United States Patent Application Publication US 2016/0078168 A1 - sequence listing, part 6

SEQ ID NO: 117900 - RNA, 82 nt, Homo sapiens
ccgggcagagagcgcagacaggacaccaaacaccgccgccggagccggaccagaccgccggagcacgccgagaccaccgagg

SEQ ID NO: 117901 - RNA, 87 nt, Homo sapiens
ggaccgccggacgacgagggcaacacggcacgcacacgcggcccggggcgcaaggaagaagagacgccgcgcggcagacaaggcccg

SEQ ID NO: 117902 - RNA, 76 nt, Homo sapiens
cgagccgaccgcgccgcacgggagccagcggggcacgagagaaacagaggacgaccgggaggacaagaagaggaag

SEQ ID NO: 117903 - RNA, 54 nt, Homo sapiens
gcacggagcaggagaagagcccgggaagcgcagagggaacacggccacgagggg

SEQ ID NO: 117904 - RNA, 81 nt, Homo sapiens
gccaccagccaggcccgagcgccaggaggaggaagaccgaccgccgccgcgcaccgcgcacaggaaacccagcagcgccgg

SEQ ID NO: 117905 - RNA, 70 nt, Homo sapiens
aagcccaagcaccggaacagaccaccaggccgcacagcagacaacaggaaggggaacgaacccaaccggc

SEQ ID NO: 117906 - RNA, 74 nt, Homo sapiens
cccgccagaaccgaggggcccccaggaccaacccgagaaagaaagccaagcacacacgaagacgcccgccacag

SEQ ID NO: 117907 - RNA, 72 nt, Homo sapiens
aacagcccacaaaagcaccccacccagaaagaagagacagacaaggccgcaagaggggaacaaacccgcagc

SEQ ID NO: 117908 - RNA, 76 nt, Homo sapiens
cggggcggggcgcggggacgcgcggcgcccgggcgagaggccggcaccaggggacagcccagaccaaaccccagac

SEQ ID NO: 117909 - RNA, 72 nt, Homo sapiens
ggaagagaagccgcgacccaaagggaagaaagcacgggaaaaggccgggcccacaggggagagcccagaaaa

SEQ ID NO: 117910 - RNA, 75 nt, Homo sapiens
cgggggcccgaaccaccgccgcgcagcgccgccaccccacccaaagacccaaccgggcccaggccggccgagcgc

SEQ ID NO: 117911 - RNA, 82 nt, Homo sapiens
gaagccgggccggccgcgcgacgggggacagaacggcaccgacgagacggaggacacagccgagaaagacaaaagaccccac

SEQ ID NO: 117912 - RNA, 75 nt, Homo sapiens
caaaaaccccaaaaggaggagcccccgggaggaaccgggcacacgaaaagcagcagccagagcaaaccgcgaaga

SEQ ID NO: 117913 - RNA, 71 nt, Homo sapiens
gaccggaggcaccggcaaggacaggaccgccagaagcagcgcgacggagagccaagcccggggaagaagca

SEQ ID NO: 117914 - RNA, 64 nt, Homo sapiens
gcggcggggagaaaaagacgaccaagaacacagagacgaggacgcgcacaggaaaggacgcgga

SEQ ID NO: 117915 - RNA, 74 nt, Homo sapiens
cccagagccgggcccggggaccgagaggcggccccaggggggaccaacaagggagaaccaacagaacaaccgga

SEQ ID NO: 117916 - RNA, 79 nt, Homo sapiens
aacgaggggcgaggaccccggcggcagacgcaggcgggaccagagcgggcaccgggaaaccaccaagcaggggcgcgga

SEQ ID NO: 117917 - RNA, 79 nt, Homo sapiens
gccaccccgggagccccgcccacgcgaagcgccgcccagcgcgccacccggcgaggccaccacaagggggggacagacg

SEQ ID NO: 117918 - RNA, 77 nt, Homo sapiens
ccgaaggaagccgaggaggcccgcccggcaaagcaaagcagcccgaggaggcacgcaaaacaacagggggcaaacaa

SEQ ID NO: 117919 - RNA, 75 nt, Homo sapiens
agcccacccagaacccaccagagaaagagacacacgaccaacaccaaggaagccccgggaccaaggacacgcaga

SEQ ID NO: 117920 - RNA, 80 nt, Homo sapiens
caaggaaagaaagggcagaagcaaaacaggacgacccgaggaacagagggcacacagggaccaagaagccccggggacac

SEQ ID NO: 117921 - RNA, 80 nt, Homo sapiens
caggccagacccgcccccgaaagaccacccgaccagacgaggggacggggccacaagacaccaccaggcgaggggcggga

SEQ ID NO: 117922 - RNA, 86 nt, Homo sapiens
cacacagacccacaggccaaaggagcggaagcagccaggggcccaccagaagagccgacaagccggcagaaggcagacacaaacaa

SEQ ID NO: 117923 - RNA, 78 nt, Homo sapiens
caagaagcgcgaaggaaaaaggggaaaaagaaaagggcgaagacccgaagcagcgcaggaacagaagagaagaccaga

SEQ ID NO: 117924 - RNA, 107 nt, Homo sapiens
gaagccgaacaacagagagagcggaagaagaaaagcagccagacagcgaacaaccaagaaagcagagagcgaagacgaacaagaaccaagaccaggaaacccgaacc

SEQ ID NO: 117925 - RNA, 40 nt, Homo sapiens
cggcgcggggacccgcgagcaagacgcggacagggggcca

SEQ ID NO: 117926 - RNA, 77 nt, Homo sapiens
acagaaggaaaacagcaggaaacccaagggacagagacggcagagaaggacgacccagaaggcagagagggcaacgg

SEQ ID NO: 117927 - RNA, 71 nt, Homo sapiens
cggcagccaggaggcagaacacacgcggccacggcgcgagccggcgcagcaaacgagagcaaggaaaggag

SEQ ID NO: 117928 - RNA, 69 nt, Homo sapiens
ggccccccacagaaaaggaaaggacaggcgcaacagccagacccgccgaaccccacaggggcaggaaga

SEQ ID NO: 117929 - RNA, 68 nt, Homo sapiens
aggcgaagccacccgggagcgcaccgggaaaacgcagaggaacgagggggagccacgaggagaaggcc

SEQ ID NO: 117930 - RNA, 42 nt, Homo sapiens
caggcgcccccggcggcagggccccccaccagccgaaaggcc

SEQ ID NO: 117931 - RNA, 80 nt, Homo sapiens
gggcaagcacgaagccaaaggaccgacccaaaagcagaggaccaaagacgaccaccaaagccagcccccagaacacgccg

SEQ ID NO: 117932 - RNA, 82 nt, Homo sapiens
agaacaccaggacacacccgcggccgggacccggcaaagagagaggcacacgccgccgaaggccaggagcagaggccaacgc

SEQ ID NO: 117933 - RNA, 68 nt, Homo sapiens
agagcaaagggacgaaaaaggacagacacaaggagggcgggacacccaggaggagggcagcaacgacc

SEQ ID NO: 117934 - RNA, 77 nt, Homo sapiens
gcgcgcggcccagggcgcggccggggcggagccgagccgacagcccagcagagggcgaaccaaagaaggaaggcgac

SEQ ID NO: 117935 - RNA, 74 nt, Homo sapiens
ggagaaggacaccaggcagaggcaagggacgcaacccaccacgaagcggagagcaggaaggggggccaacccag

SEQ ID NO: 117936 - RNA, 84 nt, Homo sapiens
ccaaccagggcgcgcgcacagcgacgagcaccagcccgaccaaccccaaggaaggacacgcgccacacccagcagaaggacacc

SEQ ID NO: 117937 - RNA, 70 nt, Homo sapiens
gaggcgccccagggacgagaggaagaccgaaggacaagcggccaccaaggcaggaaggagagacaaacag

SEQ ID NO: 117938 - RNA, 74 nt, Homo sapiens
aagcaacaccaacgaacgaacagccgcagacccgaagagaggccagagacgggccagcagccacccacaagaga

SEQ ID NO: 117939 - RNA, 71 nt, Homo sapiens
agcagcaaagaacaccaagacggcgaccacaggaaggacacaggcaggagaagcagagaaccccagacaca

SEQ ID NO: 117940 - RNA, 82 nt, Homo sapiens
aaaacaggacagcacaggcacagaaggccaaaaaggcaaccacagagagagagagggagggaaagaccagaggacgccacgc

SEQ ID NO: 117941 - RNA, 64 nt, Homo sapiens
accgcaggagccagagcccgagaccgaggacgagaagaagcgcgaggaaggcaaagggcggacc

SEQ ID NO: 117942 - RNA, 81 nt, Homo sapiens
ggagccggaggaagagaaggcagcggacgaggcaggcgggcccgcgcacaccgcggggcgggagcagcgccaccaccagcc

SEQ ID NO: 117943 - RNA, 71 nt, Homo sapiens
aacacccaggcaggccagagccgaaccaaagagcagcaggagacagggaaagcagacaaagggaagaagcg

SEQ ID NO: 117944 - RNA, 71 nt, Homo sapiens
ccgagacacaaaaagcccacgccaggagcccagcgccagaaacagagcccaccccgaaaagaggcaaaaca

SEQ ID NO: 117945 - RNA, 81 nt, Homo sapiens
ggcggcacccgcacccggggacaagcgcgggaacggcgcggaagcccgaagcggaggacccggcccagccgggcaggccga

SEQ ID NO: 117946 - RNA, 42 nt, Homo sapiens
gccaagggggcagacaccgaggcggccgaaccccaacccagg

SEQ ID NO: 117947 - RNA, 59 nt, Homo sapiens
ggaaacagcccgcaaagggccaggaagagaagaccaggcaccgcgccaggggacgggga

SEQ ID NO: 117948 - RNA, 73 nt, Homo sapiens
ggccagggcaccggggcccggcgcccgggcccgccccggagggaagggaccggaaggaaaggagcgcagaacg

SEQ ID NO: 117949 - RNA, 73 nt, Homo sapiens
aaacaaggcaaggcagagccaccagaaagagcgagagaacgcaccgggggcagacaccaccaaggaccccagg

SEQ ID NO: 117950 - RNA, 78 nt, Homo sapiens
ccagacggacgcaggcggcgcgcgcgcgccgcggagccggagcgaaaacgccgcagaaggccgccaggacagcgcaag

SEQ ID NO: 117951 - RNA, 63 nt, Homo sapiens
ggcggagcgacggggaggcgcggccaacggggccacaagggcccagagaagcgaggaacccgc

SEQ ID NO: 117952 - RNA, 74 nt, Homo sapiens
cggcccgggccgccagggcagagcccggagagggaaagaagcagaagcggcacgagcaggcaagagagaagcga

SEQ ID NO: 117953 - RNA, 69 nt, Homo sapiens
accagcaagacccaccgaccggaaacacaggggaggacacaaccccagagagcggaacgagcaacaaac

SEQ ID NO: 117954 - RNA, 67 nt, Homo sapiens
gaaaacacaggagccggagcagaagcaaagaggaacaaagacaaccccacgaggacaaaggaccgaa

SEQ ID NO: 117955 - RNA, 84 nt, Homo sapiens
gggggcgcggcggcaaggaagcggagggggccggagaagagagccggggcgacacgccaggagaaaagaggagagcagcaggac

SEQ ID NO: 117956 - RNA, 72 nt, Homo sapiens
gaggcacagaaggaagcgaagacaaaagacgcagcaaacaaaaagaacggccagagccagagaaagcaagaa

SEQ ID NO: 117957 - RNA, 83 nt, Homo sapiens
aggacccgcggcagcaggcacggagcgggggcaggaggcccagcggccaggcggcggaggagaaggaacccagacccagggaa

SEQ ID NO: 117958 - RNA, 74 nt, Homo sapiens
gagaaagggagacaagacacaagcaagcgaaaagaaaaacaaacccccaagccaggcaacagaacagaaaacac

SEQ ID NO: 117959 - RNA, 58 nt, Homo sapiens
cccggaaaagcagagacgaaaggggccgggagaggaaggccccaagcagccagcagaa

SEQ ID NO: 117960 - RNA, 50 nt, Homo sapiens
cggcggcgcccccaggcggggacagcagagagggccacccgccacacggg

SEQ ID NO: 117961 - RNA, 87 nt, Homo sapiens
gggacccgccgggaggacgcgggcccagcggggccccacagacgagcaggagccgccccagaggccaagaacagacccggaacccgg

SEQ ID NO: 117962 - RNA, 37 nt, Homo sapiens
cagccggaccaacggggaaggaccgcgaagcccagag

SEQ ID NO: 117963 - RNA, 74 nt, Homo sapiens
ccagaacacaacagggcaaaggccccgacagcgggacgacccgggacagcccacggggcagaccagcgaccacc

SEQ ID NO: 117964 - RNA, 94 nt, Homo sapiens
ggagaggagcggagaagcagcaggcgccgggaaacagagcaaagcagcgacaacaaagacagaggaagaaaaacagacagaccaagaaagagca

SEQ ID NO: 117965 - RNA, 64 nt, Homo sapiens
cagccagccggcccgaggacaccgacaccagcaggacccaaggccagccagccccaggcaccag

SEQ ID NO: 117966 - RNA, 55 nt, Homo sapiens
ggcagcacaccacaaaccaagggcagggaagagcccggaagaaccaaggaacaca

SEQ ID NO: 117967 - RNA, 59 nt, Homo sapiens
acggacgagaacggagagaacgcggaaggagacggagaagaagagcagggagacacgag

SEQ ID NO: 117968 - RNA, 61 nt, Homo sapiens
ggggagcgccccagggaaagaagcggaaaacaggaggaggaggccggacacggcagcggcc

SEQ ID NO: 117969 - RNA, 81 nt, Homo sapiens
accggcccagggcacgcgcccgcgcccgacggccgcaggcgggccccagagccgggaggagggagcgccgacccgcggaca

SEQ ID NO: 117970 - RNA, 73 nt, Homo sapiens
acgagcaacaagcgcgccacagggagaggcaaggaaaaagaagaaaagggggcaccacgaagaggaaagagaa

SEQ ID NO: 117971 - RNA, 83 nt, Homo sapiens
gagcagagccgcgggcgccggagccgaggcgagcgccgcgcgcaccacgagccccacggaaacacggcgagagggaccagcag

SEQ ID NO: 117972 - RNA, 78 nt, Homo sapiens
acgcgcagaacaaaagaaccagcacaggcaagagagaccgagccaaccaagggaaacgaccggagcgagaggacagca

SEQ ID NO: 117973 - RNA, 50 nt, Homo sapiens
gagcgagaacgggccaggcaggaaggaaaccccaaagagaggagaaacag

SEQ ID NO: 117974 - RNA, 73 nt, Homo sapiens
acccagaaaaaagggcaggaccaagcgcgcaggcaggaagccaacaaaggggaaacaaaaggcaggagccgcg

SEQ ID NO: 117975 - RNA, 60 nt, Homo sapiens
gcccccacccgcccgagccgggagcacagcagaagagcgaagggaggcaacagagcgcag

SEQ ID NO: 117976 - RNA, 87 nt, Homo sapiens
gcccggcccccaaccgcgccagcggagcgaacccgagagcgggagcgggcgggccagacaaaacagaggagaccagaccagaagccc

SEQ ID NO: 117977 - RNA, 80 nt, Homo sapiens
gccgcggggccgggcgccggcgcgcgcgccccgccccaagcaccgcaggaccccaacaacaggagagagcaagcgagcag

SEQ ID NO: 117978 - RNA, 61 nt, Homo sapiens
gccacaccaggcccgcgaagaaggaaacagaacaaggacgaaccgaacccacaaacgagcg

SEQ ID NO: 117979 - RNA, 72 nt, Homo sapiens
gcaagcaaaaaggccacagagacggcgcaagaaacgacccccagacgaggaacgagcagacgacaacggaac

SEQ ID NO: 117980 - RNA, 74 nt, Homo sapiens
gaagaacaagaacccaggaacgcagaaaaagagacagacggcacccacagaaccgagacaggcgcgcgaaaacc

SEQ ID NO: 117981 - RNA, 78 nt, Homo sapiens
gagggagagcaagaccacagcgcgcggcccccacaccacacagagagcgaaccacccaagaagaccaaggcccaaaag

SEQ ID NO: 117982 - RNA, 68 nt, Homo sapiens
cacgaccgggccggcgcaggcggcgcggagagggggcgcgagcgggggacaaggcacgaggcgcggcg

SEQ ID NO: 117983 - RNA, 93 nt, Homo sapiens
accaagagagacccagcgggaagccacgagaaaggaaccgcgggggcggcacacgcaggcagccgccagaacggggggcagccaaggaaggac

SEQ ID NO: 117984 - RNA, 78 nt, Homo sapiens
ccccccaacccggaaaaggggcgaaacccacaagaggacggaaggcccacgccccgaagacaaaggaagcgccagcgc

SEQ ID NO: 117985 - RNA, 71 nt, Homo sapiens
gcaaggaacaaaccgaagaacagcgggaaagaaggcaaaacacggggggagccacggaccagggggacggc

SEQ ID NO: 117986 - RNA, 80 nt, Homo sapiens
caaacaaaaagaaacggaaagaacaggcgcaggaaagggacagaacacagaccaaaacgaaaccagaacagaaagggacg

SEQ ID NO: 117987 - RNA, 85 nt, Homo sapiens
caacggagcggggcaggggcgacgagagcgcgcgcagacgacagagagagggggaagggccaaaagaggaagaggcgggaccaac

SEQ ID NO: 117988 - RNA, 86 nt, Homo sapiens
cgggaggcggagcccggccaccagcggggaagcagagagcaaccaagcaccaccaagcccacagcagcaggaacaagagaggcagg

SEQ ID NO: 117989 - RNA, 84 nt, Homo sapiens
aaaacgaccaagccagagaacagcccccacgcagcccagaagcccacaccgcggacagagcaaacagcaacaaggagcgggggg

SEQ ID NO: 117990 - RNA, 77 nt, Homo sapiens
cccccggaccggccgagcaggaggcgccacaggcggcaaaggaggagggagccggcaggagcgaggcagcggggcgc

SEQ ID NO: 117991 - RNA, 74 nt, Homo sapiens
gaaggaccaagaaccagcggaaacagagagcaaggagaagcgagaggcgcagaaagaggaccggccagagcgac

SEQ ID NO: 117992 - RNA, 67 nt, Homo sapiens
ccaaagaccgggaagagacagaaaggccagccacggaacaggcaaggaagaaaacagacaggaaaaa

SEQ ID NO: 117993 - RNA, 85 nt, Homo sapiens
agggcacccccggcccgggcccggcagggggcgaggagggcgggcgcagcgggccgcaggagcgcgcggagacagaagacaggag

SEQ ID NO: 117994 - RNA, 71 nt, Homo sapiens
gaccccgaccacaggagaagcgggaaaaacaaagccagagcacaaaagccagccagcaggacaggcacacc

SEQ ID NO: 117995 - RNA, 81 nt, Homo sapiens
cgggagcggacggcgagcgcgagcggcgcgagaaagagaagacagaggagccagaccaagagacagcacaggcgagcgagc

SEQ ID NO: 117996 - RNA, 82 nt, Homo sapiens
ccaccgcgcgggagacccgagggagccacgaaaacaacacacggagagacaagagcaacaacaggcggaagcccgcgggccc

SEQ ID NO: 117997 - RNA, 80 nt, Homo sapiens
ccgccccgccaccagccccgcgcccgagcggagcagaccaccgcccagcaaaaagcggcggaaagaaagacaaaaggaaa

SEQ ID NO: 117998 - RNA, 74 nt, Homo sapiens
aaccgacgcaagggcaggaacgcacagaaggcccaagaaaagcacgaaacacaaagcaaaacggagaaggacga

SEQ ID NO: 117999 - RNA, 79 nt, Homo sapiens
caccgcggcccgcgcaggagaccgagacccaggccaccgcgagggaccgcgcaggcagcgaggccaaaacacgcggagg

SEQ ID NO: 118000 - RNA, 56 nt, Homo sapiens
gaagagaacggaacaccaccggcgccagcgggggccaagccccgaaagaagaccga

SEQ ID NO: 118001 - RNA, 78 nt, Homo sapiens
gaacagcacgaccagaggggaagccaagcaaacgcagaaggacgcccacgagcaaccaagaacacaagcgggacggaa

SEQ ID NO: 118002 - RNA, 81 nt, Homo sapiens
caagagagaaagagggacagccgcacggaggcgaaacacaaagggcacccagccaaacccaggcccgagaagaagaggaaa

SEQ ID NO: 118003 - RNA, 63 nt, Homo sapiens
aaggagggggccaaaaaggaccaaaggagagccggagcgagcaggggaggggagaaaaaaaaa

SEQ ID NO: 118004 - RNA, 73 nt, Homo sapiens
caaaacgaaggagaagcccagaagagaggggaccacgaggacagcggaagaaaaggaaaaaccagaagagaaa

SEQ ID NO: 118005 - RNA, 95 nt, Homo sapiens
ccgcggcaggaagccaaggcaccgggacgcgcacccccgcgccgcacggggacgaggcaaaaagggcgagacgaaaaacaagcaccaggaaggag

SEQ ID NO: 118006 - RNA, 71 nt, Homo sapiens
gcaaggcccaagcccagccaaggagggaggaagaggcgcggcaagggcgcggcaagaaaaccggggccgcc

SEQ ID NO: 118007 - RNA, 69 nt, Homo sapiens
ccaccccaagccacagggccgccgacagcagagacaggacgaaagaggagagaacgaccccagggcagg

SEQ ID NO: 118008 - RNA, 70 nt, Homo sapiens
cagaggccccagcaaaggaaaggggccagcgaagacggaggaccacaccggaagccagcaaagaaaacgc

SEQ ID NO: 118009 - RNA, 86 nt, Homo sapiens
ccgggcagcccgggaaacccaagcagaaagcgcgggcggacccaccaagccaacggcccacaccagcccgggcggcccaaggagac

SEQ ID NO: 118010 - RNA, 78 nt, Homo sapiens
caaaaagcgaaggcagaaaacaggcccggcaaagagcaggcacagcggcacagagacgaggagaagagggagacccaa

SEQ ID NO: 118011 - RNA, 90 nt, Homo sapiens
gccgcccagccgcacgcgacgacaggaaggaagcagccaccccgccaggccccccgcccgccgcccccggaggaggacgagagccgaagg

SEQ ID NO: 118012 - RNA, 76 nt, Homo sapiens
cgcccgccacccgcgcgccgccgccgaggagaaagaccagaggaacccgagcaggaacaccccagcccgggccaca

SEQ ID NO: 118013 - RNA, 51 nt, Homo sapiens
ccacagggagaggaagacggacacagcaaaaggggcagccaaagccgaccc

SEQ ID NO: 118014 - RNA, 73 nt, Homo sapiens
aggagggacgacggaagaggacgggagaagacacacggggcagcaaaggcagccgcaaaagcaacccacgggg

SEQ ID NO: 118015 - RNA, 78 nt, Homo sapiens
ggccggaaaccggcggcgccagccaccggagcaaccacaacccgcaaaaacgagccagccaaaagaaaagaccaggac

SEQ ID NO: 118016 - RNA, 64 nt, Homo sapiens
gacgcagggcgcccccggggccggacaggacaccacgaccccgccgccggccggaaagcacacc

SEQ ID NO: 118017 - RNA, 60 nt, Homo sapiens
aggagcaagcccccagaacaacaggaccaggacacagaccggaaaccgaggaggcggaac

SEQ ID NO: 118018 - RNA, 79 nt, Homo sapiens
acaccgcccgcgcaggaagggggacagagcagaagggcgaaagaccgggccgcagaagaggccccaacccgggccagac

SEQ ID NO: 118019 - RNA, 79 nt, Homo sapiens
gggcaaaagcaccgagcagggaaccacgaccagcaaagaacgacggccccgcgagggggccaagcgccaggagcaccac

SEQ ID NO: 118020 - RNA, 55 nt, Homo sapiens
cgggacacacccccaggaggcccggcagagcaggacaaaccacccgagccccaaa

SEQ ID NO: 118021 - RNA, 75 nt, Homo sapiens
aaaaaaaccgcgaccggccgcccgcacaagccagaggccaacccaggcgcccagcgacaaagaaaagccagcgga

SEQ ID NO: 118022 - RNA, 80 nt, Homo sapiens
gagggagccaacccccccacgcgcacgccgggggcgaggagacaaaaaagcccaagagagcacccccacgcccagagccg

SEQ ID NO: 118023 - RNA, 73 nt, Homo sapiens
ggagcacaacaggcagacagacaagaacaaacacccaaagcagccaggagccagcaaaaagaagagacgacaa

SEQ ID NO: 118024 - RNA, 71 nt, Homo sapiens
gggaccaccccgcgccccgccagcaccggccccaccacagccaacaagaagaaaggaaagcccgagggaca

SEQ ID NO: 118025 - RNA, 77 nt, Homo sapiens
aaaacccagcgagaccgggccggaacgaaagcaggacggaggagcgaccaccgagagcaaaagacccggaagagaga

SEQ ID NO: 118026 - RNA, 51 nt, Homo sapiens
cgcggccaggcagagccggcgggaggacaagaggacgaacacaaaggggca

SEQ ID NO: 118027 - RNA, 81 nt, Homo sapiens
aacagagccacgcaccgcggcacggggcaaccgggcggccacgcccgcgcagggggagcccggcccagccccccacccccc

SEQ ID NO: 118028 - RNA, 68 nt, Homo sapiens
gaagagcgaaagggacgcaaggaacaaaaggaaacccaccaaggccggggggggcacagagccccgga

SEQ ID NO: 118029 - RNA, 75 nt, Homo sapiens
ggaggcaggggcagaaacagagaaggaacagccccacgacggcaggcgcacggaacagcgaggccagcaggagac

SEQ ID NO: 118030 - RNA, 81 nt, Homo sapiens
gggaacaaggagcaggcaaaagcaggccagagacaggggccaggccaggggcaggggaagcacccaaccaacgagcgggcc

SEQ ID NO: 118031 - RNA, 81 nt, Homo sapiens
ccgaggacaccgacaccagcaggggcgggaagaagcccgccgccaccaccccaccaccagcgcagcagagaagaaaagaac

SEQ ID NO: 118032 - RNA, 78 nt, Homo sapiens
cccgagagcgggagcagagggccacccgcaagggcaggagaaagcaacacaccgcaacgaaggcccagcgccccagaa

SEQ ID NO: 118033 - RNA, 70 nt, Homo sapiens
caggagcgcacccagcgcagcaacggggcggcacacaaggagcgaagggcagggagaacgccaggcacag

SEQ ID NO: 118034 - RNA, 85 nt, Homo sapiens
aggccaagacgcgccgccaacaccagcaagaggagccaggagcacggggggaacaagaccgccgggacggaagacgggagcgggc

SEQ ID NO: 118035 - RNA, 72 nt, Homo sapiens
aagaagaagagccgcccccaccagacgaggccaccagccagggaacagccaacccccagaaaaccgaaaagc

SEQ ID NO: 118036 - RNA, 57 nt, Homo sapiens
gaaaagggcacgaggccggaaccgcccagccccgagcacacgaagcgaaccgccccc

SEQ ID NO: 118037 - RNA, 72 nt, Homo sapiens
aaaacacaaagacgaccggagagaacaggagagaaaaccggaagagagccggacaccaagcaacgagaagag

SEQ ID NO: 118038 - RNA, 76 nt, Homo sapiens
cgcaacaaacacagagaagaggaacaccgccggggaccagagagcaaacaccggagccagggccacgcacccaggc

SEQ ID NO: 118039 - RNA, 56 nt, Homo sapiens
caccccagcaacgggacgggccccaccggccgcgacggcaagaagaagcgaaaacc

SEQ ID NO: 118040 - RNA, 67 nt, Homo sapiens
cacaacaacacaaaacacgaccaaaccgaagagcacaacaccagcgaaaagaaaggacccgacaaaa

SEQ ID NO: 118041 - RNA, 77 nt, Homo sapiens
cgagcacaggcccgcacgccggggccccgcagcagcagcgcaggaaaaaccaaggcaaggaaaagaagccagaaacc

SEQ ID NO: 118042 - RNA, 61 nt, Homo sapiens
cccccgagcgggggcggcccacggggacgagaaagccacggcaaacccccgcaccaggggg

SEQ ID NO: 118043 - RNA, 78 nt, Homo sapiens
agagagaagaagcaaaacaacaagaccagcaccagaccaggcagaacaaagacccagaccccgaagaagaagacgaag

SEQ ID NO: 118044 - RNA, 82 nt, Homo sapiens
cgggaggagaccgcacgcccagcgacagaacagagaacacgagcgacccgaagacagccccaagaacagcagggacacaaga

SEQ ID NO: 118045 - RNA, 35 nt, Homo sapiens
aaggccacccaaacaacgaggaacagaccacaaac

SEQ ID NO: 118046 - RNA, 57 nt, Homo sapiens
cagcccgccggcggcggcgggaagagagaagacagcagcgaacaagaaggggcagcc

SEQ ID NO: 118047 - RNA, 71 nt, Homo sapiens
aaagagaaaaaaaagcacggcaaggcacaaaccagaggaccagaagaagcaggaccggacgccacacaggg

SEQ ID NO: 118048 - RNA, 77 nt, Homo sapiens
aagcacgagaaccaagaggaccagagggaagcaaagggagagccccgagcccgagcccgaagccaggcggaacgggc

SEQ ID NO: 118049 - RNA, 62 nt, Homo sapiens
aaagacccaggaacaaaccgggggcaaggccaaaaagaaggggcaggcgagaaacgggaccg

SEQ ID NO: 118050 - RNA, 68 nt, Homo sapiens
cgggagacgagaagccgaaaagcgcagcgagcggagccgccggagggcagcgcaagaccccgcacgga

SEQ ID NO: 118051 - RNA, 72 nt, Homo sapiens
aagcgcagcaccaccggaagcagacaacgaggagcgacccccaggccagcagagacaaggcccaggcccagg

SEQ ID NO: 118052 - RNA, 71 nt, Homo sapiens
gaaaagaaaccacacccaagccgcagccagagaaccaagaaaggccaaagaacgccaaccgaaagaaagac

SEQ ID NO: 118053 - RNA, 75 nt, Homo sapiens
aaagaagccacggaaggacaaggggcaccagccacgccccaccaggcaagcagaagaggaacagaagaagcagag

SEQ ID NO: 118054 - RNA, 85 nt, Homo sapiens
ccacgcaaaccaaccgcccgaaagaccccccagagaaaacaagaaccaagacagaaaaacacacagggaggagaggacggggacc

SEQ ID NO: 118055 - RNA, 69 nt, Homo sapiens
cgaaggccccccgggacaagccaggcaccccacacagacacaagcgagcacgaaagcaccgcaggaagc

SEQ ID NO: 118056 - RNA, 62 nt, Homo sapiens
cgggagaggagagcccccaggggagccggcggaaaacaacagcgaccccaaggaagacaagg

SEQ ID NO: 118057 - RNA, 80 nt, Homo sapiens
gccaggagcaggggccacggagcccccacccccccgccaggccccagagacaccagggaaaagagggcgaggaagacgac

SEQ ID NO: 118058 - RNA, 78 nt, Homo sapiens
ccacaagggagaaaccgaaaacaggcacggaccaccaagcagagggcgaggcaggagacagagagaaagcaacagcag

SEQ ID NO: 118059 - RNA, 108 nt, Homo sapiens
ggaaggacaggcaagggagaagaaggaagcggagcccagacgaaccggaaggaaggcacagaaagaaacaccacaaaacagaacgaacaaaagaaagacagaaggagc

SEQ ID NO: 118060 - RNA, 73 nt, Homo sapiens
ggcgcggccggcacacgagacgggagcacccgggacgccagaaagccagcagggccgacgggccgcaagcgcc

SEQ ID NO: 118061 - RNA, 76 nt, Homo sapiens
ggaagacaaaggaacgcacagaagacggaaggagggccccggagcagccacaccaccgaggccccacccagcacga

SEQ ID NO: 118062 - RNA, 84 nt, Homo sapiens
caccagaaggaaccaaccggacacaaacaagcagcaggaggacaccaaagcccaccaccaggaggccgagaaggacagagaacc

SEQ ID NO: 118063 - RNA, 72 nt, Homo sapiens
gagacgaagcccccccaggcccaacgaagagacgacacaaggagacgaggggaagagacagacaacaagagg

SEQ ID NO: 118064 - RNA, 39 nt, Homo sapiens
aggaccccggacaaacaacaggggagccgccgcacccag

SEQ ID NO: 118065 - RNA, 86 nt, Homo sapiens
ggcagcgccgcggacgaagaaacaaagacagagggagaggaacaaaagaagagaggcagccgcacagcccagccaccccaagcacc

SEQ ID NO: 118066 - RNA, 41 nt, Homo sapiens
gggcaagaaggagccgcaagggaaagcaacggcgcaagcgg

SEQ ID NO: 118067 - RNA, 74 nt, Homo sapiens
cggccgcggggacggcacgaggggcgacgccgccccgccgggccccagacaggacacgccagccccaaggaccg

SEQ ID NO: 118068 - RNA, 69 nt, Homo sapiens
aaagaaggacagggacacaaacaccagagggaaaaagaccacagaaacaggggcccaagaaccagcggg

SEQ ID NO: 118069 - RNA, 79 nt, Homo sapiens
gaagcaaacaaaaagagaggaacagcaacaggccagagaaaggacgcaaagaacacggacccagcaaaaagaagcagac

SEQ ID NO: 118070 - RNA, 54 nt, Homo sapiens
ggccgcgaagagagaagaggcgcgacggaccagagcaggccggccgcccccagg

SEQ ID NO: 118071 - RNA, 76 nt, Homo sapiens
cacagccggcaccagccggacaaaggagagaagggacccagaccaccgcgaaaccaccacacagaggcccccagaa

SEQ ID NO: 118072 - RNA, 79 nt, Homo sapiens
gcgcgccggaccgcaggacgacagaccgagggaggacaccggaccccggacgcgggaaagccggcaagaacgaaaacgc

SEQ ID NO: 118073 - RNA, 71 nt, Homo sapiens
gagaaagggcgggaaagccacgggaaaagaccggaacagaacagcagacgcccccccgacagggacgccga

SEQ ID NO: 118074 - RNA, 77 nt, Homo sapiens
gcgggaagaggcgaaggccagagcacgagcacgggaagagaacccccggcccagacagcaagaggcacagaaaacgc

SEQ ID NO: 118075 - RNA, 51 nt, Homo sapiens
ggccagcacccggacagggaaggcgccaacaacacgaacagcgaggaaaca

SEQ ID NO: 118076 - RNA, 65 nt, Homo sapiens
aaaccaaagccagccgaccgccaaggggaagaggagccggcaagagcgagaacgcccagccgcag

SEQ ID NO: 118077 - RNA, 70 nt, Homo sapiens
cgccgcccccccggcccccgggacggcccaaggccagcccgcagaacgggaccagacacacgcaaggaca

SEQ ID NO: 118078 - RNA, 61 nt, Homo sapiens
ggaaaaggagaggcagacccaaggagccaagagaccacgggcagggggcgacagcagcccg

SEQ ID NO: 118079 - RNA, 84 nt, Homo sapiens
agggagccgaccgggcccgggcggaggaaaaccccacgagcccagaccccacagccagccgagggcgagaagcacagaaacccg

SEQ ID NO: 118080 - RNA, 75 nt, Homo sapiens
acaaacaagcacaccgcaacaaaaacaccaggaaagaaggccaacagacagagcagcacacaagggacgagcagc

SEQ ID NO: 118081 - RNA, 54 nt, Homo sapiens
ccccaaaagaccgagaaggcggggcaccaggcccagacggcgaacccgagcaag

SEQ ID NO: 118082 - RNA, 65 nt, Homo sapiens
ccgggagaggcaccaaacggccgggggcccgagaagcccccagcgccacgcagagccccgccagg

SEQ ID NO: 118083 - RNA, 73 nt, Homo sapiens
gcccgaggaagggagcgaccgcccgacaaagacaggcgcgcagacacgccacgcaagaaggagcaagaaccga

SEQ ID NO: 118084 - RNA, 80 nt, Homo sapiens
agagcaggcaggcaaaccccacagacggcaacacaacaaagaaaaccccaaggccacaacgcacgggcgacacggagcag

SEQ ID NO: 118085 - RNA, 73 nt, Homo sapiens
agcccaagcacacgcccaccacaaagggaaagggaagggagccgaagggacaggcgcaggaagaagaagggac

SEQ ID NO: 118086 - RNA, 69 nt, Homo sapiens
acggcgcgacccaacccacaaccccccagccacgagccaaccccaccaaggccggcaaaggcggcgacc

SEQ ID NO: 118087 - RNA, 79 nt, Homo sapiens
agaaggagagggggagaagaaacgccaggaggggcccccgccagacgagaaggaagagacaagggcccgcgggaaagaa

SEQ ID NO: 118088 - RNA, 74 nt, Homo sapiens
agaagaaagaacaaacaagggaacagcagagcggcgaccaccagaagacaagggggacgaccaccagccaggcc

SEQ ID NO: 118089 - RNA, 53 nt, Homo sapiens
aaacaagcaggaaaaaaccgccagaaggggggcagaaagaagaggaggacaac

SEQ ID NO: 118090 - RNA, 62 nt, Homo sapiens
aaaaggaaccagcaaagcaggcagaagaagccgcaccccacggggaggaggaacccagggaa

SEQ ID NO: 118091 - RNA, 80 nt, Homo sapiens
gaacgcggcgcggccgagcggggcggggcgaccagaggaccagaaagggccccgagccccggccccaaagacccaaaaca

SEQ ID NO: 118092 - RNA, 55 nt, Homo sapiens
cccgcccacgcaaacccaaagaccccgccggagacgagaggagccgggcgcgagc

SEQ ID NO: 118093 - RNA, 78 nt, Homo sapiens
caagcgccaaaccgacccagcgaggccacccgcaccgaaggaaggaaaggaaagcccagaggccggaacagaggaaag

SEQ ID NO: 118094 - RNA, 75 nt, Homo sapiens
ggaacagggacagacgccccacacgcgcccggggcgaggagcccacgaccaccaggcaccggacaagagcagaga

SEQ ID NO: 118095 - RNA, 84 nt, Homo sapiens
cggggcaggcagaggagcgaaggcccaagaacaggaagccccggaggaacgcgcaagagagggacaagaccaagagaccaacca

SEQ ID NO: 118096 - RNA, 84 nt, Homo sapiens
gagccgccccgcgccgccgcagagccgcccacaggagcgagaggagagagagccagagcgacaacaccgaccacccaaagaacg

SEQ ID NO: 118097 - RNA, 76 nt, Homo sapiens
cacaggaccacaaacagcaacacagaacgcaagaagaggcgcagccgcccccagccccgaggggagaggccccagg

SEQ ID NO: 118098 - RNA, 78 nt, Homo sapiens
aaagcccacagccaaagccgggcggacgcggacggcacgggaaacacgagaccggcgcagcagagcagaaacaacacc

SEQ ID NO: 118099 - RNA, 68 nt, Homo sapiens
aagaaacgcccacagaacaccgagggaagcagacggaaagcaagacaggaagaacgaaggagccgcac

SEQ ID NO: 118100 - RNA, 74 nt, Homo sapiens
agggcgccaaagcgagagagggaagcgcccggccaagaggccccaggaccggcgaggccccccccccagcagca

SEQ ID NO: 118101 - RNA, 79 nt, Homo sapiens
cgccgagccggggaagagccacgccccgcccagaccggaagaacgggaacccccgcagaggagccgccacacccaggcg

SEQ ID NO: 118102 - RNA, 68 nt, Homo sapiens
aacgcaccagagccgagaaacgcgaaaaggaagcggaaggacccgcagcacgagccaccagcacagaa

SEQ ID NO: 118103 - RNA, 80 nt, Homo sapiens
gcaacgccagagaaaggaccacgaagaggccgcaaaaaccaaggaaaaaaaacagccggagggcgcagaggagcggagaa

SEQ ID NO: 118104 - RNA, 94 nt, Homo sapiens
cgggaagcccaccgacgaggacggaggacggagaggaccgcaccagcacgcccacccagagggaagaagaaggcaagaaggaagaaaacaggaa

SEQ ID NO: 118105 - RNA, 81 nt, Homo sapiens
ggagaagcaaggccacagcacggcgacaaacccaaagacagagagaccaggcagaaacgagagggacgaccggcgaaagcg

SEQ ID NO: 118106 - RNA, 73 nt, Homo sapiens
cgaagcagcagcgcgaggcaaaaagggggagacacgccacgcggccaaaggaacacggaggaaaagcagccag

SEQ ID NO: 118107 - RNA, 93 nt, Homo sapiens
gcaagggggaagagagagaaacaaaagcgccagagccaagaacgccccaaggcacaaaagaggaggaaagaagagcagcagagagaccgaaag

SEQ ID NO: 118108 - RNA, 90 nt, Homo sapiens
cccacaccacagaccagaggacacagccgcggcccaggaagaaaagaaaaacagagcagggggaccagggagaggacgcccaccaggagg

SEQ ID NO: 118109 - RNA, 77 nt, Homo sapiens
agacccagcaagaagaagccaaaggggaccaaccgaagagaaagggggcccaccacccccccacccgagggacgccg

SEQ ID NO: 118110 - RNA, 60 nt, Homo sapiens
acccgggagcccgcacgggcaaggaaaggaaaagcaaaggaaccacacacaccaggggag

SEQ ID NO: 118111 - RNA, 71 nt, Homo sapiens
gaggcaacacccagccaaggccaaggagaaccccccaggcgcagagcacgcgcacccaagccgagccggcc

SEQ ID NO: 118112 - RNA, 83 nt, Homo sapiens
cccgcccggaagaagcgaccaaagcgccgaggaccggcaacagggcggcggggaaaagagacagaacccgccgcccacaaacc

SEQ ID NO: 118113 - RNA, 80 nt, Homo sapiens
cccccggcaccagccgcccagacaccaggggagcagcgcagacagagccgcagaaagccgcaacaccgagaaaaaaacca

SEQ ID NO: 118114 - RNA, 46 nt, Homo sapiens
gcgcagccgcaccggccaaggcccaaaggagaagccgagaccaccc

SEQ ID NO: 118115 - RNA, 75 nt, Homo sapiens
aacgccccaggagagagaaccgccaacggaccccgaggacaggaaaaacagaagccacaccgccgcgggcaaccc

SEQ ID NO: 118116 - RNA, 49 nt, Homo sapiens
aaaggagggaagccagaggccaaaggcaggagccccagccggaaaccag

SEQ ID NO: 118117 - RNA, 75 nt, Homo sapiens
gggccagcggccgcgcacccccggccggaggcaccagcggcggcacccaccccccgagcccgcccgccggcccca

SEQ ID NO: 118118 - RNA, 82 nt, Homo sapiens
agcaacccgcaaacgggggggcggccggggccgccaccacacgaaacagggcaaggcaggaaggagaacccagaggagcagg

SEQ ID NO: 118119 - RNA, 83 nt, Homo sapiens
gacccgcccccgccccgccgcggccaggaggacgagcggaaaaacggagccacgaggaagagaaacaccaaggaaccacacaa

SEQ ID NO: 118120 - RNA, 80 nt, Homo sapiens
ccacacccacacgccccagaaaaacagagagagggcagaaggcaggaccaagcagggggcacagagaagaccaaaggcac

SEQ ID NO: 118121 - RNA, 83 nt, Homo sapiens
gagcgagcaaaacacggagcccagcagggcccggaggccccggaagcagcaccacaccacacacggaagcagacgcgcagagg

SEQ ID NO: 118122 - RNA, 78 nt, Homo sapiens
ccgccccgccggagcccgggagcccgaggagaggaagagagacggggcaccagagccaggaggccaacccgacccgga

SEQ ID NO: 118123 - RNA, 65 nt, Homo sapiens
agcagacccggaagcaccagcaacggggcggccaccagccgccaggcggccgaggaaggcggggg

SEQ ID NO: 118124 - RNA, 88 nt, Homo sapiens
cacgggcccaggcagcggccgcgccgcaccccggcagcagcccaggcaaaggacagcgcaggggagcggagcaagaaaccaagacaaa

SEQ ID NO: 118125 - RNA, 83 nt, Homo sapiens
cggggaggagcaggacgcagaaccaccaaaagccaagaaacggcggacgaagcccgccgaccagcaaggcacagccaacgccc

SEQ ID NO: 118126 - RNA, 68 nt, Homo sapiens
aagaaccgagggggagagacgcaggaagagcgaaaaaacaggaggacacaaggcagaacagcgaacaa

SEQ ID NO: 118127 - RNA, 72 nt, Homo sapiens
aagcgacaaccagaaggggaacgaaagacagaagcagagcgaacagaggcaggaacagaaccggagcaggcc

SEQ ID NO: 118128 - RNA, 71 nt, Homo sapiens
cgaccccgcggagacagcgagacccgccaggagcaaaggccaggcgcgggccaccccacggggcaacaagg

SEQ ID NO: 118129 - RNA, 71 nt, Homo sapiens
cgaggcagggaaagaaggcaagagcaacgaaccaaagcaaaggaggccgggggaagacggaaaagagagac

SEQ ID NO: 118130 - RNA, 74 nt, Homo sapiens
cacacaagcgaaggcgcgcaccggaagcaccagcgaggaaggacaggacacagaaggaagaacagacgaaaaga

SEQ ID NO: 118131 - RNA, 75 nt, Homo sapiens
aacgaagcaggcccaggagaaagcacaggacaggaagaagccaagaggagaaagaagcgacacccacacgaaggc

SEQ ID NO: 118132 - RNA, 74 nt, Homo sapiens
gcggcgccaccgaacagacccggaaggacggcgaggaaccaggacgcgagaaaggcgaggaaaagaagagccag

SEQ ID NO: 118133 - RNA, 80 nt, Homo sapiens
ggaacgcgaagcgccaaagccagacaaaacggcggccaaagcgccagacaagggccgagccccggagagccccccgcaag

SEQ ID NO: 118134 - RNA, 93 nt, Homo sapiens
cgacgacagcgggccgggaaaagggcacgaggccggaaccgcccagccccgcggcggagaaaccaccacaaacacgaggccagcaacgaccaa

SEQ ID NO: 118135 - RNA, 70 nt, Homo sapiens
acgcgagaacccaagaaaggacaaccgccccagaggggggaaggcagaagaaacacaaccaggaaccagc

SEQ ID NO: 118136 - RNA, 73 nt, Homo sapiens
gaccaacaccacggaagaagcagccggccgcaaccgcagcaagacccgggccaaaacaacgaacgagcaagga

SEQ ID NO: 118137 - RNA, 78 nt, Homo sapiens
cgccacacccgggagcggcggccacggaggcaccagaagaagcaccaggagcagggccgccccgaggagagcgacgcc

SEQ ID NO: 118138 - RNA, 73 nt, Homo sapiens
ccaccggcgagccgcggagaaaggcagagccccaagggaggaagaaaccgaagagggaaaccgaccgccacaa

SEQ ID NO: 118139 - RNA, 109 nt, Homo sapiens
ggcaagccccaacccacccgaagaaggccccggccgcagaggcaacccgggcaacaacccagagaagaagccaccgccaaaaagccggccaagaaaggacccagacggg

SEQ ID NO: 118140 - RNA, 56 nt, Homo sapiens
ggaaagcagcccgaaaaagacgcgagaagccacacgcgccgaaacccgagcgaccc

SEQ ID NO: 118141 - RNA, 40 nt, Homo sapiens
aagaccccagcagaagccggggcggcaccacgcccccccc

SEQ ID NO: 118142 - RNA, 77 nt, Homo sapiens
cagaaggcagaggcagaaccacaggaaaaaacggaagcacaaaacaagagaagcacgaagaagaagaccaaggaaac

SEQ ID NO: 118143 - RNA, 54 nt, Homo sapiens
caaccaccaggaagcgccggaaggagcgacagaggcagcccgcacggaccgaga

SEQ ID NO: 118144 - RNA, 85 nt, Homo sapiens
gcaaaaccaaacaccccagcccacagagagcaaaacacaagagagcagggaggagagagaaggagcaaccccaaaaaggcggcgg

SEQ ID NO: 118145 - RNA, 60 nt, Homo sapiens
gagcgccgcgcccaccccgggggccagagccaggggacaggacagcccgcggggaacgac

SEQ ID NO: 118146 - RNA, 61 nt, Homo sapiens
ggacaagccgcaccacgccaaggaaagggaccacgccagagcgccaaagaaaacccgcgcc

SEQ ID NO: 118147 - RNA, 74 nt, Homo sapiens
cggaaagccaggaaaaacacaccaccgcaggcagcagaagaccggaggaccggggcgagggaccgagaagaccc

SEQ ID NO: 118148 - RNA, 80 nt, Homo sapiens
gcgggcgcgcccagagggcggaggaggggaggacaaaaccaacaacaagccacccacacgagaggaaggagagggaggag

SEQ ID NO: 118149 - RNA, 79 nt, Homo sapiens
cgcgaaggaagcggggacacgcggccccagcgcccggccccccaccggacacccgcggggacgaacagcggggacgccc

SEQ ID NO: 118150 - RNA, 82 nt, Homo sapiens
gcgggcaggagcggcggccaggccagacccgaaggccaggagacccgaccccaaggaagcccggggcggcgacggagcacga

SEQ ID NO: 118151 - RNA, 63 nt, Homo sapiens
gcgcaaggcgccccaaggccagacaaaacgagagagagcggagacaaggccacagcaggccac

SEQ ID NO: 118152 - RNA, 71 nt, Homo sapiens
ccagggggagagaccgccgcgaaggcccccaaaacagcccaaagcaggggaacggcgagggaacccaggaa

SEQ ID NO: 118153 - RNA, 76 nt, Homo sapiens
aacgaaccaaaagcaaccgcgaagagcagacacacagcagggcggcagcagaagggagggaacgccacccgcccgg

SEQ ID NO: 118154 - RNA, 77 nt, Homo sapiens
cccggaggaggcgaccgcggcgcagcgacccccgccaggcaaaaggaaggacgaaaccccgacccccgagacacgcg

SEQ ID NO: 118155 - RNA, 70 nt, Homo sapiens
gccggagaagagggggcccggggggaggaggggcaggcccggcgcagcaccaggaaaggaaggggaaccc

SEQ ID NO: 118156 - RNA, 59 nt, Homo sapiens
ccaagcaggaccacccaccagccaccagaaagcaaaccccacgagaacaaagcacggca

SEQ ID NO: 118157 - RNA, 68 nt, Homo sapiens
aaccacggaaaggaggaagaagacaccggggacagacaggagccagccgaggaaccgccaaggccgca

SEQ ID NO: 118158 - RNA, 76 nt, Homo sapiens
gcgcaaggagcacggcgaggagggaaacacagcaaagacaacaggcacaaagagagaaggaacacccacagggcag

SEQ ID NO: 118159 - RNA, 72 nt, Homo sapiens
caagcccaggcggcaccaggagcggagaagccagcgacggaaaaccggcagcaggagaggccacgccaggga

SEQ ID NO: 118160 - RNA, 83 nt, Homo sapiens
cacgagccacagagagagaagaggcagggagcagcaagacaacacgcagagaaccaggggaggaacgcaagcggggagaacag

SEQ ID NO: 118161 - RNA, 73 nt, Homo sapiens
ggaagcacagagggaaaggaaggcggaaaagcccaaacagaaaaggaaggaaggacgaggcagacccgggaga

SEQ ID NO: 118162 - RNA, 65 nt, Homo sapiens
gaaaaagccagaagggcaaaaagaccaaaccagacggcggaaaacggggacaccggaccggaccc

SEQ ID NO: 118163 - RNA, 39 nt, Homo sapiens
acaccaccaccaagggccgacgccaccgccgagcccaga

SEQ ID NO: 118164 - RNA, 44 nt, Homo sapiens
agagacagagacgagaagcaaaggggcggcaagagccaagcaag

SEQ ID NO: 118165 - RNA, 69 nt, Homo sapiens
caccggggaggacagaccgaagaggagcaaaaaggaccgagaaaaacccagaaaagaagaaaaaaaccc

SEQ ID NO: 118166 - RNA, 60 nt, Homo sapiens
cagacgagagccagccacacgaggagacggaaccggagaaaagcaccgcggccacaagaa

SEQ ID NO: 118167 - RNA, 83 nt, Homo sapiens
gccccggaggggggcggcgcccacgggggagcgagccggagacaggcggaggcaaagcggaaaggacaggggaaggccaaggc

SEQ ID NO: 118168 - RNA, 74 nt, Homo sapiens
gacacgaaccacgaccgggagccccagaacaacaagagggcacggagaaggaccaggggaagaaagggccacag

SEQ ID NO: 118169 - RNA, 77 nt, Homo sapiens
cggagacgccgggcagccgaacggagggcgacggagggaggcgggcaacacaacaaggcgcggacacccagacaagc

SEQ ID NO: 118170 - RNA, 49 nt, Homo sapiens
gacgggccggggcgcagaaagcaaggcaaaccagggggccacacagagc

SEQ ID NO: 118171 - RNA, 90 nt, Homo sapiens
cggaacccgccagggccagggccaggccagcgcccggcggcccagaggcgggaggcggcagaagcagccagaggagggcacaggcggcgc

SEQ ID NO: 118172 - RNA, 74 nt, Homo sapiens
caaaagacggccaccgaaagccagggcgaagaggggagccagaaaaacacagcgggaccggcaagcaccccccc

SEQ ID NO: 118173 - RNA, 80 nt, Homo sapiens
aacgacaaaaccaggggggacaagaacggcggacccgggggaaaccgcaaaagagacgaggacgcgcacaggaaaggacg

SEQ ID NO: 118174 - RNA, 66 nt, Homo sapiens
cggcgcggacccgccaccggaggagaagccacagggggcagcgcggagagggacaccaaaaagcca

SEQ ID NO: 118175 - RNA, 69 nt, Homo sapiens
gcagcagcgcggacccggagcgacaagcgccccgacggagcgccaggacggacgagaaacgaacccccc

SEQ ID NO: 118176 - RNA, 69 nt, Homo sapiens
gacggcggcaaagcaccgacaacggcaaggcggaggcaggaccacccaaaaccagagcacccaggccgc

SEQ ID NO: 118177 - RNA, 70 nt, Homo sapiens
cacaacacccaacagagaaggccaggaaccaagaacagagaccagcacaaccagggaagaagacagaaag

SEQ ID NO: 118178 - RNA, 81 nt, Homo sapiens
acccacccgggaaccagccaggaaaaggggaagaaggagaccagaaaagcagagcagacagcgacaagaaggcccagcaac

SEQ ID NO: 118179 - RNA, 58 nt, Homo sapiens
caccacgacgaacccccgacgcacaaggaacacagggggcggacgggaaaagaaccgg

SEQ ID NO: 118180 - RNA, 87 nt, Homo sapiens
accagagcggcaggcggagcggggccggacgcgagaggaggaggggcggcgcgcggccacccggcaggccgggaaagacggaaaaag

SEQ ID NO: 118181 - RNA, 66 nt, Homo sapiens
aacagcggacagcggagcgccgcaaggcacagccagcccgccagggacacacagacgccacagagg

SEQ ID NO: 118182 - RNA, 43 nt, Homo sapiens
cacacacaagacaccaccgcagaggagccccggcacaaaggaa

SEQ ID NO: 118183 - RNA, 87 nt, Homo sapiens
gcaagcgcccaccccaagggaccagggccccgccacggagagaccggccacggcgcgcaggagacgagagggccccaaagggaccag

SEQ ID NO: 118184 - RNA, 57 nt, Homo sapiens
aacacacaccgccgcaggcgcccccgggcgaagccaacccaccgccaccaccccacc

SEQ ID NO: 118185 - RNA, 77 nt, Homo sapiens
acagccggcgcggagcgccgcaggcggcggccgagggcgcgcggaccccccgcgagagccgaccccgcaaaacccgc

SEQ ID NO: 118186 - RNA, 59 nt, Homo sapiens
cgccacaacgccgacgcaccacacgacggcgcagggcagaaccaggccccgccggcgga

SEQ ID NO: 118187 - RNA, 49 nt, Homo sapiens
cagaggaaacggcagcagaacaccacgggcagcaaacgaagcgccagac

SEQ ID NO: 118188 - RNA, 59 nt, Homo sapiens
cgcacgggaaccgaagagagccgggcacacacacgaagcaacacaacacggacgccaga

SEQ ID NO: 118189 - RNA, 75 nt, Homo sapiens
aggcccggggccacgcaccgccgggccagagggccgggagacgcccggcggccggaccacaccggccccgacccc

SEQ ID NO: 118190 - RNA, 85 nt, Homo sapiens
aggagacggaaagagcaccgggacccaaaggcagaggccgcccgccccccaagaaaggccagccgaagaaaagcgaaagggagac

SEQ ID NO: 118191 - RNA, 75 nt, Homo sapiens
aaaaggaacagcagagaacaacaagagagggagcagaagaacaagacgagacaaggacgggaagaaacagcaagg

SEQ ID NO: 118192 - RNA, 57 nt, Homo sapiens
aaacaaagccaaggaaaccccaacacagagccaagcgccaacgaggagccacgagga

SEQ ID NO: 118193 - RNA, 79 nt, Homo sapiens
ggaacacaccccaaaacggcccacggacacaaggcacgaggacgaagaggaaaggggccacgaggaagacgggagggag

SEQ ID NO: 118194 - RNA, 73 nt, Homo sapiens
gcaaaagacagcgaggagcagcagcagcccagcaggcgcggcccgccaggcaggggaacccaacagcccgcca

SEQ ID NO: 118195 - RNA, 70 nt, Homo sapiens
gcgggcgccgcccccccggcccccgggacggcccaaggccagcccgcagaaagggcagcaagacacgaag

SEQ ID NO: 118196 - RNA, 47 nt, Homo sapiens
cccagggaaagggacaggaggcagcacaaaccagcccaaaaccgaca

SEQ ID NO: 118197 - RNA, 36 nt, Homo sapiens
caggacaccggaagcgggaaaggggaaacgaccaag

SEQ ID NO: 118198 - RNA, 79 nt, Homo sapiens
gaaagaaacgagacagagcagcacagaaagagaagggccagaaggacgcaaaacgggagagcagagagagagcacgagc

SEQ ID NO: 118199 - RNA, 73 nt, Homo sapiens
cgacccgacaacccaaccccaaggcaccagcaaggcgagcagcaggagagagcccacgcggggcagcaggacc

SEQ ID NO: 118200 - RNA, 72 nt, Homo sapiens
aaaacgaccaagccagagaacagcccccacgcagcccagaagaaccggaaaaccaagcaacgagacacacgg

SEQ ID NO: 118201 - RNA, 70 nt, Homo sapiens
agagaaagacaaaagccacccaggccggccagcacccaccgagaaggccagcagaaccaagagacacgca

SEQ ID NO: 118202 - RNA, 64 nt, Homo sapiens
gaaccgcaaagaggagagcaaaggcagcaagagagcacaggagaacaaaaccagccaagcagag

SEQ ID NO: 118203 - RNA, 82 nt, Homo sapiens
gacaggcaaaacgcgaagaacgagaggaacaccccggcgaaagagccgaagaagcaggggcccccaacacacgcaggaaaca

SEQ ID NO: 118204 - RNA, 73 nt, Homo sapiens
aacaccgacaaaaaggagcaacggacagaagcggcgggaaaagaggaagggaaagccacgcaggggccaagaa

SEQ ID NO: 118205 - RNA, 81 nt, Homo sapiens
cgcgagcgcgaacagaagagaggaagaaaggacagggagagaagccaagaaagacagcagccggcccagcccaccccaggc

SEQ ID NO: 118206 - RNA, 81 nt, Homo sapiens
ccccagcaaagcagggccgcccgggcggcgggaccacgccggcagagccccagaagaccagcgggagcgacggaagccagg

SEQ ID NO: 118207 - RNA, 78 nt, Homo sapiens
gaccagggccacggagcggggaaaaaaacacccgggacgcggaaagaggccaaaaagccggcggaagaggaccaagaa

SEQ ID NO: 118208 - RNA, 57 nt, Homo sapiens
ccaaccagagcggagcgcagaccgaggaaaaggagagagggagggacgggacacccg

SEQ ID NO: 118209 - RNA, 80 nt, Homo sapiens
ggcgggagaagagcgcagaagagacccgggggcagggagagagaaggcccaaaagccaggggccgacggacaagaggaag

SEQ ID NO: 118210 - RNA, 66 nt, Homo sapiens
gcgaaggaacaagacccaaaaaacagaaacccggaagcccaacaggaaaggccaaagcggcggaga

SEQ ID NO: 118211 - RNA, 71 nt, Homo sapiens
aagaccaacaaccacccagaaacagccggcagcagcggaaggagcaccgaaagaaacacggaacggaaaag

SEQ ID NO: 118212 - RNA, 81 nt, Homo sapiens
gcccgaacgcccacgacccagggccagaggccggagaccggccgcggcgaaagaaaacacgaaccccggaaggaagagcag

SEQ ID NO: 118213 - RNA, 55 nt, Homo sapiens
gaggcggcgaggcgcgcacgagggggaggggacggaaaaacgacccggaaacgca

SEQ ID NO: 118214 - RNA, 66 nt, Homo sapiens
gcggcgcccagcggggacaggcgccaggagaaagaggacacggccgacagacagcgggccggggca

SEQ ID NO: 118215 - RNA, 68 nt, Homo sapiens
gacaggaccggcaggagagacgggagcccgacacaggacgaaaaggacggcgccgggggccgaaaacg

SEQ ID NO: 118216 - RNA, 70 nt, Homo sapiens
agcccaggagcgccacgcgcggaaggcagcgcccagcagcgcagggaggcaccgccccaacccccccccg

SEQ ID NO: 118217 - RNA, 76 nt, Homo sapiens
caagcagagccggcaccacaggaagccgagcagcccagacggccgagaccaccaggcaaggggaaggggcgccgcc

SEQ ID NO: 118218 - RNA, 78 nt, Homo sapiens
gaaaagcggcccggaccgaaggcgcaagagggaggcgcacacacagaaagcaccgggaggaaagagagccacacgaag

SEQ ID NO: 118219 - RNA, 78 nt, Homo sapiens
gaggaccagggagggaaaagcagacccaagcggagggcgacacgagaacaaaagccccagcagggggaggggagcacg

SEQ ID NO: 118220 - RNA, 66 nt, Homo sapiens
ggaccagaagcggaggcaaacaagggaaacaggcgacaacggcaagaagagagaagaagcaaaccg

SEQ ID NO: 118221 - RNA, 82 nt, Homo sapiens
cggccccggcaccagcggagaaaagcgggaggcagcggccgaggagcgccaaggacggagccccacgcgagaacaacaagcg

SEQ ID NO: 118222 - RNA, 74 nt, Homo sapiens
cccgccaggagcaaagacacgagaggcgagggacgacagagcaagcggcagagggcaagcgggaaaaagaccag

SEQ ID NO: 118223 - RNA, 64 nt, Homo sapiens
gagggcaccgcgacgcggaggcccaccgagccaggacaaaccggcgaccacacacggggacgac

SEQ ID NO: 118224 - RNA, 75 nt, Homo sapiens
agaggcaccgccggagccgccggaagggcgcccgcagccccccacggagagaccggagcagcgaggagaagagcg

SEQ ID NO: 118225 - RNA, 85 nt, Homo sapiens
aggcgacgaccgacaggggggaaagcaaaagaggcggcaaggcagcccaggcaaagaagaaaggcgagggccagcagaggaaaaa

SEQ ID NO: 118226 - RNA, 78 nt, Homo sapiens
agcggggccgaggccgaaggcccgcggcgccccggcgcaggagccgcagaagccgccgcgggaagcaacgggaaacgg

SEQ ID NO: 118227 - RNA, 71 nt, Homo sapiens
ccggcccgaaaggagagccgaaacaccagcgaagagaggcaaccagcccacaagaaacaaagcaacagcac

SEQ ID NO: 118228 - RNA, 81 nt, Homo sapiens
cggaaagcagaagcgcgcagcaacggcggccccaaacaggcgggacagggagcaacaccggagcgggcacgcggggggcag

SEQ ID NO: 118229 - RNA, 80 nt, Homo sapiens
ggacaacacaccggaggcagggggacacagccacccaggacaccgagccaggggggcaagacccaggagaacaggagcaa

SEQ ID NO: 118230 - RNA, 76 nt, Homo sapiens
aacagcgaagaccaggcgggaaaaaggccagcccacaacccgcaccccgcacaccccgaggagagacagacgggca

SEQ ID NO: 118231 - RNA, 68 nt, Homo sapiens
cccggagcccagaagacagagggcgagggagcaggcgaagcgagccagggaagcgaaccaggcgaaca

SEQ ID NO: 118232 - RNA, 78 nt, Homo sapiens
gaaacgaaaaaacaggaaacaaaaacagccaggaacaaaaggaccagggggggccccgaagccacgaggaagccacac

SEQ ID NO: 118233 - RNA, 65 nt, Homo sapiens
gaagccccacaagccagggaagaccccgaaggaccaaggacaaagacggcaggggaacacaagac

SEQ ID NO: 118234 - RNA, 74 nt, Homo sapiens
aagagaaaagacagaccgccgacagacagcagccggggcagcccagcggccgcgggcaaagagagggaagcaga

SEQ ID NO: 118235 - RNA, 70 nt, Homo sapiens
agaggcaaagaacaggaagcgggaaccggggaggacggcgcacccagccacagacccaaccagacgaggg

SEQ ID NO: 118236 - RNA, 57 nt, Homo sapiens
caaaaaccacagggggaagacgagagagagagggcagccgagaaggcaacccacaga

SEQ ID NO: 118237 - RNA, 69 nt, Homo sapiens
gaagcaggcccagagcgagcacagcaggaggaggacagcagaccacagcccggcaggcccaaaaaccca

SEQ ID NO: 118238 - RNA, 81 nt, Homo sapiens
gagagggaggcgggaggagcggcagccgcgaggaggcgcgggagggcgagaacgaccccgagacggcaaaaccagaagcga

SEQ ID NO: 118239 - RNA, 68 nt, Homo sapiens
ccgagcgcgccggaccggcgcccggacaacccgccagaagccagacgccgggaaggccaaacccagac

SEQ ID NO: 118240 - RNA, 87 nt, Homo sapiens
aacaagcacaccaacacaccaggagcacaccgcggggcgggagcagcgccaccaccagcccgcaccacaacgaggggagaaccagac

SEQ ID NO: 118241 - RNA, 82 nt, Homo sapiens
ggcaaagcggagcagccaggcaacgagaaaacacccacggagaaagacagcaaagaaaaggagaagaaaggaaaaaaacaac

SEQ ID NO: 118242 - RNA, 81 nt, Homo sapiens
ccccgggccacgggagcagcggagacccgagagcccggcgccagagggagccaggccgaccacaagcgcagaaaacagcca

SEQ ID NO: 118243 - RNA, 80 nt, Homo sapiens
aggggaggacgcagcaaaccaccagaagggccaaccgccccccagcagcaggcacgggcgaaccccgagccccgccccac

SEQ ID NO: 118244 - RNA, 81 nt, Homo sapiens
ccggagcccccagcgcagcggccgcggccaggccagcgacggccggaagggaagcgggaccaccccccggaccaagcagac

SEQ ID NO: 118245 - RNA, 74 nt, Homo sapiens
ccaaggggggcggggggccaccgaacgcgcacgccggcagagccaggacaaaaccaggcagaaccaacacgaac

SEQ ID NO: 118246 - RNA, 74 nt, Homo sapiens
ggaaacgcgcaacggcggaagacccaggacagacaggacgagaggacagaacgaggcaaccaggggaaagaaca

SEQ ID NO: 118247 - RNA, 63 nt, Homo sapiens
gaggaggcccccccgccacgggaacagggacgaagccgaacccacaacggggcgccagcaccg

SEQ ID NO: 118248 - RNA, 60 nt, Homo sapiens
aacccgaggcgcggcggcgaggcagacggacagacggggagaaggccaaagaagaacggc

SEQ ID NO: 118249 - RNA, 56 nt, Homo sapiens
caagaaagcccgaaaaccaaggcaggcgccccaacccaagccagaggaggcaccca

SEQ ID NO: 118250 - RNA, 77 nt, Homo sapiens
gagcccagccgaaggagaaggggggcccccccagccggcgaccagccaccccacgcaccggagcacagcagaccacc

SEQ ID NO: 118251 - RNA, 58 nt, Homo sapiens
agcgggcaggagaggccggcgccgccgaccgggaggagggagcccagccggagacggg

SEQ ID NO: 118252 - RNA, 62 nt, Homo sapiens
gaggcaaaaccagcccccccagcgcaacggcgaggcgcacaaacgccagaagacaacacaag

SEQ ID NO: 118253 - RNA, 80 nt, Homo sapiens
gacccagggggcaccgcagagccagccagagccccgacagggcgcggccaagcagaaggccccccaggccacccaggacc

SEQ ID NO: 118254 - RNA, 71 nt, Homo sapiens
agaaccaaaaaccaggaccaaaaaggaagggaccccaaagccaaagagaagcaggagaaggaacgggaaaa

SEQ ID NO: 118255 - RNA, 78 nt, Homo sapiens
gcaaaagaaggggcacggccaagaagcccggcaaaacgcgccggcgaggaggcaaggaagagaaaaggaaccccagcc

SEQ ID NO: 118256 - RNA, 86 nt, Homo sapiens
gaggcggccccggggacaaccgcgcgccccaccccccacgggccgcgaagaccggggagaccgcaggaaaagcccggagcaccgcg

SEQ ID NO: 118257 - RNA, 77 nt, Homo sapiens
agggagcgcagcacagcggggggaggaggggcacaaagaaaagagcgggaaacaggcgggaaagggcgcaaagcacg

SEQ ID NO: 118258 - RNA, 75 nt, Homo sapiens
cagccacggccacggcaacgagcggggcaaccacgcgagacgccaccaggacccaggaagccacccgcagagggg

SEQ ID NO: 118259 - RNA, 50 nt, Homo sapiens
ggcaacacgcagccgagcgaaaggccaagagcaccagccgacgaggcaac

SEQ ID NO: 118260 - RNA, 75 nt, Homo sapiens
gacaacaaaaccacagagagaacgaagaaccccaacgggagaacagggagcaacggaccagaggaagagacggcg

SEQ ID NO: 118261 - RNA, 40 nt, Homo sapiens
caccaacacggacacggggcgagaggacagagacgaggcg

SEQ ID NO: 118262 - RNA, 77 nt, Homo sapiens
ccgggcgcagccggagccgggccgcagcgcgaggccgggccgggggagaccgcgccaggcgcgggccaccccacggg

SEQ ID NO: 118263 - RNA, 79 nt, Homo sapiens
caacaccaaaaggaaaaaacagaggagcggagaaaggacagggcagaccgccagcagcacagcaagccacagagagggc

SEQ ID NO: 118264 - RNA, 66 nt, Homo sapiens
cagcaacagccggcgggcggaaggacaccgcgaccagcaccacccaaacaagaccacaagaccaaa

SEQ ID NO: 118265 - RNA, 79 nt, Homo sapiens
agacacggagaggagcggggaggaaaggagccccgggaacacccagagaacgagaccgggaagggaggacccaaaaaac

SEQ ID NO: 118266 - RNA, 82 nt, Homo sapiens
caccgcacccggggccggcgcgcagccgagagcaccaggggacccgcggcagaaagcggacccagggaaccacgggagggag

SEQ ID NO: 118267 - RNA, 75 nt, Homo sapiens
caaagggagccccgaacgcagggccggggaaggccaaagaaagcgaaaccggaccaagaaaaaacaaaagcaaaa

SEQ ID NO: 118268 - RNA, 78 nt, Homo sapiens
gccccgcgccgggcccaggcccccacgccgagggccaccaggccgccgggggccgcgcgcccgggacacgggaggaga

SEQ ID NO: 118269 - RNA, 84 nt, Homo sapiens
gcgccgccgccgccgcccagagacgcgagcccgccgccgccgccaccacccacccggacacagaacccagcggggccgccccac

SEQ ID NO: 118270 - RNA, 79 nt, Homo sapiens
ccacgcaggggaacagaaggggacaggaggggcagcaggagaagaaaggaagagacgacagccagcaggcaggagcccg

SEQ ID NO: 118271 - RNA, 77 nt, Homo sapiens
cagcaccaaacgccaagaccacggcaccaaggaagaccgccggaccaaacagagggccccacgccaccaccagaggg

SEQ ID NO: 118272 - RNA, 73 nt, Homo sapiens
caccggcccacaaaacagaccgcccgacaaagacaggcgcgcagacacgccacgcaagaaggagcaagaaccg

SEQ ID NO: 118273 - RNA, 37 nt, Homo sapiens
cacagccacagacagaaccagcaacacacaagaaacc

SEQ ID NO: 118274 - RNA, 85 nt, Homo sapiens
gacagcagcagagggaaggagcacacgggaaggagggcaaaaaaggagaaagccacaaggacaaaagacacggacaaccaagcaa

SEQ ID NO: 118275 - RNA, 56 nt, Homo sapiens
gcagcacccccgccccccaggcgacgagacccagggcaggagcaggcaagaaagga

SEQ ID NO: 118276 - RNA, 72 nt, Homo sapiens
aagcggccggccgcagggggccgcgccccaggagggacaggccacgggggagaggacggaaacccagagccc

SEQ ID NO: 118277 - RNA, 80 nt, Homo sapiens
cgcaagagaaagcccaagaaggagacaccgaaagaccccgccgggcacccagggcccgaggccgcccacgccgccccgaa

SEQ ID NO: 118278 - RNA, 82 nt, Homo sapiens
cgagacccgccacacgagaagaaaacaccggagcccaagacaccaaaacagacgcaggcaagaggcagaaggacaaaggaaa

SEQ ID NO: 118279 - RNA, 76 nt, Homo sapiens
gggggacgcgccaggcacagcagcagacacagggccacggggccaggcggaggcggcagcggaacccgggcccaag

SEQ ID NO: 118280 - RNA, 79 nt, Homo sapiens
aaacaagagaccacagaaggccgagacacaaagcggcagggaagggacaacagccaggaaaggaacggagagaaaccca

SEQ ID NO: 118281 - RNA, 54 nt, Homo sapiens
gagggccaagggagccgcgcaaaggccccggcaagaaggagaagacagaggagc

SEQ ID NO: 118282 - RNA, 65 nt, Homo sapiens
accccacccagccggagagacccagaggaaggccccgaggcgggcagggcgggcagcggccgagc

SEQ ID NO: 118283 - RNA, 72 nt, Homo sapiens
gagcgagcgagggggggcgcgccggaaaccggagcgcgcagcagagagacccgccccgcgcacgagccggaa

SEQ ID NO: 118284 - RNA, 69 nt, Homo sapiens
acaagagaacaaaccacaagggacaacaaaacaggaaccacacgacgcgggaaccaccagagggcccgg

SEQ ID NO: 118285 - RNA, 73 nt, Homo sapiens
cgacaaggagagaagcgcggagccccaagccagcaggacaggcacacccgggcagccccagcccgcagaagcc

SEQ ID NO: 118286 - RNA, 65 nt, Homo sapiens
aaacccgagaaaggcaaccagcaagcagcacaccgaaaccaggagacggcccaccgaaggaaaca

SEQ ID NO: 118287 - RNA, 60 nt, Homo sapiens
ggagcgaacccgagagcgggagcgggcgggccagccaaacccagcccaaggacacaagca

SEQ ID NO: 118288 - RNA, 55 nt, Homo sapiens
gaacagacggcggccccgggaccccgcccggcagccgccgggaaagcggagagag

SEQ ID NO: 118289 - RNA, 65 nt, Homo sapiens
gcaggcacaacacagcagagaccgagggaacccacccccacccagcgccccacagacaaaacccc

SEQ ID NO: 118290 - RNA, 83 nt, Homo sapiens
gcgggagaggcgcagcggaggcggaagcaggaccggggcacggcaaaggaggaaacaccacacgaaacacagaaacaccaaga

SEQ ID NO: 118291 - RNA, 84 nt, Homo sapiens
gcagagggacagcaggagcaggggcgcagcgcggccgcggagacagggagacccggggcggaacgaggcaagccggcaggggaa

SEQ ID NO: 118292 - RNA, 73 nt, Homo sapiens
agaagagagagaaggggaggaaggagaggcagaacacgggggaccaaaaggagcgcaaaaagccgagcaacac

SEQ ID NO: 118293 - RNA, 75 nt, Homo sapiens
gagggcaggacccgcaggccagaccccgggagcccagccaccacagacaggagaggcagcagaaaaggccaaagc

SEQ ID NO: 118294 - RNA, 74 nt, Homo sapiens
aagccgggaaagggacaagaagggcaaagccgaaaagcccccggcggcaaccaacaacacaccacaccgagccc

SEQ ID NO: 118295 - RNA, 87 nt, Homo sapiens
cggggagcgggaaacacaaggagaccgggaaccacagccagaagacccgacaaacagaaggccgacgcccccaacccaccccaccca

SEQ ID NO: 118296 - RNA, 78 nt, Homo sapiens
agaccacaccaagcgggagacacaccacgccaagggccgagaaacagacaacccacagaacaaagcggaccaaggcac

SEQ ID NO: 118297 - RNA, 74 nt, Homo sapiens
gccggacccacacgggaaccacgagacagacgagcagacacccaaacccgcgcacagaaacagacgcacgccga

SEQ ID NO: 118298 - RNA, 76 nt, Homo sapiens
gaaaaaggcgccgccggacagcagagcccagccagaagaagccacacccgaaaaaaacgcccaagagcccaagcaa

SEQ ID NO: 118299 - RNA, 71 nt, Homo sapiens
aaaagcagcaaagaacaccaagacggcgaccacaggaaggacacaggcagaaccccaaagcgagaaaaagg

SEQ ID NO: 118300 - RNA, 63 nt, Homo sapiens
gcacgggcgcagccgcccgcgagcgcggagcgcggcgccagaaaggccccgaagagcgaaagc

SEQ ID NO: 118301 - RNA, 76 nt, Homo sapiens
gaaaaaaagaaaggaaaaaggagagagaaggcagcaggagaggaaagagcggaggacccggaccggacaacgcaac

SEQ ID NO: 118302 - RNA, 66 nt, Homo sapiens
cccccaccagcaggacagggccacaacacacaggacgcaagagcaacaaagcgggaaccaagagac

SEQ ID NO: 118303 - RNA, 70 nt, Homo sapiens
gcccaggaaggaggaggaagcgagcagacaaggagccgccagagcccagcagaaggaacgcggaaccgcc

SEQ ID NO: 118304 - RNA, 87 nt, Homo sapiens
aacagagaaaaaaacagaacccaacacccccagcgaccccgcacacacacccaccagccacggcagcccagcggggacccagccgcc

SEQ ID NO: 118305 - RNA, 80 nt, Homo sapiens
aacgcgccacgaaggccaggccagggaggcggaggcaaagcggaaaggacaggggaaggccaaggcaaggcagaccgcca

SEQ ID NO: 118306 - RNA, 53 nt, Homo sapiens
gggaggaacggcccggaaacaggaggacccggcccgacgcacaaggcgggggc

SEQ ID NO: 118307 - RNA, 82 nt, Homo sapiens
cgcccgacggggcggccgggggccagagaccaaggcgcgcccggcgggccggaccaaggcccagaagaggccacaaggaaga

SEQ ID NO: 118308 - RNA, 56 nt, Homo sapiens
caaaacagaaaaagacaagcaaggcggagggcagggagagaacagcacacagaggc

SEQ ID NO: 118309 - RNA, 80 nt, Homo sapiens
ggggagcagcagacagagaaccggagcgcacaccaagcccgcagaccccgggacgagacagcgaggcacaagcacgggga

SEQ ID NO: 118310 - RNA, 56 nt, Homo sapiens
ccaccaacagcccggcagggaaagcaaagacggaggagagggggaccgaaaaaaac

SEQ ID NO: 118311 - RNA, 57 nt, Homo sapiens
cacacacaagccagaaacgccgcccccagcaaaggcaggacccgaagacaaaaccac

SEQ ID NO: 118312 - RNA, 77 nt, Homo sapiens
gaggagggcggggggccacggaggacgcgacgaagccccaaaccccggaaaaaaccagacgagagacagaagacgaa

SEQ ID NO: 118313 - RNA, 93 nt, Homo sapiens
cgggagcccgggcgcgcaccgccgcccccccagacaagaggacaccgcggaggaagaaagcaccgggaggaaagagagccacacgaagaacac

SEQ ID NO: 118314 - RNA, 81 nt, Homo sapiens
ggaggaccggaccggacggcggcccaacccaacggcgcgccaccaacgccaccaccacgcacaagaccgacgcgcaggcgg

SEQ ID NO: 118315 - RNA, 56 nt, Homo sapiens
gccggagcgaccccggcaggaaacaggaacacgaaagaggaaaaacgcacaagaaa

SEQ ID NO: 118316 - RNA, 68 nt, Homo sapiens
ccaaaagaaccgaaagaagcggaaagcagaagcgcgcagcaacggcgggccaaagccgacagaaaagg

SEQ ID NO: 118317 - RNA, 43 nt, Homo sapiens
caagaaacggcgggaggcaaggagcacagcaagcgggagcagg

SEQ ID NO: 118318 - RNA, 52 nt, Homo sapiens
cgcaacccacccaggaggccagcaggccgaagagggaccagaccggcccgac

SEQ ID NO: 118319 - RNA, 87 nt, Homo sapiens
gcgggccgcagcgcggagcagaaagcagaacccgcagaccgacagaaccccgggaagcgacccgcgggcccgagcccgagaaaacga

SEQ ID NO: 118320 - RNA, 59 nt, Homo sapiens
ggacgggcggaggcggggggaccggcgggcggggccaaccgccccccagcagcaggcac

SEQ ID NO: 118321 - RNA, 81 nt, Homo sapiens
gcaacgggacgccgggggaggaagcggaccgacccaccaagcagagcgagaggcagaggaaaggccaaagccaccccaggc

SEQ ID NO: 118322 - RNA, 70 nt, Homo sapiens
ccggccacgagcaaaaggcagagggcagaccgacggaacccaggccagccaaaaccgaaagaagaaaaga

SEQ ID NO: 118323 - RNA, 77 nt, Homo sapiens
gggagggaaaaggggggaggggcgccaccaggaaagggcggcaggccaaaccaacagacacagggaaggggaggaca

SEQ ID NO: 118324 - RNA, 87 nt, Homo sapiens
cgcgggaggcgcgcgccccgcacagcacagaggggcagccggagagccgggaaaggaggaggagcagcgcggaggaggaagcccccc

SEQ ID NO: 118325 - RNA, 77 nt, Homo sapiens
gacgcagcaacaacagcagccggcccgaacacaacagaccacggaccgggggcccgcgcacagaccaaacgggcccg

SEQ ID NO: 118326 - RNA, 74 nt, Homo sapiens
gagagcgagcgagggggggcgcgccggaaaccggagcgcgcagcagcccccaggggccggagacaacgccccag

SEQ ID NO: 118327 - RNA, 52 nt, Homo sapiens
cgcggccaaggagccgccaaagccagacggccggggcagcagaagaggacaa

SEQ ID NO: 118328 - RNA, 51 nt, Homo sapiens
gaaggggacaaggaacaaaccaagcagagcgaagggagaccagcgaaaagg

SEQ ID NO: 118329 - RNA, 81 nt, Homo sapiens
agcgcgaacgagcgacggcggaacccggggccgggacgcagcccggcggcagcaggaaaaccaacaaggaaaaccggaagc

SEQ ID NO: 118330 - RNA, 75 nt, Homo sapiens
gccaaagcggaaccaacgaaggaaggagaaagacaaacccaagaaaacaagaagagaaaagccgaagaacacgac

SEQ ID NO: 118331 - RNA, 80 nt, Homo sapiens
gcgccgcgagggcgggagcgcgcccgccgagcgcaacagcggcgggcggggcaccccaggacagagcgggagccaccagc

SEQ ID NO: 118332 - RNA, 63 nt, Homo sapiens
gggaccgccaggccccggacacccaggaaaccccaggcacccggacacgaccaaaacccccaa

SEQ ID NO: 118333 - RNA, 74 nt, Homo sapiens
cccaaggcaggggaaagcgcaggggggccggggggggcacagagccccggaagacagcccccagcgaccagacc

SEQ ID NO: 118334 - RNA, 83 nt, Homo sapiens
cgacgacccggaccaagaaggggaggcccgcggcagggcaggggcagcggaggcagagcagccccggggagccgaagcaaaca

SEQ ID NO: 118335 - RNA, 60 nt, Homo sapiens
ccgcgccgccgaccccccggcgccgcgccggcggcggagaaggcaaccaaaggcaggaca

SEQ ID NO: 118336 - RNA, 70 nt, Homo sapiens
gaccacgggaccaagcagacaaaccaagagaccgggaaaaagacagggaagcagaggaacaacggaggaa

SEQ ID NO: 118337 - RNA, 57 nt, Homo sapiens
aaaacccggaagagcgccccaggagaaacaagacacagacggaagggagggccaccc

SEQ ID NO: 118338 - RNA, 90 nt, Homo sapiens
agcagcgacgggcccaggaaaaagaggaaagggacgccggggccgggccaggagcagagaacaccccaccagaccacccagcaagcccac

SEQ ID NO: 118339 - RNA, 72 nt, Homo sapiens
caaaccaagaaggcagacacaagagacagcagacaagccgccgggacacagcaggggccagacaaccagacc

SEQ ID NO: 118340 - RNA, 63 nt, Homo sapiens
cccagggcccccgcgccccaccccgacgcgggcccaaaggacagcccagaagacgacaagcag

SEQ ID NO: 118341 - RNA, 51 nt, Homo sapiens
cccgaacccagccgcaccggagaagagacagccacgacaaaagcaagggag

SEQ ID NO: 118342 - RNA, 77 nt, Homo sapiens
cacggcgcgacgggagaccagcacacaaccaagccaggccacggcggccacaacagcagcccaagccagcagacggg

SEQ ID NO: 118343 - RNA, 86 nt, Homo sapiens
aagaacaaaggaaggggagcccgggacccccgggggcgcaggggaaaagagacgcaaaccacgaggacagagaagagagaagccac

SEQ ID NO: 118344 - RNA, 83 nt, Homo sapiens
aaaacccagaaaaccagcaggagaccacagcaagcaaaggaccgggaagagaaacgccagagaaaaggaagagcaaaagaaac

SEQ ID NO: 118345 - RNA, 75 nt, Homo sapiens
gccggggacaaccggccaccaaagggagaaccacacggccgcacaaggggcacccgagcacgaaaggaccgcacc

SEQ ID NO: 118346 - RNA, 39 nt, Homo sapiens
cagcgcacacagcaagcacgagacagccgcgacggaagg

SEQ ID NO: 118347 - RNA, 75 nt, Homo sapiens
ccagagcccacaggcaaaggagcacggagcagcccccgagcagccaagcaccagccgggcccaacccccccgcgc

SEQ ID NO: 118348 - RNA, 51 nt, Homo sapiens
agccccgaaacgggaacagccaggaagcggaaggaccgcccggggagcccg

SEQ ID NO: 118349 - RNA, 53 nt, Homo sapiens
cagaccacgggaaaacaccagcagaccgaggaaggggaacaggcaaacaggaa

SEQ ID NO: 118350 - RNA, 57 nt, Homo sapiens
gcacaacgcacaaaaggggaaagccaacaggcagaccagagacagcgccacgcaccc

SEQ ID NO: 118351 - RNA, 77 nt, Homo sapiens
aaacgggacaaaccaggggaagaacacggagagacagacccgaaagagaaagcaggcgacaggggaacaacgaagag

SEQ ID NO: 118352 - RNA, 72 nt, Homo sapiens
cgggccaggagagagccagccgcgccgaccgcacgcccgcaccccagggagcgcgcgaagcgccagcaacga

SEQ ID NO: 118353 - RNA, 71 nt, Homo sapiens
cacaaaaaggcaaaaaaaccgaggggaagcccaaagaggcgccaaacggacgaagcaaaaacacggagacg

SEQ ID NO: 118354 - RNA, 77 nt, Homo sapiens
acccaccagcagcagcaagggcaaggcacgcccaccgaccccagcacccgccccgacgacggagcccaaggaggagc

SEQ ID NO: 118355 - RNA, 69 nt, Homo sapiens
acgcgcaagcaaaggaagacggcaagggcgaaagcacgagagaggccagggaaaaaggagccaccacag

SEQ ID NO: 118356 - RNA, 61 nt, Homo sapiens
gagagagaggacgaaggcggccgccagcaccaacgggcacaggcagcgagccgaggggagg

SEQ ID NO: 118357 - RNA, 64 nt, Homo sapiens
ggggagacccggggacccccgacgccaggcagcgcccccaaacggaacaaacaaaacgaaagcc

SEQ ID NO: 118358 - RNA, 85 nt, Homo sapiens
gaaaagaaagagaaaaagcagaaagagagaagagagacagaagagcacgccaaccgaagaacagggacacaaacggccagacgag

SEQ ID NO: 118359 - RNA, 76 nt, Homo sapiens
aaacgaagaaacaggccgcaggaaccaagccagagcaagacccacgaagggcacacaaaggacccaccgggaaagg

SEQ ID NO: 118360 - RNA, 68 nt, Homo sapiens
caccggagcaaacaaccgaggaccaccggcaccacaccaccaaagaccaggccacgggaagaagcagc

SEQ ID NO: 118361 - RNA, 72 nt, Homo sapiens
cagccaaaagacaaagaggccggaaacgcaagggagaagacacacggaccaaacggagaacgaaaccacgca

SEQ ID NO: 118362 - RNA, 80 nt, Homo sapiens
agcgggcaaccgaaagagacccccagaccaggaaagacagggaccaagaaaggcccagggaccaaagcccggacaaggcc

SEQ ID NO: 118363 - RNA, 68 nt, Homo sapiens
cgggagacccgacggagcagacagaaaaaagacaccgaggacagaaccaaccgaaaagccacccggcc

SEQ ID NO: 118364 - RNA, 85 nt, Homo sapiens
ccggggccggcccgcaaggcgcccccccagagagccagaaagaacccgccccccaaagcgaagccaaagcgaaggcaaaggccaa

SEQ ID NO: 118365 - RNA, 52 nt, Homo sapiens
acggcgggaagaagcaaacgaagggcaagaacaaaaagaaaaggaaaccacc

SEQ ID NO: 118366 - RNA, 81 nt, Homo sapiens
cgaggaaagcaggaggaggggcggcggcgggaagaggcaaagacaggcacagaggccaacacagaccaaggcgcagcaagc

SEQ ID NO: 118367 - RNA, 71 nt, Homo sapiens
acaacgaccccacagaaacaagccaccaggagaagcaaaagagccgagaagaaaccgcaagaaagaaagcg

SEQ ID NO: 118368 - RNA, 79 nt, Homo sapiens
cgggacacccgccgcggacgccacgcggcacgaaggacccggaacggcaccgggagaggaggccaagcggaggaccgag

SEQ ID NO: 118369 - RNA, 72 nt, Homo sapiens
aaagggaggcccaccacaggagaaaggagcccagggcagaccgggagacacaaagaaacacgaggggaaaag

SEQ ID NO: 118370 - RNA, 72 nt, Homo sapiens
gccagggcagcaccgggcagcgagacgaaaaacggggggcggagacacacacagggacaagccaagacccac

SEQ ID NO: 118371 - RNA, 79 nt, Homo sapiens
gcggcgccacagacccgcgaaggccaaccgaggagcagcagaagaccaacacgagcgagccccagacggcgcgcacgca

SEQ ID NO: 118372 - RNA, 73 nt, Homo sapiens
gccacaaacacccaccacagcagagagggacggaaacagacgacgacacggacaggacggcggacagggcgac

SEQ ID NO: 118373 - RNA, 65 nt, Homo sapiens
aggcacaccaggagccccaagggccggccggaacccccacaaccgcaggagacgaacgagcgcac

SEQ ID NO: 118374 - RNA, 81 nt, Homo sapiens
gcggaccgggcgccgcgagccgcccaccggcgccacgcaagggcgaggcagccccaaacaccggccgaaaaggaaaaccaa

SEQ ID NO: 118375 - RNA, 74 nt, Homo sapiens
ccccaaggcaacagacacaagcagcacagcaaggcaacaccaccccaccaagagcggcgaacccggcccaaggc

SEQ ID NO: 118376 - RNA, 75 nt, Homo sapiens
gccggaagcagcgagggaccagacgcgaaggacgccggccaaacccaggacaagagaaggacggagaagcgaaag

SEQ ID NO: 118377 - RNA, 78 nt, Homo sapiens
cgggccaaggaacaccgggggcaggccaggccgcaggaagcgcggaaaagccagagagagagaaaccggaggcacaac

SEQ ID NO: 118378 - RNA, 80 nt, Homo sapiens
ggaagaacaacgacgccaagcacaagcaggagaggaaaagcaaagcacacaacagacacagagggacccaccgacgagag

SEQ ID NO: 118379 - RNA, 86 nt, Homo sapiens
agcagagcggccggaagcgcggagggagccgcgggaggaccgcaggaggaacgcgcccccgaggcacaccggaaacccagccccga

SEQ ID NO: 118380 - RNA, 76 nt, Homo sapiens
gccgcgggccgcaggccgcgagcagcggacgccggccgccgcaggagcaagaacaacccagggggacacgcggccc

SEQ ID NO: 118381 - RNA, 86 nt, Homo sapiens
gcgcagggccgggccgacccacccgccaccaccagcagaacggccccgggccaagcgaccaggccccgggggggggaccagccagc

SEQ ID NO: 118382 - RNA, 67 nt, Homo sapiens
gaggaaagaagggggcgaggggccacacgcaaacccgggagagaaggggacgaggccgaacggggca

SEQ ID NO: 118383 - RNA, 52 nt, Homo sapiens
gggaaaggaacaacgggcaagaaagaacagcagaccagaggcccaggccccg

SEQ ID NO: 118384 - RNA, 74 nt, Homo sapiens
cgggcacacggacaagggccccacaccgcggaagagcccggaacgccagagcggaaaggaagagaacgccggaa

SEQ ID NO: 118385 - RNA, 75 nt, Homo sapiens
ggagcagcgggagccccccgcacgcaacgcccggagacggaaacgaacgggaaaagccaccgaccacacgccaca

SEQ ID NO: 118386 - RNA, 38 nt, Homo sapiens
aacgggaggaccaggggggcgccaaaggggagaaggca

SEQ ID NO: 118387 - RNA, 78 nt, Homo sapiens
ggaaggggcaagacgggcagcgcaggggcgggaaagacccaggagaagccgcccaaagaacggggccaggaaaaccag

SEQ ID NO: 118388 - RNA, 57 nt, Homo sapiens
ggaaaccgacgaacaacacaggaccaggagagaaaagagggagggaaggaaaagggc

SEQ ID NO: 118389 - RNA, 75 nt, Homo sapiens
gcacggccccggccgccccaacgggggcacgaagggggacacaggcgagagcacaaaggaaccaggggcagggag

SEQ ID NO: 118390 - RNA, 82 nt, Homo sapiens
gggcccgaggagggggaccgaagacgaccgacccgcccagcacgaccagccagcagagaggagcgggaaggccccgcacccg

SEQ ID NO: 118391 - RNA, 84 nt, Homo sapiens
cgaccggcgagccgggacgagcggcaaggcgcgggcgggagaacgggcgcaccggccagacgagcagccgccgcggccacacca

SEQ ID NO: 118392 - RNA, 76 nt, Homo sapiens
caaagcacggaccgagggcacgcaaagaggaggaccccaacaacaggagagagcaagcgagcagggagaaaggaaa

SEQ ID NO: 118393 - RNA, 75 nt, Homo sapiens
ggcgcacgcggagagaccgggcgaccagaagggcgcacccgcaggaacccgccgaggagcagagaaagggggagg

SEQ ID NO: 118394 - RNA, 64 nt, Homo sapiens
ggcggcacccggccaggaagcggagggcgcgcgagggacccaaagacaggaccacgcaccagca

SEQ ID NO: 118395 - RNA, 72 nt, Homo sapiens
agccagcaagcggaggacagcaggcagaagaccccagaggcaacaggaagaagaaaccgcgaacagcgcacc

SEQ ID NO: 118396 - RNA, 77 nt, Homo sapiens
gcaagccccaaagccggcgacgcgaggagccgaggaagcagccagcagaggagcagccgcgcaagggggaagggccg

SEQ ID NO: 118397 - RNA, 77 nt, Homo sapiens
cgacaagccgggagcgggcggccaaccaggccggcaagaagccaacggagaaccaaggccaagaccagaaccagccc

SEQ ID NO: 118398 - RNA, 76 nt, Homo sapiens
cgcgagcgagcggcaaagaggggccggaccacaaggcaagagcaggacaaccagagggaaaaaacaaaggcagcac

SEQ ID NO: 118399 - RNA, 75 nt, Homo sapiens
gaaccgggcaaagacgacgcggagaggggcccgacggaaaagaccagccgaggacggcgccccgaacaccaaaag

SEQ ID NO: 118400 - RNA, 36 nt, Homo sapiens
agagcagcgcccgaaggaccgacaggagcggacccg

SEQ ID NO: 118401 - RNA, 76 nt, Homo sapiens
ccggccgcccagcgccgccccaggcccgggccgcgccaggagccgccccccccagggccagcgcgcccggcgggcc

SEQ ID NO: 118402 - RNA, 72 nt, Homo sapiens
caaaagcagggagccacgggccgcaaccgcccacgggaccagcccagcgaagacaggggccaaagaaagaca

SEQ ID NO: 118403 - RNA, 80 nt, Homo sapiens
aaacaacacgcaggggagcgggcgagggcgccagagagaacccaccgcaagagaccaaaggccaagagcaccgcagccac

SEQ ID NO: 118404 - RNA, 77 nt, Homo sapiens
aacccagccccccggaggggggaccaacccggcagaccacgccagcaaagcacggacagagaaggaggagaagcgag

SEQ ID NO: 118405 - RNA, 52 nt, Homo sapiens
aaaacgcggaaaaccgacacaacagcaagaacggcagaaggggaaaagacgg

SEQ ID NO: 118406 - RNA, 74 nt, Homo sapiens
agaaccgacaaccaagggccccgcggaccaaggaagaacccgaagcaccggccaggcagagcagcccaccaggg

SEQ ID NO: 118407 - RNA, 86 nt, Homo sapiens
ggccgagggggcacagaagcgggcggcggcgcgccgccccgggcggccgcgggcggggacgaacagcggggacgccccagcagacc

SEQ ID NO: 118408 - RNA, 80 nt, Homo sapiens
gcgaaggggaaggcgccgaagaggacgaaggaggcagcagggaccagcgcccagaagaacagacacaggcagcagggagg

SEQ ID NO: 118409 - RNA, 80 nt, Homo sapiens
gagagccgcgcccgccgcgcggagcgcccccgcgccccgcaccagagcggggcaccgagccggggccgaggcaaacaagg

SEQ ID NO: 118410 - RNA, 91 nt, Homo sapiens
gacagcgcgcggcaggcggcgagccgggggccgcagcccagggacccagaaagacaggagaaggaagcaaagggagaggagcccgacacgc

SEQ ID NO: 118411 - RNA, 75 nt, Homo sapiens
cccccagcacgagcgccccaggcgggcccccgagcaaaagaccagaaggaccagaaacccacgacacgcagacaa

SEQ ID NO: 118412 - RNA, 72 nt, Homo sapiens
ggccggagaggagcagaaggagcaaaaggcggacaggcagggcggagaacggaaaagcaccaggaagcagag

SEQ ID NO: 118413 - RNA, 56 nt, Homo sapiens
aaagaggcaccaacccaacggccggacaagacgcagagagccgacagaccccgaag

SEQ ID NO: 118414 - RNA, 79 nt, Homo sapiens
cgcaccaccggcgcgcagcacgcgcggaggccggcccgccgggcgccgcagaccccaccaagcggccagcgagccggga

SEQ ID NO: 118415 - RNA, 51 nt, Homo sapiens
caacaaggcacgccggaggcaccccgaccagccggaagaaaacccgagcgc

SEQ ID NO: 118416 - RNA, 73 nt, Homo sapiens
aagagaaaagaccaaaggaaaagagcaaagaaaaacggcccaagacacaggagagcggaagccggcagaagaa

SEQ ID NO: 118417 - RNA, 80 nt, Homo sapiens
cccggcgcgcggcgcgccgcccggcgagcgggccggaggaaaagaaagacgccggaggcgcgggcaagaccccgggaccc

SEQ ID NO: 118418 - RNA, 83 nt, Homo sapiens
ggacaaaagccaagaggaggacagcgcacacagcaagcacgaggcgggaaagaggaaagaagacacgcaagagaacacaccac

SEQ ID NO: 118419 - RNA, 58 nt, Homo sapiens
agagccaacccagaagagccaaggggcagagagcaggcgagcgagagcaacgagcgcc

SEQ ID NO: 118420 - RNA, 106 nt, Homo sapiens
gcggagcaaggaaaagacccggaaagaagagacacagaggagccacacccccagagcagacagacagcgaacacggaagccacgaaaagcaaaagcacaggaagcc

SEQ ID NO: 118421 - RNA, 69 nt, Homo sapiens
ggcggacggacacagacaccaagggaggccacagagacaagagagagccccaaagacaagaagagcggg

SEQ ID NO: 118422 - RNA, 79 nt, Homo sapiens
cacgcaagcgccccacagagcaagacacagggaccccaaacgacacaagaccacagagaaaacccgccaaacgcccagc

SEQ ID NO: 118423 - RNA, 67 nt, Homo sapiens
agacaaacagcaaggggcaaagccaacaaaggaacgagcagcaacggccaggaaccaggccagggcc

SEQ ID NO: 118424 - RNA, 78 nt, Homo sapiens
gcgcagagcggcagcagccccagcccaaggccaggcagcgcaccgcaaaggccccagggagccccgcgccaggcacca

SEQ ID NO: 118425 - RNA, 71 nt, Homo sapiens
aggcaccaggacagcggcggcgggccgggcagcccggccgacaaccacggggcgaacggaaaaaagaggca

SEQ ID NO: 118426 - RNA, 65 nt, Homo sapiens
agaagcagggaggaccggccaggaacaagacgagaaaggccgcaagcaggaagaaaagagcgggg

SEQ ID NO: 118427 - RNA, 77 nt, Homo sapiens
ccgaccggcgggccccgggcacaccaacaagccacgaccggggagcagaacgggcaccccgggcggaaaagagggaa

SEQ ID NO: 118428 - RNA, 78 nt, Homo sapiens
agccgggaccggccgggaagcggccaccgacacgcagcagcggccaggacaaaccggcgaccacacacggggacgacg

SEQ ID NO: 118429 - RNA, 96 nt, Homo sapiens
cagccgcacgcagaagggcaacaaaagaaacagaccaaaggcagaaccccgagacggccacaccaaggagcgcgcccccacccgaccggcgagccg

SEQ ID NO: 118430 - RNA, 77 nt, Homo sapiens
gggaggagcgcgaccgaggaacggaacggccgagcgaccaggagaggagcccccgcccgaagaccggggagggcccc

SEQ ID NO: 118431 - RNA, 78 nt, Homo sapiens
ggaccggccgggccggaggcaaggggccagaggacagaggacaggaccgcggagcagcggagggaagaggcgaacccc

SEQ ID NO: 118432 - RNA, 63 nt, Homo sapiens
cggaagccgagagccagagagaaccagaggcaagccagcacaccggagccaggcagcgagcgg

SEQ ID NO: 118433 - RNA, 85 nt, Homo sapiens
cagagccgccagccaggcccgagcccccagccagagaccccgccaggacccgccccaccacagggccccacgaaggacggccagc

SEQ ID NO: 118434 - RNA, 75 nt, Homo sapiens
ccgccaacaggacaccgaagccaaccggaaggaccacgagaccgcgaaacacgacggcggggagagaaaacccag

SEQ ID NO: 118435 - RNA, 106 nt, Homo sapiens
cgggcccggccaggaacagggacagcacccaccccggagggggaccacaagacccacgacagggggggccccagcccggccgaacgggcgcacgacacaaacacaa

SEQ ID NO: 118436 - RNA, 64 nt, Homo sapiens
cgcccccgcagacaccgcccccacagaccagcggaccgcggacaggggacgggggacaggaaag

SEQ ID NO: 118437 - RNA, 57 nt, Homo sapiens
aaggcgagcaacacaggggcagaaccaggccaaacagccgggcccgggaggagcagg

SEQ ID NO: 118438 - RNA, 57 nt, Homo sapiens
aaagaagggggcagaagaggggagaacccagaaaagccaaagggaaaagaagagaag

SEQ ID NO: 118439 - RNA, 67 nt, Homo sapiens
aaaacggagacgcaggagaagaacacccgccgaccaaagagaccacccaggcacgggaaagggagaa

SEQ ID NO: 118440 - RNA, 63 nt, Homo sapiens
aagaacccacagagacaccgcacccgaagagccggcacggagaaacaccccggcggaggcacc

SEQ ID NO: 118441 - RNA, 78 nt, Homo sapiens
gcagggccgagagccaggggaaaggccagcgcagaaacgcagaaaaccgggcacaggaccaaagcaaacacagacccc

SEQ ID NO: 118442 - RNA, 68 nt, Homo sapiens
agacaagcgaaaacggccagccagaaaaagacccgcacgccacaaggagcaagaagccaagcagagaa

SEQ ID NO: 118443 - RNA, 73 nt, Homo sapiens
cacgcgagggccccgggcgggacggccgggcccgagggcaggacagcaggcaccggcgaagcacagagaggcg

SEQ ID NO: 118444 - RNA, 78 nt, Homo sapiens
caccccacgccccccggccacacccgggccaacgggccccacgcagggcgcaaacacgaagcaaaggggaacaaaaga

SEQ ID NO: 118445 - RNA, 73 nt, Homo sapiens
ggagcaggcgcaaaaaaaaagggaaccaagaacgagaagagcggcggaagcggaaaagcaaaaaggaaagggc

SEQ ID NO: 118446 - RNA, 63 nt, Homo sapiens
agcacacgccccaaggagggaccaagagaccgcgaccgcacaagcagccgccagcggaaccaa

SEQ ID NO: 118447 - RNA, 72 nt, Homo sapiens
cggcagaaaccaccaaacagacacgcaggaggccggggaacagacacacccacggcaccacgccggccaaca

SEQ ID NO: 118448 - RNA, 54 nt, Homo sapiens
cgggagcccgggagggcggccgcaggagcagcaccaacacacagcgagacggca

SEQ ID NO: 118449 - RNA, 72 nt, Homo sapiens
ccaaacagaaaaagcggagacagccgaagaccaaaggaaggcaaaccagccggcgggcgccacaacggacga

SEQ ID NO: 118450 - RNA, 83 nt, Homo sapiens
ccgcggccacgcgagagggacacgcaggacgagcggccgaagcagcgcgcggcggaggcggaccggggggcccgggcccgcca

SEQ ID NO: 118451 - RNA, 74 nt, Homo sapiens
accaacaaccgcgaaaaagggccgaccaggcagggaacaaccacagggcaggcgcgaacggcggaggcaaaaaa

SEQ ID NO: 118452 - RNA, 70 nt, Homo sapiens
aaggaccaagaaccagcaagcggcaagaggaaacaagaaaaacgaagagaacaccaccgaaagaacagaa

SEQ ID NO: 118453 - RNA, 76 nt, Homo sapiens
gggggggcagcagccagaggaggaaaggcgccaggcagccgagcggagcggaagcggacgagacaaccagaagacg

SEQ ID NO: 118454 - RNA, 74 nt, Homo sapiens
gggcaggaacgcacagaaggcccaagaacgaaagagacgcacaagaaccaaacagaagaggccaccaagcgaca

SEQ ID NO: 118455 - RNA, 100 nt, Homo sapiens
gacgcaggacgggccaagggagcacccaagaccaccggacaccaaaagaaaggaaccagccagagcggccccagccccccgccccgagagggccccgccg

SEQ ID NO: 118456 - RNA, 61 nt, Homo sapiens
gagcccaagaacaaagcgccccaaaagagagcacaagccgggagaggcaggaggaaaggcc

SEQ ID NO: 118457 - RNA, 74 nt, Homo sapiens
aaagacagaaaaccgaggcaccaagccggccagcaagacccgagcccagaaggagaaaagacagcaaaacaaaa

SEQ ID NO: 118458 - RNA, 78 nt, Homo sapiens
gacccgagaacaccgagacgcacagaaggggccgcccgaaagaagcccggaggggacggagcaggagaaagcaaaggc

SEQ ID NO: 118459 - RNA, 60 nt, Homo sapiens
agggagagcgccagagaaggaaaagcgaccggaaaacacgcaaaaaaaacacaccgcggc

SEQ ID NO: 118460 - RNA, 89 nt, Homo sapiens
ggccccagacggaaggaagacccccggccgcagacggcgcacacggccagccagagaaagccacaccaagcgggccccagcaccggccc

SEQ ID NO: 118461 - RNA, 81 nt, Homo sapiens
cggggagcgcccgcgacagaggagggaggaaaacaaccgagggcagaccaggcccacccacagccaaaacacccacccagg

SEQ ID NO: 118462 - RNA, 56 nt, Homo sapiens
agcccacagcgacagggccccccgccccccccgcagcgcgcagagcccggccaaga

SEQ ID NO: 118463 - RNA, 78 nt, Homo sapiens
ccagagagacaagccccaaggagcccggccccacaccggcacacagcaacaccagaaccgcaccgccgcaccagggac

SEQ ID NO: 118464 - RNA, 61 nt, Homo sapiens
ggaccggcccccagcaagccccaggaggaggcaaaccaaagcgacagcaagcaaacagcag

SEQ ID NO: 118465 - RNA, 77 nt, Homo sapiens
cgcggagagagcgggcaggggggacccacagaggaaaaggaaaggaaacagaagacgaagcacggcaaaccaccagc

SEQ ID NO: 118466 - RNA, 73 nt, Homo sapiens
ggccccgcagcgacaacaggaggccggaagacccaaagcgagagcccgagcgaagagaggaaggacaggacaa

SEQ ID NO: 118467 - RNA, 49 nt, Homo sapiens
ggcgacccacccaaccaagcggagggacagacaagagggagcaccggaa

SEQ ID NO: 118468 - RNA, 74 nt, Homo sapiens
aaggacggggagacaaaagcggaacaaaagagcccaaagaaccaaaggcaagaaccggagcaggagaaaagccg

SEQ ID NO: 118469 - RNA, 83 nt, Homo sapiens
gcaggcgcacggagacccgccggcagccagggagaccagggggcaggggaggagcgcccaggcgaccggcgaacaggcccccc

SEQ ID NO: 118470 - RNA, 81 nt, Homo sapiens
aagcggagggagaacgcaagagcgaagaagcaggggagaggccgagcgaagaaccagcggccaaggaggccagaccaagac

SEQ ID NO: 118471 - RNA, 61 nt, Homo sapiens
agcacaagccaaggacgcaggcggggacaggcccaagcgggccaagggaagaccacggaac

SEQ ID NO: 118472 - RNA, 43 nt, Homo sapiens
gccccgagagccgggacacagggccccggcccagaaggccccc

SEQ ID NO: 118473 - RNA, 73 nt, Homo sapiens
acagagcggggaacaagcacccacgcggaaacacggcccagggaaaaagacaacaaacgggccagagaagaag

SEQ ID NO: 118474 - RNA, 67 nt, Homo sapiens
cggaccacccccacgaacgaggggagacgaggacagaaagcgggacacaagcaggagcacagacccc

SEQ ID NO: 118475 - RNA, 78 nt, Homo sapiens
accaagaggaaagggggccagcaacccagacgcccacaggacaacgccgaaaagcgaaaagaaacaagccgcggcaac

SEQ ID NO: 118476 - RNA, 72 nt, Homo sapiens
ggccaccgcgcacccacgaacgcccaccccccgaacccagccgcaccgaaggacaggagaaacaggggccaa

SEQ ID NO: 118477 - RNA, 73 nt, Homo sapiens
ggccgcccgcccaaggcaggaagaggggccgcaaagaagacgggacgaagcggggaacgcaccgaacacaagg

SEQ ID NO: 118478 - RNA, 65 nt, Homo sapiens
gggacccggccagaggaaagaacccgagggacaagagaaaaaaagggcgggcgaacaaaaagagc

SEQ ID NO: 118479 - RNA, 67 nt, Homo sapiens
ccccgccgcaccaaaggcacaacagcagcccagcgacggaaagcacggacaccccccaaggaaaaga

SEQ ID NO: 118480 - RNA, 87 nt, Homo sapiens
cgcacccgcccggcccgacacggcgagccgagcgcggcggcggcccacgcgcagcgacagggagagacagaagcgaaggggacaggg

SEQ ID NO: 118481 - RNA, 79 nt, Homo sapiens
ggcagccgcaccgccccccccggagcgcggccgggggaaccaaggcccccgaggaggacaaccaccaccagcgagcaaa

SEQ ID NO: 118482 - RNA, 65 nt, Homo sapiens
gccgaagccccgccagcccagcaaagcagacggccgcacgcgacccgaagagaggaacaccgggc

SEQ ID NO: 118483 - RNA, 86 nt, Homo sapiens
aggaggcgcgaggagccggcgcggcgcagcccacggcgcaggcccacggagcgcagccgccgagggaggaggaaacaggaaccaaa

SEQ ID NO: 118484 - RNA, 75 nt, Homo sapiens
gacgagcgaagaagcggaggcgcgacccaacagcacgcccccaagaaggcggagccacacacccccacaccaagc

SEQ ID NO: 118485 - RNA, 76 nt, Homo sapiens
gaccacagacccacagcgaaagcaacagggagaagaaaagcaacacagcgaccagaaaaaacagggagccaccagc

SEQ ID NO: 118486 - RNA, 94 nt, Homo sapiens
aggcgacgcacaggcgcaagacacaccggaggcgacggccaggccacaggggacgggggaggacaggagacaggaagagagaggaggacagagg

SEQ ID NO: 118487 - RNA, 75 nt, Homo sapiens
agcaacagagaggggagaacccacaggaaccggaaaaagaacagggccggagggaccccagcaaacgaacaagag

SEQ ID NO: 118488 - RNA, 78 nt, Homo sapiens
ccgaagaggggcggcacccccggacaccggaacacgggggcaacggcccggagggacgagaccccccacggggcacga

SEQ ID NO: 118489 - RNA, 69 nt, Homo sapiens
ccccaaccaccaggaggaaagcccagagagggacaccccggcaaaaaacccgcaccaaaagagcaaaaa

SEQ ID NO: 118490 - RNA, 67 nt, Homo sapiens
agacaccccgcccgaggagcccagccccaagcagcacaagaccccgcaaaggcggcaccgaaaaacg

SEQ ID NO: 118491 - RNA, 76 nt, Homo sapiens
cgaagccgggcaggaaacgagggccaaccagggcaacagggaggaagcgacaacccaaaacagggagggccccgac

SEQ ID NO: 118492 - RNA, 77 nt, Homo sapiens
acccccaccagcggagcgaccggagaccacccaccgccacgaggaggggcccaaggaccaagccgacacgcaccgcc

SEQ ID NO: 118493 - RNA, 39 nt, Homo sapiens
caacgccgggacagcgcaaggaggggcgcaaaacgagaa

SEQ ID NO: 118494 - RNA, 72 nt, Homo sapiens
ggcaggccacaaagccacagagaagaggaagagagagagggcccaaaccaccagaaccgaagaagagaaaac

SEQ ID NO: 118495 - RNA, 113 nt, Homo sapiens
ccccagcagaaagcagaagccacggagaaaaacggccaagaggcagaccaggaaaggaggacaaaagagccgcaagaccggggccaaccacccaagacaagcagcgggaggca

SEQ ID NO: 118496 - RNA, 76 nt, Homo sapiens
gcggaaacgcccacgggacaggacacccggcccagcaagggcaaggggggccacaccgaaccagcacgggaggcga

SEQ ID NO: 118497 - RNA, 66 nt, Homo sapiens
ccggcagaacaccccagcaccccaaacaccgcggcccagcaccaggaaaagcccggaaaagcagcc

SEQ ID NO: 118498 - RNA, 53 nt, Homo sapiens
cgccaggacgccgacgagccagccggccagccaggggcacagaagggaccaca

SEQ ID NO: 118499 - RNA, 74 nt, Homo sapiens
aacgcgaccaaaaggccagggcagaggaaaacaagaacagccggcccagcccaccccaggcccccccagcccag

SEQ ID NO: 118500 - RNA, 37 nt, Homo sapiens
aggcacggccacccacaaaaggaccaacccaacacaa

SEQ ID NO: 118501 - RNA, 83 nt, Homo sapiens
ggagcagagcgacagcggcgagcagaacacggcgagcgggacaaggccgcagcacagccaccaaaacggagaagagagaaaac

SEQ ID NO: 118502 - RNA, 93 nt, Homo sapiens
cgcgagcagagcggggaaggcgagagaggcgcagggggagcacagccagaaggggaggaggagccgaggacgcggaccaaaaccaaagacggc

SEQ ID NO: 118503 - RNA, 81 nt, Homo sapiens
gaaagagagccacgaaccacggcacgacagcgggaaaaggggcacaggagccaagagaaacgaaaaaggcagaagaacgca

SEQ ID NO: 118504 - RNA, 64 nt, Homo sapiens
gggagagcagggggagaaagaaacagaagaggaggaaaagcaaagagcaaaagcaagaagaaga

SEQ ID NO: 118505 - RNA, 80 nt, Homo sapiens
ggggaaggacgagcaccgaggcccccggggcgacggcgcgcagaggggcgaacggggcggggggcccagagggggccaag

SEQ ID NO: 118506 - RNA, 88 nt, Homo sapiens
caaggagccaccagcacggaccaggaggcgagcaacaggcgcgcacagagcacaccccgggagcccacccccaacagcagcaaggaaa

SEQ ID NO: 118507 - RNA, 52 nt, Homo sapiens
cgcaaaagacagagcgaagcaccaagccaggagaagggagacgggcaagacc

SEQ ID NO: 118508 - RNA, 59 nt, Homo sapiens
cgccgaggccgcggcgccaaaccgaggggccagcagacccagcggggcggagcagggag

SEQ ID NO: 118509 - RNA, 42 nt, Homo sapiens
ccccgggaggggcgccccagcccagagaaagaggaggagcgc

SEQ ID NO: 118510 - RNA, 77 nt, Homo sapiens
ccgcccaggggccaggcgaagcacgagcagaccggcccgaccgcccacagacccaaacaaagggccgcaagagacac

SEQ ID NO: 118511 - RNA, 74 nt, Homo sapiens
cgagcgcgggcaacaaggcgcagcgaggaggggaagccccccgcaggaccagggaaagaggagaaacccgggag

SEQ ID NO: 118512 - RNA, 76 nt, Homo sapiens
gaacggagacaaaaacggcccggagaggaggaccaggaccgaagagggcggaaccacccaggaggaaggacgcgga

SEQ ID NO: 118513 - RNA, 54 nt, Homo sapiens
gacgcagggcgcccccgcaaggcagccgcggagcccgacacaggcccaccggga

SEQ ID NO: 118514 - RNA, 70 nt, Homo sapiens
aagccgcccacggcagagagagcagccggcagagacagacagacggggccgccggagggggggccgagaa

SEQ ID NO: 118515 - RNA, 68 nt, Homo sapiens
cacaaggggaaagagaaaagagcaccagacaagaacgccccccgaaccacaaaccgacgagcccgcac

SEQ ID NO: 118516 - RNA, 78 nt, Homo sapiens
acaggagacagacaccacggaagcacaacccaaaacggcacgggggcgcaagaaccaaccgcagagccggaaaaacaa

SEQ ID NO: 118517 - RNA, 53 nt, Homo sapiens
caggaccggccggggacgaaagcgcaccggaccgggcgaggccaccccgaggc

SEQ ID NO: 118518 - RNA, 59 nt, Homo sapiens
gagccaacgccaggcgccgcccacagagcgaccaaagcagggcacccccgaaggacagg

SEQ ID NO: 118519 - RNA, 74 nt, Homo sapiens
cggacacagacaccaagggaggccacagagacaagagagagggaccaaaagagcgcccgacacagcagggcgag

SEQ ID NO: 118520 - RNA, 77 nt, Homo sapiens
cgaagcacgacacagaaggggaggggagggaaaggcccaggaaaaaggcgagaacgcggacaagcaaacaaagagga

SEQ ID NO: 118521 - RNA, 84 nt, Homo sapiens
ggaggggcccgcaggaaggacggaccaggggcagcccgacggagcagcagcgccgggaaggaaagcacacaggacagaagcaga

SEQ ID NO: 118522 - RNA, 75 nt, Homo sapiens
ccagccggaagcccgagggcagcgcccacggccgcgaccggccgacagaagcgaaggggacagggggagaaccgc

SEQ ID NO: 118523 - RNA, 69 nt, Homo sapiens
aaagaccgccgcccagccccaaagagcgagacacagacagaaaaagcacagaaacgcggaacagagagg

SEQ ID NO: 118524 - RNA, 70 nt, Homo sapiens
ccaggacgagaagcgaaggagagagcgcaagcagaacaaggggagagcccgacgcagaacagcggagccc

SEQ ID NO: 118525 - RNA, 74 nt, Homo sapiens
ggaacggaaacgccggccaaaccgaacacaccaagagagaggagcgagaggaagcggaagaaaaccaacaaagg

SEQ ID NO: 118526 - RNA, 75 nt, Homo sapiens
cgacggaccccaccagaaccaggcccaagccgaaccgggagaagaccccggcgcgggaacgggacacagagccac

SEQ ID NO: 118527 - RNA, 63 nt, Homo sapiens
gcccgccaagcaagcgagccgcagcccccaagagacgaggacgcgcacaggaaaggacgcgga

SEQ ID NO: 118528 - RNA, 59 nt, Homo sapiens
aaagccccacaagagccaccaaaaacagaaagaaaccaggcaccaaagggagcaaagag

SEQ ID NO: 118529 - RNA, 80 nt, Homo sapiens
accagaaccggagcaggaggcgcacaacacccagaaagacaacgaaacggcaaaccgagccacgcaaaagaaaaggacgg

SEQ ID NO: 118530 - RNA, 74 nt, Homo sapiens
aggacgccacgcccggggaggggagcaaaaaagcccgacgccacccccagggccagaccggaaccggacacgga

SEQ ID NO: 118531 - RNA, 62 nt, Homo sapiens
gaacccagacagcaaggaacccaaacaaggcgggagagaggggaaggcgcggccacccgcac

SEQ ID NO: 118532 - RNA, 79 nt, Homo sapiens
ccgcgccggcgccccggcagacaacagggagaccccacgggacaccagcccaccggccgaggcggggccgaagaagacc

SEQ ID NO: 118533 - RNA, 85 nt, Homo sapiens
cgcgaccaacgaaaagagaaggccgggacagcagaaaacagccagcagaaaaagccaaaaagcaagcggacaaaagaagaaacaa

SEQ ID NO: 118534 - RNA, 91 nt, Homo sapiens
acaaacccgagaggcggccgcagcaaagccagccaaagaaacggcaagagggcagaagaaagaaaggaaagagagggacaggcaaaaaggg

SEQ ID NO: 118535 - RNA, 65 nt, Homo sapiens
aaaaggaagcgcacaaacagagaaacaggcaagaaaccgggagaagcagaacacggacccaaggc

SEQ ID NO: 118536 - RNA, 75 nt, Homo sapiens
cgcaaggcccaggcgggcgacaccgggccagccaagggcacgggacgggagagccaaaccagaggacagcgcagc

SEQ ID NO: 118537 - RNA, 77 nt, Homo sapiens
cgcagccacaacaccggcaggaaccaccaggacagaagcaaaaagcggaaccacaagaagaaagcaacgacaagaac

SEQ ID NO: 118538 - RNA, 74 nt, Homo sapiens
aagcagaccgagaaacccggagaaagccacccagagaagagagaaccacaagagaacgagggccaaagccaacg

SEQ ID NO: 118539 - RNA, 83 nt, Homo sapiens
aagcacaccaagagcaaggaaagacggcaaagaagagaaaggagaaccggagagagcacccaccacggaagagaaagaagaag

SEQ ID NO: 118540 - RNA, 74 nt, Homo sapiens
gagggagagaggaccccgggacacgaaagccaggaaaggaagcgaaagggggcagacagaagagagacgagcaa

SEQ ID NO: 118541 - RNA, 66 nt, Homo sapiens
cccggcacgccacggcgccccgcaaggacccacgggagacagaagggaaggacgccagccaacccc

SEQ ID NO: 118542 - RNA, 62 nt, Homo sapiens
caaccacggcggaaccagagcccaaaacccacagcccgggagaggaaagcgcgcaggaagaa

SEQ ID NO: 118543 - RNA, 73 nt, Homo sapiens
ccacgcaacccgcccccagaaagaaagaagcagaaaaccagaaacagcacaaggcccaggaaaaaagcacgga

SEQ ID NO: 118544 - RNA, 86 nt, Homo sapiens
cgaaaacgcacggagcgggcccgggccagaggcagaaaacggacggaagaaaaggcggccgcgagacaggagggccaagaagaagg

SEQ ID NO: 118545 - RNA, 75 nt, Homo sapiens
gacgcgccacggagagacacggcggggggggaccagaggacaagacaaagggagcaagacaagccaaagaggaaa

SEQ ID NO: 118546 - RNA, 62 nt, Homo sapiens
gcaaaacccagaggagggaccaaggccccagcgcaaccagggaacccaaaccaagcacaagc

SEQ ID NO: 118547 - RNA, 76 nt, Homo sapiens
agcccagggcgacggcagcgaaccggcgcaggaggccggggggcagcaggaggccccgccacgggggcccacagag

SEQ ID NO: 118548 - RNA, 117 nt, Homo sapiens
ggccaccgcaagcccgcccccgggacaagcaacccgcccagcccccgagaggagaaacagccacagaccagaggcagccggagcaggcgcggcggcggcacaccccacaagacccgc

SEQ ID NO: 118549 - RNA, 73 nt, Homo sapiens
cggcgcggaagggagcgccagcaggccgggcgcagaaacagcggaagcaaaaacagaacgggagcagagagaa

SEQ ID NO: 118550 - RNA, 57 nt, Homo sapiens
gggacgggcggggcgaggcaagaacggaagcacgggcggaggaaagcacaagcagag

SEQ ID NO: 118551 - RNA, 51 nt, Homo sapiens
agggagaccccaacggcaagaggccagcaacagaagaaagcaagcaccggg

SEQ ID NO: 118552 - RNA, 74 nt, Homo sapiens
ggaaaaaaaacaccaaggacgagaggcacccccagacgaagacaagacacacagagaaacgccaggcggccaag

SEQ ID NO: 118553 - RNA, 75 nt, Homo sapiens
agcacacaaaacagcaagccaggacaaaaccaggcagaaccaacacgaacccaagcacaaacaagaaaacgagca

SEQ ID NO: 118554 - RNA, 81 nt, Homo sapiens
cagccccacccaacccgccagcgagcaaaggacagcacagcgcaagcacccaccagcacagcgcaccccccacgggcagca

SEQ ID NO: 118555 - RNA, 84 nt, Homo sapiens
cgaaaggaagcaagcagcagaagagccaaggaaaaacagcaagaacccaaaagggaggagacagcaaggaagaagaaaagagag

SEQ ID NO: 118556 - RNA, 68 nt, Homo sapiens
cgaacgcagacgaaggccacagaagacgacggacagagagacacaggacaaaaccacaaggcaagaag

SEQ ID NO: 118557 - RNA, 61 nt, Homo sapiens
gcagagaacccaaaccgagagccagaacgaacaagccaacaggaagcgcccccacgagacc

SEQ ID NO: 118558 - RNA, 76 nt, Homo sapiens
ggccggcgcggaagggggccggcgaggggccggaaacgcaggggccagggagcaagcaccgagacccagaacaaag

SEQ ID NO: 118559 - RNA, 78 nt, Homo sapiens
cgccccgcggccaacagagccggagccaaaacacaccggaagaccccaccacccccgagagaaggccccgccaagaga

SEQ ID NO: 118560 - RNA, 69 nt, Homo sapiens
cgcgcgcgcaggcgcccagcgcgaagggaccaggcaacggggaccccggagcccagaagacagagggcg

SEQ ID NO: 118561 - RNA, 94 nt, Homo sapiens
gggaaacagccaaaaagacgaccaacgcagggcggggagaaggcaccaacaggagccccaaggcagcgaaaccaaagaagaaggcagaagccag

SEQ ID NO: 118562 - RNA, 54 nt, Homo sapiens
caggcccgcaagaccgaaaggcgcagggagcaggagaagcggagcgaaggggcg

SEQ ID NO: 118563 - RNA, 76 nt, Homo sapiens
agagaacaccaggggcagacccagccggcagcagccaggcggagaacaacaaacagacaccaaaggagccgacccg

SEQ ID NO: 118564 - RNA, 74 nt, Homo sapiens
aacgaagaggcagagagcaaagaacccccaagcaggaagggagaaaaccccaccccgggcaaagcaggaaagaa

SEQ ID NO: 118565 - RNA, 63 nt, Homo sapiens
cacccgccaacacacaagccaaaagaagaacagacaaggaggcgcagaggcggagcaaaagaa

SEQ ID NO: 118566 - RNA, 77 nt, Homo sapiens
aaagcaaaacggcacgggagaggcgggagagaagcaacgggaaccaaccaaacgggagcgaacgcgaagcacaaccc

SEQ ID NO: 118567 - RNA, 76 nt, Homo sapiens
gggcggccaagcgcggaagggcagcgggcccacggcggccagaagaaggggacgggggacaagggggcacaaggag

SEQ ID NO: 118568 - RNA, 83 nt, Homo sapiens
acaggggccccgaagaaccccacaagccacaggaggaggcagcagagaaaccaggcggggaacaagccagcagcccaaggaga

SEQ ID NO: 118569 - RNA, 74 nt, Homo sapiens
gcagagcagcaaaacggggaccaaagaacccgcgaagcaggacgcaacacagcaaccaaccccaggcaaaagac

SEQ ID NO: 118570 - RNA, 92 nt, Homo sapiens
ggacaaggagaagccacgaccgcgcggagcaggcggaggcggaaagaaagccgcgaggacaaggcaagcagggcgacgcaaggccgaggaga

SEQ ID NO: 118571 - RNA, 63 nt, Homo sapiens
cgcccaagcacgaccaggggacagcacagaaggccggcaggcagacaggagcgggagaggcag

SEQ ID NO: 118572 - RNA, 88 nt, Homo sapiens
cgaaaggaagcaagcagcagaagagccaaggaaaaacagcaagaacccaaaagggacacgcccaccaagaaagaaccggaaaggggac

SEQ ID NO: 118573 - RNA, 68 nt, Homo sapiens
cgaaagcgccccggaagaccgcgccgccagccgccgaagaaaaggagagaggcagaccaaaacgggcc

SEQ ID NO: 118574 - RNA, 74 nt, Homo sapiens
aagaaggacaggggccgcagccaaggaaggaggccgcaaacagacaggaagagacaacggcaagcggagaagag

SEQ ID NO: 118575 - RNA, 87 nt, Homo sapiens
gcggagcggagaacgaccggcccgccaagaccagagaaggaggagggaccacgcgcgagcgccacgcagagccccgccaggaagaca

SEQ ID NO: 118576 - RNA, 80 nt, Homo sapiens
cgcgggggcgcggagaagaggaccaggaaagaacccaggagaaacgagagggacagcaaggaagacgccagagagcggca

SEQ ID NO: 118577 - RNA, 69 nt, Homo sapiens
ccacaggaggacgaaccacgccgcccggagggaaaggacggcaaaaaaagcacaaggcaaacagggcaa

SEQ ID NO: 118578 - RNA, 73 nt, Homo sapiens
gcacaaccacagcaagagcaccggcgaccgcaccacaagggacgagaccaaacggaagagcaccgagacaacc

SEQ ID NO: 118579 - RNA, 73 nt, Homo sapiens
gagcagaggaaaaacggcccgcgcccgccagccaggccaccccgggaacgaccagcacaccagccgcagacaa

SEQ ID NO: 118580 - RNA, 83 nt, Homo sapiens
gaggaagaggaaagaaaaggagcagggaggcccaccaggcaagaacaacccaagaaggacagcgcgacagaaggacagcagcc

SEQ ID NO: 118581 - RNA, 72 nt, Homo sapiens
acagagccaaaggaccaccagcagaaggcacccaggggcggacccggcagccccaccagcggcggcgcacag

SEQ ID NO: 118582 - RNA, 81 nt, Homo sapiens
cggaggccgaggacccggggccgaggagcgggaagaggcgggaacaaaacaggagcgaggacacgcaccagcggacgggga

SEQ ID NO: 118583 - RNA, 80 nt, Homo sapiens
cgccgcagcggcgcagcccacgccagacgaccccacccgcgccgcgacccgcccgcagcgggacaagcagcagccgcaca

SEQ ID NO: 118584 - RNA, 111 nt, Homo sapiens
ccggagcacgcgcgggcccggccgggaccgagggaccaggccaccgaccagaggaaagcaagaacccgggcaccccccccccggcccgaccgcccgcggccggaccgcacc

SEQ ID NO: 118585 - RNA, 89 nt, Homo sapiens
caaggaacagcgacaccaggccagccccaaagcggcggagaacccggacgggaaggcgaggagcggaaggcgagcggagcggcggagga

SEQ ID NO: 118586 - RNA, 61 nt, Homo sapiens
ggccaggccgccgccgagccgagccccggcacaaagcagaccgccccacgggcgcgcccgc

SEQ ID NO: 118587 - RNA, 78 nt, Homo sapiens
ccagccccaagcagcgggaacagcaaacagaagaacagaagaacccacagcgccgaggagcacgaacagaagggccag

SEQ ID NO: 118588 - RNA, 81 nt, Homo sapiens
agcaagagcccggacaccggaagcgggaaagaacagccacaggaagagggaacaaagaaggaaacaggagaagcgggagaa

SEQ ID NO: 118589 - RNA, 79 nt, Homo sapiens
cggcgcccgggccggccaggacgacccggaccacaaaacaaaccacccaacacaagcaaagaccacgaagccggaaaag

SEQ ID NO: 118590 - RNA, 78 nt, Homo sapiens
agcggaggaggcggcccggcacccgacaccaggggcccagccggcagcggcccagagccgccaccgcaagagaaaagc

SEQ ID NO: 118591 - RNA, 84 nt, Homo sapiens
cacaccaccggacaaccgacaaaacgaccgaaaaaagcaacgaggaaaagaaaacccaggcacgaaaacaagagcagaagcacc

SEQ ID NO: 118592 - RNA, 76 nt, Homo sapiens
gcccacggcgggcgcgcccagagggcggagagacggggcgacggggagaggcaggcgaggggacgaccggcaccgc

SEQ ID NO: 118593 - RNA, 52 nt, Homo sapiens
gagggaccgacaagagaaaaccaggcccaagggcagagaaagaccgaacggg

SEQ ID NO: 118594 - RNA, 63 nt, Homo sapiens
cagccaggacaccggaaccgggaaaggggaacaaggaagggagcacacaaagaggccaaaccc

SEQ ID NO: 118595 - RNA, 61 nt, Homo sapiens
cacaccaggcgggccaggcgggaaccagacggcaccaagcaccgagacaaccaagcaaggg

SEQ ID NO: 118596 - RNA, 65 nt, Homo sapiens
ccggggcagggccgggagagcgggggacgagcgcaggacaggggggccacacagggaaccagacc

SEQ ID NO: 118597 - RNA, 58 nt, Homo sapiens
ggaacggcgaagaggcaccaaaaagaaccgcagacaggcagggcgcaagagaaaacaa

SEQ ID NO: 118598 - RNA, 72 nt, Homo sapiens
gccggcacacggaaaagccacgagccaacccagccaacgccgcacgcaacaggggaggacgcgagcggaaga

SEQ ID NO: 118599 - RNA, 100 nt, Homo sapiens
gagagcgggccgaaggcccggcccacacgggaagcgcgggaagggaaaggagcagagacgcccagccccaccccccagcgcgaacacagcccacgagagg

SEQ ID NO: 118600 - RNA, 87 nt, Homo sapiens
cgagacacccgcacggacccgggcgcaggggacaggaagagcacccaagcgcaagcaaaagaaggcccccccagcagagccacccca

SEQ ID NO: 118601 - RNA, 67 nt, Homo sapiens
ccagaagccggagacccacgcagcaagaacgacccagccacagaacaacagaggaggagagcaacca

SEQ ID NO: 118602 - RNA, 102 nt, Homo sapiens
gggaccagccagccccccaggaccacagccccgaccgagagaaccagcgccaggagaggggagaaacagcaggagcacgagggcagggcgcgggagcaccgg

SEQ ID NO: 118603 - RNA, 90 nt, Homo sapiens
agcacaagcacccgcccgggacaccagcaccagaccacacggggaccaggaagaacaagcacgcagggaggccagggggagagagcgcaa

SEQ ID NO: 118604 - RNA, 58 nt, Homo sapiens
agagccgcacaagcgccggccaaggccccgagccccggccccaaagacccaaaacaga

SEQ ID NO: 118605 - RNA, 35 nt, Homo sapiens
cccgagagcaggaacagggccgcaagcacggcgaa

SEQ ID NO: 118606 - RNA, 58 nt, Homo sapiens
cacacccaggaaaagaccaggacggacaagcacagccggaaggccggaaaggaaaaac

SEQ ID NO: 118607 - RNA, 90 nt, Homo sapiens
gggcggagccgccgccgcgccgcgcagaaggccggggccggccagaagcgggcggcgcgggggagaggcacggagcgcggacgcccagga

SEQ ID NO: 118608 - RNA, 115 nt, Homo sapiens
gccgagacaaaggcaccaggccaccacagaaacaaaagcaacaaagaggggaggggggaagacagggcccagcaccacaggacgggccgggaagccgccagcagggacagccggg

SEQ ID NO: 118609 - RNA, 81 nt, Homo sapiens
gaggccccccagccacgggaacacaccccccagagcccagcaaggagggacgaggagaagagggcgcagggcgaggcagcg

SEQ ID NO: 118610 - RNA, 56 nt, Homo sapiens
caacaagacccacggacgacagagaacgcagaagaggagaccgaacagccaagagc

SEQ ID NO: 118611 - RNA, 85 nt, Homo sapiens
agcggagaggccaccccaggaaggagggaggccaccgaccacgggccgacggaccccacacagcgacgggcaggccggagagcag

SEQ ID NO: 118612 - RNA, 83 nt, Homo sapiens
accgaccgcaacagaacggacccggaggaaaagaaccaggagggaggcacagaaccgaaacagcagagcccgggaccggcaga

SEQ ID NO: 118613 - RNA, 79 nt, Homo sapiens
agaaaaagcaacaccaaagcacaaagaagcacaggccaacgagaaccgacaagagcacgaaggaagaaaggggaggacg

SEQ ID NO: 118614 - RNA, 71 nt, Homo sapiens
gcgagaaaacaacagcaaccccggcccaaggccgcagcgaaggggaaaaggaagcgacaaggacaaccagg

SEQ ID NO: 118615 - RNA, 78 nt, Homo sapiens
cgaccagcggagggggagccaaccagaaaagggcggggcggaacaagaggacgggccaaagggggaaacacccaccgg

SEQ ID NO: 118616 - RNA, 65 nt, Homo sapiens
cgaagaccccgacaggaacagacaaggggccaccacagagcccgcagggacacagcagaacaagc

SEQ ID NO: 118617 - RNA, 82 nt, Homo sapiens
gcaccacgacggcgccacaccgagcgcgaggcgcggagagcaacgccgggacagcgcaagggggggccccagcccggccgaa

SEQ ID NO: 118618 - RNA, 77 nt, Homo sapiens
cagcaaccaaaaacgagcagaagaaacacaagcaaggaaggaaagcagagaaagacagcaaagaaaaggagaagaaa

SEQ ID NO: 118619 - RNA, 87 nt, Homo sapiens
gcagcaacagcgagaccggggcgaggaccccgagccagaccagacccacaccggggcagggccccacgagacacagccccccagcac

SEQ ID NO: 118620 - RNA, 75 nt, Homo sapiens
ccgggagaggagcggaggcacccaccgacagaaagagaaccggccaacagacagcccacaccggcaggccaacaa

SEQ ID NO: 118621 - RNA, 67 nt, Homo sapiens
gcggcgcccgcgccacagccaccagagccggcagcaaagagggaacaggacgaaaaagccgaaaagc

SEQ ID NO: 118622 - RNA, 73 nt, Homo sapiens
agagcgcaaacacccccagacaaaggagagaagagacccacgcgagaaccaggcgcgaacgaagaaagccacc

SEQ ID NO: 118623 - RNA, 78 nt, Homo sapiens
gacccaccggagcagagcgccggaaggccagaagcagggccgagcaacacaggggcgggcccgaggcaccaacgcaag

SEQ ID NO: 118624 - RNA, 60 nt, Homo sapiens
cgaggagagacgaggcacacggccggaagacacgaggaggggacggcccgccacaggcac

SEQ ID NO: 118625 - RNA, 57 nt, Homo sapiens
caacaagcaaaacccaaggccagggcgaagacagaggcagggcagcgggacgggggc

SEQ ID NO: 118626 - RNA, 76 nt, Homo sapiens
gaaggcgggggaggagacccacccaaacaagagacaaaaggacccaggaaaggaagacagcagagacaaagccgcc

SEQ ID NO: 118627 - RNA, 76 nt, Homo sapiens
gcgcggccacagcagaccgccgcggccggcccggccccccgcgcacggccagcgcagagagaaaggcagaaggaac

SEQ ID NO: 118628 - RNA, 68 nt, Homo sapiens
cccacccgccgcagcaagcagagaggggcacgacaacaccagaagggaagccgagagaaacacggcgg

SEQ ID NO: 118629 - RNA, 84 nt, Homo sapiens
gcggcaggaccagcgggcgggggcccacgaggggcacccgaggaggaagagggcagggcccacggaaagaagggaaacccgggg

SEQ ID NO: 118630 - RNA, 56 nt, Homo sapiens
gcaaagaacccccaagcaggaaggcagacgccagacacacagccccagcaaccacc

SEQ ID NO: 118631 - RNA, 80 nt, Homo sapiens
gccaggcccggaagcgagggcggccgcgccggcccagaacccacaaacaaagcaccagaaagcagccaaaaggcagagcc

SEQ ID NO: 118632 - RNA, 77 nt, Homo sapiens
gaccagagcgccccggcagaccccaggcgccgcacgcggggcagcccgaggcgcaccagaccgaagccaacgacagc

SEQ ID NO: 118633 - RNA, 37 nt, Homo sapiens
gggaccagcccggcggaagcaggaaacaacagacgga

SEQ ID NO: 118634 - RNA, 65 nt, Homo sapiens
cgcgggcagcagcaggccggaaacaacgaagcaagcccaagggcgcaggggcaacacaaaggcga

SEQ ID NO: 118635 - RNA, 70 nt, Homo sapiens
gcccgcggaggagcgcccgggagcgaggaaccggcccagaacgcaagaaaacaccgaaggcaaaaaagaa

SEQ ID NO: 118636 - RNA, 93 nt, Homo sapiens
cgggcggggcggcggcgcgacagggcaggccaaggagcgccccgccgccggagaaaaggcggcggagaaagcaggaacgggaccggaagaaga

SEQ ID NO: 118637 - RNA, 49 nt, Homo sapiens
aggcgggcccccgaccgcccggagcgcacagccagacaacgacggccgc

SEQ ID NO: 118638 - RNA, 69 nt, Homo sapiens
gggaggcccagggcacacgccagggacaacagcgcgcaaaggcaacgcaacggcccgaccaccaaagga

SEQ ID NO: 118639 - RNA, 58 nt, Homo sapiens
ccgccccccgggccgggaaccaagaccaggacaaagaagacccggagagacaagccgg

SEQ ID NO: 118640 - RNA, 87 nt, Homo sapiens
gcaaagcccgcagcgccgggaagaagccggcccaagccacgagaaggcggaccgaggacgaagggacccacagaaggaggaagagga

SEQ ID NO: 118641 - RNA, 82 nt, Homo sapiens
gagggaggggaaaggcgcaggggaaacaacacgaggaggacggcacaaaaagcaccagcggggaggaacaacgaagagaagc

SEQ ID NO: 118642 - RNA, 59 nt, Homo sapiens
gcgaacagacagaaggagaaaggaggaaaaacagccagaaacagcaccggaggaaaccc

SEQ ID NO: 118643 - RNA, 56 nt, Homo sapiens
aaacacccaaccaggcacagagaaagcgcaagcaaggagcgaaaccagggacggca

SEQ ID NO: 118644 - RNA, 69 nt, Homo sapiens
acagaagaagaccgaaacgccagccggacccaagagccagaaagaagggccagagcaaaaaaaggcaga

SEQ ID NO: 118645 - RNA, 53 nt, Homo sapiens
acacagcagacagccaaagaaaccaggccacccaggggaccacacacgcggaa

SEQ ID NO: 118646 - RNA, 70 nt, Homo sapiens
gacgcaccgagaaaggaaggaaaaccgacgaagacacaaaaggccccagaggcaacagggaagaagcaca

SEQ ID NO: 118647 - RNA, 103 nt, Homo sapiens
ggccagagagaccaccggcggccaggacagagacaccacgggaggaccacgcgaggcaacacaccgaaaaaagggaagcggagaggagcagagacgacaccag

SEQ ID NO: 118648 - RNA, 86 nt, Homo sapiens
ggacgcggcagcccgggagcggcgagggaaaagcgaggcaaggcaggcgggcccgccagccaccgcagaggcgaccccaggacgga

SEQ ID NO: 118649 - RNA, 73 nt, Homo sapiens
cagaaccaaaaaacgagagacagaagccaaagaaaggcacgaaaagacagcagggggagcagcaaagaaagga

SEQ ID NO: 118650 - RNA, 81 nt, Homo sapiens
ccggccccggcccacaggggggggcaaacccgagagaacggggggagccccccagacccgaaaggagacaagaggacagcc

SEQ ID NO: 118651 - RNA, 76 nt, Homo sapiens
acacaagcaccgggacccaggacgccacagaaagcccgccccagacagggccccggcccgcccggaagcgcagcag

SEQ ID NO: 118652 - RNA, 57 nt, Homo sapiens
gggccccagcccagcggcgcgaagcgaaaccggggccaagaggccaggccagaggga

SEQ ID NO: 118653 - RNA, 85 nt, Homo sapiens
gcagaccaggaaaggccaagaggaaggccgcgcgggggcggagcggcgacaagcagggcaccccccgagcccagcccacacaccg

SEQ ID NO: 118654 - RNA, 81 nt, Homo sapiens
ggcgcagccgccgggcccccacaggccggcgcgcccaaaggcccgcgccgacgccgcaggacgcagggaaggagagcgaag

SEQ ID NO: 118655 - RNA, 74 nt, Homo sapiens
acagcacaaagaagccgagacaaacggcaccaagagggggcgccacagagaaagaacccaaaacgaaaccccag

SEQ ID NO: 118656 - RNA, 72 nt, Homo sapiens
cacaaccacaccccgggcaagcgaccgcccagccccgaacagggaggccgcacagaggaggagcaccaaacc

SEQ ID NO: 118657 - RNA, 56 nt, Homo sapiens
ggagcacaggcaaccgacgcaaacagcagacggaagaccccacggcaaaaccacac

SEQ ID NO: 118658 - RNA, 87 nt, Homo sapiens
acacgacacaagcggccggggaaggcacacggaagcaggcgaacacggaggcgcgcacgaggcggcggagggcgagccgccgcgcgg

SEQ ID NO: 118659 - RNA, 70 nt, Homo sapiens
aagaccaccacggagaacagaagcacggaagaagcgcaaaaaacgaagagccaaagccggcggacagcag

SEQ ID NO: 118660 - RNA, 72 nt, Homo sapiens
gggacgccggagacggcagacaagcagcggcacaacgagagcgacaaacccagccaggggggggagacagag

SEQ ID NO: 118661 - RNA, 71 nt, Homo sapiens
agaccaggaaaaggagcccggaggaagaaaggacggaaacagaacccacgcacccagcgggcagggagaac

SEQ ID NO: 118662 - RNA, 58 nt, Homo sapiens
gcggggcgcgaacaccgaggcccgggcaggccacggaaagggagcagcaccggccaca

SEQ ID NO: 118663 - RNA, 77 nt, Homo sapiens
ccgaccgagacgggcggagaggagaagggggacgacaaagcgacaacagccgagcggagagggcaagcaagaaggcc

SEQ ID NO: 118664 - RNA, 83 nt, Homo sapiens
gcagcgaaaggacacgggagaaagggagccgagcgagaccacgcaccacgggcgacacgagaggcgagggacgacagagcaag

SEQ ID NO: 118665 - RNA, 74 nt, Homo sapiens
ggcaggaccgggcggaggccgccaagacggggaaccagaagaggccaaccagcacgaacgccagcagcacggca

SEQ ID NO: 118666 - RNA, 82 nt, Homo sapiens
acggaccccaaggaagccacggcagacacacaacccgacccgacgaccacaggaaggaggggcaggaacagcagaggagacg

SEQ ID NO: 118667 - RNA, 64 nt, Homo sapiens
cccgcgccgggagaaggcgccccgcgccagagcccccccgcccccgcgggggcgggagccccag

SEQ ID NO: 118668 - RNA, 86 nt, Homo sapiens
ccccaccccagggagccggaggcgggcgcgccccaccaccgccccaccaggagggcccccgaggaccgaaccccggagaagaggag

SEQ ID NO: 118669 - RNA, 72 nt, Homo sapiens
caacaccggcaggaaccaccaggacagacgggaccagcgacgacgcagaagagaggcacagagagaaagaag

SEQ ID NO: 118670 - RNA, 36 nt, Homo sapiens
gccaacacccaagacacaaaccacaagccgccggga

SEQ ID NO: 118671 - RNA, 79 nt, Homo sapiens
ccgggcggagccggacgagcgcggagaaggagggggcagagcacggcaggcagaaggggccaacccgggggaacgcacc

SEQ ID NO: 118672 - RNA, 80 nt, Homo sapiens
cccggcccccgccccagcccgccggcggcggcggggaagccaagagccggaaacagcagcccgagccgagggcccccgag

SEQ ID NO: 118673 - RNA, 75 nt, Homo sapiens
cagacagcagagaagccaccagcaccaggagagacacccaggaacacaacccacaacacaccccggaaagacagg

SEQ ID NO: 118674 - RNA, 74 nt, Homo sapiens
gggccagggcggagaacagaccgaggaagccgccgacagacccagcagaaggggagccagccagagagggacgg

SEQ ID NO: 118675 - RNA, 76 nt, Homo sapiens
caccggcacagcggaccccgcccgaggcagcccaaggaccaagggagaagagacccaggaggcagggcagaacccc

SEQ ID NO: 118676 - RNA, 54 nt, Homo sapiens
gaagacgaggccacagacaccgaaggaaggaggcaaggaggccacggggccgaa

SEQ ID NO: 118677 - RNA, 85 nt, Homo sapiens
gacaaggaaagaggaggaggcaaaggacaaagccccagaaaacgggacacagacccccagcccgcccagcggaggcaaggccgac

SEQ ID NO: 118678 - RNA, 59 nt, Homo sapiens
acgaggagccgacacccacacaaaaccgcagccacgaacgcaacgaccgaccagcagcg

SEQ ID NO: 118679 - RNA, 84 nt, Homo sapiens
gacagccaggcccggaagcgagggcggccgcgccggcccagcaggcggacaccgaccgcaggaaggaggaggaggagggagcca

SEQ ID NO: 118680 - RNA, 70 nt, Homo sapiens
agacaggccacccagcggggagcacggcgagcagccaggccaggagagcggcggagaaaccaccacaaac

SEQ ID NO: 118681 - RNA, 75 nt, Homo sapiens
cgagaccagaaaagcccagaagcaagcgcagcgaggggagccaaccccagaagaagagccgaacaagacccaggc

SEQ ID NO: 118682 - RNA, 75 nt, Homo sapiens
ggacaaaggaacagcacagggcgcaacaagagcgacaaacgcaggccaaggaagcgacagccaggaccaggcacc

SEQ ID NO: 118683 - RNA, 69 nt, Homo sapiens
cgcgggaaagggacacaaagcaggagaaagggggccaccaccggagagaccaggaaggaaaagcaaaac

SEQ ID NO: 118684 - RNA, 101 nt, Homo sapiens
gggaacagacgcagggcagggccccgcccggcggggaagggaagaagcccagcggaggcgaacggcccccgccaacacgaggaccccacggagaggcccgc

SEQ ID NO: 118685 - RNA, 76 nt, Homo sapiens
caacggcacggcaggagcacggcccagcgccgggcgcggccacggcaggacaccgccgcccagccacaggaccgac

SEQ ID NO: 118686 - RNA, 78 nt, Homo sapiens
gcccagaaggagcaggagcagccagagccaaagaagccgcagggggacaaccaagacagcagaagaggcccggccgcc

SEQ ID NO: 118687 - RNA, 72 nt, Homo sapiens
cacagcgccgacaacaccgggggaagggaggcaacgaggccaaccaacgccgacaagcaggagccgacccac

SEQ ID NO: 118688 - RNA, 81 nt, Homo sapiens
agccaagggggggggcggccaggccgccacccgcccaggagccggcggggcaccccgagaagcagcaggagcagccaacag

SEQ ID NO: 118689 - RNA, 75 nt, Homo sapiens
gcgcagagggcaggacaacacggcccgcacccagaccgggccaaagcccggcccacaaaggggaagcagcagcgg

SEQ ID NO: 118690 - RNA, 54 nt, Homo sapiens
gacaaaccaggaaaaagccagccggcacaggcgaagcagaaagcaaacggcggc

SEQ ID NO: 118691 - RNA, 81 nt, Homo sapiens
agcggcaccaacacccaaagaagagcccggaacgccagagcggaaaggaagagaacgccggaagcgcaacaccaagacaca

SEQ ID NO: 118692 - RNA, 74 nt, Homo sapiens
agccagcaacaccacgccaaacagaagccagaacgcggacccccgcaggcggggccggggagccccgggccaga

SEQ ID NO: 118693 - RNA, 77 nt, Homo sapiens
aaacgcgacagagagcgcagagccccaggcggagcagggcaggccagaagaccacgaaaccgacaccaggaaagagc

SEQ ID NO: 118694 - RNA, 85 nt, Homo sapiens
gcagcccgacacacggaaccacccagcagagagcaaccgaaggacaaaccaccccgacccaggcaagaaggaaggaccaacacac

SEQ ID NO: 118695 - RNA, 84 nt, Homo sapiens
cggacccgaccacgacacagccacgacccgcaggggaaccaggaaagaaacaacaaggaagcccaggcgcaggagggaccaagg

SEQ ID NO: 118696 - RNA, 72 nt, Homo sapiens
acggcagggcgcccgaacggccgagccaggccccaagacaccagacccaaaggccggcgacagaaaggcccc

SEQ ID NO: 118697 - RNA, 81 nt, Homo sapiens
aaacaagacggggcgccccacagaggggcgacggcccaccacacacgcagggcgcagcaaagaagagggaccacagagcgg

SEQ ID NO: 118698 - RNA, 87 nt, Homo sapiens
ccaggccaaggagggacagggcgccggggaagcgggagagcaccagacacaaggaaggggaggaccccaaaaggcgaggaggcccca

SEQ ID NO: 118699 - RNA, 71 nt, Homo sapiens
agaagacgggcccagccgggaacgcagcgcaacccgaaccacggagcaggacccaggcagaggaggccgga

SEQ ID NO: 118700 - RNA, 72 nt, Homo sapiens
agccccaagccgacggcggcagcaacagaagacaggagagagaacgaaacccaaccaagacccagcacacgg

SEQ ID NO: 118701 - RNA, 58 nt, Homo sapiens
cggaaagcagaagcgcgcagcaacggcggaaacagccaagggacaaggagacaaaggg

SEQ ID NO: 118702 - RNA, 60 nt, Homo sapiens
gagaagagcccagcacaacgaaggaccaggagaacacagcgaaaaagggcggggaaaaaa

SEQ ID NO: 118703 - RNA, 63 nt, Homo sapiens
agacgcagggcgcccccggaaagcgcagaccaggccggaaaaaccccgaaggacgaccaaaac

SEQ ID NO: 118704 - RNA, 74 nt, Homo sapiens
gggagaaaggggggccgagaccgaggcaacggggccccgaggccacggcccggagagggacgcaggcccaggcg

SEQ ID NO: 118705 - RNA, 56 nt, Homo sapiens
cccacagaggggcgacgaagaagaaacacccagggcacacacgggaagaggaaacg

SEQ ID NO: 118706 - RNA, 68 nt, Homo sapiens
aggccgcgagggggaagcgagaccgcccggggaggccaccacggcaccggggccggaggcccgccgag

SEQ ID NO: 118707 - RNA, 77 nt, Homo sapiens
gccaagaggaccaggagcagaagaggaagaggcgacaaagaacagccaagagaccagggagggaaagcacagccaag

SEQ ID NO: 118708 - RNA, 63 nt, Homo sapiens
ggggccaagggacaaggcaccgcccagaaacgaaggaggcccaaccacaaaaggagccgacgg

SEQ ID NO: 118709 - RNA, 72 nt, Homo sapiens
agagggagcgcaggggaagggccgcgagggcccggaacaggggcacgcacgaggcggaaccacaggaacggg

SEQ ID NO: 118710 - RNA, 53 nt, Homo sapiens
caggcaagacccaacgacccggcggggcccaaccaagaccgaacccaagccag

SEQ ID NO: 118711 - RNA, 71 nt, Homo sapiens
ggaaccaaacgaaaggccacccaaggacggacagccagccaaacacacgccagccccacggacacagaccg

SEQ ID NO: 118712 - RNA, 79 nt, Homo sapiens
gggcaagagccacaaagggaccgagaagcgaagacaaggcacgaacgagcaggagcagcaaccgaagcgaagggccggg

SEQ ID NO: 118713 - RNA, 80 nt, Homo sapiens
gcgggcccacagcaggcgagcaacccaaggagacggcgcgggggcggagagggaaagagagcccagcagaccggccccgc

SEQ ID NO: 118714 - RNA, 87 nt, Homo sapiens
acaacaccacaaaaccacagccaagaccagaggacaagacaaagggagcaagacaagccaaagaggaaaagcaaagcccaggggcag

SEQ ID NO: 118715 - RNA, 78 nt, Homo sapiens
cgagccaacacagcgggaggcaaccagcaccagcagagagaaggcaagagaaggcagggggcaggccacagaggcaaa

SEQ ID NO: 118716 - RNA, 110 nt, Homo sapiens
gggaaagcagagcaaaggagcgaacaggaggaggccagcaccacggaggagccagaagaccaagccgagagaaaaggggacgccacggacaccgggaccgaggcccgggc

SEQ ID NO: 118717 - RNA, 53 nt, Homo sapiens
cgcgccacggaggggcagccacccccggagaggagggggcgcagcaaaggggg

SEQ ID NO: 118718 - RNA, 78 nt, Homo sapiens
ggcgcaagcggcgcgccagagcggcacgagggaaggacggcggaaagacgcccggcaagagagccgcacaagcgccgg

SEQ ID NO: 118719 - RNA, 77 nt, Homo sapiens
aggggccaaagggagagggaagccacaacaagccaaagaagaagggcccaaaaaggcagaaggggagaaccgagccc

SEQ ID NO: 118720 - RNA, 77 nt, Homo sapiens
cacacggcggccgcagggcgccggagccccccagaaaaccgagaaaacgggacaaagagccagcccgagcagcaccc

SEQ ID NO: 118721 - RNA, 84 nt, Homo sapiens
agagcaaggagaggcccagcaaacaaaggcaggaagagaaaagggaaccgccgacccaccccagcccaaccacagcaccacacg

SEQ ID NO: 118722 - RNA, 71 nt, Homo sapiens
cacccccaggaccaggcagcacccacagcccccacccggacgcagcacgcaagcagcgcccccccgccggg

SEQ ID NO: 118723 - RNA, 45 nt, Homo sapiens
gagccagaagcccaccagacacaaggccagggagagaagaagagc

SEQ ID NO: 118724 - RNA, 65 nt, Homo sapiens
gcgcagagaagagagcgccaaaacaccaaacacaaagcgacgcgaggaaaaaaaacgacacacaa

SEQ ID NO: 118725 - RNA, 76 nt, Homo sapiens
ccggggacagcccgggcccggcggacagccgcacccgcgccccagcagcgacacgccccaaggcgagaacaaagag

SEQ ID NO: 118726 - RNA, 82 nt, Homo sapiens
ccgccgccgcgggcgccagaaggaagaggcggacggaggagcaggcgagaagagaaggggcgaacggaaaaaagaggcagag

SEQ ID NO: 118727 - RNA, 83 nt, Homo sapiens
gaacaaggagaaagagaacacgcagagccggcgcagagacaaagcaggaggacacaagaagggaggaaaggcggacccaggaa

SEQ ID NO: 118728 - RNA, 71 nt, Homo sapiens
ccccgaaacagaagccaacagaaaggcaaggaccgaaggacggaacaagcgagcggagaagaagagaaggc

SEQ ID NO: 118729 - RNA, 61 nt, Homo sapiens
aaacaccaccaacaaaccgagaccacagcagacacagagacgggcggacacaggccgacag

SEQ ID NO: 118730 - RNA, 77 nt, Homo sapiens
ccccacaagcacaaacgaccaagcacagagcaccagccaagaagcaaggggaacggagggaaagcgacaaacaacca

SEQ ID NO: 118731 - RNA, 80 nt, Homo sapiens
aaaaaacgacaaggaaggccggaaacggaagaaagaaaaggacacgacacggaagcaagagaagccgacagaccacccag

SEQ ID NO: 118732 - RNA, 87 nt, Homo sapiens
aggaacgaggacaacaaacagaagaaggcaccacaagaacaagaccccccgagcaggaaagcccgaaccagagcgcccaccggaaga

SEQ ID NO: 118733 - RNA, 72 nt, Homo sapiens
ggccccccccccggggcccgcgaggagacccgggcgaggcaagaacggaagcacgggcggaggaaagcacaa

SEQ ID NO: 118734 - RNA, 83 nt, Homo sapiens
cagccaggccgcgcgggcccgaggccggaggaacccggacccggcgagcggcgaggaaaaccaccacacaggggaaacaccca

SEQ ID NO: 118735 - RNA, 49 nt, Homo sapiens
ggaagaagaagcaggaaagggaagcaaaccgacaccagcgacacaagcg

SEQ ID NO: 118736 - RNA, 57 nt, Homo sapiens
agacgaagaggaccaggagcaaacagaagggagagagacgaaagggagaggaaaacc

SEQ ID NO: 118737 - RNA, 52 nt, Homo sapiens
gggggcagggagagaagggagccagagaagaaccaggagaaagcaaaccaca

SEQ ID NO: 118738 - RNA, 78 nt, Homo sapiens
cgccaacgccccagcccggccccgcgccgcaccagccgccagagggcggagaacggaaaagcaccaggaagcagagag

SEQ ID NO: 118739 - RNA, 76 nt, Homo sapiens
gagacaggaggcagagccaaacacccagccccagagaaagaaagcccaagaggagaaggagaggagaagagaagga

SEQ ID NO: 118740 - RNA, 71 nt, Homo sapiens
cgagcgcggcacgggccccgggccccacgccaggacacgagaggagagaaaaggggaaggaacaaaccaaa

SEQ ID NO: 118741 - RNA, 62 nt, Homo sapiens
aacagacccacaaccgagcaaagaagagacgaaaaacccagccagaggacagaaagcagagc

SEQ ID NO: 118742 - RNA, 85 nt, Homo sapiens
aaaaaaccagccacacagaggcccccagaagagaaggacaacaaggaaaaccacaacaggaaggggcaaaggagcaaagccaggc

SEQ ID NO: 118743 - RNA, 73 nt, Homo sapiens
ccaggaacaagggaaagagcccggaggggagggagagaaaagaagaggaccagggcaacgacccgagaaggcg

SEQ ID NO: 118744 - RNA, 76 nt, Homo sapiens
cagcccaaagccaggaccgagaaggcgacaagggaggccggggaggaggagggcgggaccgcccaacgagaagacg

SEQ ID NO: 118745 - RNA, 52 nt, Homo sapiens
gaggggcaaggaacacagacaccaagacggcgcggcgcgcacgagggacgcc

SEQ ID NO: 118746 - RNA, 72 nt, Homo sapiens
accgccggcgcgggaaacgggcgaagcgacgagccgcgaggagggagcggcaggggaggcgaagaagagccc

SEQ ID NO: 118747 - RNA, 74 nt, Homo sapiens
gagaaaagcaaggacacgggccggcacacccacggaagccaggggagcaacagagggaaggggaggagcgcccc

SEQ ID NO: 118748 - RNA, 75 nt, Homo sapiens
cggaagaagcaggaggcaagaaaggggaaccccggagaaaaggccaagaaggcaggacaaccacaccgaaggcca

SEQ ID NO: 118749 - RNA, 72 nt, Homo sapiens
ggggaaagagcggcaagcaagccgagaccgggacaacaagacaccggcgagaggaccgccgggggaacaggc

SEQ ID NO: 118750 - RNA, 82 nt, Homo sapiens
ggagggcggagggccaacaggccaagggcggcgccccagagcgccaaacggaggcccgaagaaaaagaaccgaaaaagaaac

SEQ ID NO: 118751 - RNA, 80 nt, Homo sapiens
cggaaccaagcagggagcagcaacagaaccaacgaacccacggccccccgaaaaagccgaggaggagaggagaggccgag

SEQ ID NO: 118752 - RNA, 75 nt, Homo sapiens
gacagcgcacccaggacgcgccagggggacacagacccacaacaagggaccggaacgaacaaaaaggacagagac

SEQ ID NO: 118753 - RNA, 65 nt, Homo sapiens
ggcggcggcggcggcggggacgcccggcaaccagcaggcagacggagagggaagcccaagggcag

SEQ ID NO: 118754 - RNA, 54 nt, Homo sapiens
acagaccccggaaacacccaccaccgaaccagaaagaggaagagaacaggaaag

SEQ ID NO: 118755 - RNA, 71 nt, Homo sapiens
ggggcccgggacgaggcggacgggcagagagagacacagccgaaagcggacgcaagagcaagaccagccgc

SEQ ID NO: 118756 - RNA, 39 nt, Homo sapiens
cacagccaccgaaagaggagaacaggaccaaaaggaaac

SEQ ID NO: 118757 - RNA, 76 nt, Homo sapiens
cccacgcggcaaggcaagaagaacagccaaggagagcagagaacacccagaaaagggaccgaaggaaacaaaagaa

SEQ ID NO: 118758 - RNA, 72 nt, Homo sapiens
agagcacgaccgaacgccaaacccaagggggagagggagaagccacagaaagaaccaagaacccaaaggaac

SEQ ID NO: 118759 - RNA, 106 nt, Homo sapiens
gaagcgggagagccgacgagcgcgcacaacgcaggaccggcgccgaaggcccgccagcgacaaaagaagcgaagccaggaacaagaggcggaagacacacaacaca

SEQ ID NO: 118760 - RNA, 90 nt, Homo sapiens
cacacgaccagggaggggggacgggaccgccagggcccccccaccaccaggaccaagggcagcccacggcagacacagcaggccaaccca

SEQ ID NO: 118761 - RNA, 56 nt, Homo sapiens
ggcgcagcgagcgcggacggagaggaaagcgaggggaagaacgaaaagacaacaaa

SEQ ID NO: 118762 - RNA, 77 nt, Homo sapiens
ggaagaggcggcgggcaaagacaggggccaggccaggggcaggggaagcacccaaccaacgagcgggccacacagcg

SEQ ID NO: 118763 - RNA, 75 nt, Homo sapiens
accaagcacgggcgcccacgaacgccaagcccggccccaggaccccaagcagggccagggagcggagagcagaga

SEQ ID NO: 118764 - RNA, 65 nt, Homo sapiens
aggggaagcggaacaagagaccaaggagaggcggccccaggggggaccaacaagggagaaccaac

SEQ ID NO: 118765 - RNA, 100 nt, Homo sapiens
cagccccgacgggacgggggagggggcggccgggcggagagaaccagcgaggacgagagagaagaagaaggaggccgcggccagaaacccaagaaaaagc

SEQ ID NO: 118766 - RNA, 76 nt, Homo sapiens
aagccaggcaaccccaccggccgacagccgcgacggcgagcccgggccgcgcccgagggccggagcgagggagagc

SEQ ID NO: 118767 - RNA, 77 nt, Homo sapiens
aagaaaaaagcgaaaagcgaacaggcgggaagcgagcccaaaagagagcagggaaccgaaccaccaggccaaaaagc

SEQ ID NO: 118768 - RNA, 77 nt, Homo sapiens
gaaggcacggcgccacagcaaaccagccagcaacagaagaaagcaagcaccggggaaagcggcccgaaacaagcaga

SEQ ID NO: 118769 - RNA, 83 nt, Homo sapiens
caagcggagcccaacgaaaccgaacagaggagccaggaagagacaagcaacgaggaaaagaaacaaaacacggccaggggagg

SEQ ID NO: 118770 - RNA, 70 nt, Homo sapiens
gaccaccaaggagagcaacgcacacggcgccacacgaggccacgaggcggcgcggggggagaacgcaggg

SEQ ID NO: 118771 - RNA, 96 nt, Homo sapiens
cgggaagggcacacgaacaacaggcccaaaaagagaacaaacacgaacagaggcaggaaaggccggcccagcaaaaggaccagaagacaccccacg

SEQ ID NO: 118772 - RNA, 58 nt, Homo sapiens
ggagaaggaccaagaaccaggagcacaacgagaacacaaaagggaaccaccgaaacga

SEQ ID NO: 118773 - RNA, 65 nt, Homo sapiens
aagacgacgcaccgcaggcagacaaaagggccaaagaagggagagagggggacacagccagggcg

SEQ ID NO: 118774 - RNA, 78 nt, Homo sapiens
aacacccaggggagaacagacaaaccccacaagcacgcaacggcaagaacggaagcacgggcggaggaaagcacaagc

SEQ ID NO: 118775 - RNA, 71 nt, Homo sapiens
aaagaaggagggccccaggaaagcgcacggggcaacagccacacccggagcacccaccaaacacagcaaac

SEQ ID NO: 118776 - RNA, 74 nt, Homo sapiens
ccaaggccgagaagcgacggcggaaagaaggcgagagaggagaaaaacaacaccaggacacagaaggcgaaaca

SEQ ID NO: 118777 - RNA, 83 nt, Homo sapiens
gagggaaggagaagcccaacaaagccccacagcagccagaaggaaagacccaagggagaagaaccgaccagaaagaggcacca

SEQ ID NO: 118778 - RNA, 67 nt, Homo sapiens
aagaacagcccaaacagagaagacacggaagccaccgggcgaaggggaaacgaccgaaccaagaccg

SEQ ID NO: 118779 - RNA, 59 nt, Homo sapiens
cgcagcgagcccgagcggcagcgccggagggcggagaacggaaaagcaccaggaagcag

SEQ ID NO: 118780 - RNA, 40 nt, Homo sapiens
aaaggccgaggagccggagccgcagacagggaggccgcac

SEQ ID NO: 118781 - RNA, 84 nt, Homo sapiens
cggacaccaggcgcgaagggcaccacgacccgaaggcggagcagccgagaacgagccaaccaggaaacgaaggcagcaaaaaga

SEQ ID NO: 118782 - RNA, 69 nt, Homo sapiens
gcaccggacacgaggagaaacagcagaaacgcaccaggccaaagaaagagaaagacggaacagagaagc

SEQ ID NO: 118783 - RNA, 72 nt, Homo sapiens
ggaaagggaaggccacaagacccccagacccaacacagaacacacacggggagcgggagaaaccggcggaac

SEQ ID NO: 118784 - RNA, 62 nt, Homo sapiens
caagcgcgagcaagagggaagggaaaaggccgaggcacagcgggaagaccgcaaagacgacc

SEQ ID NO: 118785 - RNA, 73 nt, Homo sapiens
accacgacaccgaaaacccaccgagcccgccaaaggacaggaagaggcagcagcgggaaaccagacacccgcc

SEQ ID NO: 118786 - RNA, 79 nt, Homo sapiens
cagcccccagagcgggacacaggaccaaagggagcacgaccgacagcaggcagggcgccgccacaggcaccccgacagc

SEQ ID NO: 118787 - RNA, 68 nt, Homo sapiens
accaagcccaccaaccggggaggggcggagacaaccagagggggcggaggcgacaagaaccgacaaac

SEQ ID NO: 118788 - RNA, 70 nt, Homo sapiens
cgaggaagaccagccccagaggcagacaaggcacccagaggcgaaaaccggcgccaagcacggggacagc

SEQ ID NO: 118789 - RNA, 71 nt, Homo sapiens
acgcggggcgggcccgggggcccagcgggcgccgcgcacgcggcgacacacgcacgccacaccgggaacgg

SEQ ID NO: 118790 - RNA, 73 nt, Homo sapiens
cgagagcagcgaagcaccacgaaaggaggccgcaacaaacggcgcacacaccagcggcccagaccgggaaggc

SEQ ID NO: 118791 - RNA, 79 nt, Homo sapiens
aggggacaggaggcccggggaaggcagaggcaacaggggcacgaccggagacgagacacgcaaccgaaggaaggggacc

SEQ ID NO: 118792 - RNA, 76 nt, Homo sapiens
gcacacccgcacgaggcagagaacaagacggacgcaccgacggaaccccgacagagaaaggcacaacccagaccag

SEQ ID NO: 118793 - RNA, 63 nt, Homo sapiens
gagacaaaagaccagagcgagagagcaaacaaggcccccccgggggcgagaagaaacggacgg

SEQ ID NO: 118794 - RNA, 79 nt, Homo sapiens
cgcggggggcgccgcgcggaggggaggcaagacggccccaagaagaggggagagcagcggccagggaagcgcgacaccc

SEQ ID NO: 118795 - RNA, 76 nt, Homo sapiens
gcccgggcaggggcggggcaacgcggaagagggaggaggcgggacccgggcaggacggaggcgcccacgcacaggg

SEQ ID NO: 118796 - RNA, 80 nt, Homo sapiens
ccaccaacaacaccacaaaaccacagccaaggcgggagaaggacggccaagggagaagagcccgggcaggcgcgcagcag

SEQ ID NO: 118797 - RNA, 74 nt, Homo sapiens
gagcgcggccagcccgccgcagaaaccgccccacagagcccggagggacaggaagggcaacccaggaaccccgc

SEQ ID NO: 118798 - RNA, 83 nt, Homo sapiens
agaagcgggcagcagccagaagaggacgaggcacacaacagcggagccccggacagaagagaggcaaccccagcaggcaggag

SEQ ID NO: 118799 - RNA, 71 nt, Homo sapiens
ccagggcgagccaggagcagcagcccacggcggaccagcacgacacgagccgaggacgagaagggccaccg

SEQ ID NO: 118800 - RNA, 80 nt, Homo sapiens
gaagacaaggggacaccagccgaagaagcacagagaacgcgcacgcaacaacagcagaggcagaagcaaaccgagaagaa

SEQ ID NO: 118801 - RNA, 62 nt, Homo sapiens
gacagcccgggacaccaagaaagaacggccggcccagggagaacgcaaaaccaccaccccca

SEQ ID NO: 118802 - RNA, 78 nt, Homo sapiens
agagacgaaccaggcaaagccccacaggagacaggaccgaagcaaaggagcgaccgaaccgggcccgcgggaccaccc

SEQ ID NO: 118803 - RNA, 55 nt, Homo sapiens
agaaaacagacagagcagaagaaaccaagacggcagagagaacaagcacaaggaa

SEQ ID NO: 118804 - RNA, 56 nt, Homo sapiens
gcggcccagccccgacacaggccagaagggagccgggaaacagggagacccccgcg

SEQ ID NO: 118805 - RNA, 80 nt, Homo sapiens
gcggcgcaaccccggagcccggccccggggaacagggagcgcccggcgcacagcgccagggaaggagaacagagggaaaa

SEQ ID NO: 118806 - RNA, 62 nt, Homo sapiens
gggcgcgggcggcggcgccggcaggaagcacagacaacagcagcgccgagaaaccggcagcc

SEQ ID NO: 118807 - RNA, 66 nt, Homo sapiens
ggcacaggcaacccaagacggcgggagccggaacgggccaggaaagacagggggaagagaacaaaa

SEQ ID NO: 118808 - RNA, 88 nt, Homo sapiens
cccacgaacgaggagacaaagcacagacggagcggacaagccaggcagcgcgagaggaacagcaaccgggggggcgcccacgaggagc

SEQ ID NO: 118809 - RNA, 86 nt, Homo sapiens
gccgccccgcgagcacagagcccgccgccgaccgccgcccgccacacccgccgccagccaggagccaagaggccaggaacggcaac

SEQ ID NO: 118810 - RNA, 74 nt, Homo sapiens
ccagagaagaagggccgcgaggaaaaggcaaggggcgcaccgggaaaggaacaggagcgccacgggacaacccc

SEQ ID NO: 118811 - RNA, 70 nt, Homo sapiens
aaagcgcagcgagcggagccgccggagggccaacaaaaagggcaggggacccacaggacgcagccacacc

SEQ ID NO: 118812 - RNA, 77 nt, Homo sapiens
acacgcacgggccccggcgccaccggagagaggccgcgccgggcagagcaagcacagcacaccgggagcagaccacc

SEQ ID NO: 118813 - RNA, 82 nt, Homo sapiens
acccaacaccggccaccggccaacaaaggacacacacaaggacgcccccaggcaaacaccagcaacacccgggacaaaaacg

SEQ ID NO: 118814 - RNA, 70 nt, Homo sapiens
cgacgggcccccgggccgccccccccacgggcagccggagggagcccagcacaaggaacaccagagaagg

SEQ ID NO: 118815 - RNA, 46 nt, Homo sapiens
cagaggccgaacaacggagagcaacaggaagaaaacaccggagccc

SEQ ID NO: 118816 - RNA, 74 nt, Homo sapiens
cccacccagacaccgccagagcaaagccgagggaaacaaagacgagggaagaaccagcgagaccagacaaaagg

SEQ ID NO: 118817 - RNA, 75 nt, Homo sapiens
acagaccgcgagcccagagagagagagaacccgagcgccgcagcggagaaagaaggaacgagcaagcaacccggg

SEQ ID NO: 118818 - RNA, 76 nt, Homo sapiens
aacgagacaagagggcacaggagcacaaaggacagagacccgaagagcaggagcgggaaaaaggagagcaggggaa

SEQ ID NO: 118819 - RNA, 84 nt, Homo sapiens
caaaagcaaccaccccccagaggaaaccaccccacccaacccccgacacagaagaggagaaaacggaacaacaggagggcaacc

SEQ ID NO: 118820 - RNA, 83 nt, Homo sapiens
ccgagccaggccggagcgaggagaacgacgggcgccgcccagcaaagcgaaggaaacaggcaaaggagcgacagacagcgagg

SEQ ID NO: 118821 - RNA, 78 nt, Homo sapiens
cgaaccaaaccacggaaacaggcacggccacagaagcaacaaaggaccgcccccagagagacggaagaacaacggcgc

SEQ ID NO: 118822 - RNA, 67 nt, Homo sapiens
cagagaagcaaagagggcagcaggcccagaaacgcacacaagaaggaggcaaggaggccacggggcc

SEQ ID NO: 118823 - RNA, 75 nt, Homo sapiens
ccgaaagaacaccgaaccaggccgagaagaccgcaggagacacagcaacaaaagccaacgacaacggaaccagga

SEQ ID NO: 118824 - RNA, 75 nt, Homo sapiens
cgaagcccaccggccccaacgcacagccagggagccaagcgccgcccggccgacacccgcaggagcaaacagcca

SEQ ID NO: 118825 - RNA, 60 nt, Homo sapiens
caaaagaacagaaggacagacccagaccgaggagaacaagccgacggagaccgcccgccc

SEQ ID NO: 118826 - RNA, 64 nt, Homo sapiens
gcacgacccacgcggaacgggcccaccggaccgggccacagaggcagaaaccagcagggcggcg

SEQ ID NO: 118827 - RNA, 72 nt, Homo sapiens
gacacaggagcccgacagcaccagcaggaaggaagggaacacggacgacgagacacgaccaacacaggcgac

SEQ ID NO: 118828 - RNA, 71 nt, Homo sapiens
gcagccccgagcgccgcggacgcgcacgagggacggggaaaggaaggcaccaaacggacacaaaaacacca

SEQ ID NO: 118829 - RNA, 58 nt, Homo sapiens
gcacagggacaagcaaggcacacagcacgagaagagaagcccagagcaaaacacccca

SEQ ID NO: 118830 - RNA, 67 nt, Homo sapiens
aaggaacggaggcggccaaagagaaagagaaaggagagcaagagaaccgggcagaagcacacaccag

SEQ ID NO: 118831 - RNA, 81 nt, Homo sapiens
agagcaacccgaaaaaacgaaggaagaaagagagaagcccacaggccaagcggggaagacccccagagggaagcaggaagg

SEQ ID NO: 118832 - RNA, 80 nt, Homo sapiens
agagaagacaacgcacaacagagaggacgcgaggcccagagagggaaagccacgccagggacacacagcggggagagggg

SEQ ID NO: 118833 - RNA, 76 nt, Homo sapiens
aaggcagggaagagggagagagccccagaacaaacgggaagcccgaagccagagagggcacccgccggcgcacgag

SEQ ID NO: 118834 - RNA, 74 nt, Homo sapiens
gaaggaacagggggccacggagagcggaacaacagagaacagcgaagccaagagcagagccgaacgaacagaac

SEQ ID NO: 118835 - RNA, 52 nt, Homo sapiens
gcccaccgccgcccccgcgagacgacgggaccgaaggaccccgccagagaca

SEQ ID NO: 118836 - RNA, 75 nt, Homo sapiens
ggcggcgccaggagcgcggccccgccggcccgggcgcaccggggcccagagccaacggggccccagcgccacaag

SEQ ID NO: 118837 - RNA, 79 nt, Homo sapiens
gcagacgggcccgcgcacagagacaggacaagaaggagacccaacaccccggccagacgggccaccaggccggcgcccc

SEQ ID NO: 118838 - RNA, 67 nt, Homo sapiens
cccggacacagcaaaccgggccacagcaagcagagccggcgggcaaagcgacgaagacgggaagcaa

SEQ ID NO: 118839 - RNA, 79 nt, Homo sapiens
ccaacaagaggaccgccaccccacaccccaacaagccgccaggggacagagcgaagaaccccccaagaagacgaaaccc

SEQ ID NO: 118840 - RNA, 79 nt, Homo sapiens
ggcggggacccacggccaaggccggcgagacgagccgagcgcagcgggaaagagccagacccagaggcagcgcaacaag

SEQ ID NO: 118841 - RNA, 74 nt, Homo sapiens
gagcgagggggggcgcgccggaaaccggagcgcgcagcagggggcccacggggcagggaagagcacaagcgccg

SEQ ID NO: 118842 - RNA, 78 nt, Homo sapiens
cggacgacggaaggagaaacgacaggcaacaagacaagcggcggggccccgggggcaacaggaaaacaacccagagaa

SEQ ID NO: 118843 - RNA, 70 nt, Homo sapiens
caggaaaggacccagaaaaaggaaagacccagaggccagcgcacaaccggccacaagacacccaaaggag

SEQ ID NO: 118844 - RNA, 71 nt, Homo sapiens
cacaagcgaggagccaccaagcccgggagacagcaaaacaagacacccgagaaaagcacagcacccgcagg

SEQ ID NO: 118845 - RNA, 81 nt, Homo sapiens
gccacgcagagccgccgcagcccaggaccgcacgccagggaggccagaccagccagcgcggggaagcagccgcggggagcc

SEQ ID NO: 118846 - RNA, 73 nt, Homo sapiens
gccccgccaggaggcaagagccccggaccgacccacgccaggaaaggcgaacaccccaggccgcgaggccccc

SEQ ID NO: 118847 - RNA, 58 nt, Homo sapiens
agcacacagcacggacgaaagggcggaagaccgggccggaagagggaaagccgagccc

SEQ ID NO: 118848 - RNA, 73 nt, Homo sapiens
ggcaccagaagcccccagcgggaaaagagcacccaaggccaacgcagacccgcaggaaaacgcgcaaaccgcc

SEQ ID NO: 118849 - RNA, 79 nt, Homo sapiens
ccggacgcggggggcgggaagagccggggccgggcgacaggagcaggacacagcagagccccgaaaccagaagaaagac

SEQ ID NO: 118850 - RNA, 79 nt, Homo sapiens
cagaaggggaaaagcaccaaggggcccccgcgagaaggcacagccaccagaacccaaacccgaaggcccagcgggggga

SEQ ID NO: 118851 - RNA, 69 nt, Homo sapiens
gcgaagcacgcagaaacagcagacggaggccgggagcaggcaaaggccaggcgccggcaggagcgaaca

SEQ ID NO: 118852 - RNA, 74 nt, Homo sapiens
gaagggacacacgcgccggcgcgcacacaccacgggcgaggcaacgggggcagcacgccgaaggagagaccaga

SEQ ID NO: 118853 - RNA, 80 nt, Homo sapiens
acccaagcaaaaccagagcaagcagcagaaaacaggcagaaaagcagagagccaggcccgaaaccgaggccaggagccac

SEQ ID NO: 118854 - RNA, 75 nt, Homo sapiens
gcgggccgaagaccgggaccacacaggaagagagacagaaacacagcaacggcaagccccaaagcccagagaaga

SEQ ID NO: 118855 - RNA, 63 nt, Homo sapiens
agcagacccagaaggcgacaagcccagagcgccgcccaagagagagaagagaggcgcgagggc

SEQ ID NO: 118856 - RNA, 100 nt, Homo sapiens
gcaagacgcaagaccaaggccggaccgagccacaagaaggacgcggggaccggggccacggaagccccccagcccggccccagcccaacaagccagcccc

SEQ ID NO: 118857 - RNA, 77 nt, Homo sapiens
ggacaccggaagcgggaaagggcaaaggcaaaccaaacgcaagaccagggcggagaaaagcaaggaccagcccgacg

SEQ ID NO: 118858 - RNA, 64 nt, Homo sapiens
acgacgcgggcgagcggggcggacgccggggagacgcaggcgagcccaccgggacaccgaccca

SEQ ID NO: 118859 - RNA, 84 nt, Homo sapiens
gagagacacacgccaacgcaccaaccagggcaaccccaagcccagacagccgggggcggcccaagagcccccagaaaaaggcag

SEQ ID NO: 118860 - RNA, 85 nt, Homo sapiens
ggcccggacccgcggccggcccggcgcggcccagcgccccagggcccacgagcagcgagcgcccccggcccccggccaccaacca

SEQ ID NO: 118861 - RNA, 83 nt, Homo sapiens
gacagcacagcaaaggcccgagggccagaggcaacgaccggcccgcgcaacgccgcgacccgaccgaccggcgcacggagaca

SEQ ID NO: 118862 - RNA, 66 nt, Homo sapiens
gaaacgcccacaccaagaaaaacgggcacagagcacaggaaggagcccggcagcgccgggaaacac

SEQ ID NO: 118863 - RNA, 58 nt, Homo sapiens
aaaaccacgccaggagccaaagcggggaagaaaaagcagcacgaaggcgaggaaccag

SEQ ID NO: 118864 - RNA, 51 nt, Homo sapiens
gagccagagcgggaggacgacgagagagggaccgacacaagaagcagccag

SEQ ID NO: 118865 - RNA, 79 nt, Homo sapiens
agcggcccccagcaccacagcccgcagccccgccagccacccccaggacaacccccaccagaccaccgccccaacccga

SEQ ID NO: 118866 - RNA, 100 nt, Homo sapiens
gaggccgcgaaccagagaccgggccagggggacagagaaaccggcagacagcacagcacaccggggagcacccaccccaagacacggggccgaggagaag

SEQ ID NO: 118867 - RNA, 72 nt, Homo sapiens
ccacaccgccgacccagggcgacgccggggcgggagcgcccaagcgggcacccccgacaggcggaaccacac

SEQ ID NO: 118868 - RNA, 73 nt, Homo sapiens
cggagaccgacccaagaaaccaaaaggaaccggcccgaagccgaaagcgcggagcgggccacccaccggacaa

SEQ ID NO: 118869 - RNA, 77 nt, Homo sapiens
gccgcgggggcggaacaaacaggcagagccaaggcgccggaggccccccggcgaagcgccggccacaggcacacggc

SEQ ID NO: 118870 - RNA, 72 nt, Homo sapiens
gaggagacgccgaaagaacagcagcacaggcgaggaccgcgggaagcacaaaggccagcgaacaacggggaa

SEQ ID NO: 118871 - RNA, 67 nt, Homo sapiens
gcaccaaggcagaaaaccacggggaaaggaaaagcgcccaggaagcggaaaaacaaaagagccgccc

SEQ ID NO: 118872 - RNA, 56 nt, Homo sapiens
gcagcagagagagaaagggccacagcagcccagcaaagaacagcgaacgacaagag

SEQ ID NO: 118873 - RNA, 46 nt, Homo sapiens
aacggccagcaccacgaggcggcaaaccgacaccagcgacacaagc

SEQ ID NO: 118874 - RNA, 76 nt, Homo sapiens
gacaaacagcggaaaacacgcgggcgcaggaaccgaccagacgggaaaagaaacccggcccaggaaacaccagaaa

SEQ ID NO: 118875 - RNA, 49 nt, Homo sapiens
aacagcaaaacacgaaaggcaaagagacacgcgagaaacagacgcacgc

SEQ ID NO: 118876 - RNA, 59 nt, Homo sapiens
gcccaccaaggagccccacggcggggaccaggagcgaccaagggaacggaagccccagc

SEQ ID NO: 118877 - RNA, 81 nt, Homo sapiens
ggaagcccgcccacgagcccgcaggccaccgcaccacaggaaggcccccagaacaaacaaccacgagcaagcagcacaacg

SEQ ID NO: 118878 - RNA, 76 nt, Homo sapiens
ggcgaacagacccagggggagacggcggccagcacagcagagcaccaaacaggggggaaggaagacaaacagagcc

SEQ ID NO: 118879 - RNA, 75 nt, Homo sapiens
gagcccggaggccccacgcacccgcccccagcgccggcagccccccgcagaccgacacgccacaccagagagaac

SEQ ID NO: 118880 - RNA, 82 nt, Homo sapiens
gaaggaacgaggcaaggagcaaagcagcggcgcagcccgggggcggagaacggaaaagcaccaggaagcagagaggaccgca

SEQ ID NO: 118881 - RNA, 115 nt, Homo sapiens
agcaggcacagaaacccgagagccagacgccaaaggaaaccccgggggacacccccaggaacccagagccagagggaccggacaaggagaacggagcggaccgcacgggcgccaa

SEQ ID NO: 118882 - RNA, 75 nt, Homo sapiens
aaccagcagcgggaccaacaggaacggccgggcgagcggcacagccacgccaaggagacagggaaacgaaaacca

SEQ ID NO: 118883 - RNA, 80 nt, Homo sapiens
cgagagagacagggaggaagcggaagcagccgacacgagcggcaaaaacagcgaaaggagagcacaccccggagaaccga

SEQ ID NO: 118884 - RNA, 60 nt, Homo sapiens
aagcggagaacaaggaaccggcccggaaaagggaaagcgcgaagcagacagcaaacgaaa

SEQ ID NO: 118885 - RNA, 81 nt, Homo sapiens
gacagcgggccggcagaagaccacggaaagcaggcgcgcacgaaaagaccagccagaagcgagccgaaggaagacagggcg

SEQ ID NO: 118886 - RNA, 39 nt, Homo sapiens
gccccaaaggcgagaacaggacacacaaacgggagaccg

SEQ ID NO: 118887 - RNA, 72 nt, Homo sapiens
cccacagaagcagagacaggacagaaagaagagagcgaggacgccccacgccccccgcagcccagcccagag

SEQ ID NO: 118888 - RNA, 74 nt, Homo sapiens
acgcagcgacgccccgcacgacgacagaggcccagagcccccccggaagagacagcccggagaagccacgaaac

SEQ ID NO: 118889 - RNA, 69 nt, Homo sapiens
gcgccggacagagaagcccccaaggagcgcaggacagggacaagcgcacagcggagaaagcagcgcggc

SEQ ID NO: 118890 - RNA, 62 nt, Homo sapiens
acaccagaagaagggacaaaaggcgcagcccagcccgaaagcagaacgacgccggcgagcgg

SEQ ID NO: 118891 - RNA, 79 nt, Homo sapiens
ggcgcagcccacgagagccaagcgacaaggagacacggaacaaacggcagccggcacccgcacaacccagggggccgaa

SEQ ID NO: 118892 - RNA, 94 nt, Homo sapiens
cagcgcccggaccggccgagaggaagacgagccgggaggaacggcccggaaacaggaggacggagccaccagcgggcagcacaggaccccacca

SEQ ID NO: 118893 - RNA, 80 nt, Homo sapiens
ccgcagaaaggccggcacaggaaaggcaggagagcgaaagagagcggaaaaacgaccaaagaagccacagagagcacaga

SEQ ID NO: 118894 - RNA, 85 nt, Homo sapiens
cggacccggccgggagaagcagcagagaaaggcccaccagcgagcagcccgcgcacaagcaaccagcgacgggggagaagacgca

SEQ ID NO: 118895 - RNA, 76 nt, Homo sapiens
agcaggacgcgccgcgccccaagacggacggccggcccgggcagaccagaccagacacacagggccgacagaaagg

SEQ ID NO: 118896 - RNA, 78 nt, Homo sapiens
gagacagggcgggccccggaggcggagaacggaggaaagccaggcccggcccggcggaaaaggagaggcagacccaag

SEQ ID NO: 118897 - RNA, 83 nt, Homo sapiens
acaggcacccgccaccacgcccaggcacgcggaaaaaagagcacagaaacacgagagcaaaagacgaaagaaaagacacagga

SEQ ID NO: 118898 - RNA, 69 nt, Homo sapiens
cccaagccaggaccaggagcgcccaaaagcagcacaacacgaaaggagaagaggacgggaggagaaaag

SEQ ID NO: 118899 - RNA, 81 nt, Homo sapiens
agggaagaccccaaggaacaagacgccaaggagacgccgcagagacccccgggagcggagccgcagccccacgagcgcgcg

SEQ ID NO: 118900 - RNA, 76 nt, Homo sapiens
gcccaccagaccacagggaccagccgagccaagggacaagaacagcagaaccaggcggagaagaacagagaaaccg

SEQ ID NO: 118901 - RNA, 100 nt, Homo sapiens
agcaaagaaagaacagaacagaacaaagagaagcggcaggaaagcgccacaaacaacccccaccacgccaagagaaggagagagaaaggacaagaaagag

SEQ ID NO: 118902 - RNA, 84 nt, Homo sapiens
gaccgggcaccagcaggacccgaggccaggagccaggggcccagaagacaagggaggcgaggacggacaaaaggaaacggacgg

SEQ ID NO: 118903 - RNA, 79 nt, Homo sapiens
aggcccggagaaaaagcgaaccaggcccggaccagcccgggcgcccgcacggacccccagcaaaagcagaccggaaaac

SEQ ID NO: 118904 - RNA, 83 nt, Homo sapiens
agaagaagaaagcagggggacgcaaaggccaaggggcggcaaaaagaccgggagacgggagcaagagcagagacacaggccgg

SEQ ID NO: 118905 - RNA, 61 nt, Homo sapiens
cacaaacgggaccccaccacacagcagaagcaagcagaagaggaacagaagaagcagagca

SEQ ID NO: 118906 - RNA, 68 nt, Homo sapiens
cggaaagggcggagccacggcccagagccgccccgaggccccggcgcggcgcgagggcgcggggcgcg

SEQ ID NO: 118907 - RNA, 80 nt, Homo sapiens
ggcaaggggaaacagaaaaaagacacaggaaaaggggacgaaaagaacaggaggcacacggcagagacagccaaaaaaac

SEQ ID NO: 118908 - RNA, 88 nt, Homo sapiens
aagcgcagaagagaaggcagcggcaggaggagcggccggccaggcagacaggcgacgccacaacgccccgaagccggcccagaagccc

SEQ ID NO: 118909 - RNA, 78 nt, Homo sapiens
cggggggacgggcgcgaggagccaggggacgagacgcggcagaccgggaagcacaggagagcaggcacgaccccagcg

SEQ ID NO: 118910 - RNA, 80 nt, Homo sapiens
ccccgccccagcccaccccaaccaaggaaaagaaacagagcccccgcccagaagaggggcacaggaggaagcgaggccag

SEQ ID NO: 118911 - RNA, 86 nt, Homo sapiens
aacacaggagccggagcagaagcaaagagcccggaccgacaggaaagaaggagcccacaaagaaaagaacaccgccagcagccagc

SEQ ID NO: 118912 - RNA, 72 nt, Homo sapiens
acaagcacccgccgggccgaaccggaagggcaagcccccaggcccgccgccagagggacaggagccaggcca

SEQ ID NO: 118913 - RNA, 74 nt, Homo sapiens
caaaggcaccaggccaccacagaaacaaaagcaacaaagagggacacggggggcacacaacccagccagccgcc

SEQ ID NO: 118914 - RNA, 80 nt, Homo sapiens
ccagacgccgaaaagaggacaccaacaggggggagaaagcaaggagaaacaaacccaagggaaaagcacagggccaggaa

SEQ ID NO: 118915 - RNA, 87 nt, Homo sapiens
ccccgagcgccaaaccggggggaggcgcggcacgcccagcgggaaccgcaggcgccgaagcccggcccaccgggggacggcacggca

SEQ ID NO: 118916 - RNA, 72 nt, Homo sapiens
cgccccccggccggcccaggaagccagaacacccaggccacaaacaggacaaggacagcaagacgaaaggac

SEQ ID NO: 118917 - RNA, 71 nt, Homo sapiens
gaaggaaggggcgagggccacgaaaaaccgggcgcgaccaccgcccacgaagcccgacgaggcccgagaga

SEQ ID NO: 118918 - RNA, 80 nt, Homo sapiens
cgggggcacagacgcgccagcacgccgccgccaggacccaaagacaggaccacgcaccagcagagaaggaaagcaaaccg

SEQ ID NO: 118919 - RNA, 72 nt, Homo sapiens
aaggaccgacgcccgggagccaagagacccgacggaaggaggaggaagaaaaaacgaagaaggcccggagcc

SEQ ID NO: 118920 - RNA, 87 nt, Homo sapiens
cagcccagacgggcgggcagggccgggcccgcagggagaaaccacgaaacccgaagaccccgccagcgaaacaggaggcacacagag

SEQ ID NO: 118921 - RNA, 57 nt, Homo sapiens
agccgggagcccaccacacaggagcagacaggccaaaacagaagaggcaaagcccag

SEQ ID NO: 118922 - RNA, 69 nt, Homo sapiens
aaagggccaaagaagggagagagcggagcgggacccggggcaccagaggaccgagagagaaaagagaag

SEQ ID NO: 118923 - RNA, 75 nt, Homo sapiens
ccagaagaaggaccggaagcacacaacaggaaaacaaaagaggagaaagagagggaaagggcgggggcaagaccc

SEQ ID NO: 118924 - RNA, 76 nt, Homo sapiens
cacgcccccaagcacaaagcggccaccagagggaaaccagacagccagcagccggccccaggcagggaggagcgag

SEQ ID NO: 118925 - RNA, 74 nt, Homo sapiens
gccacgaagggacaaacggaccccacaaccaacccgcagaagaccagagagagaacccccggaagacacgggga

SEQ ID NO: 118926 - RNA, 80 nt, Homo sapiens
acacgggccaagggagcgaaaagaacccccaaaaggcgggcacagaaagcgagagagccaaagacgagaggagaggaagc

SEQ ID NO: 118927 - RNA, 67 nt, Homo sapiens
cagggaagcaagccaaccaccagaagcgaagggggaagaggccagacagaaaaaacgggacggcaaa

SEQ ID NO: 118928 - RNA, 63 nt, Homo sapiens
gaggccgcggcgccaaaccgaggaaaccccccaggcaagaggcgcaggaccgggaagaccaac

SEQ ID NO: 118929 - RNA, 102 nt, Homo sapiens
ccgagagagcccgagaaagaaggaagaagacccgcgcgcgaaggccaaagcccacagagaagaagagaaaggaggagccacaaacgaccaagaaagaaacag

SEQ ID NO: 118930 - RNA, 42 nt, Homo sapiens
gaaacgccgaaaaacccaagcccagagcgacgggcggaaacc

SEQ ID NO: 118931 - RNA, 54 nt, Homo sapiens
aaacgcggacccccgagaaccgcgccaccagagacggaggcacgcagaccaccg

SEQ ID NO: 118932 - RNA, 79 nt, Homo sapiens
ccaccacaagacccgcgaggcgccgagcggcagaccacaggaaagggcccagaaggcagaccaacaagaaaccgccccc

SEQ ID NO: 118933 - RNA, 70 nt, Homo sapiens
ggcggaccagaggaaagaacggaaaaaaggagaagagagcggacccacaccagggaagacaggggagagg

SEQ ID NO: 118934 - RNA, 57 nt, Homo sapiens
cccagcccgcagcccgccgcggacggccccgccccgaccaagaagaagagagggcga

SEQ ID NO: 118935 - RNA, 72 nt, Homo sapiens
agcccccaagagcgagaacaggaggcgaagcacagacgaccggacccagaggcgaggccaaccggcggaccc

SEQ ID NO: 118936 - RNA, 74 nt, Homo sapiens
ggggccaggaggggagaggaggcaggcccgcgggagaccaaggaccaggagcaaccagccgggaacgccggaaa

SEQ ID NO: 118937 - RNA, 58 nt, Homo sapiens
gcacgggccgcgaacacgggacccaaggccagccagccccaggcaccagcggacagga

SEQ ID NO: 118938 - RNA, 50 nt, Homo sapiens
agcacccgagaaaaagagagacaacgagggagcaggcaacaggaagaaga

SEQ ID NO: 118939 - RNA, 83 nt, Homo sapiens
ggagaggcagacgcaccacccagggccggcgcggggcaccagaagaaccggccagccagaacagacaagcgagccgcccccgc

SEQ ID NO: 118940 - RNA, 34 nt, Homo sapiens
ggagagaaccccccaacaggcccacccccaccgg

SEQ ID NO: 118941 - RNA, 79 nt, Homo sapiens
cagaacaacagccgccaccacgccagggcggcccccccagacagaagcaaaaagcgggccaggcagcaagaacagacac

SEQ ID NO: 118942 - RNA, 73 nt, Homo sapiens
gaaaaaaagaggcgggaggcgcggcaaaacggacagggacaagcgcacagcggagaaagcagcgcggccagga

SEQ ID NO: 118943 - RNA, 77 nt, Homo sapiens
ccaggcagccaaccagagcgccacccaggaggcggagcggcaaaaaccgcacgaacgagacacgccgggcgcgaccc

SEQ ID NO: 118944 - RNA, 74 nt, Homo sapiens
ccccgccacgcccaaacgcgaagcagccccgcgaggaccacccgaggcaaacaccgcaccagggaaagcgacgg

SEQ ID NO: 118945 - RNA, 89 nt, Homo sapiens
cgaaggacgcgcaggagaagcggagccacggagaagaaggccccgacgaaaccccccaggcaagaggcgcaggaccgggaagaccaaca

SEQ ID NO: 118946 - RNA, 66 nt, Homo sapiens
ggacagcaggaccgccccagggaagggggaaagggacaggcacacaggcacagggagggcgggaca

SEQ ID NO: 118947 - RNA, 62 nt, Homo sapiens
aggggaagggcaaagggcgacgcggacccagaaaccaggaacgaggaggcaaaaggggagaa

SEQ ID NO: 118948 - RNA, 82 nt, Homo sapiens
cgcaggccccagcagcccccggcccgcgcgcccgcacccggccgccggggccgcccagagcgcacgagagccacgcgagagc

SEQ ID NO: 118949 - RNA, 73 nt, Homo sapiens
aagcagggaggcggcggacagggcagaccgccagcagcacagcaagccacagagagggccggcagggcgggca

SEQ ID NO: 118950 - RNA, 75 nt, Homo sapiens
aacggacaaggcggcaaagcggggaggccagcgacgccaggaagaaaacgcaaagggaagagccacaaagggaac

SEQ ID NO: 118951 - RNA, 96 nt, Homo sapiens
ggccccccagccagcagaacgagagaagaccaagaggcggagaagaggagaaaagggcagaggccaaaaggagaaaggcaaagaggaacccggccc

SEQ ID NO: 118952 - RNA, 64 nt, Homo sapiens
acagagaaagagccaggaaacggaaagagacaagcagagaaagggggaggcggacccggcaaca

SEQ ID NO: 118953 - RNA, 47 nt, Homo sapiens
aaagccaagcaccccgggagagcaagaaagagcgccgcaaggcacag

SEQ ID NO: 118954 - RNA, 77 nt, Homo sapiens
gcggcaggagagccggccgcgacaggacggcaggaaggaacggcaccgaggcacgggggcccggcaaaccacagaac

SEQ ID NO: 118955 - RNA, 76 nt, Homo sapiens
aaagcacgggggcaacagagacgacccaccgaagaaacggaagaaaagaaagccaacaaaacacagcgaagaaaga

SEQ ID NO: 118956 - RNA, 78 nt, Homo sapiens
ggcccgagccggcaaacgagagcaaaagggaccgaggcaagaagcaagccagggccacccacaccaagcaggcaggag

SEQ ID NO: 118957 - RNA, 59 nt, Homo sapiens
ggcagagaacacaacaagcaccagccacagaaccagcccccccaagccccggggccagc

SEQ ID NO: 118958 - RNA, 82 nt, Homo sapiens
gagaggccggacggcgcgggcgccggcgaggagagcccgcggcgcaggaaggagggccccggagcagccacaccaccgaggc

SEQ ID NO: 118959 - RNA, 72 nt, Homo sapiens
gagcgggcaccaggaagcgaaggcgcaaaagcggaaggagagacaggaagggcacagaaacggcgcgagggc

SEQ ID NO: 118960 - RNA, 69 nt, Homo sapiens
gaagagggaagagaagacaaagaaaagagagcagcaagggagaggggaaaagcacaagcgagcagaaac

SEQ ID NO: 118961 - RNA, 70 nt, Homo sapiens
acccggacggggacggaggcaacacggaaccacggggaagcagacggggaaagcaacacagaagcaaagg

SEQ ID NO: 118962 - RNA, 66 nt, Homo sapiens
gccccccaaaggcccagacaggcaacgagcaaaccgcaccacagcgcgaggaggagcagccgggga

SEQ ID NO: 118963 - RNA, 69 nt, Homo sapiens
gagagccgaagacgggcaggcgccggacagcgccggggggcgccaccgggcccacacagccacagcaaa

SEQ ID NO: 118964 - RNA, 74 nt, Homo sapiens
agacaccacggggcaacgaggcgaaccacgggaacaaaggcgaggacaaggagggcaggggacgggacccaaac

SEQ ID NO: 118965 - RNA, 62 nt, Homo sapiens
aagaccgacaggaggccccggaagacggagggcgacagcaagacaaggaaaagccgcaccac

SEQ ID NO: 118966 - RNA, 89 nt, Homo sapiens
accacaaaaaagagaaggaaagccagcaaaggcaggaaaccggggaaccaacggaagccgaagccagagcagagcacaagaagagggac

SEQ ID NO: 118967 - RNA, 50 nt, Homo sapiens
gcgacgaaaagcgggcgccaacaaggagaaaccagaggcaagcgacggga

SEQ ID NO: 118968 - RNA, 73 nt, Homo sapiens
agcgcccggggggaagggaaggagggagccccaacccacgcagggcggccaggcccggccaacgaaccaagag

SEQ ID NO: 118969 - RNA, 64 nt, Homo sapiens
cccaccaacaaggagacccgggaggaccaagccgaccggaaacgaaacagcgcagccaggaaca

SEQ ID NO: 118970 - RNA, 70 nt, Homo sapiens
aggagcacagaacgccaggaccaaaacagggagaaacacagccagaagggggccagacggaagaacagcc

SEQ ID NO: 118971 - RNA, 84 nt, Homo sapiens
aagcccgccggcgaccggccggggcccagagcgaccgcccccgcggaggggggccgccgccgaccgggaagcgccagaagggag

SEQ ID NO: 118972 - RNA, 86 nt, Homo sapiens
gccgcccgccgcccgccaccccggcacccaagccgcccccgccgccccggcccggcgcgcaggcagacggcagaaaacagacgaag

SEQ ID NO: 118973 - RNA, 75 nt, Homo sapiens
cgcgcccgacaccagaagaacccaccagagaagaagaagacaacgacgacacaaggggagaaacagccagcaaaa

SEQ ID NO: 118974 - RNA, 74 nt, Homo sapiens
cggcaggccgcccccggcaaggccgccaggcacagagaaggcaaacgggagggcgaggacaccaagagcagcgc

SEQ ID NO: 118975 - RNA, 79 nt, Homo sapiens
caggaagcaaaagaagaggaccacacacagacgcgcgccgcaccccagaccccgggcgcgagggaggagcgccccggcg

SEQ ID NO: 118976 - RNA, 82 nt, Homo sapiens
gacacgcgacgcgccaaaacccgcccggaaaggggacaccgacaagcagaccggaagaccgacggaagaccacaccccgagg

SEQ ID NO: 118977 - RNA, 68 nt, Homo sapiens
agggcaggggacccccgagcgggggcggcccacggggacgagaaaggcaagaacgccccggcaaggac

SEQ ID NO: 118978 - RNA, 80 nt, Homo sapiens
cagaccacgacaagagcacaaccccggcgacaaaccaagaggagccagaggcgaccgaaagaaaagggccacagacagca

SEQ ID NO: 118979 - RNA, 71 nt, Homo sapiens
gggcaagggacccacaaaaccgcccaacagacagaagaaagggagcccccaagaacagcgagcacaggaag

SEQ ID NO: 118980 - RNA, 56 nt, Homo sapiens
cagccaggcgaggccaagaaaccaagggagaggacaagagacagaaagacagaaaa

SEQ ID NO: 118981 - RNA, 38 nt, Homo sapiens
acgcgaagcggccggaggacagcgagcgccccccccgc

SEQ ID NO: 118982 - RNA, 73 nt, Homo sapiens
caacgacagcaccaacccagagaaagggcccgagggcaggacagcaggcaccggcgaagcacagagaggcgcg

SEQ ID NO: 118983 - RNA, 61 nt, Homo sapiens
gggagagagacagcgacgagagagaccggagaggggagaggaccggagggagagccaccga

SEQ ID NO: 118984 - RNA, 60 nt, Homo sapiens
aggggccggaccacaaggcaagagcaggacagagcgggagccaccagcgccaaagggaag

SEQ ID NO: 118985 - RNA, 76 nt, Homo sapiens
gacaacccgaggagccaccagacaaagcggccagaagaaaagagaggggcccccgggaacaaaggaagaaacgacg

SEQ ID NO: 118986 - RNA, 80 nt, Homo sapiens
gacaagagaggcagagggcagcggacaggaaccccagggcgccggggcgaggaccgagggaacagccaggagagcaagca

SEQ ID NO: 118987 - RNA, 82 nt, Homo sapiens
aaggccgagagccggaacaaacgagggcccgggaggaccgacgcagccagacagagcaccacaggaaggaaacagcaggacc

SEQ ID NO: 118988 - RNA, 62 nt, Homo sapiens
ggagaaggaccaagaaccaggccacacccagcaagggacaaggaccggagacccagcgcgcc

SEQ ID NO: 118989 - RNA, 68 nt, Homo sapiens
caagagggagccccgcagacgggacacagcacaccggagagacgaggcaaagcaccacaggggaaaac

SEQ ID NO: 118990 - RNA, 81 nt, Homo sapiens
aaagcacccacccagcacgcaccccaagaaaccagagaagacggcccagcagagcacccaaccagcgggaacacagcgccg

SEQ ID NO: 118991 - RNA, 84 nt, Homo sapiens
gacggcgagcgcgagcggcgcgagaaagaaaccccccaggcaagaggcgcaggaccgggaagaccaacaaacgcaccgcggcca

SEQ ID NO: 118992 - RNA, 62 nt, Homo sapiens
gaagaccagaccaaggcagggaggcggccaacggaccacaccaaaagccaccaaaggaacac

SEQ ID NO: 118993 - RNA, 62 nt, Homo sapiens
cagcagccaccaggagcccgagagagaaggggggagcccggcccagccccccaccccccgcc

SEQ ID NO: 118994 - RNA, 72 nt, Homo sapiens
agcgggaaagaaggcaaaacacggggggaccagagagaaaaacaacaaacagagcggcacccgagaaagaag

SEQ ID NO: 118995 - RNA, 63 nt, Homo sapiens
gcgcacccgggccagcaaggagcgcgaccaaaaagggcagcacagacgccagcagcccggacg

SEQ ID NO: 118996 - RNA, 80 nt, Homo sapiens
cccgaaccacggacaggacccgcccagcccaacggggagcgccaaggggccaagggagagcggggccccccccaaggcac

SEQ ID NO: 118997 - RNA, 77 nt, Homo sapiens
acgcccaagccccaccgcgaggcagaagagcacgacgacggccaccagagaggacgcccaacagccagaaggaggcg

SEQ ID NO: 118998 - RNA, 79 nt, Homo sapiens
gcccgcagcgccccaacacccgcgcgcccgcccgcgccgccgccggcacccccccggcccaggcgagccccaccgggga

SEQ ID NO: 118999 - RNA, 59 nt, Homo sapiens
cccccaaagcgggaacagaggccgggcgcccaggaacccacgggccacagagcccagcg

SEQ ID NO: 119000 - RNA, 71 nt, Homo sapiens
aacgggaagaaccggccgaaaggggagccccccaaacccgggcgccccggcaaggccaccgcagaagccac

SEQ ID NO: 119001 - RNA, 79 nt, Homo sapiens
ccgccgccccgcccacgaggagcacagccgggccgcgcgaaggaagagagaccaggagagggcccaggaccagacccac

SEQ ID NO: 119002 - RNA, 72 nt, Homo sapiens
acacagaagaaagccacgggagaccagcggcgggaagccgcaaaaagggaacaagacccaaacagaggcaga

SEQ ID NO: 119003 - RNA, 72 nt, Homo sapiens
cccccccgccccgagcaaaaaacacagggacgagccaccagagaagcacacagcaaaaccaggacgaaagca

SEQ ID NO: 119004 - RNA, 36 nt, Homo sapiens
ggaagaggagccagcaggaagaaaaaagcgggcacg

SEQ ID NO: 119005 - RNA, 82 nt, Homo sapiens
acacaacgaggccacgggagacgcgaaggaagcgagaagagagaacgagagcgcaggagaagcacggagacagaacggagcg

SEQ ID NO: 119006 - RNA, 77 nt, Homo sapiens
ggaaacaggagcgaagcccagcgggccggacggggcggggggaacgccacgcaccggggagcccgccacccccccag

SEQ ID NO: 119007 - RNA, 77 nt, Homo sapiens
caaacgcaaacacgaacagccagagcggacgcagacagcccgaaggagcaagcaagacccaagacgacaagaccaca

SEQ ID NO: 119008 - RNA, 68 nt, Homo sapiens
cgcccggcgcccagcccaccagcacggcagcaaagggcgggagagagaagaaaaaacaacccagaacg

SEQ ID NO: 119009 - RNA, 77 nt, Homo sapiens
caaaacggccgggaaagaaccacaagcccacgggacacgcggcaggaacggggaaagaggcaaaaccgagaaaagga

SEQ ID NO: 119010 - RNA, 70 nt, Homo sapiens
aacaggcggcaagaacaaaaggagccacagcaaaaagccacgccacaaacaagggaggcgaggacggaca

SEQ ID NO: 119011 - RNA, 109 nt, Homo sapiens
gcaccgaaagcccagcagacgcaaggagcagccagagacagaaggaaaggagaaccggggcaagagacggcagacaaacacagccgagagaaggcaggcgacgggcaaa

SEQ ID NO: 119012 - RNA, 79 nt, Homo sapiens
cggccacccgagaagggagacgacgcgcgggccgcgagcggggcgacccgagagacaccacacaccccccagggcccca

SEQ ID NO: 119013 - RNA, 77 nt, Homo sapiens
gacccacaggccagagaggagccaggcacagcagggaccagaaacgggaaaccgcgggggcaggagaaggaggcagg

SEQ ID NO: 119014 - RNA, 76 nt, Homo sapiens
cgcggccgacaacagccggcgccgccacggaccagggcccgaggagggcggaaccacacgaggaggggcgcggacc

SEQ ID NO: 119015 - RNA, 81 nt, Homo sapiens
gaagccgccaacgaggacgaccaggcacccggggcgacgcgggaggaagagcagagcagaagagaagaggaggaggaggaa

SEQ ID NO: 119016 - RNA, 78 nt, Homo sapiens
aagcgccccccccgccccccaggaggggcgagagggagccgcagcgagcaggcagcagggagaccagaccaggacaga

SEQ ID NO: 119017 - RNA, 75 nt, Homo sapiens
gaccaaagacgacaacaaacgcaagagcagaaaagaacacggaagagaaccagccaaaccgaaaacaaagcagga

SEQ ID NO: 119018 - RNA, 73 nt, Homo sapiens
cacccgcaccggccacccccccggagcccggagcaagcgagaggacggcagaccgagagaccaggcaggcaag

SEQ ID NO: 119019 - RNA, 77 nt, Homo sapiens
acccaccaaccgcgaagcccgaggcagcccaagccgggcccgcacgccgagcaaagcccacaaaagaggcagcagac

SEQ ID NO: 119020 - RNA, 78 nt, Homo sapiens
cgggagcagcgggcacggggccacgccagcccgggggcacgaaggcgggaacaccgagccagaagggagcaaagcgac

SEQ ID NO: 119021 - RNA, 80 nt, Homo sapiens
cgaggggaccaccgaccgcggccccagacagggcaggccgggccccgccccacggacaaccagggaagcagaaggcaagg

SEQ ID NO: 119022 - RNA, 72 nt, Homo sapiens
ccagagcgaggacgccggcaggccaagagcccagggcaaaaacagaccaggaacgcagaaaaggaaaggaaa

SEQ ID NO: 119023 - RNA, 78 nt, Homo sapiens
gagcccaggccacagacccacacgccggcggccaaggcacgcgagaaggggagggggagaaagaagaggaagaagcca

SEQ ID NO: 119024 - RNA, 77 nt, Homo sapiens
ggaaacccccgggaccgggagcaagcacagcaaaggagaccaaaaccaggggacaagagaaaagacggggcagaaga

SEQ ID NO: 119025 - RNA, 86 nt, Homo sapiens
aggaaaacaaccccggggccacaaagcgagacaagccgagaccaccaggagcagagcggaggcaaccagccaaaacaacggaaaac

SEQ ID NO: 119026 - RNA, 76 nt, Homo sapiens
acacaaggagccacaaggacgggaagcaccaaagcgcgccaagagaccaaagaaacgaaagggagccagcccagca

SEQ ID NO: 119027 - RNA, 79 nt, Homo sapiens
aaaggccgcgggaacgcgcgccgccgacaaggcgcacaacaggggacagaccagagcaggaccaaaggcgcacagagcc

SEQ ID NO: 119028 - RNA, 75 nt, Homo sapiens
gcagccgggacagaacgaacaggcaaagcccaaaaggcaaggcacaaggaagccaccaccagagggcaagaaggc

SEQ ID NO: 119029 - RNA, 72 nt, Homo sapiens
cgcacagagaacggcacccaggccaggcaccggccgccaccagggcacgacagccagcaggggcagaagcag

SEQ ID NO: 119030 - RNA, 78 nt, Homo sapiens
cccaagcggcgccgaagaggcggagggcaggccgggaacgccacacaacagggccccgggaggacccacacgcagggc

SEQ ID NO: 119031 - RNA, 79 nt, Homo sapiens
gccgccaagaaagcagaaggaacacccgaaccaaggaagcaggccagaggacacaaaagagagaagccccagaagagac

SEQ ID NO: 119032 - RNA, 62 nt, Homo sapiens
gcgccacaaggcaacacgcccacccgccaacgcaaggggaacgaaacgcacacccggcccca

SEQ ID NO: 119033 - RNA, 49 nt, Homo sapiens
cgccccacgaccgccagaacaccgaccgaggacaacaggagagaagcaa

SEQ ID NO: 119034 - RNA, 38 nt, Homo sapiens
aagagcccccggccagaagagccccaacgacagaaaaa

SEQ ID NO: 119035 - RNA, 75 nt, Homo sapiens
gcaggacccggacccggaagagaagagggggcaagaaagaggagacaaccacaagacagaacccaggagggggac

SEQ ID NO: 119036 - RNA, 79 nt, Homo sapiens
cgccgggccgcgccaggaagccggccccgcagccggcgcgcggccagggcagcggggaagaagaaaaggaaccgaggcc

SEQ ID NO: 119037 - RNA, 71 nt, Homo sapiens
acaagggaccaacacgagcggaaaccccaaagagaggagaaacagcgacgacccaaaggggaaacgggagc

SEQ ID NO: 119038 - RNA, 78 nt, Homo sapiens
ggaagaagcaagccggacccacgacggcaggaaaggaggccaggacggagagggagaagggagcgcagacgcgacgga

SEQ ID NO: 119039 - RNA, 82 nt, Homo sapiens
caacaggccccccgccccccccccgcgggcaccgaggacccgcccgcccaggagaacacgagacccgcacaaaaccccgccc

SEQ ID NO: 119040 - RNA, 81 nt, Homo sapiens
agcaccgcggagggagcgcgaaaaagcggggaaggggggcaaaaaaaagaagcaagcgaagcaccgagcacccacccgaga

SEQ ID NO: 119041 - RNA, 74 nt, Homo sapiens
gaccagaaacaagcagaagagagcgcgagcagaaccgagaagcgccccagaaaggaggacaccaggaaagcaaa

SEQ ID NO: 119042 - RNA, 74 nt, Homo sapiens
aaccccaggaaacggccagcaacagccaaccagaaaaccagaaacaccggcagggagcaaaccccccaacaagc

SEQ ID NO: 119043 - RNA, 64 nt, Homo sapiens
ccaaaagacacaagggcacgaaagagaggcgcggccagcgaagaagacgcagccagacccggcg

SEQ ID NO: 119044 - RNA, 71 nt, Homo sapiens
cgaacgcccacagagggcgcagacggcaggcacagaggacaggaaaagacccagagccggaccccggaggg

SEQ ID NO: 119045 - RNA, 88 nt, Homo sapiens
cagccccaaagccgaacaggcagggccagacccagggaacccgagcgcagaggggaagcagaggacccaggcgaacagcaaggagggg

SEQ ID NO: 119046 - RNA, 69 nt, Homo sapiens
cggcggcgggccgggcagcccggccgacaaccacgggccggagcgagggagagcaggaacacagagagg

SEQ ID NO: 119047 - RNA, 77 nt, Homo sapiens
ccgcgcccgcaggacgccccagccaggaacacagaaacgccccgggccagccgccaaggccgcccagagccccagca

SEQ ID NO: 119048 - RNA, 50 nt, Homo sapiens
cagcacggggcaaagacgcaaccccaagagggagaaaaaagagaagacca

SEQ ID NO: 119049 - RNA, 71 nt, Homo sapiens
gggacgaacagcgggccgcagccaagcgccgccggccaacagagacaggcaccacggcgagacagagaggc

SEQ ID NO: 119050 - RNA, 77 nt, Homo sapiens
acgccagaaacggccacacgaagagcagacccggggcccacgcacagaccccgaagagcccaaggaaaggcccaggc

SEQ ID NO: 119051 - RNA, 35 nt, Homo sapiens
ccaagccgcccgagacgacccgcgacaccaacacc

SEQ ID NO: 119052 - RNA, 103 nt, Homo sapiens
ggagaagaacgggacccgcgcaagcggcacaaaggaggaaacagaaacaggaagagagaaggccacgcccgaccccaagcaacaacggggcagggacaggcgc

SEQ ID NO: 119053 - RNA, 34 nt, Homo sapiens
aaaacccgaaagagggggcagagacggaccagag

SEQ ID NO: 119054 - RNA, 71 nt, Homo sapiens
gcaggcccgcggccggcaccgagcacaggagggcagaccaaaagcacaaaaagaacggcccgaagacccca

SEQ ID NO: 119055 - RNA, 35 nt, Homo sapiens
ggaaccagcagaagaacaggcccagcaacggccac

SEQ ID NO: 119056 - RNA, 88 nt, Homo sapiens
acaacccaggcccaaacgcaaacgaacgccagcgacgcgcacaaaacaaacaggacgacgcagcacagagaggaaacgaggaaacgac

SEQ ID NO: 119057 - RNA, 78 nt, Homo sapiens
cacgcaagcacggcaagaaacgacagcaagcccagagacaccgaggcccggcacgagccgccagcccgccagagcgcc

SEQ ID NO: 119058 - RNA, 68 nt, Homo sapiens
cagaggcagacaacacaaaagggcccgagggcccggaaaggggagcacagaggcggaacaagaaacgg

SEQ ID NO: 119059 - RNA, 72 nt, Homo sapiens
agacaaccaaacccaccaccggcaggcgaacccaggcacccagagacggagcggaaaccaaggaagaaaagc

SEQ ID NO: 119060 - RNA, 71 nt, Homo sapiens
ggaagcagaggcacagcaacggggacccggaggacgggaacagcaggagagcagggagcggccggcagcac

SEQ ID NO: 119061 - RNA, 92 nt, Homo sapiens
aaaaacgcgggggacacccagccacacgcggagaagaggaccaaagacagagacaagcggggaagaacggcggagcacaccgaccaaaaaag

SEQ ID NO: 119062 - RNA, 71 nt, Homo sapiens
ccccaggacaacagcacacgcacccaagcgggcacccaacaccgccgaaagccgggccgaacaaggagaag

SEQ ID NO: 119063 - RNA, 52 nt, Homo sapiens
gcgggaggccaccgccaggaccgcgaagcccagagcacccaaggaccacccc

SEQ ID NO: 119064 - RNA, 52 nt, Homo sapiens
aaggaccaagaaccaggcaagcagaagaggaacagaagaagcagagcagaga

SEQ ID NO: 119065 - RNA, 76 nt, Homo sapiens
aaaacagaagcagaagcacagaccgcgaacaggaaagcgggaagagacaaagggagaagccaggaagaggaggacg

SEQ ID NO: 119066 - RNA, 72 nt, Homo sapiens
caggcaagaggaggagaaaagacgcggagacaaccgagaaagagaaagccaaccccagacaacagccggggg

SEQ ID NO: 119067 - RNA, 56 nt, Homo sapiens
caaacaccaccaccaaggcagggaggggaaccaggggccgaaggcgacacacgagg

SEQ ID NO: 119068 - RNA, 77 nt, Homo sapiens
cgagaagccgaaaagcgcagcgagcggagccgccggaggccgcggagacgggggcacggaggcggaacaacaggaac

SEQ ID NO: 119069 - RNA, 68 nt, Homo sapiens
aacaggaagggcacaaaggaaaagcacaagaaggggcaggcaaagcacagcgcaagagacgaagagcc

SEQ ID NO: 119070 - RNA, 79 nt, Homo sapiens
ggacaccccaacagaaggggaaggggagccgcacaagagggggaaacggggaaaaggcaagcagcggaagagaagaagg

SEQ ID NO: 119071 - RNA, 58 nt, Homo sapiens
gcagaggaagaacagagggaccaagaaaggcccagggaccaaagcccggacaaggccc

SEQ ID NO: 119072 - RNA, 81 nt, Homo sapiens
ccagcagcgcagccgcagccgggcggcagggccccgagccggcccgggcgagggcgaaggcacaagagaggcagaaagaaa

SEQ ID NO: 119073 - RNA, 59 nt, Homo sapiens
caaaaaagagacccacagccagcaacaccagccccccaagagaacccagggggagccac

SEQ ID NO: 119074 - RNA, 81 nt, Homo sapiens
ccaggagcccagagaccgagcccggcggcgacggcggggcagcgcaccggcaggcgggcacaggaagcaccagagccaaaa

SEQ ID NO: 119075 - RNA, 78 nt, Homo sapiens
acaggcggcacgacgggcaaagaggccacagaggcagccaaggaaccgcggcagaaaaggggcaggagaagcggaaac

SEQ ID NO: 119076 - RNA, 55 nt, Homo sapiens
agggccggcgccacacacccacgggcacagcaccaggacccgggaacccagaaca

SEQ ID NO: 119077 - RNA, 84 nt, Homo sapiens
cccgagcagcgggacacagacacgggcaaggagaagcagaggaaaacaacggaaggagagcaagcacaaagcacaggccagcgc

SEQ ID NO: 119078 - RNA, 82 nt, Homo sapiens
gagcccaccaaggcaaccagacggaccaccacaggagccggcgggaggcaggagaggccaagagaaggacggagccacaacg

SEQ ID NO: 119079 - RNA, 80 nt, Homo sapiens
acagaaagacacacggagacaaaccgcgccaagcaaggccagcagagcccaagggcgccagccaccacccagacgaccag

SEQ ID NO: 119080 - RNA, 61 nt, Homo sapiens
caacccggaccagcagaaaccagagggagccacaacgaccgagcggacaggagacagccag

SEQ ID NO: 119081 - RNA, 77 nt, Homo sapiens
cgagagcgcggagcgggcggagcggcgagagcccccacgggagacagacccagcacggaccccccccccagccgggc

SEQ ID NO: 119082 - RNA, 74 nt, Homo sapiens
acacgggagaaagggagccgagcgagaccacgcaccacgggcgaagacccgaggaccgggaacgaaggggcccc

SEQ ID NO: 119083 - RNA, 79 nt, Homo sapiens
cagaccaggccgcccacaccagaagcagagccgcaaaggccagagcagacgacaccacagcccgaaggaaaagaaaaaa

SEQ ID NO: 119084 - RNA, 71 nt, Homo sapiens
accggccagaaacagccagagaagcgagccaaagccgcaaagccgccggaagccaaagagaaaagagggaa

SEQ ID NO: 119085 - RNA, 81 nt, Homo sapiens
ccgaccccaggcagccccgcacgagcggcaaccgaaagccagcagcgggacacggcagaaacagagacagaccaagcccgg

SEQ ID NO: 119086 - RNA, 56 nt, Homo sapiens
ccacaagaaggcagcaaaccaagcaaccagacgcagaaaacagacacacagcggag

SEQ ID NO: 119087 - RNA, 67 nt, Homo sapiens
agcgcggcccgaggcccgcccagagcggccacacccaagaccggcagacagaacaaaaaaacacaaa

SEQ ID NO: 119088 - RNA, 56 nt, Homo sapiens
agcagggaggagcaaccaccccagagggagaaccccagcccgagaacacgaaacaa

SEQ ID NO: 119089 - RNA, 68 nt, Homo sapiens
gaggcaacaaacaagaagcaggaggaagggcagaccaagagaagcggagcaacaccccgcaccgggaa

SEQ ID NO: 119090 - RNA, 82 nt, Homo sapiens
aggccagggaagagacggcgcccagcaaagagcggcacgcagaggggagcgaagaagggagccacccaaaacacgcggaaac

SEQ ID NO: 119091 - RNA, 79 nt, Homo sapiens
agggaagcgcagaaagcaggcgaacccgcggcgcaaaacgggggagcacaaaagagcagcaacccacgaaagacccgac

SEQ ID NO: 119092 - RNA, 80 nt, Homo sapiens
ccgaggccccccagaagcagaagcagaaagcccacagaaccgccaccggagcaagagcgacaacaacacaaccagaaaac

SEQ ID NO: 119093 - RNA, 83 nt, Homo sapiens
ccacaccagaagagggcgagccccagggcccacgggagaaacgggcccaaggggagcgggccacccgggcccccggacccccc

SEQ ID NO: 119094 - RNA, 74 nt, Homo sapiens
gccaaagagcgaagagagaaacaggcaaaagcggaacaagaaagcagccgagaacaaggcaaaaacgcgaagcc

SEQ ID NO: 119095 - RNA, 36 nt, Homo sapiens
gacaggcacgccacacacaggcagcgcaggcacccc

SEQ ID NO: 119096 - RNA, 61 nt, Homo sapiens
caagccccccaggagaagacacgacaggaagcagaacggaccccgaccacagaagaacagg

SEQ ID NO: 119097 - RNA, 72 nt, Homo sapiens
ccagggccggagccaggaagcgaagaaccgcggagaagaagaggaccagaagagcaggagccaaagaacaga

SEQ ID NO: 119098 - RNA, 71 nt, Homo sapiens
cggagaacgccaagcgccgccacgacaaggaaccaaaggggagaaaaggaccggaaaggaaaacagagaaa

SEQ ID NO: 119099 - RNA, 62 nt, Homo sapiens
cccccacagaaagccagaccccgggaacagagagaccagcgccccacaagaaacccaaagaa

SEQ ID NO: 119100 - RNA, 102 nt, Homo sapiens
aagcaacgacggggacacagcagaagcacaccaagaaaaggcgcaaccgaaagcacgcgcgggaaaaaaccccagcaaaagggagccggggacggcagacac

SEQ ID NO: 119101 - RNA, 84 nt, Homo sapiens
aaacaagccaacccaggaggaaaaacgcccgcgcagaacccagaaaacagaacaccacgggacaaagccagaaaacacgccgca

SEQ ID NO: 119102 - RNA, 72 nt, Homo sapiens
agaaaacccggccagggacaggaaagaaggaaaaggaagcggaagagaagaccggcaacaagaaaaaaagcc

SEQ ID NO: 119103 - RNA, 67 nt, Homo sapiens
cgaaggcgccggccaaaagaggagccagggagaacaaggaacgaccaagcacaaaagacaaaaaagg

SEQ ID NO: 119104 - RNA, 76 nt, Homo sapiens
gaaaaaggggcgccggccggccccagaccgcaaacaagcaagagaaaaaaacaagaagagaggacaccccggaaag

SEQ ID NO: 119105 - RNA, 80 nt, Homo sapiens
gcgagaacgccacgcgggccggcgaaagcgaacggagcggagcccagaaggggaacggcggaccacaaagagagaaccgc

SEQ ID NO: 119106 - RNA, 82 nt, Homo sapiens
aagagcgcggaacaggacgccccgacccaggaggcggcccagggaccggaggacgcgcgccaacgggaccccggaggagcgc

SEQ ID NO: 119107 - RNA, 70 nt, Homo sapiens
ccagcccagagccacgacggcgaggggaaaaggaaggaaaccgggccagggagacggcaagccagaagag

SEQ ID NO: 119108 - RNA, 81 nt, Homo sapiens
acggccccggacgaaggaccgcagcacggagcgcagaaccggccgcgcccgcaccaacagggacgcagcaacgggcaggaa

SEQ ID NO: 119109 - RNA, 68 nt, Homo sapiens
ccaagagagaaaccaacaagcgggacccaagaaacaccgaaagcaccacaagggaaaaaagcaacgaa

SEQ ID NO: 119110 - RNA, 79 nt, Homo sapiens
ccgaggggagcgcggggcccggcagaaaggcaaaagcagaccggaaaacccaccggcaagaccacacccgaggggagcc

SEQ ID NO: 119111 - RNA, 80 nt, Homo sapiens
ccccggaccgagccgacgccgcggggcagcgggccggcgccggcgcgggcgacccagcaacgcggccggccaggggcaag

SEQ ID NO: 119112 - RNA, 94 nt, Homo sapiens
aggcgcgccgcacccggacggaccgccacgcgcccgggagacgcccgcgccgccgagagacggggcaccagagccaggaggccaacccgacccg

SEQ ID NO: 119113 - RNA, 60 nt, Homo sapiens
agagagaaaaaccggacgagcgagcaagggcaaagagcagacccagaaagaaaaagaaag

SEQ ID NO: 119114 - RNA, 59 nt, Homo sapiens
cggccaggaaaacaagagcaagaccccaagcagcggacaggcgcaggggcaggcaaacc

SEQ ID NO: 119115 - RNA, 80 nt, Homo sapiens
ggcaggcgcccgcccacccacagagagacacgcggaacaagacaggccccccaaccacagcgcccccgcgccacccagcc

SEQ ID NO: 119116 - RNA, 59 nt, Homo sapiens
cggcccacacgggaagcgcgggaagggaaaggcggggccgacagcaccgccggcgaccg

SEQ ID NO: 119117 - RNA, 63 nt, Homo sapiens
accgagcaacgagggcagacagcaagcaccccccgcgaaagccaccaccgacccgaggaccgc

SEQ ID NO: 119118 - RNA, 55 nt, Homo sapiens
aggaggcacccagccacacccagagaccgggaggcagcaacccagaggccaccgc

SEQ ID NO: 119119 - RNA, 64 nt, Homo sapiens
gcaagcagaacggaaccagaaccccaccgcggaggaaaccccccgcgacccagacgcagcgagc

SEQ ID NO: 119120 - RNA, 79 nt, Homo sapiens
agaggcgccaccacagagccacacgaggagaaccagaggacaaaaagcccagggaacaacaagcgcaagaggaagaaaa

SEQ ID NO: 119121 - RNA, 73 nt, Homo sapiens
gcgcgcggcaccaggccgcgacccagggggaaagccaccgaaaccaccgaagacaacagccaaaaccaagaga

SEQ ID NO: 119122 - RNA, 72 nt, Homo sapiens
aaggaaaggcccaccgaaccacacccaggacaagcagaagaacagcagagggccaggacaccacaagggccg

SEQ ID NO: 119123 - RNA, 80 nt, Homo sapiens
caggaagagcaaagcgccaggccaaccagagacaccagcaggacaggaaaaaaagagggagaagcccaccacgcaacggg

SEQ ID NO: 119124 - RNA, 83 nt, Homo sapiens
agaaggaccagaaaaccgacaacccccagaaagccaagccggggaagcccggggagaaccgcccgccgcagaggaaagcgggc

SEQ ID NO: 119125 - RNA, 70 nt, Homo sapiens
aacgcagcaaagccacgggggagaaggccgaagacgacacggccacaagaagagaaaacgcaagccaacc

SEQ ID NO: 119126 - RNA, 58 nt, Homo sapiens
gcaacagccagagcaagggggccgcaaagcccaagggcaaacgcaacccgaaaaccca

SEQ ID NO: 119127 - RNA, 61 nt, Homo sapiens
ccgccaccacgcacgggcgcacggaggacgggaaaaccagcagcagagagagaggcaccgg

SEQ ID NO: 119128 - RNA, 52 nt, Homo sapiens
ccacaaagggaagcaagagaaaaagaacaacgcgaaacacaggggaaacacg

SEQ ID NO: 119129 - RNA, 76 nt, Homo sapiens
ccagccaaggggcaggagagaagggagcgaacacaggccccgacggcagcccaccccgagcgcggaaccgcagggg

SEQ ID NO: 119130 - RNA, 84 nt, Homo sapiens
agagagcaggggggcgccaggcacccgagaaaggggacggagaggcggccgagcccaagcagacggcagcaggagcacgaggcc

SEQ ID NO: 119131 - RNA, 40 nt, Homo sapiens
agcccagagagggcacaggcggacccggacgacaccaaag

SEQ ID NO: 119132 - RNA, 74 nt, Homo sapiens
ccccgggggacacccccagaggaaaccgcgcaaccggaacaagacacgccaccaggggccccgccgcaaccggc

SEQ ID NO: 119133 - RNA, 71 nt, Homo sapiens
cggccacacggagccaggacgccacggagagaagaaaacgaccggaaggacgcccaggaccgagaacgccc

SEQ ID NO: 119134 - RNA, 71 nt, Homo sapiens
agcggccggaaagagccccgcaagggggcacacacaggcgaaggggcgccgaaccgagcccgaagggaagg

SEQ ID NO: 119135 - RNA, 74 nt, Homo sapiens
gaaaagcgcagcgagcggagccgccggaggacaggggaacccaccagccggacccagggaaaaaacgcaaacgg

SEQ ID NO: 119136 - RNA, 49 nt, Homo sapiens
aggaagccgaaacaggacacaggcggagaccgggagacgggccaaacag

SEQ ID NO: 119137 - RNA, 71 nt, Homo sapiens
gcagggcgcccccgcgaacgcccaagcaaaaacagggacagacaaaaccgccccacccaccaccaagagag

SEQ ID NO: 119138 - RNA, 75 nt, Homo sapiens
gaagcagcccagcccaggaacaagagagaacgagcgagaggggaaagagagggaggaggagacaacagagagagc

SEQ ID NO: 119139 - RNA, 64 nt, Homo sapiens
cgggacacccgcgaggccggaaaaggccagggaaggccccaaaacaccaaccagagcacagaga

SEQ ID NO: 119140 - RNA, 51 nt, Homo sapiens
cggaggacacggacgggcaagcaggcccaccacgcaccacgaccccagagc

SEQ ID NO: 119141 - RNA, 61 nt, Homo sapiens
ccgaggcaccgaggcaccagaggaggcagggcggacggccacgcaaccccgaccccggcaa

SEQ ID NO: 119142 - RNA, 64 nt, Homo sapiens
caacagacacacacacgccccacagaggcgggacacaaaaccaaccccgggagagagaccggca

SEQ ID NO: 119143 - RNA, 80 nt, Homo sapiens
agggaagagacggcgcccagcaaagaccaagaaaacacggccaaaacaggggaagacgccaccgacaaaaggaaaacaaa

SEQ ID NO: 119144 - RNA, 81 nt, Homo sapiens
gcgcggggacggcacaacggaagcaccagacaagacaggggagaccacacccaaaacgaaacgggaggcagccagaaggaa

SEQ ID NO: 119145 - RNA, 80 nt, Homo sapiens
gcgaaagcaaggaagcggggaagaggaccacacgcccagaggaccgagaagaacgagaggcacaagaccagaagaaagaa

SEQ ID NO: 119146 - RNA, 84 nt, Homo sapiens
cgagcacagagcccgccgccgaccgccgcccgccacacccgccgccagacaagcagaccggaagaccgacggaagaccacaccc

SEQ ID NO: 119147 - RNA, 79 nt, Homo sapiens
caggggaaaacccccgggaccaggaccccggaggaaaagcggaagcggcagcggcgaacgccggaacggaccaacagga

SEQ ID NO: 119148 - RNA, 108 nt, Homo sapiens
aaccacggcgccagcgcgcaagaggccaggcgggccgccgccgggccgcacaggaggggcagcagcaggacagggaacccgggagacagcaacagacggaggaacggg

SEQ ID NO: 119149 - RNA, 60 nt, Homo sapiens
caggcgggacagagggagccaggcagaggaaaaccaacagagacaacaaagagaagaaac

SEQ ID NO: 119150 - RNA, 84 nt, Homo sapiens
cgggccgccgagcggacccggaccgggggcgggggccggccccagcccagacggaagagagagacccggcccaggagcgcccgg

SEQ ID NO: 119151 - RNA, 77 nt, Homo sapiens
gcaggaaacaggcggcggcggggggagcgggaagacaagcagaccggaagaccgacggaagaccacaccccgaggga

SEQ ID NO: 119152 - RNA, 76 nt, Homo sapiens
ccgccacaagcaacgcgggaagagaaggaaacaggagccagaaaaaaaaaaagaaaggacaagggaggccaggaaa

SEQ ID NO: 119153 - RNA, 76 nt, Homo sapiens
gcccccacccagccagccggcaccgccaccccacaggcccccaccaggccgcggcagcccaaaggggcacaaaacg

SEQ ID NO: 119154 - RNA, 85 nt, Homo sapiens
gaccacaaggaacgaggggccccaagagcacagaccagcagccgccaaagcagagcaccggccagaacaagccaaggagccaaga

SEQ ID NO: 119155 - RNA, 83 nt, Homo sapiens
ggaccaggggcccggaggagcagggcagagcacgcgcgcagcgaagcccagggaggccaccaggcccaagggaagcaagaaaa

SEQ ID NO: 119156 - RNA, 74 nt, Homo sapiens
caaccagcaccagaaaagcgcggcaggagacggaccagagccccggggcccgcgcaaaaccaaccggaagggaa

SEQ ID NO: 119157 - RNA, 58 nt, Homo sapiens
ggaggccagcaaggccagcacagccccgcgacaaccagacacagacagaagacaagga

SEQ ID NO: 119158 - RNA, 86 nt, Homo sapiens
cccccggggcccaggcccggacccgcggccggcccggcgcggcccagcgccccagagaagagacgccaacagaccggggagaaggg

SEQ ID NO: 119159 - RNA, 79 nt, Homo sapiens
aggaacccaccgccgcccccaccgccagcccggccgcgagcgcggccgcaggagaacgccaggagccagaaccccgagg

SEQ ID NO: 119160 - RNA, 79 nt, Homo sapiens
gagccgcagcacgagccaaaccgaggccaccagccaggagcccaagggaggggaagccgccggccggggccccagggcc

SEQ ID NO: 119161 - RNA, 72 nt, Homo sapiens
agaaccagggagaagccgcccgaacaccaggaagaaagagggccacggacagaggcgcagcagaggaaccgc

SEQ ID NO: 119162 - RNA, 73 nt, Homo sapiens
gacccaacagcaaaggacccccacccacccgagaacaaacaaccgccagggaacagcaaaaaacgagagcagc

SEQ ID NO: 119163 - RNA, 58 nt, Homo sapiens
cgaaggagaaaaagcaggggaagcagcgcacgccagaaacggcgaggaaagagaggag

SEQ ID NO: 119164 - RNA, 75 nt, Homo sapiens
cagccacaccggggagccagcggcacgaccgaaaccacgaggaaaccagacaaggggagcgaaaacaaggcacaa

SEQ ID NO: 119165 - RNA, 83 nt, Homo sapiens
caaggagaagagccaggaaacaggaggaagaacccaagccaaagcccaggaacaaggcacaaggagaggggaccaccaggaag

SEQ ID NO: 119166 - RNA, 75 nt, Homo sapiens
ggcggccggcgagaggaccaacggagcgcgaggcgggcgcggagaagcgcggaggcgaaggagaacacggcgagc

SEQ ID NO: 119167 - RNA, 47 nt, Homo sapiens
gacagaaaggagggacgaagacaccgacggcggagggaaaccccgca

SEQ ID NO: 119168 - RNA, 57 nt, Homo sapiens
cgcgaagagagaagaggcgcgacggaccagagcagccaaaagaagaacccggacccg

SEQ ID NO: 119169 - RNA, 79 nt, Homo sapiens
gcaggccgcgccaggagccaccaagcggcacaggcgccccagacccggaagcccaagacgcaaaaagagaaccaagaaa

SEQ ID NO: 119170 - RNA, 84 nt, Homo sapiens
gagagaaccgccagaaaggagcggaagaggccacgaggcgcacaccgccagcccaagaaaaaggagaggagggggcgcagcaaa

SEQ ID NO: 119171 - RNA, 97 nt, Homo sapiens
gcagacccaagaccggaacggagaacgaacagccaggcaggcccgaggcccggggagaacagaaccgacagaaaaagcaaaaggaagacagaagagc

SEQ ID NO: 119172 - RNA, 76 nt, Homo sapiens
cacggcgacgcggcggggcggccgaggaacccccaaggaggcaccgagaaacgcaggccaacaaaacgagcaaaag

SEQ ID NO: 119173 - RNA, 80 nt, Homo sapiens
agaaagccagaggcgaacacagagcgaccaaagcagggcacccccgaaggacaggcacccggcccacccgcggagggggc

SEQ ID NO: 119174 - RNA, 79 nt, Homo sapiens
acgaaggaaagcagagaaagggaccccagcgaaccccccaggcccacccagcacgagaacagaaagcggggcagaagaa

SEQ ID NO: 119175 - RNA, 82 nt, Homo sapiens
ggccgccggagagccgacgcacgcgaggagcggcaggacgcgaggagcgggcaagaaccaagaaggagcgagggaggagcag

SEQ ID NO: 119176 - RNA, 80 nt, Homo sapiens
cggaaggacgaggcgaggcgagaaacgagcacgagagaaacagaggacgaccgggaggacaagaagaggaagaggaccac

SEQ ID NO: 119177 - RNA, 71 nt, Homo sapiens
gggaaaccggaacaacgcacccaccagcaaagaaagggaagcagcgggagaggaggaacaggaggcccgga

SEQ ID NO: 119178 - RNA, 73 nt, Homo sapiens
agcgcccagacacccccgaagcgacgggagagccccacacgcgacgacgacgggcgaagagcccgagcaccag

SEQ ID NO: 119179 - RNA, 93 nt, Homo sapiens
ggcgggaggagggaaagagaaggcgaggaaccagcaaccagcagcaccgagaggggagaagaaccaaacaaggaaaacgaacaaaaacagggg

SEQ ID NO: 119180 - RNA, 87 nt, Homo sapiens
caggacccgaggccaggagccaggggcccagaagaggaaacggagggagcggccggaacccaagccaggcgccaagacgggaagccc

SEQ ID NO: 119181 - RNA, 74 nt, Homo sapiens
cgaccggcggaaacaaagccaccaggcgcacaccagccggggggggcacagagccccggaagacagcccccagc

SEQ ID NO: 119182 - RNA, 82 nt, Homo sapiens
aggagcccagaggcacagaggacagacagaaacgaaggaggcccaaccacaaaaggagccgacggaacccagacggagaaca

SEQ ID NO: 119183 - RNA, 60 nt, Homo sapiens
gaggcggcgagagaggcaggcggagccgaccgggccaggcgcagacaaaacgaagcgaaa

SEQ ID NO: 119184 - RNA, 43 nt, Homo sapiens
cacgagggaagccagccagccaccagccgagagaaaaggggac

SEQ ID NO: 119185 - RNA, 69 nt, Homo sapiens
gcaaaggggccagggaacaacaccaaacaccgcgaaggaaaggggacacaaaccacaaccgacagcgag

SEQ ID NO: 119186 - RNA, 64 nt, Homo sapiens
aagccccgaaacgcggcgaccacaggaggagcagacagaagagaggaaggccaaaacccaagcc

SEQ ID NO: 119187 - RNA, 74 nt, Homo sapiens
gcgcccggcgcacagcgccagaaaacggggacggacccaggccaggaaagaaagaaccgccacgggcgcgcagc

SEQ ID NO: 119188 - RNA, 77 nt, Homo sapiens
ccagcgcacccaggagggaacagcccaggagccagagacccaaagaagggcgacacaacgcccccaggagagaagag

SEQ ID NO: 119189 - RNA, 77 nt, Homo sapiens
cgcgggcggagcgggggcgcgcccgccgacccgcgcccgccccccagcaccgggcggacgccaggacacggccaagg

SEQ ID NO: 119190 - RNA, 75 nt, Homo sapiens
cccccaccggccgaccgcgcgccacgcacgagacacgagacaggagagaaaggagagacaaaggaccagacaaag

SEQ ID NO: 119191 - RNA, 76 nt, Homo sapiens
agaggagacacagcaggagagggcaccgcacccgccaagcagccaaaaggccgaccaagcagaacccgagaagagc

SEQ ID NO: 119192 - RNA, 118 nt, Homo sapiens
agagagagggggaacgaccacgggacgccaaccccacccgaaacgagacaacgcgggcaacagaaaaaggagaagcgggccagggaacggaaggcggccaaaggcgccacagggagag

SEQ ID NO: 119193 - RNA, 72 nt, Homo sapiens
aagcgaagaacaaagagacagaggagacagagaaaacacggaacagagagccggcggcacgacagcaaaagc

SEQ ID NO: 119194 - RNA, 56 nt, Homo sapiens
aggaaggccccacggcgcgccagccagggcagacgaacccggagagcgagaggcaa

SEQ ID NO: 119195 - RNA, 80 nt, Homo sapiens
aaagagagagcagcacccggaaagagaaaccccaagccaaaggccccacccggagacacgcccgagccaacccacagccc

SEQ ID NO: 119196 - RNA, 68 nt, Homo sapiens
ggagcggcggggccgcaccgagaaggagcaggggaaagaggaccaacgaggcaggggaacgaaagggg

SEQ ID NO: 119197 - RNA, 81 nt, Homo sapiens
agacgagaggcccacggagcaaacaggacagggggggacaagcagaccaggaggacgcacggccacgaccgagccggacca

SEQ ID NO: 119198 - RNA, 53 nt, Homo sapiens
gggccccggccccgcccgggcacagaggcacaacggcacgaaaagcaaaggag

SEQ ID NO: 119199 - RNA, 67 nt, Homo sapiens
acggagagacacaaggcaggagacacgcaaaagcggaaccgccagaggaggggaggcaagcaggggg

SEQ ID NO: 119200 - RNA, 78 nt, Homo sapiens
caagccaccgccaaaaggcaaaggacgcagcgccccaccagccggaaaggaggagagaaaagaagagaaagagaggga

SEQ ID NO: 119201 - RNA, 77 nt, Homo sapiens
ggagggcaacacagcgggggaagaagcgcagagacagcagaccaaaagcgcacgcggccacaagcgccagccgccca

SEQ ID NO: 119202 - RNA, 72 nt, Homo sapiens
ggccgaaaaagaggaaccaccagcgaacacgccaagacaaccgcagccacgcaggaaaaccaacacacagca

SEQ ID NO: 119203 - RNA, 36 nt, Homo sapiens
ggaagagaaagcgcgcggaaaaggaacagaagagga

SEQ ID NO: 119204 - RNA, 70 nt, Homo sapiens
cggcgccggccccgcggggggggcaggcagcaggggaaccgcgcgaaggacacaccaccggacacaagga

SEQ ID NO: 119205 - RNA, 69 nt, Homo sapiens
cgcgcaaaggccccggcaagaaggcaccaccaggccacgcagaacaaacaaagaaaccgacaaagccag

SEQ ID NO: 119206 - RNA, 76 nt, Homo sapiens
agagaacagcgcgaaaccacaacccaccaagcacccaacaagcacagagaccagggccggagcaaagagcggaggg

SEQ ID NO: 119207 - RNA, 74 nt, Homo sapiens
gaagcggacagacgggcagcggggccagaagcccccaggaggagaacgagcaacggaagccagaagaagcaccc

SEQ ID NO: 119208 - RNA, 62 nt, Homo sapiens
cgcgccccagcccgagccagggcgagaaacccaccgcccaccacacaggacacccagcggag

SEQ ID NO: 119209 - RNA, 58 nt, Homo sapiens
gcgcgaacggggcgggggaggccaccagccggacagccggcggaggggccacgggccc

SEQ ID NO: 119210 - RNA, 74 nt, Homo sapiens
gacgcgccgagccggaggcgcaggagggaagcccagaggcacggggcagaacaccaacagagggccgaccgggg

SEQ ID NO: 119211 - RNA, 85 nt, Homo sapiens
gacacgccggggggccaacggccggagccacacacacagcggaggacaaggagagaaaaagaggcgaggaaggagaggagacaga

SEQ ID NO: 119212 - RNA, 67 nt, Homo sapiens
cgccagaggggaggaaacacaagaaaaaggcaaggaaaacacaaacaccgcaagaccggccccacgg

SEQ ID NO: 119213 - RNA, 67 nt, Homo sapiens
cgcccacggccaccccgccgcgcaggagcgggcaccacccaaagaagcggaggcaggggaagcacaa

SEQ ID NO: 119214 - RNA, 42 nt, Homo sapiens
cgcgcgccggcgcgcgccgagggagcgaaccacgcgaaagca

SEQ ID NO: 119215 - RNA, 54 nt, Homo sapiens
cgccccacacggcgcggagagaagaagggcaggaccacggcacgaagagaccca

SEQ ID NO: 119216 - RNA, 68 nt, Homo sapiens
aggcacaagcagcaagaaaccccacagcggagaaaaaggagaaacccccaagacaaaccacggacgga

SEQ ID NO: 119217 - RNA, 75 nt, Homo sapiens
cagggggcaaagaccagagacgaggggaggaacagaaccgcacaacagaagaaacggacccagacgccagcaccc

SEQ ID NO: 119218 - RNA, 80 nt, Homo sapiens
cgacagcgccccgacaagaagccgaaggggaaagaccacagcaagaccacgcccccagccgggggaccaggccgaacgac

SEQ ID NO: 119219 - RNA, 81 nt, Homo sapiens
cgccgccgaagaagcacgaaagccccacccgccgcagcaagcagaggaccgaaggagaagaaggagaaggggaggagaagg

SEQ ID NO: 119220 - RNA, 75 nt, Homo sapiens
gaccaccccgcacaccacccaaggcgcaaaccagcgaaggccgaagaaaaagaaacagcccggcgaggacccaag

SEQ ID NO: 119221 - RNA, 53 nt, Homo sapiens
gacaccgggccagcccgaggggagaggccaaggacaggcagacagaccacacc

SEQ ID NO: 119222 - RNA, 51 nt, Homo sapiens
ccgcgcggcacaacccggggacgaccaccagccaggccggggacaaacagg

SEQ ID NO: 119223 - RNA, 78 nt, Homo sapiens
gcaaagggaacaggcaaaccggcgggaagaagaccagcgggggacagaggcgacacgcgggaggcagggagcccagaa

SEQ ID NO: 119224 - RNA, 81 nt, Homo sapiens
cgaccccgagaagcgcggaccggaccaggaccgggaccccaccggccaaccgcaccaagggggccaaagggcgagggcaca

SEQ ID NO: 119225 - RNA, 69 nt, Homo sapiens
acccacggcggacagccccgagacaggagaaacaggagaagcgaggaaaagaaaaaaccccggcccccc

SEQ ID NO: 119226 - RNA, 77 nt, Homo sapiens
agcccacccaccagggaagcccgcacgcggaagcgccaggggcggagaaaccacaccaccgcggaaacaggcacccc

SEQ ID NO: 119227 - RNA, 53 nt, Homo sapiens
cacgacacggggccagggaacccggcaccgccccaggacccacccaggaggca

SEQ ID NO: 119228 - RNA, 76 nt, Homo sapiens
ggagcccgccgccgcaggcacgaagaagcaaacacccaacgcggccggaggagaaggaccgaagggaagagccgac

SEQ ID NO: 119229 - RNA, 85 nt, Homo sapiens
gagacggcggggccagggccgggcgggaccgcggggaccaggcggagccgcccgggaccacggaagaagcggggggaaacccagc

SEQ ID NO: 119230 - RNA, 84 nt, Homo sapiens
acggcaagcccgggagagcagccagacagagagaagaagaaggaggccgcggccagaaacccaagaaaaagcgaaggaacgcag

SEQ ID NO: 119231 - RNA, 82 nt, Homo sapiens
cggacagagacggaagcacgaaggacaaacagcaggggccaagaaagaaggagagggggcgacaggacaccagacgaaaaca

SEQ ID NO: 119232 - RNA, 60 nt, Homo sapiens
cgagggcgccgagcaaccgccaggagcaggcagaaagaacaaggcagcccacacaaaacc

SEQ ID NO: 119233 - RNA, 83 nt, Homo sapiens
cacccgcgcgcgcccgggaggaaggaacgaggcaaggagcaaagcagcggcgcagcccggggagcacagcaagcgggagcagg

SEQ ID NO: 119234 - RNA, 51 nt, Homo sapiens
ggcacacagagagaccgaggccgggcggagaaaggaaggccacaccaggcc

SEQ ID NO: 119235 - RNA, 79 nt, Homo sapiens
caaggaggagccagaggcaacaaggcggacaagagaagccgccagggccaaggaaaggacgcagacccgaaagcaaacg

SEQ ID NO: 119236 - RNA, 77 nt, Homo sapiens
accgggacggaccgagaccggaccgagagcggaccgagagcgcgaaacgcacgagaagggacaaaggaaaaagagga

SEQ ID NO: 119237 - RNA, 78 nt, Homo sapiens
aacacagcccacccgcagcaacgccaagcagagaaagccggaaggaagacaaaggcgcggcaagcggggaagcacagg

SEQ ID NO: 119238 - RNA, 81 nt, Homo sapiens
ggaccagggcgaacaccgcccagccaacaggcaaggccccggggcaccagccgagggacaacgggcgccggaggagaagcc

SEQ ID NO: 119239 - RNA, 69 nt, Homo sapiens
ccggggaggaaaaccgacgaagggaagaacacaccaaacagacaagaaaaggaaaaagcaccaggcagg

SEQ ID NO: 119240 - RNA, 63 nt, Homo sapiens
aggcaggaccccgggacacccggaagccaggaaagaccgagcagcagaaccgagggggagcgg

SEQ ID NO: 119241 - RNA, 60 nt, Homo sapiens
aggcaagcagcgccgagcccaggcaagagcccgcgagaagacgcaagaacaagagccaca

SEQ ID NO: 119242 - RNA, 70 nt, Homo sapiens
acccgcccgagccgggagcacagcagaagggagaacggcagaaccaagggaccaaagcgggacggcaggc

SEQ ID NO: 119243 - RNA, 83 nt, Homo sapiens
ggggagcgcagcagcccggaagcgcgagccaccccaggcaagcgacacaaccagaacagaggcaggcagaaggaccaggcgga

SEQ ID NO: 119244 - RNA, 91 nt, Homo sapiens
acggcccgagacacaccaggccggcaggcgagaaaagcgagaccgcggcgaggaccggggaggaggccccggcagcgcagacccggcacca

SEQ ID NO: 119245 - RNA, 45 nt, Homo sapiens
ccacccccgacagggggccgccggcccagaagccacaggaacagg

SEQ ID NO: 119246 - RNA, 75 nt, Homo sapiens
aagcgcgggccaagagaccggaaaacggaaacaaggagcgagcagcagaagggaggaggaaagccagcaaaccgc

SEQ ID NO: 119247 - RNA, 79 nt, Homo sapiens
cggggcgaaccccgggcagcccgggaaacccaagcagaaagccggagcgggcagggcacacaaccgggcagcggacacg

SEQ ID NO: 119248 - RNA, 76 nt, Homo sapiens
caggagccgcggggcccgcccagaacagaaggacagcaccaggacaggaccggacgggaggaggcagccgccacca

SEQ ID NO: 119249 - RNA, 72 nt, Homo sapiens
caaggagagggagacaggccacgaaaaagggcaaaaccaggagcgagacaccagagcaagcaagcaacccag

SEQ ID NO: 119250 - RNA, 95 nt, Homo sapiens
ccagaggggagacccccgggggaagaagggggccaacaccacaggcaccaagcccacagaagggggaaggcggcaggacaaaacaggacaaggca

SEQ ID NO: 119251 - RNA, 81 nt, Homo sapiens
gccggaaggggcccgaagcccccgcaggaaccacaacccaaccagggcccgaagccagcagagagcggaggcgcaaaccga

SEQ ID NO: 119252 - RNA, 51 nt, Homo sapiens
cggagagcgacaccaaagacgggcagaagcgggccgcaaggccaggcgcgc

SEQ ID NO: 119253 - RNA, 60 nt, Homo sapiens
cgggcaggacgcagcacgcgcacagaagaaaggcccagcacaaaacacagacaaagaacg

SEQ ID NO: 119254 - RNA, 69 nt, Homo sapiens
ccggacgccgacgaaagccagcgagccccagcccagcaggggccagccggagggagcaagggcacagaa

SEQ ID NO: 119255 - RNA, 65 nt, Homo sapiens
agggccaccggggaaacaaacacacgcaggcagagaggaccgaggaggggcgccgaggaaaagac

SEQ ID NO: 119256 - RNA, 76 nt, Homo sapiens
gagaagggcgacaaaagggaagcaccgggcacaagacgaagacccccgacgcccagcccgaggcggaaacagcgcg

SEQ ID NO: 119257 - RNA, 81 nt, Homo sapiens
gggcaggaaggcagcgcacgacagcaaaaggcccagcaggagaagacagacacggccgcgcacaagccgccgccccaacga

SEQ ID NO: 119258 - RNA, 66 nt, Homo sapiens
gcccaccccagagcaccggcagcagaagagacaacacagaaaccagggcggaggcaggaacagcag

SEQ ID NO: 119259 - RNA, 71 nt, Homo sapiens
agcgcagcaagacggccgcgcggcccgcaggacaaaagcacccagacaaaaaccggcaagagacaaaacac

SEQ ID NO: 119260 - RNA, 53 nt, Homo sapiens
cacaagaccgaccaggaaaagggcggaaggagggaacggaggaaggaggggac

SEQ ID NO: 119261 - RNA, 77 nt, Homo sapiens
gagagacacaagcgggacagcccagccaggcccagagacgggccaagaccgaacggcgggcggccaggaagaaaggc

SEQ ID NO: 119262 - RNA, 84 nt, Homo sapiens
gacaccagccgccccaccagccgccgaagcgaccccaacgagacaaagcggcaagaagagaagaacggggaggagcagaccggg

SEQ ID NO: 119263 - RNA, 72 nt, Homo sapiens
ggaagcgccgccaggcccgcaggaccgccggagacagggcaacaaggcaccagcagaacagacacccccaaa

SEQ ID NO: 119264 - RNA, 98 nt, Homo sapiens
ccgggccacggggacgccaccaacaagacaaaagaacggaagaaaaaaccagggacagagacgggacccccgcacacccaacagcccccacagaccgg

SEQ ID NO: 119265 - RNA, 56 nt, Homo sapiens
agaggcagaggaaggcgcgaaagaaaaggcgcggccgaacccagcgagaaaccagg

SEQ ID NO: 119266 - RNA, 70 nt, Homo sapiens
gggacgggcggcgagcggaccgcgaggcccccaacccccccacagccgccaaggccggggggggcacaga

SEQ ID NO: 119267 - RNA, 68 nt, Homo sapiens
gaccacagccggccgcccgccaaaggaaagcgggaacgaacaaggcgacccacagaaccggcagcagg

SEQ ID NO: 119268 - RNA, 75 nt, Homo sapiens
ccagggagggaaaacccaggaaacagccaagggacaaggagacaaaggggaacacccaaccggagaaagacacgg

SEQ ID NO: 119269 - RNA, 57 nt, Homo sapiens
cggacaaacggaacagcacaggccggccggaaaagaaaggcagaggacagggagaag

SEQ ID NO: 119270 - RNA, 84 nt, Homo sapiens
ccaggcggagcaggagcggcggcgacggccacaggggcggcgacggcgcaggcgaagcgaaacaggccacagcggaacgacaaa

SEQ ID NO: 119271 - RNA, 63 nt, Homo sapiens
ccggccccggcccacaggggggggcaaacccgagagaacgggcccagaagggcagagacggca

SEQ ID NO: 119272 - RNA, 68 nt, Homo sapiens
gaaacggaccagaaccaggagacagacccagcacggaccccccccccagccgggcgaggccccgaaac

SEQ ID NO: 119273 - RNA, 86 nt, Homo sapiens
gggccgccgcggcagcaagaacagagagagaggggacagacgagagaacgagggggaacaccaggcaggaaaacaagcaacacgcc

SEQ ID NO: 119274 - RNA, 72 nt, Homo sapiens
gagcgggggccaaacccgggagaagaagaagcgcgagaaaagcaacggagccagggccaacgcaacaaggaa

SEQ ID NO: 119275 - RNA, 75 nt, Homo sapiens
aaaaagaagaagagacgagaagagaaagaagcaagcacggccacggaacagcgccgaagcgacccaagaaagacc

SEQ ID NO: 119276 - RNA, 85 nt, Homo sapiens
cagacagcgaccccagagaagagcagcccgacggccaggaggcgaagagacgaggaagcccaggagcccgaacacaaaaagaccc

SEQ ID NO: 119277 - RNA, 73 nt, Homo sapiens
agaaccacaggggaagaaccacagaagaaacaggacagaggcaaaaaagcccaacaacacggaagaaaaaggg

SEQ ID NO: 119278 - RNA, 52 nt, Homo sapiens
aaacaccagggacagagccacccaagaaagaccacccgcgcacggaaagccg

SEQ ID NO: 119279 - RNA, 65 nt, Homo sapiens
cgagagagacagggaggaagcgccgaaaagcgaagccagcaaagagacgacggccaaacacaaca

SEQ ID NO: 119280 - RNA, 88 nt, Homo sapiens
cgcccggaagcaggcagccaagagggccgagagcgcacccggccagagacaccgggggaggaaagacggaaggagccaagagggagcc

SEQ ID NO: 119281 - RNA, 78 nt, Homo sapiens
ccgcacccaagggcccccggggacaggaaccaacgcacagacaacaaccgacagcccccccacaaaggcaagacagag

SEQ ID NO: 119282 - RNA, 78 nt, Homo sapiens
ggggaaggagcccagcgacggccacgccccaccaggcgaggcccaagacaacccgaggaagaccagagcaccaggagc

SEQ ID NO: 119283 - RNA, 83 nt, Homo sapiens
ggggaacagcaggggacgcgggcgcgccggccgccgagcacgggcaccgccgggggacgagccaggggggagggacaggccgc

SEQ ID NO: 119284 - RNA, 65 nt, Homo sapiens
accccgggccaggcggagcggagagaaggcggagaaaagaacagagcaccacgaaagaccccgac

SEQ ID NO: 119285 - RNA, 69 nt, Homo sapiens
cgagaaaaccacccgaacacgcaggcagcggagggaagcaaagaagggcagagacacggagcaacaagc

SEQ ID NO: 119286 - RNA, 81 nt, Homo sapiens
accaacaccaggcacacagggcagaccaaccaaggacagccccgggggaggccggccggacaggcccggggaccacaacga

SEQ ID NO: 119287 - RNA, 77 nt, Homo sapiens
gacgcccagggcacccgcagcaaagagagggcggggacacagcgggcaggaagaagacgccgaggcccccccaccca

SEQ ID NO: 119288 - RNA, 78 nt, Homo sapiens
ggagcggccgccccagcaacgaaaacaaacggaagagagggcagcaagaaagaacaagaaagcgaacggaaaaaaaca

SEQ ID NO: 119289 - RNA, 81 nt, Homo sapiens
ccacaagagcagcacaaaaccaggccagcaaaggacgcccgaacggcgcagagcaggagcagacgcgcagggagcaacagc

SEQ ID NO: 119290 - RNA, 76 nt, Homo sapiens
gccacaagagagccagagcaacgcacaagaacgaaaccggaaccagacagaaggaagcagaacggaaaaagcaaaa

SEQ ID NO: 119291 - RNA, 86 nt, Homo sapiens
caagcgagccgagccgagccgagcgggggcgcagagcgcgggaggcggcggcggcgcggagcccaggccggggggggcacagagcc

SEQ ID NO: 119292 - RNA, 91 nt, Homo sapiens
ccacagccgaaacaaccaacgacaacaaggcagaagggggaaagcccaccgacacccagaacgggaagcggaaggcaaacacgaggaagca

SEQ ID NO: 119293 - RNA, 76 nt, Homo sapiens
cggaccaggcccaccccacgaggaaggcacaagcagagacacagaaacacagcaagaaggggaaacgcgcaggagc

SEQ ID NO: 119294 - RNA, 77 nt, Homo sapiens
ggcgcgggcaagaagcgcgaaggaaaaaggggaagacagaggcggaagaaagagcacagacggcccaccagagacac

SEQ ID NO: 119295 - RNA, 72 nt, Homo sapiens
gcgcagcaagacggccgcgcggcccgcagggagcacccacgggagaccggggggcaagaaaaggaagaagaa

SEQ ID NO: 119296 - RNA, 78 nt, Homo sapiens
cgcgccccggcccaaccaggcgccccgcggccggcgcggggacgggcagggaggaacgagagaccgaaccgaaaaggg

SEQ ID NO: 119297 - RNA, 76 nt, Homo sapiens
ggccaaacacagcacgacggcaccgagcgagcgagagagggcaaaaaacacagacaccggcgaacaacaagaaccg

SEQ ID NO: 119298 - RNA, 75 nt, Homo sapiens
cccgaggcagcgaggaaaagaaggagggggccacggagcgaaagccgcagccagagaagaccgcggaccgaaagc

SEQ ID NO: 119299 - RNA, 79 nt, Homo sapiens
gcggggcggcccaccaacaggaacagggcagacgagcggaggacacccaacccggacaggggcaaggccgaggggaaca

SEQ ID NO: 119300 - RNA, 68 nt, Homo sapiens
agcccgcagcacgaccagcaggaacgcccagagcaccacagagacgggaggcgacgccaaccgccaca

SEQ ID NO: 119301 - RNA, 67 nt, Homo sapiens
cgggcggcggcggcgggcgggagccccagaggcgccaccaggggccagaaccgcccacggcccccac

SEQ ID NO: 119302 - RNA, 72 nt, Homo sapiens
gccgacaggagaggcgccgagagggaaggagccgacaggggaaagaacaaggcgcacaccgcaacagcacac

SEQ ID NO: 119303 - RNA, 78 nt, Homo sapiens
cgccggcggcgcgcgacccccgcgcaggaaacaggaacacgaaagaggaaaaacgcacaagaaaccgaagccaaggag

SEQ ID NO: 119304 - RNA, 92 nt, Homo sapiens
cgggcccgggcgccgcggaccagcagcgcgggagagcggaccccccgccaccgcccgagcccaggcccgacaagccaagacagagaagagca

SEQ ID NO: 119305 - RNA, 87 nt, Homo sapiens
cggaagcggcggagagagcggagccggcgggcggggaacccaggccccgccgaggcggccagaaagggggagagagagcggagccgg

SEQ ID NO: 119306 - RNA, 80 nt, Homo sapiens
ccccaggcagcaccccaacaaaggggagggagcaccccgccagagcacgaaggaagaggcccggaaaggaaggggggaaa

SEQ ID NO: 119307 - RNA, 88 nt, Homo sapiens
cgggagaacgcagcgggcgcagcgcgccaaaaccgggacggacaagacccgggaaggaggcgacagaacccaccggcacaaccgcacg

SEQ ID NO: 119308 - RNA, 79 nt, Homo sapiens
ccgcgcggacccggccgggagaagcagcagcgcaagaaaccgggagaagccggccaggcaggcacaccccaccacaacg

SEQ ID NO: 119309 - RNA, 115 nt, Homo sapiens
gcaccagccggaccccgacacgcgccgcggccacaccccaggagcagccaccaagggcaagcgcgcggcaggacccagaccggaagggaggcaggagagcagacacggcccaccg

SEQ ID NO: 119310 - RNA, 80 nt, Homo sapiens
aaggggccggcgccgcgcgcagcagggaaacgagccaggcgacggggcagggaaaggcagcagaagcaacgcagcaagaa

SEQ ID NO: 119311 - RNA, 82 nt, Homo sapiens
ccggcccggacggagccggcggcgcggccggcagccggcagcgcagcggaacacacagcaggacgaaagagacaaaagccac

SEQ ID NO: 119312 - RNA, 82 nt, Homo sapiens
gacacaggacgagagggagagcaagaccacagcgcgcggcccccacaccacacagagagcgagcaagagcgaaggagaaagg

SEQ ID NO: 119313 - RNA, 86 nt, Homo sapiens
cgagagccgggggagcggggccccacacccccccgggggggcccgggaccgggagcccgggaccgggagccggggggccaccccga

SEQ ID NO: 119314 - RNA, 70 nt, Homo sapiens
caaacagcagggagaagagacaacaagacaggaccccgcgggcacggcgggacgggacaagacaccaagg

SEQ ID NO: 119315 - RNA, 72 nt, Homo sapiens
gaaaaacaggacgcaagaacgccgaaccaggaacaacaagaaccaagccacagggccaagcggagaacaacc

SEQ ID NO: 119316 - RNA, 94 nt, Homo sapiens
aaaccagcggaaagccaagagcgcacgggggaaacaagcgaaaaacaggcaaggagcacacgggcacgaggcaagccgagccccaacaccccgc

SEQ ID NO: 119317 - RNA, 82 nt, Homo sapiens
caggacaccggaaccgggaaagggaacgcaaggcggggaaaaaaaggcagcacacagacgcagcaacgggcacgcaaccaag

SEQ ID NO: 119318 - RNA, 59 nt, Homo sapiens
accgggccggaacgagacgcacgaacaacaagaaggagaaagacacaacgacagaagaa

SEQ ID NO: 119319 - RNA, 81 nt, Homo sapiens
aggggccgccgccaagaccgagcagcagccccacagaccaggcagccaggcggcaaaaggaaaagaagggaagccccagac

SEQ ID NO: 119320 - RNA, 69 nt, Homo sapiens
aacaacggagaccgcgaacccaagaacaagcaaagagcggcccagaaggacggaacagccagggaggcg

SEQ ID NO: 119321 - RNA, 57 nt, Homo sapiens
agcagccaacaccagaagaagggacaaaagcgcggagccagcgcccggcaaggagcg

SEQ ID NO: 119322 - RNA, 71 nt, Homo sapiens
accgcagccgcgcccaggagggaccggaaagcaccccggccacagcggaccaaccggagagacaccgacac

SEQ ID NO: 119323 - RNA, 62 nt, Homo sapiens
aacaaacagaaaccccaccagaaagaggcccaccagaagagccgacaagccggcagaaggca

SEQ ID NO: 119324 - RNA, 43 nt, Homo sapiens
aaaggaggaagaggagcggcggccccacgccggaaagcggaaa

SEQ ID NO: 119325 - RNA, 53 nt, Homo sapiens
ggaaacacaagagaccagagggggcccccaaagggaagccaaacacaaaggaa

SEQ ID NO: 119326 - RNA, 66 nt, Homo sapiens
aacaaacgagggcccgggaggaccgacgcagccaggaaccaccggacaaacaccggaaaccacaag

SEQ ID NO: 119327 - RNA, 74 nt, Homo sapiens
caaacccaggaaaaagccaagagagaccggagaacgcgacaggcaacaaccagaccaaagaaagccaaagccgg

SEQ ID NO: 119328 - RNA, 78 nt, Homo sapiens
gcgaccgcccgcgccggcaccggggcggccggccaaagccaggaccagaaagcagcagagagcggggagacggcagaa

SEQ ID NO: 119329 - RNA, 77 nt, Homo sapiens
cgcgaccagagaccgccggggcggcacacggagcacaccgaacacgccgcagaccagcaaagaaagagaagggcaac

SEQ ID NO: 119330 - RNA, 80 nt, Homo sapiens
ccacccaccggacagagagccagaaacgaagacaaccaccaccagcgagcaaaagaacaaagaccaagaccaagaagcgc

SEQ ID NO: 119331 - RNA, 62 nt, Homo sapiens
caacaacccagacccagcccgggcccggagcaggacagacccccagagcgagagaacgcacc

SEQ ID NO: 119332 - RNA, 40 nt, Homo sapiens
ccccagaccccggcgcgggccccaccgaggcaccaccaac

SEQ ID NO: 119333 - RNA, 82 nt, Homo sapiens
gacacgaggcggcgggcggagacaggaccgcggcgagcaagaccaacgggagccgcaaggacaacagccgcggccagacagc

SEQ ID NO: 119334 - RNA, 49 nt, Homo sapiens
ggcgcgaggaggaaaggaggacgagcaaagcaccacaggggaaaacaag

SEQ ID NO: 119335 - RNA, 70 nt, Homo sapiens
aaaacaaaggggacggaccacagagggggggggaaaggacgcaacacagcaaccaaccccaggcaaaaga

SEQ ID NO: 119336 - RNA, 39 nt, Homo sapiens
cagcgaggcccgagaccaggggaacagggcgagacgaac

SEQ ID NO: 119337 - RNA, 61 nt, Homo sapiens
caaggaaagagaacgaacgaaggacgggggaggcaaacgagagcgccagggacggaagcga

SEQ ID NO: 119338 - RNA, 50 nt, Homo sapiens
acccgagggcgaagcagccaagggaaacacaaagaagacaccagaagggc

SEQ ID NO: 119339 - RNA, 71 nt, Homo sapiens
aaacgcccgaggcccgaaccgcgggagaggggaagagacaagaccagggccgggagggcccgaacccaaag

SEQ ID NO: 119340 - RNA, 64 nt, Homo sapiens
cgaagaccagaacggcaagagcaacgaaccaaagcaaaggaggccgggggaagacggaaaagag

SEQ ID NO: 119341 - RNA, 73 nt, Homo sapiens
gaacccgcaacccagacgagaggcagcggcagaaaccagagcaccagagaaaggagcacaaaaggccgcagcg

SEQ ID NO: 119342 - RNA, 68 nt, Homo sapiens
gaggcgcggaggacgccccaccgccgacgcccccagccaccagggcccaggcgcacccaggcagaagg

SEQ ID NO: 119343 - RNA, 74 nt, Homo sapiens
gaggagcgaaccagggggacacaaagcccacaagagagggaaggagaaaggcagacgagggacagccacggcca

SEQ ID NO: 119344 - RNA, 56 nt, Homo sapiens
aacacgccccagccgcgaagccgcgcacccggaaagcagaaacaggcccggagagc

SEQ ID NO: 119345 - RNA, 75 nt, Homo sapiens
cgggccacaagagaaagagcacgcaggcgaaaggaaaagagaaaagagcgagggccccccgaccagagaagaaga

SEQ ID NO: 119346 - RNA, 75 nt, Homo sapiens
gcgccccccggcccccgcgcgcacgccccgacgcaagacgcccggcccggaacaccagcaggaaaaaagagcggc

SEQ ID NO: 119347 - RNA, 71 nt, Homo sapiens
ggccggaggaaccggcagccccacgccccgcccgaagccgacccgacgcccccaggaggggagacgagcag

SEQ ID NO: 119348 - RNA, 88 nt, Homo sapiens
aaaagcagcgccaagcgcagcagagcaaagccgaaagacagggcagaccgccagcagcacagcaagccacagagagggccggcagggc

SEQ ID NO: 119349 - RNA, 65 nt, Homo sapiens
ccacccgccgcagcaagcagagagaagagcaccaggccagggggccaaaacccgagccaagcgac

SEQ ID NO: 119350 - RNA, 57 nt, Homo sapiens
ccgacccaggccagcacaggcacagagacggggcgagaaagaaccccagaagacacc

SEQ ID NO: 119351 - RNA, 66 nt, Homo sapiens
agagcaacgaagacaacgcagcggcagaaacaaggcgcagggcgacgccaggagcacaccgaaaag

SEQ ID NO: 119352 - RNA, 82 nt, Homo sapiens
gcagaggaaaaaagaacacagggagcgagaacgggccaggcaggaaggaggagaagaaggaaacgaggagaggagagacgag

SEQ ID NO: 119353 - RNA, 68 nt, Homo sapiens
ggccgaccacccagggaaacggccggggggaagccgagccacggcacgagacgaagccacaaaagagc

SEQ ID NO: 119354 - RNA, 50 nt, Homo sapiens
gacaaaagggccaaagaagggagagagggggcagaaacgggacgggagcg

SEQ ID NO: 119355 - RNA, 75 nt, Homo sapiens
gcgcagggcgggggcgccccaggagccggacaggcgcgggcacagggagggcggaccacccaggaggagggaggg

SEQ ID NO: 119356 - RNA, 37 nt, Homo sapiens
aacaaaagagccacccaaggagaaacaccggcgcaca

SEQ ID NO: 119357 - RNA, 118 nt, Homo sapiens
cccagcagcaacagcagcagcaagagggaaaaaccccaagaggaagacaaacaaccagcccagaaaacccggacaaccagcggggcacaacaagggcacaacagagccaccccaccac

SEQ ID NO: 119358 - RNA, 83 nt, Homo sapiens
cgcccggcccagcccccgagcccaggaagcacgccacgggagcacagaaagccaacaggcagaccagagacagcgccacgcac

SEQ ID NO: 119359 - RNA, 71 nt, Homo sapiens
agaagaacgacaccaaagccaaacaaccaaggaaaagaagaaaaggaagcacagccaacaaaaacgagaaa

SEQ ID NO: 119360 - RNA, 79 nt, Homo sapiens
ggaacaggcacaccccacacaagcacgccaaggcgcgggacaaccaacacaaccaaagagaagaaaacgcaaagaacag

SEQ ID NO: 119361 - RNA, 74 nt, Homo sapiens
aaagaagaacaacagacgagaagagaagggagcaccaggagacgccagccggacccgaggccccagccccaaag

SEQ ID NO: 119362 - RNA, 74 nt, Homo sapiens
gccgccgccgccgcgcgccaaagcgcgccgccccgggcaaaaggccgcggggcgaagccaaacccgaccacagc

SEQ ID NO: 119363 - RNA, 74 nt, Homo sapiens
ccagacaaggaaacagcagaaaccggaaccacacacaccacaggaagccagccgaagggcaagagggcacagaa

SEQ ID NO: 119364 - RNA, 76 nt, Homo sapiens
gaccgagcgggcccggagccaccggcccaggggaggcccccggccagcaacaccgggccgggagaagggagcaggc

SEQ ID NO: 119365 - RNA, 82 nt, Homo sapiens
cccgaagggccgggaggggcaacaagggaacagcccaccagccggaaaacagaccagcccgcacccagagaaacccacccac

SEQ ID NO: 119366 - RNA, 82 nt, Homo sapiens
acaccaaccagaaggaggcgggccagcagcaacccggaccacagccagacgaggacagccggcgcgccccgcggcgccgcgg

SEQ ID NO: 119367 - RNA, 52 nt, Homo sapiens
gccggggcaaggaagcgaggcgagaacgcggacaagcaaacaaagaggaaaa

SEQ ID NO: 119368 - RNA, 62 nt, Homo sapiens
ccccgccgcacacccgagacaggccggcagaggccgcccagacagagcacagggagcgggag

SEQ ID NO: 119369 - RNA, 69 nt, Homo sapiens
cggacccccagaagaagaggggaacaggagggcaaaggagaacgagaccaacgagaaagcaaggaagca

SEQ ID NO: 119370 - RNA, 119 nt, Homo sapiens
ccaaccaggaaggagacgccaggaggccagggcagcaccgggcagcgagacgaaaaaccaaagggaagagccacaaagggaaccaggcgaagaggaaaaaaggaagaaaagcagaacgg

SEQ ID NO: 119371 - RNA, 75 nt, Homo sapiens
ggacggaggaacaggaacaggagcaggcagaggaaagggcgcaggcagaggagcagccgccaccccccagggggg

SEQ ID NO: 119372 - RNA, 73 nt, Homo sapiens
agcgcagggcccgggccggcgcccgaccccgcagggcgcccgggcagaaccgcacccccagcaggacagcaca

SEQ ID NO: 119373 - RNA, 55 nt, Homo sapiens
gccgcgccgaggaggccggaaaggaacccagaaccgcgggcagcaagaaccacca

SEQ ID NO: 119374 - RNA, 76 nt, Homo sapiens
acggagagaggagaaccagccgggggacgagcagggggaggaacaaagcgaggaagggaagggaaggcgacaggca

SEQ ID NO: 119375 - RNA, 78 nt, Homo sapiens
cgggaaaacccgaagccgacggccacccgggccccaccagcgcgagaagggacagcgcgggacccagggcggagaaac

SEQ ID NO: 119376 - RNA, 87 nt, Homo sapiens
gacgcagagcccgaggccggggaccaggacagcgcgaggcgagggcagagccgcggggcaagacagccagccccgggcaacaaaggg

SEQ ID NO: 119377 - RNA, 72 nt, Homo sapiens
cacggaaccacacagggccgccaccaacagagaagacagagcaccaacgaggaccccagaagggccccgagg

SEQ ID NO: 119378 - RNA, 70 nt, Homo sapiens
gggacggccagacagcaggccgacggccccgggcgcagccaaaccgagagggggaggagggggcggccgc

SEQ ID NO: 119379 - RNA, 79 nt, Homo sapiens
ggaacaagacaaaaccgagaggcaccaccccaaaacagagcggaggcaagcaaaaaggccggcccagggagaacgcaaa

SEQ ID NO: 119380 - RNA, 80 nt, Homo sapiens
acaggccacccacggccgggcagaccccaagagaaaggagccccccaagaccccgcaaaacccgcgccgacagggaggcg

SEQ ID NO: 119381 - RNA, 71 nt, Homo sapiens
gggcgaggacgaagagaggccggaagaaagggcagagaaaagcggccaagcacacgggggaaccagaagag

SEQ ID NO: 119382 - RNA, 75 nt, Homo sapiens
aaggcaggagcgagaagagagagcagagacagccgcgagccagaagacaccaggggcggcacggcccggagcgcc

SEQ ID NO: 119383 - RNA, 77 nt, Homo sapiens
gagagaggacccaacaggggcagaagcgaaacccaaaagaacccggggacgaagggaacccgccgggcggcccggca

SEQ ID NO: 119384 - RNA, 58 nt, Homo sapiens
cgacgggaagcccacagcccagaggacggaagacagaacgacgcaagaacagccaaca

SEQ ID NO: 119385 - RNA, 52 nt, Homo sapiens
cgaacacgacacagggcccagcacaacacaaaaggggccgcaaggccaggcg

SEQ ID NO: 119386 - RNA, 72 nt, Homo sapiens
aaaaccgagaacccgaccccgcggagacagcgagacccgccaggagcaaaggccccccaccgaagacaagcg

SEQ ID NO: 119387 - RNA, 80 nt, Homo sapiens
acgcgcccggcccggagcccccagcgcagcggccgcgaagagaccgacagcccacagacccagacagagggagcggagac

SEQ ID NO: 119388 - RNA, 88 nt, Homo sapiens
gcgccggcccacgcgcggccaaggaagggaaaaggccgaggcacagcgggaagaccgcaaagacgacccgagacagggaacagcagcg

SEQ ID NO: 119389 - RNA, 72 nt, Homo sapiens
cccaagacacaaacggcgacacagaaagggaggacggcccccgaccacaagccgcgccccgcagaggggaag

SEQ ID NO: 119390 - RNA, 84 nt, Homo sapiens
ccaggaagcggaggagccccggaggcagagcggcgccagaaaccacacagcacgaggaccgcgggcacgagcgaccagcaaggc

SEQ ID NO: 119391 - RNA, 44 nt, Homo sapiens
gaaagcaccgcggagccaggcccggcaagacgcgcaggaagacc

SEQ ID NO: 119392 - RNA, 77 nt, Homo sapiens
gcagcaggagcgcccgcccgagccagcccgccagcagccccagccaaagcggagcggaggcagacacacacgggggg

SEQ ID NO: 119393 - RNA, 87 nt, Homo sapiens
gaggaacggcaggcggccccgagcggaaccagagaagcgaggcccgaagcggaggacccggcccagccgggcaggccgacccccacc

SEQ ID NO: 119394 - RNA, 70 nt, Homo sapiens
cccagcggggaagaccaacagacaaccaccaaaggggaaacagaaacaaggaccaggcggcaacccgaaa

SEQ ID NO: 119395 - RNA, 51 nt, Homo sapiens
gagccggagaccccgcagcagaagaggggaagagaaaggcaggaacacacg

SEQ ID NO: 119396 - RNA, 76 nt, Homo sapiens
agcacaggcccacaggggcccaggaaaaagcaacggacacagaaccaaaggaaaaaaaccggaacaacgaagaaaa

SEQ ID NO: 119397 - RNA, 55 nt, Homo sapiens
ggggaaggcaacaaaaggacccggcgggggcaaggaagcacggaggcccgggaac

SEQ ID NO: 119398 - RNA, 73 nt, Homo sapiens
cagcaggcaccgcgccggagacagaggacgagccacgggccgaagaagcgccacgccaggaggcccgaaccgg

SEQ ID NO: 119399 - RNA, 41 nt, Homo sapiens
accggcgggaggaacaaaaggggaacaaaggccgacaaaga

SEQ ID NO: 119400 - RNA, 74 nt, Homo sapiens
gacccgaacacacgcaggaggggaagagaacgagacaaacagaggagccggcccagacaacccaacccgccaag

SEQ ID NO: 119401 - RNA, 75 nt, Homo sapiens
aaaggaagggagagggaagaccagagcgaaacgaagggaagagacagcgagcagagaccaggagaagagaagaga

SEQ ID NO: 119402 - RNA, 77 nt, Homo sapiens
gagaccaggcgacaccgcgacaccccaacaaacaccagcgcgggacccaaggccagccagccccaggcaccagcgga

SEQ ID NO: 119403 - RNA, 80 nt, Homo sapiens
ccacggacggccaacaagacgcacccgccaccgggaccgacgggcacgggggagagcacgcacgccagccccaggaaggc

SEQ ID NO: 119404 - RNA, 68 nt, Homo sapiens
gcgagcagccaggccaggagagacaacgaagagaggaaagaagcggaaaggagggagcacacaacaag

SEQ ID NO: 119405 - RNA, 84 nt, Homo sapiens
ccgagagcaccacaaggccaagggcaaggagacaggccccgagccccggccccaaagacccaaaacagagacaccccccagccc

SEQ ID NO: 119406 - RNA, 59 nt, Homo sapiens
ccaaagacgggcagaagcacgagggcgaaggacaacaacaagcgcccagcgccgggacg

SEQ ID NO: 119407 - RNA, 98 nt, Homo sapiens
ggccggccgggacggagacgcccagggggcaccagcccccgcggccgggaacaagcaagaaaagccccagaagggccgaaccgaaacccaagcccccc

SEQ ID NO: 119408 - RNA, 75 nt, Homo sapiens
cagcgcgccccgaccgggaggcgcgaagagagggaccaaggaacaacagcgaggcccagcaggaagacccaggag

SEQ ID NO: 119409 - RNA, 58 nt, Homo sapiens
gaaaaggaagaaaaaagcagaaggaagggcacgggaaaggcagggccccgaagagaca

SEQ ID NO: 119410 - RNA, 74 nt, Homo sapiens
gcacaggcgacgcggggccaggcaggacccaacgacaggcgccccggcccaacgaacagccaagaacaggaaaa

SEQ ID NO: 119411 - RNA, 80 nt, Homo sapiens
ggggcggacccccgccgcgacccggaaagccacacacgaggaggggcacggaagcaaaagccacgcccagaacccaggcg

SEQ ID NO: 119412 - RNA, 57 nt, Homo sapiens
acagaccccgcgcagggacagccacccagcaacaacaaggccacacggggccaaagg

SEQ ID NO: 119413 - RNA, 68 nt, Homo sapiens
gagcaccgcgcaaaaaaacggaaagcaggaccggcacgcgccggcagggcgaaggcaggccaacaagc

SEQ ID NO: 119414 - RNA, 83 nt, Homo sapiens
cagggcaaaggagagcacaaccacgcagggaagcccaggggcagccaccaacaacaccagggacacaacagcaaggagcagaa

SEQ ID NO: 119415 - RNA, 71 nt, Homo sapiens
aagaacacggggagccaagcacaaaagacagcccgccccgcgcagcagcacacagaagaaacaggacagac

SEQ ID NO: 119416 - RNA, 72 nt, Homo sapiens
ccccgcagaagagcaggacccaggaaaacaacccacccggaaaaggcgcgcggccgcaagaaaaggacagac

SEQ ID NO: 119417 - RNA, 78 nt, Homo sapiens
agaggcgcggccaagcgcaaagcgggagagacggaccagaccagggccgagcacaggcgggcgccacggaaaggaggg

SEQ ID NO: 119418 - RNA, 83 nt, Homo sapiens
gcgaacagaagagaggaagaaaggacagggagagaagccaagaaagacagcgccacgcagagccccgccaggaagacacgccg

SEQ ID NO: 119419 - RNA, 83 nt, Homo sapiens
ggcgacgccgagagcacacgcacgggccccggcgccaccggagagaggccgcgccgggcagagggagcagcggaccaggaggg

SEQ ID NO: 119420 - RNA, 74 nt, Homo sapiens
gcagccggagggggccggagaacggggagacagccaaggaaacggaagacccagcccggcccacccggacaacg

SEQ ID NO: 119421 - RNA, 70 nt, Homo sapiens
cccaccaacagaagccacgaggagccagagaagagaaaggcacgcgaaaaaagcccaggacccacccggc

SEQ ID NO: 119422 - RNA, 64 nt, Homo sapiens
ggcggggcccaggagacggagggcaaagacgacacccggcgaaaaaaaggaaaccggaaggacc

SEQ ID NO: 119423 - RNA, 86 nt, Homo sapiens
caggaggagagcccacagggcaaagagagcagacccgaggagcccgcaggggcgacagcaagaaggagccagcacagaggcaaaag

SEQ ID NO: 119424 - RNA, 98 nt, Homo sapiens
accggaccacccggcacagccgggccgcggcgggagccgggcaggagccgcgagccagcgcgcgaagccaagggaagaagcagaagcaagcccagggc

SEQ ID NO: 119425 - RNA, 77 nt, Homo sapiens
ggacgccagcacgcgcaccccaaagcagcccaaacagaaagacagggagaggccagcgacccgaggaggccggcccg

SEQ ID NO: 119426 - RNA, 38 nt, Homo sapiens
cacacggggcgccagacaaacagccagaaaggaggagc

SEQ ID NO: 119427 - RNA, 69 nt, Homo sapiens
agagaaaaccagaaaaaggccaaaagccaaaccgcaggagagagaaaggacaagagagaagggagccga

SEQ ID NO: 119428 - RNA, 90 nt, Homo sapiens
ggggagccaaagaccaagcaccagagaagaggaggaagaaggcgagaagcacaggcacgccggcggcccaacccagcaggagaagggaca

SEQ ID NO: 119429 - RNA, 71 nt, Homo sapiens
ccagaaaccaggagccacggacaagaccaaaaggaaacggaggaaaacaacagaacaacaaaaggaaaaaa

SEQ ID NO: 119430 - RNA, 76 nt, Homo sapiens
agaacaaacgagaaggcagagaggggaagaccaagagcacaggccaagggcacagagcgaggaggacgaccgcagc

SEQ ID NO: 119431 - RNA, 79 nt, Homo sapiens
gcgaccgaggggacgccgcccgccgcccgccgcaggccacccgggaacggaggagggggccaccacaggaagccccagc

SEQ ID NO: 119432 - RNA, 75 nt, Homo sapiens
caacaccaccagaggagaacaaaggagcaaaccaagcagcgcaagacccaaacgagcggcaccgacagaaagcca

SEQ ID NO: 119433 - RNA, 56 nt, Homo sapiens
ggccccgccaccggcacaccgaaggacaaaacaccggggcccacaggacagccggg

SEQ ID NO: 119434 - RNA, 60 nt, Homo sapiens
agccccccaagagccggaaagggaccaaggacaagacccagacaaggggccggccaacag

SEQ ID NO: 119435 - RNA, 65 nt, Homo sapiens
ccacagaaaccaaacaggcaggagcggcgcaccgggcggccgaccacagacccgacgcccacgag

SEQ ID NO: 119436 - RNA, 69 nt, Homo sapiens
aaggaccaggaggaggagcaaccaccaaaggccaggcccagcaaccaggaaccaaagaaacgccaaaac

SEQ ID NO: 119437 - RNA, 73 nt, Homo sapiens
cggccgccggcgccccggcccgcccgccaggacaagcagacccaaagggcgcacagaccggcccaccgaccga

SEQ ID NO: 119438 - RNA, 74 nt, Homo sapiens
gcagccgccaggaaaacgcagaaagaccagaagaggaaagcacacaaccacaacggaagacagcaaaaaggacg

SEQ ID NO: 119439 - RNA, 82 nt, Homo sapiens
gcggggagccagcagcccaaccgcagagccgccgccagcgcgcacgcaaggaggcggcggaacgcccagccgacaagaggaa

SEQ ID NO: 119440 - RNA, 79 nt, Homo sapiens
gacgcacggaacacgggcagcccccacacaggcaggaccgaggaccggaagaagcagaggagccagacaggaggaagac

SEQ ID NO: 119441 - RNA, 80 nt, Homo sapiens
cggcgcggagggggcccaagaaaggacgagaacccccgcgaaccagaggaacccagcgagcgagagcggaccagaggacg

SEQ ID NO: 119442 - RNA, 72 nt, Homo sapiens
caccggaaaacggcggagcgggacgcaagccgaccccagaggaagagccgcgggcagggaaagcagccacag

SEQ ID NO: 119443 - RNA, 77 nt, Homo sapiens
caagccgacaaggggcggaggaagggaggagacccgaccccagaagcggcaaaaccaaggccagaaacgcagggccc

SEQ ID NO: 119444 - RNA, 87 nt, Homo sapiens
gggcacaacggcaaaggcagaccaacaagaggacccaggagaaacgccccaaaggaagacacccaagaaagagcacagcaggcgggg

SEQ ID NO: 119445 - RNA, 70 nt, Homo sapiens
agcagagcgggcaggacaaccaggggaccagagaggacggcaccagccaggaggaaagcgcaaagccgac

SEQ ID NO: 119446 - RNA, 64 nt, Homo sapiens
accaacggagaaacgccagcacacacgacagggagcccagaaggccgcacaagcagcgggcaca

SEQ ID NO: 119447 - RNA, 82 nt, Homo sapiens
gagccaccagggagcgaaaccaaacaaaagcaagccgggaggcggcgcccccccgcgccgcggggccacaggggcggggcag

SEQ ID NO: 119448 - RNA, 68 nt, Homo sapiens
caaaaccagagagaaaacagaaggaaacagccacgacaaggcccgagaagcaggggaaacagagcaca

SEQ ID NO: 119449 - RNA, 58 nt, Homo sapiens
aaaaacccagcggaaagcaacaaaaggcacaagaccggcagggaggaagccaagaaaa

SEQ ID NO: 119450 - RNA, 83 nt, Homo sapiens
cacacccgcaggaccgcaggcgggcgccgcgcgagccacccagcgagagggccaagacagcagggaaccaaggcccggaagaa

SEQ ID NO: 119451 - RNA, 78 nt, Homo sapiens
ggccgcggcccgcgcagcgccccaggccagaaggagcgcccccagggcgccggccgagcccgggaaaacgacagcagc

SEQ ID NO: 119452 - RNA, 53 nt, Homo sapiens
acgcagggcgcccccggcaagaagcaagcaaccaggcgccgcaccagaagagg

SEQ ID NO: 119453 - RNA, 66 nt, Homo sapiens
gccagccacggacgccacagagggaagaccccaagacgcagcgaaagaaaaccgaccccagaggcc

SEQ ID NO: 119454 - RNA, 97 nt, Homo sapiens
ggagccacgacagcagaagggaaaagcaacgaacagaccagaaagaaaccgagaaccaggcaggaccgggaaagcggacacagaggcccaagcaaac

SEQ ID NO: 119455 - RNA, 68 nt, Homo sapiens
ccagacacccagaaaacaaagggaccgaaagacaacaacgcagagaagaacgccggccaacggaagcg

SEQ ID NO: 119456 - RNA, 80 nt, Homo sapiens
gaacccaaaaggagccaggagaaaaaggacaggacccccggagacagaaaaaaccgccgcaccagaggaaaccgaaccaa

SEQ ID NO: 119457 - RNA, 69 nt, Homo sapiens
aaagcacagagcaagcggacaaaagaaggggagaagcagaccgcaccaggcgggaccccgaaaaagccc

SEQ ID NO: 119458 - RNA, 62 nt, Homo sapiens
agagaacagccccggaggagacccacacgaccagcgccggagggagagacagggggcaagcc

SEQ ID NO: 119459 - RNA, 89 nt, Homo sapiens
gagagggaagagacagccagcacaccccgcgagcaaggagaaacgaggaggaagagaaggaccgaacacagaagaaggaacgcagagaa

SEQ ID NO: 119460 - RNA, 65 nt, Homo sapiens
ggaagcgcagaaagcaggcgaacccgcggcgcaaaacgggccggaaagagggcgggcccgcacgg

SEQ ID NO: 119461 - RNA, 71 nt, Homo sapiens
ggggaaccccgaaagccagcacacaccccgcaggacccgccagcagaaaccagggcgaaggacgaggaccg

SEQ ID NO: 119462 - RNA, 61 nt, Homo sapiens
aaaaggagccggaaacggacaaacagagccggaagagcgcagaagccggaagagagccaag

SEQ ID NO: 119463 - RNA, 78 nt, Homo sapiens
ggcgcggcacgccggcccgcagaaaaagcggggaaggggggcaaaaaaaagaagcaagcgaagcaccgagcacccacc

SEQ ID NO: 119464 - RNA, 76 nt, Homo sapiens
caacagagaagacagagcaccaacgagacccgggaagaaaagggggagcgcacgaagcggggcccagcggcgaccg

SEQ ID NO: 119465 - RNA, 41 nt, Homo sapiens
gccaaagaagagcagaggacgggaacggagggaaagcgaca

SEQ ID NO: 119466 - RNA, 80 nt, Homo sapiens
cgcggccgccacgcggccgcgcgcagaaggagagagcaaggggaaaagaaacaaacaacaagaagaaggacaaggaacga

SEQ ID NO: 119467 - RNA, 113 nt, Homo sapiens
aaaaaaaacaccgaaccaacccaagaggaaaagcaggccaggaaagaaacggcaacgaaagcccgcggccccaccagccagacccacaaacagaaacgcaccgcgcgagccac

SEQ ID NO: 119468 - RNA, 121 nt, Homo sapiens
gccacaacacggccgcacggcccgccccggcgggcagagaccagcaccggagaaggagccgcccgcagcgaggagccggagcgcacagagaagaggggacaagaggaccaagagaagacag

SEQ ID NO: 119469 - RNA, 77 nt, Homo sapiens
gcgccgacagaggaagaggacagcgggaagcgaaagaacgcagaggcccacagcaagccggaggcgccacgagaacc

SEQ ID NO: 119470 - RNA, 81 nt, Homo sapiens
gccaagaggaggacagcgcacacagcaagcacgaggggccgccaacccgggccaaggacccgcccaccccccacaggcggg

SEQ ID NO: 119471 - RNA, 80 nt, Homo sapiens
ggaccggggcagaccaaacggcaaggcaggaacagagcgagaggacagccccagaaaagacacaccagaagagaaagaaa

SEQ ID NO: 119472 - RNA, 69 nt, Homo sapiens
gaggacacccgcgcacagaggaagaccaggcagagcgaccgggggaggcggcaagagggaagagagcca

SEQ ID NO: 119473 - RNA, 78 nt, Homo sapiens
cgccgagggcgccgccagggaaagggagcagcaccggccacacccacagcacgaccggaacccagcgaccgacgccgg

SEQ ID NO: 119474 - RNA, 75 nt, Homo sapiens
gcgggacaacccaggagcagacagagaagcgcgcagcagacaggaagggaaggggcggagacgggcggaacgcag

SEQ ID NO: 119475 - RNA, 77 nt, Homo sapiens
agcgccacgcgcggaaggcagcgcccagcagcgcagcacgcaccccgcgccgccgccccccaccaaggaagcccaag

SEQ ID NO: 119476 - RNA, 35 nt, Homo sapiens
gcccgggagagcaaggaggcccacaagcggcaccc

SEQ ID NO: 119477 - RNA, 69 nt, Homo sapiens
agaaacaccacaaaccgggaggagccaggaggagagaacaagaaaagcgcggaaacgcaacaaaagacg

SEQ ID NO: 119478 - RNA, 76 nt, Homo sapiens
gacgcccacccccacggcccccggcgccccggcccccgccccagcccgccggcggcggcggaaggagagagcacga

SEQ ID NO: 119479 - RNA, 71 nt, Homo sapiens
ggaggcacggacaccacacacacacagcggaacaagccgcaagaccgaaaacccggcaccaaggaccaggc

SEQ ID NO: 119480 - RNA, 65 nt, Homo sapiens
cccagacagcaaggaacccaaacacggaaagaacaaacagggagaagaacagacgggcacaagag

SEQ ID NO: 119481 - RNA, 78 nt, Homo sapiens
gcgccccggggggcaccggacgacacagcgaggccgccaacaccgggcccgggcaccaccaggaggcgggcaggaccg

SEQ ID NO: 119482 - RNA, 68 nt, Homo sapiens
caacagccccaagccgacggcggcagcaacagaagacaggagagaacagaaagaccaagcagaagaga

SEQ ID NO: 119483 - RNA, 67 nt, Homo sapiens
gaacgcccggaggagaaaagcaaaaaaagccgggcaaccaggggcagagagcaagcgcaaaaagagc

SEQ ID NO: 119484 - RNA, 94 nt, Homo sapiens
agaggaagaggaaagcaaaggagcagggaggcccccagggcagagacaggaggccaagccacacacagggccacagccccaacccacaggaaac

SEQ ID NO: 119485 - RNA, 71 nt, Homo sapiens
gggggcgagcacaaacggggcggggccggggaacacacagaaagaaggcaacacaaggacaaggcaaaaca

SEQ ID NO: 119486 - RNA, 79 nt, Homo sapiens
ggaaacgaccacaggccaccacccaccaccacggcgggagagccagggaacgagcccacgggagccggccccgaacccc

SEQ ID NO: 119487 - RNA, 73 nt, Homo sapiens
gcaccgccaggcaggcacaaagcaaagggagggagaacaaggggccagcccagacaaagacaaaggcccggca

SEQ ID NO: 119488 - RNA, 88 nt, Homo sapiens
cagggccaacagggccggccggccggcccccaaacgcgcccgcccccaggggggaaaacaggaagagaacgaggagcaacccaaaggc

SEQ ID NO: 119489 - RNA, 78 nt, Homo sapiens
gcacacgagcacagaccaggcaacaagcagggaccacagagagggaacccccagcaagaggcccaccccaaaccagga

SEQ ID NO: 119490 - RNA, 79 nt, Homo sapiens
cgaaaagcacgcaggaagggggaaagcagcaggggccagaagacaaaaccgaaccacagaaaacaaaggacaagagaca

SEQ ID NO: 119491 - RNA, 68 nt, Homo sapiens
aagagacccgccccccagaacaacacacaccagaaacagcgcaccacccgcagcaaagaagggaagga

SEQ ID NO: 119492 - RNA, 77 nt, Homo sapiens
ccgcagccgaagggcgcacacgggggggcccacgaccgagcggccacaagggcgccaacaaggggccaaacccgggg

SEQ ID NO: 119493 - RNA, 80 nt, Homo sapiens
gagggcgggcccaggcggcgagcggccccagggaacccgagaaggccaacaaaagagcgaggaaccaagaagaggagaca

SEQ ID NO: 119494 - RNA, 58 nt, Homo sapiens
accgacagcacagacagaacccgcaccaaccgacccccaccaccggcagggagcagcc

SEQ ID NO: 119495 - RNA, 76 nt, Homo sapiens
gcagcgaagaagaggcccaacccccaccccgcccaaggaggcccagcggcccccccaggccgcgcgcggaagcgcc

SEQ ID NO: 119496 - RNA, 69 nt, Homo sapiens
ggacccacccccgggggaaaagaacgaggacaacacagagaaccggaaagaacaagccaccaaaaagaa

SEQ ID NO: 119497 - RNA, 73 nt, Homo sapiens
aaacgaccggaaaaggcgaaaagcaaaagaacaggacggcaaggcaagagcgcccaacaccagaaggcgaagg

SEQ ID NO: 119498 - RNA, 68 nt, Homo sapiens
ccgaaggcggacccgcgcgcccccgcccgcaggccaagcaacaggcgcacgcggaggagggcgacgag

SEQ ID NO: 119499 - RNA, 74 nt, Homo sapiens
ggcggagcgacggggaggcgcggccaacggggccacaagaacgggaagaagaagaaggcgaagaagcacaacac

SEQ ID NO: 119500 - RNA, 70 nt, Homo sapiens
aaacaccgcagccaccaagaaaacggagcccgagacaccccacgaagcaaaagccgaagcaaggacaaag

SEQ ID NO: 119501 - RNA, 37 nt, Homo sapiens
gagaagcgcccaagcggacggccagaaccgcccaaac

SEQ ID NO: 119502 - RNA, 65 nt, Homo sapiens
gcccagggagagcaaggcgcgcggcgacccgccagaaagaccgcgacaaacagcaaaacaaaggg

SEQ ID NO: 119503 - RNA, 56 nt, Homo sapiens
ggagagcgaggaacgaccaagcaaaaaccaggacaagcccccacgaggaaaacccc

SEQ ID NO: 119504 - RNA, 77 nt, Homo sapiens
ggaagcagccgaccagccgcggagccgggggcagagcgacacgcgcgacggaggccgcagggccagaacaacgaaca

SEQ ID NO: 119505 - RNA, 80 nt, Homo sapiens
cgaggccggccgccccgccgcgaggcaacaacggccagcccagggagaggcacacaaaccacgggggcccccaaagcgcg

SEQ ID NO: 119506 - RNA, 73 nt, Homo sapiens
ccggacaggacagggcacgcagaaacagcgcaccaggccccagacgagaaacaagccaaggccggaaaaggag

SEQ ID NO: 119507 - RNA, 69 nt, Homo sapiens
gaagaggaagcaaagccaagacagcccggagaaagagcaggaggacacgcaaacagcccacaaagcgga

SEQ ID NO: 119508 - RNA, 74 nt, Homo sapiens
aacagccaaggcccacggggcagagccaccagcaggaggagggggcaaggcacacccaaccaggaggaaaaggc

SEQ ID NO: 119509 - RNA, 76 nt, Homo sapiens
ggacacaacgcgccacgaaggccaggccagggaggagaaagaagaaacaaagagggacccagccaccaaaaggagg

SEQ ID NO: 119510 - RNA, 90 nt, Homo sapiens
cgccccgccggcacagcgggaagagcggggccagacccaagaggacgcagaggcgagcgcggagaccgggaccgcgagaccccccggagc

SEQ ID NO: 119511 - RNA, 83 nt, Homo sapiens
cgcgccagcgcccagggggggaaaccaccgaaacccgagaagcaagggaaagcgggcgaaaaggaacgagcaggaggcgaaaa

SEQ ID NO: 119512 - RNA, 53 nt, Homo sapiens
aggagaccagaacgaacccccccccccgagacgaggacgcgcacaggaaagga

SEQ ID NO: 119513 - RNA, 37 nt, Homo sapiens
aacagaacaggacggcgagggacacaaaaggcgcaac

SEQ ID NO: 119514 - RNA, 70 nt, Homo sapiens
cgacaagcccgcgccgcccccaggagcacaaaagggggaaccgagagacacaggggcacaagacgggaca

SEQ ID NO: 119515 - RNA, 78 nt, Homo sapiens
cggcacaccacagcgacaccaagcacggccagaagagagagggagcaggaagaccccggggaggccgggcggaggaca

SEQ ID NO: 119516 - RNA, 78 nt, Homo sapiens
cgcggccagcaccccaacgggccaaagaggcacaagaaaaggaagcaaggaaaaggacagcaaaaagaaacgacaagc

SEQ ID NO: 119517 - RNA, 73 nt, Homo sapiens
cacaagagaagaccgcccaagcgcccggaggcccacagcagggggcaggccacgaaggaccgaacagcccaaa

SEQ ID NO: 119518 - RNA, 74 nt, Homo sapiens
aaaacagacccacaaagcacccagaaacacagggggagacgaaccggcaaggaacagacgaagagcagagccag

SEQ ID NO: 119519 - RNA, 85 nt, Homo sapiens
aaaacggcaacggaacagaaggcacagaagaggaaggaagaggcccaccagcccggccgggcgaggacaagcagccagcgccgca

SEQ ID NO: 119520 - RNA, 55 nt, Homo sapiens
ccgggcacaccaagagaccaggaaagccgaccgcacaagaggagccgccgcgccc

SEQ ID NO: 119521 - RNA, 85 nt, Homo sapiens
aaaaaaacaacacaaagaaggagcacaggaacagcgcaccacgacaaagaagagaaaacgcggcagagcaacaaacacagccaga

SEQ ID NO: 119522 - RNA, 82 nt, Homo sapiens
cgcgcgcgagggccggggcgggcgccgcgggacccccgggccagggaaggagggccccggagcagccacaccaccgaggccc

SEQ ID NO: 119523 - RNA, 82 nt, Homo sapiens
ccccggggacacccggcacgcagcggagagcccgccaccaaccccgacaggaggggagaaacacaaacccaccaagcacaag

SEQ ID NO: 119524 - RNA, 82 nt, Homo sapiens
cggcgggagcggcggaagcccagcggaggagcgaaaccagggcaccgcagcccccacaccccgaggaaaagaccaccaggcc

SEQ ID NO: 119525 - RNA, 61 nt, Homo sapiens
agaaaaccccacagcgggcaagagaacgagcgcagcagggcgcagaccacaagacgggaaa

SEQ ID NO: 119526 - RNA, 93 nt, Homo sapiens
gaaacaagccggagcgggagagacagggccggcagggcagccgggggacagcgaggaagacgaacaggagaaggaacaaaggaaacggacaga

SEQ ID NO: 119527 - RNA, 56 nt, Homo sapiens
ggccaaccaaaccacccagacaagccacccaccgagcagacaagggaggcgaggac

SEQ ID NO: 119528 - RNA, 75 nt, Homo sapiens
ggcccggcgcacagagccccgcccagagcaggagaagagacccacagggcagcgagaaaaaggaagaaacaccaa

SEQ ID NO: 119529 - RNA, 62 nt, Homo sapiens
acgcagggcgcccccgcccggggcacaacacaacaacaaaacacaacccagccgggaagcag

SEQ ID NO: 119530 - RNA, 74 nt, Homo sapiens
aaagccaggccagcgcgacggggaagccaccggcagcggcagcacccagcccagggggaaccccgccagacacc

SEQ ID NO: 119531 - RNA, 78 nt, Homo sapiens
cacaacccggcccggccgcgccgccccgggaaaagagagaagcccggaagcaaaaggagcggaggacaccccaaacag

SEQ ID NO: 119532 - RNA, 83 nt, Homo sapiens
acgggcgccacgcgcggcgcacacgggcgcgggccggagaacacaggaaggaaaggccaaggcgagaagagagcaggagaggg

SEQ ID NO: 119533 - RNA, 79 nt, Homo sapiens
ggcgccggccagccgcgccccgccgcaccgccgaaagcacaccacgagcgacccgggaacccggcgggagggacccgaa

SEQ ID NO: 119534 - RNA, 108 nt, Homo sapiens
gcagaaagacccagaacgccaagagagcgacacgaagagaaggaaaacacaaggggaagcggcccaggaaagaccgagacaagacacaccaagcccagaaaacacacc

SEQ ID NO: 119535 - RNA, 86 nt, Homo sapiens
agagcgggacagccaggaggaagggcagcggcagagcccaggcagaggagaaccaaggagagaaaccccaagcaggcacgcccgcc

SEQ ID NO: 119536 - RNA, 74 nt, Homo sapiens
agccacgggccaaaggaaaacaccacaagaggacaaccggaaaggagcgccgcagcggaaccgcaaggaagcga

SEQ ID NO: 119537 - RNA, 81 nt, Homo sapiens
ggcgggagcgggaaccagcggaggcagcagcggacaggagaaccaacgccacacccgcgccccaggccacaagaagaaacc

SEQ ID NO: 119538 - RNA, 56 nt, Homo sapiens
aaagggcccacagaaggaaacgacgaagaaccagggcggagaacggaaaagcacca

SEQ ID NO: 119539 - RNA, 55 nt, Homo sapiens
gcgcgggagcccggcgcggcaagggccccagcccccgcagacacggccgagacgc

SEQ ID NO: 119540 - RNA, 77 nt, Homo sapiens
aggcagaagggaaggagcagaacggaggggaacacaaaaaggccgccaggcacagagaaggcaaacgggagggcgag

SEQ ID NO: 119541 - RNA, 86 nt, Homo sapiens
agaggcagcagggccggccccaaagagcaaacgaaaacgcgcgaaaagcaggagaagagaaacaggacgcgaggaggagagaggag

SEQ ID NO: 119542 - RNA, 72 nt, Homo sapiens
cggggcgcccggcgccggccgagaaggcagaggcgaggagacgcgagaacagagacagacaaccggaaagga

SEQ ID NO: 119543 - RNA, 70 nt, Homo sapiens
agggccggagccaggaagcgaagaaacccgcaaagaagcgagccagcaaagaaacggggggacccacgag

SEQ ID NO: 119544 - RNA, 68 nt, Homo sapiens
agacgacgcaccgcaggcagacaaaagggccaaagaagggagagagaaaggaacaggaagcagaagca

SEQ ID NO: 119545 - RNA, 80 nt, Homo sapiens
aacagaaggcggaggcagaacgaaagagagagaggcgccacccaacagacgcccacccaaaacagccgaccccgcacggg

SEQ ID NO: 119546 - RNA, 71 nt, Homo sapiens
cagaaacagagaaggaacagggggggaagaaagaaggagaaggcggaggagggagaggacccaaacgggaa

SEQ ID NO: 119547 - RNA, 80 nt, Homo sapiens
gcccaggcagcccgacggggccaccgcggcggcgcccgcaccgcgcccgcaaagcaaaagcagaccggaaaacccaccgg

SEQ ID NO: 119548 - RNA, 87 nt, Homo sapiens
agaagcccagaaaaaagcccagcgcggcgcggggcgcggagcgccggagccgcgcgcgcggagcgggcacggacacaagaacgagag

SEQ ID NO: 119549 - RNA, 72 nt, Homo sapiens
acgcccaggagcaagacaggggaggaacgaaggagaacgcaccgggaaacggagcagaaaaccacagggcac

SEQ ID NO: 119550 - RNA, 78 nt, Homo sapiens
cagcgagagacagaccccccccggaacgagcaccaaaagggaacgaagcccaaaaggcagagacggaccgagacagga

SEQ ID NO: 119551 - RNA, 103 nt, Homo sapiens
cggcaagcgccgccgcggcgcggaagcaacacaacaggaggcggaggcgaaagcggaacgaggccgcggaggaggagaacaccgacaacagcggaacagggca

SEQ ID NO: 119552 - RNA, 116 nt, Homo sapiens
caacagagcagcaagaccgccgcaggggcacccccaacgagaaccgaacacacaaaacaggccccaggaagaagaagcagcaacgcaaaggccgcgacccccgggggaagaggaca

SEQ ID NO: 119553 - RNA, 71 nt, Homo sapiens
ccagcgcgcagcccggaccagccaagccccaacggcccccgcgccgggcgcagcgcggaaagggagaacgg

SEQ ID NO: 119554 - RNA, 35 nt, Homo sapiens
cggccacggcccccacaagaaaagacaggcaggga

SEQ ID NO: 119555 - RNA, 73 nt, Homo sapiens
aagaagagaagaggacagcaggcaacagaagaaaagagacagcccggggacccgagacaccagaagaaaagga

SEQ ID NO: 119556 - RNA, 71 nt, Homo sapiens
ccgggggaccccgcacacgaagagacgccgggcaccccaacacgaagaggaacgcggcgcaaaacaggaag

SEQ ID NO: 119557 - RNA, 81 nt, Homo sapiens
gagggcgcgcaagagcagaaccccagcgggccgccaagcccgcaagccaccaagaggaggaacagagcccaggcccacaca

SEQ ID NO: 119558 - RNA, 63 nt, Homo sapiens
ggaaaccgaaggggagccaggcggcgacagcgggaggagaaaggacccaaagacaggaccacg

SEQ ID NO: 119559 - RNA, 72 nt, Homo sapiens
aagcaggaacgggagagagaaagcagagcgagacccacccgaaccagagaggaaccgccccagaagagacac

SEQ ID NO: 119560 - RNA, 70 nt, Homo sapiens
aaaagacaggcgccaggagcacagaagagcgaggagcaccggaaggaggagaagaaccgaacgggcagcg

SEQ ID NO: 119561 - RNA, 74 nt, Homo sapiens
aaggaagcacaccagaggaccgaaaagacgcggccccaaaggaaacacccgaagaacacagcgccagcccaacg

SEQ ID NO: 119562 - RNA, 71 nt, Homo sapiens
ggggccccccgcgcgggacagcagcgggaaacccagacgacaaggaaggccaagggacccacgaccaacca

SEQ ID NO: 119563 - RNA, 72 nt, Homo sapiens
cccaccgggagccgggacagaggcgcccccgggccaggcggagcagggcagcaagccacgaagcccaaaccg

SEQ ID NO: 119564 - RNA, 79 nt, Homo sapiens
aagagccgcggggcaaaaacacaagaagagagcgagaacacggcaagggcgggaggccaggcagcacgcagacaagaag

SEQ ID NO: 119565 - RNA, 66 nt, Homo sapiens
agaagccaacagcgaggccagcggaaccacccaccgagggaccagaccgaggccaaaagaaaggaa

SEQ ID NO: 119566 - RNA, 61 nt, Homo sapiens
gggccagcagggacacaaccaggaggacagggcggacgggccccgaagcccaaggggagac

SEQ ID NO: 119567 - RNA, 67 nt, Homo sapiens
ggcagaaacaaggcgcagacgggacccaaaacgacacacaaaccaaaagccgggagaaccaccaccg

SEQ ID NO: 119568 - RNA, 64 nt, Homo sapiens
gaaggcccgcggagacgagaccaacccaaggagaggcacacaggacaggacccccgagaaacga

SEQ ID NO: 119569 - RNA, 69 nt, Homo sapiens
acagcacaccacacgccaacagacgaagggaggccggcgaagacgcggagcggcgccgacaccggaaca

SEQ ID NO: 119570 - RNA, 105 nt, Homo sapiens
ggcgagacccggcgaagcagagagaacgggcaaaacggaaaagacaagagaccggaaggaagacaaaaaggaccaagagccgaggcaagagaaaaacgcagaagg

SEQ ID NO: 119571 - RNA, 70 nt, Homo sapiens
ccgcgcgacaaaaggaccagacaaacaaaagggggaaggaagagaggaaagagcggcaaagcagacccaa

SEQ ID NO: 119572 - RNA, 72 nt, Homo sapiens
aggccacagccccgcgcggggaacagcggccagagggaccacgcgaggcgacggaggacaacaaagagcgca

SEQ ID NO: 119573 - RNA, 88 nt, Homo sapiens
gagcgggcccgggggccggggccgcgcgcccgggccgcgaggacgaggcggcgccgccgggcgggagcagcccagaaagccgggacaa

SEQ ID NO: 119574 - RNA, 74 nt, Homo sapiens
cgccgagaccagcccaacaggaccaggagcgggagagggccagacagggcgggaccaccaggagcagagcggag

SEQ ID NO: 119575 - RNA, 81 nt, Homo sapiens
cgagaaggagagaagaaggcagagcccgggcagggggccaggcaggaagagcccggaacgccagagcggaaaggaagagaa

SEQ ID NO: 119576 - RNA, 74 nt, Homo sapiens
aaagcccagcgacaacagggcccacccagacaggagcccagcagggggaggccgacaggaaaaggagggcaggg

SEQ ID NO: 119577 - RNA, 76 nt, Homo sapiens
ccaccaagaacaagagaacgcagccacgagcgcgagccgggccagaaagcgaggagaacgccagggcggggacaga

SEQ ID NO: 119578 - RNA, 81 nt, Homo sapiens
gcgcccagcagacccccgacgcccacccagccgcgccaggcccagacacgcagaggagacccgaaccggcaacagcaccgg

SEQ ID NO: 119579 - RNA, 74 nt, Homo sapiens
gagaacaaagcgaggccagagaaagagaagcggcacccccaggaagcgcgaaagcaccgggaggaaagagagcc

SEQ ID NO: 119580 - RNA, 65 nt, Homo sapiens
ggggagggcaggggcgcaggcccacgaagcggaccaggccaccaccagccccggaagaaaacccc

SEQ ID NO: 119581 - RNA, 94 nt, Homo sapiens
cccggccgccgaaccgccacgccagcacgccaacccggacggacaacaccggggagcgcggggagggcaacagagagaaaagcgaacacccagg

SEQ ID NO: 119582 - RNA, 37 nt, Homo sapiens
agggagccgccagaaggccacaagggagcaccagccg

SEQ ID NO: 119583 - RNA, 74 nt, Homo sapiens
agggcccaccgcaaggacggagaaggaacgacaaggaaaaaaaaggcaacagcaagcagaaaacggaagaaaca

SEQ ID NO: 119584 - RNA, 75 nt, Homo sapiens
gccaccgacaccgggaaggggccagacgaacacaagccacacaacgccagccaagcccaggccaccaaggaccgg

SEQ ID NO: 119585 - RNA, 69 nt, Homo sapiens
cagcacacacacacggccagccgcgaggccccgcgaaccagaagagcaacgacgccgaagccgaccacg

SEQ ID NO: 119586 - RNA, 69 nt, Homo sapiens
cggggaaaaacagaaggccaagcgccaacccaaacgagcgagacacacagaaaggaaaagggaacagcg

SEQ ID NO: 119587 - RNA, 100 nt, Homo sapiens
ccagcggcgcaggacgggcacagcagagaccaaaggcagggcaaggaaacggccacaacacaacaacagcaacggaggcgggaccggaacaggcacaccc

SEQ ID NO: 119588 - RNA, 72 nt, Homo sapiens
aaagaaaaaacaggaagaagaaagaaagggaagaagggagacaaaggaaaacaaaggcgagcggaaaaggag

SEQ ID NO: 119589 - RNA, 77 nt, Homo sapiens
gagggacagagcaccgacaacaggcaaccacagccagagccccaacaccacacaagcaaagcgggccacagagaaga

SEQ ID NO: 119590 - RNA, 83 nt, Homo sapiens
gcaaccggagccccccaggaggaaacgaggagaggcggagcggaggagaaaacgaaaggacacagaaagaaacagaagaacaa

SEQ ID NO: 119591 - RNA, 80 nt, Homo sapiens
cgcacccccgcgccgcacggggacgaggacaccagaggaccagaacccacgagaaacagacgagccaaccagaccccagg

SEQ ID NO: 119592 - RNA, 64 nt, Homo sapiens
gcgagacccaacgcggaccgagaggcagaacgcagagcggccaagccggcaggagccagcaagg

SEQ ID NO: 119593 - RNA, 69 nt, Homo sapiens
aggaggcggaagcaagaacgaaacccaaaccgccgcgcccgggaaaggaggaaagaaagagaagaagag

SEQ ID NO: 119594 - RNA, 69 nt, Homo sapiens
gccggaccccgcggcgcccccggcccggagcaacgagcgcagcgccggcaaacaccagcaacacccggg

SEQ ID NO: 119595 - RNA, 82 nt, Homo sapiens
agccaaccgagaaggacaggaaaggaccaaagacagagacaagcggggaagaacggcggagcacaccgaccaaaaaagaagg

SEQ ID NO: 119596 - RNA, 74 nt, Homo sapiens
ccacggcagaaggagcggaaggcggagcgaagagccggaccaagcgccagcgggggcccacagacccgcacggg

SEQ ID NO: 119597 - RNA, 38 nt, Homo sapiens
acccggacccaccccgcacccgagagacggggcaccgg

SEQ ID NO: 119598 - RNA, 78 nt, Homo sapiens
ccaccccaaccaaacccccaaaccgacagccccaaagcagcgaggggaaagcggagcgaaagggaaccgaggcccggg

SEQ ID NO: 119599 - RNA, 80 nt, Homo sapiens
gggaccaccgccccagcagacgcggaagagacagccagcggaacaccccggacgggacgccggcagccaaggacgggacg

SEQ ID NO: 119600 - RNA, 76 nt, Homo sapiens
ccaccaggaggccagggggcgccagggcggacgggccgaaagcagcaagaagagcgaggcgcaccgggcaagcaga

SEQ ID NO: 119601 - RNA, 75 nt, Homo sapiens
aaacccgggccaagggcccaccagccccaagagcgggacacagacaggccaccagccagacaaaaggaagaggag

SEQ ID NO: 119602 - RNA, 93 nt, Homo sapiens
aaaacaggcagggacacggaagaaccagagcaaggacccagggagagaggaacccaacaagaagaaaaccagcaaagaaaacgaagaagaaaa

SEQ ID NO: 119603 - RNA, 69 nt, Homo sapiens
gagaccggaaaagggcaagggagggacacgacacaaggacacgaaaggacaacgccaccggaaagcgga

SEQ ID NO: 119604 - RNA, 69 nt, Homo sapiens
ccgaacccgggcgaagcaacccgccggcccccagagggggaagcagaggagcgccaggagccgagccgg

SEQ ID NO: 119605 - RNA, 75 nt, Homo sapiens
acaaggaaacacgacacaaaaagcaagcgggccaccacagaaaagccacaaccaacaggcgcacggaggggcaga

SEQ ID NO: 119606 - RNA, 78 nt, Homo sapiens
caacacgggaggacggggaaaaagcggccaaagaaggaagcgcgcaccggcgaccaagcaaaaggggggcgcggccca

SEQ ID NO: 119607 - RNA, 70 nt, Homo sapiens
agggaagcaccacacaccaccacagcccaggggggcggcaagacaggaaggacgacacaccccgaagagc

SEQ ID NO: 119608 - RNA, 77 nt, Homo sapiens
acggacccaccccgcgagggcacagaccacagaaggccgaaagggagcacagacaggcgaaaccccgaagaaaaaac

SEQ ID NO: 119609 - RNA, 74 nt, Homo sapiens
ccgaaaaaagcagggaagaagcaaccccagaaacccacaagagcaaagaaagaaaaagagcgaggaaggaggca

SEQ ID NO: 119610 - RNA, 85 nt, Homo sapiens
cagggccgaagagaggacgggagggcaacgagcacaacaggagcacgaggaggagccagcccgagaagcaggagagaaagaagcc

SEQ ID NO: 119611 - RNA, 76 nt, Homo sapiens
caccacccaaaaacgacgaaaaacggaaacgccggaccaaaagcaagccagagagaaccagagggcagaaagggag

SEQ ID NO: 119612 - RNA, 69 nt, Homo sapiens
gggggacagggagaaaaacaaggccagcaacagaagaaagcaagcaccggggaaagcggcccgaaacaa

SEQ ID NO: 119613 - RNA, 71 nt, Homo sapiens
gccgggcagaaacagcaagacccccgaaacgggaaagcccacaggacagcaccagaagcgcgcgcgcaccc

SEQ ID NO: 119614 - RNA, 72 nt, Homo sapiens
cacggccaccacccacggcaggcagcaccccaacaacaccgcgagacgagggacagggaagggaaacaggag

SEQ ID NO: 119615 - RNA, 70 nt, Homo sapiens
caccgacagcggccccgcggaaaaagaccagaaggccacccccacacaccaaaggcaaggaaaggcacgg

SEQ ID NO: 119616 - RNA, 74 nt, Homo sapiens
cccgacccaccacacgagccccgggagcccgggagcagcagaagcaggcaagggaaacgaggaaagaaacagcc

SEQ ID NO: 119617 - RNA, 35 nt, Homo sapiens
ccccaacggagcacggaggagacaaacagaccaaa

SEQ ID NO: 119618 - RNA, 86 nt, Homo sapiens
gggaccacaagacccacgacaggaaaaccaacggcccggaggaccacagcccaggggccccaggcgaaacccagccggagcgcagg

SEQ ID NO: 119619 - RNA, 71 nt, Homo sapiens
gccagggcagcaggcgggcagaaaggacaaaaagcggagaaccacagaaaacggccggggaagagccaaga

SEQ ID NO: 119620 - RNA, 81 nt, Homo sapiens
aaagagggaaagcacaagcggagcccaacgaaaccgaacagaaacccaaccgcggggcacaagaaagcccaggagggcagc

SEQ ID NO: 119621 - RNA, 79 nt, Homo sapiens
accgggcccaaacacccccaaaaggaccgccagagacgggagggacgcgcaaggaccaagggcacaaggccaagacggc

SEQ ID NO: 119622 - RNA, 84 nt, Homo sapiens
ccgcggagaacaacaaggagcagaagcccggcggggggagcgcccgcggggaacaaaggacaggaggccaagaggaagggcaga

SEQ ID NO: 119623 - RNA, 74 nt, Homo sapiens
gcaggcgccaacgccccggggagaagcgagggaccaccacacgaaaccaaggaaaaaccgggaacagcagaggc

SEQ ID NO: 119624 - RNA, 57 nt, Homo sapiens
cgccgcaccaggacccaaggaaccaaacacagagaacgcaccaagaacagcgaaacc

SEQ ID NO: 119625 - RNA, 76 nt, Homo sapiens
ggcccacacgggaagcgcgggaagggaaaccaaaagcgagacaagacgaaaggacgccacaaggagcaaagaagaa

SEQ ID NO: 119626 - RNA, 69 nt, Homo sapiens
ccaaaggcgcccggcgcccacaccccccgaagcacaagaccaccaaaggacccaaagacaggaccacgc

SEQ ID NO: 119627 - RNA, 74 nt, Homo sapiens
gacacacaggaaggagaaaaacaagcgccaggagccgaacaagaccgagggaacagccaggagagcaagcaaaa

SEQ ID NO: 119628 - RNA, 80 nt, Homo sapiens
cccggcccgcagcccccgccggccgcccaacaccgaacaccgggccggaggacgcggggaaccagaccgggccagacccc

SEQ ID NO: 119629 - RNA, 80 nt, Homo sapiens
aaccccaggccaagcaaccaccagcagcccccagagcggaacacaggaaacggaacgccaagcgaagaagaacgaaacgg

SEQ ID NO: 119630 - RNA, 65 nt, Homo sapiens
gaagaacagaagaaacaaaaggccaccgaagagacagaaccaaggagagacacacggaacaagag

SEQ ID NO: 119631 - RNA, 99 nt, Homo sapiens
gcccaacgcaaagacaacccccgaccagaggggggccaggcccgcaagcccaggcccgacgccccgccagacccgcccagcagcccggcccacgggccc

SEQ ID NO: 119632 - RNA, 74 nt, Homo sapiens
ccacacaaagaacaaagcagggaggggagcaggacaacggccaaaagcggaacgagcagggccgcggaggcagc

SEQ ID NO: 119633 - RNA, 78 nt, Homo sapiens
ggccagccacccagaacgcaagggccagcgcgcccggcgggccagccccaggaagcacggccagcccagaacacggcc

SEQ ID NO: 119634 - RNA, 78 nt, Homo sapiens
cgacagcgccggcaacacgcggcacaagacggggggcacacaaagaggcacgggcgcgaggcggagcgggagacggga

SEQ ID NO: 119635 - RNA, 77 nt, Homo sapiens
caaccacgcagggaagcccaggggcagggagcggagaaagagacaacacggccagggaagcacagcagagaagcggg

SEQ ID NO: 119636 - RNA, 81 nt, Homo sapiens
gaccgggagccggcgcgcgggcggggaggcgaggccggacgcacccggggggcccagggaaaagcaacacaggaaaagaag

SEQ ID NO: 119637 - RNA, 76 nt, Homo sapiens
aacaaaccgccacccaaagagcccgaacagcgaggaagcccaggaggggagcgaaacaacgagagagccgaggagc

SEQ ID NO: 119638 - RNA, 74 nt, Homo sapiens
ggaccccaagaagaccacagagggacccggacaaccagaggcagccagcagggggagggcagaaaaggcaaagg

SEQ ID NO: 119639 - RNA, 77 nt, Homo sapiens
gagacgagagaacacgccggagagcagaagaggagccaggaagcaaggccaagacaggggacagccggccgaacggc

SEQ ID NO: 119640 - RNA, 66 nt, Homo sapiens
ggaaagccacacaagacggaaacaaaaccggggaaagcgaacgaaggaagaccaaggaagaacagg

SEQ ID NO: 119641 - RNA, 82 nt, Homo sapiens
ccccgagagcgggaacaggcaccacaccaaccccggggcacgagggcggggaagaggaccagccgaaagacgaaggaagcca

SEQ ID NO: 119642 - RNA, 68 nt, Homo sapiens
ccccccgaaccaggcagcaagcaaagacggaggagcagacggcggccaggagagaaccagacgaccac

SEQ ID NO: 119643 - RNA, 67 nt, Homo sapiens
ggaagaacacaaaggagaggcagacaacacacacgcaggacacagaaccagggggggcgaccaaggg

SEQ ID NO: 119644 - RNA, 78 nt, Homo sapiens
gaaggcagagcggggcacccacccaagggcgcacggaagaccaggagagagagggacgcagacacgacaagcaccaaa

SEQ ID NO: 119645 - RNA, 60 nt, Homo sapiens
cggcagccgcaagccgcgaggccacgccccgcccaggagagagagcggagacaaggccac

SEQ ID NO: 119646 - RNA, 71 nt, Homo sapiens
gcgagcgcaaaggaaggcgccgggcccgacccgcgagaggaagcccggggcggcgacggagcacgacccaa

SEQ ID NO: 119647 - RNA, 83 nt, Homo sapiens
ggaggacggggccgggcgaccgggcaccagcaggacccgaggccaggagccaggggcccagaaggaggaaggcccgggcccga

SEQ ID NO: 119648 - RNA, 66 nt, Homo sapiens
aacggcaaaacacggcaagaaccgaaaacaccagcagaagcccgagaaaagcacagcacccgcagg

SEQ ID NO: 119649 - RNA, 71 nt, Homo sapiens
agcaggacgcgccgcgccccaaggcacaggaagagggcggcacgcggccagagagcacaacgggaggaagg

SEQ ID NO: 119650 - RNA, 79 nt, Homo sapiens
ccgacgggacccacaggcaaagcagagaagaggcaaggaccccacagaacacaaccgaaaaacgaaaaacaacacggcg

SEQ ID NO: 119651 - RNA, 82 nt, Homo sapiens
cagagccccacccccaccagcgagcgaacgcggaggggagaagagcagaaggggggccggaggagagcagaggaggccgggg

SEQ ID NO: 119652 - RNA, 84 nt, Homo sapiens
cgggcaggccccgagaggaacccagccgacacgacgccgccggcaggcccgcgcaccaggggagccgccaccaaaagcagacgg

SEQ ID NO: 119653 - RNA, 75 nt, Homo sapiens
cgcagggaaagaacgggaaccccggggggccgcgaacgggaacagcgcaggaagcgcccaacagcggcgacccgg

SEQ ID NO: 119654 - RNA, 47 nt, Homo sapiens
agacaagagacacccccgccgccagaggcccacacacacgcagggcg

SEQ ID NO: 119655 - RNA, 75 nt, Homo sapiens
gcccgggccggcgcccgaggggaagagcggcccggcccgaggggggagaaaaggccaagggcaggagacacgaga

SEQ ID NO: 119656 - RNA, 66 nt, Homo sapiens
cgagccggaggagcacccaaccccgcgaaccaaaggcaagaaccggagcaggagaaaagccggaaa

SEQ ID NO: 119657 - RNA, 62 nt, Homo sapiens
ccggcgcggcgagggagcagcaccagggaggacgccccgggcggacccggacgacaccaaag

SEQ ID NO: 119658 - RNA, 61 nt, Homo sapiens
aggcccggggcaaagcagcaaagcaccacggacagaaaggcaccaaaccaccagccagagc

SEQ ID NO: 119659 - RNA, 75 nt, Homo sapiens
ccgacccaccggagcagcgcagaagcgagcggccagagaaccagaggaccggcaacaacccgaggacgaaccacc

SEQ ID NO: 119660 - RNA, 70 nt, Homo sapiens
gggggggaagaccccaggcgaccacaccagacacaggccgaagaacaggagaaggaagaacaaagaaaga

SEQ ID NO: 119661 - RNA, 77 nt, Homo sapiens
caggaaggaggagacgaagaaaggagcgaggaacaggaccgagccaggggcccggcaccgccgcacccccacccaag

SEQ ID NO: 119662 - RNA, 81 nt, Homo sapiens
ggcgaacccgcggcgcaaaacggaggagcggccgcagaagggcgcggcccgcccgcccggacgagccggcccgaggaccgg

SEQ ID NO: 119663 - RNA, 68 nt, Homo sapiens
caccacccgacagcgaccaggacccccagaggaccccaacacccacccccgccgggaccccgcggaca

SEQ ID NO: 119664 - RNA, 67 nt, Homo sapiens
cagacgcagggcgcccccgcgcgccgggggcccggaaagggacgcgcgcccagggagcgagaagcag

SEQ ID NO: 119665 - RNA, 77 nt, Homo sapiens
ggcgccggcagcagagaccaccagaagggccaagacaacgacaagagaacaaaggaggggaccccggcaaaaaaaac

SEQ ID NO: 119666 - RNA, 62 nt, Homo sapiens
cgaaagccggccacgccgggccggagccggccacaagaacggaagcagaagcacgcaagcag

SEQ ID NO: 119667 - RNA, 59 nt, Homo sapiens
acaacggaagcaccagacaagacagggcgcggggcgcgggggcccaggccggaggaacc

SEQ ID NO: 119668 - RNA, 80 nt, Homo sapiens
gcggaagacccgagccggacccagggagagcagggcagggaaaagcgccgggcggaccagcagccaccaccgcccagcgc

SEQ ID NO: 119669 - RNA, 93 nt, Homo sapiens
ggacggcgcaacaagaaacggaacaggcaccaggagaagcggcgaagacggaagggacggcccccagcggaggagacacgggccaagcccaac

SEQ ID NO: 119670 - RNA, 75 nt, Homo sapiens
aagagggcacaacaggaccagcaagaggaccgaagaaaaagcagcacgaaggcgaggaaccagcagacaaaaaag

SEQ ID NO: 119671 - RNA, 83 nt, Homo sapiens
ccgggcagacggggcacggcgagagaggaggggacacaaaggaagaggcagccagacagcaccagcgcccaacgcacacgaca

SEQ ID NO: 119672 - RNA, 68 nt, Homo sapiens
ccggagccccgggggcgcccgaacaacgcacccacgagcggcccagagcgggaagagagagagaaccc

SEQ ID NO: 119673 - RNA, 80 nt, Homo sapiens
gacagccccagagacggcaaccaaagaccggaaaaaggcagaaaacgcccacccgccagggccgccgcgcaggccgggaa

SEQ ID NO: 119674 - RNA, 60 nt, Homo sapiens
acgcccccgccagccgagcccccgggccgacggaacaagaagcgaagaaacacaaacgga

SEQ ID NO: 119675 - RNA, 67 nt, Homo sapiens
aggaaccaggcgccccaggagaaggaccgaaggggaacgagaacgcagccacagcgaagaggacgca

SEQ ID NO: 119676 - RNA, 76 nt, Homo sapiens
cacggaacaaaacaaagcaccacagacagcgggcgaagaaacaccggcggacagccagcgcaacaaaagcaaggaa

SEQ ID NO: 119677 - RNA, 76 nt, Homo sapiens
ccgcggaggccgagaggcaaggagaacacaaccgccaaaaaaaaaacaaggagacgaggccacgaggaaggaggag

SEQ ID NO: 119678 - RNA, 64 nt, Homo sapiens
cgagagcgcgggaggagcgcagccccgcaagagccacagcccccagccaacgaggcagcgaggc

SEQ ID NO: 119679 - RNA, 78 nt, Homo sapiens
acaaagggagggggcagcccgcaggagcaagcgcagcaccaccaacagagaaagacagcaaagaaaaggagaagaaag

SEQ ID NO: 119680 - RNA, 79 nt, Homo sapiens
gccgcgggaaacaggcggacagccacgacgggagaagaccaaaaacgcacccaaaagcaagcgcgggaagcgacaccca

SEQ ID NO: 119681 - RNA, 62 nt, Homo sapiens
caggaacaaagccagacgacggagaaacacaaggcggacacagaccagacaagggaaaccga

SEQ ID NO: 119682 - RNA, 77 nt, Homo sapiens
cgacggaggccgcagggccagaacaacgaacagaagaccacggcggaaacgggcgaaaggcagaaaaccacgcggaa

SEQ ID NO: 119683 - RNA, 77 nt, Homo sapiens
gggaccgcccggccgcgagccggcgcagacgaggagcggccgcgcccaggcgcaagcagggagacaggccacgcaac

SEQ ID NO: 119684 - RNA, 82 nt, Homo sapiens
gcccaaagaccccggagacagcgcgggccaggcacgacaccgcaacgacacagcagcgaagcgccggagaacgcacgggacg

SEQ ID NO: 119685 - RNA, 77 nt, Homo sapiens
agcgccaccgggcaagggcagaagggaacagggccacagcaagcccacagcacaggccagcggagcgaagccacaga

SEQ ID NO: 119686 - RNA, 86 nt, Homo sapiens
ccgagccacccgcccgcccaaggcccgcgggcgggagaacggaaaaccccaacccgagcaaggcaccggcaccggaccaacacgaa

SEQ ID NO: 119687 - RNA, 75 nt, Homo sapiens
ggagagggcggcccagggggccacgcgcggagcgggacccggggcaccagaggaccgagagagaaaagagaagca

SEQ ID NO: 119688 - RNA, 82 nt, Homo sapiens
ggaagaggcggacggaggagcaggcgagaagagaaggacgaccgaaaacccagccagacaaaagagaagcagaggagcgaag

SEQ ID NO: 119689 - RNA, 72 nt, Homo sapiens
aagagcagaaacccgccaggaccgggacacagagagggcaggccacagaaagccacaaggacgcaaacccca

SEQ ID NO: 119690 - RNA, 82 nt, Homo sapiens
gacacaagacacggccagaaaagagagaccccagggaacaccgaccagggcagccggagcagcaagcgggccgaccgcagga

SEQ ID NO: 119691 - RNA, 78 nt, Homo sapiens
cggggccccgcggcagggcacagggagggggccacggacggggccgagcacaaccacccaccggacgggaccggaccc

SEQ ID NO: 119692 - RNA, 72 nt, Homo sapiens
ggaccgaagagacaggcagcacgaaggaggcagaaggacagcccccaaggagacaagcgcaagcagccagag

SEQ ID NO: 119693 - RNA, 67 nt, Homo sapiens
gggcagcccggccgacaaccacggaggcagcacggcaggagacgaggagaggacagcaggacacccg

SEQ ID NO: 119694 - RNA, 70 nt, Homo sapiens
caggaggccaaaagacgaaacccagaggaaggaggaaccaaaaagcaacacacaggcccagacgacagag

SEQ ID NO: 119695 - RNA, 75 nt, Homo sapiens
ggacacgcccgggcagggcccaccccgcgcccgacagacaacccagaaaagaaaaggccaggggcgccgaaaaac

SEQ ID NO: 119696 - RNA, 72 nt, Homo sapiens
cagcaaacaccaggagaaaccgggaaaccgcccgagacccagggaacccaaagaacagaaccacaagaacag

SEQ ID NO: 119697 - RNA, 78 nt, Homo sapiens
cgaagggcaggcgccccgacccagaggagcccagccaaggagagacgagcacggcagccaccgacagaaggaaggcac

SEQ ID NO: 119698 - RNA, 63 nt, Homo sapiens
cgacggacaccccccagaaaagcagagggaacaccagaggacgccaaccgcacagcagaccac

SEQ ID NO: 119699 - RNA, 69 nt, Homo sapiens
aagcagagcccaggagaaaccggacgcgacgggacgccaggaagccggacgcgcagggaaaacgagagg

SEQ ID NO: 119700 - RNA, 58 nt, Homo sapiens
gggagagcccggaagaacacagccagggaagcagcgcagcccgcaaaaagcgccacca

SEQ ID NO: 119701 - RNA, 73 nt, Homo sapiens
gccgcaaccggccccggaggaggaagacagccgccggggccggcacccagggccccggggcggcggccgcggg

SEQ ID NO: 119702 - RNA, 62 nt, Homo sapiens
ccacgcccacggacgccgcccgcggccggaccgagccggaggaaaccacagagcagccagca

SEQ ID NO: 119703 - RNA, 43 nt, Homo sapiens
agagccaggcagaagcgcgcggagcacccccaccgccaacacc

SEQ ID NO: 119704 - RNA, 74 nt, Homo sapiens
gccgagacccccgaggggaccagacgaagcgcgccagaggaccgagaagcgcggggaccacgagccaggaccca

SEQ ID NO: 119705 - RNA, 58 nt, Homo sapiens
aacacggccccacggcacaacacacccgcaaggaaacacacgccgagaagacggcccc

SEQ ID NO: 119706 - RNA, 78 nt, Homo sapiens
gagagacacggccgaaggcgaacgccgcggccaaggagccgccaaagccagacgcgaggcgcgcaacagcggacgcgg

SEQ ID NO: 119707 - RNA, 62 nt, Homo sapiens
cgggaagaggcggcgccgccacccccccccagcagaagacgaccccgacgcaggccaggagc

SEQ ID NO: 119708 - RNA, 87 nt, Homo sapiens
aaccgcaaccagacgccagcgggacgaggaccgagaccgcggccgggaccgagggcaccccacgccacagcggacccgcagggcgag

SEQ ID NO: 119709 - RNA, 76 nt, Homo sapiens
caagcgcgccaccccggggccgaggaaaggccaaccgggccacgacgggacacacagagaaccagaaaccgagagc

SEQ ID NO: 119710 - RNA, 70 nt, Homo sapiens
aaaggggcacacagggcaaccccgggccggaccggcagcgaggacagaaaaggggcagaaaaccaacaag

SEQ ID NO: 119711 - RNA, 72 nt, Homo sapiens
aaaggaagccaggccacgaaagaccacagacacaaggacaagaaagccaccaggacgagaaaaaccaccgga

SEQ ID NO: 119712 - RNA, 74 nt, Homo sapiens
cgggaggaccggcccgcccgcagcagagcccgcaccagagagcagagggaaggcaacacgagcggaagaacaca

SEQ ID NO: 119713 - RNA, 83 nt, Homo sapiens
cccgcccgccccagccacccaggccccgccgcccgggggcgccgcccaccgcgcccgccggacagcccagagcaagcacacgg

SEQ ID NO: 119714 - RNA, 77 nt, Homo sapiens
ccgacacaagaagaggcccgagacccaagcgcagcacaggagccaaagaagccggggaaagacaaaggaggaacggc

SEQ ID NO: 119715 - RNA, 64 nt, Homo sapiens
cccccccaaaccgagccaaaagcggcaaggcaacaggagcaaaagcggaaggagagacaggaag

SEQ ID NO: 119716 - RNA, 67 nt, Homo sapiens
aaacagcaacaacgggccggaagggcaaaacacaaggcaagggacgaaagggcccacaggccacccg

SEQ ID NO: 119717 - RNA, 72 nt, Homo sapiens
gaaccgagacaaaagaagaccaaaacgaggcacaaaaagcagagcacggaagcaggaaaaaagaacaagaac

SEQ ID NO: 119718 - RNA, 72 nt, Homo sapiens
aaagcacaaaaaacaccgaagccagaagacggaaaaaacagcggagcaacaccccgcaccgggaaccgcgga

SEQ ID NO: 119719 - RNA, 71 nt, Homo sapiens
gcagagaggaccgccacgggccggcgcggcggcccacagcccagaagacccaaagagaagacgaaacggac

SEQ ID NO: 119720 - RNA, 82 nt, Homo sapiens
cacgggggaagaagaaaaaaccaaaaacgccaagacagcaaggaagcgggagaggccacccgcccacgagcggaagaaccag

SEQ ID NO: 119721 - RNA, 64 nt, Homo sapiens
ccaacagaaccacagaggacaaaccggcgaccacacacggggacgacggggaagccggacagca

SEQ ID NO: 119722 - RNA, 85 nt, Homo sapiens
gaacgccggagagcacgaccgccagaagaaagggacgcggcacagaacgaagaagaaagcagaagcaagagaaaaaagaaacacc

SEQ ID NO: 119723 - RNA, 72 nt, Homo sapiens
gccaggcgggaggaagaggcagaggacccaccgccagccacccacgccagcagagaaccaggaccgagggga

SEQ ID NO: 119724 - RNA, 44 nt, Homo sapiens
ccccaaagcacgggaacaggaagcacaagccagcagacgacaac

SEQ ID NO: 119725 - RNA, 83 nt, Homo sapiens
gaaagccacaacagggcggcaacaggggcgagaaagggaaaaacgcagccccagagagcgcggcgaagacagaaaaggacccc

SEQ ID NO: 119726 - RNA, 64 nt, Homo sapiens
gggggaacggggcccccggcaggccacagagcgaaaaaaaccaacacgcaaccagaaacaacag

SEQ ID NO: 119727 - RNA, 86 nt, Homo sapiens
cgccgccagaacaaccgggcgccgacgagacgggaacaacaaccgaccccgcggccgacaccagacggaggagggcgaggagaacc

SEQ ID NO: 119728 - RNA, 87 nt, Homo sapiens
gagagcacgacggaccaagacgagcccagcgcaaccccaagcgcccaaagccgcacaaacacgcagaggcaagaagagaggcaggag

SEQ ID NO: 119729 - RNA, 85 nt, Homo sapiens
gccgacacaagagcgcgagaccaacagaaaggccaaagaagagacgaagcaaaggcgcccggagccccagaaccgaagaagagcc

SEQ ID NO: 119730 - RNA, 74 nt, Homo sapiens
ggacggccggcaggccgccgccgagcgggcggagaacggaaaagcaccaggaagcagagaggaccgcagaaggg

SEQ ID NO: 119731 - RNA, 80 nt, Homo sapiens
gggaggcaaccaacaaggaagacaggaaaaaccagccgcaagaacggcacacgcgagaacaaaccccaccagaaaccgcc

SEQ ID NO: 119732 - RNA, 66 nt, Homo sapiens
gggcagcccgcaccgcgccgccgccaccacgcccacgcaacacacgaaacgccagaggcagcagca

SEQ ID NO: 119733 - RNA, 68 nt, Homo sapiens
ccggaaaacaccccagaggaaccagacgggcgaaagaaggacaccggcagaagaaagcgggacaacgg

SEQ ID NO: 119734 - RNA, 74 nt, Homo sapiens
accaggagcagaagaggaagagggccgaccaagcagaacccgagaagagccgagaaacacccgacaaagccggg

SEQ ID NO: 119735 - RNA, 65 nt, Homo sapiens
gcgggcgacagcgaccgacgccacacggaggaggaggaagagcagccgcaggcagcacagccccc

SEQ ID NO: 119736 - RNA, 36 nt, Homo sapiens
gcgcacgccagcagcaaccagaagggaccccgcccc

SEQ ID NO: 119737 - RNA, 79 nt, Homo sapiens
ggccgccccccgccgcccccccccgccaggggcagacacggcccagaaccgaccggaccccagaggccgcgggcgggcc

SEQ ID NO: 119738 - RNA, 77 nt, Homo sapiens
cgagcccacaacaagaaacgcaacggccaggaaggaacaccagcaaagcaccggaacgcagggaacagggggccccc

SEQ ID NO: 119739 - RNA, 77 nt, Homo sapiens
accggcacccggacaggaggagccagggcccggcccgaaaggagagccaggagcgggggacaggagaccaacggcga

SEQ ID NO: 119740 - RNA, 71 nt, Homo sapiens
gagggccgcaaccggccccggaggaggaagacagccgccggggccggcacccagggcgagcccaggcagcc

SEQ ID NO: 119741 - RNA, 96 nt, Homo sapiens
cgcgcaaagcagcaagaccgggacagggagagaagcaaacggagggaaaggcaccaacggacaaccaggcacgggacaaccagcacggagcagagg

SEQ ID NO: 119742 - RNA, 73 nt, Homo sapiens
acagaccccggaaacacccaccaccgaaccagccacacaggaaaggaaccagaacagacccacgaagacccgc

SEQ ID NO: 119743 - RNA, 79 nt, Homo sapiens
ggcgggcaaccagaagggcccagggccaggagggagggcacggaggaccagaggcggacacaccaccacccagccagga

SEQ ID NO: 119744 - RNA, 64 nt, Homo sapiens
gggaaacgacgccaacacccccgggccccaccggccaagcgcaagaggagcaaaaaacagaagc

SEQ ID NO: 119745 - RNA, 49 nt, Homo sapiens
aaagcagcagcgcgccgcaggaggcaggagacaaaaacaggaagagaag

SEQ ID NO: 119746 - RNA, 74 nt, Homo sapiens
cgggagggcccgccagccgcgcccgggcggagaacggaaaagcaccaggaagcagagaggaccgcagaagggaa

SEQ ID NO: 119747 - RNA, 58 nt, Homo sapiens
gaagaaaagcacgaacacccaaagccaagcgaccccacacaaaacccagcgccaggcc

SEQ ID NO: 119748 - RNA, 82 nt, Homo sapiens
gaacccccgcccaggaggcgcggccgggcgccaaaaggcgccggcggcagagcggggagacgagacaaccgccccgccgccg

SEQ ID NO: 119749 - RNA, 74 nt, Homo sapiens
aacagccaccaaaacagaagggacagagaaagaagcaagaaaaaccagccaaaagagagagaaagagaaaagca

SEQ ID NO: 119750 - RNA, 96 nt, Homo sapiens
cggagcgcgaaggccgggacccggccccggcccacaggggggggcaaacccgagagaacgggaaaaccagagacccagacacgcgaaggaacgaaa

SEQ ID NO: 119751 - RNA, 79 nt, Homo sapiens
cacgcggacgcccgggcaacacccccgggaacgagagagagacagggcagggcagcagcacgaccgacccagcagcccc

SEQ ID NO: 119752 - RNA, 72 nt, Homo sapiens
aaccacaaagaagacaaagcacgcggcacaagacacagaagcacaacccaaccaagcagaaacaacagaggc

SEQ ID NO: 119753 - RNA, 74 nt, Homo sapiens
cccagaacacgcacccgcaggaaaggaagcaaagccagggagggaaccgaagccacgggcgggggacgcgaccc

SEQ ID NO: 119754 - RNA, 83 nt, Homo sapiens
gccgagcaacaagaaccagacgacaaacggggacagcgccgaccggaacagggaccacggaagcccaggaccagccccgacaa

SEQ ID NO: 119755 - RNA, 76 nt, Homo sapiens
aggagagcgcaaaaaacgcgggaacagagagaccgacagagccacaagaaacaaaggcacggcacggccggcacac

SEQ ID NO: 119756 - RNA, 81 nt, Homo sapiens
gcaaaaaaagagcccgcaagaagaacagagacagcagccaaacccccaggcccgcggcggaagccggcaggacacgaaagc

SEQ ID NO: 119757 - RNA, 89 nt, Homo sapiens
ccccaccccggaacccgcggggcggaccggagaagccccgagcaccccacagcaccagcggccaggagcagagaaaaagaaaagacccc

SEQ ID NO: 119758 - RNA, 82 nt, Homo sapiens
cccagcccacccccaaccccaaccggccgcgaggcacagacgggagagcaacgggcgaaggcacgcccgggaagacgaacgg

SEQ ID NO: 119759 - RNA, 47 nt, Homo sapiens
cgcagccgaggaagccagacaccaggccgagggcggaggaacgggga

SEQ ID NO: 119760 - RNA, 40 nt, Homo sapiens
gccaagggacggccaccccagggaacccgagcgcagaggg

SEQ ID NO: 119761 - RNA, 77 nt, Homo sapiens
gaccgaccgagcgcaggacggacagcgcaggagaagagggccacaagcgaaggcaaaaccaaacaccccagcccaca

SEQ ID NO: 119762 - RNA, 59 nt, Homo sapiens
cggcggcggccagcgccaggacccagaagaccccagacggggagcgcagcagagggagc

SEQ ID NO: 119763 - RNA, 75 nt, Homo sapiens
ggaacgcagagacccccgccccgacgccacggccagccacgagagcccccaccccggggggaggaggggaagaaa

SEQ ID NO: 119764 - RNA, 72 nt, Homo sapiens
gccacggaggggcagccacccccggacccaagaagaacagaaggaagacaaagagacggcacccccaaagaa

SEQ ID NO: 119765 - RNA, 84 nt, Homo sapiens
gaccgcaaaggccaacccacagagccccgcggcgccacgcagagccccgccaggaagacacgccggggaacgaagcagaagacg

SEQ ID NO: 119766 - RNA, 81 nt, Homo sapiens
aacgagcggcgaagagggcgacccggacccggaaggggcggaggaagaggacgaacgggagcagcaacccagcacgcacga

SEQ ID NO: 119767 - RNA, 93 nt, Homo sapiens
cgcaggcagacaaaagggccaaagaagggagagaggggacaacagagccgacacagccaagaagcagagcaaaacaggaaaaacagccaagag

SEQ ID NO: 119768 - RNA, 89 nt, Homo sapiens
cgagaaagagaggggagagagagaggcagagagggagagagggagaggacagcagcgccgaacggcggccaaagcgccagacaagggcc

SEQ ID NO: 119769 - RNA, 53 nt, Homo sapiens
aaggaccaagaaccagccaaaagaagaacccggacccgaccgaagcaagaacg

SEQ ID NO: 119770 - RNA, 50 nt, Homo sapiens
caacacagaacgaagagaagaagcgagggcgaacggccgcccggacaacc

SEQ ID NO: 119771 - RNA, 67 nt, Homo sapiens
aacccaacgagaccaaagaggcaagggaccgggaaaggggaaaggacgcgcagcggagccgcagacg

SEQ ID NO: 119772 - RNA, 74 nt, Homo sapiens
ggcagacccacgagcaggagcagacaggccagaacacgaacacaggagccaccagaaaaacaaaaaggagggaa

SEQ ID NO: 119773 - RNA, 63 nt, Homo sapiens
cgcaggacgcggccagagcaggcagagacagagaagaaacgccaggggaaagaaaaagagccc

SEQ ID NO: 119774 - RNA, 77 nt, Homo sapiens
aaggggaagggcacgacccagggaggaaggcgcaggagcccggccaccacacccagccggaagagggaaggcaccag

SEQ ID NO: 119775 - RNA, 77 nt, Homo sapiens
cggacaggagcgccgaggggggcgggccgagcacccgcaggccccgcagaggcgcccacagcggacggcaggccagg

SEQ ID NO: 119776 - RNA, 37 nt, Homo sapiens
cacgacaagggcccgcggaccgaggagccaccgcgcc

SEQ ID NO: 119777 - RNA, 80 nt, Homo sapiens
aagcaccgcacccagagaaagcgcggacaacaccaggaaaagacagaggccccagcagccgaccgaggggaggaccagag

SEQ ID NO: 119778 - RNA, 79 nt, Homo sapiens
cacaacaggcagacagacaagaaccccacccagaagaaagaaaagcggcgcaccgggcaccggccaggcgccgacacga

SEQ ID NO: 119779 - RNA, 74 nt, Homo sapiens
cggcaggcgaagggaagaagaaacagaggaaggcacagaagaaggagaagagaaaagggaaggcacggaggaag

SEQ ID NO: 119780 - RNA, 74 nt, Homo sapiens
agaagcaagagagacgccagacagccgccaggaagcaacgcagcgcggaaaggcacaaccaaggacacgcagca

SEQ ID NO: 119781 - RNA, 71 nt, Homo sapiens
acggcagaggaccccggagagcaaggaagaaagcagcccagcagagaaacagaaaacagccaaaaggacag

SEQ ID NO: 119782 - RNA, 69 nt, Homo sapiens
aaaacggcggaaaaaagcggagaagaggagagaaaacagacagaaaagaaccagaaccggccaaaagcg

SEQ ID NO: 119783 - RNA, 77 nt, Homo sapiens
ggccacggggcgcggacgaggccggcgcaggccgcgcccagcacacgcaggaacgggccccgggagcacgggacgcc

SEQ ID NO: 119784 - RNA, 69 nt, Homo sapiens
gggacgcgacccccggacgacacaaaaagggaaaggggcgacgcgaggaaacaccaggccacgcccgga

SEQ ID NO: 119785 - RNA, 55 nt, Homo sapiens
cgagggaaacaaaaaaaagaccagacagagaagccggggcagccgcacaagaccc

SEQ ID NO: 119786 - RNA, 89 nt, Homo sapiens
ggccggaggaacgggcccgcaagcgcgccgacagaagagagcgaagcggagcagaacaggagaagacgcaccaacagcagcaaacgcag

SEQ ID NO: 119787 - RNA, 60 nt, Homo sapiens
gggacaaaaaccagaccaggccaagacaaggccgagaccgcgggaagaagaaggaggagc

SEQ ID NO: 119788 - RNA, 74 nt, Homo sapiens
aagcggacagcaaaaggcagagcagaacagagagaagggcgggagaaaccaaggaaagagaaaagcgggaggcg

SEQ ID NO: 119789 - RNA, 85 nt, Homo sapiens
gagaagcgggcgcagcacagaacgccaaaggcccgcaaggacaagcgaagaaacaggggagaaaccccgcggggaagccgaggaa

SEQ ID NO: 119790 - RNA, 86 nt, Homo sapiens
cccgaaaaaacacaaaaagaaaaaaaagcgaacaacacaggaggagaaggccccagccaagcacacaggaggggacccccggcgaa

SEQ ID NO: 119791 - RNA, 70 nt, Homo sapiens
gagggaacccgaccggacccagccccagaaggaccaccgccacaacaacccagaaggacgaaagcgcgca

SEQ ID NO: 119792 - RNA, 82 nt, Homo sapiens
cgagcgagggggcggcggcgacagccaggcccggaagcgagggcggccgcgccggcccaggaagcccggggcggcgacggag

SEQ ID NO: 119793 - RNA, 63 nt, Homo sapiens
cgacaaagagaaaaaacgggcggggggaacagacagccccagccacagaccccgccggggaag

SEQ ID NO: 119794 - RNA, 79 nt, Homo sapiens
cgggccccgggcagcagagcggaggcgcgccacgaaaccgaccgcggcaagagcagccgggaagaaggagcgcagaagg

SEQ ID NO: 119795 - RNA, 81 nt, Homo sapiens
acagccaaacgcagcgcagaccgcgcccgccgaggcgcaaggaagaagagacgccgcgcggcagacaaggcccggcaggca

SEQ ID NO: 119796 - RNA, 75 nt, Homo sapiens
cagccgggccccccgggaaccaacccccgaccgagcaggccgcaacccacccacaccaacagagaacagccaggg

SEQ ID NO: 119797 - RNA, 73 nt, Homo sapiens
acgcgcccggacagaaagcaagcagcgcaagcgcacggagaagagggggcggagcccggacggaaagaaacac

SEQ ID NO: 119798 - RNA, 84 nt, Homo sapiens
cgggcggagcggcgagagcccccacgggaaagcagaggccgcaacaggaaaagcagccccagaacagcaggagaggcccgcccc

SEQ ID NO: 119799 - RNA, 65 nt, Homo sapiens
cgggcccgacccgcgagaggacaaggcacgaggcgcggcgaccaccacagcagagcccggcgaag

SEQ ID NO: 119800 - RNA, 74 nt, Homo sapiens
aaaaaccagacaccacaccagacgagagagaccgaggacaggaaaagccagagagcggcagagaagaagggagg

SEQ ID NO: 119801 - RNA, 85 nt, Homo sapiens
cagagaaaggaggcggcccagggcagcggagcacgcgggcgccacgcagcagggagaggcggggcccacccaggaaaaaggacac

SEQ ID NO: 119802 - RNA, 79 nt, Homo sapiens
aagccaaaaaagcccaggaagaagacgaggaggcacagcaagcaacccggccgaggggggcaccccgggaggaagcaac

SEQ ID NO: 119803 - RNA, 37 nt, Homo sapiens
ccaaaaggagcaagaaggcgaccagaagcccacacgg

SEQ ID NO: 119804 - RNA, 101 nt, Homo sapiens
caggcaggcgcagaagagacaggggaggcacgcgaggagacacagcagcagcaaagcccgcgacacccgacgaggcgggcgggaagccgcacgggaaccag

SEQ ID NO: 119805 - RNA, 55 nt, Homo sapiens
ccacgacacaaacggaacgccgcgcgaggacgcggaacaggagcaaaacggagca

SEQ ID NO: 119806 - RNA, 79 nt, Homo sapiens
aacggcggggggccggagagggagaacgccacccccgacgccgcccaaagcacgagacaaggcgaccccacacaaaacc

SEQ ID NO: 119807 - RNA, 90 nt, Homo sapiens
cagcagcggggggcgacccccagaagcggcgaccccgcacacacacccaccagccacggcagcccagcggggacccagccgccccgcccg

SEQ ID NO: 119808 - RNA, 81 nt, Homo sapiens
caaggccaggacccccggagcccgaagacagcaccgccagccaagggaaggagagcgcccaaaggacgcggaacagcacca

SEQ ID NO: 119809 - RNA, 70 nt, Homo sapiens
cgcacggcgaggggcacaggagccgcgcaggccccccgggccgggcacgggcgccagcggcacggcagcc

SEQ ID NO: 119810 - RNA, 53 nt, Homo sapiens
gcagcggaccaaggcgcggggaggggagaagaagaggagccgcgcgcccaggc

SEQ ID NO: 119811 - RNA, 68 nt, Homo sapiens
ccacaggccacaacgcacacgcccccgccaaggcggcgcaaccgaccccagaaggacagccaagcgcc

SEQ ID NO: 119812 - RNA, 71 nt, Homo sapiens
cccgcgccggcccgcccgcccaaaaccgaagagggaagagccagaagaacaggccgccaaagaaaacagcg

SEQ ID NO: 119813 - RNA, 87 nt, Homo sapiens
caggccgaggcgggaagccccagcgccgggccaaggccaaggccagccggacaaaacaaagggcagaagccaggaccccaccaacgg

SEQ ID NO: 119814 - RNA, 82 nt, Homo sapiens
caaaacacccggaggaacaggcccgaagaccggggaaaagggcaacccaacaacagccaccgggacacccgcaggccggggc

SEQ ID NO: 119815 - RNA, 82 nt, Homo sapiens
cgcgcagacgacgagccgccccgcccgcgcccccggggccgcggagccagggggaccccacccgaggagcagagagcgagga

SEQ ID NO: 119816 - RNA, 43 nt, Homo sapiens
gccgaaccgagagaagacaagcacaggaagccggagaaccgaa

SEQ ID NO: 119817 - RNA, 67 nt, Homo sapiens
gaggcggagaaaagaaaaaagaagaaaaacgaaggaaaacggagggaaggggaacaggaccggccac

SEQ ID NO: 119818 - RNA, 70 nt, Homo sapiens
aggaccaagaaccagcacagacgccggagaccgggcaccaccaccagggcgcaaggcggggcccggacac

SEQ ID NO: 119819 - RNA, 67 nt, Homo sapiens
ccaggagccaccaacaccaaaaaggggaaacgaccaccggagccaagacagagggagccgacaccac

SEQ ID NO: 119820 - RNA, 68 nt, Homo sapiens
ggccggggagccggcccaagcgggacaaggcacgaggcgcggcgaccaccacagcagagcccggcgaa

SEQ ID NO: 119821 - RNA, 67 nt, Homo sapiens
agaaccgcaaggcaaggaaaggaccccaaagccagaccagggaaggggccagggccaccacaccccg

SEQ ID NO: 119822 - RNA, 78 nt, Homo sapiens
agcccagcccccgccgcggcgccgaccccgacagaacgggccccgcacccgcggccccggggcagcggaggccgggac

SEQ ID NO: 119823 - RNA, 76 nt, Homo sapiens
acaaaaacacaccaagagagcgcgacagacgcaacaaaacagccgcccagcgaacagcagcacggaccaacaacag

SEQ ID NO: 119824 - RNA, 51 nt, Homo sapiens
agcccgccgcagaaaccgccccaagaccacacacaaaaccacccgggaacc

SEQ ID NO: 119825 - RNA, 77 nt, Homo sapiens
agccgagaagacaagcaggaaggccagaaaagcacggaaccaagcgagggaaaagagacgcaaaccacgaggacaga

SEQ ID NO: 119826 - RNA, 62 nt, Homo sapiens
aggccacgcggaaacaaggcgaccccagaaagagccagagcccagaggggagcagagggagg

SEQ ID NO: 119827 - RNA, 78 nt, Homo sapiens
gggcgggggaggccaccagccggacagccggcgggaacggggcgcgaaagacacggacaacgcaaacccggccccccc

SEQ ID NO: 119828 - RNA, 72 nt, Homo sapiens
aaagccgccggaaccaaagccagccggcaacgaagacgcagggagcacgggcagagacagccacaaaccaga

SEQ ID NO: 119829 - RNA, 73 nt, Homo sapiens
gaagaccccagggggcaggaaggcacccagccacggagaaggagaagcggcgaggaaggaagccgacgcccag

SEQ ID NO: 119830 - RNA, 72 nt, Homo sapiens
ccccacaccgagcacccgcagaacaggagaggaagaagcgcacgcgaaggggccagagcccccgaacaaagg

SEQ ID NO: 119831 - RNA, 69 nt, Homo sapiens
cacgacaggagggcaacggacagggagacaacagccacacaaagcagcaacaggagcagggaagaaaag

SEQ ID NO: 119832 - RNA, 80 nt, Homo sapiens
gaggagcaaggcccggcacaccacgggcgcgggcgccaggaggaggacgaggacaggaggccccgcaggccgcgcaccgg

SEQ ID NO: 119833 - RNA, 72 nt, Homo sapiens
gcaccacacgccaaccaccgcacggcaggggccggccaaccaggccccccaagacggcaccagagagagccc

SEQ ID NO: 119834 - RNA, 69 nt, Homo sapiens
ccccaaagcagcaggagcgcagcacgaaaacggaaagggaaggaggagaacgccaagccaaccgaaaaa

SEQ ID NO: 119835 - RNA, 70 nt, Homo sapiens
ggcgaagcggccgagcaggcgagcgaacgacgaagcaaaacggacaagcggaagggcaacaacacaccag

SEQ ID NO: 119836 - RNA, 70 nt, Homo sapiens
gggaaacaccgcagaaaaggaagaggcgggcacccaggaccagaggacgcaccagaagacagggcaacca

SEQ ID NO: 119837 - RNA, 77 nt, Homo sapiens
aaggcaagaaaacagggaccacgaggagcacagcggggacaacgaggagaaccccagaggcgaagacgacgagaaga

SEQ ID NO: 119838 - RNA, 79 nt, Homo sapiens
caagaggaagggcgcccgaagcgggagaaggacgcggacagcagcaagcagcaggaggcacaaagagagacggaacgca

SEQ ID NO: 119839 - RNA, 47 nt, Homo sapiens
cgaaaggggggcagggagagaagcacccggccgcaagcccggccgga

SEQ ID NO: 119840 - RNA, 56 nt, Homo sapiens
acaacgcgcgcgacacggggacgagcagggacgcaccaaaacggacagccgaagac

SEQ ID NO: 119841 - RNA, 53 nt, Homo sapiens
agaggagggagaacacagaaaccggccccaggagaagcagccagacccagagg

SEQ ID NO: 119842 - RNA, 71 nt, Homo sapiens
ggagggaaacacccgaaacagcgcggaaaggaaacccgggagcacggcccaggcagccaagaaggcagaga

SEQ ID NO: 119843 - RNA, 69 nt, Homo sapiens
agcacaacaacaggaacccagacagcgcgggccggcccagggagaacgcaaaaccaccacccccacaaa

SEQ ID NO: 119844 - RNA, 76 nt, Homo sapiens
gggcccaggaccccgggccccaggacgcacggcagagggccccggaccaaaagacccaagaaggagaagccccgca

SEQ ID NO: 119845 - RNA, 72 nt, Homo sapiens
aaaggccggcagcgacacacgagagcagaaaaaggcgggaggcgaccaggaacaggccccaggacagggagc

SEQ ID NO: 119846 - RNA, 69 nt, Homo sapiens
cagagaaggcagccaagcccggccagaaggaaaggcaacaaaaccaaagagagccccagcaggaggggg

SEQ ID NO: 119847 - RNA, 83 nt, Homo sapiens
gaaagccagccccagaaagaaaaggccagcaaaggacgcccgaacggcgcagagcaggagcagacgcgcagggagcaacagcc

SEQ ID NO: 119848 - RNA, 76 nt, Homo sapiens
cggccgcgccagaagaccggaggaagaggaggcaaggagggcgaaggggcacccccacaggcagaccgggaagacg

SEQ ID NO: 119849 - RNA, 66 nt, Homo sapiens
gaacacgggacgccccagaggaccccggccggaggcaagacggcaaccgggaaaaacgaagcaaag

SEQ ID NO: 119850 - RNA, 63 nt, Homo sapiens
gccggaggaagagaaggcagcggacgaggcaggcgggcccgcggcagccagccacagagcccg

SEQ ID NO: 119851 - RNA, 85 nt, Homo sapiens
gaaggggacacagaagccgcagagcccagcaagaccacgacacgagagcgccgccagccggaaggagacacggccaccgggacgg

SEQ ID NO: 119852 - RNA, 77 nt, Homo sapiens
ccgaccccccggcgccgcgccggcggcgcccccgggcgcgccggacaggccgccgcggcgggacagcggccccaagg

SEQ ID NO: 119853 - RNA, 74 nt, Homo sapiens
ggcgaccacggagagcccggccccccacaggacgggaagacacaagcgggacggaagaggcccggcgaccggac

SEQ ID NO: 119854 - RNA, 58 nt, Homo sapiens
ccccacccaccggcccacccacaagcgcacaggaccggccccagaagccagggccccc

SEQ ID NO: 119855 - RNA, 39 nt, Homo sapiens
gcggaacaggacgccccgagagacggggccgaggaggga

SEQ ID NO: 119856 - RNA, 80 nt, Homo sapiens
aaaaagggcagcgccgaaaggaagacgaaagagggccccacgcccaaaccaaacgaacaaagagacacggaaagaaccca

SEQ ID NO: 119857 - RNA, 72 nt, Homo sapiens
ccgcgcacgcagcgcaaccggggagaagagggaccacaaggcaccaagcgggggggcagggaaaaaccagga

SEQ ID NO: 119858 - RNA, 85 nt, Homo sapiens
cggcaccaccccagcgacaaaaaggagacacagaaggggagaagggaggacgggacaccgagggagccagagacaaccaggcgcg

SEQ ID NO: 119859 - RNA, 59 nt, Homo sapiens
cgacggacggcgggcaccggccgacgcaaagggggagcgccaggagagaagagacccgg

SEQ ID NO: 119860 - RNA, 64 nt, Homo sapiens
accaagaaggggaaaaacaaccaaaaagagcgaaccgacccccagagggaaagggccccaagag

SEQ ID NO: 119861 - RNA, 76 nt, Homo sapiens
gcagggcggcagaggaagggaaaaggccgaggcacagcgggaagaccgcaaagacgacccgagacagggaacagca

SEQ ID NO: 119862 - RNA, 71 nt, Homo sapiens
caaggaggccccagcggaccgaacagggaccaccacacgaaaccaaggaaaaaccgggaacagcagaggcc

SEQ ID NO: 119863 - RNA, 45 nt, Homo sapiens
gacgccggagcagcccaacccagaaacaggggcacggccgccaag

SEQ ID NO: 119864 - RNA, 54 nt, Homo sapiens
cacacccgcagagcgaggaccggaagccagcagggagaagcgcggaagccacca

SEQ ID NO: 119865 - RNA, 82 nt, Homo sapiens
cgacaccgcgagaagaaccgggcggagggacgccacagcagcagcgagaccccacgaggagccgggccgccaccgccccaga

SEQ ID NO: 119866 - RNA, 73 nt, Homo sapiens
agcgagaaaccaaagggaacgggggagagaagccacaaagcaagcaggaccaggccaccggagacaggagaag

SEQ ID NO: 119867 - RNA, 82 nt, Homo sapiens
cgccacgagaaacagcccgccaggcgggagaagaaccccccgaaaggaccccccaggggcagcgccccccgaaacaagacgc

SEQ ID NO: 119868 - RNA, 79 nt, Homo sapiens
caaacagggccagcacgccaccgggaaggcggggaggaggccccaaagggcgaggagcacagcaagcgggagcaggcag

SEQ ID NO: 119869 - RNA, 36 nt, Homo sapiens
gggcggacgcgcgcggggcagaggaaaaggaagcaa

SEQ ID NO: 119870 - RNA, 75 nt, Homo sapiens
caaaggggggacccaaagaaggccaagaaagcaagggaggacgacacaccgcaggaccgaccgagagcgacaaag

SEQ ID NO: 119871 - RNA, 80 nt, Homo sapiens
gaggagcgggacaccccggaagcgggaaaggagaaccggggcaagagacggcagacaaacacagccgagagaaggcaggc

SEQ ID NO: 119872 - RNA, 72 nt, Homo sapiens
gccccggcgcagcgcgaccgcgggcccgcccgggcggaacgacccgagacgacgcaaccaaaggggggaggg

SEQ ID NO: 119873 - RNA, 74 nt, Homo sapiens
agagcaggcaaacaaagccagggaccggcgggcccaccgcaaccggcccgaacgcaacgaaggcacagccgacc

SEQ ID NO: 119874 - RNA, 71 nt, Homo sapiens
ggagaagaccaaagggaagagaaacgcaaccggcgagggaagcaaaagcagcaagccacagaaaagcagag

SEQ ID NO: 119875 - RNA, 64 nt, Homo sapiens
agcccagaagacagagggcgagggcagaagacccgagcggcccgagacaaggggacccagagca

SEQ ID NO: 119876 - RNA, 55 nt, Homo sapiens
cagagacggaggaacgaacaacacgcccccaacggcgggaagaacccacgagcaa

SEQ ID NO: 119877 - RNA, 69 nt, Homo sapiens
caggacgcgccaaaccagaccgggcaaccggagcaccgggaaaccagcgaggacagcggcaaccaagcc

SEQ ID NO: 119878 - RNA, 64 nt, Homo sapiens
cgccgggccgccccgacccgagcggcgcgagagaggcagacagaagcgaaggggacagggggag

SEQ ID NO: 119879 - RNA, 75 nt, Homo sapiens
acgcccagaggacaaaaggggccgggcaccacaagggaagcgggagaggccacccgcccacgagcggaagaacca

SEQ ID NO: 119880 - RNA, 76 nt, Homo sapiens
accggacccggcacagacgcggcggggcgcaaaccgagacaagcaccccgaagcgccggcccagggagccacgcgc

SEQ ID NO: 119881 - RNA, 70 nt, Homo sapiens
cgcggcaagcagcggaagaggacgacgcgacacaaacaaaagcggagaaacacacgaaacaaagagccag

SEQ ID NO: 119882 - RNA, 77 nt, Homo sapiens
ccgagccggaccggagagcacaagccggccacgggagggggccagccagcagaaacaggggcgacaacacacccaaa

SEQ ID NO: 119883 - RNA, 58 nt, Homo sapiens
cgcagggcagcggcccccgcccgcagacgagggaagaaaggaggaccagaaccaagga

SEQ ID NO: 119884 - RNA, 85 nt, Homo sapiens
gcaacaccaacaggacagccagagaccgaacagagagaacaagagacgcagccgcacagagaggacgggcgccgaccgaaggacg

SEQ ID NO: 119885 - RNA, 84 nt, Homo sapiens
aaacaccccacagaacaggggaggggcgaccccggggcccggccagcacgaccgaggaggggcggacagcggaggagaacggag

SEQ ID NO: 119886 - RNA, 71 nt, Homo sapiens
cacaaggacccccgaaacagaagggaaccaagaccaggacaaagaagacccggagagacaagccggaggac

SEQ ID NO: 119887 - RNA, 53 nt, Homo sapiens
gccggcccccaacagcgccgacgaaaaagagccacgcccccacgagcgccccc

SEQ ID NO: 119888 - RNA, 53 nt, Homo sapiens
acagaggacacagaagcagggagagggccaaaggaacgggacagcacggcaca

SEQ ID NO: 119889 - RNA, 78 nt, Homo sapiens
gacggacaagaggaagggcacagagaacacagaggcgcaagccaggcagggagaggaagaggagagaagcccacccaa

SEQ ID NO: 119890 - RNA, 75 nt, Homo sapiens
aggggaccaccggacagaaacaggaacacgaaagaggaaaaacgcacaagaaaccgaagccaaggaggagaggag

SEQ ID NO: 119891 - RNA, 69 nt, Homo sapiens
gaaggaccaagaaccaggacagagccagaggaccccggacaaacacagcggaacaaaggggcgccgcag

SEQ ID NO: 119892 - RNA, 56 nt, Homo sapiens
ccgccggaaggcccccggcgcgagacccgccggaggaacgaagggagcgccaccgg

SEQ ID NO: 119893 - RNA, 88 nt, Homo sapiens
aggcccagcacccaggagggcaaacccaagaccagccgacagcgaccaaggccagagcgaaaggccacggccagccgccggcacgcag

SEQ ID NO: 119894 - RNA, 73 nt, Homo sapiens
gccaccaacaacagaaggaggaggagaaggaagaggcagggccccccaccagccgaaaggcccagcgcaggag

SEQ ID NO: 119895 - RNA, 123 nt, Homo sapiens
cccaccgccccagccagaagggcacgccagcggcgcgagaggaccaccggggcggcccggcggaggcaaggaggaaggggagcaccggagcggcaggacccgggcgcagccagcccgcccaag

SEQ ID NO: 119896 - RNA, 49 nt, Homo sapiens
gaacaagggcaaggaacagggcgagacgaacaacgcgcgcaggagacca

SEQ ID NO: 119897 - RNA, 65 nt, Homo sapiens
cgccagcgcagaacggagcgcccgggagcaggaggagagccgcaggcaaggcaccagcagaacag

SEQ ID NO: 119898 - RNA, 74 nt, Homo sapiens
acagaggggccggcccaaaagccccaggccggggaacccagcccggagcagggccacgcggggccggccggccc

SEQ ID NO: 119899 - RNA, 81 nt, Homo sapiens
cgcagaacgcccagccgggcaccaacggggcccaacaccaacgagaccacaccagccccacgcgggccgcgggggacccga

SEQ ID NO: 119900 - RNA, 74 nt, Homo sapiens
aggaaaaacagaacagcgcccgcgaaaggcgcaaaaaccagacaccccacaccaccacccagacgaccaaaagg

SEQ ID NO: 119901 - RNA, 72 nt, Homo sapiens
gggaccacaagcagacgagccaagccccgcccgaggacagcggcaccacccagagaaaacggccgcgacggg

SEQ ID NO: 119902 - RNA, 82 nt, Homo sapiens
agaacagcgagccgagcgggaggcgccccaccagcgggaggcaaaaacaaccaggcagagagacaagcaggagcgaagcagg

SEQ ID NO: 119903 - RNA, 58 nt, Homo sapiens
agaggaaccaaggaagagaaaccaggggccggaggacgcggggaaccagaccgggcca

SEQ ID NO: 119904 - RNA, 78 nt, Homo sapiens
ccaggacggaccccaagcaagccggagaggagacagggaaacgaaaaccaccgggcaccacgagcccacgagagagga

SEQ ID NO: 119905 - RNA, 80 nt, Homo sapiens
caaccgcgacacaaaaacacgcaggggaagcagagagcaaccaagcaccaccaagcccacagcagcaggaacaagagagg

SEQ ID NO: 119906 - RNA, 68 nt, Homo sapiens
aggcccgcaacccacacccgaacacacaaagaagcgggacacaagagaacggaacgggagcggccgca

SEQ ID NO: 119907 - RNA, 82 nt, Homo sapiens
agccaggagagggagaaccccacgcggggcggagaaagcggacccggaaccagccacccagagccagcaaagacccaaaacg

SEQ ID NO: 119908 - RNA, 80 nt, Homo sapiens
aaagcagagacccggaggggcgcggaccagccggcgcaagcgggcgaagagggccagggacggcagaccgggacccggcg

SEQ ID NO: 119909 - RNA, 79 nt, Homo sapiens
acagcacagcccgccccggacaggccggccagggagcaggacagcccaggggccaaacaggagaagaagaagaagaaga

SEQ ID NO: 119910 - RNA, 67 nt, Homo sapiens
caacaaaacaacccgcgagagagcgaaggcaaccacggaacggccacacagacacgcgagacagaaa

SEQ ID NO: 119911 - RNA, 75 nt, Homo sapiens
agaaccaccaaaagccaagaaacgagagagcaaaccaacaaacagaaaacaacaggaaccaaaaacgcaagccaa

SEQ ID NO: 119912 - RNA, 72 nt, Homo sapiens
ccgccaaacacaaggaacgaaaccggcggccgggggcggcccacgagccggccggaaccaaaggcaagaacc

SEQ ID NO: 119913 - RNA, 60 nt, Homo sapiens
cccacgagaggcagcgccaggcggagcagaccaccggggcggcgcagccgaaggaaagca

SEQ ID NO: 119914 - RNA, 80 nt, Homo sapiens
ggcggacggacacccagcggcgacacgcgacgcgccaaaacccgcccggaaaggggacaccgaggaaccagagaaggaga

SEQ ID NO: 119915 - RNA, 69 nt, Homo sapiens
acaaaggagaacaggaggacgcaggccaaacaaaacggggaagaggaaacaagcccaggcgacggagcg

SEQ ID NO: 119916 - RNA, 60 nt, Homo sapiens
ccgccgcggacccagcgccgcggcgcccgagcggcgggccgcagagaccagagccagagc

SEQ ID NO: 119917 - RNA, 79 nt, Homo sapiens
gcaaagccaccagaccccaacaggcgccccagaaggggaaaagaacaggaagagaaaccagcagggcagagacccagga

SEQ ID NO: 119918 - RNA, 71 nt, Homo sapiens
agcggcagggccgggaagaacagcaagaggacagaaggcgacacaggcagaggaagggacaaaagagagaa

SEQ ID NO: 119919 - RNA, 72 nt, Homo sapiens
gggcgacagcgcaaggagacgaaggggaagcaagcaggaccaccgacagaccaagcaacgcgcagaacgcgg

SEQ ID NO: 119920 - RNA, 87 nt, Homo sapiens
cggcccgcgcgcgaccccggcccgcgcggcgccgggcgcggcccggcgacagaggcaccaaaagcgaaggaagcccgccaccaaagc

SEQ ID NO: 119921 - RNA, 76 nt, Homo sapiens
gcggaaaacggggcccgggccggaaagacccggaagcaagaagacaaacgaggggagaaagaaggggaaggacgcg

SEQ ID NO: 119922 - RNA, 86 nt, Homo sapiens
cccagggcccgcgggccaggagagcgccggcggaacaagagaaccaacggcgaaaacggcggggaaaaaaggaagagaggccaaaa

SEQ ID NO: 119923 - RNA, 74 nt, Homo sapiens
ccagccgccaggaccgcccaagagaagggggggcgcccacgggaagaagagaaagggccagccaaagaagaaaa

SEQ ID NO: 119924 - RNA, 59 nt, Homo sapiens
gcacacaacaggaaaacaaaagaggagaaaggacggaccgggccaaccggggccgcaac

SEQ ID NO: 119925 - RNA, 78 nt, Homo sapiens
ggccaagggccaaggcggcggggagacgagaagaagaggggaaagaaccagacgacaggaaggcacagaacgaagccg

SEQ ID NO: 119926 - RNA, 78 nt, Homo sapiens
gccagggcgcaggcacagcccgagaaaccgcagcacacacacggaacagccccaagccggaaacccaggaacggaaac

SEQ ID NO: 119927 - RNA, 58 nt, Homo sapiens
gcagcaaagggcccaaaccaggcaaccgcggggagcgggaagccaggcgcacaggagc

SEQ ID NO: 119928 - RNA, 98 nt, Homo sapiens
ggccgccgaaccgccacgccagcacgccaacccggacggacaacaccggggagcgcggggccagagagggacaaggaaagcaaacaaacccagacacc

SEQ ID NO: 119929 - RNA, 74 nt, Homo sapiens
agccacacccgcgcgggccaacgggggagacaaccggagcagggaccagcaacggggcggcacacaaggagcga

SEQ ID NO: 119930 - RNA, 77 nt, Homo sapiens
gggggccgaggacagacacgaaaccagccgaaaaacccacccccagcgaggggagacacagaaacaggaacacacac

SEQ ID NO: 119931 - RNA, 79 nt, Homo sapiens
ggcacagccggagaagcggagaagacaagagcccgcgggcacgacccggcaaacgaacacgcgcagcgcagaggcccgg

SEQ ID NO: 119932 - RNA, 80 nt, Homo sapiens
aaaggaggagaggagagggcacggggcgggaccacgagggccaccccagcggcggggcagcagagacccgcgaccggacc

SEQ ID NO: 119933 - RNA, 52 nt, Homo sapiens
cgcaagaaaaggagccggaaacggacaaacagaaaaaagggggaacaccacc

SEQ ID NO: 119934 - RNA, 58 nt, Homo sapiens
cgggagagacccacggccacggccagaggaccccaacacccgaggaggccgcgaggca

SEQ ID NO: 119935 - RNA, 76 nt, Homo sapiens
ggacccaggagccggccagcgcgccggagccgccgaggaggcacagcgcacggccgcaggggggcagaacggccca

SEQ ID NO: 119936 - RNA, 75 nt, Homo sapiens
ggaccacggaggcaccacagcccaaggagcggaagcgagaaacagcgccagccaggaacgagacaacgccagcag

SEQ ID NO: 119937 - RNA, 74 nt, Homo sapiens
gagcgggaccagccagggcacggagcgcaaagagggaacccccaaaacacagaggagccaagagaaacaggaag

SEQ ID NO: 119938 - RNA, 38 nt, Homo sapiens
gaccaagaaccagggaaaggaaagcaagccaggaggaa

SEQ ID NO: 119939 - RNA, 85 nt, Homo sapiens
cacaaaccgagcaagagagagcaagaggaagcagggggaaagaggcacaaaggacaggaacaaagaacaggaccaggggacagga

SEQ ID NO: 119940 - RNA, 78 nt, Homo sapiens
ccaggaggccgaggacacaccgcggacaggaagggaggagcgcggcaagacaaccacgaaaacgaagaggggagaagc

SEQ ID NO: 119941 - RNA, 68 nt, Homo sapiens
aaacccacgaacaaccgagaagacagaggaaggggcgagaacagcccagccggccgcacccgcccgcc

SEQ ID NO: 119942 - RNA, 84 nt, Homo sapiens
caagaggcggcagaagcagcggcccaggcgccagcagcccaagagcccaaaaggggcagagacaagaagcacaacaaccaaaca

SEQ ID NO: 119943 - RNA, 62 nt, Homo sapiens
aaagcaaaagaaaaagaaaacagaaagcaacaaagccacgaaccgacggggaccccaagagg

SEQ ID NO: 119944 - RNA, 64 nt, Homo sapiens
cagcgacccacagagagagggagaagagagacaagagagacaccccaaccgacaaagagcacca

SEQ ID NO: 119945 - RNA, 65 nt, Homo sapiens
gacacccgggcggggcagagcagcccccagccagccgcgagcaacggggcggcacacaaggagcg

SEQ ID NO: 119946 - RNA, 56 nt, Homo sapiens
cgcccgagggcgagaaggaagcccagaggcacggggcagaacaccaacagagggcc

SEQ ID NO: 119947 - RNA, 76 nt, Homo sapiens
gggccaccaggaggccagggggcgccagacagcaacagcaaaaaaggccgcccaccaagaaaggaagaacgccaac

SEQ ID NO: 119948 - RNA, 73 nt, Homo sapiens
agcgagggggggcgcgccggaaaccggagcgcgcagcagagcggggcccggcgcacccaccaccgccgcccac

SEQ ID NO: 119949 - RNA, 65 nt, Homo sapiens
gaccccccggcgccgcgccggcggcggacagagacacggagcgaagacgagaaggggcagcgcca

SEQ ID NO: 119950 - RNA, 69 nt, Homo sapiens
agcgcagcacgaaaacggaaagggaagggaaaaaccagaagagaaaaaacaaaggggagaggcaccccg

SEQ ID NO: 119951 - RNA, 71 nt, Homo sapiens
agaaggcacgccgacaaacgcagcccaagagaacaggaagaacaccagacaagaaaaccggccgaagcagg

SEQ ID NO: 119952 - RNA, 98 nt, Homo sapiens
aagcgccaaacacaagaaaacacacagacccaacgacaagaggagaggaagaggaagaggaggagagaagagaggaagcgagcagcacgggcaagcgg

SEQ ID NO: 119953 - RNA, 71 nt, Homo sapiens
agacaccagaaggcagcagcggaggggcaaaaaggccccgagcaccaggggggcagagccccagggacaag

SEQ ID NO: 119954 - RNA, 88 nt, Homo sapiens
aagcggcggcgggaagcggagcgcccccacccggaggcccgccggccccggagcgaagaagcaggggagaggccgagcgaagaaccag

SEQ ID NO: 119955 - RNA, 50 nt, Homo sapiens
aaccagagcacacgagagggccgggacaaggaagaaagccggaaagcggc

SEQ ID NO: 119956 - RNA, 35 nt, Homo sapiens
agagccgcggggaaaggagaaaaacagggacaagg

SEQ ID NO: 119957 - RNA, 85 nt, Homo sapiens
acagagcacccgaggcaccggcagggcacaaggaaaacgcccaagacacagccccagcagcccccagacccacagacacacccag

SEQ ID NO: 119958 - RNA, 74 nt, Homo sapiens
cgcagacaccgggggcgcccggaggagcccgaagacagccccgacggccccagcagccgagcggaacaacaagc

SEQ ID NO: 119959 - RNA, 81 nt, Homo sapiens
acagccgcccaccggaaggccaccccgcaggcaaagggcgggccaacggaaggagcgggagagggaggcaccaaacagcaa

SEQ ID NO: 119960 - RNA, 79 nt, Homo sapiens
gacaagacgcggcgccgacgggccccgaggccgcgggcggccccaaaaggcgagacaccggcaccggcccaacaaccag

SEQ ID NO: 119961 - RNA, 47 nt, Homo sapiens
gaaaaccgacacaacagcgagacccaagaaacagccgagacacccga

SEQ ID NO: 119962 - RNA, 76 nt, Homo sapiens
agccgcgccgacagcacgcagagcggagaagccccagaccaggcaagaaaaggagaagaaagaagaaaaaaaagag

SEQ ID NO: 119963 - RNA, 83 nt, Homo sapiens
agaggagccggcaagcaaaacccgcagaacggcgccaaacagcaaccagagagaaacgccaggagaacggggaaagcacgaac

SEQ ID NO: 119964 - RNA, 72 nt, Homo sapiens
gcaagggggccgcgcacccaacccaggaaggccgggacagcagaaaacagccagcagaaaaagccaaaaagc

SEQ ID NO: 119965 - RNA, 84 nt, Homo sapiens
accccggagggggaccacaagacccacgacagggacgcggcgcacggcgcggaggggccgagggcaggggggccgccacggcgg

SEQ ID NO: 119966 - RNA, 73 nt, Homo sapiens
aagccagaaggcaccagagagaggccgaacggagcagacaaagacgaacggggaagaagcagccgcccaaaca

SEQ ID NO: 119967 - RNA, 66 nt, Homo sapiens
gcgacaggaaccccccgagacccagccaaaagggcccagaaaaggccacggaaacgcaaggaagaa

SEQ ID NO: 119968 - RNA, 74 nt, Homo sapiens
cggagggcgaggccaagggacgcgacaacggccagacgagcaaggcgcagccgaaaaccaaccccggaccacac

SEQ ID NO: 119969 - RNA, 72 nt, Homo sapiens
acacaaagaaagaggagccggggacaccgggagaagacagaggagccagaccaagagacagcacaggcgagc

SEQ ID NO: 119970 - RNA, 90 nt, Homo sapiens
acaacaacagccaagcaaccagcagggaagcgcaaacggaagcaacaagagccgcacacgagacgcggcccgaggcagcacgcaaacgaa

SEQ ID NO: 119971 - RNA, 73 nt, Homo sapiens
aaaagagagagccgccgggaaccaggacgcacagcccaagaagaaggggacgaggccagaccgaagcgggaag

SEQ ID NO: 119972 - RNA, 72 nt, Homo sapiens
gccacgaggaagagcaacacacgcagaacagggaccgagcaccgcagaccgccgaggagaagcgcccccaac

SEQ ID NO: 119973 - RNA, 80 nt, Homo sapiens
cagccagaacagggacgccagccgcagaggaagacccggccagaacacaaagcggaaccggaagaaaagcaacggaaaca

SEQ ID NO: 119974 - RNA, 73 nt, Homo sapiens
gaggaacgagaccaaggaaggcccggaagggggaccccacaagacccaagccagggggagcccaagaccccgg

SEQ ID NO: 119975 - RNA, 56 nt, Homo sapiens
cggcgcggcgggccggcggcgcgagaccaagccacccaccaacacggggccggcac

SEQ ID NO: 119976 - RNA, 69 nt, Homo sapiens
gagagggcgggcgcggcggcggccacgcagagaaacacaggagacaagccgagaggccgacggagaagg

SEQ ID NO: 119977 - RNA, 71 nt, Homo sapiens
cgggagaccaaccaggggccgccgcaagcccccgggcacgcagaacagacgccccagcaccgccggcaagg

SEQ ID NO: 119978 - RNA, 82 nt, Homo sapiens
cgcacgagggccacggccgagcagacacaacacaggggaagaccgggaggcaacgaggcaccagacaagaacgagccagcaa

SEQ ID NO: 119979 - RNA, 81 nt, Homo sapiens
ggcgcggcggccgggccccgagacggggacgcgggaggccaccgccccaccagcaggcaacgccacagaccgccagcgcca

SEQ ID NO: 119980 - RNA, 80 nt, Homo sapiens
ggggggaccgaccgcaacagaacggacccgcaaacgcccagaggaccccgagcaggcgcagccagaagaaggaagacacg

SEQ ID NO: 119981 - RNA, 90 nt, Homo sapiens
caggcggaggcccccgggcaagaggcgcaaacaagccaacccaggaggaaaaacgcagcagaaagcagagagcccagaagaaaccaaagc

SEQ ID NO: 119982 - RNA, 77 nt, Homo sapiens
ggcagggcccccagaccgcaggcaacaagcagggggggggggaggacccacccaacaacgaacaagaagacgcgcca

SEQ ID NO: 119983 - RNA, 66 nt, Homo sapiens
ccacaaccaagagaaacaaccgaccagccgcccggagaagacaggggaaaaagggacgggcggaca

SEQ ID NO: 119984 - RNA, 92 nt, Homo sapiens
ggccgcccgggccgggccccaccggacgaccccaagaagaagcggaagaggagccgcggaaccaagacacaaggaacagaagacaggaccag

SEQ ID NO: 119985 - RNA, 82 nt, Homo sapiens
ccggaccaaccacacggcccccccagcgccgccgcccagccagccccagggaagagacccggcccaggcggaaacagcacca

SEQ ID NO: 119986 - RNA, 79 nt, Homo sapiens
ccagcgccgaagcgacaccaggcgggaaggaaaaacagaacagcgcccgcgaaagggggagcccggcccagccccccac

SEQ ID NO: 119987 - RNA, 82 nt, Homo sapiens
gcacccgcgccccagagccacgaaggcaccgacgcacagcgaccaccaacagaccgaagggagaagcccaccacgcaacggg

SEQ ID NO: 119988 - RNA, 68 nt, Homo sapiens
agggggggcgcgccggaaaccggagcgcgcagcaggacagggacaagcgcacagcggagaaagcagcg

SEQ ID NO: 119989 - RNA, 60 nt, Homo sapiens
ccccacaacgggagaaggaccagggacagccgaggagcccgagccgacacagggccagac

SEQ ID NO: 119990 - RNA, 71 nt, Homo sapiens
ggaagaaaacgcagagccaaaccacacagaccgcacagccaagaagggcagaacaccccaggagggccagc

SEQ ID NO: 119991 - RNA, 75 nt, Homo sapiens
gagggcgcggcggccgcagccagcaagcccaacaccaaggcaccggacaagagcagagaaagagacgaggagggg

SEQ ID NO: 119992 - RNA, 72 nt, Homo sapiens
aacaaagaaccacggacagggcaggaccagaaaaagcaggagaacagccccccaagccgccgcccaccaaca

SEQ ID NO: 119993 - RNA, 81 nt, Homo sapiens
ggacaggagagaaagacgggagcaccgcggacgccccagggcacaccgcgcaccagcgagaggaggagaaccggccaaccg

SEQ ID NO: 119994 - RNA, 106 nt, Homo sapiens
cacacaggacgcccaggcccacaccggcggcaagggaagagaccgagaagacaggcgaggccggcaccagcaaaccagcccgcagaaaagcaggcccaggggccga

SEQ ID NO: 119995 - RNA, 37 nt, Homo sapiens
cccaggcgcaagcgaaccagggacgaccacgaaaaaa

SEQ ID NO: 119996 - RNA, 70 nt, Homo sapiens
aaaccaacaagaaacaacaccccacgaaaccgcaagcgaccagaagcacagccagagaaagccagagagc

SEQ ID NO: 119997 - RNA, 73 nt, Homo sapiens
ccaacgaggggccgaaccccaggaacaagacaacgaagagaggaaagaagcggaaaggagggagcacacaaca

SEQ ID NO: 119998 - RNA, 72 nt, Homo sapiens
caacagcgaggagcaggcggagcacccaccacggagggaaagaccaggcagacacaacagcaggcagcccgc

SEQ ID NO: 119999 - RNA, 67 nt, Homo sapiens
agcaagcgggccaccacagaaaaggagacgcgcaagacccacagcaagccagccggcccgcgccccc

SEQ ID NO: 120000 - RNA, 87 nt, Homo sapiens
gaagccggccacccaggaaaagggagacaagaggagagaaggaggagagaccgccgggcgcaggcacaggaacaagccaccacccag

SEQ ID NO: 120001 - RNA, 58 nt, Homo sapiens
gcaccagggcacaaagaacagcaacgacggggacccaaaagccaccgggcccaggcgg

SEQ ID NO: 120002 - RNA, 70 nt, Homo sapiens
aaaacgagaaacacaagggaacaagacgagggaaaaaagaacccaggcagcacagcaggcgacaagaacc

SEQ ID NO: 120003 - RNA, 73 nt, Homo sapiens
cccccacgcaccgcacaacaagaggccggcggggcgacagggggggagggccgggaccggagcaggacgacag

SEQ ID NO: 120004 - RNA, 84 nt, Homo sapiens
ggcagagaaggaaggaggcccggacaccgaggggacgccaaggaggcccgaacggcgcagagcaggagcagacgcgcagggagc

SEQ ID NO: 120005 - RNA, 104 nt, Homo sapiens
caaaagcaacacggagcacggggagcggaggaaaggacggagggggcgcagagggcaaggggggagagggcagaaaccagcagcgcaacaagaaggcacaggag

SEQ ID NO: 120006 - RNA, 61 nt, Homo sapiens
agcagagggcggaagggacgcccagggcacccgcagcaaagagccgggaaaccgaagaagg

SEQ ID NO: 120007 - RNA, 68 nt, Homo sapiens
aaaacaacagaaacccaagggcaggggaacccaacagcccgccaacgaagaacgaaccaggcaaaccc

SEQ ID NO: 120008 - RNA, 79 nt, Homo sapiens
agaggccagggagccgaccagaggagcggagaccgacacaacccccggcccgaaccgacagccacaagggcgcccgaac

SEQ ID NO: 120009 - RNA, 55 nt, Homo sapiens
ccaacccccagagccaggacccagcaggacgaccagccaaagagcccaacgccaa

SEQ ID NO: 120010 - RNA, 86 nt, Homo sapiens
gaggcccgccaagaggcgccgcaggagacagaagaggagcacggcggcggaggaagaaagaccgacacagagaacaggaggaacga

SEQ ID NO: 120011 - RNA, 55 nt, Homo sapiens
aggcggcggccaggggcagggacaggagacgccaggaaaccccccaggcaagagg

SEQ ID NO: 120012 - RNA, 32 nt, Homo sapiens
gcccgagggaccaaagggccgagggaggaccg

SEQ ID NO: 120013 - RNA, 79 nt, Homo sapiens
ggcacccgcccgccggccccgacaccgcggaccaccgggcgcccgcgccggagaccccacggggaaccacggggagaca

SEQ ID NO: 120014 - RNA, 79 nt, Homo sapiens
gggaagggcaggagaaaaccaagaaggagagaagagcagaacccaggccgcaaaagaaagaccggaaggcgggaaggga

SEQ ID NO: 120015 - RNA, 80 nt, Homo sapiens
accagcaaaagcccggggaggggaggccgggaacccaacaagggagcaaacagagaaagaacccaaacacacagaaaaac

SEQ ID NO: 120016 - RNA, 73 nt, Homo sapiens
cagagccagggcagcggccaggccggaaaggaaaaacaccagaacggaaacagaaggacacaccagagggagc

SEQ ID NO: 120017 - RNA, 67 nt, Homo sapiens
cccagaaaaggccaacaagggccgccccgagggacccaaggccaagccaccagaccccagcgccccc

SEQ ID NO: 120018 - RNA, 79 nt, Homo sapiens
accagaacccccgcggagaacaccccaccagggcgcgagccccgccgccccagaaagaccacagcaagaccacgccccc

SEQ ID NO: 120019 - RNA, 81 nt, Homo sapiens
agcagccaagcccagacaagccccagggaagccacagcaccccagcacccagaaggggcagaccaacaccacccagcaaaa

SEQ ID NO: 120020 - RNA, 79 nt, Homo sapiens
gagcgcacggcgacgccccaggggaaaacccccgggaccaggaaaccccccaggcaagaggcgcaggaccgggaagacc

SEQ ID NO: 120021 - RNA, 73 nt, Homo sapiens
aaacgcccaaaccaacgcgaccccaaccccaaacccaggagggacacaccgccagcaccagaagaaaggagag

SEQ ID NO: 120022 - RNA, 74 nt, Homo sapiens
accagaaggagagagagacagagggaaccggcagggcaagcggcgacacacgacggaaacgcagaagaggaagc

SEQ ID NO: 120023 - RNA, 72 nt, Homo sapiens
gaacagaaccgagcggaccaaaagccccagagcaagcgagagaggaccacagccggaaggcagcgcccgcag

SEQ ID NO: 120024 - RNA, 58 nt, Homo sapiens
cggacggaaacgaggaggagcggccaggaaagccaagacagcgagacgacgggaccga

SEQ ID NO: 120025 - RNA, 70 nt, Homo sapiens
ccagcggcgcgaagcgaaaccggggccaagaaaggcccgagccaaaagacccagagaaaggagcacgaag

SEQ ID NO: 120026 - RNA, 69 nt, Homo sapiens
gggaaagagcacggaacgggcgaaaaaggagccggcacaggacccaaagaggcggaggggccagcaccg

SEQ ID NO: 120027 - RNA, 76 nt, Homo sapiens
cgcgccccgaccagggaggcccccccccacaaggcccgcaagcaccagccccacccgcacgcccggaccacacagc

SEQ ID NO: 120028 - RNA, 80 nt, Homo sapiens
aagaaggaaacaaaaaacaggagaaagaacacaggagcgcaggcgaccaaggccacagcagaagggggaacaaacaaaag

SEQ ID NO: 120029 - RNA, 82 nt, Homo sapiens
ccaccccaccgccagcggaacccggggacacgacgccccaaaccgccaggagaaaaaagacaggggcaaggccgaggggaac

SEQ ID NO: 120030 - RNA, 101 nt, Homo sapiens
ccgcaagagcgaggacccagcacacaccacacaccacggccacaccaccacccaggccacacagaaaacagcacaggaaacacagaagaagagaaaaagca

SEQ ID NO: 120031 - RNA, 81 nt, Homo sapiens
ccagaccagaaacggaggagcccgccgaagcaggaaaagacgagggaagaagaccgacaacaaccaggggaagggaaaaaa

SEQ ID NO: 120032 - RNA, 71 nt, Homo sapiens
gagaaagcgcacaccaccaacgcagacccagccaacccccccacaagaacaagcaacccaacccccagaga

SEQ ID NO: 120033 - RNA, 76 nt, Homo sapiens
cggaccgcacccgacgccagaagaccaagaccgcagaccgaccccgagagaggacggcaaaagcagaccggaaaac

SEQ ID NO: 120034 - RNA, 80 nt, Homo sapiens
gccagcgaggccagggcacagggcacgacggacccggcaaaagccagggcccgcaaccacacgacggaggcaccaccccc

SEQ ID NO: 120035 - RNA, 60 nt, Homo sapiens
cacgcggccaggcggcgacacgccaaccccgcccccgaaggcaaccaacagcggacaaca

SEQ ID NO: 120036 - RNA, 74 nt, Homo sapiens
cagccgcaccaaggagacaggacgaagcccaaaccacaagccacaaaagggcgagcaacggcccaaccaacccc

SEQ ID NO: 120037 - RNA, 77 nt, Homo sapiens
cacaaacaaagaagaaaagggggcaagggaaaaccaaaagaggccgaacaacgggcaaccgaagagagggaaaagag

SEQ ID NO: 120038 - RNA, 80 nt, Homo sapiens
ccggacccgcgaccagcagaaggacgcccaagacaccacggaaggacggaacccccaacaacaaacggacaaacagcgga

SEQ ID NO: 120039 - RNA, 100 nt, Homo sapiens
ggcagggggcggggcggcagaccacacacgcagagccaccgggcgggaacaaaggaccgcacaggcgcaggcgcaaggggccaggggaccaggcacccgg

SEQ ID NO: 120040 - RNA, 93 nt, Homo sapiens
cggaaggaagagaggagcgacgccgggggcgcagaccgggcaagaccacccgcaagcacgcgaggccccacccgcggagaacaagggcacaga

SEQ ID NO: 120041 - RNA, 54 nt, Homo sapiens
cacaaacaacccccaccaggaacagcgaaagaacgcgagggcgcacaaaggcgg

SEQ ID NO: 120042 - RNA, 73 nt, Homo sapiens
cgcggccaccaccgcgcccaacagaagaagcccgcccgaccgaacggcaagagacaaggacccagaagccagc

SEQ ID NO: 120043 - RNA, 74 nt, Homo sapiens
gaaaagcccgaagcaaaccggaggacacagaaagacagacaggaagcacaagaagaaaagacacaggaaaagag

SEQ ID NO: 120044 - RNA, 46 nt, Homo sapiens
cacaaaccccaaccagggacaagccgaggaagcaggcagaaggaga

SEQ ID NO: 120045 - RNA, 61 nt, Homo sapiens
gcaggcaccacaaaaaggacaggaaaaagcagcaaagggagaaaagaaggccaaacagaag

SEQ ID NO: 120046 - RNA, 82 nt, Homo sapiens
caggcaggacgacagcagcagcagcgcaccccaggggcagccacagcagcccagggacccagcaacaggccccgcccagacc

SEQ ID NO: 120047 - RNA, 82 nt, Homo sapiens
gagaagccagcgggagacaaccgaacccaggaagcagacacaagagaaagggcaaagacaccagcagagagaggagaaggca

SEQ ID NO: 120048 - RNA, 86 nt, Homo sapiens
aagcggcggcagcggcggggcggggcgagcagaggacccggcgggcggcccgcgggcaggagccaaaaaccgaacacccggaaggg

SEQ ID NO: 120049 - RNA, 82 nt, Homo sapiens
accaagacggcgaccacaggaaggacacaggcagcgcccgcaaggccaagccggcgaagcccgcgcgcagccccaaaagcag

SEQ ID NO: 120050 - RNA, 75 nt, Homo sapiens
ggaacaccaaacggaggagccagacccggggaggcgcacacacaccaaagagaaacccagaaaacgccaaaccga

SEQ ID NO: 120051 - RNA, 77 nt, Homo sapiens
gaacaagggacaggaaacagaagagggacaacggccaagaacccaaagcaaggcgagacaaggggccaaccagccag

SEQ ID NO: 120052 - RNA, 68 nt, Homo sapiens
cggagaaaaaacgaagcacccacagcaacaagaacggaggcgaagagagcggggaacaggcaagagcg

SEQ ID NO: 120053 - RNA, 76 nt, Homo sapiens
gaccgagacccggcaccacccccggccgcccccagacgacacaagcccacacaaggaccggacccaagcagaaaga

SEQ ID NO: 120054 - RNA, 81 nt, Homo sapiens
cagaacccccgaaacccagccagcgcccaccccaaaacaaccaagacagcaacagaaacccaagggccaaagccaaagccc

SEQ ID NO: 120055 - RNA, 74 nt, Homo sapiens
agcggaccgagagcgcgaaacgcacgagaaggaagaaagggcaggcgagagagggggaacaggaccaacggaac

SEQ ID NO: 120056 - RNA, 65 nt, Homo sapiens
aacaacaccggacccgacccgaagaaaccacgagggagcaagaaaagcggacccacccaaggaga

SEQ ID NO: 120057 - RNA, 65 nt, Homo sapiens
agcaaaacaccaaccccccagggcggcagaacaggggccacgggcaaagacaccaaccgaaggaa

SEQ ID NO: 120058 - RNA, 78 nt, Homo sapiens
cgcgcccgcggccggggccaccggaaggccgcgggggaaggaggacgcagagagggcacacggggcgaaggagaagac

SEQ ID NO: 120059 - RNA, 70 nt, Homo sapiens
gaacgggcggacgggcgcccagccaggagggaacgaccaacacggaaaaagacacagggaaacaagagca

SEQ ID NO: 120060 - RNA, 62 nt, Homo sapiens
ggcggagggacacgggcagcacgccaggaacaagagagacccggccaaggcggcccaggacg

SEQ ID NO: 120061 - RNA, 50 nt, Homo sapiens
acagagcagacagaacagacaaggggacacggaagggcgcacggaaaagg

SEQ ID NO: 120062 - RNA, 66 nt, Homo sapiens
gcccggaaagaagcaacagagaggggagaacccacagaaagccaacaggcagaccagagacagcgc

SEQ ID NO: 120063 - RNA, 74 nt, Homo sapiens
gaccagaacccgaagcccacagacccacagacagaagcagaagcaggccagaaagaagccagcaggaagaagag

SEQ ID NO: 120064 - RNA, 104 nt, Homo sapiens
cgaacgagcaaaggcacgggcagccggaaggacaccaagagcggaccgggccccgaaaggggagcaagaagaaagagcagggaggagggagcgacaggaagaaa

SEQ ID NO: 120065 - RNA, 79 nt, Homo sapiens
ggcccccgccccagcccgccggcggcggcggggacccagacaggagcgcgggaagaagccggcccggggccgcggacga

SEQ ID NO: 120066 - RNA, 55 nt, Homo sapiens
caagaaggggaacggaaagcgagagaaggccaaccaagacaccgagacaagcggc

SEQ ID NO: 120067 - RNA, 77 nt, Homo sapiens
gagcgaggagcagaaaccagccacgggccggaggcaaaaaagaaagaccacagcaagaccacgcccccagccggggg

SEQ ID NO: 120068 - RNA, 86 nt, Homo sapiens
gaccgcggggcagcaagagggccccgcgaccaggggcgcaggagagccaaaggaggcacgacagcagaggaagagaagcagcgaag

SEQ ID NO: 120069 - RNA, 57 nt, Homo sapiens
ccggacgcacgcgaagggagcggggaggaaaacgaagggcacacgaacgaaaggaaa

SEQ ID NO: 120070 - RNA, 83 nt, Homo sapiens
cggcgcagcggcggcagcggagagcgagagaggggagcagacacgagagggcgaagggcgccaacgcggaaaaacaagggcaa

SEQ ID NO: 120071 - RNA, 66 nt, Homo sapiens
gaaagagacacaaaaacccgcagcaggggccacaaagacaggcaaaaggggaaagccggagaagac

SEQ ID NO: 120072 - RNA, 84 nt, Homo sapiens
cgcagagcaccaggcccaccggaaaggcacgggacgcgggcggggcaccgggaaggagaagacagccaagcaccgccccaaggg

SEQ ID NO: 120073 - RNA, 79 nt, Homo sapiens
aagaaggcaggccaaaccaccgaccagaaagccggacccacagccgccagagagaccgggccagggacggccccaccac

SEQ ID NO: 120074 - RNA, 66 nt, Homo sapiens
aaagccagcagcgacagcccgacaacgcaaagaacacagcacggaaggccaagcggaaaagacgag

SEQ ID NO: 120075 - RNA, 75 nt, Homo sapiens
cgccggcgcgggaaacgggcgaagcgacgagccgcgaggagcgccggcccaggcggaggcaggggccacagccaa

SEQ ID NO: 120076 - RNA, 77 nt, Homo sapiens
ccaaagcagagggaccgccccacgagagcgcacacaagacgccacgaaaaggggaacggcgagggaacccaggaagg

SEQ ID NO: 120077 - RNA, 117 nt, Homo sapiens
cagcagaaccgcagccaccggcacggggcgggcagcggcgccgggcacaggagggaagagcaaggaccgacaggagcggacccgcggaggggcgggagcggccgagggccgggcgcg

SEQ ID NO: 120078 - RNA, 77 nt, Homo sapiens
gaggaggggccgccggcgggaccgcagcacggggaaacgaccgccccaaaacggcacgggcgcaccacgagcgcacg

SEQ ID NO: 120079 - RNA, 82 nt, Homo sapiens
cagaacaacagaagaggagagaggaacccgaagaagaaaggacgacagccagagaggccacaaagaaagcaagagaggaaaa

SEQ ID NO: 120080 - RNA, 86 nt, Homo sapiens
aggaccgcccccagagagacggaacaccgaggcccggggaccgccccgaaacaagacagaggagcagggaaaccacggccccgcac

SEQ ID NO: 120081 - RNA, 75 nt, Homo sapiens
gcccaccgagagaggagagcgcccggggacccccccgcaacgcaggcccgccacaccaaggagaaccgggcggca

SEQ ID NO: 120082 - RNA, 74 nt, Homo sapiens
cggaggaggggagcagcgcgcaaggcacagcgacccgaagaaaccgcagcaaaagaaaggacaaagacaaccag

SEQ ID NO: 120083 - RNA, 80 nt, Homo sapiens
gacagcagaaaaacccagaagcagaacgaaggaaaccacagcccacacagaaagaaccaagagggagacaagggaaaagg

SEQ ID NO: 120084 - RNA, 78 nt, Homo sapiens
gaggggggacagcagcagcagacggccgagaggagggagacccaggaccaagaacaaggggcacccgcaagcccaccg

SEQ ID NO: 120085 - RNA, 69 nt, Homo sapiens
gaaggccgggaaagggccaaacaggcggcgggcagggaaaaaaaaccggcaacggggagaaagacaacc

SEQ ID NO: 120086 - RNA, 76 nt, Homo sapiens
acccagggaaaggagacaaggaccgaaacagaaacggaacaccaagggaagggcccagcaccggcaggggacggga

SEQ ID NO: 120087 - RNA, 74 nt, Homo sapiens
gagagacgaaccgaagcgggcgggcccccccacccagagagaacagaacccacggccgaggggaaggaaccagc

SEQ ID NO: 120088 - RNA, 81 nt, Homo sapiens
ggagggcgccgagaggccgggggcgcgggcggcgaggaacggaaaacagccccaaagcagcagaccgaagaaagaagaccc

SEQ ID NO: 120089 - RNA, 74 nt, Homo sapiens
ccaaaagaaaaaagggacccacccagacagcgggaggcacggcagaaacggaaaaaccaaagcagcccgaagga

SEQ ID NO: 120090 - RNA, 88 nt, Homo sapiens
cccccgccagcagccgccggagccagccaacgagcgagacaccaggcgccgagaaggccagcagagaaacaggcaggagaggcccaca

SEQ ID NO: 120091 - RNA, 72 nt, Homo sapiens
aaacccacgcaacgcaaccacgggaaggcgggagagccagggaacgagcccacgggagccggccccgaaccc

SEQ ID NO: 120092 - RNA, 54 nt, Homo sapiens
gcggagaaaaggaaccggccccgggggccgggaccagagaagcggacagcaagc

SEQ ID NO: 120093 - RNA, 127 nt, Homo sapiens
aggaaccaggagaagaaaggaaggaaccgggaggggagggaagggacaagaagaacgcccggaagcagacaccccaccccgacaggacagcggagcggcccggccaccagaaacgcagcacgcacca

SEQ ID NO: 120094 - RNA, 61 nt, Homo sapiens
ccaccacagggccaacaagcagcgaggcccaccagcccggccgggcgaggacaagcagcca

SEQ ID NO: 120095 - RNA, 73 nt, Homo sapiens
caaggaaaaacagcaagaacccaaaaggagcaagcaagaaaaaggggcagaacagcgacccacaagcaaggag

SEQ ID NO: 120096 - RNA, 80 nt, Homo sapiens
caagaaggcagcagcagaaccccggccgccggaaaggagaaaaggaccagacaagaagcgacaggaaacaaagagcggag

SEQ ID NO: 120097 - RNA, 78 nt, Homo sapiens
acgcgggcgagcggcggggagcggcgaagccgcgggcgagaaagccggacccacagccgccagagagaccgggccagg

SEQ ID NO: 120098 - RNA, 60 nt, Homo sapiens
cagccacagaccacgcgccaggcaaaagcagaccggaaaacccaccggcaagaccacacc

SEQ ID NO: 120099 - RNA, 68 nt, Homo sapiens
gcccacacccccggcacccccacagacccaccaaaaggggagcgggagcacagacccaggagaagaag

SEQ ID NO: 120100 - RNA, 94 nt, Homo sapiens
aaaccaagcacagcgagagacagcagagagggcagggcgaggacccaaagcacccaggcggcggagaaacccaggacgagaaaaaacagagcgg

SEQ ID NO: 120101 - RNA, 68 nt, Homo sapiens
agagccggcacgcagacggaaggagcgccgaacgcgggggggcggcgggacaacaaggaccagcaagg

SEQ ID NO: 120102 - RNA, 74 nt, Homo sapiens
gggcgcggagggccgagggagggccgagccagccgcggccggaggagcccccaggccgaaggcccgccgaagga

SEQ ID NO: 120103 - RNA, 76 nt, Homo sapiens
ggacggaagaagcaccccagggacagcaaaggcaccccgcaacccgcagagaggacccggcccgacggcagaagaa

SEQ ID NO: 120104 - RNA, 38 nt, Homo sapiens
cggcggaacacacacagcacaaaaggaaggggaaccac

SEQ ID NO: 120105 - RNA, 78 nt, Homo sapiens
aaacaaaaaggccagaaagaggagcagagacgccggacagggcacacagggaccaagaagccccggggacacgcgaga

SEQ ID NO: 120106 - RNA, 83 nt, Homo sapiens
aaacagaagcggagcagcagagcgaaggaacccaaacggacgaaggaccacaagacacggccacaaccgaccaacgcaagaga

SEQ ID NO: 120107 - RNA, 81 nt, Homo sapiens
aagccgccccgaccaaagagcagcccaaggccaaccccacgcaccgcccgccccccgaggagcccaagccaacaaggccac

SEQ ID NO: 120108 - RNA, 72 nt, Homo sapiens
ggaggccgaggcaaggagaggagacagcgaagggcacaaggcaaaggggcagggaagaaagggaagggaggg

SEQ ID NO: 120109 - RNA, 79 nt, Homo sapiens
ggccacagcaggacacgccgcgcgaaagaggggcagaaaggagcgaccggcggaggagcggacaacccagagagaaacg

SEQ ID NO: 120110 - RNA, 58 nt, Homo sapiens
cccaggagaaacaacaagaggaacacggagacaacacgaagacgagagaagaagaagg

SEQ ID NO: 120111 - RNA, 41 nt, Homo sapiens
gaagggcggacacaccagcaaggcagacacaagcagaaaac

SEQ ID NO: 120112 - RNA, 77 nt, Homo sapiens
acagccccagaagcaagagaggaaaacagaagcgggcgcccccacagagagcacacaaacaaagcgaaaccacggaa

SEQ ID NO: 120113 - RNA, 79 nt, Homo sapiens
agaagcccgaaaagaaggggcagacccgggcgacgccccagggacaggagacccggaaaacagaacggagacagaaccg

SEQ ID NO: 120114 - RNA, 85 nt, Homo sapiens
gcgcccggcgccccgagccggccgagcggcgacggaccgcgagggcggagaacggaaaagcaccaggaagcagagaggaccgcag

SEQ ID NO: 120115 - RNA, 78 nt, Homo sapiens
gcagacaacgaggaaccgcaaaggggcacgccagagagcggcagcaagcgcagacgagagcgagcaacgaagaagaag

SEQ ID NO: 120116 - RNA, 87 nt, Homo sapiens
acaccagcggcgcaggacgggcacagcagagaccaaaggcagggcaaggaaacggccacaagcagaagaagagcaacaagagaaagg

SEQ ID NO: 120117 - RNA, 76 nt, Homo sapiens
gaaagacccaggagaagccgcccaaagaacgggggaaacccgcccagggcgggagaccgccaagaaacaccacaag

SEQ ID NO: 120118 - RNA, 102 nt, Homo sapiens
ggagcgggcagccgccgccaccccgcggccgcacccccgccccagacagcaagaaagcaccagccaagcagaagggagccagcggacgagggcgccaggcca

SEQ ID NO: 120119 - RNA, 75 nt, Homo sapiens
aagaaagccaagaagggaagcgaagggcgggagacagcaggagacacgggaagccgaggagaaaagaaaaggaca

SEQ ID NO: 120120 - RNA, 78 nt, Homo sapiens
aaggaccaagaaccagggcagcgcaagaccccgcacggaagcagcaagcacaggcagcgcagagccagagaccacagg

SEQ ID NO: 120121 - RNA, 129 nt, Homo sapiens
cccgcaaccggagaagcggcagaacgcccggccaagacagcagcaccaaggaccagcaacaagcagaagacaacacagacaagccgacagcacaggccagagcaaacaaaggaggcggagaagcaggag

SEQ ID NO: 120122 - RNA, 108 nt, Homo sapiens
agcgccccaagcgcacaccaccagccaccccacaggacggaggcaaaacacccaaggacagacgggacacaaaaaagaccgccgcggagcgggaacagagcccccagg

SEQ ID NO: 120123 - RNA, 87 nt, Homo sapiens
cagcagcgcgggccagagcgcagcgccgagcgcggcccgggcgccacgagccggcggcggacggcagcaagaggagccaggagcacg

SEQ ID NO: 120124 - RNA, 73 nt, Homo sapiens
gaaggaggcagaggcacagcgcagacaagcagcagaccccagggcccgacagcacggagaccagggaagaggg

SEQ ID NO: 120125 - RNA, 85 nt, Homo sapiens
cccggggagacgaggggaaagacgaagaggaggagaaaaaccagcggagagagagacggaggagcagaaggacaggagaaacagg

SEQ ID NO: 120126 - RNA, 76 nt, Homo sapiens
cacagcgaagaaaagcaaacacgaggccacacgggcaagcaaaacggagaccgagaagcgagcacaaaaagaaaga

SEQ ID NO: 120127 - RNA, 75 nt, Homo sapiens
gagacggaaccaagggaaagcacacgaacagagacaggcagggaaggaggcccaaaagcgacaggcaaaccaccg

SEQ ID NO: 120128 - RNA, 88 nt, Homo sapiens
ggaacggcccggaaacaggaggacacccacggcagggcaaccccaccgcggaaggcaggcacacagacgagaacagagaggacccgag

SEQ ID NO: 120129 - RNA, 56 nt, Homo sapiens
gcgcgcagcaacggcgggccaaagcaaagagcaaaagcgaagacccccaaccagcc

SEQ ID NO: 120130 - RNA, 77 nt, Homo sapiens
cccagcgcgcaaagcgcgaggggcgagaacccaggagcccccgcagggccccggagcccacacggagcagcccgaga

SEQ ID NO: 120131 - RNA, 69 nt, Homo sapiens
gccgcacccgcccgcacccgaccgcccaccccgccggacacgaacgaagggagagaccgaagcggccaa

SEQ ID NO: 120132 - RNA, 80 nt, Homo sapiens
ggagacgccgggcagccgaacggagggcgacggagggaggaacacgaggacccaaagaacaaacccggagagaagaaaac

SEQ ID NO: 120133 - RNA, 81 nt, Homo sapiens
aggaagcaaagaacagagaacgcgaccagcagcagaaggaaaaggggaagaaggagaccagaaaagcagagcagacagcga

SEQ ID NO: 120134 - RNA, 72 nt, Homo sapiens
gcacgaagcccaccagccacgcgaggccgcccagcaacccgagaagggaaaccggaccacgcgacggaaggc

SEQ ID NO: 120135 - RNA, 75 nt, Homo sapiens
agcccggaaaaccagaccagaaacggaggagcccgccgaagcagcccccaagaagagccggagacacccaggaga

SEQ ID NO: 120136 - RNA, 81 nt, Homo sapiens
ggaggcaacaaccacggcccaggaaccgaaaaggcgaggagaagacggcaaaaaacgcgggaaggagaccccggcaacagg

SEQ ID NO: 120137 - RNA, 76 nt, Homo sapiens
gacgggcacggggaaccacaggagaagcaaagaaggccaagaagacgacacaaaaggagcaccgagcggacaagag

SEQ ID NO: 120138 - RNA, 77 nt, Homo sapiens
ggggcggaggacggcaaggagggaagacaacaaaaacaacgcaggacagcaaagaaagagaagcccagcgaggggga

SEQ ID NO: 120139 - RNA, 86 nt, Homo sapiens
cgagcgggggcggagaccaggagaccccacggagcgggcgacgagcgacccgggagacacgacggacagaccacacgcggacacca

SEQ ID NO: 120140 - RNA, 79 nt, Homo sapiens
gagggacggagagggcgagggccaccaccgcagcacacagcgaccgcgagagcccgaaggaaacaaggaggcgggcagc

SEQ ID NO: 120141 - RNA, 82 nt, Homo sapiens
ccgaaccgccacccaggcccaagaagcccacggcagacacagcaggccaacccagaaccaccgaagaagaaaagacaaacga

SEQ ID NO: 120142 - RNA, 78 nt, Homo sapiens
gagccgcagccaccagccgcccgcgcccccagccccgccgggagccccggcccgcgcgggccgcgagggaggcggccg

SEQ ID NO: 120143 - RNA, 71 nt, Homo sapiens
gaggaggaaaggaggacgaggcaggaaaaggaagagcaaaaacaaaaacccagcagacaaaagacagaagc

SEQ ID NO: 120144 - RNA, 63 nt, Homo sapiens
gggaagggaggcggcggccccaaaaggggcccgaaggcaccgcagaacggggcgggacgacag

SEQ ID NO: 120145 - RNA, 70 nt, Homo sapiens
gaagacgggcaggcaggggagcaaaggggcgccacagggaaggaccaagacgcagcgaaaggcggggggg

SEQ ID NO: 120146 - RNA, 51 nt, Homo sapiens
gacaggcaaggaccgcacgagagcagagaaagggggaggcggacccggcaa

SEQ ID NO: 120147 - RNA, 45 nt, Homo sapiens
gcgggggaagaagagaaagaaaaccagcccgcccaccggaagaag

SEQ ID NO: 120148 - RNA, 81 nt, Homo sapiens
ccggggaggcaccgacgaggaggagggcgggaccccgcggaacggccgcggggagcggcgcgcgcacaggcacacgacacc

SEQ ID NO: 120149 - RNA, 84 nt, Homo sapiens
acaaacacaccagccccaagagacccaacagaccagagcaggggaagaagagcccgaagaagaaccgaagagacagcagaagac

SEQ ID NO: 120150 - RNA, 79 nt, Homo sapiens
agaaagggcgaaaaaagggaaaggacgggaagggcgacagcgcaaggagacgaagaagaagccacacacagaagaccca

SEQ ID NO: 120151 - RNA, 72 nt, Homo sapiens
gccgcacggcccacgcgagggcgaagaagaagcacaaaaccacacaggcaagcaggagggcaccccaaaaga

SEQ ID NO: 120152 - RNA, 91 nt, Homo sapiens
cgaggaccggaacgggggaagcagacccgggaagcgcggaaaaagggacaaagggcagagcaacaggcggaaaaagggcaagaagccagaa

SEQ ID NO: 120153 - RNA, 67 nt, Homo sapiens
aggcaaaaaacagaggaaggaaaggcgcaacaacacaaaaaaagcagcaaggaggaggcaggaccgg

SEQ ID NO: 120154 - RNA, 71 nt, Homo sapiens
cagcggcaagggacccccggccccccagcgcccccggggcaaacccgagccaggccaaaacagaagaggca

SEQ ID NO: 120155 - RNA, 41 nt, Homo sapiens
gcgccggagccgcgcgcggagcccagccccaagcagcacaa

SEQ ID NO: 120156 - RNA, 39 nt, Homo sapiens
gcgaaaaacaggcaagggggacgggggaggacaggagac

SEQ ID NO: 120157 - RNA, 75 nt, Homo sapiens
cacaccagcaggcgcagaacgagggacaaggagagcccgaccagagaaaaggcggaagaccgccaaaaaggacac

SEQ ID NO: 120158 - RNA, 71 nt, Homo sapiens
caaggcaacagcaccaaaaagcaacccaaaacgaacacccggagggaacaacaagacgcccgagaaaagag

SEQ ID NO: 120159 - RNA, 74 nt, Homo sapiens
caaaagcccgacacacagggaaaggaccggcccgcagaaggccaccacagacacaaacgggaagaaccggccga

SEQ ID NO: 120160 - RNA, 55 nt, Homo sapiens
ggacacgggcggagccagaacagccccccccccagaaccggaaacagacacaggg

SEQ ID NO: 120161 - RNA, 75 nt, Homo sapiens
gaaaaggcggggcgaaaagaggacaggaccaggagagcaggaagagcccagccagaagaaaagaaacggaggagg

SEQ ID NO: 120162 - RNA, 83 nt, Homo sapiens
agcgaccggagagcgccggggggacagacagagaggagagaagaaccccagaacccagcccgcacacgcagccaggcccagag

SEQ ID NO: 120163 - RNA, 73 nt, Homo sapiens
gaacagacgagcgaagagacccagaacagagcccaagagacacaggcagaagaagaccgcaaggaagaagagg

SEQ ID NO: 120164 - RNA, 79 nt, Homo sapiens
gagacggaaagccgggacaggagagaaaccaggcggggaacaagccagcagcccaaggagaagccccacagagcaagcg

SEQ ID NO: 120165 - RNA, 72 nt, Homo sapiens
cacacaaaagaggagaaaaccgggcgcagccaaccaaaggagagcagagagaaaaaaaaagcaaaagagccc

SEQ ID NO: 120166 - RNA, 82 nt, Homo sapiens
gaacacaaggccgaccaggagagcacgcgcagccaggcgaagacagagggccgacggcgacagaaaagggacgcggcacaga

SEQ ID NO: 120167 - RNA, 74 nt, Homo sapiens
ggaagggcaaccaaccaaggggcccagccagaagccagacgccgggaaggccaaacccagacacaggaaaaccc

SEQ ID NO: 120168 - RNA, 73 nt, Homo sapiens
gcagggcggaaggacaacagcccgacaaccaggccacgagcggcacaggacagaaccgcaaacaacggagcca

SEQ ID NO: 120169 - RNA, 38 nt, Homo sapiens
acgccacacaccaaacggacaaaagccacgaggcacaa

SEQ ID NO: 120170 - RNA, 69 nt, Homo sapiens
acccgccgcacaaggcagcacacacgagacaagacaagcagggacaacaagaaacacgcccaccgagcg

SEQ ID NO: 120171 - RNA, 61 nt, Homo sapiens
agaaaagaaagagaacaaaaccccagggcgggacccgagagaacgcaagacccaccccccc

SEQ ID NO: 120172 - RNA, 75 nt, Homo sapiens
agcggcaaaaggcgaaacaagggaggcgaggacggacaaaaggaaacggacgggaggccagccagcagaaggagg

SEQ ID NO: 120173 - RNA, 75 nt, Homo sapiens
gcgaacgagccacagggacccagcaaaggagagcaggagaaaaacggcagcagggaaacaccgccaagccccacc

SEQ ID NO: 120174 - RNA, 57 nt, Homo sapiens
cccccagcaagaccagcacaaacgaggagaaacaaagagaacaaagcgggcccaggc

SEQ ID NO: 120175 - RNA, 74 nt, Homo sapiens
cgccggcgggaccgcagcacggggaaacgaccgccccaaaacgagcccagcgaaagacaaccgcccccagcgaa

SEQ ID NO: 120176 - RNA, 55 nt, Homo sapiens
ggcaaacaggaaaccgaagaaagggggacagaggggagcgggacgggcggcgagc

SEQ ID NO: 120177 - RNA, 72 nt, Homo sapiens
ggaaagaacgcaagagcagggacagcagcagaacccagccgaccgccccccacgacaggcccaccggggggg

SEQ ID NO: 120178 - RNA, 71 nt, Homo sapiens
ccagagaccacagaaggacgggagaacaccccacagggaagaggagaaaccgcaagaagcacagaagcagg

SEQ ID NO: 120179 - RNA, 76 nt, Homo sapiens
cagcagggcgggcaggcccacacagacacgagaggcgagggacgacagagcaagcggcagagggcaagcgggaaaa

SEQ ID NO: 120180 - RNA, 74 nt, Homo sapiens
gaggcaagcagacaagacggaggagcgcgcacccaggcggagacagggcacgacacagccacgcaccccaaccc

SEQ ID NO: 120181 - RNA, 71 nt, Homo sapiens
aagcgacagaaggagggaccggccggggcaaggagaaaaggggaggagagacaagaagaagggaccgagcc

SEQ ID NO: 120182 - RNA, 74 nt, Homo sapiens
ccccggagaccaaccccagaacaaccaagcggagggcagaagaagacagccagaacagcaagcgaggaccaccg

SEQ ID NO: 120183 - RNA, 84 nt, Homo sapiens
cgggggcggccgggacggaggacgcgcagacaggccgacggcgcaaggccacggcaagcaccgggagcagcagcgaagccagcc

SEQ ID NO: 120184 - RNA, 117 nt, Homo sapiens
accaggacggcagggcccccggagggaacccgcccccagggagggaacaaagcccacaagcaccgcacaaggcggccgaccaagggaccagcgcagcacccgaacgcgggggccgga

SEQ ID NO: 120185 - RNA, 64 nt, Homo sapiens
cgccggaggaaccgagaagagcagagcggagggagccccagacacggaaaagaaaagccaagag

SEQ ID NO: 120186 - RNA, 65 nt, Homo sapiens
cgcagggcgcccccggaccacacgagggaaccggccgcggcaacgggcgagaaggggacaaccaa

SEQ ID NO: 120187 - RNA, 77 nt, Homo sapiens
acaacgggcacccacaacagaagacagccggcaaccaagaagaaaagagggaccgcgcgaagcggccaaacccccac

SEQ ID NO: 120188 - RNA, 83 nt, Homo sapiens
agaaaagaccaagaccaccaaggcaaagcccaccacaaaccaaacgagcaagaaggagcgaggcagagccacaggagaagcag

SEQ ID NO: 120189 - RNA, 67 nt, Homo sapiens
aggcggaagaaggaaccccgaagaggaaggagagcccggacccacccaccggccaacaaacccaaag

SEQ ID NO: 120190 - RNA, 72 nt, Homo sapiens
aaggaccaagaagccgccaagccacaacagaccaaacgggcaaaggaaaggggcgcgaaccaggaaaaaccg

SEQ ID NO: 120191 - RNA, 74 nt, Homo sapiens
cgcggcaaagaaaacaggaagagcagacccgaaagcaaaggaaacgggaagagccgcaggaggagaaccaaacg

SEQ ID NO: 120192 - RNA, 79 nt, Homo sapiens
gcaggccacgggacacggccacaaccaagcaaccggcacaaaggggcaggagagagaacaaaggggaagggggccagac

SEQ ID NO: 120193 - RNA, 63 nt, Homo sapiens
cacagcccagccgggaagggacagacgggcgcagacccgggaagaaacgagcgagcccgggac

SEQ ID NO: 120194 - RNA, 79 nt, Homo sapiens
cgggacccaccaaaaaaaaagaaaaacagaaaaaaaaaacacgcaaagaccaccaggaagccaggaaaggcagcccagc

SEQ ID NO: 120195 - RNA, 81 nt, Homo sapiens
gcagcgcgcccagcggcccaggcgccgcggcgaggagcgagcgcgcgaggggcggccgaggaaccagaaagagacaagaag

SEQ ID NO: 120196 - RNA, 83 nt, Homo sapiens
gccaggggacaccagcaagcgcggaagaggaccggaggccggaggaagccaggaggccgggaaccagagaaccagaccccgag

SEQ ID NO: 120197 - RNA, 79 nt, Homo sapiens
cgaagaagaggcccaacccccaccccgcccaaggaggcccagcgaaaagcacgaaacacaaagcaaaacggagaaggac

SEQ ID NO: 120198 - RNA, 80 nt, Homo sapiens
gagaaacccggagggcgccgggacagaagcgaaggggacagggggagaaccgccagggaaacccgggggacagacacaag

SEQ ID NO: 120199 - RNA, 55 nt, Homo sapiens
cccgcagaaaggccggcacagggagcaacacaccccacacgagacccaagaaaga

SEQ ID NO: 120200 - RNA, 80 nt, Homo sapiens
agcgggacagagggaaagggaccaagcccaaagaggagaaagagccaagggcaaaagcagaccggaaaacccaccggcaa

SEQ ID NO: 120201 - RNA, 81 nt, Homo sapiens
ggagagcgcgaagcaaaggagcaagcggccgagccgagcacacgccggaacggggccaagggcgcaggcggaagagaaggc

SEQ ID NO: 120202 - RNA, 74 nt, Homo sapiens
gcaggcggcccacggcagcgaggggccggcacagcagcaagaccggaacccagaagccccccccccggaaacaa

SEQ ID NO: 120203 - RNA, 82 nt, Homo sapiens
gggaaggagcgggcgacccgggggggccagcggagcccgcaacaaggaggaggaccaaagccacaaagaggggaaccgccgg

SEQ ID NO: 120204 - RNA, 94 nt, Homo sapiens
cccaacaacccgacggcggaaggccccaacacccggagcagcgccacaagggacaggcaagggacagagcacaggaaagggacccccacagcac

SEQ ID NO: 120205 - RNA, 73 nt, Homo sapiens
ccccggcgagcgccggcggccggcccgaagagcccagaggcccggaaggcgcaaaagggggagaacaacacca

SEQ ID NO: 120206 - RNA, 77 nt, Homo sapiens
ggccgacaggaggcggccaggcaaacggaaaagcagcccaaagagaagaaaggaaaacagaagaaaaaaagcgaagc

SEQ ID NO: 120207 - RNA, 77 nt, Homo sapiens
ccgcagaaggccggagacaccagcaggaaaggagaccaggaagcaccccggaccaaagggcaggagcacaggaggac

SEQ ID NO: 120208 - RNA, 82 nt, Homo sapiens
aaacagcaaccaggcacagcgcaccagcaggagggcccccggacccgggagcggacccggggcgggaagcccgaggcggcaa

SEQ ID NO: 120209 - RNA, 88 nt, Homo sapiens
ggccagggccgggaggggcgcggcgagggcgaccccccaaagcagcgcccggcaaaggccgagcgcaggaggagggaagaacgccaca

SEQ ID NO: 120210 - RNA, 75 nt, Homo sapiens
gagaagccaggagcacccggcgcccagacaagacaaaccggcgaccacacacggggacgacggggaagccggaca

SEQ ID NO: 120211 - RNA, 74 nt, Homo sapiens
agcaagaccgccgaagaggccagaaaggcacccggaaacaagccacgaaggagagaaaaccagcagcagcgcag

SEQ ID NO: 120212 - RNA, 74 nt, Homo sapiens
ccacccacaggggggagggaaaaaacaacaagaaggagaaagacacaacgacagaagaaaaaacacaagaaaag

SEQ ID NO: 120213 - RNA, 129 nt, Homo sapiens
cgccgagccgcgcagcgcgcgggggaggcgcccgcgccgacgcggggcccaggccaggaccaccagccagcgcccgggcgcgccaggcacagccaagagcggaccggcagcggccagcgcagcggccgg

SEQ ID NO: 120214 - RNA, 57 nt, Homo sapiens
gaaggagggacgagaaaagcgacgaggagcaaccaggggcccgagaaaaagaagcag

SEQ ID NO: 120215 - RNA, 59 nt, Homo sapiens
gccacaaccggacaggcagcaaggcacacaagccgaagccaacacgcccagaacagcgg

SEQ ID NO: 120216 - RNA, 38 nt, Homo sapiens
ggcgccgcgccggcggcgccagaggagcagccaagaag

SEQ ID NO: 120217 - RNA, 78 nt, Homo sapiens
gacaggaacgagggccgacacgaggccccacagcaagaggcaagaaggacccggcccacaaaggcgggcacggacacg

SEQ ID NO: 120218 - RNA, 65 nt, Homo sapiens
gccaacccgccgcgcaccgacccgacgcgccggcccacgcgcggccaagcggccccggaggcggc

SEQ ID NO: 120219 - RNA, 67 nt, Homo sapiens
aggaaacgagggacaacacagacccaccagcagaggcacgaagaacacaaagcaaaaaggaaaagaa

SEQ ID NO: 120220 - RNA, 70 nt, Homo sapiens
ccaagaacaaccgcggacacggagaggaaggaccacaagaagggcgggggccccgcagacccagcagcgg

SEQ ID NO: 120221 - RNA, 65 nt, Homo sapiens
ccagcgggggggcagcagaagcccagagcccagacgcagggacagagcagaagggcgaaagaccg

SEQ ID NO: 120222 - RNA, 69 nt, Homo sapiens
aggaaaagaagcaggagcgcacccacggaaagacgaccacgcaaaggagcggaacgcggaagcggcgca

SEQ ID NO: 120223 - RNA, 63 nt, Homo sapiens
acaagaggaagcaggaaaaacaaagaagacccagaaagcagaagccacggagaaaaacggcca

SEQ ID NO: 120224 - RNA, 80 nt, Homo sapiens
agacacgagccccgaaacaggagacacggacaagagggagagcgcagcagagccaagaagaacaagcccaaccgcacacc

SEQ ID NO: 120225 - RNA, 82 nt, Homo sapiens
ggcgcgcccagaagaagggaaggcgcgaggaggaaaggaggacgagaaaccgaaaccagcccccaaggggaaccagccagac

SEQ ID NO: 120226 - RNA, 76 nt, Homo sapiens
cacccgaagaaacaagcacagaagccgaaaaccagacaagccaacgggagcccagaaaagcagaaaagcaaccgag

SEQ ID NO: 120227 - RNA, 71 nt, Homo sapiens
ccgaacacaggagagagggaacacagggaggaaaggacgcacacgcggaaaaaaggacaggacacaacagc

SEQ ID NO: 120228 - RNA, 64 nt, Homo sapiens
cggcggccgcggccgagcgccgcgcacagcccggacaggcccaaacaggcagcgagggccggaa

SEQ ID NO: 120229 - RNA, 59 nt, Homo sapiens
cagggaaacaccacgaagcagccaagacgaccccgcccgggggacccaacgcagccagc

SEQ ID NO: 120230 - RNA, 82 nt, Homo sapiens
gggccccgaaccgccaggggacgcggagccccggaggccgcggcggacggacaccggaggccaccacagaaggacgccgcgc

SEQ ID NO: 120231 - RNA, 83 nt, Homo sapiens
caaaaacccccaccgggaaaaaggggaagcggagcacagcaagcgggagcaggcagaccaaaggaacagaagccagggccgga

SEQ ID NO: 120232 - RNA, 82 nt, Homo sapiens
ggcggggacggccacagaaagcagcccaccagcaggcgggacccgcaccggaaggccacgccaagacaggaagggaaggggc

SEQ ID NO: 120233 - RNA, 75 nt, Homo sapiens
acccaaaggccaacacaagacaagccagcagccgccagacaagaggggacggggcggggcaccaccccgaacagc

SEQ ID NO: 120234 - RNA, 68 nt, Homo sapiens
caaccggggaggaaaaccgacgaagaagcgccaaaacgggcaaaagggccaaaacgccgaggcagcgc

SEQ ID NO: 120235 - RNA, 75 nt, Homo sapiens
gaaggccaccgagggaacccgaccggacccagccccagaaggcgggaaagaggaaagaagacacgcaagagaaca

SEQ ID NO: 120236 - RNA, 57 nt, Homo sapiens
aggaggaaacagaaacagggcggagggggagagccaacagacacgccacgcgaagcg

SEQ ID NO: 120237 - RNA, 90 nt, Homo sapiens
gaacaccgggcaccgccagcaggccaagagaaaacgagggcccgagaagaggacaggcccaggaaggagacgcacgagcagcccagcacg

SEQ ID NO: 120238 - RNA, 59 nt, Homo sapiens
gccccagcggaccgaacaggcaacgcggaaaaaagccggggggacgcggacagcgccca

SEQ ID NO: 120239 - RNA, 71 nt, Homo sapiens
ggagcggcgcggccccagcccccgggggggcccgagcgccgggagcgccgccaggacaggcccgacgaccc

SEQ ID NO: 120240 - RNA, 37 nt, Homo sapiens
gggggggcaaacccgagagaacggagggggccacggg

SEQ ID NO: 120241 - RNA, 67 nt, Homo sapiens
cggggccccgcagcagcagcgcaggccaggggaacaaaaagagacgcaccagacgaccgcggaacaa

SEQ ID NO: 120242 - RNA, 103 nt, Homo sapiens
cgccgcgcacccgcgccagcaccacgcccgcgccgcgccgccgccaccagcccaagagaaaggcacgcagcacgggggcaggggccgacccagaacgccagcg

SEQ ID NO: 120243 - RNA, 88 nt, Homo sapiens
gccgaagcagccgggagccggagcgggcgcggacgccgaggcaccgaggcaccagaggagagagccccgcagggccgccccgcgcgag

SEQ ID NO: 120244 - RNA, 58 nt, Homo sapiens
ccaacagaaacgcaccaccaaggccccccaaagccagccggcaccaacaaaggaaagg

SEQ ID NO: 120245 - RNA, 81 nt, Homo sapiens
acgagagaggcaccgggacggaccgagaccggaccgagagcggaccgagagcgcgaaacgcacgagaagacagacaccaaa

SEQ ID NO: 120246 - RNA, 77 nt, Homo sapiens
ccccccgaggagggcaaaacacgagcacggcgaaggacaggcacaggcagcacaaagacccagcgaggcccaagaaa

SEQ ID NO: 120247 - RNA, 136 nt, Homo sapiens
gaaccaaagcgcacgaggaggacacgcgggggcaccggccaagacacgccagcacggggcacagacccaggaacaccagggcacacgagaccaggaggggcgaccgaggccccggacagcgaccggaggaggggag

SEQ ID NO: 120248 - RNA, 105 nt, Homo sapiens
cggaaccccacaccagggggccagccaggcagcccgggagccccaccaccccggaaacaggccccacccagagaccaagccacgggagcacaaaacgccaaggcc

SEQ ID NO: 120249 - RNA, 68 nt, Homo sapiens
cccgccgcagccgcaggaaggcagcaagaaacagaccgaagagcaagaaacacgagaacagcacccac

SEQ ID NO: 120250 - RNA, 71 nt, Homo sapiens
accagaaaggccagacaagaggaagaccagccgcaaaccaagaggcacacccagaagccacaggagaagca

SEQ ID NO: 120251 - RNA, 56 nt, Homo sapiens
cgcccccgagcacgcagccaaccccagcaaggaggcagcacggcaggagacgagga

SEQ ID NO: 120252 - RNA, 84 nt, Homo sapiens
agaaggaagcgcccacagggcagcacaacaagaacgcgcgacaaaacacagcaggcccccagagaggagccaagaagaaccgga

SEQ ID NO: 120253 - RNA, 73 nt, Homo sapiens
cggcaacggcgaccgcccgccaaggggccgggagcgaccaacacaagggggccgcaagcaaaacgggcaccgg

SEQ ID NO: 120254 - RNA, 77 nt, Homo sapiens
gcccacagagcagacccccggggcccaggaacccggcccgcaagcaacagcaagccccagccaagacccaccaggca

SEQ ID NO: 120255 - RNA, 82 nt, Homo sapiens
aggcggcgggagaagagcgcagaagagacccgggggcaggagggaaggcggggcgaggaccccagagacaccagacggccaa

SEQ ID NO: 120256 - RNA, 80 nt, Homo sapiens
gcgccggcaagagccgggcggagaaccggggccgggcccggcaggaaccggaacaacccacagggcagagcggagaagcc

SEQ ID NO: 120257 - RNA, 72 nt, Homo sapiens
caaacaagaaacagcaagcaaacaggggcagcgcaggagaagaggaggacaaacagaggcgaagaaacaaga

SEQ ID NO: 120258 - RNA, 68 nt, Homo sapiens
ccaccccccaaaccgcagcgcccgaaagagacagagccgcgggccacacggcagaacccggcccaagc

SEQ ID NO: 120259 - RNA, 71 nt, Homo sapiens
gcaagggggcacccagcggcacaaaaaggacgccggcaaccaaggaggcacagcgagaagggaaggaagcc

SEQ ID NO: 120260 - RNA, 80 nt, Homo sapiens
caaacaccacccggacccgcgaccgcacaaagacgaacagcacgcaagccagaccacagcccagaaggccgagcccggcc

SEQ ID NO: 120261 - RNA, 77 nt, Homo sapiens
gaagggaaagggaaacaacaaagaaacaaccggcccagagagaagcgggaaggcagaaaaggcgaggccggaaacca

SEQ ID NO: 120262 - RNA, 36 nt, Homo sapiens
gcaaaagccaggaaccagcaaagaagcaaggccgaa

SEQ ID NO: 120263 - RNA, 68 nt, Homo sapiens
gaacaccgcgggcggggcggcagcgaggaacaggagagcggccgcagacaagcccccgggccacgggc

SEQ ID NO: 120264 - RNA, 45 nt, Homo sapiens
cgcccggggagaagcacagccacaggcccaccagcaaagcgggca

SEQ ID NO: 120265 - RNA, 78 nt, Homo sapiens
gggggggggccccggagcccacggagcaggagaagcccaaggcccagggaaagcaacggcgcaagcggcggcggcggg

SEQ ID NO: 120266 - RNA, 80 nt, Homo sapiens
gggccggccgccgcggggcgaaacagagacacgggccaaggcccccgggccaccggccagaacggaggaaaaacgacgag

SEQ ID NO: 120267 - RNA, 84 nt, Homo sapiens
agaaggacagagaaccgggaacaggcggacggccagcccacacaggccccccaaagaggcggacaaggggcccacggcaggggc

SEQ ID NO: 120268 - RNA, 104 nt, Homo sapiens
cagcgcccggaccggccgagaggaagacgagccgggaggaacggcccggaaacaggaggacgggacgaagggaacccgccgggcggcccggcacccagcccccc

SEQ ID NO: 120269 - RNA, 65 nt, Homo sapiens
gccccgggaaaccagagagcggagggagccacggagcggccaagcgccggaacagagcagcgcag

SEQ ID NO: 120270 - RNA, 81 nt, Homo sapiens
gcggccgggagcccgccgcgcggagcggaaccgacagaagccaggaccccagagagggccaagcccaagaacaaaaaccga

SEQ ID NO: 120271 - RNA, 69 nt, Homo sapiens
cgggaccacaggccccggcccagaggaaacgagcacggagcgcccacggagccacggaaggaaacgagc

SEQ ID NO: 120272 - RNA, 72 nt, Homo sapiens
aacagacacaacccaagagcggacaacagccaagaggaaaaaacaaagccacaggcccggacagcaaaaagc

SEQ ID NO: 120273 - RNA, 82 nt, Homo sapiens
gcggcgcagcacgagccaggaacgcgcagccccgagcgccgcggacgcgcacgagggacggggaaagggaacgaagcccaaa

SEQ ID NO: 120274 - RNA, 53 nt, Homo sapiens
gacaaaagggccaaagaagggagagaggccacacgccaacgaggacgacaagc

SEQ ID NO: 120275 - RNA, 76 nt, Homo sapiens
gcggcggacggccgcgggcaggagggcgacccaaaacacggcaaaaccaaaagagccaggacgggggcaaggacac

SEQ ID NO: 120276 - RNA, 77 nt, Homo sapiens
gagcgaacggggagccgagcggagcgccgcggcgcagccaggggccagaaacagagaggcagaccacagcgggagga

SEQ ID NO: 120277 - RNA, 57 nt, Homo sapiens
cggggccccaacaccggagaaaaagaaggaccggaagcgcgcgacagcccagcagag

SEQ ID NO: 120278 - RNA, 71 nt, Homo sapiens
caggcgacgggaagcgaccgcaggcgggcccccgaccggacagggggcgcgccccaacggccacggagaag

SEQ ID NO: 120279 - RNA, 73 nt, Homo sapiens
ccgcgcgcccgggaacgagaccagggcgacaagagaaaaagaaagaaaccccaaaaacaaaccgccaagagac

SEQ ID NO: 120280 - RNA, 79 nt, Homo sapiens
ccgagcagcccccccgcagccggggaccgccccaggaagaccgaggagcagggagcaaccacaaggaaaggaaaccacc

SEQ ID NO: 120281 - RNA, 72 nt, Homo sapiens
caaggggcaaagcgcggaacgggggaaccaaagccaagcggaacaaacaacccgaacggcaacagacgaaga

SEQ ID NO: 120282 - RNA, 81 nt, Homo sapiens
aagcgaggaaaaacaccaacaggcacagaggcagaaggagaagacagccgaagaagagcagcgaggagcgcgacgaaggca

SEQ ID NO: 120283 - RNA, 53 nt, Homo sapiens
aacacgcgagcacagcgaaaaaaaccccgaagaagagggaaagaccaggagca

SEQ ID NO: 120284 - RNA, 75 nt, Homo sapiens
ccggggacccgcaaagaggacacggacagagggaggcccacagccagccagaacaaccacaacccacaaccaacc

SEQ ID NO: 120285 - RNA, 72 nt, Homo sapiens
ggaagccccgaaaccccaggacccagacacagcaggagacagagagaaagcaacagcaggccagccccagag

SEQ ID NO: 120286 - RNA, 73 nt, Homo sapiens
gaaccagaagcacaagcacgaaagccacaaaaggggagaggcccaggaggacagcacgagccagggagccgcc

SEQ ID NO: 120287 - RNA, 48 nt, Homo sapiens
gaacgccaagcccggccccaggaccccaagcaggaggagcaccggccc

SEQ ID NO: 120288 - RNA, 69 nt, Homo sapiens
ggcgagcgggcacccgcgcggccgcgggcgcgcccgcagcgcccgccacagaaaccggaaggcaaaaag

SEQ ID NO: 120289 - RNA, 81 nt, Homo sapiens
ccagagggaaagcacaccaccccagccagccagacagaaaagggagccaggaccccagagaggagacccagcgcccgccgc

SEQ ID NO: 120290 - RNA, 73 nt, Homo sapiens
gggcaccagcagcgacggagccacccgcgaaaacggccagggccgccggcaagaagagaaccgacagcacaag

SEQ ID NO: 120291 - RNA, 82 nt, Homo sapiens
ccagacacagacgagcaggggaaggacacgaacaagaaggcagcacaggcccccacagaaagaagaaggccagcaaccccga

SEQ ID NO: 120292 - RNA, 81 nt, Homo sapiens
cgcggcagcgcgcccgaggaccagggaagacacgggagcgccgccgccggagggcaggacgaccccgcgaccccacacaaa

SEQ ID NO: 120293 - RNA, 79 nt, Homo sapiens
cgccagacccacccggccgggccgcgcgccccgcgccccggggcgggccgcagcgcacgggggaacaaacacacgaaaa

SEQ ID NO: 120294 - RNA, 74 nt, Homo sapiens
ccgacaggaggcggccagggagggaaacagcgaaaagcaaccagcagaccgggagcagacaaggcggagcgcgg

SEQ ID NO: 120295 - RNA, 84 nt, Homo sapiens
acacgaccgacgagcgcacgaggaggcgcgcagaaccagaccgggagcacgcacccacgagggcaaacaccagcaacacccggg

SEQ ID NO: 120296 - RNA, 76 nt, Homo sapiens
gcacacccgaaaagcgccaaggaaaaggacgagaacgccgcgacagaaagagagacagcgcggagaccacccagcc

SEQ ID NO: 120297 - RNA, 78 nt, Homo sapiens
agagagggaagacagaccaggggagacaaaacccaagacacgcgcaacaaagacgcagagaacagagcacccaagacg

SEQ ID NO: 120298 - RNA, 68 nt, Homo sapiens
gagcggagggggggcgccagaaccagagagagacgaggccaccggccaagcccagcagagcgcaggaa

SEQ ID NO: 120299 - RNA, 66 nt, Homo sapiens
acacggccgcaggaggaccaaacccaaagcaggcaagaggcagagaaaggcccggaccaagagacg

SEQ ID NO: 120300 - RNA, 56 nt, Homo sapiens
ggcacacaccaacgcaggaagaagagagccaggcgaacgccgaggaacagggaccg

SEQ ID NO: 120301 - RNA, 96 nt, Homo sapiens
gaagcccacgccgggacccagcgcaggcagaagccccagaggagcccgaaacccccaggcgggcaggaaggagagccccagcgaggaagcacacca

SEQ ID NO: 120302 - RNA, 75 nt, Homo sapiens
cgcggggaaacagccacccaacaacccgggccgccaggagcaaggcagcgacccagggcacagcggggcacagcc

SEQ ID NO: 120303 - RNA, 101 nt, Homo sapiens
ggggccaaggagcacggacggacccagcacgaggaggcgcgaggagagagagcgccaagccccaaagaagaaccagacgagaagagacggcaccccaaggg

SEQ ID NO: 120304 - RNA, 73 nt, Homo sapiens
cagacaggacccgcaccgccagaggagcaggaagaggagagggagaacgggaagaagaagaaggcgaagaagc

SEQ ID NO: 120305 - RNA, 43 nt, Homo sapiens
ccacgaccccgaccccggcccggggcccagaaggaccgggacg

SEQ ID NO: 120306 - RNA, 70 nt, Homo sapiens
cgagcccagccgaaggagaagggggacaacgaagagaggaaagaagcggaaaggagggagcacacaacaa

SEQ ID NO: 120307 - RNA, 73 nt, Homo sapiens
cccgggacaccaagaaagaacgagagccaggcacaaaaaggggaagacaaaagcagacccaaccaaggaaagg

SEQ ID NO: 120308 - RNA, 38 nt, Homo sapiens
gcccagccccagcagagcgacacagaaggaacacagcc

SEQ ID NO: 120309 - RNA, 76 nt, Homo sapiens
gggagaccaagagacagacaccgccccgagacgagaagaagccgggaagaaaacagaaaagacgcaacagaaagac

SEQ ID NO: 120310 - RNA, 103 nt, Homo sapiens
cgccgggacgcggagcccggagcggggcgacgaggcgagcgggggccgggcagagggagacgcgcacggaccggaaccagaacaagacgaaagacaacgagcg

SEQ ID NO: 120311 - RNA, 79 nt, Homo sapiens
ccccagcccgccccccgggccggaccaaaggccacaagcccgaggaaagccagccaaacacccaagccaaaagcggccc

SEQ ID NO: 120312 - RNA, 54 nt, Homo sapiens
accgcagccaccgaaaaggcaaaaaggcgcagcggcgaacaccagaaagagaca

SEQ ID NO: 120313 - RNA, 56 nt, Homo sapiens
ccggcaacaccagacaccaaggacagcccgcaaggcagcaagacaagaaacgcccc

SEQ ID NO: 120314 - RNA, 78 nt, Homo sapiens
ggaacacccgcagcgacaggaaacaggaaaggaaagagccaggaggaaagagccaaccagacagccaggaagaccccc

SEQ ID NO: 120315 - RNA, 74 nt, Homo sapiens
gaaggaggcagaggcacaccgaaagaggcggacacgagcgaaccgaaaagagacacggaggggaaaccagaaca

SEQ ID NO: 120316 - RNA, 81 nt, Homo sapiens
aaaggagggggcgagaaggcgggaagccgaaggcagccacagggaacccagagaaggaaggaaaacccgccaccaccccag

SEQ ID NO: 120317 - RNA, 70 nt, Homo sapiens
ggaagaaaaccgaccagggcaacaccaaaaacaaaacgaaccaggacggcaagcccggccaacgcaacag

SEQ ID NO: 120318 - RNA, 67 nt, Homo sapiens
agaccacccccaaacggaaagggcaggaagaccaggggaacaaaaccaaagggggcgcaagcagcga

SEQ ID NO: 120319 - RNA, 69 nt, Homo sapiens
cgagcaaaaaaaccacgggagaagaacaacagcacaaagggaaaacaaaggcagagaagccagacggca

SEQ ID NO: 120320 - RNA, 76 nt, Homo sapiens
gcggcggccaggccagacccgaaggccaggagacccgaccccaaggaggggcaggagaagccaagagggggagggc

SEQ ID NO: 120321 - RNA, 76 nt, Homo sapiens
cgcccccccaccaggcccaaccaaggccgagagcccaagaagagccaagccgccccaggagcaggaggaggccagc

SEQ ID NO: 120322 - RNA, 72 nt, Homo sapiens
caaaagaccaggagccacaaaggagggcagagacaggcaacagacggcaacgaaaggcacaaaaacgcaaca

SEQ ID NO: 120323 - RNA, 71 nt, Homo sapiens
cgcgccgcgccggcgagggaagcggaaccaaccgggaaagcccggggcagggcaacaaagaccagacagca

SEQ ID NO: 120324 - RNA, 72 nt, Homo sapiens
caaggagccgcaacaagaaggaaagccaagcacaaagacaggaagaacggagaaggaaggacacccccagga

SEQ ID NO: 120325 - RNA, 64 nt, Homo sapiens
cagcgagcgaagaaaggcgaccggcccgaggaccgccgcacgaccaaacgcagaacccacaccc

SEQ ID NO: 120326 - RNA, 75 nt, Homo sapiens
ggaggcggcccaggcgcgcaaaaagaacggcaggaacgggcgaacaggagccaggagacaacgccacagccaaaa

SEQ ID NO: 120327 - RNA, 73 nt, Homo sapiens
ccccaccaagggaagaggacacacacccagcagcggccgaagaaaccaaaaggcccaccaaaccaaagcaaga

SEQ ID NO: 120328 - RNA, 81 nt, Homo sapiens
agagcagaaaccaacagacaagccaaacggcaaggaacacagaggaaagaccggcagagaccaagccaagggacaaccggc

SEQ ID NO: 120329 - RNA, 54 nt, Homo sapiens
gagggcaccaaccaacccggaaccgcagacccgggcccggacggacaagaaccc

SEQ ID NO: 120330 - RNA, 80 nt, Homo sapiens
acacgccccgcgcacaacaggcggcgccaggggagaggaggcagaaggagaccgcgggacagaaccgcgggcaaaagggg

SEQ ID NO: 120331 - RNA, 79 nt, Homo sapiens
acacaagaacaaggagaccgcaagaggacaccaggcgagcacacagagaggggaagggcagcagcagcagagaaccaaa

SEQ ID NO: 120332 - RNA, 56 nt, Homo sapiens
caagagcccaaacgcgaacccgcgcccagaagggaaggccacggacggggaaacgc

SEQ ID NO: 120333 - RNA, 66 nt, Homo sapiens
gaaaaccaacgcccccccagcacacagaggagagcgacgagaagggaccccgacggagagacaaag

SEQ ID NO: 120334 - RNA, 68 nt, Homo sapiens
aaagaaggcccgggaaagcacaaagcaagagacagcgaggacagaaggaagcggccgcgagaaccggg

SEQ ID NO: 120335 - RNA, 77 nt, Homo sapiens
acacgcaggcagcggaccccgaacgcacccgggccaggccccaagggccccagccagaaggccaggccacacaagcc

SEQ ID NO: 120336 - RNA, 76 nt, Homo sapiens
gcgaaagcggaacgaggacaccaggggggaaaaaccacacaggcaaagaacgcgcaaaacaggacgaaaacaaagg

SEQ ID NO: 120337 - RNA, 116 nt, Homo sapiens
accgcgaccgagcagcccccgggacggccggcccgcgccaccgcaccggcaccggcccgaccgcgaggcgacgacgagagggaggaggagaagggcagagacggagaagccgaaga

SEQ ID NO: 120338 - RNA, 76 nt, Homo sapiens
cagaggggagcacagagcgagaccaggaaagaagggggcagaagagggggcaaggccagagaaggcgggagaaaga

SEQ ID NO: 120339 - RNA, 82 nt, Homo sapiens
gaacccagagagacaacccacccagaggccggcaaacggaggagcgagaacccgagcagcgccagagcaacacaccgcgccc

SEQ ID NO: 120340 - RNA, 52 nt, Homo sapiens
cgcaaacccagaccgacgcaaaacaaaaggggccaaggacgcacacaccaga

SEQ ID NO: 120341 - RNA, 81 nt, Homo sapiens
caccacagagccacacgaggagaacggaagaggacaagagacgacacgcaagcaggcaaccgaaacaggaaaaggaaaaaa

SEQ ID NO: 120342 - RNA, 80 nt, Homo sapiens
gcacgagggcaccacaccacgacaccgacaacccaccgggcgccgccaaagggcggagaacggaaaagcaccaggaagca

SEQ ID NO: 120343 - RNA, 51 nt, Homo sapiens
aaggacaacggacagggaaggcggcagaacacaaagaaacgccccaggggc

SEQ ID NO: 120344 - RNA, 35 nt, Homo sapiens
ggcggagcggggcccgacgacaagggaggcgagga

SEQ ID NO: 120345 - RNA, 56 nt, Homo sapiens
gagcaaacccgcccccacaacggaaaaagacaagggcagagcagccggggaaaagg

SEQ ID NO: 120346 - RNA, 78 nt, Homo sapiens
cgcccaaaacgcgggcggcccagcagggggagacaggaggccaccccaccgagggcagcccgaagcggaaccccaaca

SEQ ID NO: 120347 - RNA, 68 nt, Homo sapiens
gaccaacacaccacaccgaaagcaggaggagagaccagcagcaaacccacgcggcgcaccgcacacca

SEQ ID NO: 120348 - RNA, 77 nt, Homo sapiens
aacagaggagaccggcaggagagaacccaccgcaagagaccaaaggccaagagcaccgcagccaccagcccggaacc

SEQ ID NO: 120349 - RNA, 44 nt, Homo sapiens
caacggacggaggacaggaaggaggcggcgaaggcgggcaggcc

SEQ ID NO: 120350 - RNA, 83 nt, Homo sapiens
cgacaggcaacaagacaagcggcggggccccgggaggaagcgcgcagggcgagccagccagaccgggagcagccgagagggcg

SEQ ID NO: 120351 - RNA, 75 nt, Homo sapiens
gccaggcccggcggcgacaccacgggaggcagaccacgagaagccagccaaggccgacaaaaccggccgggaagc

SEQ ID NO: 120352 - RNA, 78 nt, Homo sapiens
aggagcaaaccgcacaagaggcggcggagcggcagggcggcgcgaggaggcgggcacaggcaaccagaaggggaaagg

SEQ ID NO: 120353 - RNA, 56 nt, Homo sapiens
ccagaaggaacgacaaacaggaccgccaaacccaaaccggccaggccagccggcgc

SEQ ID NO: 120354 - RNA, 95 nt, Homo sapiens
gagccgacaagaaggacaaagagacaagccgagagaaagcaagcaaagggcggagaacggaaaagcaccaggaagcagagaggaccgcagaaggg

SEQ ID NO: 120355 - RNA, 76 nt, Homo sapiens
gccagcaggggagaagcgaggaggccagaggagcgcccgacaaggcccaggccgcagcagagagaaggggaggccc

SEQ ID NO: 120356 - RNA, 66 nt, Homo sapiens
cggaaccggaggagaagcccagggagcgcaccccaggaaaccagccagcgggaaccggggccacac

SEQ ID NO: 120357 - RNA, 57 nt, Homo sapiens
accgacaccacggaggaggcggccggaggagggacggaaacagacgacgacacggac

SEQ ID NO: 120358 - RNA, 76 nt, Homo sapiens
cccacagagagacaaccccaagaacaggcgaccccaaaagaaacaaccccaggccggcacagggccacaccgaaca

SEQ ID NO: 120359 - RNA, 84 nt, Homo sapiens
gcgcgagggcacgagcgcccgaagagcaaaaccagcgggcggccgcgcccccaggacacaagggcgcacccagcccggaaagca

SEQ ID NO: 120360 - RNA, 82 nt, Homo sapiens
aaaaaacagaagacgcagcccaggggcgcccgcgccggcagaggaggcgagcacccgccagggagaggaacccccgcgcacc

SEQ ID NO: 120361 - RNA, 77 nt, Homo sapiens
cggcggaaagccccaagcgggcaaggccagagaaggcgggagaaagacacgaaccacagaacgcaacaggacagcaa

SEQ ID NO: 120362 - RNA, 48 nt, Homo sapiens
cccagccgcccgcgcggacgcgaggccgagaaagaccagaaagaagac

SEQ ID NO: 120363 - RNA, 67 nt, Homo sapiens
agggcccccaggcgagccacgccaccgggcacggagcgaggcagggacaacaacgcagggcaccgag

SEQ ID NO: 120364 - RNA, 58 nt, Homo sapiens
ggaggccagaggaaggagagcacagcagacgaaccgaaaaaaagaaaagcaggccgac

SEQ ID NO: 120365 - RNA, 73 nt, Homo sapiens
agagcaccaacagccccaacccagaaagcagaggccagagcggagacagacggaaacgaacccaacagccaca

SEQ ID NO: 120366 - RNA, 54 nt, Homo sapiens
cccgagcagaggagcagggagaagagaaagagacgcaggcccagcaagagagga

SEQ ID NO: 120367 - RNA, 78 nt, Homo sapiens
caaccaacggacaccaccaggggacggcacggacgacagaagcgacgggagaccgacggggcaccgggcccaggcggg

SEQ ID NO: 120368 - RNA, 66 nt, Homo sapiens
aaaggggagacgaagaacagaaaccgcggggccagccgcacacgacggggagggaagagaccacac

SEQ ID NO: 120369 - RNA, 77 nt, Homo sapiens
ccaaagggaaaacagaaacagggcaggacccgaggcgccagcagcagcaagaccgggggaccaggcgaacgaggcag

SEQ ID NO: 120370 - RNA, 76 nt, Homo sapiens
cgccggagcggcgggggcagcaggggacccgacacccccccccaccgaaccgcgccagaacaccaacgccacacac

SEQ ID NO: 120371 - RNA, 74 nt, Homo sapiens
acccaagaaaaaaaccacaaagcggccgaaacagaaaacaagagaccacagaagaacagaaagacgacccagcg

SEQ ID NO: 120372 - RNA, 76 nt, Homo sapiens
agggcgagggcgcgcccgaccagcgggaagaggcgaccccgagggcgcgcagaagcacaaggaccgaggaaccacg

SEQ ID NO: 120373 - RNA, 80 nt, Homo sapiens
ccgcccaagagaggagccccggccgcccggacgagcgagaccgcaccagagggcacgcagacgcagcaggagggaagcgc

SEQ ID NO: 120374 - RNA, 67 nt, Homo sapiens
ggccacgcagacaggcccagaccggaacacggcaagaaacaccagcgaagagaggcaaccagcccac

SEQ ID NO: 120375 - RNA, 67 nt, Homo sapiens
aggagaaggggccgcagccagcaccaggaaaaccagcaggccacagccccaggcccagccccccgac

SEQ ID NO: 120376 - RNA, 64 nt, Homo sapiens
gcgaaccacggaaaggaggaagaagacaccggggacagacaggccacacgaaggcacggaccaa

SEQ ID NO: 120377 - RNA, 74 nt, Homo sapiens
cacagagggggaaagccaaggaaaaacggagagccacaaaaaaggaagcgaaaagaagaccaaacagacaaaca

SEQ ID NO: 120378 - RNA, 85 nt, Homo sapiens
accaaaccggagggggaaaaaacccaaggcgcaaagggagcgccgccgccagccgccagggcaaacagaacagcaagcgcggccc

SEQ ID NO: 120379 - RNA, 73 nt, Homo sapiens
ggaaggcagcgcccagcagcgcagacacggcacagccaacaagcggagggacaacagcaaaagacaagaccaa

SEQ ID NO: 120380 - RNA, 78 nt, Homo sapiens
cagaacacccacaacggaggacacccccacacgagccccaaccccccagaccaaacacaccgccccaacgcaggcgaa

SEQ ID NO: 120381 - RNA, 90 nt, Homo sapiens
ccggacccgacccgagccaccaggacacgggacgaaacgcccaccccgggaagcaggacgcgcacagagcgacagaaaggacagcagaag

SEQ ID NO: 120382 - RNA, 73 nt, Homo sapiens
ggcccaggggaagaggcaaggggccacagccagaaaccaaaaggcaaagccacaacacgagaaaaccaggacc

SEQ ID NO: 120383 - RNA, 72 nt, Homo sapiens
caaccacccagaaacccccccagggaggagagcagaaggccaggaaggggcaaggggcgggacccggaggaa

SEQ ID NO: 120384 - RNA, 76 nt, Homo sapiens
cagccgggacccggccgcacgcgcgccagagggccacgccaggccggccacaaaccagccggcgggcgccacaacg

SEQ ID NO: 120385 - RNA, 56 nt, Homo sapiens
ccgggggccggccacaaaaccggcgagagggcaagcgagccgcccgagggaggggg

SEQ ID NO: 120386 - RNA, 79 nt, Homo sapiens
aaacagcgccgcgccaggaagaaagcagagaacgggaagggccacaccaccgccagcacaggaagacagaaccccggca

SEQ ID NO: 120387 - RNA, 77 nt, Homo sapiens
ccggcccgccgcgccgaagcagcccgggacgcgcagcgccccgcggccggcaagcaccggcagaccgagcaggagag

SEQ ID NO: 120388 - RNA, 76 nt, Homo sapiens
acgacggcggggacccagcccggagcccagccagagggggccgacacacggcgcacacccacagaggcagaccgaa

SEQ ID NO: 120389 - RNA, 63 nt, Homo sapiens
gcgaggagccgggcgcagaacagaggcgcacaggggagcagccagaccggagagcgggcggca

SEQ ID NO: 120390 - RNA, 62 nt, Homo sapiens
agacacgcgagcaagcacaccgaaagccacagcaagaaggacaggagagacaacggaggcaa

SEQ ID NO: 120391 - RNA, 74 nt, Homo sapiens
caaaaccacgcgcaaaagcagggcagccagggaagagagacaaccagaagacagagcaaggcgccaaaaagaaa

SEQ ID NO: 120392 - RNA, 50 nt, Homo sapiens
gaaccgcaggagccagaggcaaaacacgcagaaccaaccagcaacgccac

SEQ ID NO: 120393 - RNA, 75 nt, Homo sapiens
ccggaccgcgccaagagggccagccggagcccccacgcccccacacacgccaacaccgcgcggccgagcccggca

SEQ ID NO: 120394 - RNA, 66 nt, Homo sapiens
cgcaacacggcgccagacacgaccacgacggcaagcacgagggagccaccaaagaaaaacaggaaa

SEQ ID NO: 120395 - RNA, 76 nt, Homo sapiens
ccggcggcacccgcacccggggacaagcgcgggaacggcgcggaagacaagcagaccggaagaccgacggaagacc

SEQ ID NO: 120396 - RNA, 73 nt, Homo sapiens
ggaagagccacaaaaacgagccggaaggagcagcccgagcgagccggcaaccaggccagagaacagcaagcag

SEQ ID NO: 120397 - RNA, 93 nt, Homo sapiens
ggaagacaccaagacaaggacaagagggcaccagccgggagaagaccgcaggccaaaaaggccaaggaagcacgggaagaacagaaaagagaa

SEQ ID NO: 120398 - RNA, 80 nt, Homo sapiens
cgagagccgggggagcggggccccacacccccccgggggggaggcaggggaccccccgagggcagcccggccccagcagg

SEQ ID NO: 120399 - RNA, 70 nt, Homo sapiens
ccgccgaacccgaaaggagggaacaaggaagggagcacacaaagaggccaaaccccaagcagaagagaaa

SEQ ID NO: 120400 - RNA, 84 nt, Homo sapiens
acaagcaggccggacccacggcgcggagcgcaccaccagagcacaccggcgcaccagcagcagccggccggcggacgagcacac

SEQ ID NO: 120401 - RNA, 79 nt, Homo sapiens
aaaaggcagcaccgaaaacagcccacgcaaacagcaggagcaagaccgggggagagccacagaccccgcaccggaggag

SEQ ID NO: 120402 - RNA, 78 nt, Homo sapiens
caagcgaaaacagaccgcgagcccagagggaagccagagcaggccaccccaggggccagcagccagaggagccccgac

SEQ ID NO: 120403 - RNA, 126 nt, Homo sapiens
ggcccaaacaagcgaagagcgccaaaagcaaaccaaggcaggagaggagccagcccccaccccacaggcagcacaagggggcggcacacggagcccagcaggcggccaggcaaggggagcacacac

SEQ ID NO: 120404 - RNA, 81 nt, Homo sapiens
aacccagaccacaaagaggaaaggacgccaggacacacggcacaagggggggcgcggggcccacgccccaggacaaaaggc

SEQ ID NO: 120405 - RNA, 80 nt, Homo sapiens
agcagcccagcggcagcagaaagagcaaagggagcccgacgggagccgccccggggcaggacggcggcggaacccaaagc

SEQ ID NO: 120406 - RNA, 76 nt, Homo sapiens
cagaagcacgagaacagacccccagagagacaaagaagacggaagaagagaaagacaaggcaacgcagcagcgcgg

SEQ ID NO: 120407 - RNA, 84 nt, Homo sapiens
aacacacacccgcagacaagaacggagagggaagagaccgggagccggcaagagccgacggaaacacgcgcgcaagagcagagc

SEQ ID NO: 120408 - RNA, 78 nt, Homo sapiens
ggaaggaggccgagccgggaccaggcccgggggcggcggccacgccaaggacggcgaaccggacggcccaccacgacg

SEQ ID NO: 120409 - RNA, 66 nt, Homo sapiens
cgacccagccagcgacgaggcaaagcagaagacgcaagggcacgcgaccgacgggaacaagagaac

SEQ ID NO: 120410 - RNA, 33 nt, Homo sapiens
agggccacaggagaaaagaccagaacaggccgc

SEQ ID NO: 120411 - RNA, 59 nt, Homo sapiens
cggagggaagcaagacgcgaagccacccagcgccggagaccgggcgagcaggagcgccc

SEQ ID NO: 120412 - RNA, 81 nt, Homo sapiens
cgggcaggacgccgagcgggacccccgccgccccgggggccggacgacaacacacacgcacaagcgaaaccaagagagaga

SEQ ID NO: 120413 - RNA, 83 nt, Homo sapiens
gaccaacgcagcggacaagacggccgacaacaggggaagaagaaggaaaacaaccacagcccccgaagcccagcaagcagaca

SEQ ID NO: 120414 - RNA, 68 nt, Homo sapiens
caggaacaaaagaaaaaacacaaaccgcggaaggacaagcaggggcgcaagaaggccagcggggggga

SEQ ID NO: 120415 - RNA, 79 nt, Homo sapiens
caccagacgaggaagacccggaaacaggggccacggagccacggccacggccgcaagaacaaagggcaaaggacacacc

SEQ ID NO: 120416 - RNA, 78 nt, Homo sapiens
gcacggcggccagaggcgaggcagggaggacccacccccgggggaaaagaacgagggaggagagaggaaaagagagcg

SEQ ID NO: 120417 - RNA, 77 nt, Homo sapiens
gaacccaaccacaggagcaaaacccacacaccgcaggcaccaagaagaccaacaagcagaagagccaagacaaaaag

SEQ ID NO: 120418 - RNA, 79 nt, Homo sapiens
cagccacgcagacggaaacaaggcaacagaaagagcaacagcagggcaacaggaacaagcgcgagaaggaacaaaccag

SEQ ID NO: 120419 - RNA, 81 nt, Homo sapiens
caaggagcaaagcagcggcgcagcccgggggggagaagggaagcgccaagaagcaacaagcacaggaggagacagcacgca

SEQ ID NO: 120420 - RNA, 53 nt, Homo sapiens
gcagcgcccagcagcgcaggaaagagaaaggagaccacaagaccccgcgccac

SEQ ID NO: 120421 - RNA, 54 nt, Homo sapiens
ccaggaaagcggagcaagggaccacaaaaagaaaacaggacaggagaagaacac

SEQ ID NO: 120422 - RNA, 72 nt, Homo sapiens
cccaaggcagccggaaacgagacgaagggagcagcacgcaaaacggaaggaagagggaagagcaccaaacac

SEQ ID NO: 120423 - RNA, 73 nt, Homo sapiens
ggagccgcacggccggcgcggccgacggcgcgcgcccgcgcgcgcggcggggccagaagagaccaagaggacc

SEQ ID NO: 120424 - RNA, 83 nt, Homo sapiens
aagaaaaacaaacacacgcaaaggagaaaggaaccgacagcaccagcccgaagaagccgggcagaccaggcagcagcggaaag

SEQ ID NO: 120425 - RNA, 75 nt, Homo sapiens
gcagagacgccggacaggaaaaacgcagaaggcggagccccggaacagaagcgcaggagacaccgcgcaagcccg

SEQ ID NO: 120426 - RNA, 77 nt, Homo sapiens
gggagaaggccagcgagccacaccaacaccgccacccagaggggccggccaccccaacccgcagagaaacagaaaac

SEQ ID NO: 120427 - RNA, 73 nt, Homo sapiens
gacagagcaccagcaccagcagagggaacccagaaagccagacacacagagccacaagcgaacccgcggccag

SEQ ID NO: 120428 - RNA, 85 nt, Homo sapiens
ccgcgagagacgagagcacgacacggccgcacgggcccacgccagccaaaacggacaagccaaggcacgagccaaagaaacaaac

SEQ ID NO: 120429 - RNA, 75 nt, Homo sapiens
agaacggagaacgaaaaacccaccagcagccagggcacccccgagaggacaacaggcacggaaggccccgccacc

SEQ ID NO: 120430 - RNA, 42 nt, Homo sapiens
gcccgccacacccgccgccagccaccggggaacacagcaggc

SEQ ID NO: 120431 - RNA, 57 nt, Homo sapiens
gccaaaggggacacccggaggcggcgcagcagcaccgccaacagaaccgcccacaca

SEQ ID NO: 120432 - RNA, 53 nt, Homo sapiens
aaccgaacacacgagccacgaaaacaggcaccagaagaaagaagagaccaagc

SEQ ID NO: 120433 - RNA, 77 nt, Homo sapiens
gaggcagaggacccaccgccagccacccacgccagcagagggggccacggacggggccgagcacaaccacccaccgg

SEQ ID NO: 120434 - RNA, 63 nt, Homo sapiens
gcgaggagccgccgcgcgcccgcgcccccgcgcgacgccagggaaacacaaagaagacaccag

SEQ ID NO: 120435 - RNA, 76 nt, Homo sapiens
caggagccgggaaccgggacgcgagcggggcaacaacacggcaccacacaagcgaagaagccgagaaaccagccac

SEQ ID NO: 120436 - RNA, 73 nt, Homo sapiens
cagcagcccaagcgcaggaccaacaaggacggggaaccaccaaccggcaagaaagcgcacagccgaaaaccac

SEQ ID NO: 120437 - RNA, 68 nt, Homo sapiens
gaaaccgccgggggccgaaacacaagcaaggaacacaaagaagaaagaaaggaacggaaggaagaaaa

SEQ ID NO: 120438 - RNA, 72 nt, Homo sapiens
cgcccgggagacggagcgaaggccggagagcagcaagcggcaagagccacagagaaacaaccaaggcaggga

SEQ ID NO: 120439 - RNA, 68 nt, Homo sapiens
cgagcgagggggggcgcgccggaaaccggagcgcgcagcaggacccacccaggaggcagaaacacgcc

SEQ ID NO: 120440 - RNA, 65 nt, Homo sapiens
cgagaagcgccgccgaacgacaggacgggggcggccggcccccagagagcccagaggaccggcgg

SEQ ID NO: 120441 - RNA, 88 nt, Homo sapiens
cccagaggaaagccaggcccgcggggggaggaacgaggcacacagaggggagcaccagccagaggagcaagccggacacagaggaagg

SEQ ID NO: 120442 - RNA, 78 nt, Homo sapiens
gggcccacgagcccagacaccaacaccggacaagccaacgcgagccgcggcgcggagacacaaacacaaagacggcaa

SEQ ID NO: 120443 - RNA, 85 nt, Homo sapiens
cgccagccaccacgcggcgcacaacgcaggaacaccgcacgcgcggaggagagcagcccgacggccaggaggcgaagagacgagg

SEQ ID NO: 120444 - RNA, 74 nt, Homo sapiens
gcaccacaaaggaacgccacacgcgaaaaacggaccgggaggaaggcaagggccacgagacccgagcacgagga

SEQ ID NO: 120445 - RNA, 56 nt, Homo sapiens
gcgaccgagggacgggagcgaggaggcgggcaggggcacggccaggcagcccgacc

SEQ ID NO: 120446 - RNA, 82 nt, Homo sapiens
ccgccagcagaggcggagcccgcagaccgcagaaggccggagacaccagcaggaccgaaaagacgcggccccaaaggaaaca

SEQ ID NO: 120447 - RNA, 60 nt, Homo sapiens
ggcaccccgggccaggacgccgaggagaaaccgaagcgaaagacggcaccccgggggcac

SEQ ID NO: 120448 - RNA, 73 nt, Homo sapiens
aggcaccgggaagaacaggacgacggggacggagaggccagacaagcaaaacaagcacgacagggaagaccca

SEQ ID NO: 120449 - RNA, 56 nt, Homo sapiens
aagaacaaaggggccaaaccaagagggcagcagaagggcggggaaacagggaccca

SEQ ID NO: 120450 - RNA, 71 nt, Homo sapiens
acgaaggagagagaagaaacgaagagggccagcagaagggaagcaccaaaaaaagaccagaagaaggaccg

SEQ ID NO: 120451 - RNA, 79 nt, Homo sapiens
gacaacacccgaaccaagaccaggggcgggccccggccagggcccaggcagccggggcggaacccccagacagcacgcg

SEQ ID NO: 120452 - RNA, 68 nt, Homo sapiens
cgccggccgcacaccaggacaggacgagggacgcaccgcaaaacccaggaccaaaacgacgggacacg

SEQ ID NO: 120453 - RNA, 81 nt, Homo sapiens
caggagaaccaagcaaacagacagccggaacgaccagcacacaccggcgggagggacggagaggacacacggcaccgcccg

SEQ ID NO: 120454 - RNA, 78 nt, Homo sapiens
caccacagacccgcccgccccgccggcccaccccggggagcaacagggcgggggagccaagggagagggaagaaaaca

SEQ ID NO: 120455 - RNA, 82 nt, Homo sapiens
cggagaccagccaggccaaaggggccaaggccgaaggagagaagcacacccagcagcaaacagggacagccgccgggggggg

SEQ ID NO: 120456 - RNA, 91 nt, Homo sapiens
ggcagggccagcgaccggccggggccggccgggcgggcaggcagaggggaggagacacgaagcgacgcagagccagaagggaggcagggaa

SEQ ID NO: 120457 - RNA, 78 nt, Homo sapiens
caccaagcgggagacacaccacgccaaggaaccgagggcaccggagggaagcgggccaccgcccggcccccaagacgg

SEQ ID NO: 120458 - RNA, 61 nt, Homo sapiens
gcggccgggcacaccgaacccgagcacaccaaggagcgcgcccgccgaaagagaagagcgc

SEQ ID NO: 120459 - RNA, 80 nt, Homo sapiens
cgaacaaggagaaagccacaacagggcggcaacaggggcgagaaaggaaagccaccacaagaaaaggccccaccggggcc

SEQ ID NO: 120460 - RNA, 73 nt, Homo sapiens
aagcagcccacacagagaggaaccaagacccagggaagagcaggaaaccggagaagacacaccacagagcacc

SEQ ID NO: 120461 - RNA, 72 nt, Homo sapiens
aagacccaggcacgggacggacaaggcaacacccgaagaaacaagcacaggggaccaggcgcccccgagggg

SEQ ID NO: 120462 - RNA, 73 nt, Homo sapiens
gccagcgccacccagcgcgcagccgagaccccgcgagcaagaaggggagaccgcccgcggcacgaggaaacca

SEQ ID NO: 120463 - RNA, 77 nt, Homo sapiens
ggagcacagcagcgcaagagagggggcacaaggacggccaagacaagacccagccccaaagccaacaccgcagaaca

SEQ ID NO: 120464 - RNA, 66 nt, Homo sapiens
cgaagaaccaaacacaaggaaaaccgaggcgccccggcgaccgggcacccgggcagcagcacaacc

SEQ ID NO: 120465 - RNA, 56 nt, Homo sapiens
ccagcccaggccgcacggacggggggggagaaagggggacaccaaagcggaaacca

SEQ ID NO: 120466 - RNA, 77 nt, Homo sapiens
cagaaacacaaaacaccgaggggcagaaaaacagggacaaaacccaaacagagagagaaagcaggagcccgagccac

SEQ ID NO: 120467 - RNA, 76 nt, Homo sapiens
gggcgcccgagaaggggacggcgggcgagggaggggaccgccgcggagacgaccagaaaaccccaaagagagggac

SEQ ID NO: 120468 - RNA, 76 nt, Homo sapiens
aaaaggagagacgccagaagcaagggggaggaaacggagagcgcaggcggccggaaaggcaacagcaggaaaccag

SEQ ID NO: 120469 - RNA, 78 nt, Homo sapiens
acaaggccgggagacgcggggaggacgaaaagcccagaagagcccagcccagcaggaggcacgaggaggaaaccagca

SEQ ID NO: 120470 - RNA, 83 nt, Homo sapiens
ccgacccggacgagaaacgcaagaccacagaagaccagcccgccgccagcaggccccacgggcaggagaccccgcgacacagg

SEQ ID NO: 120471 - RNA, 77 nt, Homo sapiens
ccagaaagcaccccacaggggagcaaacacccggaagacagcaaaaggcaggagccaggaaaccgcagcaccaaaac

SEQ ID NO: 120472 - RNA, 65 nt, Homo sapiens
gccagacagcgcagacacaccaccgcaagaagaaaaccggccgaacagcacacgagcgggcgcaa

SEQ ID NO: 120473 - RNA, 74 nt, Homo sapiens
cgcgaaggcgggccgggccagcccccgccgcccgggagggcagcggggaagaagaaaaggaaccgaggcccccc

SEQ ID NO: 120474 - RNA, 55 nt, Homo sapiens
ggagagaggaacccaagacaccaccaggacagcagaccacagcccggcaggccca

SEQ ID NO: 120475 - RNA, 61 nt, Homo sapiens
gccaccaggagcccgagagagaagggccggagccagcgagcacaagacagcgggcaggaca

SEQ ID NO: 120476 - RNA, 81 nt, Homo sapiens
gcgaccaggccgggcaccccgagcgcaaggacagcgcgaggccgcgcagcccagcgcagccaggcccacacacacgcaggg

SEQ ID NO: 120477 - RNA, 78 nt, Homo sapiens
ggcggcggccgggagggaggcggcgccgcggccgcgcggacggacgccgccgccggcgagagagcccagccaagccag

SEQ ID NO: 120478 - RNA, 78 nt, Homo sapiens
caggccaaggaccacaaagcccgcccaagccacggaaaaggccacgcaaacaaaggggaagacaagcagagacagaaa

SEQ ID NO: 120479 - RNA, 82 nt, Homo sapiens
agggccagcaccgcgcccaggcagagccagaccaaccagcccccaccaaggcccagcgacagcagcagacgagaccccgggg

SEQ ID NO: 120480 - RNA, 76 nt, Homo sapiens
gggacccgacgcccgcacgcagcaggaggaccaggacacaccccagaagaagcccacagaaagcgcaaggcgacgc

SEQ ID NO: 120481 - RNA, 68 nt, Homo sapiens
cgcgggggaagcagaggggaaagcgagaaccagaagccacaggccaaccaagcaaagcaaacaaagcc

SEQ ID NO: 120482 - RNA, 70 nt, Homo sapiens
aaaggagaagcaaaggggagacacaaaaagaaaaaaccaaggcaaaacaaaccggcgaggagaagaaagg

SEQ ID NO: 120483 - RNA, 81 nt, Homo sapiens
aagcacacaaagaccccccccacaggggagacagagcggaagaagagcaccaaaaagaacagaaaagaaacccacagccac

SEQ ID NO: 120484 - RNA, 73 nt, Homo sapiens
gaggcaagccagcacaccggccaggacccgaaaagccagcaagcgagaccaacaccaacacgagggcggcgga

SEQ ID NO: 120485 - RNA, 84 nt, Homo sapiens
gggcgagcgaggggaaacccccgaagccccaaagggacgaacagcggggacgccccagcagaccgcccaggagaggaaagcagg

SEQ ID NO: 120486 - RNA, 72 nt, Homo sapiens
gagcgcacgggagcggcggccaacacaaaagagaaagggcgcaaaaagaaagaaaacaaaagccagccaaaa

SEQ ID NO: 120487 - RNA, 71 nt, Homo sapiens
ggacggagagggagaaggaaggccgcggacccccccccccccaccccacaggagaagagacgaaagaagac

SEQ ID NO: 120488 - RNA, 85 nt, Homo sapiens
gacgggaggaagaggaaaggagacggaagaagaagaaaggccggggagcagcaaaaccgcccggcagaggaccggaggagaggag

SEQ ID NO: 120489 - RNA, 80 nt, Homo sapiens
gaggcaccgggacggaccgagaccggaccgagagcggaccgagagcgcgaaacgcacgagaagccgagaaagacaaaaga

SEQ ID NO: 120490 - RNA, 90 nt, Homo sapiens
gcgagaccgcggcgggcgcgagcgaggcgcccagacaccccccccgcccagggaccccgacggagagacaaagaagacggagggggggcc

SEQ ID NO: 120491 - RNA, 74 nt, Homo sapiens
gcccagcccggagagcaggacacagcggacaaaacagggcgacgcaacagcacgaggccccgacaggcggcgca

SEQ ID NO: 120492 - RNA, 68 nt, Homo sapiens
ccgagagggggaaaccgacaccgcgaaaggacccaggccaagccaccaagcgacagaagggcccgaga

SEQ ID NO: 120493 - RNA, 75 nt, Homo sapiens
caggcggggcccgggacaagaacagggacgggcccccccagagaccaagcccagccagcggaaggccgacaagcc

SEQ ID NO: 120494 - RNA, 71 nt, Homo sapiens
gaaaggggcagacaacgacaccaaaggggacaacagaaacgcccgaggccaaaggaccgacgcaggaacga

SEQ ID NO: 120495 - RNA, 76 nt, Homo sapiens
ccgcgggacccccgggccagggcccaaaaaaacagaccaccagccgcgaggacaggacccccagaaacaccgccga

SEQ ID NO: 120496 - RNA, 60 nt, Homo sapiens
cggagcccagggaagcagccgaccagccgcggagccgggggcagagaaggaaggcccgcc

SEQ ID NO: 120497 - RNA, 69 nt, Homo sapiens
acaggcggagcgacggggaggcgcggccaacggggccacaaggaaagcgcaaagccgacgaggagagac

SEQ ID NO: 120498 - RNA, 106 nt, Homo sapiens
gagggcccgggaaggaggcagccgaaaggaggccgacccaagcgcagacccaccgaagagggaaggaaaggagggagcggcccagcgccacgccacacaaaaacag

SEQ ID NO: 120499 - RNA, 79 nt, Homo sapiens
cagcgcccgccgcggcccgggcccccccgccggaaacaggccagaagcggacccagaagaggggagcagcaaggaggaa

SEQ ID NO: 120500 - RNA, 81 nt, Homo sapiens
acagggccaggcggcacaccacagcgacaccaagcacggccagaagagagagggagcagacaagccgagaccaccaggagc

SEQ ID NO: 120501 - RNA, 64 nt, Homo sapiens
gcaggacggcgaggaccaaccggggcccaaagggaccaaaagagccccagaaagagcgagaaga

SEQ ID NO: 120502 - RNA, 70 nt, Homo sapiens
acaacggaaaccgggaagacgcaaaagcagagaaagcgaaggaagaaaagaaggaccgcaaggaaggacc

SEQ ID NO: 120503 - RNA, 61 nt, Homo sapiens
ggaaaccaagcacccaaaaggccacccaaacaacgcggaacaggagagcggcccaaaaaga

SEQ ID NO: 120504 - RNA, 81 nt, Homo sapiens
cgcgggcgccgggccaggacgggcgccgaccccgacagaacgggccccgcacccgcggccccggggcagcggaggccggga

SEQ ID NO: 120505 - RNA, 97 nt, Homo sapiens
caaaggggaaaaacgaacagagacgaggcggaacagagaaaagaaaggaaggaagggaacacggacgacgagacacgaccaacacaggcgaccaaac

SEQ ID NO: 120506 - RNA, 77 nt, Homo sapiens
acggaacaggccggcggccccaccccccaggcccgcggcaggcggggccaggcccgagccagaaggaggcccacaga

SEQ ID NO: 120507 - RNA, 71 nt, Homo sapiens
aacagacacagccagccagccacacggcagaaaaagagagaggaagacgaggaagcagaagaacaccaagc

SEQ ID NO: 120508 - RNA, 57 nt, Homo sapiens
ccagggcaaagcccaccagcaggcaagcccacaggccaaggccgcaggggaggaggc

SEQ ID NO: 120509 - RNA, 78 nt, Homo sapiens
gagcgggacccccgccgccccgggggccggacggagaacaccggacagacccagaagagcggggcagccgaccaaccc

SEQ ID NO: 120510 - RNA, 74 nt, Homo sapiens
acccacccaggaacccgccaccagaagccggcccagcagcaagaacccacacccccacaggcgaggcccagcca

SEQ ID NO: 120511 - RNA, 72 nt, Homo sapiens
caagagagccgaggagaacccagagaagaagagaggaagaccgggacacacagaagacaagacaagcgcaaa

SEQ ID NO: 120512 - RNA, 53 nt, Homo sapiens
cagccagacccaacggacacgcagaggggggaagaaaagaccgagaggaacca

SEQ ID NO: 120513 - RNA, 62 nt, Homo sapiens
cgagacaaaacgaaaggccccccaccccacagaaaaaaggacaaccagggaagcagaaggca

SEQ ID NO: 120514 - RNA, 76 nt, Homo sapiens
gccggaccgcaggagggagaccacagcaagacccaggaccccggaagccagaaagcacaaagacaagcaggcgcgg

SEQ ID NO: 120515 - RNA, 84 nt, Homo sapiens
cgcccagcgagacccggggccccagaggccgcggacaccgaccggagggaaagggagcagcaccggccacacccacagcacgac

SEQ ID NO: 120516 - RNA, 84 nt, Homo sapiens
ccggaagagcgccccaggagaaacaaggagcaagaggcagacagaccgagacgggcaaccaacaagaaacagacacaccgcaca

SEQ ID NO: 120517 - RNA, 53 nt, Homo sapiens
gcggggaggaccccagaccacgaggaacgcaaggaagaaaagggaacgccacc

SEQ ID NO: 120518 - RNA, 64 nt, Homo sapiens
ccagaagggaccgccaggccccggacacccaggaaaccccagacgagcaagaagacaaacaagg

SEQ ID NO: 120519 - RNA, 78 nt, Homo sapiens
cgcgcccggaccccgccaccaaggggagcgccacgaagggcaccaacccgcggcaccagggaacgccagccgggacga

SEQ ID NO: 120520 - RNA, 45 nt, Homo sapiens
ccacccacaggccgcaaaggcaaagagccgagccaacaaacgagc

SEQ ID NO: 120521 - RNA, 40 nt, Homo sapiens
gggccgaggagacaggagaaggaaagagccgcagacgcac

SEQ ID NO: 120522 - RNA, 72 nt, Homo sapiens
gccggaccccagcgggggaagaaggacaagaggccagggcaggggcgcaaagggaaaaacagcagacgaaga

SEQ ID NO: 120523 - RNA, 103 nt, Homo sapiens
caggaacaacgcggaccacacccgggagagaggggggccaccaggaaagaccacagcaagaccacgcccccagccgggggaccaggccgaacgacccggacac

SEQ ID NO: 120524 - RNA, 118 nt, Homo sapiens
agggaacaggggagaaggcgggccagagccaaaccacacgaacacaggagccacgggaaagagggccgacccgggacggaggggaaaaggggcccgggcagcaagaagggggaacccc

SEQ ID NO: 120525 - RNA, 73 nt, Homo sapiens
ggcgaggacgagaaaggaagagaccccaagaggagcaagaggggggggcccccccgaagaaaggaaccgggga

SEQ ID NO: 120526 - RNA, 36 nt, Homo sapiens
acgaaaagcacggaaaggaccaaaggggcacgaaca

SEQ ID NO: 120527 - RNA, 70 nt, Homo sapiens
ccgcggcccggcggaaaggacagcagacaccgaaaacgagaaacgaaagagacacgggggcacaaccgag

SEQ ID NO: 120528 - RNA, 75 nt, Homo sapiens
aagcgcgacccgacaaaaccaggcaagcgaggcagaaaaaccagcgcagcgcgccaaccgccaagaagacagcag

SEQ ID NO: 120529 - RNA, 89 nt, Homo sapiens
cacaccgcgcccccgccgcgcggcccagcaccaggagcgggccggcccccgaagccgccgcgccccggaggagaccggcacgcggggcc

SEQ ID NO: 120530 - RNA, 82 nt, Homo sapiens
caaggccacaagggaacgggcggccccggagagagagccgcgcacgcacagacaaggaccgccaggaagggcagcgaagaag

SEQ ID NO: 120531 - RNA, 69 nt, Homo sapiens
ggggaaggaagccggccagggaaccgcaggggaggcaccgcccccgggaccagccaccaaacccacggc

SEQ ID NO: 120532 - RNA, 79 nt, Homo sapiens
gaaccgccgcccagggaggacggcgacaaaaccagacccccgacgccgggcagggcgaaggggccggcaccaacgcgaa

SEQ ID NO: 120533 - RNA, 51 nt, Homo sapiens
gcacccgcacccggggacaagcgcgggaacggcgcggaagaggacccaaga

SEQ ID NO: 120534 - RNA, 85 nt, Homo sapiens
gccaacgggccaggaggaccgggagaggcgcgggaggcgaggaggcggcggcggagacggaccccagccacagcggaggacgagg

SEQ ID NO: 120535 - RNA, 64 nt, Homo sapiens
cgaaagaacaccgaaccagaacccaaggaaagaccggaaagaaggaagaaaagacacagcaaga

SEQ ID NO: 120536 - RNA, 67 nt, Homo sapiens
ggagcgcacgcaagggcgcgcccggcacacgaaaccacgacccacagaaaggccgggggaaaaaaag

SEQ ID NO: 120537 - RNA, 54 nt, Homo sapiens
acccacaacagaaaccccagggggggagagaacggccaagggagccgccaccga

SEQ ID NO: 120538 - RNA, 79 nt, Homo sapiens
gccacgaaccacggcacgacagcgggaaaaggggcacaggagccaagagacgaacaggagaaggaacaaaggaaacgga

SEQ ID NO: 120539 - RNA, 74 nt, Homo sapiens
ggaaaacacgcccaagagaggggcaagcaggacccagagagggaccagggccaaagaagagccggggggcaggc

SEQ ID NO: 120540 - RNA, 76 nt, Homo sapiens
cggacggggagcgaacgggacagcccacacccggcgcggagggcagggagcacgcgggcaggcagcccagcaaacc

SEQ ID NO: 120541 - RNA, 87 nt, Homo sapiens
agccggcgaggggaagaccaagacaggccggaacccgaaagggaagcaggaagagcgggcagcagggcggaagcggcggaggaggcg

SEQ ID NO: 120542 - RNA, 87 nt, Homo sapiens
ggcggagcaggagcggcggcgacggccacaggggcggcgacggcgcaggcgaagcgaaacaggccccgggaccaaggacacgcagac

SEQ ID NO: 120543 - RNA, 75 nt, Homo sapiens
gcgcgagccgcagaacaccgggcccgcagccgagagggacaaggaccacccaagcgggcgccagggccagcacac

SEQ ID NO: 120544 - RNA, 83 nt, Homo sapiens
ccccgaccgacgagccccaccccccaacggacgcccgcccaccgcccgaacccgagacggcacgccagccgggccacggagca

SEQ ID NO: 120545 - RNA, 76 nt, Homo sapiens
acaggcggcgcgcgcggcgcgggacgcgcgcgggcacccacggagccccggggcgagagcacaccccaaagcccac

SEQ ID NO: 120546 - RNA, 75 nt, Homo sapiens
agaggacagcggcgagaagaccacacccacgcagcgaagggaaaaaagacgacaagaaggagcgaacgagaagaa

SEQ ID NO: 120547 - RNA, 72 nt, Homo sapiens
gagccaaaagaaaggcgccaggaacaagcggaaaggaagccgaagacagaagaggagaacaccacgaccggg

SEQ ID NO: 120548 - RNA, 78 nt, Homo sapiens
gcggccgcggccgggggggcccagcacgcaagcgggccacagacagcccgcagcgcgcacaagacccagaagggaggc

SEQ ID NO: 120549 - RNA, 69 nt, Homo sapiens
gcaccagaaccaagagccaagggccaggacggagcgagaacccgagcagcgccagagcaacacaccgcg

SEQ ID NO: 120550 - RNA, 76 nt, Homo sapiens
cccgcaagcagccccaggagaagacgcccgcagaacaagaaggagaggggccagaaaacggaaccggaagcgggaa

SEQ ID NO: 120551 - RNA, 56 nt, Homo sapiens
ccaacaccaggaagcccagaagggccgaagcacgaggacaaacgggaggagcggac

SEQ ID NO: 120552 - RNA, 86 nt, Homo sapiens
cggagaaccagaccccagagcccaggacgcgcaagcccaagacagcggcacccgaaccggacagcggcgaaggagcgcccagggca

SEQ ID NO: 120553 - RNA, 77 nt, Homo sapiens
cccgcccccagcagcgcggaggccgccgcagcaagaaggaaagaggcagaaggccagaagggcgaagaagaaggaaa

SEQ ID NO: 120554 - RNA, 66 nt, Homo sapiens
aagccacgggaggcaaaaagggccccaggggaagcggagaggagcaaaaacaggcgaagccggcca

SEQ ID NO: 120555 - RNA, 79 nt, Homo sapiens
cggacagacacgcgccggagagaaacagcgacaggacacaggagccaggcgagaagggccgacgagagaaagacagacg

SEQ ID NO: 120556 - RNA, 75 nt, Homo sapiens
gacgcggccaacggagggaaacgggcagagggaccagggcacaagaaaggggacagacagacaacaacggagagc

SEQ ID NO: 120557 - RNA, 42 nt, Homo sapiens
ccagggcggaggaccccaacggaggaggaagccaagaacggg

SEQ ID NO: 120558 - RNA, 59 nt, Homo sapiens
aaacgcaccggaaaggccaccaggacacagagaaccagcacgggaagagaaggaaggcg

SEQ ID NO: 120559 - RNA, 76 nt, Homo sapiens
gggacacaccgcgggacgaaaacacagggcccaaggcacacccaggcccaccgagccacaccacaagcgccggcac

SEQ ID NO: 120560 - RNA, 72 nt, Homo sapiens
aagcgacagaccgcacacggcagccaaacacagccaccccaggccgcaaaaggccgcgacagccaccaaagc

SEQ ID NO: 120561 - RNA, 48 nt, Homo sapiens
gggaccaggccgacgcagacagagcgggaaggacagcagaccacagcc

SEQ ID NO: 120562 - RNA, 81 nt, Homo sapiens
cggaggagccccggcggagaccacgcaaggccacaggccaggcccgagcaccgcaaggccagagcaaagcggaagggacgc

SEQ ID NO: 120563 - RNA, 65 nt, Homo sapiens
agacaccaaaaagcaaacggaccagaccgaccaccaaaagccaccccaggccaccagcaagacca

SEQ ID NO: 120564 - RNA, 82 nt, Homo sapiens
gacagacggagccgccacccagagcgcacggcgacgccccaggggaaaacccccgggaccaggcgaaggggagcaagggaga

SEQ ID NO: 120565 - RNA, 78 nt, Homo sapiens
gacaaccacaagggaggagcacccaagcacggggggcaggaacagcacgggacagggcagcaagcgccagaaccagcc

SEQ ID NO: 120566 - RNA, 69 nt, Homo sapiens
acagaagcacagggagcaacacgcacacgaaacccacgacccaaacagaagcgaaggggacagggggag

SEQ ID NO: 120567 - RNA, 84 nt, Homo sapiens
ggagcaaaaccaacgccggccggagcagcagcccgagacaaagaaacagccggaaaagcacgagcacaagacgaaaacgacacg

SEQ ID NO: 120568 - RNA, 59 nt, Homo sapiens
ggggcgaggacccccgagccagggcggaccacagacaagccggcaccaaagagacaccc

SEQ ID NO: 120569 - RNA, 100 nt, Homo sapiens
ccggaacgcgcgccgcacagacgcggagacaaacagcgcggaaaaggaacagaagaggaaccgaaacccaagaaaaaccacccagcaaagaagcaagcag

SEQ ID NO: 120570 - RNA, 62 nt, Homo sapiens
gaacccaaggaacaagacgcgggaacccaccaaagaagggacagcagcagaaaaagcaaagg

SEQ ID NO: 120571 - RNA, 63 nt, Homo sapiens
cacagacaggacaagaaaccgagccacgaccgccgagaggccagaacagccacaggaagaggg

SEQ ID NO: 120572 - RNA, 42 nt, Homo sapiens
cccggagaagcagaggaaaagcaaagccgcaggaaaccagag

SEQ ID NO: 120573 - RNA, 86 nt, Homo sapiens
gggaaagccagacccgcccaacagaaaaagagaggagggagaacacagaaacccgccccgggagaccgaaagcacgggaaaacccg

SEQ ID NO: 120574 - RNA, 75 nt, Homo sapiens
acaaggcaaacgggcccgcgccgggcaacgcggcgcaaccccacacacaaccaaaggaaaaaaggacgggcgcgc

SEQ ID NO: 120575 - RNA, 74 nt, Homo sapiens
ggggacacgccagccagcccaacccagccggacacaagagggcaagaaaggcgcgacgggccgaaaagggacga

SEQ ID NO: 120576 - RNA, 58 nt, Homo sapiens
ccaaagcccgggcgcggaagaagccaaggcaaaccgacaccagcgacacaagcgcgag

SEQ ID NO: 120577 - RNA, 79 nt, Homo sapiens
aggggcggaggacggcaaggagggaagacaacaaaaacaacgcaggacagcaaaggaccgcaaacacccagagagaagg

SEQ ID NO: 120578 - RNA, 51 nt, Homo sapiens
agacccggcaccaacagaacgcggcagaacggaggcaggcagcacgagaca

SEQ ID NO: 120579 - RNA, 76 nt, Homo sapiens
cgacacagccacccccagacaaaaccaccaaagacaacagccaccggaggacagaccacaccacccggcaagaacg

SEQ ID NO: 120580 - RNA, 61 nt, Homo sapiens
agaggccacggaggccagccccaacacccggaacccagcagaagccagccgccacgccgag

SEQ ID NO: 120581 - RNA, 76 nt, Homo sapiens
ggcggcggcccgcaccccgccccccgaccacccagcggccggggggggcacagagccccggaagacagcccccagc

SEQ ID NO: 120582 - RNA, 86 nt, Homo sapiens
gagccaaacagccaaacacagggccggaagcgcccaggacccccaggaaccaccaagaaaagccccaggggggccagacaggaaaa

SEQ ID NO: 120583 - RNA, 71 nt, Homo sapiens
cagccaacagaaaccccacaggccggaaggggggcgacgcggaaggcacaacacggcaacacagaaacaag

SEQ ID NO: 120584 - RNA, 100 nt, Homo sapiens
gacacgccgcggcgcagaggacgacaccaacaagaagaaggcgacagaggggccagagaaaaccggcaggaagcagagccccgccgcccgaaaacaagac

SEQ ID NO: 120585 - RNA, 68 nt, Homo sapiens
cagcaagaacagagagagaggggacagacgagagaacgagaccgagacaggggcccggcaccgcgccc

SEQ ID NO: 120586 - RNA, 72 nt, Homo sapiens
ggaaaaaaccgagaacccgaccccgcggagacagcgagacccgccaggagcaaaggcaaggccccagcccaa

SEQ ID NO: 120587 - RNA, 81 nt, Homo sapiens
gacacagaacagaagcgaagaagggacgaaaggcaagccaaagggaccgggacaggggaagaaaagaagaagaagagagaa

SEQ ID NO: 120588 - RNA, 81 nt, Homo sapiens
ggcggccacggcaccggcggggggcacgaggaaaggccggggggggcacagagccccggaagacagcccccagcgaccaga

SEQ ID NO: 120589 - RNA, 72 nt, Homo sapiens
gaccgaccggagggcggagagacaaagcgaaagaagccagaggacaacagagcaaccagccgggcaccagga

SEQ ID NO: 120590 - RNA, 73 nt, Homo sapiens
ggcggagcccgcacgcggcgggcaggccgcagaaggaacggcagccacacagcccggcaacaccaggaaaaaa

SEQ ID NO: 120591 - RNA, 113 nt, Homo sapiens
aaaaaggacagaccccaaacgcaagaaacccggcaaaccgacgcgaagacccgagagagacacagaaccagggggggcgaccaagggaacgagccaagaaccaaacagccgcg

SEQ ID NO: 120592 - RNA, 71 nt, Homo sapiens
aagacccggaccccaggcaaaggaccaggaaaacagcccgccaagaccggcccacgggcacgccaaaacca

SEQ ID NO: 120593 - RNA, 68 nt, Homo sapiens
aaaaaaaccgcacagagacgcaaacaaagacccggacccgaaagaagacgagccaacggaggcagccg

SEQ ID NO: 120594 - RNA, 82 nt, Homo sapiens
cggggacggcgaggccccagaccacacgacagaagagggacaagccaagaaacccggaacgaggaaaacacggaggacaggc

SEQ ID NO: 120595 - RNA, 59 nt, Homo sapiens
gccccagaaagccccagacggaaagagcacgcgaggaagaaaacgccagagaagcagag

SEQ ID NO: 120596 - RNA, 81 nt, Homo sapiens
ggggagacgccggacaaccgccccgagggaagggaggcggcggccccaaaagaagcccggggcggcgacggagcacgaccc

SEQ ID NO: 120597 - RNA, 80 nt, Homo sapiens
ggaagagcgcagcggggacaagaccacagcaccgggaagccagcagcggcagagggcggggggcaccgccagacgcgaac

SEQ ID NO: 120598 - RNA, 83 nt, Homo sapiens
aaaaaagccgggagacccaggccgagccgagaggcaagacaacacacccagaaggagcggcagcccacaagcaggaagaccag

SEQ ID NO: 120599 - RNA, 70 nt, Homo sapiens
ggcccggcgccgcccccggcaaccccgggaccgagcagcgcaccggaggcagcgacagaaaggcggcgag

SEQ ID NO: 120600 - RNA, 52 nt, Homo sapiens
aggcggggaccagaggaaccccaggcacacgacggacacagacggaagggag

SEQ ID NO: 120601 - RNA, 70 nt, Homo sapiens
agaaaggaggacaacgggacccagaagaggcacacagagaaaaaaagggaacaaaacacagcaagcagac

SEQ ID NO: 120602 - RNA, 75 nt, Homo sapiens
cccacaggagcgcccgcggaggagcgcccggagcacaggggaggggaagcaacagggcggggggaaccgccacca

SEQ ID NO: 120603 - RNA, 74 nt, Homo sapiens
gggaaccccccacaacagcagaggccacacagggcaagcagaacaacgaagagaggaaagaagcggaaaggagg

SEQ ID NO: 120604 - RNA, 63 nt, Homo sapiens
cccaggccaagcagccaccagcagcccccagagcgggaccacagaccagaagcagcaaggcag

SEQ ID NO: 120605 - RNA, 85 nt, Homo sapiens
cccggcgccgccaggccgacgaaaagcccaaggcccagcccccggacacgggcggccggaaggcgaggccccgccagcccgccgg

SEQ ID NO: 120606 - RNA, 85 nt, Homo sapiens
acccccgccccccagccgaccggaagagaccggggccccccagccccgccaacccagaaagaccacacagggaaacgaccaggga

SEQ ID NO: 120607 - RNA, 78 nt, Homo sapiens
gccacgcgccaggcagacgggccagggaagacaacaccagggggaggccaggggaacaccgaagaagcaggcacaccc

SEQ ID NO: 120608 - RNA, 66 nt, Homo sapiens
accggacagcagaggaaacgagggacaacacagacccaccagcagagagggcgaaagagagagagg

SEQ ID NO: 120609 - RNA, 68 nt, Homo sapiens
gccacacaagccccagccaaaaccagaacaagagagaggacgggaaagccaagacaacccaaacacaa

SEQ ID NO: 120610 - RNA, 85 nt, Homo sapiens
cgggaggcccgagaaggaggggagagccacacaccccgaccacgcggccgagagcacccaggccacagaggaggaaagagagggg

SEQ ID NO: 120611 - RNA, 77 nt, Homo sapiens
aaaccgcgcgccaagacagggaccaggggggcggcagcgcggacacccagccccaggggggcgagcccggcccggcc

SEQ ID NO: 120612 - RNA, 77 nt, Homo sapiens
cgcaggaccggggaaccgccaaagcccgggcgcggaagaagccaagcccacgggcaaaagaagcagccgaaggccca

SEQ ID NO: 120613 - RNA, 64 nt, Homo sapiens
acggagagaaaggaggaaagggccgccacagaaaccagggaggcagggcggccaagacggagcc

SEQ ID NO: 120614 - RNA, 73 nt, Homo sapiens
gggcccgaggccccgaccaggagagaggagagaaagaccccaacccagcagggcagaccaacaggcaaaggaa

SEQ ID NO: 120615 - RNA, 79 nt, Homo sapiens
acgcacggaggcggcccgcccggaaggcaagcgcagcaacaacagagagcacggggcagggaggcgcccgcacagcgag

SEQ ID NO: 120616 - RNA, 71 nt, Homo sapiens
gaaaccagacagccagaggaaagaagcaaagggaaccagcggagacccaaacaaggccaccaggaccgggg

SEQ ID NO: 120617 - RNA, 58 nt, Homo sapiens
ggccaggcggccccgagcggaacggagaaagcgaggacggagccgcgggccagcacca

SEQ ID NO: 120618 - RNA, 76 nt, Homo sapiens
cggaaaccaccaggcgaccgggccagggcagaaaggcagaaggagggcagcccacagagcccgggaagcgcagagg

SEQ ID NO: 120619 - RNA, 76 nt, Homo sapiens
gacgacaaagagcgagaaagaaccacccgccaagcccagcagagggacgccggaaaacagcggaagaggcgacccg

SEQ ID NO: 120620 - RNA, 84 nt, Homo sapiens
cccccagggccaggcgccgccagaacggacccgcggggcccagccccaccagggcccagaagaccggcaggcaccagggcaaac

SEQ ID NO: 120621 - RNA, 74 nt, Homo sapiens
cagcccaaacaggagcggagcagccaaagagaagacaaacagaccccagaaagaagaagaggaaagcccgacaa

SEQ ID NO: 120622 - RNA, 85 nt, Homo sapiens
cagagcgccagggcccgaagagggaagacacgcggaaacagaggccaacacaaaggaggagacagaaacgccgaagcggcgggaa

SEQ ID NO: 120623 - RNA, 80 nt, Homo sapiens
gagcagaaacacaagacccgggaaaaaacgagaaacagacaagcacgccgagacagcgcggagggacgagagcaggacca

SEQ ID NO: 120624 - RNA, 74 nt, Homo sapiens
cagcccaacccccgcacgcggcacaaggaccccagccagcagagccgaagaggaaaagaggagaccccaaggga

SEQ ID NO: 120625 - RNA, 85 nt, Homo sapiens
aaacaagaggacacgggaacagcacggccacagagaaaaccaacccgagccaaagaacacacaaaaagggaagaacgcaaacaac

SEQ ID NO: 120626 - RNA, 79 nt, Homo sapiens
cccgcaccgcccgggcccccacgccggcgggcgcagagcggaaagcaggcgacaaaggggaagaaagggaagaaggaca

SEQ ID NO: 120627 - RNA, 60 nt, Homo sapiens
acaacgggacccagaagaggcacgagaagagaagcccagagcaaaacaccccaaaccaga

SEQ ID NO: 120628 - RNA, 78 nt, Homo sapiens
cgcccgccgcaaagagcccccccgcggaaagcggaaaccccccaggcaagaggcgcaggaccgggaagaccaacaaac

SEQ ID NO: 120629 - RNA, 78 nt, Homo sapiens
cccgccgcccccggcgggcccggcggcccacaccagcacccgagggagagcgcaccaccccacgcgccaggcgagacc

SEQ ID NO: 120630 - RNA, 80 nt, Homo sapiens
ggacaaaggaaggagagggaaaagcacacaggaagcagagcccagagaaacagagggcaaagaggaccaaagaacaaaca

SEQ ID NO: 120631 - RNA, 66 nt, Homo sapiens
gccccggccaggggaaccaccaaaagcagaaggaacaagcaaaaacggacgaacaacaacacacgg

SEQ ID NO: 120632 - RNA, 81 nt, Homo sapiens
cagacgggacagcccagaaaccgccaaagacggaaccgccacagcaccaagcacgcagcacgggggcaggggccgacccag

SEQ ID NO: 120633 - RNA, 80 nt, Homo sapiens
cggcagggcaccgcgcgaagcggccaaagccgcccagacggccaccggcgggaggaacaaaagggagggccagggagagg

SEQ ID NO: 120634 - RNA, 74 nt, Homo sapiens
acggcgccaacgcccaccgaacggccagagaagggcccaagcagagacaaagagggccgagacaagaaacggaa

SEQ ID NO: 120635 - RNA, 37 nt, Homo sapiens
agagagcccagcccagacgcgacggcacaggcgagga

SEQ ID NO: 120636 - RNA, 78 nt, Homo sapiens
ggccgcaaccggcagccccacccaccggcccacccacaagcgcacaggaccggggcccggaccgagcaaccgcgaccc

SEQ ID NO: 120637 - RNA, 45 nt, Homo sapiens
cacggcgccccgcaagacgacacgaggaggcggggaggaggaagg

SEQ ID NO: 120638 - RNA, 73 nt, Homo sapiens
agcggcgagggaaaagcgaggcaaggcaggcggagggaaggggaacaggaccggccacagacagccccccagg

SEQ ID NO: 120639 - RNA, 82 nt, Homo sapiens
cgccccgcccggggccccagaggaccagcccggcgcccaccccaacgccccccccgcaccccacagaccccgcccacagcgg

SEQ ID NO: 120640 - RNA, 76 nt, Homo sapiens
gggagacacaagggcacgaaggaaacgccaagggaccacggaacagcgcaagaaaacaagcagaaaacaagaagac

SEQ ID NO: 120641 - RNA, 69 nt, Homo sapiens
acagaggcagagccaagccggcgccgaggcaacacgggggggacacccaggaagggcgcgcaggaacaa

SEQ ID NO: 120642 - RNA, 53 nt, Homo sapiens
caccccccccgccccaaagcgcgacagagcaaaccgccacccgggacaaccca

SEQ ID NO: 120643 - RNA, 72 nt, Homo sapiens
gcgccgcgcgccccggggggccaaggaaaaggaacagagagagcagaaccgaaacggggaaagaccgaagaa

SEQ ID NO: 120644 - RNA, 82 nt, Homo sapiens
caagcgacagcgcagaggggcaggagccgggagccaccgcgaagccacgaggcggccccagcgcgggcgacaggccgacacc

SEQ ID NO: 120645 - RNA, 85 nt, Homo sapiens
agaaggaggagaggcgccaggaggagcagccaacaaagaggaacagccaggaagacgcgcaccgagaccaaggaaggcaggaccg

SEQ ID NO: 120646 - RNA, 87 nt, Homo sapiens
aggcgaccgcggaccggcgccccggcgcgaagaggcggaccggacggccgagggcggagaacggaaaagcaccaggaagcagagagg

SEQ ID NO: 120647 - RNA, 81 nt, Homo sapiens
cggggagcgcagcagagggagcgccgaaggacaagaacagcgccgcaccagcagggggagcgggaagacccggacaacgga

SEQ ID NO: 120648 - RNA, 76 nt, Homo sapiens
agacgaaggggccccagagccaaggaggaaggggccggggcggagaacggaaaagcaccaggaagcagagaggacc

SEQ ID NO: 120649 - RNA, 83 nt, Homo sapiens
aaggagaaggcccaggccaagggggaccccgaaaggggccaccaccgcaggagggcggaagaaaaaggcacaaacccagcaca

SEQ ID NO: 120650 - RNA, 81 nt, Homo sapiens
ccgaaggcgggaagggaagcggccaaggcacggaggccgcgggcgaccagacgaggggagacggacgggggagagaggcca

SEQ ID NO: 120651 - RNA, 68 nt, Homo sapiens
cgggcaggagccgaaagggaagcacacggaccagcagaacagaaacaaggacagggggagaggcaagg

SEQ ID NO: 120652 - RNA, 57 nt, Homo sapiens
agcgggaaaaacaaagccagagcacaaaagccaggcacggaagaacacgggaaagca

SEQ ID NO: 120653 - RNA, 74 nt, Homo sapiens
ggccaaggcaaacaggccacagcgaccagccgccagcaccaagaaagccaaaggcggcccggcagcaaggcgag

SEQ ID NO: 120654 - RNA, 76 nt, Homo sapiens
ccgcccgagcacgccgcgcagcccggccgccggcccccaacagcgccgcgcgccgccgcaacaggggcaagagagg

SEQ ID NO: 120655 - RNA, 63 nt, Homo sapiens
aagaggggcagaaaaacaacggccgaagaaagcaaggggacgcaggacggaaacagcaggggg

SEQ ID NO: 120656 - RNA, 91 nt, Homo sapiens
ggacccggggcggggagggcaggagcacaggaggagaagcagccccaaaagacgaaggaaccccaaaagaagagagcccagcagaaggaga

SEQ ID NO: 120657 - RNA, 90 nt, Homo sapiens
ggcgagagcagcaaggaaaaccaggaccagaggccagcccacagcagaaggaaccgagcggaaggaagcaagaaaccaaggacaaccagg

SEQ ID NO: 120658 - RNA, 67 nt, Homo sapiens
aggccacacaagcaaaaacagaccgcaaaagacgaacgaagacaaagcaaaaccacaggagaaacag

SEQ ID NO: 120659 - RNA, 64 nt, Homo sapiens
agccacagcgcccagagaggcggccgcgcgccgggccccgaagagaggcgaggcaacacccaag

SEQ ID NO: 120660 - RNA, 83 nt, Homo sapiens
gcgccagcacaccccagcacgacccgagagcacaggcacacaggaccccgcgagccagcggcgacgggaacaagccccaaaga

SEQ ID NO: 120661 - RNA, 66 nt, Homo sapiens
gagacaaggaccgaaacagaaacggaacaccaagaaaaaaacagaggcgggaaacacggcaaaccc

SEQ ID NO: 120662 - RNA, 74 nt, Homo sapiens
caagcaaacagaagcgcggccaaggaggaagccagcccgagcaggcccaggggaggaggggcaaccacagaccc

SEQ ID NO: 120663 - RNA, 76 nt, Homo sapiens
gaaggaccaagaaccaggacgaaaaggacggcgccgggggccgaaaacgcccagccaaggggcaacacggcaagcc

SEQ ID NO: 120664 - RNA, 83 nt, Homo sapiens
acaggagcacggacccaccacagggccccgccagccccagccccggagaggagcaggaaggcccgccgaaggagaagggcagg

SEQ ID NO: 120665 - RNA, 69 nt, Homo sapiens
ccagcccagaacgcagggcggaaccagagaagagcgccgcgcacagaaaggaacaggcacccgaggaca

SEQ ID NO: 120666 - RNA, 75 nt, Homo sapiens
ggccacccagcacgcgcagccggggccagccccgggcagccccgcccggacaggagcggggagcgaccgagcgag

SEQ ID NO: 120667 - RNA, 79 nt, Homo sapiens
caacaagaggacccaggagaaacgccccaaaagccgccggccgacgagacacgccggaggaaacagacgcacgggaaac

SEQ ID NO: 120668 - RNA, 70 nt, Homo sapiens
cggagaccagcaagacacacggaaacgaaaagagacagcagggcaaaacgggccacacacagggcaaaaa

SEQ ID NO: 120669 - RNA, 85 nt, Homo sapiens
cgggccacccgagggcggacacccgcgcagccgaagccagcagaaaacgagcccggcacagagaacggcagacgacccccgccaa

SEQ ID NO: 120670 - RNA, 64 nt, Homo sapiens
ggccgagccaacaaaagaaagaccgagaccacaggggcaacccaaggacgagaccagcgcaaca

SEQ ID NO: 120671 - RNA, 71 nt, Homo sapiens
gaaaaggcccgaagccaaaaagaggaccccagcccggcacaaacaggaaggacagccagcccagccccaga

SEQ ID NO: 120672 - RNA, 80 nt, Homo sapiens
agagaccccaacccgacacagaaccgccccaaggaggaaggcaacgaggaagcgacccaccaaccggcaaagaacgcccc

SEQ ID NO: 120673 - RNA, 81 nt, Homo sapiens
gagaaccggcgccagaaggccccaccggagcggccaagccagagagagccaagaagacgccaagacagaccagcgagaaca

SEQ ID NO: 120674 - RNA, 63 nt, Homo sapiens
aaaaagagggagccagcaagacagcaaacagggaaaacacaagggaaggaccccccacagcgg

SEQ ID NO: 120675 - RNA, 90 nt, Homo sapiens
acagacgaccggcacacagcagagaggagggggaagacagagaagaccacacaaccgaaggggccgggcaggacggcccggggcagcaag

SEQ ID NO: 120676 - RNA, 53 nt, Homo sapiens
cccccccaagacccacgagggacgaagcggggaacgcaccgaacacaaggagg

SEQ ID NO: 120677 - RNA, 74 nt, Homo sapiens
aagcaagcccagaagggggagaaggaaccgacagaaaagccaaacgagccgggcgagaaagccccccacccggc

SEQ ID NO: 120678 - RNA, 78 nt, Homo sapiens
caaagcgaacgaagagcaccgggagcggcgaagaggcaccggaggaggcacaaccaagggaacaggagagagacaggc

SEQ ID NO: 120679 - RNA, 71 nt, Homo sapiens
cacagaggggaaaaaggaagcccagaagaacggaagagccgagggaacggcaagaaacaggacagagaaaa

SEQ ID NO: 120680 - RNA, 77 nt, Homo sapiens
cgcggcgcggccgagagccgcggcccggcggaaaggacagcaggacggcggacgaacccaaccccagagacagaccc

SEQ ID NO: 120681 - RNA, 74 nt, Homo sapiens
gaacgacaggacgggggcggccggcccccagcgccaacccaaacgagcgagacacacagaaaggaaaagggaac

SEQ ID NO: 120682 - RNA, 42 nt, Homo sapiens
gaccaaaaagcgccccgcccccagggccaagggaacacaacc

SEQ ID NO: 120683 - RNA, 78 nt, Homo sapiens
cagccaggccccggggcagaccccggaggaaaaaccagaagagaaaaaacaaaggggagaggcaccccgcgggacgac

SEQ ID NO: 120684 - RNA, 55 nt, Homo sapiens
gaaaccagaccagagagaggaggagaagaagagacaccaggagcccagaagacgg

SEQ ID NO: 120685 - RNA, 67 nt, Homo sapiens
agggaccaaggaccaaaacccaaagaaaacccacacagcagggaaaggccccccgggcaagccagca

SEQ ID NO: 120686 - RNA, 85 nt, Homo sapiens
cgcagccaccgagacacaccgcaagaagagaaaccgagccaggagagcaagaaacccaaaacggaggacaagaacagcaggccaa

SEQ ID NO: 120687 - RNA, 78 nt, Homo sapiens
ccacaggccgccccaacaccagggaagagacacacccaggacacgccaccacaccgacccacgacaagaacggagaga

SEQ ID NO: 120688 - RNA, 47 nt, Homo sapiens
acgcagggcgcccccggggggaaaagacgacccacggaaaaagcaga

SEQ ID NO: 120689 - RNA, 74 nt, Homo sapiens
agggccgagggaggaaggcgacacaccaaagaaaaaacacaccaagcagaaacggagccaaggggcaggcaagg

SEQ ID NO: 120690 - RNA, 52 nt, Homo sapiens
cccagacccaacccgcaggggaggcaagcaggggggcaaaggaaagaaggca

SEQ ID NO: 120691 - RNA, 81 nt, Homo sapiens
accaacgccccgcaaggcccccagcacacagcgcggccaaacagacggcacaagcaccaacaagaaggcgaacacgcagcc

SEQ ID NO: 120692 - RNA, 65 nt, Homo sapiens
ccgcgacaggggggagagggaaggacagaaaacgggccccagacacaagccccaccaagaggaca

SEQ ID NO: 120693 - RNA, 86 nt, Homo sapiens
cgcaggagccaagaccacagcagcacccaggagagcacaagccgggagaggcaggaggaaaggccgcccagggccccggccagcag

SEQ ID NO: 120694 - RNA, 87 nt, Homo sapiens
caaggggagcgggcgcgcgcgaccgcgccccggagaaaagagcagaacacaaaaaaacaaagaggcagaagcgaccagagcgaaaaa

SEQ ID NO: 120695 - RNA, 73 nt, Homo sapiens
gaggacaagagcgcaaggagaacaaaacagagaccaccggggccaagagcggccggaagagcgcgaggcaaac

SEQ ID NO: 120696 - RNA, 76 nt, Homo sapiens
caggcccagggccggcccccccaggacaacccagaggcaacaaaggcgaggcgccggcgaaagcaacgaagggacg

SEQ ID NO: 120697 - RNA, 74 nt, Homo sapiens
aaggaagcgagaccaacgcaacccaaggaacccggggggccagcggacagcgacggaccgcgcccaccaggccg

SEQ ID NO: 120698 - RNA, 55 nt, Homo sapiens
gagagcgccacagaacagacgggggcgggcaggggggcagcagaggagaggagga

SEQ ID NO: 120699 - RNA, 78 nt, Homo sapiens
ccgcccgccgccggccggcgcgcgccccacagacaaagcggccagaagaaaagagaggggcccccgggaacaaaggaa

SEQ ID NO: 120700 - RNA, 71 nt, Homo sapiens
caccaggggggaaaacggagccaacaggcccgcggaagagaccaaacgaacacaagagacagggaacacca

SEQ ID NO: 120701 - RNA, 77 nt, Homo sapiens
cagcagggacacgagacggcagacccagcgccgggagaaggcaaccaaaggcaggacacaaaaacaaccgaaagagg

SEQ ID NO: 120702 - RNA, 74 nt, Homo sapiens
aaaaaccagcaaggacaaacgaccgggcccggaccaggcacgcacaaaaagaagaggcggccacccacgagccg

SEQ ID NO: 120703 - RNA, 83 nt, Homo sapiens
cccgcgcacaaggaaaagagaagcaacacccgaaagccaacaaggaaacccgagccgagagggccgacggccagcgagcgcgc

SEQ ID NO: 120704 - RNA, 75 nt, Homo sapiens
gcggcccggagcgcggcccgaggcccgcccagagaggccgggaagaaggagggacacagcagcgcggagagcggc

SEQ ID NO: 120705 - RNA, 66 nt, Homo sapiens
gaggcaaggggccaccaggaggccagggggcgccagacgacccggagacgcggaggcaggcaccga

SEQ ID NO: 120706 - RNA, 87 nt, Homo sapiens
ccaggccagggccgcgcggccccacccgcgacaggacacagaacagagaagaagcagacgagacagaaaaagaaccagacagagaaa

SEQ ID NO: 120707 - RNA, 84 nt, Homo sapiens
cgcagagcccgcgcccgcgccggcggcaagaagacggagccggagcacggggagacccgcggcgcggcggaccagcacaccgga

SEQ ID NO: 120708 - RNA, 85 nt, Homo sapiens
gaagcccccagaaccaggcccccaaccagccacgcggaggcaagaaaggcgcaagcaacgacccacagagaaggaccagcaagcc

SEQ ID NO: 120709 - RNA, 97 nt, Homo sapiens
accccacgcggacgggcgaggagaacacccggaccggacacgccgagcgcgcgagaacagacccagcccgaggaaggagaagaggcgccacgacagg

SEQ ID NO: 120710 - RNA, 75 nt, Homo sapiens
cgcggagacacaaagggcgccgcggagggcccggccaggccccaccgccacaagcaggggaacaccgccaacccc

SEQ ID NO: 120711 - RNA, 77 nt, Homo sapiens
caagcacgagagccgcagggcaccggaacaagcagaaagcacgaacaacgagaacaagacacgagcaaaccccaccg

SEQ ID NO: 120712 - RNA, 79 nt, Homo sapiens
cgagcgacagagacaagcgagcgccgcacaaaaagcagagagggacagggcggggccgacaggccagcgacggaagcaa

SEQ ID NO: 120713 - RNA, 74 nt, Homo sapiens
acccaggcgacgagccgaccccagaggacaggcgggccagcgacggccaacacccccaagaacaagcgccaaaa

SEQ ID NO: 120714 - RNA, 72 nt, Homo sapiens
gccagcaaggaccggcggcaaaagccaacggggagggcggagaaggaacagggagagaaacaacgggaacag

SEQ ID NO: 120715 - RNA, 80 nt, Homo sapiens
aaagcaccaagaagagacggcaagaccccagcagcagacagggaacacacaggcacccccaggaggacacagcgaggacc

SEQ ID NO: 120716 - RNA, 78 nt, Homo sapiens
gcggccgggacaaaacccgaaagaggcgcagcgcccagggagcagcagaccagccccagcacaagagaaaacagacag

SEQ ID NO: 120717 - RNA, 79 nt, Homo sapiens
cgggcccggcccgggggccgccccggcgagccgcgacggcgccgcccacggcgagcaagccccagccaagacccaccag

SEQ ID NO: 120718 - RNA, 79 nt, Homo sapiens
gacccacggcaggaggcaagaccaccggggaaccggcccggaagcagccaccccagagcaaccccccgcgccggcccgc

SEQ ID NO: 120719 - RNA, 74 nt, Homo sapiens
ggccaagaagacacaaaggacggaggcacgaacccaggacgagaaaaaacagagcggaacaagcggcccaagag

SEQ ID NO: 120720 - RNA, 71 nt, Homo sapiens
ggacacgaggaacccagggaggaaacacggggcaaaaaaagccccaggccacccccgacgcagccggaggc

SEQ ID NO: 120721 - RNA, 81 nt, Homo sapiens
aggaggcgcggaaccaggccgagggggcgagggcgaagacgagaccagccgcgaacgggacgcccacaggggcagagcccc

SEQ ID NO: 120722 - RNA, 75 nt, Homo sapiens
acggaccgaaggccacaaaaccacgacacggcaggaaggcgcaaccggggggggaggaagagggagagaaggcag

SEQ ID NO: 120723 - RNA, 72 nt, Homo sapiens
gaaagaaaacacacacacacaaaacggccgcagagaaaaccgcacacaaagggaaagaaaaagacaaaggag

SEQ ID NO: 120724 - RNA, 57 nt, Homo sapiens
cccaaagcggggggaaggaggccccagcggcgaagcgcagaagcgcagacggcgaga

SEQ ID NO: 120725 - RNA, 44 nt, Homo sapiens
cacagaggagccacacccccagggcggagaacggaaaagcacca

SEQ ID NO: 120726 - RNA, 73 nt, Homo sapiens
ggaccaggagaacggcggcggaaaccccacagcggagaaaaaggagaaacccccaagacaaaccacggacgga

SEQ ID NO: 120727 - RNA, 58 nt, Homo sapiens
gaagcagggcacacacacccccggcacccgaagagagacccagagaaggccgcaggcg

SEQ ID NO: 120728 - RNA, 67 nt, Homo sapiens
accaaacaccaaaacaggacccgaacacggaagaaagacacgcaggaggccgcggccgagcagcgcc

SEQ ID NO: 120729 - RNA, 72 nt, Homo sapiens
gagagaacggaagaaagggccacgcaacagcaagcccaagccacagaccaaaaagagaaagggaggcaaaaa

SEQ ID NO: 120730 - RNA, 49 nt, Homo sapiens
gaaaccccggacaaggcacgccagacggagagaagaagagcccccaagc

SEQ ID NO: 120731 - RNA, 69 nt, Homo sapiens
acggcccgacagacccggcggacagcagacaggggacaggccgcgcgcggggcgaccaaaccggagaga

SEQ ID NO: 120732 - RNA, 49 nt, Homo sapiens
ggcaccagccacgccccaccagcccggaacgaccaggagacgcgggaag

SEQ ID NO: 120733 - RNA, 83 nt, Homo sapiens
cgggcgagaagcccacgaggcaacacgcaaggccgccaccaggcgaacccaggcacccagagacggagcggaaaccaaggaag

SEQ ID NO: 120734 - RNA, 76 nt, Homo sapiens
gcgcacccccgcgccgcacggggacgaggggaggcaagcaggggggcaaaggaaagaaggcagaaagggaggccag

SEQ ID NO: 120735 - RNA, 70 nt, Homo sapiens
agagggagacagagaagagggcgaaaccccgaaccaaacagagcccaaggagcggcaaagaaaggaaaca

SEQ ID NO: 120736 - RNA, 56 nt, Homo sapiens
cgaaggaaagagccaccggaagcacagcaaggcacagcaaggcggggcgggcacag

SEQ ID NO: 120737 - RNA, 72 nt, Homo sapiens
aaaacccagaggcaagcggagcagccagcagaggcgcgccggagggaggaacacccaggagggaccagccac

SEQ ID NO: 120738 - RNA, 68 nt, Homo sapiens
caaaacggagaacgcggcaaaggaccaagcaaagaccccgagacgcagaaccggccgaaaagcacaaa

SEQ ID NO: 120739 - RNA, 74 nt, Homo sapiens
caaaagcggggcacgacaaaagaaccagaaaaagagaaggaggcgcgagccggaggcgcagaccggggacagca

SEQ ID NO: 120740 - RNA, 75 nt, Homo sapiens
ggggcaggcggccaagcagaggagacgagaaagagcggggaaggcaaagccgaagaagcagcagggagaacaagc

SEQ ID NO: 120741 - RNA, 74 nt, Homo sapiens
ggcacggccacagaagcaacaaaggaccgcccccagagagaggcaagaagagggagaagaaacacaaagggcaa

SEQ ID NO: 120742 - RNA, 70 nt, Homo sapiens
agccacgccggagccggcccagggcgccgagcagggccacggcgaaaacagccgggagaaagggcgcaaa

SEQ ID NO: 120743 - RNA, 71 nt, Homo sapiens
gacgcaagccgggagacgcacagcaagagcccggacaccggaagcgggaaagccgaagacccagaaaccac

SEQ ID NO: 120744 - RNA, 68 nt, Homo sapiens
agagaagagcgagccgcagccgacaaaggaaaaccgccgccggggccagcaagaacaaaaagcaccaa

SEQ ID NO: 120745 - RNA, 76 nt, Homo sapiens
gaccggaggggacgaagaacggcagcagcgcgacggcagaccgaagcccggcccaccgcaccgccaaccagggcag

SEQ ID NO: 120746 - RNA, 86 nt, Homo sapiens
cgacaaggagagaagcgcggagccccaagggcgccaggcgcccagcggcccagaggagggacagagacccggcagcggaggcggac

SEQ ID NO: 120747 - RNA, 82 nt, Homo sapiens
cgagcgagggggggcgcgccggaaaccggagcgcgcagcagggagcgccgccgccagccgccagggcaaacagaacagcaag

SEQ ID NO: 120748 - RNA, 59 nt, Homo sapiens
gcgcggacaacaccaggaaaagacagaggcaccgacagcacagcagaaaggccgccccg

SEQ ID NO: 120749 - RNA, 70 nt, Homo sapiens
ggggaaccacagcaggaacgagagcaggcgacagaccacgccagcaccaggcagaaggacggacaccagc

SEQ ID NO: 120750 - RNA, 72 nt, Homo sapiens
aagcgccccgacggagcgccaggacggagaaacaggcgccaaacgacagagaccccaccacgggccggcgaa

SEQ ID NO: 120751 - RNA, 79 nt, Homo sapiens
agcagccagccggcccgaggacaccgacaccagcaggaaacccacccaccacccgagaggaaacgcaaccaagacaaga

SEQ ID NO: 120752 - RNA, 78 nt, Homo sapiens
acccagagcgcacggcgacgccccaggggaaaacccccgggaccagggagggccagggagagggggacgggggccgag

SEQ ID NO: 120753 - RNA, 59 nt, Homo sapiens
cccacaccacacagagagcgagaagcagaaaaaaggcacgaacgcagaggacaaaggga

SEQ ID NO: 120754 - RNA, 61 nt, Homo sapiens
agcgaccccacagccaccagcgacccccacaaccaccacgggaaagaagaccgccaaagag

SEQ ID NO: 120755 - RNA, 72 nt, Homo sapiens
gcggagagaacagacccaaggacagggaggaaggagcggaaggaagccagaagaaggccggagcccacccag

SEQ ID NO: 120756 - RNA, 76 nt, Homo sapiens
gaacccaggcccacggaggaagagccgggcagcccggagcgggccagccgggccccgaggaccgagacaggagcac

SEQ ID NO: 120757 - RNA, 76 nt, Homo sapiens
aaaacaagccaaggagaacccagcccgacggacaagccgagaccaccaggagcagagcggaggcaaccagccaaaa

SEQ ID NO: 120758 - RNA, 70 nt, Homo sapiens
aacgaccgcgacaggacagaggaaccaaagaacaaaggaaagacaaagacaggagacaaaccagcaggca

SEQ ID NO: 120759 - RNA, 78 nt, Homo sapiens
accggccggaaaaccgcaagaccacagcaggaggaccccgcgggggcagagcgaagaagaggcacacaacccaagcca

SEQ ID NO: 120760 - RNA, 77 nt, Homo sapiens
ggcccacgacacccggacgcgcccgcagcagcaccgcgcgcggccccagcccgaggaggaccaaggccgccagcaag

SEQ ID NO: 120761 - RNA, 71 nt, Homo sapiens
aggaggacagacaaaaggaggcaagagcacgcgccaagggcacacgcagagggaggaaccggagaggccgg

SEQ ID NO: 120762 - RNA, 85 nt, Homo sapiens
gcggagaccccgccgccccgccgcagacgccgccgcgcagagaagaggcgaggcggcgaggcacccggcgcccggcgcgcccgcg

SEQ ID NO: 120763 - RNA, 78 nt, Homo sapiens
acaaaggcaccaggccaccacagaaacaaaagcaacaaagaggacgagccaacggaggcagccggcggaaacgaagaa

SEQ ID NO: 120764 - RNA, 75 nt, Homo sapiens
agccagagcaaaaccagcccagagaacaagagaccgaaacaaggaccccccgggagaagaaaagcgggacgagga

SEQ ID NO: 120765 - RNA, 78 nt, Homo sapiens
gccccgaagggcacaccggagagccaggacaaaaccaggcagaaccaacacgaacccaagcacaaacaagaaaacgag

SEQ ID NO: 120766 - RNA, 51 nt, Homo sapiens
gcccaccccccgaacccagccgcaccggaacagcagccggaagcgagggcc

SEQ ID NO: 120767 - RNA, 58 nt, Homo sapiens
ggaagggccgcaaggaacgcccgcgcagcgaaagcaccagccggcaaacaccaggcgc

SEQ ID NO: 120768 - RNA, 64 nt, Homo sapiens
caaaaaaaagaagccacgccaaaagacgaaagggggcgaccacaggaagaaggccccagacgaa

SEQ ID NO: 120769 - RNA, 89 nt, Homo sapiens
ccgagagccgcccgggccagcggccgcgcacccccggccggaggcaccagcagccaggacaaaaccaggcagaaccaacacgaacccaa

SEQ ID NO: 120770 - RNA, 80 nt, Homo sapiens
acccgagaagggagacgacgcgcgggccgcgagcggggcgacccgagggcagagcggcgggaaaccaccaacaacacccc

SEQ ID NO: 120771 - RNA, 77 nt, Homo sapiens
gcagcgggccggagaccagaagcgacgcacagaccagggacaacaccgggaacgcgagcccagaaccgaaccacgcc

SEQ ID NO: 120772 - RNA, 99 nt, Homo sapiens
cggcggggcgccgcggaccaacagcccaggaggccgagcgcgggaaagcagcgggggggaagaaagaaggagaaggcggaggagggagaggacccaaac

SEQ ID NO: 120773 - RNA, 72 nt, Homo sapiens
accagacagccacgcagacacagccaggaccgcaaacaagcaagagaaaaaaacaagaagagaggacacccc

SEQ ID NO: 120774 - RNA, 72 nt, Homo sapiens
cagaagagcacagcacgaacagacagaaagcaccacagaaagggaaaggccccccgggaaagaccgaggaag

SEQ ID NO: 120775 - RNA, 86 nt, Homo sapiens
acaaaggaagaaggcccgaagccagggggaggcaaacacgggcaggaacagaccaaacgcgaagaaccccccacccggcccggaac

SEQ ID NO: 120776 - RNA, 65 nt, Homo sapiens
ccggcggcccggagggggcggcggagaagagaggagcaggaggcacgccaccggaaaaccggcgg

SEQ ID NO: 120777 - RNA, 80 nt, Homo sapiens
gaggacacgaggcggcgggcggagacaggaccgcggcgagcaagacagccggccggcagccaggagcgggagaaggcccc

SEQ ID NO: 120778 - RNA, 55 nt, Homo sapiens
caccagcccagagagggcacagagccgacccggacagaccgcggaccgggggggg

SEQ ID NO: 120779 - RNA, 80 nt, Homo sapiens
gacacgagacgggcacaacgggcgaagggagagggcccaggacgggcggagaacggaaaagcaccaggaagcagagagga

SEQ ID NO: 120780 - RNA, 35 nt, Homo sapiens
acagcggcagaggacacaaggaggccaagaaccgc

SEQ ID NO: 120781 - RNA, 72 nt, Homo sapiens
gacccccagagccaggcccccggaagcacaacaagacaacggagcagcaacgaagcaacaagcgccaacacc

SEQ ID NO: 120782 - RNA, 62 nt, Homo sapiens
gggagcgcgcggaccagaccccaggcgcaaacgaacacaagagacagggaacaccagaccgg

SEQ ID NO: 120783 - RNA, 63 nt, Homo sapiens
ggacagcgaggacgccaccaggaccggaacggcaaaggaaagcacaccacagacccagcaagc

SEQ ID NO: 120784 - RNA, 79 nt, Homo sapiens
aaaagaagagaagcagaaaaccagaagcacaaggacagagcacccaccacaggaggaggaccagagaaaagagaagagc

SEQ ID NO: 120785 - RNA, 75 nt, Homo sapiens
ggggaccaccgcgcggcgcgagacccgaagaaggaaccagcaaagcgccacgaagcacaagcaagaggaccagcc

SEQ ID NO: 120786 - RNA, 43 nt, Homo sapiens
gcggcccacgaccggaccggcccacacaggaccagaagggccc

SEQ ID NO: 120787 - RNA, 48 nt, Homo sapiens
agagcgagggggcccgcagcgaaacaacaaggccaaccaggggagcga

SEQ ID NO: 120788 - RNA, 65 nt, Homo sapiens
gagaacccaaccagggggaaacacagaacgcaggacacggccaaaagaagacccagacaagaaag

SEQ ID NO: 120789 - RNA, 71 nt, Homo sapiens
caccgcgcgggcggccaggagcgagccagggcccgacagccgcgaagaaccagcagggagagccggacccg

SEQ ID NO: 120790 - RNA, 56 nt, Homo sapiens
cacagacccccaccaagcagcaaaccagccggcgggcgccacaacggacgacgaaa

SEQ ID NO: 120791 - RNA, 72 nt, Homo sapiens
ccaaagggccggagcgagaaaaagccagccacgaggcgcaaaaaaagagaagagggagcgcaacacagacag

SEQ ID NO: 120792 - RNA, 68 nt, Homo sapiens
caccacaaccaaaacagagacaagacggcaagcacacgaaagccaccgaacaagggggcgcaacagcc

SEQ ID NO: 120793 - RNA, 74 nt, Homo sapiens
ccgcgcggaagagcggccggggaaaacgggcgaacccaggagggccgggcacgcccccgagggaaacaagcgcc

SEQ ID NO: 120794 - RNA, 69 nt, Homo sapiens
ccagaaaggaggacaacgggacccagaagaggaaagcgaagccaacaaagaaaggaccggggcaaaacg

SEQ ID NO: 120795 - RNA, 75 nt, Homo sapiens
gcgggcaaaccagaccgaaggccagagaggcagaagaccaaacagaagcgcaggacaaaacggaaagcaagaaac

SEQ ID NO: 120796 - RNA, 76 nt, Homo sapiens
agagcgaccagaagccaaagggccaccaaggcaaaggcagacaacccgcagacgcgaccggaaaggagagagagac

SEQ ID NO: 120797 - RNA, 70 nt, Homo sapiens
cgcgccgccgaccccccggcgccgcgccggcggcggccgcacacccagaagcgacgacccagcggcgaag

SEQ ID NO: 120798 - RNA, 77 nt, Homo sapiens
cgaggccgcagggagaaggcgccgggaacacgggaccaaaccacagcaaaaacaccaggaaagacaacgaaacacac

SEQ ID NO: 120799 - RNA, 39 nt, Homo sapiens
acgggagcggaaaccagaacaggaaagcgggaacgaaca

SEQ ID NO: 120800 - RNA, 85 nt, Homo sapiens
agaaaaccacccaaagccaaaggccagacccgacgcaggccagggcaacccacagcccaaccacaacaagcccaaccagcggaca

SEQ ID NO: 120801 - RNA, 72 nt, Homo sapiens
gggacccgcacagagaaaaagaagaagagacgagaagagaaagaagacgccacgggcacgggcaccaccaga

SEQ ID NO: 120802 - RNA, 72 nt, Homo sapiens
cagccccgaaacggacacgagcaagaccggaccggcaccaccaggaaccacaggcgccgcggcccacggaag

SEQ ID NO: 120803 - RNA, 51 nt, Homo sapiens
aaggggagaaccgcaggcagccggcacccgcacaacccagggggccgaacc

SEQ ID NO: 120804 - RNA, 51 nt, Homo sapiens
ggagaaggaagaggggaaaagaaggccaggccagacggcaaaaaggcagaa

SEQ ID NO: 120805 - RNA, 56 nt, Homo sapiens
gcacagggagcaccgaccgagcccacaaaccaagcacccgaaagagcgaaagccca

SEQ ID NO: 120806 - RNA, 84 nt, Homo sapiens
gaagccggcccggggccgcggacgaggaccagcagaggccagcacgagaacccaggaagccaccgacaagagcacagggaaggg

SEQ ID NO: 120807 - RNA, 69 nt, Homo sapiens
acaaagagggaggccagccccggcacagaggcaccgaccgcaccggaggagcacccgaaagagcgaaag

SEQ ID NO: 120808 - RNA, 108 nt, Homo sapiens
cccgggccagggaacaccaggcccccgcccccgcggcgggaggagagcccgcagcagcacaggagaagcggccgaggggcggcgccgggacccaccagcaagcgcccg

SEQ ID NO: 120809 - RNA, 71 nt, Homo sapiens
caccagccgccgccccgcagccccccgcagcacccagccggccacgaacccgccacccccacccggcgccc

SEQ ID NO: 120810 - RNA, 80 nt, Homo sapiens
gccccagcgccgggcgccgaggacccgggcccccacaaagaggagagccaaaggaggcacgacagcagaggaagagaagc

SEQ ID NO: 120811 - RNA, 38 nt, Homo sapiens
cgcgcagcacagcgaaggcgagaaccgaagggaggaga

SEQ ID NO: 120812 - RNA, 45 nt, Homo sapiens
ggcaaagggccccagagagcccccccacccagaaccgagaacgag

SEQ ID NO: 120813 - RNA, 71 nt, Homo sapiens
ccaaagcaagagcaggcgacacgcaggaggaggcaggggaagcacaaaagcgcacccgcgccagcgaggac

SEQ ID NO: 120814 - RNA, 81 nt, Homo sapiens
agggacggaaccaccagaagccagcccccaggcggaacgcccgccccgcagagaggagcagcagcagcagcagcagcagca

SEQ ID NO: 120815 - RNA, 74 nt, Homo sapiens
agcccccgcccagaacagcaagcacaccgaaaacccccccaggaacacggccaaagccccagaggacaagccag

SEQ ID NO: 120816 - RNA, 68 nt, Homo sapiens
ggaaaaggggaccgcagagggggaaaaaacagaagaggcgacccaagggagaagaaccgaccagaaag

SEQ ID NO: 120817 - RNA, 79 nt, Homo sapiens
gacccgggagcgacgccgacagcgaagcgagcgaaaggcaagcaccgacgaagcagaggagacaagaggcaaaggcggc

SEQ ID NO: 120818 - RNA, 77 nt, Homo sapiens
aggcggcgcggagagggggcgcgagcggggagaaggaaaaacgcagggcgaagaacgccaaagaacaaaagaaccga

SEQ ID NO: 120819 - RNA, 73 nt, Homo sapiens
ggcgcccacgggggcccgcggcgcccggcgcgaaggggaacaacagcaccaccaaccggccggggcagcagaa

SEQ ID NO: 120820 - RNA, 65 nt, Homo sapiens
gccgcagcaccccccggacccagccccgggacacggggggcccacacaagcccccacccgaagca

SEQ ID NO: 120821 - RNA, 83 nt, Homo sapiens
gaaccccgaccgcagcccccgggcacgaccccggacacgggcaggcaggcgcgaacaggaaaaaaaagaaaacaagcgcacga

SEQ ID NO: 120822 - RNA, 61 nt, Homo sapiens
aaggaaccaaggaagagaagaaggaacggaaacaaagagccgggaccaccgaagaccagac

SEQ ID NO: 120823 - RNA, 74 nt, Homo sapiens
gacaaaaccccgaaaaaggcgggggaccaaggcaacgaacacaagcagcgggcaacaacagaacagaaaacacc

SEQ ID NO: 120824 - RNA, 90 nt, Homo sapiens
gaagcccaaggagccgcccgcagggcaaacgaagaaaacgacccagccagaggacaaaggaccgaggacagggaagaaacacaacaggaa

SEQ ID NO: 120825 - RNA, 80 nt, Homo sapiens
ccggcgcaaggggacgccgcgcgcccgccgcgaacggcggccaaagcgccagacaagggccgagccccggagagcccccc

SEQ ID NO: 120826 - RNA, 70 nt, Homo sapiens
aacggccacgcaggaaccacaaggacacggaacagccccaagccggaaacccaggaacggaaacagaacg

SEQ ID NO: 120827 - RNA, 85 nt, Homo sapiens
ggggccgcgcccggccccgcgcgggcggacggcggaggcgcccccagacaagcagaccggaagaccgacggaagaccacaccccg

SEQ ID NO: 120828 - RNA, 70 nt, Homo sapiens
agacaagaaaagaagggacaaaacacgaaacagagaccaagcagaagagaggggcaagcgaacaaacccc

SEQ ID NO: 120829 - RNA, 73 nt, Homo sapiens
cagaacacacgcaccccggggacagggacagaggcacagaagagggcaaagcgaccgagacccccggccagag

SEQ ID NO: 120830 - RNA, 70 nt, Homo sapiens
caggcaaaacaaccagaaggggagaaggcaggcaccacaaaaaggacagccgagaaagaacgggaaggaa

SEQ ID NO: 120831 - RNA, 77 nt, Homo sapiens
gaaagaacaaagagcagcgggcgaggagagaccaaaggaagggaaggccaaaggaaagcgggcaaaggaaacaggag

SEQ ID NO: 120832 - RNA, 70 nt, Homo sapiens
gaacaagaggccggaagccggagaagccggagagcaccaggcaagcggcagccacacccggagaaggagc

SEQ ID NO: 120833 - RNA, 57 nt, Homo sapiens
cagcccgaccacaccacccccgccagcaggccccacacaggacgagaaggagccccg

SEQ ID NO: 120834 - RNA, 77 nt, Homo sapiens
gggcagcacggaaccacacagggccgccaccaacagagaagacagagcaccaacgaggagagaaacaccgaggagga

SEQ ID NO: 120835 - RNA, 47 nt, Homo sapiens
aaccgcagccgagcggggccggccacagagcccaaaaggcagagcga

SEQ ID NO: 120836 - RNA, 79 nt, Homo sapiens
gaagagaggagggagaacacagaaaccggccccaggagccgggaaaccgaagaaggcagagaaggcaaacaggaggcgc

SEQ ID NO: 120837 - RNA, 59 nt, Homo sapiens
ccgccacccacaggaccagaggccggaagagcgggagcgggagccaggcagaaggccaa

SEQ ID NO: 120838 - RNA, 73 nt, Homo sapiens
gagcaaggccgccagaggcagagcgcaaaagacaacccacgaaaaccacacccagggacccccagaaggaacg

SEQ ID NO: 120839 - RNA, 71 nt, Homo sapiens
aacaagcaaaacccaaggccagggcgaagacagaggcagcggcgagcccagaacgaagcggcccagcgggc

SEQ ID NO: 120840 - RNA, 100 nt, Homo sapiens
gacggagcaaagcccccacgcccagccaggagcaccgccgaggacccagcacaccgaggggcgaaaccaagaggagggaagcaggcagacgcgaggccgg

SEQ ID NO: 120841 - RNA, 87 nt, Homo sapiens
agggaaacccggagaccaaaccgacgccaggaacccgccaccgccaccggccccaggcccacaacccagggggggccccagcagcgg

SEQ ID NO: 120842 - RNA, 83 nt, Homo sapiens
gcaaagccccaagaggaccaccagggcaagagcgaaggagaaaggcaacaaggcccgagcggggaacacgagagccacaggca

SEQ ID NO: 120843 - RNA, 77 nt, Homo sapiens
aaaagaccggcaccagcacacaaaccccgacagaaacgccaagggccccgcaccgcccggcgaccacgagcagccag

SEQ ID NO: 120844 - RNA, 61 nt, Homo sapiens
cgcaggacggcgcggcagagccccgacgccacagaacgcccccggcagggccaaggccccc

SEQ ID NO: 120845 - RNA, 64 nt, Homo sapiens
ccccgaggagaccagaggagagaaagaacccacgcaggacgacagaagaggccggacaagagaa

SEQ ID NO: 120846 - RNA, 72 nt, Homo sapiens
acacagggcccgcaccccccgcaggggccgaggaaccaccagcagaaaaagaggcaaaaagaagcaaccccc

SEQ ID NO: 120847 - RNA, 76 nt, Homo sapiens
ccagagaagaccaaaagaggaagcaaagaggaaacacggaagcacagcagggcccggccagaaagacaggagcgaa

SEQ ID NO: 120848 - RNA, 81 nt, Homo sapiens
caccaacccaagccagagcacaggaccgagcagaccaaggcgacccagcgcaggaggagacagaacagacagaaaaaacaa

SEQ ID NO: 120849 - RNA, 74 nt, Homo sapiens
ggagagccgcagacacgggggaaaaagaaaagggcgaagacccgaagcagcgcaggaacagaagagaagaccag

SEQ ID NO: 120850 - RNA, 86 nt, Homo sapiens
cgaccacaaggggaggacaaccgcccgggaccagcagagcaccggccagaacaagccaaggagccaagacgagagggacacacgga

SEQ ID NO: 120851 - RNA, 70 nt, Homo sapiens
cccagacccaccacccccaaggacgcggagcgaaaaaggggccggaagaacgggacgcaagcgccccaca

SEQ ID NO: 120852 - RNA, 86 nt, Homo sapiens
gacggcaacaggaacaccaagcgggagcacgccaaagcccaccaagggaaggaagccagcgaagcaccgggacacgagacggccac

SEQ ID NO: 120853 - RNA, 78 nt, Homo sapiens
caggccaccacagaaacaaaagcaacaaagaggaagagcaagaccaggccaggacaaacgcaggaacggaacagaggg

SEQ ID NO: 120854 - RNA, 72 nt, Homo sapiens
aacaaccaggaccaagaccaggagaaacgaaccgagccaccgcaaaggcagacagcaccccccgcaggcccg

SEQ ID NO: 120855 - RNA, 50 nt, Homo sapiens
ggagcacccaccacggagggaaagaccaggcagggagcagggagcgcagg

SEQ ID NO: 120856 - RNA, 81 nt, Homo sapiens
gaccggagaacgcgaggcagagcgggagcgcgcagccaggagagaacagaaagaccaagcagaagagaggacaaagcaccg

SEQ ID NO: 120857 - RNA, 77 nt, Homo sapiens
ccggaaaggagaggaggaagagcccacagcaagccaggacggacccaaggccacggaaggcggcaggacacaagcag

SEQ ID NO: 120858 - RNA, 59 nt, Homo sapiens
ccacagaaagcccggaaagagggcccaccacacacgcagggcgcagcaaagaagaggga

SEQ ID NO: 120859 - RNA, 54 nt, Homo sapiens
caaaacgccaggcggaccagaaggccagcaaaggaccgcaagaaccagggagac

SEQ ID NO: 120860 - RNA, 77 nt, Homo sapiens
ggggcccgcgggccaggccggggcgggcacggcccgcgagggcaagggcgcagcacgcagacccgcaagccccaagc

SEQ ID NO: 120861 - RNA, 75 nt, Homo sapiens
gggaaacgggagggaaccagcaacaagccggaagaagacggcacgggacccccagcacaggcagcaggccgggag

SEQ ID NO: 120862 - RNA, 77 nt, Homo sapiens
aagaagcaacgacaaaccagggccgagggaagcacgaggggcgacaggacaacacaccagcccagcacaaaaaacgg

SEQ ID NO: 120863 - RNA, 79 nt, Homo sapiens
ccgccgccgcgagcccaccagcggaggaccggcggagaccgccgcgcgccgaagcaaccacaacgacagaagaccggag

SEQ ID NO: 120864 - RNA, 82 nt, Homo sapiens
agaaaaggagaaggaaagcgaaggggaaggcgccgaagaggacgaagaaaccagggcgaaggacgaggaccgaaaaagggca

SEQ ID NO: 120865 - RNA, 80 nt, Homo sapiens
aggcggccggcacaacgccaggacggccggagcagcagaacaagagcggagaccaagggagccccgcagcagcagaagac

SEQ ID NO: 120866 - RNA, 74 nt, Homo sapiens
aggaaagagagcaaaaccgggccgggcacagaccggaagcggagacggaacaaagagcagaggccagcagccac

SEQ ID NO: 120867 - RNA, 77 nt, Homo sapiens
cgaccaggccccgcagacccaacgaccgcagccagaccacgcgagccggcccgggcccacccacacgagcgaaccag

SEQ ID NO: 120868 - RNA, 79 nt, Homo sapiens
gaggaagaagaaagacagaagaaggagcaagaccaggaggaggccagaacgccagacggaaaaaaaccgcagaaaagca

SEQ ID NO: 120869 - RNA, 54 nt, Homo sapiens
acccaaacaacacccgcaccgggcgccccgcagcgccacgcccacaaagcacaa

SEQ ID NO: 120870 - RNA, 70 nt, Homo sapiens
accggcgaagccgggccaaaggacgaagaacccacagaggaagaaaacaggcgaaacaaggcacccccag

SEQ ID NO: 120871 - RNA, 82 nt, Homo sapiens
ggcgcagccagagccaccagcgcagcgcgccaggagcccagcagcaagggccagcgcgcccggcgggccagccccaggaagc

SEQ ID NO: 120872 - RNA, 119 nt, Homo sapiens
cgcaggaggagggggaacgggcggagagacagggagaggggcgaaccggccccccacagccacgcagcggcggagaaaccaccacaaacacgaggccagcaacgaccaacaagacagac

SEQ ID NO: 120873 - RNA, 79 nt, Homo sapiens
gccccccagcagggaacgacccaaaccaaaaagggggaagaaagaaaaccggccagcagcagccacggaaaagaaaaag

SEQ ID NO: 120874 - RNA, 102 nt, Homo sapiens
aggagggccggaccggcggggcccgggcaagaaccggaagaaaccgaagcgggcacaacgggggaagccccagcagcgcaaagaggccggaccaccgggcga

SEQ ID NO: 120875 - RNA, 67 nt, Homo sapiens
aggcaaaccaacagaacgaaagggagcagagacggaaccgcacaagggaaaacaggcgaagaccagg

SEQ ID NO: 120876 - RNA, 75 nt, Homo sapiens
cgggggaggaggcaacgccgcggcgacggggacgaccagcgggagccggcgcgcgcgacgggcacgcagcgagca

SEQ ID NO: 120877 - RNA, 71 nt, Homo sapiens
ccaccgagaggaaagggaagcggggacaagaccggaggaacccaaggaccgcaaagaaaacccagagaaca

SEQ ID NO: 120878 - RNA, 83 nt, Homo sapiens
gcaaaaaaccaaaccgagcagacccggaagggacgaggcacccacagcccccccaaagccgccaagaagagagggcccggaac

SEQ ID NO: 120879 - RNA, 64 nt, Homo sapiens
caaagagcaccaaagacagcaggacagaaaagggcggggacgcagaaaaaagaggagcaccagc

SEQ ID NO: 120880 - RNA, 79 nt, Homo sapiens
ccccagaccaggcgggggcccgaccgaccccgagagaaaccgaagaaggcccacacacacaggaaggcagaaagcacag

SEQ ID NO: 120881 - RNA, 81 nt, Homo sapiens
cccgaggcagaggaaccggccccagaggcagcaagaggagaagccagaaaagaagccgcacaagagaagaaaacgcagcag

SEQ ID NO: 120882 - RNA, 70 nt, Homo sapiens
ggccaccacgagcacggcccgcgcacgcccggagagagagggagacgcgcacggaccggaaccagaacaa

SEQ ID NO: 120883 - RNA, 88 nt, Homo sapiens
aagggcacaccacaaagacaaaccacggccaagccccagcacacaggacaaagacaggggagaaggacggcagaaaacgagacgccgg

SEQ ID NO: 120884 - RNA, 81 nt, Homo sapiens
aggccgcggcgccaaaccgaggcaagagcaaaaagggagcgccagaggccaaaaggccggaggaacggaaggaagagcgga

SEQ ID NO: 120885 - RNA, 81 nt, Homo sapiens
aagagcgcggccagcaccccaacgggccaaagaaaagagcgccgccgcagcaacagggccggagcgagggcagccgcgcca

SEQ ID NO: 120886 - RNA, 76 nt, Homo sapiens
accgcccgacgcgcgggagaggagcagcgggcgggaggaggaaccagaagaagcgacgcccgcggagaaacaaagg

SEQ ID NO: 120887 - RNA, 75 nt, Homo sapiens
gcagcaggccccgggcccggcgccgccgcccgcagggggaagaaggagccgcagccagaaaaggccagccacaaa

SEQ ID NO: 120888 - RNA, 76 nt, Homo sapiens
ggcggcgcccgcgcacgcgcaagaccgcgaggcgagacccagacaagcgggcgacacgagagggaagccccagagc

SEQ ID NO: 120889 - RNA, 70 nt, Homo sapiens
cgggggcccaccgggccaaggaggccgccgacggcccgcacagggagggcacagcaagcccacgagcaag

SEQ ID NO: 120890 - RNA, 74 nt, Homo sapiens
ccagacagggagcagccaacacggccagcccaaaagcgaccgcaagaagaggacgcagaaaagaagagacgaag

SEQ ID NO: 120891 - RNA, 72 nt, Homo sapiens
aaccagcaaccccccacgagaacgggaggcaagcaggggggcaaaggaaagaaggcagaaagggaggccagg

SEQ ID NO: 120892 - RNA, 72 nt, Homo sapiens
gccaagcggcacagagaaacagacacaaggccagggaaggacacaccgcggaaagaacaagaagcaaaaggg

SEQ ID NO: 120893 - RNA, 78 nt, Homo sapiens
ggcaagaccgaacagaaggaacgacgcggaccagaagccagagcgaggacgccggcagcaccagacagagcagcaccc

SEQ ID NO: 120894 - RNA, 80 nt, Homo sapiens
cccaggagcaagacccaggaagcacagagcgaccagacacggcccacggccagaggccgaaaaagagggaccgaacaagc

SEQ ID NO: 120895 - RNA, 73 nt, Homo sapiens
gaccgggagggaaagaaaacaacccgccgcagccgcagagccggcggcacgacagcaaaagccagggcacagg

SEQ ID NO: 120896 - RNA, 76 nt, Homo sapiens
agaagagaaaaaacaaagacggaccgcaaggggaagaaaaccggagggaagaaggcaaaaacggaccaaagaaaac

SEQ ID NO: 120897 - RNA, 76 nt, Homo sapiens
aaacaaccccgccggcgcgaccagaagaagaacaaacagcagaaagaaaccaaggagacacccccgagcaccagag

SEQ ID NO: 120898 - RNA, 80 nt, Homo sapiens
gggagggaaaccagccaagagaggcgccagacagcccagagaagccgcaaaggccagcaagcaacaacgaacgcacagac

SEQ ID NO: 120899 - RNA, 68 nt, Homo sapiens
ggaacagcagagacgcaacggaaaggcgcaggcagaacgagcaagaagacaaacaagggaaggccgca

SEQ ID NO: 120900 - RNA, 74 nt, Homo sapiens
cccggaaaggggaggaaaccacacgccccccaggacgcaggaagacaagaagaggcaggcggaacccacgagga

SEQ ID NO: 120901 - RNA, 87 nt, Homo sapiens
ccagcagccacggacgagaagaaaccgagagcgcagcagcacaccggcccaggggcagaggccaagcgcaccagccacagccgcacg

SEQ ID NO: 120902 - RNA, 70 nt, Homo sapiens
cgcaaccgcgaccgcccccccgaaccccgcagcgccccacagagcaggggccaagcgcggcggcagaagc

SEQ ID NO: 120903 - RNA, 74 nt, Homo sapiens
ggaccgcacccgcggagacggacgcccgaggagaggagaaaaccaggggcggaaggaccgagccagagcaaaga

SEQ ID NO: 120904 - RNA, 64 nt, Homo sapiens
cacaacaacaggaacccagacagcgcggcaagaagagaaaggaaggaggggaaaagacaaacac

SEQ ID NO: 120905 - RNA, 55 nt, Homo sapiens
gaagagcgccccaggagaaacaagggcacgccgcgaaagaccgaggccccacgag

SEQ ID NO: 120906 - RNA, 73 nt, Homo sapiens
ggagaaagcacaggacagaaccgccgcgcccgggaaaggaggaaagaaagagaagaagagcaaccaagcaaag

SEQ ID NO: 120907 - RNA, 63 nt, Homo sapiens
cagaaaaccccccagcaccgccggagggggacccgaggaccccaagaagaagcggaagaggag

SEQ ID NO: 120908 - RNA, 86 nt, Homo sapiens
ggcgcccggggaaagccgggccccgagggcggaccgagagaaagacgaccgccaaccagggagaacacagagaaaaaccgcaagaa

SEQ ID NO: 120909 - RNA, 51 nt, Homo sapiens
gccggggcaaggagaaaacaaccagaacaaagacaggagggcaggaaggac

SEQ ID NO: 120910 - RNA, 56 nt, Homo sapiens
acggaaaggaccaacaaggccaacgagcgcacccccaccaaggaagagaagacccc

SEQ ID NO: 120911 - RNA, 78 nt, Homo sapiens
acacaaccaaaggacaccagggcgacgaggaggcgaagaggcgcgacccagccaagaggaaccgcaaaccaaggcacg

SEQ ID NO: 120912 - RNA, 69 nt, Homo sapiens
aaagggccaaagaagggagagaggaccgagggagagcacaacacggaagcggggaaaaacgcggaacaa

SEQ ID NO: 120913 - RNA, 44 nt, Homo sapiens
cgcggaaggccagagcaaagggcgaagagaagaagcaaacagag

SEQ ID NO: 120914 - RNA, 74 nt, Homo sapiens
ggaaggcgacccaccagggagagagaggaggcacaaagaaccccaggcaaacgaaagcagagaggaaaagcgga

SEQ ID NO: 120915 - RNA, 84 nt, Homo sapiens
ccgaaagcgcacccccaaagcgagaggcgccgggacgagaggaggcgcgggcccgggggagcccccagagcggaccgagcacca

SEQ ID NO: 120916 - RNA, 94 nt, Homo sapiens
acaagcagccaagcccagacaagccccagggaagccacagcaccccagcacccaggaggagagcggcgacacacggggagcaagaaagaagcaa

SEQ ID NO: 120917 - RNA, 73 nt, Homo sapiens
cccaccagcggaagcgcgcgcgggggaaggaaaccccccaggcaagaggcgcaggaccgggaagaccaacaaa

SEQ ID NO: 120918 - RNA, 75 nt, Homo sapiens
gagcccggccgggacaggaggaagaggcagcgccaacccacgccgaaaggggccaggcacaaggacgggcgggac

SEQ ID NO: 120919 - RNA, 77 nt, Homo sapiens
cgccgggaggaagagaagccaaaacaaagacagggccgggaagacgccgaggcgcccagggaggaggacgaacggcc

SEQ ID NO: 120920 - RNA, 57 nt, Homo sapiens
gaaggaaccgcccgccgccacacgcgcaaagcccgcacaccgacagagaacccaggc

SEQ ID NO: 120921 - RNA, 52 nt, Homo sapiens
ggcaccgggacacaaacccccggggcgcccaagagcgcaggggaacgcaacg

SEQ ID NO: 120922 - RNA, 70 nt, Homo sapiens
ggcgacgccgcagccaggaagagacggccggcaacaagcgaggggggaggccaggcgcccagaacggccg

SEQ ID NO: 120923 - RNA, 68 nt, Homo sapiens
gaacggcaagacaacaagcaagaacggaagcacgggcggaggaaagcacaagcagagcccccgcagag

SEQ ID NO: 120924 - RNA, 83 nt, Homo sapiens
aggagcggcggcgaagaaggaggcaggcacgggcgcacgaagaagcaggagcccggaggcagagcaggcaccaggaccagcag

SEQ ID NO: 120925 - RNA, 72 nt, Homo sapiens
gaaaaccaggaccagaggccagcccacagcagaagggaaacccagacgacaaggaaggccaagggacccacg

SEQ ID NO: 120926 - RNA, 80 nt, Homo sapiens
cgccggggcgcccggcacccgcgggacccaaggccagccagccccaggcaccagcggacaggacagggaggacgaaggcc

SEQ ID NO: 120927 - RNA, 54 nt, Homo sapiens
gaaagaggcacagccccaaaagaaaggcagccgaaggagaaagggcgcaagaga

SEQ ID NO: 120928 - RNA, 92 nt, Homo sapiens
agccgaggagccggacgggggaggggccgggcccaggagcccagccccgccggcagcccaagggcaagccacgacacaggacagcgccagcc

SEQ ID NO: 120929 - RNA, 67 nt, Homo sapiens
gacgagcccgggagcgacccgcgcaaacaaacaggcaccaagaagagagaaagagaccaagcaagca

SEQ ID NO: 120930 - RNA, 47 nt, Homo sapiens
gacggcacagcgcacaagaaacccaagcgcgagcagagacccaaagc

SEQ ID NO: 120931 - RNA, 57 nt, Homo sapiens
cggagccgggaaaggacaagagagcccagaggaccggcggcccgaccaaagaagaac

SEQ ID NO: 120932 - RNA, 46 nt, Homo sapiens
gaccgagaccgcggccgggaccgagggaccagaaggcaccacaaca

SEQ ID NO: 120933 - RNA, 75 nt, Homo sapiens
aagcaccaacgccaaggccccgagccccggccccaaagacccaaaacagagacaccccccagcccccgcgccccg

SEQ ID NO: 120934 - RNA, 82 nt, Homo sapiens
aggggagccaccaacgccccccacaccaaggcagcagcccacggagcagagcaggcccccgccccaagcgccaccggcggcg

SEQ ID NO: 120935 - RNA, 81 nt, Homo sapiens
cagcccacagagagcaaaacacaagagagcagggaggaggcccagcaggcgcagcagcaagagggaaaaaggcaacgggac

SEQ ID NO: 120936 - RNA, 34 nt, Homo sapiens
ggcacccaaaaaaacagacgggccaagacaaagg

SEQ ID NO: 120937 - RNA, 69 nt, Homo sapiens
aaggcaaaagaagaaaggggcaaaacaaaagaaggaagaggacacccaccggaaagccgaaaacaacaa

SEQ ID NO: 120938 - RNA, 82 nt, Homo sapiens
ggaaccagcgccagcccaccggaagagcagagccgggcaggccacgcagaacaagacagggaagaggccgccgagccgcgcg

SEQ ID NO: 120939 - RNA, 63 nt, Homo sapiens
ccaaccgccacccgcggggagacacggcaaagggccaccaggcacagcgccgaggcccagaga

SEQ ID NO: 120940 - RNA, 60 nt, Homo sapiens
agaggacaaggaggccaagcagcggacgcccaaccagggaacaagcagagaaaggagaca

SEQ ID NO: 120941 - RNA, 68 nt, Homo sapiens
gcaagaccggaaaggccacacgggagcggcaaacgggaaacccagggggagagaagaggaagaacaaa

SEQ ID NO: 120942 - RNA, 69 nt, Homo sapiens
acaagaaggcaaggggacgccccagcccaaagcagcagagacgcccaaggacaagccgagaaaaccggg

SEQ ID NO: 120943 - RNA, 80 nt, Homo sapiens
gccaggcagacgggccagggaagacaacaccagggggaggccaggggaaagaccccagcaggccccaaggagcggcaaga

SEQ ID NO: 120944 - RNA, 80 nt, Homo sapiens
gaaaagggaagagaagcaaggaaagcggcaagagagcaagacggcgaaagagccagcaaaagaaaagaaggaggccagcg

SEQ ID NO: 120945 - RNA, 77 nt, Homo sapiens
cgcggaaaaccgacacaacagccagaggagcagccaagaagccccccaggggcccgcagaccaacaacaagccacag

SEQ ID NO: 120946 - RNA, 60 nt, Homo sapiens
gggaagacaggcccccaacaggaaacagagccgggggcggcaccgacgacagcccaggaa

SEQ ID NO: 120947 - RNA, 56 nt, Homo sapiens
aggcccacaggacaggagagaaagacgaaaccgaaaccagcccccaaggggaacca

SEQ ID NO: 120948 - RNA, 80 nt, Homo sapiens
gaaggacggggccggcccccgggaccccggccgcggagcgacgccgacggcgcaggaccagcacacgcaagcccacgccg

SEQ ID NO: 120949 - RNA, 81 nt, Homo sapiens
gcggggcaaccgccacgagacaccaaggagagccgaacaggaaccgagaccggacagaaacgaagacagacaaaccaaaag

SEQ ID NO: 120950 - RNA, 66 nt, Homo sapiens
caaacacaagaagcaagaagggcccagccagccccaaaaaccagccaagggagcccaagcaggccc

SEQ ID NO: 120951 - RNA, 69 nt, Homo sapiens
ccccgcagccggcagacaaagacagcgcccaaagaaggagacccaggaagaaagggcgaaggacaccgg

SEQ ID NO: 120952 - RNA, 63 nt, Homo sapiens
ccagccccccgagggcaacgagaaagagacgaacagaaggagcggcggacacacagaccccca

SEQ ID NO: 120953 - RNA, 67 nt, Homo sapiens
gaacggaacgaaaccaaagcacaaaccaggacacagccagggcaaacaaaaaaagccacacccacac

SEQ ID NO: 120954 - RNA, 73 nt, Homo sapiens
ccgggcggcggggaccgccagcccagcgaccagcaggcaacaagcagaaagcacagcccgaggacccacacaa

SEQ ID NO: 120955 - RNA, 83 nt, Homo sapiens
gagcccgcgcgccaggccgcggcccgaggcgcagcagcaggaggaggaccgcagcaaggcccaggaggcaagagcgagaagag

SEQ ID NO: 120956 - RNA, 76 nt, Homo sapiens
ggcaacaggacgcagcagcgcagacaacggaaaacgcaaaaccaccgggcggaaaacgcagaaaacgaagaagacc

SEQ ID NO: 120957 - RNA, 79 nt, Homo sapiens
gcgcccggaggcccgcaagcccccccggagaaaaaggaagcgagaaaagagagcgcaccggaaagcaaaaggaaaccaa

SEQ ID NO: 120958 - RNA, 61 nt, Homo sapiens
ccgacagcgccaggcccagacgccaacgcaggagcacccaggagaacgcgacacacaccaa

SEQ ID NO: 120959 - RNA, 87 nt, Homo sapiens
cgcgccccccgcccggccccccgccggccccgccagcagcacgggaggccgcccgagcaagaacgaggccaaggaggagggacacag

SEQ ID NO: 120960 - RNA, 78 nt, Homo sapiens
ccccaccaagggcaaagagcagcggggcacgccaagggacagaccgggaccgagaacggcagacagcccgccccccac

SEQ ID NO: 120961 - RNA, 68 nt, Homo sapiens
gacaccccaccagcccagacaaagcaccaggacaaaagaagggcagcacaaaggaaagccccaaaccc

SEQ ID NO: 120962 - RNA, 78 nt, Homo sapiens
gcaacccagagcggccggggagacgcgggcccagccgcggcccacggggaggcgcggcggaagaggagcgccagccca

SEQ ID NO: 120963 - RNA, 70 nt, Homo sapiens
cgcggccccagcccccgggggggcccgagaaacgggggagaaggaggaacacaaagaggaccagcgacaa

SEQ ID NO: 120964 - RNA, 80 nt, Homo sapiens
gaagaagcagaggaggcccacaggcccgcccggacaccgagcggagagaacacccagcgaagacccaaaccggccaacga

SEQ ID NO: 120965 - RNA, 84 nt, Homo sapiens
acgcggggaccccagaccccaggagccagcaagaggagagcaccggagggcggcgacggcggcgcgaggaccgaccgggcccgc

SEQ ID NO: 120966 - RNA, 83 nt, Homo sapiens
cggcggccggagcgcccacggggcccccgccccggggccccggccggccaagcagagaaccagagagcacagagaaagcggga

SEQ ID NO: 120967 - RNA, 58 nt, Homo sapiens
accccaaccggggaggaaaaccgacgaaggaccgaaaagacgcggccccaaaggaaac

SEQ ID NO: 120968 - RNA, 92 nt, Homo sapiens
ccggcgggcggggaacccaggccccgccgaggcggccagaccccaagaagaagcggaagaggagccgcggaaccaagacacaaggaacagaa

SEQ ID NO: 120969 - RNA, 76 nt, Homo sapiens
ccccgccgcggggcgcgcggcgccggcggcgcgcgacccccgcgcagaacacaggcagcaccccaacgcagccccg

SEQ ID NO: 120970 - RNA, 70 nt, Homo sapiens
gcccaagggcgcgccccccaccagacggagccccgaggagcaggaaaccaccagagggcacagggaagac

SEQ ID NO: 120971 - RNA, 54 nt, Homo sapiens
gagagaaccacccgcacacagccacgagcaaaggagcccgaaaacgaccaggaa

SEQ ID NO: 120972 - RNA, 74 nt, Homo sapiens
cgaacgggcccgcccagccgcagaaagcacaccaaccagaggagagaaaagacacaggagaacgggaggcgcag

SEQ ID NO: 120973 - RNA, 77 nt, Homo sapiens
gcccacgggaaagcaggcaaggcaggaagaagagaaaaaggcaccgcaagccccacggcccgcccaaaagaaaaccg

SEQ ID NO: 120974 - RNA, 85 nt, Homo sapiens
ccacggcccgagacacaccaggccggcaggcgagaaaagcgagaccgcggcgaggaccgggggggccccagcccggccgaacggg

SEQ ID NO: 120975 - RNA, 75 nt, Homo sapiens
cccgaaaacgccgaaccggcgaagaacaacagcagagcagagcgaaaaaaacaaggagaccccacaggaacagca

SEQ ID NO: 120976 - RNA, 78 nt, Homo sapiens
aggaagagacaggaggcagcagacggacaccagcgagaaccagccaaaacacacgaacagggaacaagaaacaccgaa

SEQ ID NO: 120977 - RNA, 63 nt, Homo sapiens
agagcaccaggcccaccggaaagggaaaccaaaccgcccaaccaaggcaagaacagcccacgg

SEQ ID NO: 120978 - RNA, 80 nt, Homo sapiens
gcgacgcaccgagaaaggaaggaaaaccgacgagggagccgccaccaaaagcagacggaaaacccacggggaagaccaca

SEQ ID NO: 120979 - RNA, 107 nt, Homo sapiens
gacggcgcaaccgcgcccgccggcccccccccgcgcccgcgaccgccgcggcgaagagggccagcgcagaagcagaaaacccagagcccaagcacacgcccaccaca

SEQ ID NO: 120980 - RNA, 59 nt, Homo sapiens
cccgcaagggagagccaaacacacacagaaccagggccgaaaacccagaagaacggcca

SEQ ID NO: 120981 - RNA, 72 nt, Homo sapiens
ccgggacacggccggaggggaagcacaagccacaacaccaggggggaaggaacaagaagaacccaacccacc

SEQ ID NO: 120982 - RNA, 80 nt, Homo sapiens
gcggcgcgccggaccagagcccgggaacgccagaggggaggcagggagcccagaaagaagagaaaaagagagagaagcca

SEQ ID NO: 120983 - RNA, 74 nt, Homo sapiens
ggcccagcaccccgagaaccgcaggagccagaggcaagaacggaagcacgggcggaggaaagcacaagcagagc

SEQ ID NO: 120984 - RNA, 81 nt, Homo sapiens
gcggcggcagccgcggcccgcgagagggaaaaggacgccgcggccccaggcgcgcggagagcaggggccgaaaagaaaaaa

SEQ ID NO: 120985 - RNA, 78 nt, Homo sapiens
acgaagcggggaggagcagaagagcccaaaaccaacgaaccaaaagcaaccgcgaagagcagaggccacaggggagac

SEQ ID NO: 120986 - RNA, 50 nt, Homo sapiens
ccggcgccgcgccggcggcgggccacgccgcaggacacagccgacagggc

SEQ ID NO: 120987 - RNA, 64 nt, Homo sapiens
agcccaggaacggccggaggacaggaaacccagcggcggcagaaccagccggcacaaagccgaa

SEQ ID NO: 120988 - RNA, 71 nt, Homo sapiens
ccggaaaggcgaccaagcaacaagaaagaggaagccggaagacgggaaaggaaacgagaacgggcagcgca

SEQ ID NO: 120989 - RNA, 40 nt, Homo sapiens
aaaaaaaggaagaggaccaaggcagaagcagcacacacaa

SEQ ID NO: 120990 - RNA, 76 nt, Homo sapiens
ggaacggagccggccaagggagaaagccgggccacaacccggcagagcagccgagaagaagccaaaaaacacggag

SEQ ID NO: 120991 - RNA, 77 nt, Homo sapiens
gcaaacccgggaggagccgagggccacagagccgaacacagcagagggggacaagcccacggagacgggagcggcag

SEQ ID NO: 120992 - RNA, 69 nt, Homo sapiens
ggaaacaacaacaggcaaaaagaaaagcccgaaggcaaaagggaaacaaccaaccccacacagaagaca

SEQ ID NO: 120993 - RNA, 38 nt, Homo sapiens
ggcaggggaccgcacagagcagcacaggaaggagaaaa

SEQ ID NO: 120994 - RNA, 63 nt, Homo sapiens
gcgcccccaaacgggaccgacagcaagaaaaggagaaaacaaggccgcgggcacacagcaacc

SEQ ID NO: 120995 - RNA, 69 nt, Homo sapiens
agggagcacccccacccaagaaaggaccagacaccagcacaggacgacgcagcacagagaggaaacgag

SEQ ID NO: 120996 - RNA, 89 nt, Homo sapiens
gagaaacaggcgccgcgggcccgcgcccggccggacccgggcccgagagcaagaacgaggccaaggaggagggacacagagacagcgaa

SEQ ID NO: 120997 - RNA, 80 nt, Homo sapiens
agccccaagaaagcccaggacgggccaagagagcccgggcccggaaaggcaaggacggggacacaagaccagccagccca

SEQ ID NO: 120998 - RNA, 76 nt, Homo sapiens
acggaaccgggagacagaagggccccaggggaagggaaccacccggccacccagccggcagggcaaccaaagcacg

SEQ ID NO: 120999 - RNA, 66 nt, Homo sapiens
acgcagggcgcccccgaagaaaaagcagcacgaaggcgaggaaccagcagacaaaaaagaagaaaa

SEQ ID NO: 121000 - RNA, 69 nt, Homo sapiens
cgaagagccacaccagcaccacggacagccccgggcgacaccgaaaacgagaaacgaaagagacacggg

SEQ ID NO: 121001 - RNA, 80 nt, Homo sapiens
acgaaggaagagcagcaaaggaagagaggagaaaggagccgaaaggcgaggccagccccaacccgccacgcccacaagac

SEQ ID NO: 121002 - RNA, 64 nt, Homo sapiens
gcccacaacaaccacagacaacggcaagcggagaagagcaaggccgaaccgagaggaagggcaa

SEQ ID NO: 121003 - RNA, 41 nt, Homo sapiens
gccaagccgagccgccacccggcagcgggaacagcccacgg

SEQ ID NO: 121004 - RNA, 76 nt, Homo sapiens
cgcaccagcacgaccccaccggcggcgggccggaagcagagcgcaggggccggccgccaagacacccccggcccgg

SEQ ID NO: 121005 - RNA, 74 nt, Homo sapiens
cccgccccgcccccggcgggcggcggaggccgcgagaaccgacgaggggggaagggagcagaacagggacggag

SEQ ID NO: 121006 - RNA, 76 nt, Homo sapiens
cccaggagagacccggaaggccaaaggcgcgcaaggaggaagcagaccaccgagagcggaagccccggaggaaccc

SEQ ID NO: 121007 - RNA, 72 nt, Homo sapiens
acggcgaagcaccaacgccaaggcccccacagagagcacacaaacaaagcgaaaccacggaagaaaagggca

SEQ ID NO: 121008 - RNA, 78 nt, Homo sapiens
gcccacgaggcaacacgcaaggccgccaccaggaacagagccgacaggcacgaagaaaaggaaaacccacgcgggggc

SEQ ID NO: 121009 - RNA, 78 nt, Homo sapiens
acaacgccggaagcacaggggaggccggagggagaggcagagaccggcaacgcacgaagaccaccaagaacagggaag

SEQ ID NO: 121010 - RNA, 58 nt, Homo sapiens
cccaaaaccggaacaaccacagcaccaggacgggccaagagcagcaggcgagccaacc

SEQ ID NO: 121011 - RNA, 78 nt, Homo sapiens
cccagacaggggaacagggcacagcccacccagggagcccacaggagacaaaagccaaaagaaccaccgagcagcaag

SEQ ID NO: 121012 - RNA, 75 nt, Homo sapiens
gagggggcccaggaacccgcacggaaaccagcacccaaaagcaagacccaagagagcccagcaacacaacagccc

SEQ ID NO: 121013 - RNA, 73 nt, Homo sapiens
aaagccaaggagccgcaggcacggcagacgaacaccagaccaagggccaggagaacaggaaaggggacaaacc

SEQ ID NO: 121014 - RNA, 82 nt, Homo sapiens
cagaacggaggcacacgcaaggcagaccgagggagaccaccccagcgggaagcccagggaaggcggcagggacgccacccca

SEQ ID NO: 121015 - RNA, 70 nt, Homo sapiens
cagccccgaaggccagagagaggagaaaccagaggcaagcgacgggaaggaccaccaaacccagccagcg

SEQ ID NO: 121016 - RNA, 88 nt, Homo sapiens
gaagaggcccagccggcccgcgggggagccccgggagccgcacgagcagagggaaggcaacacgagcggaagaacacacaccgggacc

SEQ ID NO: 121017 - RNA, 67 nt, Homo sapiens
caccggagcaaacaaccgaggaccaccggcaccacaccaccaaaggaggcagcacggcaggagacga

SEQ ID NO: 121018 - RNA, 71 nt, Homo sapiens
aaacgccccagagcaaaacgaagcacggacaagcagcgcacgaaccagaggacggggccgcgccagaaacg

SEQ ID NO: 121019 - RNA, 64 nt, Homo sapiens
cggaggaggggaccccaaagacaaggaggagaaaggaaaaaggcgagaaaccacaagcgaaaag

SEQ ID NO: 121020 - RNA, 55 nt, Homo sapiens
cgccggaaaccaacaggcgaccccaacagccaggcggccccgccgagcccgcgcg

SEQ ID NO: 121021 - RNA, 69 nt, Homo sapiens
cagcccagggaagagaagagcgcgccgacgaaaagccacaggaaagcgcacggcagcagcaaaaccaca

SEQ ID NO: 121022 - RNA, 54 nt, Homo sapiens
ccacaggaccgcagcaacagcgcggccacgaaacagcgaaacccaagcacgccg

SEQ ID NO: 121023 - RNA, 65 nt, Homo sapiens
ggcggacgggaaagcagacagaaaacacagagaaaacacggagaaacagcaacaggagaaaaggg

SEQ ID NO: 121024 - RNA, 57 nt, Homo sapiens
aaaggagcacgacggcaggaaggaggagacgaagaaaggagccaaggagaccgggag

SEQ ID NO: 121025 - RNA, 79 nt, Homo sapiens
ggccgcgccgcccgcccgcggcgaccacggaggcaggcgggaggcgggaggaggaagggaaggggccaaccaggagggg

SEQ ID NO: 121026 - RNA, 73 nt, Homo sapiens
ggcggcccaggagaaccgcgagacaacaaaacagccaagaagagggaaagaagacaggaaacaagggaaggac

SEQ ID NO: 121027 - RNA, 99 nt, Homo sapiens
gagcgaccaggggcgagagcgggcaccccccaaacgacgcagccacggagaggaacaggaaaagggaggcaaagacaaccagaaacccgccacgcagca

SEQ ID NO: 121028 - RNA, 81 nt, Homo sapiens
ggcagcacaagcagcagaaccggggacagcgcacagaggagggagaagccgcgcagcccaagccgcaaaagggggcaccgg

SEQ ID NO: 121029 - RNA, 69 nt, Homo sapiens
ggacccggggcagcaggcgaccaccggggaccagccaaagggcaaagaagccccagccccgaagaacca

SEQ ID NO: 121030 - RNA, 66 nt, Homo sapiens
cacggggcggacgacccagccggggggcacagccgggcaagaggaaaggcacagaggcccaaaaaa

SEQ ID NO: 121031 - RNA, 46 nt, Homo sapiens
caccccgcggccgcacccccgccccaggacacccgggaggaaccgc

SEQ ID NO: 121032 - RNA, 71 nt, Homo sapiens
aacaagaaacaccaacacaaaaaaaaccaacagccccccaggggaaaggaaggaaaaacgggaaaagaacc

SEQ ID NO: 121033 - RNA, 60 nt, Homo sapiens
ggcaagcacccccgccagccccgaaagcaggaccacagggaccaccgaagaccagaccgc

SEQ ID NO: 121034 - RNA, 75 nt, Homo sapiens
cagaaggccggccgggacccgaggcgagaggcgcggcgaccagggcggagaacggaaaagcaccaggaagcagag

SEQ ID NO: 121035 - RNA, 78 nt, Homo sapiens
ggaacggccggaggcgcccgcgagacgcagggccccaagggcagacagcggacagaaggggcggcaaccggcacgcac

SEQ ID NO: 121036 - RNA, 48 nt, Homo sapiens
ggagagcaaggaaggagggcagcccaagggagaacggaagcccgccag

SEQ ID NO: 121037 - RNA, 67 nt, Homo sapiens
accgcgagccagagacaggagggcggaggcacaaaagaaccgaacggaaaccgaacccaggaaagag

SEQ ID NO: 121038 - RNA, 87 nt, Homo sapiens
acccagcacgccgggccgggggcgcagcagggggacccgacgaccagggggagagacccgcgcccccccgagcccagggcacggcca

SEQ ID NO: 121039 - RNA, 71 nt, Homo sapiens
cgaaaaccagcgaccacaagccgagcgccccccaagggaaaaacgccacaaccaaacgcgcaaagcgccaa

SEQ ID NO: 121040 - RNA, 74 nt, Homo sapiens
acgaacaggcaaagcccaaaaggcaaggcacaaggacgaaagaggagagaacgaccccagggcaggaacaagag

SEQ ID NO: 121041 - RNA, 69 nt, Homo sapiens
caaggcggcaaggacccaccaaccgcaccagagacaggcagaaggcagaaaaaaaaggagaaggaaagc

SEQ ID NO: 121042 - RNA, 58 nt, Homo sapiens
ccgccgccgaggggcgggaacgaaacgccacgaaggaagacaggaggccgaggagaaa

SEQ ID NO: 121043 - RNA, 88 nt, Homo sapiens
gcagcagacgccaaggggggcaagggcggccggcccccgacagccaggcccgcgagaaacccccccagcgcccgccccagcacccgaa

SEQ ID NO: 121044 - RNA, 84 nt, Homo sapiens
aggcacaggccgcggaggaggaggaggggaggcgcccccggagccgccccggaggagaagagcagagaaagggggaggcggacc

SEQ ID NO: 121045 - RNA, 75 nt, Homo sapiens
gagggcgggggcagcggcaggcagaacaagcagaacagacgacaaacggaaggagcaaagggcggcaagacgaaa

SEQ ID NO: 121046 - RNA, 76 nt, Homo sapiens
aagacgccgcgccaccgagccggaccggagacggggccaacaggacaacacagagaaccggaaagaacaagccacc

SEQ ID NO: 121047 - RNA, 83 nt, Homo sapiens
cccgcccggcccgggaaacgaacaaacgcacggaccaagaaggacaagaaggggagaagaaaagaaacggcaaaagaaaaaag

SEQ ID NO: 121048 - RNA, 54 nt, Homo sapiens
acggcgccagcgagagcccaacaaggccacggggcgccggccacgaggggcgga

SEQ ID NO: 121049 - RNA, 63 nt, Homo sapiens
ggaggcgccgccagcggccgggaccgaacaggcgaagcaacagaacaacagagaagcccaggc

SEQ ID NO: 121050 - RNA, 63 nt, Homo sapiens
ggaccagcagcgcgccgccgcccaggagagccaggaaccccaagacggaggacacacacgcac

SEQ ID NO: 121051 - RNA, 82 nt, Homo sapiens
ggcccggggcccgcagggggcacccggcagaggaccagcagaaacagaaggggaacaacggacaggaagacggccccccaag

SEQ ID NO: 121052 - RNA, 79 nt, Homo sapiens
cggccgccgagaaggaccgcgcgcgggagcgaggcccgcggagcgccgccgcgcggagaaagacagcaaagaaaaggag

SEQ ID NO: 121053 - RNA, 71 nt, Homo sapiens
cggacccaccacaccgagcacaggcccccggagggaggccagacaccaggacagccaggagacccgccaaa

SEQ ID NO: 121054 - RNA, 55 nt, Homo sapiens
gacagggcccgggcacaaaaaccgacgagccagagcgccgcaaggcacagccagc

SEQ ID NO: 121055 - RNA, 65 nt, Homo sapiens
aacggagagggaaccacccgacacacagccaggcccacgggaaaagagacaccaacgaagaggaa

SEQ ID NO: 121056 - RNA, 76 nt, Homo sapiens
ccggcccccaaaggcggaacagaaccggaagagccacccgagaaacccgcagagccagcccgcagccagaagccac

SEQ ID NO: 121057 - RNA, 75 nt, Homo sapiens
accacggcccgacgccgcaaaaaaacccagggaccaggaaacgccggaaggaaccggaagggagaaaacaggaaa

SEQ ID NO: 121058 - RNA, 68 nt, Homo sapiens
gggaagaggacgcgagcaaacgcccgggggaggagagccgggaccgcaccagcacacagggccgacgg

SEQ ID NO: 121059 - RNA, 37 nt, Homo sapiens
ggcggagacgcacaggcccggcccagccccccccgcc

SEQ ID NO: 121060 - RNA, 77 nt, Homo sapiens
gggagagcggccgccgccgcgccgcccaccacaggcgaaagggcgggggcgccgaggaagaaccgggggggacagcc

SEQ ID NO: 121061 - RNA, 55 nt, Homo sapiens
aaggagccagacacccgcaaaagagagacgcagaaggacgaacacaaaggggcag

SEQ ID NO: 121062 - RNA, 82 nt, Homo sapiens
gcaaggggccagaggacagaggacagaaacagaagaggaggaaaagcaaagagcaaaagcaagaagaagagaggcagaaggc

SEQ ID NO: 121063 - RNA, 79 nt, Homo sapiens
gacaaagggaagagcaggagccgaggcaaaacggacacagaagacagggacccggacaagcgaccggaaagaaggaaga

SEQ ID NO: 121064 - RNA, 62 nt, Homo sapiens
agccgggagcgcggggcgggggcgcccgccgcgccgccacgggcggagaacggaaaagcacc

SEQ ID NO: 121065 - RNA, 80 nt, Homo sapiens
agcccgcagaccgcagaaggccggagacaccagcagagggaagaggaagcgcccagaagaacaggccccaagaagaccgg

SEQ ID NO: 121066 - RNA, 81 nt, Homo sapiens
cggaagcccccacgggccaccgacccgcagcaccgacccccgaagagcagaagaaacagagcgcaagacacaggacacaac

SEQ ID NO: 121067 - RNA, 74 nt, Homo sapiens
ccccagaggcaagagccaccggcgggcccccggcaacagccacagcagagaaacagaaaacagccaaaaggaca

SEQ ID NO: 121068 - RNA, 69 nt, Homo sapiens
gcccgcaccgcaccccacagccgccagggccgcaacgggagcgcccgccaagaggagggcaaaagaaac

SEQ ID NO: 121069 - RNA, 81 nt, Homo sapiens
gcggggcggaggacgcggcagcccgggagcggcgagggaaaagcgaggcaaggcaggcggggcagcggcaaggagcgaagc

SEQ ID NO: 121070 - RNA, 69 nt, Homo sapiens
cacagagacaagcaagaaagaaaacccccgaccagaggagcaccagagccaggaggccgacccgacccg

SEQ ID NO: 121071 - RNA, 66 nt, Homo sapiens
gccacaaagagaagcaaaccgcacaggccagaacggcgaagaaggaggggaagagcaagcgaggaa

SEQ ID NO: 121072 - RNA, 70 nt, Homo sapiens
gagcccagcagaagggcaaccgagcgccgacccaggaaaagcaacagcagcagcaaagaacacaccaaga

SEQ ID NO: 121073 - RNA, 73 nt, Homo sapiens
aacagcagcaagaccccccgggaaccacccgcgcccccagagccgcacccgaaggaccaccccagagcgaggc

SEQ ID NO: 121074 - RNA, 79 nt, Homo sapiens
aacccggaggaggcgaccgcggcgcagcgacccccgccaggcaaaaggaagagcggggcccggcgcacccaccaccgcc

SEQ ID NO: 121075 - RNA, 86 nt, Homo sapiens
gaagaggcgacgaggcacagaggaaggggagggccagcccgcgaaccggccggagggcggagaacggaaaagcaccaggaagcaga

SEQ ID NO: 121076 - RNA, 77 nt, Homo sapiens
gccaacagcagaagagaaagccagaccacggacggaagacaaaagagggaagagaagcccagacacgaagaagagag

SEQ ID NO: 121077 - RNA, 76 nt, Homo sapiens
aaacgaaggcacgggccagaaggacaaagaccaggaggagaacagccgaaagggccgaggggaagagcccaagccc

SEQ ID NO: 121078 - RNA, 73 nt, Homo sapiens
ccagggcggcgccaaggagacgcaggacaagcggcagaaaaaacaacacgggaaagcaacagaaaggggcgac

SEQ ID NO: 121079 - RNA, 51 nt, Homo sapiens
gacagaacaagcaaagggacgccaaaccaccggccaggaggcacaggacgc

SEQ ID NO: 121080 - RNA, 35 nt, Homo sapiens
aacagcaagggcggccaaagacaggccagcgggga

SEQ ID NO: 121081 - RNA, 102 nt, Homo sapiens
gaacccgagaggaggggaccagaacggaacaggccggcggccccaccccccaggaaagggagagaggagaaccaggcagcccgggccagccgcggagccagg

SEQ ID NO: 121082 - RNA, 72 nt, Homo sapiens
agcaaacgaagagccggaagaggacgaacccagagcgcacaagaccaaaggaacaggacacccaaccgcgag

SEQ ID NO: 121083 - RNA, 101 nt, Homo sapiens
cacacggcaaggaggacacccggacaccggaagcgggaaagagccgaggaaggcaccaggagaggaggaggggagacgcccaggcagaaagcccaaccagc

SEQ ID NO: 121084 - RNA, 61 nt, Homo sapiens
cagaagcgggcggcgcgggggagagggccagaagcccccaggaggagaacgagcaacggaa

SEQ ID NO: 121085 - RNA, 74 nt, Homo sapiens
gaccaaacgagaggcgggcaggaggacccaaacgaaggcccaaagcaacaccagaaaacagaacgcagaacagg

SEQ ID NO: 121086 - RNA, 85 nt, Homo sapiens
cggccaggcggccccgagcggaacggagaaagcgagggcaaaaagggcgagacgaaaaacaagcaccaggaaggagcaagaccgg

SEQ ID NO: 121087 - RNA, 70 nt, Homo sapiens
gcgcgacaggaacgggagcccacaggagacaaaagccaaaagaaccaccgagcagcaagagaaagagaca

SEQ ID NO: 121088 - RNA, 84 nt, Homo sapiens
gcagcagcagcagcagcagaaagcgggcgagcagcaggagcgagcccgaggacaggagaggaaggaaagaggagggagggaggg

SEQ ID NO: 121089 - RNA, 76 nt, Homo sapiens
gaggaacaaaacagccagagcaggcacgaaaagcagaaagaagacaaggacaaaaaggaggggcgcagacaaaaaa

SEQ ID NO: 121090 - RNA, 59 nt, Homo sapiens
accaggccaccacagaaacaaaagcaacaaagaggaccagaggggaggccgcgagcccg

SEQ ID NO: 121091 - RNA, 73 nt, Homo sapiens
cgagcgaggcggagggagaaggcaaaggggccagggggcagcaaggcccaggggggacaaagaaagaaccagc

SEQ ID NO: 121092 - RNA, 72 nt, Homo sapiens
gccgggccaaccgaaaggcccagggcgacagccacccggaggggagagggccggcacagcaagaagagagga

SEQ ID NO: 121093 - RNA, 70 nt, Homo sapiens
gagaccgaagcaccgggaggaagaccaggcagaccggccaggagaagcagcgccgaaaagggaggaagcg

SEQ ID NO: 121094 - RNA, 76 nt, Homo sapiens
acgacgccgagggcccgcccagagcgcggaacgggaaaggggccagcagggcaggacgacggccaccggcccagaa

SEQ ID NO: 121095 - RNA, 54 nt, Homo sapiens
ggagaggcggaggccaggcagcgaggagccaggcacagcagggaccagaaacgg

SEQ ID NO: 121096 - RNA, 69 nt, Homo sapiens
caagcggaaagcacgcgcacagaggggccagcacgaaagcagccaggagaagagcacaagaaacaagag

SEQ ID NO: 121097 - RNA, 53 nt, Homo sapiens
aagaaagaagccccagcaggcacagcagcccggaaacgagggagcacccacgg

SEQ ID NO: 121098 - RNA, 58 nt, Homo sapiens
gcagggccggcggcggaaccgccaggccgagccggccggcgggaaaaaggaaagggga

SEQ ID NO: 121099 - RNA, 75 nt, Homo sapiens
aggcgaaagcggaacgaggcgacgccggaccgcgaagagacgagaggggcacggaaggggagagggacggggaag

SEQ ID NO: 121100 - RNA, 81 nt, Homo sapiens
ccgccgcccgggggcgccgcccaccgcgcccgccgaaaggagacacggcgcgccgcagcagggggaagaagagaaaacgag

SEQ ID NO: 121101 - RNA, 77 nt, Homo sapiens
agcaacccccggcgaccaacccgaccggcgggacggcaggcgaagggagggccgccccaaccgacgcaccagccgga

SEQ ID NO: 121102 - RNA, 53 nt, Homo sapiens
gcgaaccaccccaaacagaaccggaacagaagacagggaaggacccaagagcg

SEQ ID NO: 121103 - RNA, 69 nt, Homo sapiens
ccaggccccggggacagccggcacagcgggagagggacggaccagcagggcgggcccaaaagaagaccg

SEQ ID NO: 121104 - RNA, 77 nt, Homo sapiens
aaaggacaggacaaccccgcccaacacccaccgagaagcaggaaagggagcagcaccggccacacccacagcacgac

SEQ ID NO: 121105 - RNA, 80 nt, Homo sapiens
aaacgggccccccggcgagagacgcagccccgcacagaacgagacgacaccaagaggaaaaaccaggcaaggaagcacaa

SEQ ID NO: 121106 - RNA, 78 nt, Homo sapiens
ggcccaacgccacaaaggccggcacacacgcggagccccgccgcgcgcgaccagagcaaggagaagcgcgcgcccggg

SEQ ID NO: 121107 - RNA, 65 nt, Homo sapiens
gaagcagaaacagaaaagccccacggcccaagcaaccaggaacagaacggggggcacccacccca

SEQ ID NO: 121108 - RNA, 44 nt, Homo sapiens
agacgaagcgggcggcgaagaccgaggccaaaagaaaggaagaa

SEQ ID NO: 121109 - RNA, 78 nt, Homo sapiens
gacccgccgagccccggccccaagaacgccgccgccccggagccgcccaagggagggaaaaaacaacaagacgcccaa

SEQ ID NO: 121110 - RNA, 83 nt, Homo sapiens
cggagacagcccaaaacccggaagagcgccccaggagaaacaaaagcgaagcggacggagggggcacaaaacccagagacgac

SEQ ID NO: 121111 - RNA, 87 nt, Homo sapiens
cgggaggcaaaggcacaagcgccccagaggacacacgccaagcccgggcgcgccaggcacagccaagagcggaccggcagcggccag

SEQ ID NO: 121112 - RNA, 82 nt, Homo sapiens
aggagccccacaagcaccggcccaccacccccgcgaccacacgggggcccagaaaacgcccaggagcgcaggccggaccacg

SEQ ID NO: 121113 - RNA, 73 nt, Homo sapiens
gacgaaggaccgggcccaggcggcacacagcccgcggcgccacacgcaaaggggagacaaaccacagggaagc

SEQ ID NO: 121114 - RNA, 114 nt, Homo sapiens
aggggacggagcaggagaaagcaaaggcgccgaagcgcacgaccccgacacccccaagaaaggcacccgaaaggggaaggaaaagaaggaagaacaggcacagcccggacccag

SEQ ID NO: 121115 - RNA, 69 nt, Homo sapiens
cagaacgaacaagccaacagggacaaaggaaaaagaggaggaaaacagcagggacgaacaaaagcgaga

SEQ ID NO: 121116 - RNA, 86 nt, Homo sapiens
caagaggacacgacggcgaccggggggacagcggagaggaaggaagcgaggacgggaagaccacgccccaagggagcaaaaaacag

SEQ ID NO: 121117 - RNA, 71 nt, Homo sapiens
agacgcggcggggcgcaaaccgagacaagcaccccgaagcgccgccacacccacgccccaacgccgcccac

SEQ ID NO: 121118 - RNA, 72 nt, Homo sapiens
ccgggccgaaggcgcggaaaacacagcccgcagcccgcccaaccccagggccaccgggacaccccgggagac

SEQ ID NO: 121119 - RNA, 69 nt, Homo sapiens
gagaggccaagcgggaccgccagaacaagaagcacagggaggccaccgacagagccgaaaagaggagaa

SEQ ID NO: 121120 - RNA, 86 nt, Homo sapiens
gagagacacccggagccgcagccagcagaacgggaagcaaaacgagagcgaccagggggaaccgaaggagccaggcagacagcgcc

SEQ ID NO: 121121 - RNA, 72 nt, Homo sapiens
cagcagggcacacaggaaggaacaggaggaaaccacagaggcgggcgcggacggcaggggcgccggggaacc

SEQ ID NO: 121122 - RNA, 81 nt, Homo sapiens
gccacagccggaccacggccgcacgcgccgcagcgggaggacgacggcccccggacgcgccagcacgcagagagaggaggg

SEQ ID NO: 121123 - RNA, 67 nt, Homo sapiens
cagacaggcaggcagacaccccggggcgaaaaacagggcaaagaccggccagagaaggagaacaaga

SEQ ID NO: 121124 - RNA, 65 nt, Homo sapiens
caagacgcgagagaccacagagacaagacacgggaagcaggacaccaaccgacaagccaacggaa

SEQ ID NO: 121125 - RNA, 54 nt, Homo sapiens
gcagcccccagagcgggaccacagaccagaagggaaagacagcacacgacgccg

SEQ ID NO: 121126 - RNA, 70 nt, Homo sapiens
cggcccgaccggccgcgacagcgaacagcgcggccgcagcacagccgaccaaccaaacaacgaaacagcg

SEQ ID NO: 121127 - RNA, 69 nt, Homo sapiens
gccgccaggaacgaaaaagggagcggcaggggaggcgaagaagagcccggacagaaagacgacaaaaaa

SEQ ID NO: 121128 - RNA, 79 nt, Homo sapiens
agggaaggaaacgcccagggggacgagggcgagggagaaccaacagcagaagaagcgagcccgacgccaggaggagcga

SEQ ID NO: 121129 - RNA, 78 nt, Homo sapiens
cgcagccgagagccgggggagcggggccccacacccccccgggggggcccgccgcccgcagccaaccgccgggacgac

SEQ ID NO: 121130 - RNA, 78 nt, Homo sapiens
acgccaggcagcccgagcagaggaagagcaggggcacagagagaggagagagaccagagcccccggaaagagccgccc

SEQ ID NO: 121131 - RNA, 85 nt, Homo sapiens
agaggccgccacaaccgccagacaaccggagccacgccccacgaccgccaggaccggccgggccgcagcacacaccggccacacc

SEQ ID NO: 121132 - RNA, 67 nt, Homo sapiens
gacaccggcgcagccagcgaacccacgagggaagagaacaaccccaaccaggcaccaaaccagaacc

SEQ ID NO: 121133 - RNA, 78 nt, Homo sapiens
gcccagccaacgcgcgcaccagcgcacggaacggcggagaacagaggaagcgcgcgcagaaggggaagggaacaaagg

SEQ ID NO: 121134 - RNA, 72 nt, Homo sapiens
gaagggccccgaaggcacgccgcggcgcaggacacacgaagccgagaggcacggggccaaaaaggcacgagg

SEQ ID NO: 121135 - RNA, 75 nt, Homo sapiens
gggaccggagccgggcccggcgcagaggggcggcccaagagccacccgcaccggggcgccgcgaggggcaagagc

SEQ ID NO: 121136 - RNA, 100 nt, Homo sapiens
gggagcgaagcgagggcgaagcacgacacagaaggggaggggagggaaaggcccaggaaaaagagaggaaagcaagacagagaggacaagcaagaaacga

SEQ ID NO: 121137 - RNA, 73 nt, Homo sapiens
acgaaaggcagaacggcggaaaggaggcgaagaagagccaccaggaagcagcgaagacggagaaaaggacagg

SEQ ID NO: 121138 - RNA, 80 nt, Homo sapiens
cacaaacgaaggcaaggcacgcaggaggagaaccgcgaccgcgcaaagccagcggaccacgcccccccagccggcgacca

SEQ ID NO: 121139 - RNA, 76 nt, Homo sapiens
cgccgcgaggagacagaagggcagagggccagacccccaacaaagccaaaggagaaacggacccagcaggggcagc

SEQ ID NO: 121140 - RNA, 66 nt, Homo sapiens
gaagcccacacacgccagcagaccaccccgggagggaggagaacaccccgaaccccagcagcccac

SEQ ID NO: 121141 - RNA, 73 nt, Homo sapiens
aaacggcgacacaaaaagagcgaaagagagagagccaacaagagccagacaaacaggagaaagaagaaacaaa

SEQ ID NO: 121142 - RNA, 77 nt, Homo sapiens
cggagaaacagcaacaggagaaaaggggagaggcaccaacaggagcaggagccaaagaccacgggggccaaacacca

SEQ ID NO: 121143 - RNA, 75 nt, Homo sapiens
ccaacacagagccaagcgccaagaagggaccacagaccagcacgccggcgccacgaaccgagcgacaggacgggc

SEQ ID NO: 121144 - RNA, 54 nt, Homo sapiens
ggaccgaaacagaaacggaacaccaaggaaacgggggcgcacaggaaacagaaa

SEQ ID NO: 121145 - RNA, 72 nt, Homo sapiens
gcaagagagaggggaaagaccagccagacaaacaaggccaagcaacaggagacacaagcagccacagcaagc

SEQ ID NO: 121146 - RNA, 82 nt, Homo sapiens
cccgaggcccagaggaggaggcacacaagaaggggcagagaggagagaggccaaggccgcacggaagcagcccgcccaagac

SEQ ID NO: 121147 - RNA, 76 nt, Homo sapiens
cacgccgggaaagcaagccgaaaaagggggaaaaacgaggccgggaaggaagcaccaaccaggccacaaacccaca

SEQ ID NO: 121148 - RNA, 73 nt, Homo sapiens
gaaggaagagggaagcgaagagcaggaccccgagcggcccgcaaaccccgccgagccgccgagcggaggcgag

SEQ ID NO: 121149 - RNA, 78 nt, Homo sapiens
cggcacacacggggagaagccggagagcgaaagagcacaagaacaccgggccgacgccaccgccgagcccagaccgga

SEQ ID NO: 121150 - RNA, 38 nt, Homo sapiens
ccggaagagaacgcgcacagaggccgggggggcaaagc

SEQ ID NO: 121151 - RNA, 79 nt, Homo sapiens
cggaggagccaggacgcagcccggcggacgccggcacagaacggcccacggccccacggggcgacgagccacgggcggg

SEQ ID NO: 121152 - RNA, 72 nt, Homo sapiens
gcagagacgaacaggaagagaaaaagaaacagcggaaagaggacggccagggcgggggagaaaggaagaaac

SEQ ID NO: 121153 - RNA, 57 nt, Homo sapiens
gagagcagcacccggaaagagaaaccccaagccaaaggccagacaacacagggacac

SEQ ID NO: 121154 - RNA, 70 nt, Homo sapiens
cccacaggacaaggacccgccgacgcaaaaccgggcgcacacgcccacgacgccaccgacacgcacggaa

SEQ ID NO: 121155 - RNA, 79 nt, Homo sapiens
cggccggcgagaggaccaacggagcgcgaggcgggcgcggagaagcgcggaggacagcggccgaagccagagccggggc

SEQ ID NO: 121156 - RNA, 74 nt, Homo sapiens
cgcagggcgcccccgaggccggaagagcgggagcgggagccaggcagaaggccaaccaaccccaggaaaagcca

SEQ ID NO: 121157 - RNA, 80 nt, Homo sapiens
ccggagcaaacgacgagaaagcccacagccaaagccgggcggacgcggagacgcaggcagaaggaaagggcgcagaccgg

SEQ ID NO: 121158 - RNA, 41 nt, Homo sapiens
gcagcaacggcgacaccagcaagacgaagaagacacgaaca

SEQ ID NO: 121159 - RNA, 67 nt, Homo sapiens
ggaggccaggacggagagggagaagcgcgcaccaaggccccagaacccgaagcccgccgaaggccca

SEQ ID NO: 121160 - RNA, 71 nt, Homo sapiens
cggaagcgacggcacggaggcaaagaaccgaagaagaggaggggggcaccggaaagaccacagcaagacca

SEQ ID NO: 121161 - RNA, 67 nt, Homo sapiens
aggagcacagaacgccaggaccaaaacagggagaaacacagccagaaggagaaaagaaagccagaag

SEQ ID NO: 121162 - RNA, 67 nt, Homo sapiens
gggccaaccgaaacagcaagaacacacgaaccacagcgaaacaggcagcaaccagggccccggaaga

SEQ ID NO: 121163 - RNA, 78 nt, Homo sapiens
gacacaagaagaaaaacgaaccacgagcggaagcacaacgggaagaaagcaccaaaaagcccgggcaccgcccagcgc

SEQ ID NO: 121164 - RNA, 71 nt, Homo sapiens
gcaaagaggagagacaccggagaggagggagaacaagacgaggaacaaaaacacacaagacaacgaagaag

SEQ ID NO: 121165 - RNA, 69 nt, Homo sapiens
cccacgccgaggaagcgcagcagccgggcaggccacgagaggaccagacccaggaacagggaaggagga

SEQ ID NO: 121166 - RNA, 54 nt, Homo sapiens
gacaagacaaacccaggaaagccacagaagcaaaaaaggagaccgagagagaag

SEQ ID NO: 121167 - RNA, 79 nt, Homo sapiens
ggacagcgagagcggcccggacgacaagggcgccacccagcccagcaagagcaccggggcggcagcagggggagcccag

SEQ ID NO: 121168 - RNA, 60 nt, Homo sapiens
gaagagccagcacagacccgagggcgcgaggcacgggcgcggagacgggacacagaaccg

SEQ ID NO: 121169 - RNA, 77 nt, Homo sapiens
aggcaagacccacccaagcacacccaaggacagcagcccaccaagcacagacaagcaaacagcgcgagccacaaggc

SEQ ID NO: 121170 - RNA, 59 nt, Homo sapiens
ggaacagacgcagggcagggccccgcccggcggggaaggggaagaaacgagcgagcccg

SEQ ID NO: 121171 - RNA, 68 nt, Homo sapiens
caccacgcagagggacgagcagagaacagcaaaagagcacaagggaagaggagcggaaaaacaagcaa

SEQ ID NO: 121172 - RNA, 75 nt, Homo sapiens
gaaggcgcacaccccagcgcgcaaagcgcgaggggcgagaggcgggagcaccagacagcgacagacgcaaacacg

SEQ ID NO: 121173 - RNA, 58 nt, Homo sapiens
gaggagcgggaaacgggagggaaccagcaacaagccgggcgcagaaaggggaaagcga

SEQ ID NO: 121174 - RNA, 82 nt, Homo sapiens
acaacaccagaaaaaagcgagacggaaggagcaggcagcggccaacagggcaaggggccggccagaccggagcgagacccaa

SEQ ID NO: 121175 - RNA, 64 nt, Homo sapiens
gcggacggcggcagccaccgccgagccccaggccgaagaacaggagaaggaagaacaaagaaag

SEQ ID NO: 121176 - RNA, 80 nt, Homo sapiens
ccggaggacccagggagcacggccagaggaccaggcgaccagcaccagcccgaccaggaaagaaggagggagaggaccgg

SEQ ID NO: 121177 - RNA, 72 nt, Homo sapiens
ggaccaagaaccagggaggacaccaggagaacgaagcaaaagcgggccgggaccggcacagcagcacaagcc

SEQ ID NO: 121178 - RNA, 70 nt, Homo sapiens
caacccaaaaccaacgagaaccagccaaaacacacgaacagggaacaagaaacaccgaagaagagcaaga

SEQ ID NO: 121179 - RNA, 76 nt, Homo sapiens
agaagaagggaaggcgcgaggaggaaaggaggacgaggcggagcaggagcaaaggagcaagaaaccagacccggaa

SEQ ID NO: 121180 - RNA, 69 nt, Homo sapiens
gagcggacgcccaggaccggaacagacgagaacccagaggccccgcaacggacgcccacaggacaaacg

SEQ ID NO: 121181 - RNA, 62 nt, Homo sapiens
gagaacacccccccaggaggcgaggagagggggcgcagggacagggccgggcgccccaaccc

SEQ ID NO: 121182 - RNA, 72 nt, Homo sapiens
gacgcgacaaagacaggaaaaaccagaagagaaaaaacaaaggggagaggcaccccgcgggacgaccggaca

SEQ ID NO: 121183 - RNA, 78 nt, Homo sapiens
aaggaggacacccggacaccggaagcgggaaagcaacacccccagggagcgggggcggaaacacggaagagggggagg

SEQ ID NO: 121184 - RNA, 64 nt, Homo sapiens
ccaaacgccaagaccacggcaccaagcgcaagccccggggcagagacacaggacacccacccgc

SEQ ID NO: 121185 - RNA, 75 nt, Homo sapiens
aaaacgggcagggcagccacaaagaggagcacgagaacagcaagacggaacgcaaacgcccaagagccgcccccc

SEQ ID NO: 121186 - RNA, 63 nt, Homo sapiens
ggcccacgacacccacccggcagggcccagacccacaaccagcaacccccaggccaaccacaa

SEQ ID NO: 121187 - RNA, 79 nt, Homo sapiens
ggagccgaagcgaggcggaaaacgaagacagcaggacaacccgccacaacgacaaaggaccccaaagaccccggaaggc

SEQ ID NO: 121188 - RNA, 88 nt, Homo sapiens
caccggcggccccaccagcagacgcagccgagacaccagcccgaaacaccaccaagagcccgaggagagacaggaaggccgaaggaga

SEQ ID NO: 121189 - RNA, 76 nt, Homo sapiens
agccagacagccaggacaggacaccaccagagcccacacagaacacacaaagaacgaggacaccaccccggggagg

SEQ ID NO: 121190 - RNA, 80 nt, Homo sapiens
ggaagagggagcaccacggaccccaaggaagccacggcagacacacaacccgacccgacgacgcacagagcagaggacga

SEQ ID NO: 121191 - RNA, 73 nt, Homo sapiens
cgacagggccagcaacaccgggcaccgaacgggggggagcggcaccccagcaccagcccagaagccaaggagg

SEQ ID NO: 121192 - RNA, 81 nt, Homo sapiens
gaacggccacgaggacccaggcacggaggagggaaagaaggccgagaagagacaggcaggccggggcagcccagccgcgcc

SEQ ID NO: 121193 - RNA, 70 nt, Homo sapiens
ggacagacccacaacaccaggcgccaggaaagggagcgggggaagagcagccaagcggcagaagcaggga

SEQ ID NO: 121194 - RNA, 80 nt, Homo sapiens
cggcccccccccagcccgccccaaaaggggagccgccaccaaaagcagacggaaaacccacggggaagaccacaccccga

SEQ ID NO: 121195 - RNA, 77 nt, Homo sapiens
ccggacgaaccccaggaagcgccaggaagaaagaacaggagaagagcaggagggaggacaggcaggggagcgggagc

SEQ ID NO: 121196 - RNA, 73 nt, Homo sapiens
ccaagagcggccccgagagccgcgccgcagggcgcccggccgccaggccagcggcgggcaacacaacaaggcg

SEQ ID NO: 121197 - RNA, 86 nt, Homo sapiens
agaggaggggcagcaaagaggccgaggagagcccgccggcaacacgggcggcgcggcccggaggagccccgggggaccggcgcaag

SEQ ID NO: 121198 - RNA, 74 nt, Homo sapiens
aaccaggagggcaccaaacaaaaggaaaccacaccaaccaagaagagccagccagggaaacgcagagaccagag

SEQ ID NO: 121199 - RNA, 79 nt, Homo sapiens
ccagccagaaaaaacacagccgacagacgccaccaaaagcaccaggaagacggaaagggccaggacccaccggccagca

SEQ ID NO: 121200 - RNA, 67 nt, Homo sapiens
acagaaaaagaagaggcccaccagacagagaccagagaaggacggagaagcgaaagccagaccggca

SEQ ID NO: 121201 - RNA, 78 nt, Homo sapiens
ccaggacaaaggaggacagcaccaaaaaccgagaacccccggcccagacagcaagaggcacagaaaacgcagaaagga

SEQ ID NO: 121202 - RNA, 74 nt, Homo sapiens
cgacggccccacccccgagcccagcaccgcgggaagcaccaccacaggagcccgggacgaccgccgagcaaaca

SEQ ID NO: 121203 - RNA, 77 nt, Homo sapiens
gcggcgcgaggcgcggggagcccgaaccgccggcgcccggccaggcggcccagaccgaaaagccgggaacccacaga

SEQ ID NO: 121204 - RNA, 66 nt, Homo sapiens
gggaacagcccaagaggaacaaagacggagagcccagagacacaacacggccccagggccacccag

SEQ ID NO: 121205 - RNA, 84 nt, Homo sapiens
cggggagccggcaggacccgaagacgaggagcggcaggccaccacgagaagcagggacgccgcccgacgagccccggaagccca

SEQ ID NO: 121206 - RNA, 38 nt, Homo sapiens
gaaccagcaacaagccaggcccgacaacaagccaaaac

SEQ ID NO: 121207 - RNA, 74 nt, Homo sapiens
gagcgggcgcgcgcgaccgcgccccgggcagcccaaggccaaccccacgcaccgcccgccccccgaggagccca

SEQ ID NO: 121208 - RNA, 54 nt, Homo sapiens
gcacggagccggacacgaaacgaagaagagccgccccacacgcagaaaagggag

SEQ ID NO: 121209 - RNA, 72 nt, Homo sapiens
ccgcccggaacacacaacaacacagagggagagcccgaccagagaaaaggcggaagaccgccaaaaaggaca

SEQ ID NO: 121210 - RNA, 70 nt, Homo sapiens
acagagcagacccggacggaacaggcaaaagagaggcagcacggcaggagacgaggagaggacagcagga

SEQ ID NO: 121211 - RNA, 76 nt, Homo sapiens
agaccagcagcacaaaagcggcagaagccccagaggagcccgaaacccccaggcgggcaggaaggagagccccagc

SEQ ID NO: 121212 - RNA, 77 nt, Homo sapiens
caaaacgaaacacagggcggcggcagcgagccagcagcgccccccagaagcgaggaacagaccgaaacaaggacccc

SEQ ID NO: 121213 - RNA, 80 nt, Homo sapiens
aacccaggaaccggccgaggacaccaggggggaaaaaccacacaggcaaagaacgcgcaaaacaggacgaaaacaaaggg

SEQ ID NO: 121214 - RNA, 88 nt, Homo sapiens
cgggaccaggcgaagcggccgagcaggcgagcgaacgacgcacgccaggaaagagagaagaaaaccgaacaacaaaccagaacaagag

SEQ ID NO: 121215 - RNA, 60 nt, Homo sapiens
gggaccaggaaagacaggacaccgggaagcggcgaagaccagggccacagcccagaaacc

SEQ ID NO: 121216 - RNA, 48 nt, Homo sapiens
agaggccccagcccggaaaaggaggcgaacccccagaagagcaacgga

SEQ ID NO: 121217 - RNA, 75 nt, Homo sapiens
aacacccgaccccgcacagcagggagcaagcacggcacaaaccaacaaagagacaagccaccacgaagggccaaa

SEQ ID NO: 121218 - RNA, 81 nt, Homo sapiens
aaagccggaggcccgaccccagaagagacccagaaaggggcgagagccacagaaggaggaggggacagcagcaggagccca

SEQ ID NO: 121219 - RNA, 80 nt, Homo sapiens
aaagaggaaaaccagagaaacaagaggaggaggggcccagcacaaaacacagacaaagaacgcacgcagaaccagccgag

SEQ ID NO: 121220 - RNA, 80 nt, Homo sapiens
ccgaagccgcagggaggggaaacgaagcgcacgaaacaccaagcggggcacaggaagaacgcgagaagacaagcagcaaa

SEQ ID NO: 121221 - RNA, 71 nt, Homo sapiens
gcgacgacaccaacccgccccgggccaagcaaccccacccagccgggagcaagaggcagacagaccgagac

SEQ ID NO: 121222 - RNA, 71 nt, Homo sapiens
acgaaaaacgcagaaggagccccccaagccgggcggggagcccgacgagcacaaggacccgcccaccacgc

SEQ ID NO: 121223 - RNA, 79 nt, Homo sapiens
gaccacagccgaggagaaccgccccgccaaggagacgccccacgaggcccaaaccgccaaggaaagaccacagcaagac

SEQ ID NO: 121224 - RNA, 73 nt, Homo sapiens
gcaaaccccccaacaagcaccgaaaacaggaaaaaagggagcacacgaggggcgcgccagagggagcaacacc

SEQ ID NO: 121225 - RNA, 55 nt, Homo sapiens
ggggaagaggcccgcccagcgaccaggggagaaggacaagcagacacgaaacaca

SEQ ID NO: 121226 - RNA, 123 nt, Homo sapiens
ggcggcccagcgacggcaccgaggccaaggggagaggcccaggcgagggaaggagcacccaggagcgaaggaggagagaccagcagcaaacccacgcggcgcaccgcacaccagcgcggccca

SEQ ID NO: 121227 - RNA, 74 nt, Homo sapiens
accaaacaggccgacggcggaaggaagggcacaacagccaacagcgaaaacccacgcagcaaccagagaagccg

SEQ ID NO: 121228 - RNA, 86 nt, Homo sapiens
aaagcgaaggggaaggcgccgaagaggacgaagcccgcaccacccccagccccacaccaaggcccagcgcccccccagacccgaca

SEQ ID NO: 121229 - RNA, 76 nt, Homo sapiens
cggcggcggagagaagcgccaaaggaccggacccagagaagaggaaaaccaccgggcaggacaggagagacaacgg

SEQ ID NO: 121230 - RNA, 92 nt, Homo sapiens
gacaccaaaaagcaaacggaccagaccgaccaccaaaaggcggagaacggaaaagcaccaggaagcagagaggaccgcagaagggaaggaga

SEQ ID NO: 121231 - RNA, 73 nt, Homo sapiens
gaacagaggcccaagaacacgccggggggggcacagagccccggaagacagcccccagcgaccagacccaggg

SEQ ID NO: 121232 - RNA, 77 nt, Homo sapiens
cagccaggaagagccgggaagcagcaccaacccggcccaccaaaccccagaagaccccaacgacaaaagccgcagac

SEQ ID NO: 121233 - RNA, 79 nt, Homo sapiens
aggaaaagaggcccgcccccacccgcgaggaagagaagacggggccgggagaggaaggccccaagcagccagcagaaaa

SEQ ID NO: 121234 - RNA, 73 nt, Homo sapiens
gcaccaccgaacaccaaccagaaaaccacacaaagggcaaaggaaggaaaaaggccccaaacaagagagcagc

SEQ ID NO: 121235 - RNA, 68 nt, Homo sapiens
cccaccaagacaaaaaagagggcgccaagcggaacaaccaagggcgaacacgcagcaaagaaaaaaag

SEQ ID NO: 121236 - RNA, 76 nt, Homo sapiens
caccgacccgacgcgccggcccacgcgcggccaaggcgcggggaggcccagcccgccgcagggccaccccgcggcc

SEQ ID NO: 121237 - RNA, 73 nt, Homo sapiens
aaacgcgcgagaagagagacgagagagaagaggagagagaagaggcgggccgaggagaacgggacccgcacca

SEQ ID NO: 121238 - RNA, 70 nt, Homo sapiens
aggaagcagggccccgaaggccggcccaagcccccaagaagcccgggacgaacaccaaggccccgcgcgc

SEQ ID NO: 121239 - RNA, 72 nt, Homo sapiens
ccccaagccaggaaaagccgggaaagaaacccaaaggaagcaagaagggagacaccgacaggaaacaaacag

SEQ ID NO: 121240 - RNA, 74 nt, Homo sapiens
ggagcacacaagcaacggaaaagaaggagggacgaaggagaggcaaaaaccaagggaaagaggagaggggcccc

SEQ ID NO: 121241 - RNA, 41 nt, Homo sapiens
ggaagaaaccagcaggcaaccaaacgaagcacagcaaacaa

SEQ ID NO: 121242 - RNA, 70 nt, Homo sapiens
agggaagccaaagaagcagcagggacgcaccaaaacggacagccgaagacaggcgacccaccaccaggac

SEQ ID NO: 121243 - RNA, 76 nt, Homo sapiens
cgaaaaccaccggaacggcgaagaggcaccaaaaagaaccgcagacagaacgcggcagaacggaggcaggcagcac

SEQ ID NO: 121244 - RNA, 39 nt, Homo sapiens
cgcagcccaaccccggaccagaccggaccaaaccagaga

SEQ ID NO: 121245 - RNA, 81 nt, Homo sapiens
gcgaacggccgggagaggggaagaggggacaaagccgcccacccccagcggcacaggaggccagagcacccccaccaagcc

SEQ ID NO: 121246 - RNA, 79 nt, Homo sapiens
caccagcggcacgggcaagccagagggcacgcaggccccagaagaagggacacgagaaacgaagcaggagagaagagga

SEQ ID NO: 121247 - RNA, 68 nt, Homo sapiens
ggcaaaaaacagaggaaggaaaggcgcaacaacacaaaaaaagcagcaaggccaccaggcaggcaacc

SEQ ID NO: 121248 - RNA, 53 nt, Homo sapiens
cgcgcagcgagcccgagcggcagcgccggaggaagaagagagggcgaaggagg

SEQ ID NO: 121249 - RNA, 56 nt, Homo sapiens
ccccccacggacccaaaccagaagaaaaccgaaccgagccgagacacaagccccaa

SEQ ID NO: 121250 - RNA, 75 nt, Homo sapiens
agcagcaaaggaagcagagcaggagcacacgcagacacagaaaagcaacgaagccacaacacaccagacaagaaa

SEQ ID NO: 121251 - RNA, 58 nt, Homo sapiens
gacagagccccagaccggaggacaaccacacccagcaggccaggagagacagcccaaa

SEQ ID NO: 121252 - RNA, 83 nt, Homo sapiens
gaggcggccgccgcgcacccaccgcgacccgggacccgcccgcccgcgggaggcaaaagcagaccggaaaacccaccggcaag

SEQ ID NO: 121253 - RNA, 50 nt, Homo sapiens
aaacacaaggccaagaagacggagcaaaacgaggagacggcgcaggaccg

SEQ ID NO: 121254 - RNA, 76 nt, Homo sapiens
acagcgcgcggcgcggccccgacccccgcccggcgccggcccgggccgccagggcaggcaagacacgaagacgcca

SEQ ID NO: 121255 - RNA, 73 nt, Homo sapiens
agggcaagagaagcaaggagccccgccacacacgcaaacgagaaaaggagggccgagagacacgccgcgagaa

SEQ ID NO: 121256 - RNA, 80 nt, Homo sapiens
ggcccaggggcgagccacagcgaaagggggggccgaagaagccagggggaggaaagcagacagacccaccaagagggcgg

SEQ ID NO: 121257 - RNA, 36 nt, Homo sapiens
ccccgccgcccgggagggccccccgggccggccgcc

SEQ ID NO: 121258 - RNA, 66 nt, Homo sapiens
aagcaagcagcagaacgcagggggcccgaaggcacaggaggggggcggggaggacagcagcgagcg

SEQ ID NO: 121259 - RNA, 76 nt, Homo sapiens
ccaacaagggcccccagggcccggccgaagcaagaacaaggcgacggggcaagcaagggccaaaggcgcggaaaga

SEQ ID NO: 121260 - RNA, 79 nt, Homo sapiens
gacagagccggcacgacaaagagcaagagcgaggccgaagacccagaggaccccagcaccacagaaaccccacaccccg

SEQ ID NO: 121261 - RNA, 71 nt, Homo sapiens
gaccaaaagacccgcggccccggccgaaagggaaaaaagagaaaggcaccggagagggcaccaacccaaaa

SEQ ID NO: 121262 - RNA, 79 nt, Homo sapiens
gccgccccccaccgcccgggcccgaggaggcagccaagccgagccgccacccggcgaaaagcggccaggaccaccaggc

SEQ ID NO: 121263 - RNA, 81 nt, Homo sapiens
ggggcaaagaagggaacaaggcgaaggaaaagcaaacaccacacagcggaggagggcacgagcacaccggagccggggcaa

SEQ ID NO: 121264 - RNA, 104 nt, Homo sapiens
ccgaaaccagaaccgaagcacaagccagaccgcgacacgagcagcgcagggaagcaagagcaaggaagacggccaagcacccgccgacccccgacgggcaggag

SEQ ID NO: 121265 - RNA, 60 nt, Homo sapiens
gcgcgggcccgggccaggccgccgccgagccgaggccccgggggcgccgagggcacaagg

SEQ ID NO: 121266 - RNA, 76 nt, Homo sapiens
gagaccaccggcaacagaccgaggacggccacaggagcaaagccacgcaaccggccgccaccaggccgacccagcc

SEQ ID NO: 121267 - RNA, 82 nt, Homo sapiens
cgcagcaaaccacaggagaggaggggccaggcaggcccagcagccagccaggcagagccagccaggaccaacaggcagcccg

SEQ ID NO: 121268 - RNA, 76 nt, Homo sapiens
cagccggaagacagagagagaaaagagggacgccaaacacccaaaggaagcgaggagaaagggccacgcacccagg

SEQ ID NO: 121269 - RNA, 76 nt, Homo sapiens
aaccggcccacacgcaagaccaccagcgcgaaagcaaaacggaaaccaaaaggaggaaagagaaagacaagaagcg

SEQ ID NO: 121270 - RNA, 81 nt, Homo sapiens
gcgcgggacggggcgccgcccggggcgaggcagggccagcagcaggcgggaggggacgggcacaaaaccagcaccaggcga

SEQ ID NO: 121271 - RNA, 82 nt, Homo sapiens
gccgcggcggcagcagcaggagagcgcgagcaaggaaccccgggccccgccacccacgcgaccagcccacgccggcgagccc

SEQ ID NO: 121272 - RNA, 78 nt, Homo sapiens
cgaaaggacacgggagaaagggagccgagcgagaccacgcaccacgggcgcgggaaaaagccaaagcaggccgccaca

SEQ ID NO: 121273 - RNA, 55 nt, Homo sapiens
aggaagaaaacagggaaaaacaccacaggggagccgccaccaaaagcagacggaa

SEQ ID NO: 121274 - RNA, 79 nt, Homo sapiens
gcaaagcccaacacccccccacggggaagaaggaccgggaaaaggccccagaagaggacgcgcccaaagcgaccacaac

SEQ ID NO: 121275 - RNA, 79 nt, Homo sapiens
cggccggacgccgcccgaacaggacccgccggccaagagggacaacggcacacacagcaaggaccgcgcgcgagggagg

SEQ ID NO: 121276 - RNA, 77 nt, Homo sapiens
aaggagcagcccaggaccgagaccggagcagccggggcggagcggccaagcccgggcgcggacaggaacccaaagac

SEQ ID NO: 121277 - RNA, 57 nt, Homo sapiens
cacaggagaacgccgagacagagaccaccaaaagagggaaccaacaacagaaaacag

SEQ ID NO: 121278 - RNA, 67 nt, Homo sapiens
aagaggaaagccaaaacaacggaagaaacaggaccacagaaacggccagggcaaccggggcaggcac

SEQ ID NO: 121279 - RNA, 81 nt, Homo sapiens
ccggcagccccacgccccgcccgaagccgacccgacgcccccaggagaacacggccccagggccacccagcagacagagga

SEQ ID NO: 121280 - RNA, 52 nt, Homo sapiens
ggcccacgagacccaccggaacaggaccacgccgcgaggcaaacgcaaggga

SEQ ID NO: 121281 - RNA, 51 nt, Homo sapiens
cagaccccaacccagcggccaaggagcaggacccgacggaacgaagacagc

SEQ ID NO: 121282 - RNA, 97 nt, Homo sapiens
caggcacagaaacccgagagccagacgccaaaggaaaccccgggggacacccccaggccggaagccagacaaccacggcccaccagcggccagcagc

SEQ ID NO: 121283 - RNA, 71 nt, Homo sapiens
gcagaccgagcacccaggccgggccgggaaagacaccgcgaagcaggggaggcccccaaacaaaagagaaa

SEQ ID NO: 121284 - RNA, 78 nt, Homo sapiens
cgaaccccgagcccccgcacagccccaagcagacgggcaaggcaaagagcccaaccacgggagcgggacgaaggagac

SEQ ID NO: 121285 - RNA, 83 nt, Homo sapiens
gcgccgaggacgcggagcccagcaaggaacgcaagcacaggaccagaaacgaaaggcagcagaagaggaaagccagaaagacg

SEQ ID NO: 121286 - RNA, 69 nt, Homo sapiens
cagagccaggagggcaagcacaaggcagggggggaacagaaacacagaggcagagcaacagggacacaa

SEQ ID NO: 121287 - RNA, 60 nt, Homo sapiens
ggccgcccaacaccgaacaccacagggcgggaccaccaggagcagagcggaggccaccag

SEQ ID NO: 121288 - RNA, 87 nt, Homo sapiens
agccagcggcgaggaggggccccagcagcccccgaaggcccacaggacaggagagaaagacggaagaagacggcacgggacccccag

SEQ ID NO: 121289 - RNA, 71 nt, Homo sapiens
ccagacacccagaaccaccaccaaacgagagacgaccaaaacaaacagcaaagaccaccaagaaagggaaa

SEQ ID NO: 121290 - RNA, 79 nt, Homo sapiens
gcaacgaagacaacgcagcggcagaaacaaggcgcagaagaagccagaagaggaaggacccaggaaacagcgcgaccag

SEQ ID NO: 121291 - RNA, 81 nt, Homo sapiens
gaaagaccacaagaccagccaccccaggaagcaggaaggaaccgggcagagcacagcgcaccacacaagggagagcagcag

SEQ ID NO: 121292 - RNA, 69 nt, Homo sapiens
accggcgaagccgggccaaaggacgaagaacccacagagggcggagaacggaaaagcaccaggaagcag

SEQ ID NO: 121293 - RNA, 82 nt, Homo sapiens
gccgaccgccgcccgccacacccgccgccaggacccaaggccagccagccccaggcaccagcggacaggacagggaggacga

SEQ ID NO: 121294 - RNA, 70 nt, Homo sapiens
acaagacgaagccaccgcagaaggggagacacaagggcacgaaggaccacgggcagcaaacgaagcgcca

SEQ ID NO: 121295 - RNA, 42 nt, Homo sapiens
cgcccaacaccacaggccacggcagccggcgagccgccggcc

SEQ ID NO: 121296 - RNA, 81 nt, Homo sapiens
ggagcgcgcgcgggaagaggcccgcgaccagagccaagaccgaccagaacagccaagagaaaggcacccgggagcgggacc

SEQ ID NO: 121297 - RNA, 63 nt, Homo sapiens
ggcggcggcggcgcgccccgggggcgacggcgagcgacgcgcccacggaggaggcgggggccc

SEQ ID NO: 121298 - RNA, 78 nt, Homo sapiens
gccgcgccaccgcaccgccaccggcccgacccacgcgccccagaccaccggcagggaacagccgagcagaccgaggag

SEQ ID NO: 121299 - RNA, 78 nt, Homo sapiens
cgcggcacagcgaggcgccggcccagacccacccccagcggaaaggccgcagaaagcaacaaagcgagagcacaagaa

SEQ ID NO: 121300 - RNA, 77 nt, Homo sapiens
gagaccaggacacagagaacagagcccgaagacaaggggaacacccaaaaaggaccaccacccacccaggccgagca

SEQ ID NO: 121301 - RNA, 68 nt, Homo sapiens
caagacagaaaacccccaggacagaagccagccaggcgcaagagagcacaagaagaggaacaagacgg

SEQ ID NO: 121302 - RNA, 63 nt, Homo sapiens
gcaaggagcaaagcagcggcgcagcccggggccacagaccccaccagcacgaagggacacggg

SEQ ID NO: 121303 - RNA, 80 nt, Homo sapiens
gaaccccgccgccagccgggcgcgcgaagcggcgcggggaggcagcggaaggcggcagaacccaggagaaacgagaggga

SEQ ID NO: 121304 - RNA, 82 nt, Homo sapiens
cgccgcagagcgccgaggaggcccgcggggcaaccgccacgagacaccaaggccaagcagaagaaccagcacaggcgaagcc

SEQ ID NO: 121305 - RNA, 78 nt, Homo sapiens
agccggacccgaggcagccgaaagaacgcaggaaggagaaacacagcaccgcaggcagcagaagaccggaggaccggg

SEQ ID NO: 121306 - RNA, 71 nt, Homo sapiens
cagaagcccagaaggacaaaaccaagccagaagaacaccgaggccgagaggcacacccagaagccacagga

SEQ ID NO: 121307 - RNA, 62 nt, Homo sapiens
gggcacagcaaagcgaggaccagaccagccgcaagaagacgaggacgcgcacaggaaaggac

SEQ ID NO: 121308 - RNA, 67 nt, Homo sapiens
gcgggaggaggacgggaccccggcgcccccaccccaccccgggaggcccccacagagagcacacaaa

SEQ ID NO: 121309 - RNA, 68 nt, Homo sapiens
gggcgacaacagccaagccaagcagaaggcggagagggcccagaggagacaggggaaccaggaggagg

SEQ ID NO: 121310 - RNA, 80 nt, Homo sapiens
caacacccgagaacggcgggaagagaagacacgagcacaaacggaagcggggagagggggagagagaccccggaggacag

SEQ ID NO: 121311 - RNA, 81 nt, Homo sapiens
aaggagagagccagagcaagagcggaccgccgcagcagaagaaaggaaccaggcaagggacagaacccgggcccaaggaag

SEQ ID NO: 121312 - RNA, 85 nt, Homo sapiens
cgggacacgggagcgagcggcgacaccaagaaagcaggaaaacagagcaaggcccggagggacccccccgcggcggcgaggcccg

SEQ ID NO: 121313 - RNA, 68 nt, Homo sapiens
ggaggcccaaaaagaaggcaaagccaggcacggcgggcggcccaaccgggggaggaaacaaaacccac

SEQ ID NO: 121314 - RNA, 47 nt, Homo sapiens
gaggcaacacgcaaggccgccaccaggcccacacgggaagagaccag

SEQ ID NO: 121315 - RNA, 61 nt, Homo sapiens
ccgagacaaagaacaaggaccccagaggaaaaggaagcaagagcaaagaaggccacaagag

SEQ ID NO: 121316 - RNA, 70 nt, Homo sapiens
gagaagaacagacgccgcacccccgcgacacagcaacgaaacggaaaccaagccgccggggagaggcggc

SEQ ID NO: 121317 - RNA, 72 nt, Homo sapiens
cgaccgcggcgcgagcaccagccaagcaaggccggacagcacagggcacaagcaaagcgagaaggcgggaga

SEQ ID NO: 121318 - RNA, 69 nt, Homo sapiens
gacgcgcgccccgaccagcccgccacagagcaggaaaacaagacgccagacacccaacagaggaagccg

SEQ ID NO: 121319 - RNA, 80 nt, Homo sapiens
ggaggcagaggggaggcgcgaaaggccgaacgaggcggggggcccgagaccacaccacacccaccagggaggaccggaga

SEQ ID NO: 121320 - RNA, 68 nt, Homo sapiens
gaggaggcagggccgcggcggccacgcaggagaggaaccacccaacagagggaagagacagccaggag

SEQ ID NO: 121321 - RNA, 78 nt, Homo sapiens
gaccagggggacggcgacagcgccgaacaggagaaaccagaggcaagcgacgggaaggaccaccaaacccagccagcg

SEQ ID NO: 121322 - RNA, 77 nt, Homo sapiens
gccaaccagggagaggaggagaacgggccagcgagacagaccgaaacccaaagaaaaggagcgcgcccaacgagaga

SEQ ID NO: 121323 - RNA, 98 nt, Homo sapiens
gaggaccacaacccagccacgagacaagacacaaggagggggcagagcgagggcaaacaggaaacacggggaacggccaggccgcgcaggcagacggg

SEQ ID NO: 121324 - RNA, 54 nt, Homo sapiens
cccggagagcgggaacagaccaagccagggcagcggcggacaaagggcacaacc

SEQ ID NO: 121325 - RNA, 80 nt, Homo sapiens
accagccgcccaggcgcagagcgggcccgcggaccagccagggcacggccgggacgagacagagccccagcaacggaaag

SEQ ID NO: 121326 - RNA, 74 nt, Homo sapiens
gagaacacagaaaccggccccaggaagggacgcagaaccgcagagcagaagcccacgccgcaagaacaacagaa

SEQ ID NO: 121327 - RNA, 69 nt, Homo sapiens
ggcggggagcgcggcgggcgcgcgccaggcaaggacacggagccagcgaaggacggagaacgagccgcc

SEQ ID NO: 121328 - RNA, 61 nt, Homo sapiens
aaaggacgacagccagagagggccgccgaagggcgggaagcgaagcccggagaagaacggc

SEQ ID NO: 121329 - RNA, 83 nt, Homo sapiens
ggacacacaggaacgggggccacgcacggagaagccggcaagaagccaacggagaaccaaggccaagaccagaaccagcccgg

SEQ ID NO: 121330 - RNA, 76 nt, Homo sapiens
agggccccacgacacaagacgccgcgcgcgacaaggccccaacaccaaacacagaagcaacagccacacagaggca

SEQ ID NO: 121331 - RNA, 82 nt, Homo sapiens
gaccgccggcgcgagcgcaagacacgaaacaccgagagaggggacggcaaaacagaacagaaaggcggagaaaaaagagggg

SEQ ID NO: 121332 - RNA, 75 nt, Homo sapiens
acgacccagaccaagagcaccgagcaagaaacaaaaaaaaccagccacacaggggacccagaaggcaagagagga

SEQ ID NO: 121333 - RNA, 56 nt, Homo sapiens
gaacgagcacggaaagaggcaaccacccgaagaccaagcgcacccccggaaggcaa

SEQ ID NO: 121334 - RNA, 77 nt, Homo sapiens
cggagcaccgggccggcggacaggagggcgcggagcgcacgccacgaggagcagggggggcgccgcgcgaagcaccg

SEQ ID NO: 121335 - RNA, 62 nt, Homo sapiens
gcgggcccgcggggaggggcagcagacccacaggaaagagacagcccccccccggccaaagg

SEQ ID NO: 121336 - RNA, 73 nt, Homo sapiens
agagaacaccagcgcaaaggggaggacagacaaacagaacgagagccacagcagaccacccaagaagccaggg

SEQ ID NO: 121337 - RNA, 77 nt, Homo sapiens
agacggacaacagcccaacaacacccaaacaaggaccaacaccaaggaccagccaccgaaccacacaccaaagaaaa

SEQ ID NO: 121338 - RNA, 87 nt, Homo sapiens
gaacaccccgagaggcgccgcaggcccgcgaaccccgccggcagaggagcggccgagccgcaggcgcgggcggcggcagaagaaggg

SEQ ID NO: 121339 - RNA, 84 nt, Homo sapiens
gcggggccgcaccagcgcgggagcagcgccccgcacccagggggagacgcagcggcaccacaagggagagaacagcacacagag

SEQ ID NO: 121340 - RNA, 72 nt, Homo sapiens
ggaagggacgacagggacagcacggaacacacggacaaaacccagcaaacaggacacagcaggggccagaca

SEQ ID NO: 121341 - RNA, 78 nt, Homo sapiens
caggaaccgggagcgcacagacagccaacagagggaacagaggcacagaaaagaagggagacggcaacacaaaaaaga

SEQ ID NO: 121342 - RNA, 67 nt, Homo sapiens
acaggcggaccagagcggaaaagacaacggcaagcggagaagagcaaggccgaaccgagaggaaggg

SEQ ID NO: 121343 - RNA, 57 nt, Homo sapiens
agcccaacggaaggcaaacccgaaaccaacacggcgcccccgcagacaaagcggaag

SEQ ID NO: 121344 - RNA, 68 nt, Homo sapiens
cgaggaaaccacgacgggggagcccccacacgaggagacagggaaggcccgcgaagaagcacggggcg

SEQ ID NO: 121345 - RNA, 69 nt, Homo sapiens
cccagcacccgacccagaggaacaccggggccagcagcgccgcccaccgagcgggggccggaacaacgg

SEQ ID NO: 121346 - RNA, 63 nt, Homo sapiens
ggagcaccacgcagccagaaagcgagaccgcaaggagccccgggcgccaacgcgacacgggag

SEQ ID NO: 121347 - RNA, 37 nt, Homo sapiens
cagacagagcagaaagacagggcgggaccaccaggag

SEQ ID NO: 121348 - RNA, 74 nt, Homo sapiens
aagcccccgcgcgccccaggaacagcgcccccaaggacgagccgggaggggagacaccgaccccaagcgagaga

SEQ ID NO: 121349 - RNA, 76 nt, Homo sapiens
gcagacccaaaaggcgcgcacagacaaacaagggcaggaccccgaggaacggaccccagcaccacgccagccagca

SEQ ID NO: 121350 - RNA, 61 nt, Homo sapiens
gaccaaaggccgggcgcagaacccccagaccacaggaggcaccgccccaacccccccccgc

SEQ ID NO: 121351 - RNA, 79 nt, Homo sapiens
ccgacagccgcagaacgcaccacagagggagaccgcccccggggcgagagaccccaaccccccaagcgaagcgcaggga

SEQ ID NO: 121352 - RNA, 82 nt, Homo sapiens
agaaggaacgacgcggaccagaagccagagcgaggacgccggcaggcgaaaacaggccaaaagaaagccgagaaggaacgac

SEQ ID NO: 121353 - RNA, 77 nt, Homo sapiens
gaaaaccgacaacccccagaaagccaagccggaaccagaggaccggcaacaacccgaggacgaaccaccccgcgcca

SEQ ID NO: 121354 - RNA, 55 nt, Homo sapiens
agaacgcaaggccacaacgcgaaacggggggcacccagccacacgccaagaagac

SEQ ID NO: 121355 - RNA, 66 nt, Homo sapiens
cccagccgccaacggaagagagaggagaagaccagagaccaccacaaaaagcgaagaaaagccaca

SEQ ID NO: 121356 - RNA, 74 nt, Homo sapiens
gccgaagagaaaggaggagacaagaagcggcgaacaacaagaagacgaagccagaaagagaggacgacaaagca

SEQ ID NO: 121357 - RNA, 78 nt, Homo sapiens
cgacaaggaggcagggacccggagccacccacaggacccgccaccaaaggaaccggcagaagcgaaaggccagaggag

SEQ ID NO: 121358 - RNA, 70 nt, Homo sapiens
gccaggcacaagggcagcgccgagagggaggaagagaagcgaggccaacagcggcgcaaagacaaaaggg

SEQ ID NO: 121359 - RNA, 71 nt, Homo sapiens
gaggaggaaggaccgcgagaaaacacaaaccgaaaggaaagagcagggaagacagagaacaagacccgccc

SEQ ID NO: 121360 - RNA, 86 nt, Homo sapiens
ggagccgaggcgccgaaggaccgacgcccgggggagccagccaagacacggagccaaaaagaagaaaaagaaacaaaaaaagaaga

SEQ ID NO: 121361 - RNA, 79 nt, Homo sapiens
aaaacaacggaaaagcaaggacaaggccaggagcacgcagccggaaacccaggacgcccagccaacagaaaaggaaacc

SEQ ID NO: 121362 - RNA, 64 nt, Homo sapiens
cagcacagcacccacaaagcaacggggccaacagcgggaaccaaaggaccaccagggacgaggc

SEQ ID NO: 121363 - RNA, 79 nt, Homo sapiens
aagcacaagacaagggccaaaacaggacagaaagaaggaaaaagcagaaagccagaggaagaaggagagaagcaagcac

SEQ ID NO: 121364 - RNA, 82 nt, Homo sapiens
ccacggacacggcgggagccggcgaggggaagaccaagacaggccggaacccgaaaggaacaagaacccggagcgaaagccg

SEQ ID NO: 121365 - RNA, 79 nt, Homo sapiens
cgggagcgaggaaccagaacgaaaagcgccagaaagaaaaccagacgagagacagaagacgaaagggcaagaaagagag

SEQ ID NO: 121366 - RNA, 33 nt, Homo sapiens
ggcaggccgcccccggcaagagcaaagccggcc

SEQ ID NO: 121367 - RNA, 70 nt, Homo sapiens
gcgggaaaagaaagcaacgcgagcccgcacagggagcgggacgggcggcgagcggaccgcgaggccccca

SEQ ID NO: 121368 - RNA, 78 nt, Homo sapiens
ggaacaccccagccccgacgcaaaacagaccaggaggagaagaagggaggcagagaaggcagaggagagcgaagaaga

SEQ ID NO: 121369 - RNA, 76 nt, Homo sapiens
aaaaccgccacgccaccgaacagcccacaaggacaagaagagcaccccggggaaacaaagcccgagcagcccggac

SEQ ID NO: 121370 - RNA, 94 nt, Homo sapiens
gaaccagggggacggcaaacggagccaggcacaagaaaaaagaagagcaaagagggcagcccggaagggacaaacagaaccaagccaacagaag

SEQ ID NO: 121371 - RNA, 76 nt, Homo sapiens
caggcagaagaagaaacaggcaaacgaggaccggacaggagagacaacggaggcaagaaagacggagaagcgagaa

SEQ ID NO: 121372 - RNA, 84 nt, Homo sapiens
gaggaggaagagagcccgggaccgccaggccaccaccggccgcccagccaggacgcgcccggagaagacagcggacacacccag

SEQ ID NO: 121373 - RNA, 78 nt, Homo sapiens
gaagcgaacaaaaaaaaccccaaagaacccgacggcaaaagcagaccggaaaacccaccggcaagaccacacccgagg

SEQ ID NO: 121374 - RNA, 58 nt, Homo sapiens
cccagcagggaggccgagacccgccaaaaacccagaaaagaaaccagcagacggcggg

SEQ ID NO: 121375 - RNA, 57 nt, Homo sapiens
cggagaagagccaaccgcaccgcgcaggcgacggggacgaccagcgggagccggcgc

SEQ ID NO: 121376 - RNA, 57 nt, Homo sapiens
ccggaaagaggcccggacagagaaggaggggcaggagacagacccagcacggacccc

SEQ ID NO: 121377 - RNA, 71 nt, Homo sapiens
cgccgcaaagaagcagaaaccaccagagaccaggcccgagggacagaggacccgagaacggaagagaggga

SEQ ID NO: 121378 - RNA, 64 nt, Homo sapiens
gcggcacccccaggaagcgcgggaagcggcagacggcccagaccccaagaccccccagggcagg

SEQ ID NO: 121379 - RNA, 65 nt, Homo sapiens
gcaagagggagacaaagagagagcagggaccaagaaaggcccagggaccaaagcccggacaaggc

SEQ ID NO: 121380 - RNA, 79 nt, Homo sapiens
gaccgagccagaggggaaagagggaaaacccaccgggagcacgaagaggggccgaacaagccgagacggggccggccga

SEQ ID NO: 121381 - RNA, 78 nt, Homo sapiens
caggaggcagaaaccagcgccggacagagaagcccccaaggagcgcaggacggggagggaaggggcgagcccggggag

SEQ ID NO: 121382 - RNA, 71 nt, Homo sapiens
aagagacgaaaagcccggggcagcaacaccgcacagccacaacaagggcaaacggaccaaacaaaaagaag

SEQ ID NO: 121383 - RNA, 79 nt, Homo sapiens
ccccccagacccagccgaggccaagggcgcacggcgggggccacggcaccagacagggcccaggacaacaacgggacac

SEQ ID NO: 121384 - RNA, 58 nt, Homo sapiens
agccgacccccgcaaggaagcgcaggcgaggacccggcccaacgagcccacgaagaac

SEQ ID NO: 121385 - RNA, 74 nt, Homo sapiens
cgggagacggaggaggaggccagcggaaagcgacaggaaaggcgagagcgggcaaaagggcaccagagaaagaa

SEQ ID NO: 121386 - RNA, 88 nt, Homo sapiens
gaaggcccgagcaaagaagagcccgaacaaacaaacacccagaaacaagaggcaggcaaaaccccaaaagagccgcgcagcgagccac

SEQ ID NO: 121387 - RNA, 78 nt, Homo sapiens
caaagaccaaagccacagccaagagcccacggacaccacccaacggagcaaaggagaaaaccccaaaagcccagacaa

SEQ ID NO: 121388 - RNA, 71 nt, Homo sapiens
gacaagaagcacgaacagcaggccaaagaccagaggcgccggggaaggaaccagaacggcacccccccccc

SEQ ID NO: 121389 - RNA, 77 nt, Homo sapiens
cggggggccggccgaaccccagcggcagacacggacagacagcgacggaacccaccagggacaagcaaggggccaag

SEQ ID NO: 121390 - RNA, 55 nt, Homo sapiens
gccgaaaggcggcaccaggacgcgaacacgccccagaacaacacccccagcaccc

SEQ ID NO: 121391 - RNA, 79 nt, Homo sapiens
ggagaccgcaggcgaccccgcagcggccgggcgcgcggcccccacccagagggcgaaccaaagaaggaaggcgacccaa

SEQ ID NO: 121392 - RNA, 76 nt, Homo sapiens
gagagaaaacagggacccggaacacagagcgccgacagcagggagcgacaagagagacagaccgaagcggcgggcg

SEQ ID NO: 121393 - RNA, 79 nt, Homo sapiens
accgccgccggccgacgggcgccaggcggcgcgcgccgggccaagcacagagacgcaagcagggagcgcaagaaaaagc

SEQ ID NO: 121394 - RNA, 75 nt, Homo sapiens
aaaaagcacagagagagggaccggaaggcacgggccggggacacaagcaacagccagaacaagccgaagcacgaa

SEQ ID NO: 121395 - RNA, 79 nt, Homo sapiens
caagaagggccgcacagaaggaagaaaagccaggcaagggaagaggaacagcaaccgggcgcgaaaaaaaaccggggaa

SEQ ID NO: 121396 - RNA, 69 nt, Homo sapiens
acggaaaccacggacaaacaccccaagagagaaggcagaaacaaaaaagggagagaaaaagcccggcgg

SEQ ID NO: 121397 - RNA, 66 nt, Homo sapiens
gaagaaggacaaggacagaacaccagcacggcgaagggcggccagagggacaacagagaaggagcg

SEQ ID NO: 121398 - RNA, 67 nt, Homo sapiens
agcacacgcaccaaagcaagcaggaccacgcggaagccggacggagcagcagagacaaggggacaaa

SEQ ID NO: 121399 - RNA, 76 nt, Homo sapiens
gggcggagaagggcagggcgagcgcccccgccagggccgaccaggccaggccacacaagccccagccaaaaccagg

SEQ ID NO: 121400 - RNA, 69 nt, Homo sapiens
acaaaggacaccaccggaagacaaggagaaggagccgccagcccaggcggaggcagaggcacgaccggc

SEQ ID NO: 121401 - RNA, 82 nt, Homo sapiens
agcagcgcaccccaccgaccagcggacacggaaccggggagaccacgacgcgccccgggcgccagagccgcagcccagcgcc

SEQ ID NO: 121402 - RNA, 85 nt, Homo sapiens
gccaggcggaccagaaggccagcaaagggcgcgaaaaaggagaccaaggaagagaagggaagcacagagcaacccgggagacaga

SEQ ID NO: 121403 - RNA, 72 nt, Homo sapiens
cgcgcggacccgccagaacaaggagcgggaggacccaggggggggcagccgccccaagaagccaagacagga

SEQ ID NO: 121404 - RNA, 76 nt, Homo sapiens
agcacacgccgggagaggagggcaagcgagggcgcacgggggaaaggaaaggggcaacaagacaccccagaccaac

SEQ ID NO: 121405 - RNA, 61 nt, Homo sapiens
ccagacgcccccagcccaggcgagcgggggcacaagaaggccaaccccaaaagagagaaca

SEQ ID NO: 121406 - RNA, 80 nt, Homo sapiens
caacaagagaccagcacagaccgacccccgacaccccgcacaacacggggggcaggaagcaggaaaaccgaaagcgccag

SEQ ID NO: 121407 - RNA, 65 nt, Homo sapiens
aggcgcgggacgcgaagcaacaggcggagagaagaagggcaggaccacggcacgaagagacccag

SEQ ID NO: 121408 - RNA, 71 nt, Homo sapiens
ccagaaaacgacaaacagcgccgaaaagcgaaaagaaacaagccgcggcaacagcgaccccaagccagaca

SEQ ID NO: 121409 - RNA, 83 nt, Homo sapiens
ggcggccgccgcagcccaggcgcgggggcgacgacagaggaggacgagaaggacacgacgggagacagcagccaaagaacacc

SEQ ID NO: 121410 - RNA, 80 nt, Homo sapiens
cggccgccagaccacagcacagccgggaaggggagccaccagccccccggagaccgaggagcccaggaggaggaacccac

SEQ ID NO: 121411 - RNA, 74 nt, Homo sapiens
caggagcacgggaggacagagcacaagggacaagcgggaacaagaaacggggggacggcaaaagaagagaagcg

SEQ ID NO: 121412 - RNA, 47 nt, Homo sapiens
aaaggcagacgaagggaaagcccagaacaagagagagaacccgagcg

SEQ ID NO: 121413 - RNA, 77 nt, Homo sapiens
gggaaaaaaccaccaagaccaaaaaaccccaacaacagccccaggggcggcaccaggaaaaagaaagacggcacaga

SEQ ID NO: 121414 - RNA, 75 nt, Homo sapiens
gaacaggaccaccaggaaacgcgcaagacgcccaagagaagaggggggacacagcgagccacgcgccaggaagcc

SEQ ID NO: 121415 - RNA, 41 nt, Homo sapiens
acccaggccgccggccccacaggggacgaacagcggggacg

SEQ ID NO: 121416 - RNA, 79 nt, Homo sapiens
agcggggcagaagagaggaaagggaggcaccacacacaaaaagggagaagggcagggcccgacacagcgagaaggccca

SEQ ID NO: 121417 - RNA, 55 nt, Homo sapiens
ggagagagcgccaaagagcggccagacgcccccaagggaagaagcagaagcaagc

SEQ ID NO: 121418 - RNA, 83 nt, Homo sapiens
accggaggaccagaacgcaagcggccaaggaaaagcgcacaagacggccggccacacaaacaagaccagaaagagcaaagaac

SEQ ID NO: 121419 - RNA, 64 nt, Homo sapiens
caaggagaacccagcccgacggcgcgggggcgcggagggccccccaagcccacccacacaagga

SEQ ID NO: 121420 - RNA, 82 nt, Homo sapiens
acaagaagcggaggcaacgaggccgagcgcgcggcgccgcaacaaagcagacaccaggagccggaagagggaagaaggaagc

SEQ ID NO: 121421 - RNA, 78 nt, Homo sapiens
gaccaaaagagaggcaccgcggaacacaagagaaacaggaagccccgaacacggcaagcgccgagcaggcagagagca

SEQ ID NO: 121422 - RNA, 79 nt, Homo sapiens
cagaaaagcacccgacacagacggcaacaagaagaggaccggcacgcaccaaagagcgggaggaaaagcaccacgcacg

SEQ ID NO: 121423 - RNA, 71 nt, Homo sapiens
gaccacacggccgcgccagggccagcacagacagacgggcaaaagacaaccaaggaagcccgagaagcccc

SEQ ID NO: 121424 - RNA, 74 nt, Homo sapiens
gccagaagaaccgacagagagggagcggagaacacaggaacgggccccgggacagcagaccacagcccggcagg

SEQ ID NO: 121425 - RNA, 72 nt, Homo sapiens
cggaccgagagcggaccgagagcgcgaaacgcacgagaaggggaagggcaggcgcccagccaaagagaacag

SEQ ID NO: 121426 - RNA, 54 nt, Homo sapiens
caggaaaaaccaaaggaaccagggccggcccagggagaacgcaaaaccaccacc

SEQ ID NO: 121427 - RNA, 80 nt, Homo sapiens
gaacagacacggggaagcgcaaaaacaagacggggcgccccacagaggggcgacgacagaccccggcggcgacacagcga

SEQ ID NO: 121428 - RNA, 87 nt, Homo sapiens
gacggcaagaccaaggaggcgggggagacaccggcaagaggaggaacgacgagaagagaggaagagagagacgcaacggagaggaag

SEQ ID NO: 121429 - RNA, 79 nt, Homo sapiens
aacaacggaggccaacaacagaaggggccaagcaggacaagcaggcacaaccaaccaccgccaggagaggccccaggaa

SEQ ID NO: 121430 - RNA, 63 nt, Homo sapiens
aagcgcgaaagcgccaaaaggacagcagccgaacacccaacaagaaggcaacgacaaacagcc

SEQ ID NO: 121431 - RNA, 76 nt, Homo sapiens
ccaaagaagggagagagagccccacgcccccgagcccagcgcccgaccgggcagcccgcgcaggacggcgcacacg

SEQ ID NO: 121432 - RNA, 58 nt, Homo sapiens
gcccagacggccaccggcgggaggaacaaaagggcagccgcaccaccgccgcgcacag

SEQ ID NO: 121433 - RNA, 112 nt, Homo sapiens
ccccaaagggaagccaaacacaaaggaagaagcccggagacgaccaagagggcgggccgaggagaacgggacccgcaccacgggagaaccagacgcgggccgggacgaggag

SEQ ID NO: 121434 - RNA, 63 nt, Homo sapiens
gcagagcggagggagccccagacacggaaaggaagccagaaccgaaaacccaccgacaccagc

SEQ ID NO: 121435 - RNA, 54 nt, Homo sapiens
aagaggcgccgggccaggaaaggaagccagaaccgaaaacccaccgacaccagc

SEQ ID NO: 121436 - RNA, 73 nt, Homo sapiens
aggaggaaaggaggacgaggacgggcagcacgagaaaggaacgagacagcaagggcagaacgagagcaagaag

SEQ ID NO: 121437 - RNA, 32 nt, Homo sapiens
cgccccccgggccgggcggcaaaggaacagag

SEQ ID NO: 121438 - RNA, 72 nt, Homo sapiens
aaagaaggccgggagaagcaagaaccggagccaccccccaaaagaagagccaagagaaggcccacaaaacag

SEQ ID NO: 121439 - RNA, 48 nt, Homo sapiens
gacgcggaggaccgacgagcacgagaggaaaggaaaggagcggaggca

SEQ ID NO: 121440 - RNA, 80 nt, Homo sapiens
cacgcagccaggaaaccacgaggacagagcgggagccaccagcgccaaagggaagccaggagcccgggggcacggggaga

SEQ ID NO: 121441 - RNA, 61 nt, Homo sapiens
cgcagagcgggaccacccgggcacagcaggcacggagacggagcgcgccccaccgcggccg

SEQ ID NO: 121442 - RNA, 70 nt, Homo sapiens
ccagagcggcccccagcaccacagcccgcagccccgccagccacccccaggacagcagaccacagcccgg

SEQ ID NO: 121443 - RNA, 89 nt, Homo sapiens
cagcgagggacgaaggagaccgcgcagaagacgaccccgacgcaggccaggagccgcggacagaagccgagcacggccgagacaaaagg

SEQ ID NO: 121444 - RNA, 77 nt, Homo sapiens
gccgagccaacaggaccagcagggcgggcaggcccacacagggggcacccgaggaggaagagggcagggcccacgga

SEQ ID NO: 121445 - RNA, 86 nt, Homo sapiens
gcccgggagacggggcccagcgcggcggaggcggacgacccaacgcacagacgagcggcggagaagaccccaacgacaaaagccgc

SEQ ID NO: 121446 - RNA, 66 nt, Homo sapiens
aggcaaagacaccggcagagaaccaaaaacacgacccgggccgcagccgacccggcggagccacag

SEQ ID NO: 121447 - RNA, 58 nt, Homo sapiens
ggaacggcaaggacgaagcaagagcaggaagcaggcggcaagcccgggagcaaggacc

SEQ ID NO: 121448 - RNA, 76 nt, Homo sapiens
cagaaaccagcgccggacagagaagcccccaaggagcgcaggaagagccgcgggcagggaaagcagccacagacgc

SEQ ID NO: 121449 - RNA, 52 nt, Homo sapiens
acaaccaagcagcagcgcacaccaggggcagagagaagagcacacagaaggc

SEQ ID NO: 121450 - RNA, 40 nt, Homo sapiens
ccggagaagcagaggaaaagggaaagcaacggcgcaagcg

SEQ ID NO: 121451 - RNA, 81 nt, Homo sapiens
gcaggacgcgccgcgccccaaggcggagccaggccgcgaaaaccacaacgcaccagagggcaagagcccagcgagacaccg

SEQ ID NO: 121452 - RNA, 80 nt, Homo sapiens
aaaccaggagaagaagaagcagcaaaaagagcgggaagccacccgggaggaggaggggggagcgaaccacgcgaaagcac

SEQ ID NO: 121453 - RNA, 62 nt, Homo sapiens
gggaccaggacccaacagcaggaagggggacgccagacgggacacgcacaggggcgaggccg

SEQ ID NO: 121454 - RNA, 78 nt, Homo sapiens
agcgccgccgcgcccggcgccgacccacagcggggccgggccccgaccacccagagaaaggaaaggagccagagaagg

SEQ ID NO: 121455 - RNA, 70 nt, Homo sapiens
aaccccccaaaagcaagcgcgaaggggaggaagaaaagccagccagaggagaccgaagaagacggagacc

SEQ ID NO: 121456 - RNA, 66 nt, Homo sapiens
ggaaaggaacaggaacagaggcccaagaacacgaccagcccaggagaggaaccgagaacacgacac

SEQ ID NO: 121457 - RNA, 79 nt, Homo sapiens
aaggaaagagacaagaagccaagcagagcacaggcaaggcgcagaacagccgggcacacagaaaaagcccaaagagggg

SEQ ID NO: 121458 - RNA, 74 nt, Homo sapiens
gcccgggaaagcacaaagcaagagacagcgaggacagaaggaaggaagcaagccagaaagccagggacgcagaa

SEQ ID NO: 121459 - RNA, 67 nt, Homo sapiens
aaaaaaagaggagcagcaggcacagcacgggcagagccaggaaaaaagaaggggcagagaacacagc

SEQ ID NO: 121460 - RNA, 63 nt, Homo sapiens
gcggacggaggagcaggcgagaagagaagggcgcccgcgccggcagaggaggcgagcacccgc

SEQ ID NO: 121461 - RNA, 77 nt, Homo sapiens
gcgagccgaaaagcgagcgcgaggaaaaggcggcgggagagaggagcaaaaaaggaacaagacagaaaaacaacgac

SEQ ID NO: 121462 - RNA, 65 nt, Homo sapiens
ccagccgcagccacaacaccggcaggaaccaccaggacagagaccacaggcaaacaaagaaccac

SEQ ID NO: 121463 - RNA, 57 nt, Homo sapiens
cgcacgagagacaccagcacgcgccaccaccaaccaggacccgagccccaaagacag

SEQ ID NO: 121464 - RNA, 74 nt, Homo sapiens
acaagcacacacaggcgcgaaacggaaaaagaacagccagcaaagacaagagcagaccagcagccgcagcgcga

SEQ ID NO: 121465 - RNA, 62 nt, Homo sapiens
gcccccaacccagcgcaaaggaagaggaagcagaaaggacccaggagcgaaacagaaacaaa

SEQ ID NO: 121466 - RNA, 73 nt, Homo sapiens
gagcagccagggcaggggagggagcacaaaagaacaaaagggaaaaaaggacggcagcacacaacaaaacaca

SEQ ID NO: 121467 - RNA, 74 nt, Homo sapiens
cacaacagcagcagcaggaaaccaacagccacaccaggagcacagacacgacggaaacagcacggaaaaccgcg

SEQ ID NO: 121468 - RNA, 41 nt, Homo sapiens
ggaccaaaccccacacccagggcgcccagacgagcccacca

SEQ ID NO: 121469 - RNA, 66 nt, Homo sapiens
gccggggcagcagaagaggacaagcagacagcaccaacggccggaggaaggaaaaagcaaaagaaa

SEQ ID NO: 121470 - RNA, 81 nt, Homo sapiens
gggaaccgcaagcggccaagcacaaagagcgccccacgagagaacggcacacgcgagcgaaacagcagacaaggagccgcc

SEQ ID NO: 121471 - RNA, 74 nt, Homo sapiens
acaaagaagccacgaagcaaaaagacccccaagcccaagaagagaaaggagcggacaacaaagaagggcccgga

SEQ ID NO: 121472 - RNA, 34 nt, Homo sapiens
gggaaccacaggaacggaaacgagcaagcagaac

SEQ ID NO: 121473 - RNA, 72 nt, Homo sapiens
cgggagagcaccaggaagaccggcagaggagacaccgagagaaaaggaaaggaaaaccaagaaagagacagg

SEQ ID NO: 121474 - RNA, 69 nt, Homo sapiens
agcccgcgcacgagaggagagaaaggggggcgccagcccaaagagcgagccaaagaaccgggaagaacg

SEQ ID NO: 121475 - RNA, 75 nt, Homo sapiens
ccgagaaccagcccaaaccaagcaagcaaagcagaccgagaaaaacacaccccaagcagaccacccaaaccaaaa

SEQ ID NO: 121476 - RNA, 54 nt, Homo sapiens
gagcagaaccgaaaggaacgaaccagaagagcacaagacggaaccaaagccgac

SEQ ID NO: 121477 - RNA, 78 nt, Homo sapiens
cgggccgacggaagaccaccacggagccgcacaggaaccccgcacaacccggcgcgaagacccagacacgaagcgaga

SEQ ID NO: 121478 - RNA, 76 nt, Homo sapiens
gcacccaggggccgccccaggacacgccggacccccccggaaaaacgggaaagagcgcagagggaccaaccgaaag

SEQ ID NO: 121479 - RNA, 70 nt, Homo sapiens
acaacacagaagagacccgcaaccgcaccccagagggagcccaggacagaaagaaggaaaaaacgcaaga

SEQ ID NO: 121480 - RNA, 70 nt, Homo sapiens
cgaagcgccccccaagacaccagaaggcagcagcggagggaaggggggggccccaagaaacaggggacca

SEQ ID NO: 121481 - RNA, 82 nt, Homo sapiens
gcccggaaggcaagcgcagcaacaacagagagcacggcgccaaggggccaagggagagcggggccccccccaaggcaccccc

SEQ ID NO: 121482 - RNA, 85 nt, Homo sapiens
caaaggggaggacgcagcaaaccaccagaaggagcacagaccagcgcgcgaccggagccccacagcggcacaggccccagccaag

SEQ ID NO: 121483 - RNA, 94 nt, Homo sapiens
agcaacaaggcgcagggggaacagaggcagcgggacggggaagaggaggagagagaagcggaaaaaagcgccagaaacaagaagcacacaccac

SEQ ID NO: 121484 - RNA, 65 nt, Homo sapiens
aggcccgcacccaaagaaggaccagaacagagaagaaagcaggagaaacgaaggaaaaaggggca

SEQ ID NO: 121485 - RNA, 72 nt, Homo sapiens
agagcgcaaccccgcccgaagcagaaagaaaagacgcccagagaagagacacaagccacgaaggagaaccaa

SEQ ID NO: 121486 - RNA, 52 nt, Homo sapiens
accagcaaggcacccacacccagcgccaccagcaaaaccagagaaacaggca

SEQ ID NO: 121487 - RNA, 81 nt, Homo sapiens
caccacgccagcagcgcgacggcagacaggcccagaacaggacagagcaggacacaaaaaggaacccagaaagacaaggaa

SEQ ID NO: 121488 - RNA, 71 nt, Homo sapiens
gggacccccagccaaaggcaaaggaaacagaagacagccgaaccaagggcgacaaccagagacaagcaggc

SEQ ID NO: 121489 - RNA, 78 nt, Homo sapiens
cacccagccgccagcaggcaaggcaacacccaggaccagcccgcgcgggccagacgagccagaaaaccaaggagaaag

SEQ ID NO: 121490 - RNA, 62 nt, Homo sapiens
cggaggacccccgcccgaaccgagggaacaggagacgacaccaagaggaaaaaccaggcaag

SEQ ID NO: 121491 - RNA, 76 nt, Homo sapiens
gagcgcgcccggccacacagacacccgggaacccacccaccagcgggcccaggagaaaaccggaagagaaaggccg

SEQ ID NO: 121492 - RNA, 81 nt, Homo sapiens
aaagcagcggcgcagcccgggaagcggcaaggagagcagaagacacacaaggaaagccaagacaaacccggcaagcgcaca

SEQ ID NO: 121493 - RNA, 86 nt, Homo sapiens
ccggccgcgggcgcgaccggaggcagggcccgccacaaaaacggcagcagagccaaaccaggacggaccagagaaggagagaagcc

SEQ ID NO: 121494 - RNA, 71 nt, Homo sapiens
cggaaaacggagaaccacgccggaggaagagcggaaaaggcggagacgaaaaccgggaaggacagccgacc

SEQ ID NO: 121495 - RNA, 84 nt, Homo sapiens
gcagccaagagaaaaccccgcccgcagcgacacaccaagcggaggggacgccacgcaacgccggagagcagagcgagggggcgg

SEQ ID NO: 121496 - RNA, 54 nt, Homo sapiens
ggacggaagggaagaaacacagaagaagcccggcaaccggcccagcgaggaagg

SEQ ID NO: 121497 - RNA, 89 nt, Homo sapiens
accacgcggcacggccacaacagacccggcacaaacaagcacgaaaagggaacgcacaaaaagcggggaaagcagaaagaaaggacgga

SEQ ID NO: 121498 - RNA, 86 nt, Homo sapiens
cgcggacgagagcacgcccggggcccgcgcgcgacgcgacggcacagcacggaagccgcaccgggcccagcaaccggcgcagacaa

SEQ ID NO: 121499 - RNA, 54 nt, Homo sapiens
gaggagccagagcaaggggaacgccacggacggggcccggccaaagaaccgaca

SEQ ID NO: 121500 - RNA, 34 nt, Homo sapiens
gcgggccacccacaaagaagcagaagacagcgac

SEQ ID NO: 121501 - RNA, 81 nt, Homo sapiens
gcgagggcgcaccgggggcgggggcgccagcccaccaagaagggccgagcacagcaagcaaagacagaaagagaaaaggga

SEQ ID NO: 121502 - RNA, 64 nt, Homo sapiens
caagaagagagaccgggggaggcgacgcaaggcgacgggcgggacgaagccacgacagcagaga

SEQ ID NO: 121503 - RNA, 74 nt, Homo sapiens
agaacccaaaacagaagaggaagcaagcacgaagaaaaaccacaacaaggggaacaggaggagaaggaagggca

SEQ ID NO: 121504 - RNA, 84 nt, Homo sapiens
ggagcgcggaacagcaggcccgagcccaccgcgccgggccccggacgccgcgcggaaaaggcacgacgacggagagaggaagaa

SEQ ID NO: 121505 - RNA, 77 nt, Homo sapiens
gcccgcgcgagcgggagcgggcccgcgcgccgagggcgaggcggacgcgcggcgcgcaggacaaaccggcgaccaca

SEQ ID NO: 121506 - RNA, 63 nt, Homo sapiens
ccgaccagggcaacaccaaaaacaaaacgaaccaggacggcaagcaccggcgggagcgaccgg

SEQ ID NO: 121507 - RNA, 80 nt, Homo sapiens
cggccacggggaggcgaggacgacggggcgagaccccgcccggaccgcagaccacacaaagaggggagcgaccaaacaga

SEQ ID NO: 121508 - RNA, 84 nt, Homo sapiens
gcgcaccccgcggacgccacagcgccgggagaacagagacccaccaagaaaccagaacccggacaagggaagggcccgaggagg

SEQ ID NO: 121509 - RNA, 75 nt, Homo sapiens
cgagaccggaccgagagcggaccgagagcgcgaaacgcacgagaagagcgcacaaaaggagcggagccgccagcc

SEQ ID NO: 121510 - RNA, 77 nt, Homo sapiens
ccagagccgggggccccgggcaacgacgacgcggaccccgacagacaagccaaacggcccgggacagagggaccgcg

SEQ ID NO: 121511 - RNA, 73 nt, Homo sapiens
cagaagagaagacaggccccagccaacgaaggaaacacaaagaagacaccagaagggccagcaccacgacaac

SEQ ID NO: 121512 - RNA, 77 nt, Homo sapiens
gcgggccacggaagccaccgacaggcccgagggcccgagagcaccgcgccagacaggagaggaaccgcacccaagga

SEQ ID NO: 121513 - RNA, 76 nt, Homo sapiens
ccccacgcggccagcgaaaacgcccagcgaccggacagaagacagaccgacagacgccaaaccacccgagagaagc

SEQ ID NO: 121514 - RNA, 79 nt, Homo sapiens
ggagaccacccaaacgcggcacgggagacaagcagaccggaagaccgacggaagaccacaccccgagggagcccaggac

SEQ ID NO: 121515 - RNA, 74 nt, Homo sapiens
agacgcgagcgcccagcacggagcggaggaaagagaggagcgagaggaagcggaagaaaaccaacaaaggacag

SEQ ID NO: 121516 - RNA, 89 nt, Homo sapiens
cgacaggagagggcagaaaggacggacagagagccgggggagcaagaaaggccaccaccaccacagacagagggaagagcggaacacca

SEQ ID NO: 121517 - RNA, 80 nt, Homo sapiens
accagaagaccccaagaagacgccgggcccccaggagccaggagcaggggcgcggcagaggcgcggacgagcagcgcagg

SEQ ID NO: 121518 - RNA, 60 nt, Homo sapiens
cagagcgggcccgcggaccagccagggcacggccgggacggcagagaaagcaagagacgc

SEQ ID NO: 121519 - RNA, 97 nt, Homo sapiens
cggagaccccaccgccggcgcgggaaacgggcgaagcgacgagccgcgaggagcaacggggcggcacacaaggagcgaagggcagggagaacgccag

SEQ ID NO: 121520 - RNA, 61 nt, Homo sapiens
gggccacccagaacaaaaagggccagggaccaagaaaggcccagggaccaaagcccggaca

SEQ ID NO: 121521 - RNA, 54 nt, Homo sapiens
aagagcccagacgcaaagacaagcagacaaaacagaggagaccagaccagaagc

SEQ ID NO: 121522 - RNA, 76 nt, Homo sapiens
gacccagcccaggcggcgcggacggggcggaaagacagaaccagcacagcaaaaaaggcagcgcaccgaccccaac

SEQ ID NO: 121523 - RNA, 54 nt, Homo sapiens
ccgggcggccgggcgcggcgagcccagggggacaaagagaacacagaccgggcg

SEQ ID NO: 121524 - RNA, 74 nt, Homo sapiens
agaagcaagccaccgaccacaccgcccggggccgggcagcgagcccacacagaacaccccaccagaccacccag

SEQ ID NO: 121525 - RNA, 45 nt, Homo sapiens
agcccccagggccaggacgcccggaccacaacaaaaggaagccgg

SEQ ID NO: 121526 - RNA, 84 nt, Homo sapiens
cagaccacccgggcgaagcgggcgagcggggggacgccggcggagacgcgggcgaggagccgacagcagcagaaggagaaaaaa

SEQ ID NO: 121527 - RNA, 83 nt, Homo sapiens
gcggcgagccggagcgcggagcccggccccgcaccaggaggaggacgacagcacggcgaccggcccgaggaccgccgcacgac

SEQ ID NO: 121528 - RNA, 81 nt, Homo sapiens
ggagccagaagcacagaccccaaacgggcgaggaaccaaagccccggcgcgcaacagaagaggagcggagcaggccaacga

SEQ ID NO: 121529 - RNA, 73 nt, Homo sapiens
acagagacgaacaagacgcaacaggcggggccggggagcccgggccagaccccccagacccagcccaccccgg

SEQ ID NO: 121530 - RNA, 65 nt, Homo sapiens
gagcaggaggcagcaagacggacacagccgaccggcagagcagaaaggacccaggagcgaaacag

SEQ ID NO: 121531 - RNA, 75 nt, Homo sapiens
cccagccccggagagcgggaacaggccaacccagggagcccccaaggcacccaacccagacaacccagcaaggcc

SEQ ID NO: 121532 - RNA, 45 nt, Homo sapiens
gggccacaaaccggcccaacaaccacaagggacccacggaagagc

SEQ ID NO: 121533 - RNA, 56 nt, Homo sapiens
aaaaagaagcgggagaacgggcgcgccagagggaagggcgcagcggaagacccaca

SEQ ID NO: 121534 - RNA, 77 nt, Homo sapiens
gggccaagagacccccaccacacgaggcaggagacgagaccacggcaagaagacggggcggacccagagcgaccagg

SEQ ID NO: 121535 - RNA, 72 nt, Homo sapiens
gcccggcgccggccgagaaggcagaggcgggcggagaacggaaaagcaccaggaagcagagaggaccgcaga

SEQ ID NO: 121536 - RNA, 114 nt, Homo sapiens
gaaagggggccgagagcggagcgcaggacagcgcaggagccccggcgcacgcggcgcgcacagacccagacaaagcggccagaagaaaagagaggggcccccgggaacaaagga

SEQ ID NO: 121537 - RNA, 72 nt, Homo sapiens
agccgagagaacaccaagcccgcagagccccagaggacgacgggggacagaagaggaaaacaccacaaaagg

SEQ ID NO: 121538 - RNA, 72 nt, Homo sapiens
gccagcgcggggaccccgaacaggcgcgcccccagggagcacaaaagaacaaaagggaaaaaaggacggcag

SEQ ID NO: 121539 - RNA, 79 nt, Homo sapiens
gcggcgagggccgacaccaccgcgcgaccgcaaccggccagggcggaacccaccagggacgaagcacggcaccggccca

SEQ ID NO: 121540 - RNA, 84 nt, Homo sapiens
gcggccgagcaagccgccgcccgacccagggcccgcgggccaggagagcgccggcggcgcaccccccggaggcggccgagccca

SEQ ID NO: 121541 - RNA, 77 nt, Homo sapiens
gaccgggcgagcgagagagagcaagcgcagcgccacaaacaggcaaaagcagaccggaaaacccaccggcaagacca

SEQ ID NO: 121542 - RNA, 82 nt, Homo sapiens
caacccaggggcagacagggcacagcggggggagaacgacgggagaaccaaccaagaaaaagcggggaaaacaaaaaaaaga

SEQ ID NO: 121543 - RNA, 79 nt, Homo sapiens
ccggggccaacagcaccacagacgcaggcaccaacaaacgcacaccaggaggcgcaagccagggccgaaacggggaacc

SEQ ID NO: 121544 - RNA, 57 nt, Homo sapiens
aagacaaacggcgcggcagcagaccagagccacgcacacagaaacagcgagacggag

SEQ ID NO: 121545 - RNA, 61 nt, Homo sapiens
caccaggccacgaggagggcgcgagaagacaaagcgggaggccaccgccccaccagcaggc

SEQ ID NO: 121546 - RNA, 80 nt, Homo sapiens
caggaagagcgagaaacgcggaaagaagcagaagacagccgccaggaagcaacgcagcgcggaaaggcacaaccaaggac

SEQ ID NO: 121547 - RNA, 66 nt, Homo sapiens
ggaagggagccccgccgagcgcagacaacgccccgggagggacccagaagaccccaccccaccccg

SEQ ID NO: 121548 - RNA, 72 nt, Homo sapiens
caggggaaaagaggacaaagcggaagaccagagcaaccacacacacccagacccagacggcccgagcacacg

SEQ ID NO: 121549 - RNA, 69 nt, Homo sapiens
gcacacacgagagagcgacagaagcgaaggggacagggggagaaccgccagggaaacccgggggacaga

SEQ ID NO: 121550 - RNA, 59 nt, Homo sapiens
accccagcagaccagagccgcgaagcgaggcccggagcaaaccacagcaaggcaacacc

SEQ ID NO: 121551 - RNA, 77 nt, Homo sapiens
cagacgcggcagcaacagcgagacccggggcgaggacccccgagccaggggggacccaaacgagcagccagagcgcc

SEQ ID NO: 121552 - RNA, 59 nt, Homo sapiens
aagggacaaggagccaagaaaccacaggacgcaaagcaaggagagcgcgagagaacagg

SEQ ID NO: 121553 - RNA, 77 nt, Homo sapiens
ccgggccagcccaggaccccaggggaacaagaggccacgcagagccacgccggacgaagcgggcacgggcgggaacc

SEQ ID NO: 121554 - RNA, 68 nt, Homo sapiens
cagagcgagaccaggaaagaagggggcagaagagggagcccgaaaacgggaccaggaagcagaagggc

SEQ ID NO: 121555 - RNA, 76 nt, Homo sapiens
cacagcacacgaaacggaggcaccaacccccacacgcccggggaaccagggccggggccagggccaccggccagcc

SEQ ID NO: 121556 - RNA, 73 nt, Homo sapiens
acaagaaaaagaacccaagggacggccacaggccggccaaggcaccagaagagaaccccggggacagaaaagc

SEQ ID NO: 121557 - RNA, 53 nt, Homo sapiens
agcgcagacgcggacgggagggaaaaccagaagagaggcgggaacagaggcca

SEQ ID NO: 121558 - RNA, 76 nt, Homo sapiens
ccgcggagcccagcacggcagaaacagccaagaagcccaggaaaaccagggcggcggcccaccccccggccagaga

SEQ ID NO: 121559 - RNA, 83 nt, Homo sapiens
gaggccaggaaacggacgcggccaagggaccggacaagcgcacaggcaagaccaagggcacggccgcagccaaggaccccagc

SEQ ID NO: 121560 - RNA, 82 nt, Homo sapiens
gcacaaaggcggacacgaaaccaccgggaagcgccggggaacgcagagccgaggaacagaaacaggagaagccccaggaaga

SEQ ID NO: 121561 - RNA, 65 nt, Homo sapiens
aacccagcacggcaaccgcgcggcaggccaggggaccgaaaaagacaccggaccccacaggcccc

SEQ ID NO: 121562 - RNA, 84 nt, Homo sapiens
ggggaccgggagaggcaccaaacggccgggggcccgagaagcccccaggggaagacagagggggccaccagcgcgccagcgagg

SEQ ID NO: 121563 - RNA, 52 nt, Homo sapiens
gggaggacgacgagagaggccaaagccacccccaaaggcagaggaagaacga

SEQ ID NO: 121564 - RNA, 83 nt, Homo sapiens
ggcccccccaggacaacccagaggcaacaaaggcgagcgccggccgcccgcaggacaccgagggcccagccgcgcaccagcga

SEQ ID NO: 121565 - RNA, 70 nt, Homo sapiens
gcggcggagccgccaaggcggcgcagcgggcccaggaagccaccgaaaccggagaaaccaacgaagagcg

SEQ ID NO: 121566 - RNA, 50 nt, Homo sapiens
agcacagcaaacccaagcacaggagccagacagaggaagcagagcacgcc

SEQ ID NO: 121567 - RNA, 72 nt, Homo sapiens
cacaacaaaccgacggcaggcaagggcagcaggcaccagaacggaaaaaggggccggcacaagcgaggaggc

SEQ ID NO: 121568 - RNA, 71 nt, Homo sapiens
gcaaagcgccccgggagcacagagcaccaaaccagaggggggccggacaggcagaaagggaggaaaacaac

SEQ ID NO: 121569 - RNA, 72 nt, Homo sapiens
cgaaccagagcggggcaaacgcggcaccccaaagggacacaagagagcggcagcccacaagcaggaagacca

SEQ ID NO: 121570 - RNA, 40 nt, Homo sapiens
agaccccaacaacccagcagccacaggggggaacaggggg

SEQ ID NO: 121571 - RNA, 79 nt, Homo sapiens
gcaaggagcgcggaacggggagcgccggagcagcggacccaggcaggcaccgaccgcacgagcaacccggaagagcccg

SEQ ID NO: 121572 - RNA, 40 nt, Homo sapiens
cgggggaggagaaggaaagggcccccagggagacacaccg

SEQ ID NO: 121573 - RNA, 76 nt, Homo sapiens
ccccgagagcgggaacagggccaccggaccaggaggagacagaaacagcaggccacgcagcccaacccccaagcca

SEQ ID NO: 121574 - RNA, 77 nt, Homo sapiens
aacgccgaacccagcgcgcagcgcgcaggaaccccccaaacgcaaaagccgccccaagaaagaaaaggcagcgaaag

SEQ ID NO: 121575 - RNA, 57 nt, Homo sapiens
aaagcgagaaggaagaaagacgcaggccacaaaaacaggaagcagagcaggaaggag

SEQ ID NO: 121576 - RNA, 32 nt, Homo sapiens
aaacgcaccaccaagaccacagacacccgagc

SEQ ID NO: 121577 - RNA, 63 nt, Homo sapiens
aggaggcagcagccccgaagagaaacacacggacaacaaacgcggcaccgacgaagccgcaac

SEQ ID NO: 121578 - RNA, 76 nt, Homo sapiens
cggcgccgcgcgcgcacaaggcggccgaagagggcgcgcgcagcgaaccaccagggagcccgggagaaagacaggc

SEQ ID NO: 121579 - RNA, 78 nt, Homo sapiens
cagagaggaagaaagcgaggcaccagggaggcaacccaaaaacaggacgccccagaagagaagcgaaggacgacagcc

SEQ ID NO: 121580 - RNA, 86 nt, Homo sapiens
gggcgcccgggcccgacccacgggccggccggcccgcccgggcggggaggggcgcccgcccaagcagaggaagcgggaccaacgaa

SEQ ID NO: 121581 - RNA, 86 nt, Homo sapiens
cggacaacggagaccagaccacgcagccacgcgggcgagcggcggggagcggcgaagccgcgggcgagggagcaccgcggacgccc

SEQ ID NO: 121582 - RNA, 68 nt, Homo sapiens
caggccagcaggcacagagccggaggacgcgcgggcgcggacggcaggggcgccggggaacccgcggg

SEQ ID NO: 121583 - RNA, 79 nt, Homo sapiens
cgcgagggcaccaggagggaagcagaacaccccaccagaccacccagcaagcccacaaaaaaggcacaagcagggacag

SEQ ID NO: 121584 - RNA, 84 nt, Homo sapiens
cacaccgcggggccgaaaacaacgacaacgagcacagggcaacacacaagcccaacaacaaggccaggcagacgagcgagcgag

SEQ ID NO: 121585 - RNA, 72 nt, Homo sapiens
gcccagggggcacgcggaaacggagacggccgccacagcccagacggcgaaagcgggccaagagacccccgc

SEQ ID NO: 121586 - RNA, 34 nt, Homo sapiens
cagcgcccagagagaggaggaaggaccgagcgca

SEQ ID NO: 121587 - RNA, 80 nt, Homo sapiens
aagaccgaacagaaggaacgacgcggaccagaagccagagcgaggacgccggcaggccggagcgcgaagacgcagggaaa

SEQ ID NO: 121588 - RNA, 72 nt, Homo sapiens
aagaagggcaaagccgaagcccgccaagcgcccccgggcacgagagcggacgagccaaggccgggaggaaca

SEQ ID NO: 121589 - RNA, 75 nt, Homo sapiens
gcggggacccagcccggagcccagccagagggggccgacacacggcggaaaccgaaacgaaccagcggaagaaac

SEQ ID NO: 121590 - RNA, 79 nt, Homo sapiens
ccgaccagccgcggagccgggggcagaccagggaagggacgagacagaccggagaggacgggaggcccgagagggggag

SEQ ID NO: 121591 - RNA, 52 nt, Homo sapiens
ccgaccaggacacgagcgggaacgcaaacgaagaacaagccccgcagagcga

SEQ ID NO: 121592 - RNA, 73 nt, Homo sapiens
gccagggccggccagggccgcggggccccggggccgccaggacccgcagcccagagaggggggcgcagaaacc

SEQ ID NO: 121593 - RNA, 74 nt, Homo sapiens
cgccccgccggcacagcgggaagagcggaccccgcgcccacccaacaaggcaggcgaaacagcaggagagggaa

SEQ ID NO: 121594 - RNA, 76 nt, Homo sapiens
cacaaaacagccacgagaggcaacagaccagaggcccgaaaaaggaaccaaaccgaggacaaagcccagccacgag

SEQ ID NO: 121595 - RNA, 56 nt, Homo sapiens
gagggagcaaggacaccaccagggagccaggagagagaaaaaccggaagggaaacc

SEQ ID NO: 121596 - RNA, 78 nt, Homo sapiens
cccccggagacgcaaccaaggaacaaggggagaagaagcccagcccacgcgacgaaaaggcccccagcgcgaggagag

SEQ ID NO: 121597 - RNA, 67 nt, Homo sapiens
aaacccgggaaaaagagaaagagaagacaaaggaggagaacgggaagaaccggaccagacgcgaacg

SEQ ID NO: 121598 - RNA, 76 nt, Homo sapiens
cgccaggacgagcagagccccccccaccagaggacgggaggagcagcaacagggccaggcagcgaagaagacaaag

SEQ ID NO: 121599 - RNA, 81 nt, Homo sapiens
cgccgagcccgcgccccccccgcccagagcaggcggcagcagccgccgagggcgccgccagagccgagaaaaagcggaccg

SEQ ID NO: 121600 - RNA, 80 nt, Homo sapiens
ccgggaccagaggaacccacccccccaaggagaaggacccaagggcagccaccggaagagaaaaccaagaacgacagagg

SEQ ID NO: 121601 - RNA, 68 nt, Homo sapiens
aaccacacggggagcacccaaaccaaggcgcccccaagagcggagacgggaaaccaaagaggagggga

SEQ ID NO: 121602 - RNA, 80 nt, Homo sapiens
gaaaccacccccggaaaaacgggggggaacagagagaacagacagccccaacagagcagacagaacggagcagcagcagg

SEQ ID NO: 121603 - RNA, 63 nt, Homo sapiens
ccaggacgaagaaaacggacacccccggcagacaggaccacgaagaagaacagaagacggaag

SEQ ID NO: 121604 - RNA, 99 nt, Homo sapiens
gcccgcgccccagaacgcgcgcccgacgcccgcaggcccgcgggcgcaccggcgacgagcaaaggcaggagagggaaaaccagcagacagagaaaagaa

SEQ ID NO: 121605 - RNA, 72 nt, Homo sapiens
accacagcagcggccaaacaacggcggaaagcagggccagagggcacgaaaggcggagacagcaaaggcaaa

SEQ ID NO: 121606 - RNA, 62 nt, Homo sapiens
ccgcggggcagcgggccggcgccggcgcgaccaagacacccaggagaaagacagcggggaaa

SEQ ID NO: 121607 - RNA, 81 nt, Homo sapiens
ccaaccacgcggcgcgagccccgcccccgccgccgcgcacaaccgcacggcagacggagaaagaagaacaaacacaaaaca

SEQ ID NO: 121608 - RNA, 71 nt, Homo sapiens
gcgccggccgcgcgccgcgcccgcgccacaggccccagggagcgccaggcccgcgcacgccaggagggcag

SEQ ID NO: 121609 - RNA, 101 nt, Homo sapiens
agccgggcgggaccggcgcggcgccgggggcaccgcgccgccgagagacaccaggcgccgagaaggccagcagagaaacaggcaggagaggcccacaggcg

SEQ ID NO: 121610 - RNA, 39 nt, Homo sapiens
gagaaacggcaacggcagcggaggaccaggaccgaggag

SEQ ID NO: 121611 - RNA, 52 nt, Homo sapiens
ggcaaggagagacgcgcgaggggcgccgaagcgaggggagccaccaacagag

SEQ ID NO: 121612 - RNA, 59 nt, Homo sapiens
gaaacgggcgaagcgacgagccgcgaggagggaaaggccgcaaagaggaagggaaaggc

SEQ ID NO: 121613 - RNA, 69 nt, Homo sapiens
aacacgaacaccaagccccgaagcacacagaaagggagcaacacggccacagagaagaccccagaagcc

SEQ ID NO: 121614 - RNA, 73 nt, Homo sapiens
cggcaggaacaaccacggaacccggggggagaagagcaagacaacagggccaccccgaaccccaagggaagaa

SEQ ID NO: 121615 - RNA, 87 nt, Homo sapiens
ccaggaccgggccggaacgagacgcacgagagcggcggcaccaggcaagcgggagcggggaggccgaagcggggggccaacccgcca

SEQ ID NO: 121616 - RNA, 89 nt, Homo sapiens
aagaagcagacaagggggaagcagcaggaagcagcggaaaaggacgaggagccaagcgcaaacagcaggaggagggaccacagggacca

SEQ ID NO: 121617 - RNA, 79 nt, Homo sapiens
cccagcacgggaggccgaggcaagaaagacacccacagcagcagccaggcaggcccgggacgggggaccaggacaaagg

SEQ ID NO: 121618 - RNA, 79 nt, Homo sapiens
gagagggagccgccccgcaggggccagggcacgcacgcaggccaggagcgagcgaagaacagcaccacaaggaccgcag

SEQ ID NO: 121619 - RNA, 78 nt, Homo sapiens
gccacaagccacacggaggggaaaacacaaagcaaagaggaagaccaggaacgggacaggcgcacgagaggcccaagc

SEQ ID NO: 121620 - RNA, 73 nt, Homo sapiens
ggaagggccccacgacggaggaaggcagcccagaaaccaacgagagacacacaaaagcccgaagaggcacagg

SEQ ID NO: 121621 - RNA, 74 nt, Homo sapiens
cagccgccgggagccagaagcacaggcccgggcgaaggggccacgcgagcacaaaccccagagcaacaggaggg

SEQ ID NO: 121622 - RNA, 72 nt, Homo sapiens
acccgaaaccagccagaaggaagagagggacaggagaaacagccaccgccggggacccagcaacagcacgga

SEQ ID NO: 121623 - RNA, 76 nt, Homo sapiens
ccagaacgcggacccccgcaggcagcggaggaggaaaggcaggccaacaaccgcacgccgcggacaccaagcagag

SEQ ID NO: 121624 - RNA, 78 nt, Homo sapiens
gaagccaaacagaggaaaaaaccagacaaggccggaaaaaaccaaacgaaaagagccggacgaaccagcacgccaagc

SEQ ID NO: 121625 - RNA, 85 nt, Homo sapiens
ggagcacgaaaaagagagaggacgaaaggaaggaggaaaaaaaacgcagcaaaaaggaaaggacgaacgccagcccgaagaagga

SEQ ID NO: 121626 - RNA, 60 nt, Homo sapiens
cggcagaagagaggaagagccacacgcggacaggaggagaaggaggaaggaccaggacac

SEQ ID NO: 121627 - RNA, 54 nt, Homo sapiens
aaaaaaaccagcacaacgcgccggaacacccccggacagcagaaacgcccggaa

SEQ ID NO: 121628 - RNA, 77 nt, Homo sapiens
accgccaggcacaacacaaggaagaacccacgagcaaccgagccagagaagaggccccagggcccacaacaccagcc

SEQ ID NO: 121629 - RNA, 69 nt, Homo sapiens
agacccgcaaaagaaaagccccgggaaaccgaagccaagagggaaacccccggaaacagggccgaacaa

SEQ ID NO: 121630 - RNA, 83 nt, Homo sapiens
cgagccgcagaccagaccgggaggagcagccgcgcgccgagaagcacccgcgacccagaaggggagccgccaccaaaagcaga

SEQ ID NO: 121631 - RNA, 87 nt, Homo sapiens
cagcgagggcgccgagcaaccggaggaccgcgccaacaggacgaggagaccgaccaggagaccccagcggagacgaccgcgacacca

SEQ ID NO: 121632 - RNA, 80 nt, Homo sapiens
gcgggggaaccggcgcgccggcgcgcggcgcggacaggcccaaacggcgcgggggcaggcagggcgcgcgggccaaggcc

SEQ ID NO: 121633 - RNA, 59 nt, Homo sapiens
ccgcgcccgacgagccgcaggcggcaccaagaagagcccggagagcgagaaaaccggaa

SEQ ID NO: 121634 - RNA, 84 nt, Homo sapiens
acgaaaggagcaagagcaagacaccggacaccgagggcccccaaaagggcaggccggggagcccgcggacagagaagagaaaaa

SEQ ID NO: 121635 - RNA, 40 nt, Homo sapiens
gagcccagagccacgcaaagggaggcacaggagagcaggg

SEQ ID NO: 121636 - RNA, 62 nt, Homo sapiens
gggacggaggacgcgcagaggccaccaggcaccggacagggaggaaccggccagcgggagga

SEQ ID NO: 121637 - RNA, 71 nt, Homo sapiens
gagggaggaacagcaccgagacgacaccaagaggaaaaaccaggcaaggaagcacaagcgacaagaggagc

SEQ ID NO: 121638 - RNA, 70 nt, Homo sapiens
ggaggccagagggaagcaaagcagccaacaccagaagaagggacaaaagacgaggaccaaaacggaaggc

SEQ ID NO: 121639 - RNA, 70 nt, Homo sapiens
ggcacggaggcaaagaaccgaagaagaggaggggggcaccgggaggcaaggagcacagaggggcgcaaca

SEQ ID NO: 121640 - RNA, 81 nt, Homo sapiens
cggacccgacgcaggagggagagcacagcaagagccaggaccaccggaagccagaaagagcagaaacgaggcccagcagag

SEQ ID NO: 121641 - RNA, 55 nt, Homo sapiens
cccggggcccccccagccgcaccaccaaggaccagggaagacacgggagcgccgc

SEQ ID NO: 121642 - RNA, 74 nt, Homo sapiens
aaaacaaccgagggcagacaacacccccagggagcgggggcggaaacacggaagagggggaggccagggccgga

SEQ ID NO: 121643 - RNA, 69 nt, Homo sapiens
acagcgaccacgagggcgaaccacccacagaccagccggaacaagagacccggacaggagagacaacgg

SEQ ID NO: 121644 - RNA, 51 nt, Homo sapiens
caaaggagagaggaccacccagaggagcaacgaaagaccagggaaacaaac

SEQ ID NO: 121645 - RNA, 58 nt, Homo sapiens
aaaagcggcaaagggaaaaaggcgacaggcagcaaagagcagacccaaaggaccaagg

SEQ ID NO: 121646 - RNA, 71 nt, Homo sapiens
caccggagaaaaccagcagagaaggcaggcaaagaacagagaccgaagcgccggccagaccaggcgagccg

SEQ ID NO: 121647 - RNA, 77 nt, Homo sapiens
agcaggacgggggcgcgacgccgcggacagcgcagccaccggagacccaccgcagagggggagaacagaaaggaagc

SEQ ID NO: 121648 - RNA, 85 nt, Homo sapiens
gaaaggagacaccagaaggcagaggaggcgcaagacgcgaccaaagccgacggggcaagaggaacgagaaagaggcacaaacgaa

SEQ ID NO: 121649 - RNA, 78 nt, Homo sapiens
cccagcgccaccaaagaccgcgacgccagagcaagaacgaggccaaggaggagggacacagagacagcgaagaaagaa

SEQ ID NO: 121650 - RNA, 58 nt, Homo sapiens
cggagccgagccggagaacggcccccaccaagccaaggccagacccgcaacaaggagg

SEQ ID NO: 121651 - RNA, 75 nt, Homo sapiens
cccgcgcaccgccaggcgccccgggcgcggcaaggacgagccggggcgcgaagcaccaggcacgaacccgagaaa

SEQ ID NO: 121652 - RNA, 49 nt, Homo sapiens
agaagaaccaaccgacggggaagaacaaaagcgcagagagccgccccca

SEQ ID NO: 121653 - RNA, 82 nt, Homo sapiens
aggaggccaaggcgccaggagaggcgaagggaaaagggacccaaagcccaaagagaccggacagaaacaaccccaaacaccc

SEQ ID NO: 121654 - RNA, 73 nt, Homo sapiens
aggcaaggaggaagaaaaagacccaaacaagcaaagccgaagaggagggggccagcggagggggagaagaaga

SEQ ID NO: 121655 - RNA, 81 nt, Homo sapiens
cggccccagcaacacggcgcgaggcaaggccagcgcgagagcccagcagccagagcggcggggaggcagcaaccgccccaa

SEQ ID NO: 121656 - RNA, 78 nt, Homo sapiens
acccggaaagaagccacacgacaagcaacaaaggaaaccagggaaagcaacaccgaaagaccaagagacgaaccgcac

SEQ ID NO: 121657 - RNA, 84 nt, Homo sapiens
gcggcaccggcggcggcgcgcagcggcaggcggagagacccgccgccagggcggggccccgagcagacagcaggaaagaagaag

SEQ ID NO: 121658 - RNA, 73 nt, Homo sapiens
cgcgccgcgcgggcgcccgcaggaccccaaacgggcgaggagaccagagggcccagcccaggcgaaccagcag

SEQ ID NO: 121659 - RNA, 79 nt, Homo sapiens
cagacacagacgagcaggggaaggagaccgccggaccggagaacaagcaggaaacagcaagggcccaccccgcgccccc

SEQ ID NO: 121660 - RNA, 68 nt, Homo sapiens
cagagcacggaaaacccagaaggcaccggaaggcccgaagagcccacaaacacggaaggaacagcaca

SEQ ID NO: 121661 - RNA, 84 nt, Homo sapiens
gcaaacaagccaacccaggaggaaaaacgggaaaagcacagggccaggaagcagagggacagccaggccagaaacaggcccagc

SEQ ID NO: 121662 - RNA, 92 nt, Homo sapiens
gccgccgccccagccgcccgcggccgggagcggagccccggggccgagggagcaacaagagcagaaaggaagaaccacccgcccaggagaaa

SEQ ID NO: 121663 - RNA, 66 nt, Homo sapiens
gcgaggcagccacgcaggcggggcccgggagagaacaaggagcaggccaacggccagaagaacgag

SEQ ID NO: 121664 - RNA, 78 nt, Homo sapiens
gacaacgacacccacagagggggaacagccagggccacacgggaagacacacacagcaccaggaacgcggaaagaccg

SEQ ID NO: 121665 - RNA, 79 nt, Homo sapiens
caaaaaacaacggaaaccagaaaccaagaaagcagaggagcagaaaaagcggggaaggggggcaaaaaaaagaagcaag

SEQ ID NO: 121666 - RNA, 93 nt, Homo sapiens
aaccacgcggagcaagggaaagacaagaaccccaggcacaagagagagggcacaggacagagagcccagaggggaccgagcgccacacacggc

SEQ ID NO: 121667 - RNA, 72 nt, Homo sapiens
gggagggcgccagccgcgacacgaacagagggaggagacagaggaagagagaaggccacgcccgaccccaag

SEQ ID NO: 121668 - RNA, 64 nt, Homo sapiens
gcgagcggagcagccgacacaggggaggcaccacgagggggcagcgggaaaagagggaaagcga

SEQ ID NO: 121669 - RNA, 53 nt, Homo sapiens
caacgagaccgcacagcgcggcccgcaaaccccgccgagccgccgagcggagg

SEQ ID NO: 121670 - RNA, 74 nt, Homo sapiens
cccccggccagccggcgccggagcgaaacacgacggaaggggccgcaaggccaggcgcgcagaggcacccaacg

SEQ ID NO: 121671 - RNA, 66 nt, Homo sapiens
acggcgcgaaagccagggaagaggcagagcaacagggacacaagcaagaagaaagggaccgacagc

SEQ ID NO: 121672 - RNA, 78 nt, Homo sapiens
cggaccaacgggaacaaaacacacacccgcagacaagaacggagagaaaaaagccgcaaaggcgaagcgcacaaaacc

SEQ ID NO: 121673 - RNA, 65 nt, Homo sapiens
ggcagcagcagcagagcggggcgggggggccccgaggaaggaaggcaggccagacggcacccgac

SEQ ID NO: 121674 - RNA, 79 nt, Homo sapiens
cagaggaaaaaagaaagagaaaaggaaagcagaagacaagcagcgacggggaggaggcgggccgaagcggaaaagagaa

SEQ ID NO: 121675 - RNA, 71 nt, Homo sapiens
gcagaaagggcagacacaggcacaccaagggggagagcccgaccagagaaaaggcggaagaccgccaaaaa

SEQ ID NO: 121676 - RNA, 52 nt, Homo sapiens
agccacagggccggagaggggaaccagcagaagcagcagcagaggaaaaaag

SEQ ID NO: 121677 - RNA, 84 nt, Homo sapiens
acgagcgcacgccacccggcagccggcgacgcacacaccacgcaggaagacaggacccgcccacagaaagccagcaagaaaaac

SEQ ID NO: 121678 - RNA, 86 nt, Homo sapiens
aaaaccgggcagaggcccggggaagacaggggcaggaaaagggagaacaacagcgggagaagaaggccggagagaagacgagaacc

SEQ ID NO: 121679 - RNA, 48 nt, Homo sapiens
gagagaggacccacagaaaagggcgcaccgacggacacgccgacccac

SEQ ID NO: 121680 - RNA, 73 nt, Homo sapiens
acccaaaaagcaaaaaacgcccacaccagagggaggggggaagacagggcccagcaccacaggacgggccggg

SEQ ID NO: 121681 - RNA, 71 nt, Homo sapiens
agggggcccggacggcacacccacgaccggccaagggcggaccaacgggccggggggcgaccggccagcac

SEQ ID NO: 121682 - RNA, 83 nt, Homo sapiens
ggccgggcggcgcggccgcccgggccgggccccaccggacggaggaggcgccgccagagcggcgcggagggcgagcgcggcaa

SEQ ID NO: 121683 - RNA, 84 nt, Homo sapiens
ccggagcaacccggggaccgagagcagagagaagcgcagaggccaaaagaacacagaagaagagagccaagaagaccgagccaa

SEQ ID NO: 121684 - RNA, 69 nt, Homo sapiens
gggcagaggcagaaacaaccgcggaaaacacgaaaggcgagcacaggacggcagcaagcgacagaacac

SEQ ID NO: 121685 - RNA, 72 nt, Homo sapiens
gacaaggaagagcagcgagcaccgaaggcgaaacacgaaaacaaggagaaggggggggacaaaacgagaagg

SEQ ID NO: 121686 - RNA, 77 nt, Homo sapiens
ccgagcgcgcccgcgcccacaccccggacaccgcgccacacgacagcagaccacagcccggcaggcccaaaaaccca

SEQ ID NO: 121687 - RNA, 72 nt, Homo sapiens
gacgcacagcaagagcaggacaccggaagcgggaaaggagcagcagccgagacaagacccaccaagaaacgg

SEQ ID NO: 121688 - RNA, 84 nt, Homo sapiens
ccaaaaagcagcggacgaaggaccaccaaccaaacaagaaacgaagccaaaagacaagagcagacaagcagagggaagaagaag

SEQ ID NO: 121689 - RNA, 61 nt, Homo sapiens
ggacccaccacaccgagcccaagcggaaagcacgcgcacagagccccaacagcaaaggcga

SEQ ID NO: 121690 - RNA, 80 nt, Homo sapiens
aagacaaacacacaccgcgggacgacaagaggaccccgcgcaaccggcacaacaggcagaggggaaaagggaggaggagg

SEQ ID NO: 121691 - RNA, 72 nt, Homo sapiens
gaaggcacccgacaccacagaacccgcaccagggacagacgcaaaggaggaggagaagcggagcgcagaagg

SEQ ID NO: 121692 - RNA, 78 nt, Homo sapiens
ggccaggggggggaagcacaaaaacaaaccgaagaaagagaccagggaagagcaccaggagcgacaaggcggaacaga

SEQ ID NO: 121693 - RNA, 73 nt, Homo sapiens
aagcccagaaaccaaaagagaagacggagaaacaaaggcgcgggggcaagagaccaagaccccccagaggagc

SEQ ID NO: 121694 - RNA, 76 nt, Homo sapiens
gcccagccaaagaaacaagccgggaaagggacaagaagggcaaagccgaagcgggcagacacacagccccccagcc

SEQ ID NO: 121695 - RNA, 44 nt, Homo sapiens
caccggcagccaggaaagagggaccacagagcaccagccgcagg

SEQ ID NO: 121696 - RNA, 88 nt, Homo sapiens
gcgaaaggagcgggccggcaagggagccccccaggaagggcgcggagcccagcaagaagcacgggagcagacgcgcagccgagggcaa

SEQ ID NO: 121697 - RNA, 67 nt, Homo sapiens
gaacgcaggaaggagaaacacagcgcccgaagacaacaaacacagcacaccggccacaggcaggcga

SEQ ID NO: 121698 - RNA, 102 nt, Homo sapiens
agggcacgagcgcccgaagagcaaaaccagcgggcggccgcgcccccaggacacaagaaaccagacggagacgggagagcgggcgaagcaaggagggcaaca

SEQ ID NO: 121699 - RNA, 80 nt, Homo sapiens
cggggacaggacgacggcagaccacagaagcgccaagccggccaagggagacaagggaagaaggccaacaaccccaacca

SEQ ID NO: 121700 - RNA, 73 nt, Homo sapiens
ggggggagacggcgggcagggcaagaccccagggcagggaccaacaaaagaaggaccaaaaacccggagaaag

SEQ ID NO: 121701 - RNA, 74 nt, Homo sapiens
gaaacagagaccccccagaaaacagagacaagcagggaaaacaggaaaagccaaccgggagaggacacagagcg

SEQ ID NO: 121702 - RNA, 60 nt, Homo sapiens
cgggccgccaccacgcggccacaccccacgcaggagccgaaagaagcagaggaagaagcc

SEQ ID NO: 121703 - RNA, 80 nt, Homo sapiens
cagcccagcccccgccgcggcaaacaccagcaacacccgggacaaaaacgggggccaccacccccaccgaaccagcaccc

SEQ ID NO: 121704 - RNA, 71 nt, Homo sapiens
gcccacccaacccgaggagaccggaaacgagagaaacgaagacgaagaaacagccgcacacagaagaaaac

SEQ ID NO: 121705 - RNA, 73 nt, Homo sapiens
cgacgccgggaccagcagaagacccagaaaccgaaaagaagcagagaaaaaagaaaaaggcaaaggcacgccc

SEQ ID NO: 121706 - RNA, 78 nt, Homo sapiens
aaggccaaagaagccaaagacgcacagaagcacaaaacgggaggaacacagccaagggaccggagacgccaaaggaaa

SEQ ID NO: 121707 - RNA, 79 nt, Homo sapiens
cgagcaacaccgagagaggaggagccagacgacaagcacacacaggcgcgaaacggaaaaaggacccagaccagaaaaa

SEQ ID NO: 121708 - RNA, 78 nt, Homo sapiens
ggcggggaggaacaagaaaaccggcccgaggggacgggggaacccggggccagaggacagggcagaccgccagcagca

SEQ ID NO: 121709 - RNA, 75 nt, Homo sapiens
caacgagcagcccagcgaccaaagcagggaaagaaggaaacgggaccagagaagaagaacgaggagccacgcgaa

SEQ ID NO: 121710 - RNA, 77 nt, Homo sapiens
gcgaccccagcgggcccggggaggcaccgacgaggaggcagggaaggccgggcgagagacgccagccaaaagaaaca

SEQ ID NO: 121711 - RNA, 86 nt, Homo sapiens
gcccaggcggcggcccggggggcaggagccgcagaggcgggcgcagggacaccgaacagaaagggacaaagggacagagagccacc

SEQ ID NO: 121712 - RNA, 55 nt, Homo sapiens
aagcgaccaaacaaaagagagaaaaaccggacccaagcaggccaccaggcaggcc

SEQ ID NO: 121713 - RNA, 49 nt, Homo sapiens
ccaggagcccgagagagaagggaccaagagggcagcccaagaaacagag

SEQ ID NO: 121714 - RNA, 77 nt, Homo sapiens
agcaacgagcagaccgaggccgaagacgaaaaccacagcagaaaaaaggccaggagacaaccagaccccggggccca

SEQ ID NO: 121715 - RNA, 58 nt, Homo sapiens
caaccaaaagggcgaaaagcggcacagaagcagaccccacgagcgaaagggaaaaaac

SEQ ID NO: 121716 - RNA, 86 nt, Homo sapiens
gcacaaggcggaggacagccccggccgccgaagaggccgccgccaagcacagcaggcccggccccagcagcgcacagccggagcca

SEQ ID NO: 121717 - RNA, 59 nt, Homo sapiens
gagaagggaagcggcacaaaggacaagccagcgccagaacaaggaaaaaggggggagca

SEQ ID NO: 121718 - RNA, 73 nt, Homo sapiens
caggaggaagcgaggccagacagcaagagcacccgacccacaggccagagagggaagcgccaaagaagcgacg

SEQ ID NO: 121719 - RNA, 79 nt, Homo sapiens
aaaacacgacagccacgggcggagccccccaggccccagagcacgggcgccccagcaagacgaggcggccaggcagcgg

SEQ ID NO: 121720 - RNA, 79 nt, Homo sapiens
agagcagcgggcgaggagagaccaaaggaagggaaggccaaaggaaagcgcgcccaaacccaaaagaggagagaagacc

SEQ ID NO: 121721 - RNA, 80 nt, Homo sapiens
cggccgcgaccaagccgacccaccacacaagacggaaaaagcgacggagcccccccccggagccgaagagagggggaggc

SEQ ID NO: 121722 - RNA, 69 nt, Homo sapiens
gggcgccagccccgaaagacaggaagggaaggggcggagacgggcggaacgcaggaggccagaggacag

SEQ ID NO: 121723 - RNA, 68 nt, Homo sapiens
caaaggcagaaccagaaggagcccgagccacgcggccacaccggaacccacaggagggccagaggaca

SEQ ID NO: 121724 - RNA, 63 nt, Homo sapiens
ggaggaacggcccggaaacaggaggacgagcacagaccagcgcgcgaccggagccccacagcg

SEQ ID NO: 121725 - RNA, 70 nt, Homo sapiens
gaacagacccggaaggacggcgaggggggagcacagaggaccggaagcagcaaaggggagacagagaaga

SEQ ID NO: 121726 - RNA, 90 nt, Homo sapiens
gggggacccggggcgggccccgccccaccggcccccggcgccgccagcccggagggaccgaaggacagaaaacgggccccagacacaagc

SEQ ID NO: 121727 - RNA, 47 nt, Homo sapiens
cgcagggcgcccccgagcccagcaaaaagaggagaagcaccccccca

SEQ ID NO: 121728 - RNA, 80 nt, Homo sapiens
aggaaggagacacggccccccaaggaaaacaggagagaccaagcgagacggccggccgccacgggggccgagcgggggga

SEQ ID NO: 121729 - RNA, 41 nt, Homo sapiens
ggccacccccaaagaaaagggccccaccaccaaggcacaac

SEQ ID NO: 121730 - RNA, 74 nt, Homo sapiens
caaccgagcacagaaggaacccaaggaccgcaaagaaaacccagagaacaccacccgaagagacaccgagaaag

SEQ ID NO: 121731 - RNA, 75 nt, Homo sapiens
caggcacaaggaaaaacgaaagccgcggagacagggaaacaagagaaaaacaggacaagaaaacggagagagcga

SEQ ID NO: 121732 - RNA, 84 nt, Homo sapiens
gccggccaccccccacccaggaccacccccggccacgccccgggccggcccacaaaggccgccaaggcgagaagacaaacacaa

SEQ ID NO: 121733 - RNA, 57 nt, Homo sapiens
agaacggagcagggaacacgaccccaagggagcacgaaagaaagaaacagccaaccc

SEQ ID NO: 121734 - RNA, 72 nt, Homo sapiens
ccaaccgcgccaggcaggaagaaacacggccagggagcccaccgccagaaacccaaaggaacagaggaccaa

SEQ ID NO: 121735 - RNA, 76 nt, Homo sapiens
ggggaccccggcccggcagcaggcaggagacaaagagggagaaaagagcgcacaaaaacccggacagacagaaaac

SEQ ID NO: 121736 - RNA, 77 nt, Homo sapiens
ggggaaagcggcacgcgccccagagaccaaaaggaaagcccggccgagagacagagagaccaccccgaaaccacccc

SEQ ID NO: 121737 - RNA, 55 nt, Homo sapiens
caacaccgcaagcggagcagccccaccagccagccaggggaagcccccccaagaa

SEQ ID NO: 121738 - RNA, 69 nt, Homo sapiens
caggaaaagaaaaccggaaagcggccagagcagaggccgcgagacagaccagcggagaaaaaccgaccg

SEQ ID NO: 121739 - RNA, 82 nt, Homo sapiens
gccggcagcccgcggcacggagacagcgaagagagagaaacgaaaaagaggaaggagcgagggagcacaagcagcggaacgg

SEQ ID NO: 121740 - RNA, 75 nt, Homo sapiens
gcaagaggaaagaaaaagaacagacgggagaggacgcagacggaaccgaccgagcagggcacaagagagccacag

SEQ ID NO: 121741 - RNA, 67 nt, Homo sapiens
gcagccggcagaggcacgaagcgagacagggacggagagaagaacaaaagcaaacagaaccagcccc

SEQ ID NO: 121742 - RNA, 51 nt, Homo sapiens
gagagggggacgccaaggagagggcacggacagaagcagacaacaccacgg

SEQ ID NO: 121743 - RNA, 70 nt, Homo sapiens
agcccagggacccaaagagcaggaccaaggaaaagcgaccaagccagggagagggaagcagaaagcggcg

SEQ ID NO: 121744 - RNA, 77 nt, Homo sapiens
cgcacagccacaacaagcccgcgcgagaagcggagaagcagccaggcaagccagaccgaggcccgcgacagagaacg

SEQ ID NO: 121745 - RNA, 77 nt, Homo sapiens
acgcagagggcggagcggcagcgcacaaagaaaaagggcggcacccaccacggccccaggcgccggcagaggaccga

SEQ ID NO: 121746 - RNA, 126 nt, Homo sapiens
ccacgggccgagcagggggaagagaacggaacaccaccggcgccagcgggggccaagccaacacaccgaccagggcccccacgcgaacccccagcgcagaggcaggaagaagaaggaaggagaaag

SEQ ID NO: 121747 - RNA, 78 nt, Homo sapiens
acaaagcaaccggaggacagcgaacagacaagaaaggagcagcagaacgaaggaagaagggaaagacaggagcggaag

SEQ ID NO: 121748 - RNA, 73 nt, Homo sapiens
aacacaaggcagccccagcagcacggacagcccaggagacagccagcacgaacgcgcaagagccccgaaagag

SEQ ID NO: 121749 - RNA, 81 nt, Homo sapiens
gaagagagcaacgccagagcccagggcccagaggaccccagccgcgcccgggagagcaaggccaaggaaaaggaacagaga

SEQ ID NO: 121750 - RNA, 79 nt, Homo sapiens
ggagcggaagcccagcgggccccggcaaacccccaccaaggcggagacgccagcgacgaaccgaagacaagagccacag

SEQ ID NO: 121751 - RNA, 82 nt, Homo sapiens
cgcgcgaggagaggagcgcaacagcagcaccaggaaccgcaaggcgcccagaccgacgccggcagccccgcgacccgaccca

SEQ ID NO: 121752 - RNA, 84 nt, Homo sapiens
agagaaacagagagacggagcaaagaaccccgggcagaggaaacaccacggagagaaccagaccaggaggcgggcgagcaggag

SEQ ID NO: 121753 - RNA, 81 nt, Homo sapiens
gcgcccgccggcacgccgccagccccgggggccacgagcgggcgggaacacaagcggacggaagcggacgacgaggccacc

SEQ ID NO: 121754 - RNA, 73 nt, Homo sapiens
aaccgaaggagcaacaaacgagcgccgaccgagaagacagcgaacgggcacgacggccagcgaaacagagaac

SEQ ID NO: 121755 - RNA, 51 nt, Homo sapiens
ggcgcgaggggcccgggggcaggcggaacacggaagggcacaacgagggcc

SEQ ID NO: 121756 - RNA, 67 nt, Homo sapiens
gcaggaagaggcgccgcggaacaagcgaggccaggccacaggggagcagggaggcgagcaaaaaaag

SEQ ID NO: 121757 - RNA, 52 nt, Homo sapiens
ccgggacacaggagaaagagagcacaaagaaccgaccaagggggaaggaacc

SEQ ID NO: 121758 - RNA, 56 nt, Homo sapiens
gacacacaacccgacccgacgagccggcacaggaccaggcgacacccgccggaaga

SEQ ID NO: 121759 - RNA, 74 nt, Homo sapiens
gcggccggccaacccgacaggaccgaaagaaccgcacagagcaggcccaccggcaacacaaagcacgcagcacg

SEQ ID NO: 121760 - RNA, 87 nt, Homo sapiens
ggagacccggaagagagacacggccccaggaggcgcgaagacacccaagcccccaggggccacaacacggacaccagccgaaagccg

SEQ ID NO: 121761 - RNA, 36 nt, Homo sapiens
gcgccggccccaacacggaccgccccagccggaaac

SEQ ID NO: 121762 - RNA, 66 nt, Homo sapiens
agaagcaagccaccgaccacaccgcccggggccgggcagcgagcccacacaggaaacagggggcac

SEQ ID NO: 121763 - RNA, 81 nt, Homo sapiens
aggcaaagcgaggcccacaaacaccggccggaaggaccaccgcaccaggcggaaaaagggcacaacgggccacgcagccca

SEQ ID NO: 121764 - RNA, 63 nt, Homo sapiens
gccgggacagccacgacgaaaaagcggggaaggggggcaaaaaaaagaagcaagcgaagcacc

SEQ ID NO: 121765 - RNA, 74 nt, Homo sapiens
cggcccagcaccccgagaaccgcaggagccagagaaacgaaggaggcccaaccacaaaaggagccgacggaacc

SEQ ID NO: 121766 - RNA, 75 nt, Homo sapiens
caaaacaggcacagacggcgacggccacacgcgaacacgcagcaaagaaaaaaagcccaggaaagaaccaggaaa

SEQ ID NO: 121767 - RNA, 93 nt, Homo sapiens
cgagaggccggcgggacgcgggcgccaggaccggccgaacgcagagaggcgaggggacggcggggagcgcaggacagacgcccccgcgagacc

SEQ ID NO: 121768 - RNA, 62 nt, Homo sapiens
cagcaaccgcagcacccgggccccaaggaacaagcaaaggggaaagccagagacacaccgcc

SEQ ID NO: 121769 - RNA, 71 nt, Homo sapiens
cagacccgcggagacgcccgcaccacaaaacccggaaggcccccacaaagcccccagggcgcacggaaggg

SEQ ID NO: 121770 - RNA, 77 nt, Homo sapiens
gcgcgcgcgccgggacagcgaagcgcgcggccgagccggaggaaggcaagccagaagaaaagagaagacaagaaagg

SEQ ID NO: 121771 - RNA, 99 nt, Homo sapiens
aagagaaaaggaaagcagaagcaaagaaggcacaggaaaccagcggcgagagagagcaacgaggggacaacgaaggaggcaagcaacaaagggacaaaa

SEQ ID NO: 121772 - RNA, 83 nt, Homo sapiens
gcaggcagacaaaagggccaaagaagggagagagggaacagggcacaaccaaggagggccagccaccccacagaagacggaga

SEQ ID NO: 121773 - RNA, 83 nt, Homo sapiens
cacccccagaggacaagcagcagaagcggacaaacccaccaaggccagcacaaggagagagagcccacagcacaacaaaggaa

SEQ ID NO: 121774 - RNA, 65 nt, Homo sapiens
gaaccgcccgcacggggacccgcaaagaacaggccggcacaaaagggcgaagaacgcggaggaaa

SEQ ID NO: 121775 - RNA, 69 nt, Homo sapiens
ggaggccccccagccagggagcgcaacgagggccaaccgccgcagcagccaggcgaacacacacaagca

SEQ ID NO: 121776 - RNA, 49 nt, Homo sapiens
gaaacaccaccaacaaaccggacggaggggggaggagcaggcccccacc

SEQ ID NO: 121777 - RNA, 74 nt, Homo sapiens
gaaacaaaacgacacggaacaacagcgaagaccacaaggaggagcaagaaagggaggggggaaccgaagagcaa

SEQ ID NO: 121778 - RNA, 70 nt, Homo sapiens
accaccccaagaacccagcccacaccacaacacagaacgaagagaagaagcgagaaccgggcccccggga

SEQ ID NO: 121779 - RNA, 65 nt, Homo sapiens
aaaccggagaccagggcaacccagacgacggagggcaaacaaggggaaggaggagggaggcagga

SEQ ID NO: 121780 - RNA, 34 nt, Homo sapiens
aggaggagaagaagagaggaacaagcagaaagca

SEQ ID NO: 121781 - RNA, 73 nt, Homo sapiens
ggaacggaacagaaggcaagacagggcagaccgccagcagcacagcaagccacagagagggccggcagggcgg

SEQ ID NO: 121782 - RNA, 69 nt, Homo sapiens
gcggacgcagagaggggcaggcagacaaacgagaacgaagggagagggccgcaagaaggaaagcggggc

SEQ ID NO: 121783 - RNA, 80 nt, Homo sapiens
agcgggccagccgcgcggcgggaagcggcggcggcggcccagcgccaagaggagccacggaagggggaaaggcgacaaag

SEQ ID NO: 121784 - RNA, 68 nt, Homo sapiens
gcaggggaccccaggcagacgcgccaccgggacccccggagggccaagccgcccgccaaccggcagcg

SEQ ID NO: 121785 - RNA, 74 nt, Homo sapiens
acgaggggaggacccaaggagaggcacccgggacggaaccggcaacaacacggcaccacacaagcgaagaagcc

SEQ ID NO: 121786 - RNA, 39 nt, Homo sapiens
accgcacgagacccacgcggaggcagcagcacgaccggc

SEQ ID NO: 121787 - RNA, 75 nt, Homo sapiens
ggcggggcggcccaccaacaggaacagggcagacgagcggaggacacccaacccggcaggcaggcagagagaaga

SEQ ID NO: 121788 - RNA, 49 nt, Homo sapiens
accaggaaacgcaccgcacaaaccaaccgagacacaacacagaaaccaa

SEQ ID NO: 121789 - RNA, 54 nt, Homo sapiens
cccacgccagcggcccccggggccgcaaggccaggcgcgcagaggcacccaacg

SEQ ID NO: 121790 - RNA, 78 nt, Homo sapiens
cagagcccagcgccgccccagccacagcccccgcgcccgccagcccaacagaaaagaacgcggacacgcaagcgcggg

SEQ ID NO: 121791 - RNA, 70 nt, Homo sapiens
aacccagccgcaccgccccaggcgggggaggaggaggggacgaggcagaaacgcacgaagccggaagaag

SEQ ID NO: 121792 - RNA, 76 nt, Homo sapiens
gaaaaacccaaaaagaggggggacagcagcagcagacggggacaccagccaggagagaaccagaccgggcggagac

SEQ ID NO: 121793 - RNA, 81 nt, Homo sapiens
ccaaccgaccgaaaccaaggaacgggaaccagggaacaagcagcagccgagagccgaaagggccaggaacgccaaccgcgg

SEQ ID NO: 121794 - RNA, 73 nt, Homo sapiens
agggcaggccagggcaagaaccaggcccgcccaaggcagacaaaacagaggagaccagaccagaagccccgaa

SEQ ID NO: 121795 - RNA, 79 nt, Homo sapiens
gaaggaggcgacagaaaccagcagagaaggcccagacagccccggaaagacacaaagggacagggcagggcagcccagg

SEQ ID NO: 121796 - RNA, 51 nt, Homo sapiens
agggacgacaagccaacaacaggacggaagccccaacagcaacccaaaacg

SEQ ID NO: 121797 - RNA, 66 nt, Homo sapiens
gaaggggaacgggaaaggaacaacgggcaagaaagaaccaaaggcaagaaccggagcaggagaaaa

SEQ ID NO: 121798 - RNA, 70 nt, Homo sapiens
ggaaaaaaccagagaccacagaaggacgggagaacaccccacagggaagaggaggcaagaaacaaaaccc

SEQ ID NO: 121799 - RNA, 103 nt, Homo sapiens
caacgaggagaagacgccagcggcgagagcagaccacccgcgaaggagagaagcggcggggcgcacaggaaccccagcccggacgccgcccggcagcgcagcc

SEQ ID NO: 121800 - RNA, 60 nt, Homo sapiens
gcgcagcgacggcgcgggagagcgcgccagccggccgcgaaggaacccaagacacggccc

SEQ ID NO: 121801 - RNA, 69 nt, Homo sapiens
ccggcaagcacagaggaagagacacgcaggaagggggaccggagacgaccccggagaaaacacggggga

SEQ ID NO: 121802 - RNA, 83 nt, Homo sapiens
aagaggagaaaaccgggcgcagccgggccgcaaggccaggcgcgcagaggcacccaacggcacagaccccacacacaacggga

SEQ ID NO: 121803 - RNA, 80 nt, Homo sapiens
ccagggaggcccagggaaaccagacagagcaacagcagaaaggaacgcccggaaaacacagaagaaaccagcacacagcg

SEQ ID NO: 121804 - RNA, 70 nt, Homo sapiens
gagacagcccacagggggagaacaagggacaggaaacagaagagggacaacggccccccaccagaccgcc

SEQ ID NO: 121805 - RNA, 81 nt, Homo sapiens
ggacccggccccggcccacaggggggggcaaacccgagagaacggacgaagggagggaaggaaggaagagccaaaggacag

SEQ ID NO: 121806 - RNA, 60 nt, Homo sapiens
caaccagcggaaggcagacaagcagcgcaagccgccacacccagacaaaacccggcaacg

SEQ ID NO: 121807 - RNA, 63 nt, Homo sapiens
gcaagaaaaggagccggaaacggacaaacagaccacaagaagggcgggggccccgcagaccca

SEQ ID NO: 121808 - RNA, 54 nt, Homo sapiens
aacagcgagcggaccccgaccccgaggcgagacggaaagggccagggagcagaa

SEQ ID NO: 121809 - RNA, 80 nt, Homo sapiens
gccccggcccacaggggggggcaaacccgagagaacggggggagaggcaccagcaacagaccaaccgcagcaagcacaga

SEQ ID NO: 121810 - RNA, 73 nt, Homo sapiens
ggaagcacggcgggcgaaacagcaccgccggccaggaggagagcgcaccaccaaaaaggcaaacacaccagcc

SEQ ID NO: 121811 - RNA, 78 nt, Homo sapiens
ccgggcagcagggcggcagcgcccgagagaggggccagaagagaccaagaggaccccagaccaagaaggaaaccggga

SEQ ID NO: 121812 - RNA, 83 nt, Homo sapiens
aggagcgaccgcgccggcagcgccgcgaaggcgggccgggccagcccccgccgcccgggagaagacgaccccgacgcaggcca

SEQ ID NO: 121813 - RNA, 59 nt, Homo sapiens
cgcaagaaaaggagccggaaacggacaaacaggaggaaaagcccgccagcacgcacaaa

SEQ ID NO: 121814 - RNA, 71 nt, Homo sapiens
cgcacgcgccggagacagggagaccaagagacagacaccgccccgagacgaggagcgggcaaaggaaggga

SEQ ID NO: 121815 - RNA, 71 nt, Homo sapiens
ccccaagagcgggagcagacacagagggaccaacggcaggcaggcgagcagcaagcggaggaaacgcaggc

SEQ ID NO: 121816 - RNA, 64 nt, Homo sapiens
ccgcccggaccgcaagcaaaaaccaaaaaccggcccagacaacggcaagccggaaccagaaaca

SEQ ID NO: 121817 - RNA, 85 nt, Homo sapiens
acgcgggccaccgccaaccgcccccacaacaggaccgggccgcggccagaccaacagagagacggcgagagaggcggcgaggacg

SEQ ID NO: 121818 - RNA, 71 nt, Homo sapiens
aaacacagaacccaacggaccaaaagcgcagaaagccacgcaaaaggaaagacgcgacccggggcgccgcg

SEQ ID NO: 121819 - RNA, 74 nt, Homo sapiens
cccaggagagagagcacaggggaagaaaaaaccacgcacacggggccagcacagggcagcgcgaaaaaccaagg

SEQ ID NO: 121820 - RNA, 80 nt, Homo sapiens
ccggccaccggcggagcgagcgaccggaaaagggcccgggggaggagggcccggaccccagccagcccggccgggccgga

SEQ ID NO: 121821 - RNA, 73 nt, Homo sapiens
gcaaggcgcacaaggacaccaggccagacggcagggaaccaccaccgaagggacgaaaagcagggcggggccg

SEQ ID NO: 121822 - RNA, 64 nt, Homo sapiens
ggccagaccggagcagcggggacaggacaaaccggcgaccacacacggggacgacggggaagcc

SEQ ID NO: 121823 - RNA, 77 nt, Homo sapiens
cggaacccggacgcggagagcagcggacccaagggacaggacgacgccaacaggccccagccgggaaagaggcccca

SEQ ID NO: 121824 - RNA, 71 nt, Homo sapiens
gcggcagaacacaccagaagaaaacccagcaaggaaagacacaggaagagcagaaaccaccccaaccccag

SEQ ID NO: 121825 - RNA, 96 nt, Homo sapiens
acacaaagccgcgaaaggccgggaagagggagagcaaacggccagcccagggcgaaaacacagaaggaaaaccaaaaaaccaagacggagaagcga

SEQ ID NO: 121826 - RNA, 80 nt, Homo sapiens
ggcccgaaggaccggcgcgggaccaagacaaccccggcacgaggccaggacaaggacaagccgaagcccggacaaaacgg

SEQ ID NO: 121827 - RNA, 84 nt, Homo sapiens
cggagaccccgaaggcgcaaacgacaccacccgaccggcaccaggacacacgaccgaaagccgcggaggcaagaaccacccagc

SEQ ID NO: 121828 - RNA, 85 nt, Homo sapiens
cacagagagaaccaccagcagccaccaccaccaccaccaccacagagcgggaagaggggcgaggacgaccgaaaacccagccaga

SEQ ID NO: 121829 - RNA, 68 nt, Homo sapiens
cgaggccagcagggaaagccccgcagcaacaggagacagggaaacgaaaaccaccgggcaccacgagc

SEQ ID NO: 121830 - RNA, 59 nt, Homo sapiens
agcgaccaagaagggaggaaggagcacagaagaaaggagcaggcaggcccaacacagag

SEQ ID NO: 121831 - RNA, 73 nt, Homo sapiens
aacagcacacgccagggagaagcaaacagcagccaaacggggaaaaacagagaccaagcgaccaagcaagcag

SEQ ID NO: 121832 - RNA, 72 nt, Homo sapiens
gaagccacaaaccgaagccccagccaaccagaggagagagcggaacagcacgggggggaaacgaacgcggcc

SEQ ID NO: 121833 - RNA, 86 nt, Homo sapiens
aagcagaagcgagaggaggaggagaagaaagcggagcgagcggcagcgaaaaaacaccggacaaggacggacaacccacagaagga

SEQ ID NO: 121834 - RNA, 76 nt, Homo sapiens
aggccgaaagaaacacaagacgaacgggagaacagcagcagcccacgaacagaaagggaccgcaaaaggaaagacg

SEQ ID NO: 121835 - RNA, 70 nt, Homo sapiens
gaacccacaaggaggggaaaagaaggaggccagcgggacacacaaagaaagacgaaggacacccaaaggg

SEQ ID NO: 121836 - RNA, 68 nt, Homo sapiens
gagagaaacagagaggagggagaaacagcaaccggcaaggggggcccccaaagggaagccaaacacaa

SEQ ID NO: 121837 - RNA, 80 nt, Homo sapiens
cgccacccgcccccaccaggccgaagagaaccacaaggaccacgccgcgaggcaaacgcaagggaaaaaagggcagggga

SEQ ID NO: 121838 - RNA, 80 nt, Homo sapiens
ccgccggccgcgggccaggaccgcccaggggccggggggccgggcgccagccgggccagggagcgaggcggccagggccc

SEQ ID NO: 121839 - RNA, 80 nt, Homo sapiens
caagaagccggacacaaggcgccacggcagcgggggcacccgaggaggaagagggcagggcccacggaaagaagggaaac

SEQ ID NO: 121840 - RNA, 81 nt, Homo sapiens
gcgacggcggaacccggggccgggacgcagcccggcggcagcaggcaagaaacaacagcgaccagagccgaagagaacgcg

SEQ ID NO: 121841 - RNA, 82 nt, Homo sapiens
gcccgggcagagggacgagaagccggacagggcccgcggacacgagaggacgcgaggcccagagagggaaagccacgccagg

SEQ ID NO: 121842 - RNA, 72 nt, Homo sapiens
ggaccaaacagcaagggaagggacaaaccgccgggcgagccccgcgagcgcagacccagaagagaccagcag

SEQ ID NO: 121843 - RNA, 75 nt, Homo sapiens
gccccccagccagggaacggccgccccccgggcgaggcagagacgccaggggcaaagcgcgggaagcggggccca

SEQ ID NO: 121844 - RNA, 82 nt, Homo sapiens
cggaggcagaggggaggcgcgaaagccagcaaaagccagcgcagcgggcggaccaggcagcgcagggagaacagggcaagga

SEQ ID NO: 121845 - RNA, 73 nt, Homo sapiens
ccaccgccggccaggggcggaaacccaaaagggaaggcccacaagaaaacaaaaacacaaaaaagaaaacggg

SEQ ID NO: 121846 - RNA, 52 nt, Homo sapiens
gaccgcacgcggaggcggcgcccgccaccccccccccccccagcaggacgac

SEQ ID NO: 121847 - RNA, 78 nt, Homo sapiens
gcacggggcgggcagcggcgccgggcacaggagggaagagcaagagcaacggaaagcccaagaaagcaaggaagcagg

SEQ ID NO: 121848 - RNA, 84 nt, Homo sapiens
ccccggcccacaggggggggcaaacccgagagaacggaaacaggcgcagcgaccgaaaccggggcccacggccaggccccgaag

SEQ ID NO: 121849 - RNA, 75 nt, Homo sapiens
ccgggccagcgccggagcgggcaccgcagaggaggaggaagagccagggacccgaggagggacccgccccgagcg

SEQ ID NO: 121850 - RNA, 70 nt, Homo sapiens
gcacgcgcacgacgggccggaccaagacggaacagacaacacaaagagaaaggaaaaggcacggaaaaaa

SEQ ID NO: 121851 - RNA, 71 nt, Homo sapiens
cgagaaagggcgacacaggagggaggaagaggcgcggcaagggcgcggcaagaaaaccggggccgccccac

SEQ ID NO: 121852 - RNA, 83 nt, Homo sapiens
ggaacagcagagagcacacgagaaaaggcgacggcggagacagaagagaggagagcccacaaacggcaacagccagggacagg

SEQ ID NO: 121853 - RNA, 75 nt, Homo sapiens
caagagcgacaggaggagacaggcgagagaggaggacacgaccggccaagcagaagaaccagcacaggcgaagcc

SEQ ID NO: 121854 - RNA, 77 nt, Homo sapiens
agcccaccaggccaccacgcggcgggccggggcaaaagcccacagagagagccaggaccaaggccgccaaacaccaa

SEQ ID NO: 121855 - RNA, 41 nt, Homo sapiens
cgggcgggacccggcccgcgacggaaccgcgggggggaggg

SEQ ID NO: 121856 - RNA, 73 nt, Homo sapiens
acaggcccgggccaaaacagcaacccaaacacagaagaaacaacgggaagaaccaacgaaagcaggcaaccca

SEQ ID NO: 121857 - RNA, 83 nt, Homo sapiens
cgccgcggagagccggaccagcggagccagggccgacgccaccgccgagcccagaccggaacagacggggggccaacaaagaa

SEQ ID NO: 121858 - RNA, 55 nt, Homo sapiens
aacacccaaaagcgagcgcaaggaggcagccggaggcgcagaccggggacagcag

SEQ ID NO: 121859 - RNA, 78 nt, Homo sapiens
ccaccgccaggaccccccaggagagcgccccagggcaagccccgcccggccaacaagcacgcagcacgggggcagggg

SEQ ID NO: 121860 - RNA, 74 nt, Homo sapiens
cggaccgagagcggaccgagagcgcgaaacgcacgagaagaccaacgccagagccggggaacagcggggacaca

SEQ ID NO: 121861 - RNA, 74 nt, Homo sapiens
cggaggaccagaacacggcagcacaacggggccacagagagcagccaccaaaacacaagaggacaaagcccggc

SEQ ID NO: 121862 - RNA, 77 nt, Homo sapiens
acagaaagacagccccccgcgcggcacgggcggcgggccagcacgaagcccgaacaaccgcgacagaagccagaagc

SEQ ID NO: 121863 - RNA, 115 nt, Homo sapiens
gccgcagaccccgaccagacaggacgagaggcgagcagaggagaggggccgaggagaacaagcagaccgaagcggccaggcagagaggaaggacagagcaggcagcagccagcca

SEQ ID NO: 121864 - RNA, 34 nt, Homo sapiens
aggaacagcaaaaaggagagaacggagagccccg

SEQ ID NO: 121865 - RNA, 54 nt, Homo sapiens
gcgggccgccgagcggacccggaccggggggggagagagacgcgggaaccgcca

SEQ ID NO: 121866 - RNA, 59 nt, Homo sapiens
gccgccagacgcaccagaagagaacacgagccacgccagcccagaaagccgggacaaag

SEQ ID NO: 121867 - RNA, 50 nt, Homo sapiens
caccgcgaggaccagccccggcggcagggaccaaccagcaggcagccgga

SEQ ID NO: 121868 - RNA, 78 nt, Homo sapiens
cccggagcggccgccccagcccaaggcgagagcggaagagaaagccggaccaaaggagcagcaaccgcgcccgggacc

SEQ ID NO: 121869 - RNA, 70 nt, Homo sapiens
ccgacaacccccagaaagccaagccggggagaaaacgggccggaggaaaagggcggcaggggaccaccac

SEQ ID NO: 121870 - RNA, 63 nt, Homo sapiens
caccagcagccaccaggagcccgagagagaaggggggcagacccaaaggaaacgcacgaaaga

SEQ ID NO: 121871 - RNA, 40 nt, Homo sapiens
ccaacgacgcacagaacgcaagacaaagcagagcccacag

SEQ ID NO: 121872 - RNA, 70 nt, Homo sapiens
gcacggaagaagaagcaggaaagggaaacagaggaagaagcacaagaccacccggagccagaaaagacaa

SEQ ID NO: 121873 - RNA, 48 nt, Homo sapiens
cccagaagcccagggcggacagaaaggaaagcgcaaagccgacgagga

SEQ ID NO: 121874 - RNA, 76 nt, Homo sapiens
cacacagcgcccaggccagagaaggggaaggaggggcagcggcacaggagggcagaccaaaagcacaaaaagaacg

SEQ ID NO: 121875 - RNA, 114 nt, Homo sapiens
ccgaccccggaagcgagcgcggacgccacccgggggcacagcaagggggaccaaaagaacccagccaacccgcagagggaggggaggggcgagcggaggagagcggggcccaag

SEQ ID NO: 121876 - RNA, 83 nt, Homo sapiens
caccaaaggacaccacagaacccgagaaaccacaagcgacaggaagcgacagcagaaggaagcaaaaacagaaggaaaaacga

SEQ ID NO: 121877 - RNA, 72 nt, Homo sapiens
cagaaccgacggggaaaggaaagcagcccgaaaagaagcaagggggaaagcggaccaagaggaaacccgaag

SEQ ID NO: 121878 - RNA, 63 nt, Homo sapiens
cccacagcgcggcaccgcgacacggaaccccacccaacaagggggaacgccccccaaccgaga

SEQ ID NO: 121879 - RNA, 44 nt, Homo sapiens
gacagccgcgacacacagcaacggggcggcacacaaggagcgaa

SEQ ID NO: 121880 - RNA, 69 nt, Homo sapiens
cgcaccgcaggcagacaaaagggccaaagaagggagagagaaagggacagagcacagcagcacgaccgg

SEQ ID NO: 121881 - RNA, 73 nt, Homo sapiens
aacccagagaaaaggaaacaacaggacacacccagccccgggccggcggggagacccacaacccccggaagga

SEQ ID NO: 121882 - RNA, 79 nt, Homo sapiens
agcaacaacggccggacggaagagacaggagacagcaaacgcaaggcgaagagcgaagaagaaccagagaggcgaaacc

SEQ ID NO: 121883 - RNA, 80 nt, Homo sapiens
cccgcgccgccggcaccagaggcaaaggccaggaggaaggagcaaggcagagaagaccggggacgcagcagagagccaag

SEQ ID NO: 121884 - RNA, 67 nt, Homo sapiens
cgggcagcccggccgacaaccacgagaaaggccgaagaacacacaacggacagcccaaaggaggcca

SEQ ID NO: 121885 - RNA, 101 nt, Homo sapiens
cgcccagcagccccacgcaggggcccggaacgcccgaccgcacacggccacccgaggagagacgagagaggaaacgcaacagggaagcgacccaaggccga

SEQ ID NO: 121886 - RNA, 72 nt, Homo sapiens
aaaagcggcagacaggaagaaacaggaaaagggccgcaccaaaaaaccagcaccagacagcgaaaaagagga

SEQ ID NO: 121887 - RNA, 60 nt, Homo sapiens
cgcccagagccgccgccccgccccggcccaaagccacgaagaccgggcgccagggccgcc

SEQ ID NO: 121888 - RNA, 77 nt, Homo sapiens
acgcaggaaaggcaaacaacccacaaacaaagcaccagaaagcagccaaaaggcagagcccaccaaggccggaagcg

SEQ ID NO: 121889 - RNA, 83 nt, Homo sapiens
aaaagcaaacaaccaggggcagggaggcacaaaggggaacgcagggcacgagaaacagacacccgcaggagaagaccagaacg

SEQ ID NO: 121890 - RNA, 79 nt, Homo sapiens
cacgcagcgggcaagggaagaccaccgcagggcggccgagacggcaccaggacaagcgagggagacacgggcggaagcc

SEQ ID NO: 121891 - RNA, 74 nt, Homo sapiens
ggaagggaccgggaaggagggcggagaaagacgccagaagaagagcgagacgacgggaccgaaggaccccgcca

SEQ ID NO: 121892 - RNA, 60 nt, Homo sapiens
gccagacaccaggaacgggcccagggcaccagagcaaagagaaagggcagacggagagaa

SEQ ID NO: 121893 - RNA, 72 nt, Homo sapiens
accacggaaaggaggaagaagacaccggggacagacaggcggaagccgcagaaggaccggccagaagcaagc

SEQ ID NO: 121894 - RNA, 114 nt, Homo sapiens
ccagggaagaagggaagcccacgaacacaaagcaggagggagagggccaagaagcagcggacacgagcaagaaagagagccagaagaggcgagaagcagacgcccgccgccaca

SEQ ID NO: 121895 - RNA, 61 nt, Homo sapiens
cacgaagcggccgcacaacacggagaaccacggggaccaagaagcgagcagcccaaacgga

SEQ ID NO: 121896 - RNA, 85 nt, Homo sapiens
cccagccaaacaaaaaggaaaggagacaagcagagacgaaccaggcaaagaggaacaaacagacaccaagaaagggaagaggagc

SEQ ID NO: 121897 - RNA, 57 nt, Homo sapiens
gacgagacagaagcagcacaggagagagaacgagcgagaggggaaagagagggagga

SEQ ID NO: 121898 - RNA, 83 nt, Homo sapiens
gccgcggcgcaaccgcccggagcgcggcgccgagcgcagggaacggcgcccagcgggcaacccacagagagagaggaaacgaa

SEQ ID NO: 121899 - RNA, 83 nt, Homo sapiens
ggggccgcccaccccgcggcgacgggccccccggaccccaccaggcaagacgcagcagggaggcacagccagagaacaacaca

SEQ ID NO: 121900 - RNA, 82 nt, Homo sapiens
caaaaacagccaacgaaagaaacggcgagaccaaagagaggcacaacacagaaaagggcccaaggaagaaagacaagaaaga

SEQ ID NO: 121901 - RNA, 76 nt, Homo sapiens
cccaaaccccagaccccgcccaacacgacccagcagccagagagccaacaacaagggagggcacagccaagacaac

SEQ ID NO: 121902 - RNA, 83 nt, Homo sapiens
cagaacgccaagccccgcgagcgcacgccaacgacgaggaccgacgcagaaagccaaacggcccgcggcaacaaagcacagcc

SEQ ID NO: 121903 - RNA, 83 nt, Homo sapiens
cggcggcgaccccgcggcgggcgcggagagggccccggagcggcgcggcgggccggcggcgcgaaaggagcaagaaagcaaac

SEQ ID NO: 121904 - RNA, 86 nt, Homo sapiens
ccgggcccggggggagaccccccgggccaaccgggcaggaggcagaggcagaccagcagcacccggaaccaaaaagaagccccaga

SEQ ID NO: 121905 - RNA, 72 nt, Homo sapiens
aaacaaccccagaaagaacacagcgaggcagcaagaggggcccagcggagaagagcccaggcccggaagaga

SEQ ID NO: 121906 - RNA, 56 nt, Homo sapiens
ccccaacaccggccacggaaaaacgggacgaacagcggggacgccccagcagaccg

SEQ ID NO: 121907 - RNA, 72 nt, Homo sapiens
caccgagaaaggaaggaaaaccgacgaacggaggagaccaggaggaagaagccaccaggggcacaagaacag

SEQ ID NO: 121908 - RNA, 68 nt, Homo sapiens
caccaccacccacacccaccaacaacaccacaaaaccacagccaagccacagcgaggggagaagcccc

SEQ ID NO: 121909 - RNA, 83 nt, Homo sapiens
gcgcaagggcagcgcaccacggaggcaacaaggggcagcgcggccggggccgcccaggagcgaggggagggacaggagccgag

SEQ ID NO: 121910 - RNA, 70 nt, Homo sapiens
accacgcagcaggccagaagaaagaggccaacaggaacgaagagcaaggacacacacaagaaaaagaagc

SEQ ID NO: 121911 - RNA, 74 nt, Homo sapiens
gcgagcccccgcggacccacccccgaacccccaagagccggaggagccaccaacagaagcaggagccaggaaac

SEQ ID NO: 121912 - RNA, 75 nt, Homo sapiens
agaaggcaccacccacaaccggaagaggaaccgaaaaacacggaaacacccagcaaagaggaagcgcaagagaac

SEQ ID NO: 121913 - RNA, 79 nt, Homo sapiens
ggagcaagggagcggacgaggaaggcacgccgccgggggcgcgacgcggagcagccgggacaccccgaaacggaacagc

SEQ ID NO: 121914 - RNA, 45 nt, Homo sapiens
caaaagcaacaaaagccagaacacggccccagggccacccagcag

SEQ ID NO: 121915 - RNA, 77 nt, Homo sapiens
agaacgaagagggacaccacccaccccccaaccaccagaagcagcaaaggagccagcaaaagcaaggacagaaagcg

SEQ ID NO: 121916 - RNA, 70 nt, Homo sapiens
gagccaagcaggaaggcccagcaaagagaagaaggagaagaggaaaacggccacaggacaaagacagagg

SEQ ID NO: 121917 - RNA, 39 nt, Homo sapiens
agcgaaacggggaggcggaagcagcaacgaagaggcacg

SEQ ID NO: 121918 - RNA, 85 nt, Homo sapiens
ccacggcccgccaagagccaggagcagcgaacagaggccagccggggcacccgaggccgagacgaccacgccggccgcgaggacc

SEQ ID NO: 121919 - RNA, 83 nt, Homo sapiens
agcaagcgggagaccaggagcccccaccaggccaaagaccggcaagcccagcaggcggccccacgcacgcgccaccaaagcgc

SEQ ID NO: 121920 - RNA, 68 nt, Homo sapiens
cggagggaaacgaacacaggagaaccaggagggcggacgacgagaaacggcaccccccacacacaagc

SEQ ID NO: 121921 - RNA, 78 nt, Homo sapiens
aaagacagcaacaacaaccagcagcaacaaggaaacagggggcggggcggccgggcgccgggggagcacgcaccacac

SEQ ID NO: 121922 - RNA, 84 nt, Homo sapiens
ggggcaagaagccggaaccacgcggcgggagccgaggacaggagcaggagccagcacagcaggcccgcgcccgggggccgccgc

SEQ ID NO: 121923 - RNA, 89 nt, Homo sapiens
ggcgggacgcgagcggcgagccggagcgcggagcccggccccgcaccaggaggaggacgacagcacgagcccacgcaggagacgggagg

SEQ ID NO: 121924 - RNA, 44 nt, Homo sapiens
cgacacgccaaggaccacaaaacccagaaacaaccagcgaaccg

SEQ ID NO: 121925 - RNA, 71 nt, Homo sapiens
gggccccagccccgcccgcccccagcccgggcagcaccccagaacacgggcggccagaaccgggcggaccc

SEQ ID NO: 121926 - RNA, 76 nt, Homo sapiens
ggaggggagacgcgggagcggcggcgaacagcgcgacacaggaggacggcgcaccacaagagagggcaaacaagaa

SEQ ID NO: 121927 - RNA, 67 nt, Homo sapiens
gggcgggcgcggccaccgggaccggcggggagcgacgccagcgcccaacagacagagagagcaaaac

SEQ ID NO: 121928 - RNA, 75 nt, Homo sapiens
agacaccagaggaaaaccaccaagggggaaggcggcaaggacacccgaaacccaagagacagagcagacagacac

SEQ ID NO: 121929 - RNA, 83 nt, Homo sapiens
agaagaaaccggagaaggaacagaccccggaggagggggcaggcccaaaggaaagccacaaagaacacgagagacaggaagcc

SEQ ID NO: 121930 - RNA, 73 nt, Homo sapiens
ccggcccccacggccgagaagaagacaccacagcagccgaagagagaggaagaggaagggagggaaaaagaaa

SEQ ID NO: 121931 - RNA, 80 nt, Homo sapiens
agaggccgaaccgggcgacaagaggccgggcgccccgcaggacacaaggagcagaacagaaggcgcacaaaggaaagaga

SEQ ID NO: 121932 - RNA, 79 nt, Homo sapiens
agaggcaccaaaaagaaaacagagaaacacagcaccagcgggcgagcgacacaacaggaacggccgaacacagagggag

SEQ ID NO: 121933 - RNA, 79 nt, Homo sapiens
gcaggaaaagacaagcccagagaagcagagaaagacgggagcggggcgcgcagacccaaggcccgacaggcggagaaag

SEQ ID NO: 121934 - RNA, 76 nt, Homo sapiens
gccagacgaaaagccggacccaggagaagaggggagagggaccacacagaaacggccaggagggggccacaccgaa

SEQ ID NO: 121935 - RNA, 80 nt, Homo sapiens
aacccaccagaaggaaccaaccggacacaaacaagcagcaggaggacaccaaagcgagcaggcgacccaaaagagcgaag

SEQ ID NO: 121936 - RNA, 74 nt, Homo sapiens
gggaagggagccggagagaaaggccacacggagcccaaaagaaacagggcgcaggaaaagacgagccaggaaaa

SEQ ID NO: 121937 - RNA, 80 nt, Homo sapiens
gccccagacacggaccccgcagggccgcaggagggaagcgcacggaaaccgccccgggaggcacagagcaggagacgcca

SEQ ID NO: 121938 - RNA, 64 nt, Homo sapiens
gccacacccgggcaacaccgaaaacgagaaacgaaagagacacgggggcacaaccgagcccggg

SEQ ID NO: 121939 - RNA, 82 nt, Homo sapiens
aacccacacccccaaggcacggggccacaccacgaaggcccgccaccaagccagcacacgacgcggcccgccgggacccgcc

SEQ ID NO: 121940 - RNA, 70 nt, Homo sapiens
aacacaacaggaggcggaggcgaaagcggaacgagggggcagcacgccgaaggagagaccagacaacagg

SEQ ID NO: 121941 - RNA, 73 nt, Homo sapiens
ggacccaaaaaacagagcacgcgaccagcgaggagcaacacaggagccggaggcagaaaaaaccagcaggcca

SEQ ID NO: 121942 - RNA, 80 nt, Homo sapiens
gcgccagcagcccacacccggaccagcccagccccagggccccccaccggcagggaagggaaccggcagcgaacgaggaa

SEQ ID NO: 121943 - RNA, 79 nt, Homo sapiens
aagaaagcccaggacgggccaagagagcccgggcccggaaagggagcaacagcgagcaacaggcaacgaaaacagacaa

SEQ ID NO: 121944 - RNA, 52 nt, Homo sapiens
gcacgcgaacggaaacgcagcaagacggaagggaaacagagaaaaagaacag

SEQ ID NO: 121945 - RNA, 78 nt, Homo sapiens
aggaggccaccgaaggcacggacagggacagaccagggacacaacgggaaaccggaccgaacaccccaccagaccacc

SEQ ID NO: 121946 - RNA, 65 nt, Homo sapiens
aaagcagacaggccaggcacacagaaaaggagggcccccggacccgggagcggacccggggcggg

SEQ ID NO: 121947 - RNA, 81 nt, Homo sapiens
ggaaaacaagaggccccagagggaaaagaagcccaaagaaagaaagcaccgggaggaaagagagccacacgaagaacacgg

SEQ ID NO: 121948 - RNA, 71 nt, Homo sapiens
aacaaacagagcgcgagggccaagagccgagagacggaaaagaacaaacaacacaagcgagagagaaggag

SEQ ID NO: 121949 - RNA, 69 nt, Homo sapiens
gcgagaagcgggacgcgccgccacacagcccaaggcaggcaaagagagaggaagcacagacgaccaagg

SEQ ID NO: 121950 - RNA, 66 nt, Homo sapiens
cacgccaaaggggcacaccaagaagacgccaggaaagaaggaccgccgcaaagccaaagcagaccc

SEQ ID NO: 121951 - RNA, 52 nt, Homo sapiens
aaccaggagccacggacaagaccaaaaggaagaaagagggccacggacagag

SEQ ID NO: 121952 - RNA, 89 nt, Homo sapiens
aggcggcacacgcccgcgccgacgcggccccgcaagccagaccgcagggaccgccgcgacaccgagggcacgccaccaggaagggcgcg

SEQ ID NO: 121953 - RNA, 78 nt, Homo sapiens
aacgcgaagacggaacccgggacgacggaaaacccgaggagaagcccggccccaagccccccgcgcgcgagaacaggc

SEQ ID NO: 121954 - RNA, 85 nt, Homo sapiens
cggcagcagcagacccaccaagaacgaggccaggcgaggagagcgaacaaccccagaagagcccggaccaagagacgaggaaaac

SEQ ID NO: 121955 - RNA, 80 nt, Homo sapiens
ggaggaaagcgggaagaccacggagcggggagagccgccgcaaacccagaccgcgcgccccagaccaccggcagggaaca

SEQ ID NO: 121956 - RNA, 73 nt, Homo sapiens
aagaaaggggaggacgcagaggcggcacaaggaggccaacaagcacagggaaggccacccaggaagaagcgca

SEQ ID NO: 121957 - RNA, 83 nt, Homo sapiens
gccagcgaagagcagggccgagccagcaccgggaggcgaggcaagagaagcgaaccaggaggcagagagagacagggcaccaa

SEQ ID NO: 121958 - RNA, 75 nt, Homo sapiens
ccaacaaacaaccggagggagggagaaggcccgcagcaccaaaaaagacaaaacacaaaaaaacacagcccccaa

SEQ ID NO: 121959 - RNA, 69 nt, Homo sapiens
gccacaacgcgcaccccggaccaccccaccagagccagcaaaagaggcggcaaggcagcccaggcaaag

SEQ ID NO: 121960 - RNA, 77 nt, Homo sapiens
gcagagcggggcggccacaagcaaagagagaagaacgagagccaaaggaccgcagacaggaaagcaacacaagagcc

SEQ ID NO: 121961 - RNA, 77 nt, Homo sapiens
cccccagcgcccaaacacgcccaagccgacggcgccaggaacggaggggcagccgcacccaagaaggacagaccccg

SEQ ID NO: 121962 - RNA, 80 nt, Homo sapiens
cgcgacgcaagaccagcaacagaacgcgccgagcccccgcgacccaccgaaggccggggacggccgaagcccgcagccca

SEQ ID NO: 121963 - RNA, 78 nt, Homo sapiens
cgaaagcccagccagccaaggacgcgacaaaggaccagccagaaaagggaaccagggaggacgccaggccaacaggaa

SEQ ID NO: 121964 - RNA, 58 nt, Homo sapiens
ggcgccgggggaggccacagcggccgggaccaagcgagacaagcagaccggaagaccg

SEQ ID NO: 121965 - RNA, 70 nt, Homo sapiens
aagcagggaagccccgcggagccgccaccacgacgaacaagggaaaaaaggcacgccgagcccaaaggac

SEQ ID NO: 121966 - RNA, 75 nt, Homo sapiens
cagaaagaaggaaaaagcagaaagccagaggaaggagccagaaggcccggagaccgaaggccccgccgacggacg

SEQ ID NO: 121967 - RNA, 68 nt, Homo sapiens
caggagccacggacaagaccaaaagagaccagcaaccagggcaagagccagggacacggaagagaaac

SEQ ID NO: 121968 - RNA, 70 nt, Homo sapiens
aagagagaggagggggcaccgagcaacgagggcagacccgacagggacagcggcaccacccaaaagaaaa

SEQ ID NO: 121969 - RNA, 77 nt, Homo sapiens
ccaaggagcaccgccagcaagaccgagaacgacagcccgccaggagcacaacgccgagaaagccagcgacgcccaaa

SEQ ID NO: 121970 - RNA, 58 nt, Homo sapiens
aggaagaagaaagagggcgccagccgggaagaaggagcgcagaaggaacggagaagcg

SEQ ID NO: 121971 - RNA, 85 nt, Homo sapiens
cccaagaccaggccaggacgagagggaaggcacagggagaagggaaacccacacccagaccccaggcggagcgaggacccggacc

SEQ ID NO: 121972 - RNA, 86 nt, Homo sapiens
gcccagaagaccagcgcgggcagacccagcaaaagcccaggagcacagcgggccgaggcccggagggccccgaagcgcagcacgcc

SEQ ID NO: 121973 - RNA, 67 nt, Homo sapiens
gcacaccccagcaccaaagcagcaaacaaaggcaaggaccgaaggacggaacaagcgagcggagaag

SEQ ID NO: 121974 - RNA, 82 nt, Homo sapiens
gcggcggcggcgcggggaccgaggcaaaagcagaccggaaaacccaccggcaagaccacacccgaggggagcccaggacacc

SEQ ID NO: 121975 - RNA, 74 nt, Homo sapiens
ccaaaaggcaaggcacaagggacggagcgaaccaggcaggccaccgaaggcacgggacagagacaaggaaaacg

SEQ ID NO: 121976 - RNA, 50 nt, Homo sapiens
ggcgagagagacagggaggaagcggaaccaccaccgccaacaccggccgc

SEQ ID NO: 121977 - RNA, 76 nt, Homo sapiens
agcacgggacccagcccaggccgcacggacggggggggaacaaccgaacccaacaaaggcgcgcgacccagacgga

SEQ ID NO: 121978 - RNA, 54 nt, Homo sapiens
gcgaaaaagcggaacgaagaaaacggagcccgagacaccccacgaagcaaaagc

SEQ ID NO: 121979 - RNA, 76 nt, Homo sapiens
cgggccgagagccgcccgggccagcggccgcgcacccccggccggaggcaccagcgggagagaccacaacacagga

SEQ ID NO: 121980 - RNA, 72 nt, Homo sapiens
agacaaaagggccaaagaagggagagaggcggcccccccacgcgacccgggccacccccacgccgaagaacg

SEQ ID NO: 121981 - RNA, 74 nt, Homo sapiens
aggggcaggcggccagcagcagcagagcaggcagggcagaagaaaagccgacaaagccagacccacccaaaaag

SEQ ID NO: 121982 - RNA, 73 nt, Homo sapiens
gcagaagcgcccaccagaaggcaggaagaggagaggcggacgcagggccgaacggagaccagagggaaaacaa

SEQ ID NO: 121983 - RNA, 78 nt, Homo sapiens
cgaaaggagcgggccggcaagggagagccgcgaggagggaaagcggcaaaggaagaggcaaaaaggcccccaacagag

SEQ ID NO: 121984 - RNA, 74 nt, Homo sapiens
agccaagcgcgcgccggacaccgaccagaccccggaaacagggaggacccagccgccggagggcccaagggaca

SEQ ID NO: 121985 - RNA, 79 nt, Homo sapiens
ggaggagcggagagcgagcggcaacccggagagcagggacaaggaagggagcaaacgggagagcagagggcaaaagaaa

SEQ ID NO: 121986 - RNA, 85 nt, Homo sapiens
ggaggcgggacacccagcaccccacgcccggccgacaagcacgcaaagcgaaggaaggccgacgggcaagaacgggaagccgaac

SEQ ID NO: 121987 - RNA, 41 nt, Homo sapiens
cggaggagccccaagaacagagacacgagaaaggagaagaa

SEQ ID NO: 121988 - RNA, 86 nt, Homo sapiens
gccgacgggcgcggaccagccaaagcgaggaccgccgggagagccgcccaccccccacccggacgccgggcgcgcccggcccccca

SEQ ID NO: 121989 - RNA, 52 nt, Homo sapiens
gagggccggcccgcgggcaggcaaccagacacacaaccaccagaaggagaga

SEQ ID NO: 121990 - RNA, 120 nt, Homo sapiens
gagggaagagaaagaagaagacggaccccagacccccgacgaggaccccaacaacaacccaccggacggcgacaggccagaaaggcccaagcgccgggaccagcaggccgcgcccggcac

SEQ ID NO: 121991 - RNA, 60 nt, Homo sapiens
aaagcccgaaggcaaaaggacgggagcggaccgccaagcaggcaggcagcagaggccacg

SEQ ID NO: 121992 - RNA, 74 nt, Homo sapiens
gaccacagagggacccggacaaccagaggcagccagcagggggaggaaaagacacgaagggaggcgagaagaaa

SEQ ID NO: 121993 - RNA, 93 nt, Homo sapiens
aggcaccaggccaccacagaaacaaaagcaacaaagaggaccggaaggccaaaacaagggaagcaaaggaaacggagagacagaagaaggaga

SEQ ID NO: 121994 - RNA, 49 nt, Homo sapiens
gccgaacaacgccggcccaccaacccccgaaaccaccaaaaaacgaagc

SEQ ID NO: 121995 - RNA, 85 nt, Homo sapiens
cgccgagcggcggccgaggcggcggggggcgcgcaggccgcgacgagggcgcgagccacggagaaagacacacgcagggaaggaa

SEQ ID NO: 121996 - RNA, 76 nt, Homo sapiens
gcagggccgcgccgcggccgcagccccacgggggcccccgcagacagaaggcaacaccaggggcacaaaacacgac

SEQ ID NO: 121997 - RNA, 79 nt, Homo sapiens
cgccaccaaacaagcaggaaagccgcacaggacggaaaaaaaagggcggagaacggaaaagcaccaggaagcagagagg

SEQ ID NO: 121998 - RNA, 75 nt, Homo sapiens
cacaccggagcaacaaccggcgggccgaggccgcaggaggagggaggaaagaagccaaaaagaggcccggaacgc

SEQ ID NO: 121999 - RNA, 80 nt, Homo sapiens
cggagcacgagccacggcagaaccaaacccaccgcaagacagggaagccaacagccaaccagaaaaccagaaacaccggc

SEQ ID NO: 122000 - RNA, 75 nt, Homo sapiens
acgcagaaagggcagacacaggcacaccaaggggaacgcaagcacaggaccagaaacgaaaggcagcagaagagg

SEQ ID NO: 122001 - RNA, 75 nt, Homo sapiens
gcgccgggggagaccaggaaggaaagaagccaggaggagagaaagaaagccagcgcaacgagagaaccagcagaa

SEQ ID NO: 122002 - RNA, 77 nt, Homo sapiens
gagggacgggagcgaggagcaagcagagcccagagaagagacagaagaacagcggcagacggaagacccggagccag

SEQ ID NO: 122003 - RNA, 71 nt, Homo sapiens
cagagcccccccaccgagagaaacaaaaagcgaggaaagcgacaacaggaaccagacacaaagaggaagcc

SEQ ID NO: 122004 - RNA, 69 nt, Homo sapiens
gcgcccagcgcggcagaagcaaccagcaggcaagcgccccaagggcgaagcaagcccagcggagggacc

SEQ ID NO: 122005 - RNA, 88 nt, Homo sapiens
ccggcgcgcggagcgccggccggcggggccgccggcccccgacagcagcacggaggggccgcggaggggcacgagcgccacaacccca

SEQ ID NO: 122006 - RNA, 105 nt, Homo sapiens
ggaggcagaggcgccccgagcgccgccgccaggaagaccccgccccgagcccaggccggcccagggagaacgcaaaaccaccacccccacaaaaaacgcagggag

SEQ ID NO: 122007 - RNA, 73 nt, Homo sapiens
caagacggggcgccccacagaggggcgacgcaggacgaggggcaggaaccggaggaagagggaggggggagag

SEQ ID NO: 122008 - RNA, 63 nt, Homo sapiens
aaggcacgagggaacgggaaagaacagagaaggacaaccccaaacacagacggacagaacccc

SEQ ID NO: 122009 - RNA, 73 nt, Homo sapiens
caggggcagcgccccccgaagcaggccagggggagaagggcagaacaccgggaaccgccagggcacagaagac

SEQ ID NO: 122010 - RNA, 70 nt, Homo sapiens
cacagccagcgaccaaaaacagaaacccagaggggaaagagggaccagcgcagcagaagcagggagacgg

SEQ ID NO: 122011 - RNA, 75 nt, Homo sapiens
acgcacaccaggagccgagggcaggccaccgaaagacacagggagggcagccagaacgggccaacggaggacgcg

SEQ ID NO: 122012 - RNA, 65 nt, Homo sapiens
cggagggggacacccgggcggggcagagcagcccccagccagccgcgaggaacccagaaccgcgg

SEQ ID NO: 122013 - RNA, 71 nt, Homo sapiens
aaaaccagcaagcaaaagacccacaggaccgaaagccggaggagccaccaacagaagcaggagccaggaaa

SEQ ID NO: 122014 - RNA, 54 nt, Homo sapiens
acggacaccacacacacacagcgaaaaaccacagaccaggacccaagaaaaccc

SEQ ID NO: 122015 - RNA, 54 nt, Homo sapiens
cccaagagggcgagcaggacgaagcgcccgccaccaaggggcagaaaacaaaag

SEQ ID NO: 122016 - RNA, 80 nt, Homo sapiens
gcccagccgggaacccccacgcggccagcgaaaacgcccaggccaaggagaccccccgacaacagaaggaaggcggccga

SEQ ID NO: 122017 - RNA, 70 nt, Homo sapiens
gacaagaagggcaaagccgaagcgggaccccagagacacggagccaacgcaaggagcgccacaaacaagc

SEQ ID NO: 122018 - RNA, 81 nt, Homo sapiens
cgggcagacagccgcgcagcccagcgagagccgcggcagcccaagcgaacaccgaagggagagcaagccggcccggcggag

SEQ ID NO: 122019 - RNA, 78 nt, Homo sapiens
ccccacacagccaaccgcgcccccacaggccaggaggacaaccccaaagaaaagggagaacagaagaacagaaaagaa

SEQ ID NO: 122020 - RNA, 82 nt, Homo sapiens
ggccagacgcggcgacgccgacacagagaaaaaaggagcccgaaagccccaaggaaaaaaagaaagcgaaagaagaccagaa

SEQ ID NO: 122021 - RNA, 74 nt, Homo sapiens
cgcagccgcccgggcccgccgccccacaagacacggacacaccaagcccgggccaaggagacccacaaacaagc

SEQ ID NO: 122022 - RNA, 80 nt, Homo sapiens
cccggccccaggacgcccggcggccggggagccggcccaagcggggcacacgggccacagaggaccagcaaggagaagaa

SEQ ID NO: 122023 - RNA, 86 nt, Homo sapiens
gaagaaacacgggccggcacacgacagacaacaacaggcaggaccccaggaaggccagcgcccagagaacgcacagcccccaccag

SEQ ID NO: 122024 - RNA, 84 nt, Homo sapiens
agacccaggaggacccgaccaacaaggaccagaaaggagaaccagggccgacgcgaccggagaaccaaggagagacacaccacc

SEQ ID NO: 122025 - RNA, 76 nt, Homo sapiens
gggcagccgccggagcgaaagaggagagccagagaccccgcgagggcaagcggccgaaaacaggacagaacggaga

SEQ ID NO: 122026 - RNA, 52 nt, Homo sapiens
agggaggacgaagaaaggagaaagaagacccggagaagagggcccccccgag

SEQ ID NO: 122027 - RNA, 124 nt, Homo sapiens
ccagcgcgccggccgcgaggccacggagagccgccggagagcccaggagcaggggagacaggcacgggcgagagcgggaagagcacgcacaagcagagcgcacaccacggcgccggcaccggag

SEQ ID NO: 122028 - RNA, 75 nt, Homo sapiens
ggaaaggcagaacgccgaacaggagcaacagccggagaggcaagcaaagaccccgccgaaagaaaaaaaaaaaaa

SEQ ID NO: 122029 - RNA, 74 nt, Homo sapiens
gcaccaaccgcccgggacccagagcaccccggagcccacagggggaaggcgccagacacagaaaagaaagagag

SEQ ID NO: 122030 - RNA, 35 nt, Homo sapiens
aggaggggccgcaccaggagcggggaacacaaccc

SEQ ID NO: 122031 - RNA, 90 nt, Homo sapiens
gcccgcgccgaggccgcgggcggcgggcccgggaagggaaaaggccgaggcacagcgggaagaccgcaaagacgacccgagacagggaac

SEQ ID NO: 122032 - RNA, 74 nt, Homo sapiens
ccagcccgcccggcggaccaaaggcacaccaaaagcagagccaaacgccaccaagagcccaacaacaccagagc

SEQ ID NO: 122033 - RNA, 53 nt, Homo sapiens
gaagagcccagcgagaaagacgaacaggacaaggaacggagccccagcggcag

SEQ ID NO: 122034 - RNA, 102 nt, Homo sapiens
ggaccagccgaaagacgaaggaagccagaaaaccacagaacagaaagcagaaaggcgggaaaacggcacaaggcgacgagggagggcagaccgccaggccag

SEQ ID NO: 122035 - RNA, 65 nt, Homo sapiens
ccccaccggaggagcccaccggcccaaaggcccggacccaaaacaggaagacgaacacaaagggg

SEQ ID NO: 122036 - RNA, 34 nt, Homo sapiens
ggacaggaccccgcagggagaaagcgaagaggac

SEQ ID NO: 122037 - RNA, 70 nt, Homo sapiens
ccgaagaaacgagaaaaccagcaagaccaagacacacaacggacacgccaaccgcgccgaaacaaagaaa

SEQ ID NO: 122038 - RNA, 83 nt, Homo sapiens
caggcggagccgaccgggccagcaaacacccggaagacagcaaaaggcaggagccaggaaaccgcagcaccaaaaccaccagc

SEQ ID NO: 122039 - RNA, 75 nt, Homo sapiens
aggagacagagggccgagaaggacaggacagacagaggcacaaaaggagaaagcagaagaaacaggagaaagcaa

SEQ ID NO: 122040 - RNA, 52 nt, Homo sapiens
gcaccacagaaaggggaagaggggcaagcaccaacaccaaacaaaaaacaca

SEQ ID NO: 122041 - RNA, 64 nt, Homo sapiens
gaagggccgccacaaaccccaggccccaaacagaaacggcgaggaaagagaggagccccggaaa

SEQ ID NO: 122042 - RNA, 78 nt, Homo sapiens
agaaaagagaaaagaaaaagaggcacaagccacagcagaaggggccgcggagaaccgaaccaacagccagccaaagcc

SEQ ID NO: 122043 - RNA, 77 nt, Homo sapiens
gaggcgcgcgaccagagagcaaagccgagaccccaaaggccacgaaccgcgggcaaggaagagacaaggaaaccaca

SEQ ID NO: 122044 - RNA, 81 nt, Homo sapiens
ggggaagacggacacacggcgggcgacacgcgggcgcggcacccggcaaaggaagagcaaggaggggcaggagcacacccc

SEQ ID NO: 122045 - RNA, 89 nt, Homo sapiens
gaagcacagagggaaaggaaggcggaaaagcccaaacagaggccgccaaccgagcacaaaacggcaaaaccggaagccaacggaaagcc

SEQ ID NO: 122046 - RNA, 78 nt, Homo sapiens
aggaggaggccacggcagcagcagccagaaaaaggggaaggcgcgcaaacccaagaaggcagaagccagccccgcagg

SEQ ID NO: 122047 - RNA, 70 nt, Homo sapiens
ccaaaaccagaagaggaggagacggaccgaggaaaagcgagaagggacaaaaggccgaggggaagagcgg

SEQ ID NO: 122048 - RNA, 34 nt, Homo sapiens
gaggaggagcgacccggagccccaaggacaacac

SEQ ID NO: 122049 - RNA, 84 nt, Homo sapiens
caaaagaaagcgacaaggaacaagacgaagcaagaagccaaaagagggcaggacgccagcacagagcccggagaaggaaagcaa

SEQ ID NO: 122050 - RNA, 75 nt, Homo sapiens
ggcagccagagcggagggccccccgagccaacggcaagaacaagccaagacccagagagcaagacaaacaggacc

SEQ ID NO: 122051 - RNA, 77 nt, Homo sapiens
gccaaaaaggggaaggggccgacaaaagcgcagcaagacggccgcgcggcccgcagggggccaagcaagaggagcca

SEQ ID NO: 122052 - RNA, 64 nt, Homo sapiens
gagcgaccgccaaaggcaccaacccgggaagaacaaaagcgaacagagacccaagaagcgagac

SEQ ID NO: 122053 - RNA, 73 nt, Homo sapiens
gagaaggaccgccgacccgcccaccacgccagcagcgcgacggcagggcaccggcgggcacgcgagaagggaa

SEQ ID NO: 122054 - RNA, 56 nt, Homo sapiens
gcagaaccaaaacaccaccaggagaagaaacgcagggagacagcagcacgcaacca

SEQ ID NO: 122055 - RNA, 72 nt, Homo sapiens
cgcgcgccggggaggcgccggagcgccgcggggcccgggccggggcagcagaagaggacaagcagacagcac

SEQ ID NO: 122056 - RNA, 72 nt, Homo sapiens
gacgacagcagccagaagccaggcgcacgaagaaaaggaaaagaagacgcacaccaagaccacccaaacggc

SEQ ID NO: 122057 - RNA, 67 nt, Homo sapiens
accgcgaccggccgcccgcacaagccagaggccaacccagggaggaaaaggaggccaccgcaagaga

SEQ ID NO: 122058 - RNA, 80 nt, Homo sapiens
acggggagccccagagcaccgcccagaacccggaggcgggcagcagcagaggaaaaaagagaccgagagaaagcagcaga

SEQ ID NO: 122059 - RNA, 56 nt, Homo sapiens
gaagggccaccccacagacgaggggacagccagccggccaacaccggcacagaggg

SEQ ID NO: 122060 - RNA, 77 nt, Homo sapiens
cggagagccaaagggacaaccaaaggcagacccagaagagcacaaaacagagaaaagggaagggcccggagagggca

SEQ ID NO: 122061 - RNA, 82 nt, Homo sapiens
gagcgaaggaaccgcggcgacaagacacgccaagcagggagaagacacggcggacgcggcgaccgggagacccagccagacc

SEQ ID NO: 122062 - RNA, 87 nt, Homo sapiens
cagcaggagcccacccaggacccgccgcaccgcaaagagcccgcggccccaaaaagcggcgcaagacggagggcgggagaaggagcg

SEQ ID NO: 122063 - RNA, 75 nt, Homo sapiens
ggcagcccggggccgaccgagcacgaacgcccgccacgacaggagagcaaggcgcggaccaggcgggcgcgacgg

SEQ ID NO: 122064 - RNA, 80 nt, Homo sapiens
aggccgcagcggcaaggagagacgcgcgaggggcgccgaagcgaggggccagccaccagcagcgacaagaggaaaaccaa

SEQ ID NO: 122065 - RNA, 82 nt, Homo sapiens
gaggagccacgccgcgacaagggcagaaaggagcccggcagggggacaccaacaacagagaccgacgagccggcccaccgga

SEQ ID NO: 122066 - RNA, 65 nt, Homo sapiens
gacgaaagaagacagagaagcaaagaagcagcgcgccgccgcaacaggggcaagagaggccgacc

SEQ ID NO: 122067 - RNA, 75 nt, Homo sapiens
gcagaggggcgaaaagggacaagcagagcacgacagccggcgaagaagaagcaggagagaagacgacgcaccgca

SEQ ID NO: 122068 - RNA, 40 nt, Homo sapiens
ccaacagcaaagccaggaaagcaaaccaggggacagggaa

SEQ ID NO: 122069 - RNA, 54 nt, Homo sapiens
aaagcaccaacgagacccgccacacgaaggcccacgcggaccggcagcgccacc

SEQ ID NO: 122070 - RNA, 76 nt, Homo sapiens
ccaaacccagacagcgcaccccaagcccgggagcccaggaaaaccgccgccggggccagcaagaacaaaaagcacc

SEQ ID NO: 122071 - RNA, 79 nt, Homo sapiens
ccggccccccggcggagaagaagcgcggccgcaccggccaaggggaggcaagcaggggggcaaaggaaagaaggcagaa

SEQ ID NO: 122072 - RNA, 93 nt, Homo sapiens
ggggcgagcgaggggaggcaggcgcggcagacggcgacagggcggcggcgccaggcagggcgcagacaacggcaagcggagaagagcaaggcc

SEQ ID NO: 122073 - RNA, 73 nt, Homo sapiens
acgccaaaacaccagaaccaaccgcacggcgcggaggaaaggaagacaaacggggcccgcggggagacccaga

SEQ ID NO: 122074 - RNA, 78 nt, Homo sapiens
ccaaaagaaaaaagggacccacccaggaacagacgccccaccaggccagcggggcgcagagagaacccgggcccaggc

SEQ ID NO: 122075 - RNA, 64 nt, Homo sapiens
ccacaccccaaaaggaccgaccaggcaaagagagagcaggagacggagggcagaggcagggagg

SEQ ID NO: 122076 - RNA, 85 nt, Homo sapiens
gcgcggacggagcagaaccccaggacgcgcccccgggagcgggcgcccagagggagcagcggaccaggagggacagcacaggaaa

SEQ ID NO: 122077 - RNA, 53 nt, Homo sapiens
aggacagagcacagaagcccccacagaccagggcaaaacccaggacccacagc

SEQ ID NO: 122078 - RNA, 86 nt, Homo sapiens
ccgcgaggaaaagcccagcggcccgccaggcccgagacaccaggcgccgagaaggccagcagagaaacaggcaggagaggcccaca

SEQ ID NO: 122079 - RNA, 80 nt, Homo sapiens
aaccaaacagcaacaccgcaagcggagcagccccaccaggcgggcaacacaacaaggcgcggacacccagacaagcgcgc

SEQ ID NO: 122080 - RNA, 78 nt, Homo sapiens
gaaaaggagcccggaagagagggccccccgccccccccccccacgcggggggaccggacgacgcaagaacagccaaca

SEQ ID NO: 122081 - RNA, 74 nt, Homo sapiens
cagagggacccggacaaccagaggcagccagcagggggaggggacccccaaaagacaagggcaaaacggaccag

SEQ ID NO: 122082 - RNA, 67 nt, Homo sapiens
gggcgaggcagaccgccccgggccgcggccgccgaggggaaagaaaaggcacccaaaagcccagagg

SEQ ID NO: 122083 - RNA, 68 nt, Homo sapiens
gaacgaaaaccgaggagcagaaggcagagaaaagaaaaaggagggagcgacgaagagggagagcacag

SEQ ID NO: 122084 - RNA, 38 nt, Homo sapiens
gaggcgcagacaagccgcagggggaggcccggaacacg

SEQ ID NO: 122085 - RNA, 75 nt, Homo sapiens
gggaggccacaggggccgaaacacagagcaagaaaaggaagaagcacaagagcaccaggagagaaccgggaagaa

SEQ ID NO: 122086 - RNA, 85 nt, Homo sapiens
acccaagcagcgccgccagaaggaagcaacagacgggaccgaaagacggagccacacgcaccaaccacccgaagcaccaagaaca

SEQ ID NO: 122087 - RNA, 82 nt, Homo sapiens
gccggcagaggaccaggcaccaccggccccggaagggaaaccagcccagagaagacgggagcccccggggcccgcccagcaa

SEQ ID NO: 122088 - RNA, 39 nt, Homo sapiens
agcagaggacaacagaacgccagccaccaggacggcaca

SEQ ID NO: 122089 - RNA, 79 nt, Homo sapiens
ggccccaccccacgcagccccccacgcgcaggccagcagaagaggaccagacgcccgggggggcggcggcccacagacc

SEQ ID NO: 122090 - RNA, 81 nt, Homo sapiens
ccaggacgcgcccccgggagcgggcgcccagaggaaggggcggaaaaacagagcaggcaaaaacaccagaaaaacaaaaaa

SEQ ID NO: 122091 - RNA, 90 nt, Homo sapiens
caccgcccccgcggccgcccccggggaccagcgagcgcgacaaggcgagaccaccagaaggaggccggggagaaccacgggacagcacca

SEQ ID NO: 122092 - RNA, 75 nt, Homo sapiens
aggcagacggcagggccggaaacgaaaagagacagcagggcaaaacgggccacacacagggcaaaaagaacgggc

SEQ ID NO: 122093 - RNA, 75 nt, Homo sapiens
cgcgcccaagccggcaccgagcggcggagacggcgagcacaagggaagaagacgccgaacaacagccggacaaca

SEQ ID NO: 122094 - RNA, 73 nt, Homo sapiens
cgagcgcccgaggcgcgggaggggggaccgggcagcagaacgggaggaagcagacacgagcaaagccaggaga

SEQ ID NO: 122095 - RNA, 102 nt, Homo sapiens
ggcgaaggacccggccgaggcgggcgcaagagaaggcaccaagagccaaaagcaaacgaccaaagacaggaagaaaccaaaagacggacccgaaccacgaag

SEQ ID NO: 122096 - RNA, 81 nt, Homo sapiens
ccgccagaggcaggaagagccggcgggacagcggagacaggggggacggccaaacgaccaagaaagcgggacgcggaaaac

SEQ ID NO: 122097 - RNA, 95 nt, Homo sapiens
acggaaacacgacagaagcagggcgaaccagagaaaacggcaaggaagcgacagcagaccacagcccggcaggcccaaaaacccaaagggacaga

SEQ ID NO: 122098 - RNA, 68 nt, Homo sapiens
gacggggaaggccggggcgcccggcgccggccgagaaggcagaggcgaccccaagaagcgggaaccgg

SEQ ID NO: 122099 - RNA, 75 nt, Homo sapiens
accgaaaaaagagaacgagaagagaaaggggcaaagcaagcggacaaacaaaagcagagaccgacgcgacaggcc

SEQ ID NO: 122100 - RNA, 74 nt, Homo sapiens
cggggaagggagcgcccaccagaggagcgaaagagagagagccagcgggccggcaccggcacgaggagcgcaca

SEQ ID NO: 122101 - RNA, 56 nt, Homo sapiens
ggcacaaccaccaggagcgacagacagaacgccggaggcgagggaggacgggcagg

SEQ ID NO: 122102 - RNA, 88 nt, Homo sapiens
gcggacgcagccgcgagcccggaggcggcgggaggaggcggcggccgccacccaggcccaggaccgagcccgacgcccacagacaggc

SEQ ID NO: 122103 - RNA, 78 nt, Homo sapiens
caacaccacccccgcccgggccgggggccgccgggacccggccaccagcaagccgaacagccagcaaagacaagagca

SEQ ID NO: 122104 - RNA, 60 nt, Homo sapiens
ggcccccccacggaaggggcaaccagggaccaggaggaaggagcggagaggcaggcggag

SEQ ID NO: 122105 - RNA, 37 nt, Homo sapiens
gccaggggggacacaaccgccccgacaggggccccac

SEQ ID NO: 122106 - RNA, 77 nt, Homo sapiens
cggacagccaaagccaagaaaaaggggaaaggcgccacgagcaggcgcacaggcacagcaccaagccacggccccac

SEQ ID NO: 122107 - RNA, 71 nt, Homo sapiens
caggcgagcagcaggcacaccgcagcaaggggaacaccgcccccggagccggcagaggcaagaagggacgg

SEQ ID NO: 122108 - RNA, 55 nt, Homo sapiens
gccggggccacaaggagaacaaggccccgccacggcgccgggacacggcacgcca

SEQ ID NO: 122109 - RNA, 78 nt, Homo sapiens
gccccccgcagagcaaggcgggcgccgggccgcgcggacccgcccagccaggcagagcccaggaccagccgccaagag

SEQ ID NO: 122110 - RNA, 79 nt, Homo sapiens
cagacagacaagaaggccgcacacccggaccggcgcccaggcgagccgagacgcccaaaggacagcaaggggggagacg

SEQ ID NO: 122111 - RNA, 87 nt, Homo sapiens
gcccggccccgcccgcgccggaagagccacgccgacaagggggcagcgacgggcgaggccagaaaaagaaacgggggggcgaaggcg

SEQ ID NO: 122112 - RNA, 67 nt, Homo sapiens
cccggggccccgcggcgcaggaggcggggagcgcagagcgggcgagcgcgccgagcaaccaagaagg

SEQ ID NO: 122113 - RNA, 71 nt, Homo sapiens
gcaagcgccaggcagaccagacggccaaaacaacccgcagccaggcaagagaagcaaccaagcaacagaac

SEQ ID NO: 122114 - RNA, 80 nt, Homo sapiens
cgccagacccagaagcaccagaaacgagccaaaaagacaagcgaaaaagggcagaccaaggcaacagcaagagaaaagcc

SEQ ID NO: 122115 - RNA, 76 nt, Homo sapiens
gccacgcaaaagccccagaacccccacaaaagaaaccccccaggcaagaggcgcaggaccgggaagaccaacaaac

SEQ ID NO: 122116 - RNA, 70 nt, Homo sapiens
acgccgccgagcagccgccagccccacggacggacgccagccccacaacaacgagccacgcgccgagaac

SEQ ID NO: 122117 - RNA, 84 nt, Homo sapiens
cgcccgccggagcgcccggagcggccgcgagccaccgaggcccaggcgggcgcaaagacaccgccagaagaccagaggaccccg

SEQ ID NO: 122118 - RNA, 79 nt, Homo sapiens
gcgcccggcgcgcggcgcgccgcccggcgagcgggccggaggaaaagaaagggaaccaagaccaggacaaagaagaccc

SEQ ID NO: 122119 - RNA, 77 nt, Homo sapiens
cagagaggacaggaacgagggcagaagacggggagccagcaggcaggcagaagcccacaggacaaaaacacaaaagg

SEQ ID NO: 122120 - RNA, 84 nt, Homo sapiens
gcggccggcgagaggaccaacggagcgcgaggcgggcgcggagaagcgcggaggccccgagccccggccccaaagacccaaaac

SEQ ID NO: 122121 - RNA, 84 nt, Homo sapiens
ggaacagcagaacaagcgaggccgggcagagggaccacggggagccccacgagaaaccccacagcggagaaaaaggagaaaccc

SEQ ID NO: 122122 - RNA, 70 nt, Homo sapiens
ccgccgcaggcgcccccggcccacgcacccaggccacggcgagccggcgagaacaaagacgcacaaccac

SEQ ID NO: 122123 - RNA, 73 nt, Homo sapiens
cccgggacacacagagcccgccgacacagccaccaagaaggcacaagcagaacgggaaaaggggcggaaagac

SEQ ID NO: 122124 - RNA, 81 nt, Homo sapiens
cggcgaaggagccgcggcggggggaaaaggagccccaccaagccaaacccaccaagggacgaagcgcaccacgcagagaag

SEQ ID NO: 122125 - RNA, 77 nt, Homo sapiens
ggggcgggccggcggggcacggggggcgacggccaagcggagggagcaaaggacggcacgggaaaaacgccaaaagg

SEQ ID NO: 122126 - RNA, 75 nt, Homo sapiens
agagaccacagcgccgccagggaacaaggaggccccgccggggcaccgcggcaggaacggcggagcggggccaca

SEQ ID NO: 122127 - RNA, 58 nt, Homo sapiens
cgagaccggagcagccaccgccgcaacagaaaaccgggaccggaaaagcaagcaggag

SEQ ID NO: 122128 - RNA, 75 nt, Homo sapiens
agacacaggcaccaccgcccccagcgacccgagaagaagcagagcacgccaccaacaacccccccaggcaagcgc

SEQ ID NO: 122129 - RNA, 68 nt, Homo sapiens
aaacgggccaggcaggcggaagggcacagaggacacaaaggcagagggggcgagggaggaaagggggc

SEQ ID NO: 122130 - RNA, 77 nt, Homo sapiens
ggaacggcaaggcagaccggcgaggacaccgcccagcccgagcaggccaacccaggccagccccagaggaccagaag

SEQ ID NO: 122131 - RNA, 76 nt, Homo sapiens
aaccaggaggcagaaaccagcgccggacagagaagcccccaaggagcgcaggagaagcgggccgacacccgcggaa

SEQ ID NO: 122132 - RNA, 73 nt, Homo sapiens
gcaccgagacaccccaccaggggccagcacgaaagcagccaggagaagagcacaagaaacaagagccagcagg

SEQ ID NO: 122133 - RNA, 75 nt, Homo sapiens
gagggaaacagcccggaccggcagacccagcaaaagcgccacagcaggcaggagacaaagagggagaaaagagcg

SEQ ID NO: 122134 - RNA, 82 nt, Homo sapiens
caggaggaagggggcggaaggagaacaaagggagaagaggaagcccgacaacgaaggacaccgaccagaccccggaaacagg

SEQ ID NO: 122135 - RNA, 80 nt, Homo sapiens
agaaggcaggcagcaagaagacgagcgagcggcaggcgcagcgcagccgccagcgcaaggggcgccgacagcgagagcgc

SEQ ID NO: 122136 - RNA, 83 nt, Homo sapiens
cgcagccagggcaacgccaagcccgaacagagccacacgaccccgcggccaagccagggcacccccgagaggacaacaggcac

SEQ ID NO: 122137 - RNA, 85 nt, Homo sapiens
aaccgcacggaccacacagcgcgggagccacgcagaggacgccggaacacccggaagccgagaaagaaacagccagcaacagaag

SEQ ID NO: 122138 - RNA, 73 nt, Homo sapiens
ccccgcggacacaagaacacggcgggccaagacacccaaggagccaaccaggagcaaagaaaaaggaagaaac

SEQ ID NO: 122139 - RNA, 77 nt, Homo sapiens
cccgagagcgggacacaggaggcagaacgggcgcaaaaagcaagcaaagaagaaaaaaacagacgaaggagagcagg

SEQ ID NO: 122140 - RNA, 71 nt, Homo sapiens
gggccccaaagaggagagagaaaaggagacgaagagcaccagaacggccgagcgaccaggagaggagcccc

SEQ ID NO: 122141 - RNA, 77 nt, Homo sapiens
caaccgcaagacaaaagaggagaacgaaccagaaaaccggagagccccagagcaacacaccacgcacccagcgcccg

SEQ ID NO: 122142 - RNA, 58 nt, Homo sapiens
gccgggccaaagggacgcgccaacagggaggcacaccagaggcagaaccacaacccac

SEQ ID NO: 122143 - RNA, 67 nt, Homo sapiens
ccaacagaccgaagaagaccaggcacacggcccaggggcccaaacaggggacccaccgacaccccac

SEQ ID NO: 122144 - RNA, 58 nt, Homo sapiens
aggaaaccagccccagaaacggccagaacggagaaacagggagaagaggaaaacggcc

SEQ ID NO: 122145 - RNA, 75 nt, Homo sapiens
gccgagccagccgcggccggaggagcccccaggccaacaagagcaaacggcgaaaccggcacagaagcacgggac

SEQ ID NO: 122146 - RNA, 69 nt, Homo sapiens
gcagggggaaagaaggccgaaggacccccacaacgagcgcccggaggaaaaacgagcacaacgagaacc

SEQ ID NO: 122147 - RNA, 71 nt, Homo sapiens
gcagccgacaaagacgggaaacagaaccaagggaggaaccggaaaaagcccaacaagggggacgaccacca

SEQ ID NO: 122148 - RNA, 80 nt, Homo sapiens
acacggaagagagccccaggccagaagagagacccgacgacggaccgcacacggagaaggaagcagaaacggggcaccgg

SEQ ID NO: 122149 - RNA, 83 nt, Homo sapiens
gaagaggagcaggaccagaaggaagggaagacagagggccaggccgcagcggcccaagaccacccccagagcgccaccagggg

SEQ ID NO: 122150 - RNA, 72 nt, Homo sapiens
gccagaaggcgcgaggcgggaacacgaagacagcaacggcaggacaagaagaacgaaggccccacggggcac

SEQ ID NO: 122151 - RNA, 68 nt, Homo sapiens
aaggagagcgcgaccgaggaacagcagaacgcgggggacccaggcaacgcaggccagggccggacaca

SEQ ID NO: 122152 - RNA, 65 nt, Homo sapiens
aaccagcagcagcccccaacagaaaaaaggagacccccacccagaagaccagcgggacagcagac

SEQ ID NO: 122153 - RNA, 88 nt, Homo sapiens
gcggggagacccggggacccccgacgccaggcagcgcccccaaacggcgacaccccaagagggccgccaccacgaggagcaaccccca

SEQ ID NO: 122154 - RNA, 88 nt, Homo sapiens
gcacagcagcgacgggcccaggaaaaagaggaaagggacgccggggccgggccaggagcagagggggagccggcgggccggaccccgg

SEQ ID NO: 122155 - RNA, 78 nt, Homo sapiens
cgggagcggcagccccggccaaacgaccaagaaagcgggacgcggaaaacgggacccgcaggggcccccccggaaaag

SEQ ID NO: 122156 - RNA, 106 nt, Homo sapiens
caagggcgagaccggagagccgcaggacggcgcggcagagccccgacgccacagaacggacccaaagacaggaccacgcaccagcagagaaggaaagcaaaccgaa

SEQ ID NO: 122157 - RNA, 78 nt, Homo sapiens
ggaaaaaagaagaccagaaccacaggaagaaaaaagcacaccggcacagaccgacaaaaaggggaacggaagaggagc

SEQ ID NO: 122158 - RNA, 59 nt, Homo sapiens
aaacagagaaagaaggcggccaggccaaccgaaggaggccaagaaccgcaaagaaagac

SEQ ID NO: 122159 - RNA, 72 nt, Homo sapiens
gaaaaagcgacggagcccccccccggccaggaagcggaaagcccgggacacaaaagagacacagcgaggcca

SEQ ID NO: 122160 - RNA, 72 nt, Homo sapiens
gcccgcccacccagggccggaaaagccaacgccggcgaagagcccgaccagccagccggggccgcccaggcc

SEQ ID NO: 122161 - RNA, 79 nt, Homo sapiens
gccccccggagcggccccgccgcggacacgagaccccagcaggcaccaccaccagccaagacacgaggcccaccaggac

SEQ ID NO: 122162 - RNA, 78 nt, Homo sapiens
agcgcccggaccggccgagaggaagacgagccgggaggaacggcccggaaacaggaggacgccgaacggaccagacca

SEQ ID NO: 122163 - RNA, 75 nt, Homo sapiens
ggaaagaggggagcaaccagggacgcaacaaagcagccagagaaccaggccccaaccacaccgcgacagcccacc

SEQ ID NO: 122164 - RNA, 74 nt, Homo sapiens
gcagaagaacggcaaagacagagaaggagaagaagcaccaacaggaaaaacggccaaagaagggccaagccggg

SEQ ID NO: 122165 - RNA, 113 nt, Homo sapiens
aaggcggggcgacccggggggcgcgcccagagccccgcgcagcccagggaagcaggccagggagcggagagcagagaggcagagcaagacgccggacacccacaaggagcagc

SEQ ID NO: 122166 - RNA, 68 nt, Homo sapiens
cgcggagcacagaagaagcaacacgagaaccaccccgacacaacaccaccagagggcacgagacaaag

SEQ ID NO: 122167 - RNA, 54 nt, Homo sapiens
aaacagaggagcaaagacggcccaaagaagcccaggacaggagaagcgagccac

SEQ ID NO: 122168 - RNA, 74 nt, Homo sapiens
aaaaggcgggcacaggccgaccgcgcggaaaaagaacagaggccaacccgacaagaggaccaaggccaccagag

SEQ ID NO: 122169 - RNA, 73 nt, Homo sapiens
aagggagagcaggcggagaggaaaggggaaaaaggaacagacccaacaaagggagcacgccaacacaacaccg

SEQ ID NO: 122170 - RNA, 75 nt, Homo sapiens
gagcaacgcccccccacacacagaagcccgagaacacgaaacaaggaagaaagaagcaagaaaaacagaccgggg

SEQ ID NO: 122171 - RNA, 74 nt, Homo sapiens
aaacgagccacccgcgaaaagagccacggggccaagaagaaaacgagccagcaggcccagaggggaccccacac

SEQ ID NO: 122172 - RNA, 74 nt, Homo sapiens
aaacgggcagaaccagggaaaccacaaacaggaagcagaaacaaggagggaacagggggagagcaaggaccgcg

SEQ ID NO: 122173 - RNA, 75 nt, Homo sapiens
cagacagcgagccggaggaccgccaggcagagaaagccaacccagcgaaggaacaagcaaaccccaagcggcaag

SEQ ID NO: 122174 - RNA, 72 nt, Homo sapiens
aagcggagcaagagaaaaggagggagagagcagagaagaggaagccggcaggagccaaaacccagaggaaag

SEQ ID NO: 122175 - RNA, 86 nt, Homo sapiens
cgggacagagcggcgggacagcccaagggccagcaccgcgcccaggcagagccagaccagcgagacacacggacccggacacagca

SEQ ID NO: 122176 - RNA, 69 nt, Homo sapiens
cgggcgccccgggcgggcgagcacaggcacacacacccccggcacaaagcagaccgccccacgggcgcg

SEQ ID NO: 122177 - RNA, 40 nt, Homo sapiens
cagcggcaccacggcgacgcacaaggaggagcggcaccga

SEQ ID NO: 122178 - RNA, 70 nt, Homo sapiens
cagccgacgcgggaagaagcgggcgcgggcagcgacacaccccgcccggagagccggaacagccggccca

SEQ ID NO: 122179 - RNA, 75 nt, Homo sapiens
gcgacgagagcgcgcgcaagaagcaccaggagacccagcccgaaaccccagcaaacccgaaccgaaagaccgcag

SEQ ID NO: 122180 - RNA, 72 nt, Homo sapiens
caaggaccccaccagcccccaaaacgaccaggaaaagggggaccaaggccacaaaaggaagagagagggcgg

SEQ ID NO: 122181 - RNA, 57 nt, Homo sapiens
ggacaggaagaggagggggagccagagcaacaggagaaaacccccaacaccgggaaa

SEQ ID NO: 122182 - RNA, 74 nt, Homo sapiens
ggaggccacaccgaagaccaccagagccggaccaggagaacggcggcggggaagcaaaaaaagccaacggaccc

SEQ ID NO: 122183 - RNA, 80 nt, Homo sapiens
ccagcggccgagcaccgagcgggggagggggccccacgagccggaagagagaaaacgagccccacccacggccgggaaga

SEQ ID NO: 122184 - RNA, 75 nt, Homo sapiens
gggcacaagccccacacagaggacaagaaggggaacaaagagggagcacacggccagacaacaggcacaaagaga

SEQ ID NO: 122185 - RNA, 67 nt, Homo sapiens
cagaggaggccaaacagcgaaaggagacagcgagaaggaaaaaccaagcaaaagccggaagacgaag

SEQ ID NO: 122186 - RNA, 57 nt, Homo sapiens
gccagggcaagagccccccagccaagaaccccccacggaaaggacgaaagaaagaag

SEQ ID NO: 122187 - RNA, 71 nt, Homo sapiens
cgcggagaagccaaacggcaggacaccgaaaacgagaaacgaaagagacacgggggcacaaccgagcccgg

SEQ ID NO: 122188 - RNA, 69 nt, Homo sapiens
cgggaacgcaagaagaaaagggcacagaaagccaggagcgaacacacagaacccgcaagaaaaaggaag

SEQ ID NO: 122189 - RNA, 79 nt, Homo sapiens
ggggggggccacaggagaagccagggagcagggggaagcggaggagcccacgcagcaagagagagcaggagacggaggg

SEQ ID NO: 122190 - RNA, 78 nt, Homo sapiens
cgccgcgcccggcccggcggggaacgcagagcaagccagacaacaggccaaagccagggagggccagccccacaagac

SEQ ID NO: 122191 - RNA, 81 nt, Homo sapiens
aagccgcccagacggccaccggcgggaggaacaaaaggcaaacgaacacgcgcagcgcagaggcccggcagccccaaggaa

SEQ ID NO: 122192 - RNA, 58 nt, Homo sapiens
ggcccggccagaaagacaggagcgaaaacccacgcaggagagacagggcaccacggcc

SEQ ID NO: 122193 - RNA, 76 nt, Homo sapiens
cacggccgcaaagaggagcaagaaagaaaaagaggaagaggcaccagggaacccagaccaggccaaagcaaacaac

SEQ ID NO: 122194 - RNA, 80 nt, Homo sapiens
cacacgccggaggcaggggacaacacgacacaagcggccggggaagagaaccaggagcggcagaccgccgccaggaggag

SEQ ID NO: 122195 - RNA, 53 nt, Homo sapiens
ccccaccgccggagagaccagcgcaaaggagcggcgacaagccacacaccaaa

SEQ ID NO: 122196 - RNA, 51 nt, Homo sapiens
caaaacaaggaaaggcacaaaaggagagaaccaggagaccgaagcaaccaa

SEQ ID NO: 122197 - RNA, 80 nt, Homo sapiens
accacgcacccagccggacaccgaccggcacagccagagacacggaaaccccacccccggcaggcaggaggggcagcagg

SEQ ID NO: 122198 - RNA, 73 nt, Homo sapiens
agcccgccccggcgccccaaccccggcagccccagggccgaacaaacgcaagaaaccggccccagaacaacaa

SEQ ID NO: 122199 - RNA, 72 nt, Homo sapiens
cgcggcaccggccagcccagcccccgccgcggagaagacagaggagccagaccaagagacagcacaggcgag

SEQ ID NO: 122200 - RNA, 40 nt, Homo sapiens
agccaggaaggacaaaaccgcgaccaccgcacagccaagg

SEQ ID NO: 122201 - RNA, 81 nt, Homo sapiens
ggaccccgcccaggaagcccccgaagcccccgccgccgcgagaaggacagacacaccagaggaagaggcgaaaccaaacca

SEQ ID NO: 122202 - RNA, 77 nt, Homo sapiens
ggcgcccggggccccggagagcaaggcaccagcagaacagacacccccaaagaccagacacgagggcaaaaagagcg

SEQ ID NO: 122203 - RNA, 71 nt, Homo sapiens
ccgccgccccggcgccggccccgcggggggggggaaagacaaggagccgggccgagaaaccgaaccagaga

SEQ ID NO: 122204 - RNA, 80 nt, Homo sapiens
cagccgaggcgcccccgcgcgagggcacagaagagacgaaagggcgagggacgaagaaagaaagaaccgagagaacgagc

SEQ ID NO: 122205 - RNA, 89 nt, Homo sapiens
ccgaaagcagaagaaaagggacgcaagaaacccaggacgagaacagcaacagggaaggagaccccggcaacagggaacaggcagcaaag

SEQ ID NO: 122206 - RNA, 77 nt, Homo sapiens
gagcagagggaaagggaaggagaaggagggacgcaggcgcaggccaggagcaggcccagaaagaacagacaaagacc

SEQ ID NO: 122207 - RNA, 42 nt, Homo sapiens
gcaccacgccgcagcggggaagacgagccaaaccaggcgacc

SEQ ID NO: 122208 - RNA, 68 nt, Homo sapiens
gccccggccgggccggccagcgccggaaaccaacaagggcccacaaaccaacaacgaaaaaaggggac

SEQ ID NO: 122209 - RNA, 81 nt, Homo sapiens
gaggagaaggagcagccggccaacaggaggccacgcgcagccccggaagagccacccagacccaccccgggcggaaccccg

SEQ ID NO: 122210 - RNA, 85 nt, Homo sapiens
cgcggggcggagcccggggcccggagccggcgcccccggcgcggggaacccgagcgcagaggggaagcagaggacccaggcgaac

SEQ ID NO: 122211 - RNA, 77 nt, Homo sapiens
cacaagaaccgagaggaccaacaccgcagacgaaggcaggccagaaagcagacccagggaggaagcacagccggcac

SEQ ID NO: 122212 - RNA, 72 nt, Homo sapiens
gacagcccaagggccagcaccgcgcccaggcagagccagaccacggcccggggggagccggcgcccccaccc

SEQ ID NO: 122213 - RNA, 50 nt, Homo sapiens
gagggagaacaagcaacggcggcagccaaaggcagggaagaaaaagaaga

SEQ ID NO: 122214 - RNA, 64 nt, Homo sapiens
ccagccagaaccccggaacaagaaccacgcccgcaccagccacgagcagccgcaacagcgcacc

SEQ ID NO: 122215 - RNA, 85 nt, Homo sapiens
aaagggaaagaaaagaaagcacaagaagaaaaccagacagcgccaaagaaacagacgagcccccaacggaacccccacaccccaa

SEQ ID NO: 122216 - RNA, 70 nt, Homo sapiens
gcggaggcgcccggcggagcagaggaaccacacgcgacagggccgcaagagacaccacaaaaggacaccc

SEQ ID NO: 122217 - RNA, 76 nt, Homo sapiens
aggaagcagagggcagggggcaaacaagccgaccggaaaaaggaggaagaagcagacgccaagcaagaaccaagca

SEQ ID NO: 122218 - RNA, 43 nt, Homo sapiens
cggggacgacccagcgccggaagagagaagggcacagaccaag

SEQ ID NO: 122219 - RNA, 57 nt, Homo sapiens
gcaggaggagcaaagcccacagggccggcccagggagaacgcaaaaccaccaccccc

SEQ ID NO: 122220 - RNA, 114 nt, Homo sapiens
aggagcccgaaggaggaccagccaaggcccagaaggaagaggaacacagggcacaccgacgaggcgacccacaacggggacccaacggcgaacggaccgggcaaagcaaagaac

SEQ ID NO: 122221 - RNA, 78 nt, Homo sapiens
cgggggccggcaaggaaacccaaccccaggacagcgacagcagacaagcaacacaaggggaagaccggaaagaagcca

SEQ ID NO: 122222 - RNA, 57 nt, Homo sapiens
cgcggcggggggagccggccacccaccgggcgagcaaggcaaccagcaagaacaggc

SEQ ID NO: 122223 - RNA, 81 nt, Homo sapiens
cagaagaaagcccaaagaagcccagcagcgggcagagccacaaaggggcagggaagcgcccgggaggcgcaggaagaagaa

SEQ ID NO: 122224 - RNA, 75 nt, Homo sapiens
aaaaaagcgaaacacgggccgggaagaacaaaacagcccagagccccgcagggagaaaggaagggccaagaaaag

SEQ ID NO: 122225 - RNA, 70 nt, Homo sapiens
ggcaagccggacaaggaccggggaccgagagaccggccaagccaaaggcaaccaaaggacagcgaaaacc

SEQ ID NO: 122226 - RNA, 68 nt, Homo sapiens
aaggaaaagaaacacccccaaaccagagaaaaggaggaacacaagacaggggaccagagcacgaccca

SEQ ID NO: 122227 - RNA, 52 nt, Homo sapiens
ggaacaccaggcacaaggcagaccgaccaaacagggagcagcggacaggaga

SEQ ID NO: 122228 - RNA, 75 nt, Homo sapiens
caaaaagcacaaaaaagaagacgagaacggaagaaaccgccccagacagaccgaaaaaacacaacgcccagacgg

SEQ ID NO: 122229 - RNA, 80 nt, Homo sapiens
ccccgaaggaacccagaccaagcacacagacacgagagacaaggaggggcgcgccgcccacccccaaagccacacgccgc

SEQ ID NO: 122230 - RNA, 79 nt, Homo sapiens
cgagagcccacgagcgaggccgcaggggagcccggcagccgcccggggcgaagccaacaaagaaaaggaaagcagaaaa

SEQ ID NO: 122231 - RNA, 74 nt, Homo sapiens
cggaacaaggaaacccaccgagcaccagccaagggagaaaagggagaaaaagaaggccaaacaaaacgcgcaag

SEQ ID NO: 122232 - RNA, 76 nt, Homo sapiens
aggccacgagaggccccaagaagaccaggcggacggcagaagacccagccacggacaccaaaaagcggaacgacca

SEQ ID NO: 122233 - RNA, 70 nt, Homo sapiens
cgcccccccccccacgcaaccccagaccaacacacagagaaggggcgccacgcacccgggacggacaggc

SEQ ID NO: 122234 - RNA, 71 nt, Homo sapiens
gaacccgaccgcccccgcccagggaacggagggaaagcgacaaacaaccaacccacagagacccagagacc

SEQ ID NO: 122235 - RNA, 59 nt, Homo sapiens
agcaacacaaagacacacgagcaggcaacaggaagaagaacccacaggggccaacagag

SEQ ID NO: 122236 - RNA, 80 nt, Homo sapiens
aacaccgcagcagcaaccgggcccggccaggcggcgccggaggaacgacagaagagacggagaagaacacccaggaggaa

SEQ ID NO: 122237 - RNA, 81 nt, Homo sapiens
caagggggcacgcagccggggaccgcccggccgcgagccggcgcagacggccaaggcacgagaacaagccacgcaggggca

SEQ ID NO: 122238 - RNA, 78 nt, Homo sapiens
caccccccaccgccaagccaagagcccgccgcagcaagagagagcaaggagcaggcgcagagcagagcagagcagggc

SEQ ID NO: 122239 - RNA, 67 nt, Homo sapiens
caggcccagaaacgcacacaagaagacccaccaaaaggggagcgggagcacagacccaggagaagaa

SEQ ID NO: 122240 - RNA, 80 nt, Homo sapiens
gcggaaggggacccggggacgcggcgagacagcaggcagcggcaccaacggacagggacaagaagaagcggacgccccca

SEQ ID NO: 122241 - RNA, 79 nt, Homo sapiens
ggcaaggggaagcaaaagaaaaggcaagacaaccacaggcagagagggggcccgaaggcaccgcagaacggggcgggac

SEQ ID NO: 122242 - RNA, 55 nt, Homo sapiens
agggccaaagaagggagagagggccacacccccggagaccaagagaagaaacagc

SEQ ID NO: 122243 - RNA, 89 nt, Homo sapiens
gggcagagcagcccccagccagccgcgaggaccgccgggagagccgcccaccccccacccggacgccgggcgcgcccggccccccagca

SEQ ID NO: 122244 - RNA, 70 nt, Homo sapiens
cggagaacgcaaacagcagaacaagaagggcaaccaggggggaaggagggagcggagaacgcgaaggaac

SEQ ID NO: 122245 - RNA, 81 nt, Homo sapiens
ggacacggagaggcgcgggcgccaccagggcgcggacggggcgggcgcaggacggaccaggcagaggcagaaggaaacggc

SEQ ID NO: 122246 - RNA, 49 nt, Homo sapiens
gggacaagcaacagggcaaggaacaaccgggcaggcagcccgaggccca

SEQ ID NO: 122247 - RNA, 75 nt, Homo sapiens
ggggaagccgaaggacacagacaaggcgccccgcagcgcaagcacgcaccggagggaccagcagagccagccgcg

SEQ ID NO: 122248 - RNA, 56 nt, Homo sapiens
gcaggaagaaggaaggaggcgaaaacagccagcaaagacaagagcagaccagcagc

SEQ ID NO: 122249 - RNA, 107 nt, Homo sapiens
caagaaagaaagagcggaaaacgggccaaagcaggaaacgcccagaaggacgagcagggggaggaacaaagcgaggaagggaagggaaggcgacaggcagcaaggcc

SEQ ID NO: 122250 - RNA, 80 nt, Homo sapiens
gaccgcggggagcgagggccggccccgacaggacgggagaccaaagagaacccgacagaagaaaagggggacccacagaa

SEQ ID NO: 122251 - RNA, 80 nt, Homo sapiens
acacggccgcagcagggacggccagaaaaacagaaaggcagccggcgcaggcccgggagagcggcagccccaccagcaac

SEQ ID NO: 122252 - RNA, 62 nt, Homo sapiens
aaggaagccacggcagacacacaacccgacccgacgaaccccaccaacaacgaacgcggcag

SEQ ID NO: 122253 - RNA, 59 nt, Homo sapiens
ggacgcagcaagcggggcgcggccccaagcccccgcccggggaaacccagacgacaagg

SEQ ID NO: 122254 - RNA, 80 nt, Homo sapiens
gagagaaaaacggaaacacgacagaagcagggcgaaccagagaaaacggcaaggaagcgcagccagccacagagcccggc

SEQ ID NO: 122255 - RNA, 76 nt, Homo sapiens
agacaccaccccaagaggagaagcagcaagagcaaaacaaacggagagaggagggagaaacaaaggccaaagacgc

SEQ ID NO: 122256 - RNA, 67 nt, Homo sapiens
agcacgggcagcgcaggaaacaggaagccgagacccccgcgagggacgagaggcggcccgcagcaga

SEQ ID NO: 122257 - RNA, 67 nt, Homo sapiens
caccagaagcgaagggggaaggaaggccgcggacccccccccccccaccccacaggagaagagacga

SEQ ID NO: 122258 - RNA, 43 nt, Homo sapiens
gcaagcacaagggagcaaaggggccaggagcccccaaaccgga

SEQ ID NO: 122259 - RNA, 65 nt, Homo sapiens
acccggaaaaaggaagcaacgccaccagaggaagggggacaggagccaggccaagagaaagaaac

SEQ ID NO: 122260 - RNA, 84 nt, Homo sapiens
gcggaagcagcgagggcccaccaaggagacgaccgcgcggaggagcacgcaaagcgcagacagcgcgcgaagaaacacacggag

SEQ ID NO: 122261 - RNA, 87 nt, Homo sapiens
gcaagggcgcggacgacacgggccgcgacagcagccacgaggcgagccagagccgcagcccacacgggggagcgggaagacccggac

SEQ ID NO: 122262 - RNA, 71 nt, Homo sapiens
caaggccggcagcccgcaggacagcggagcggcaacgcccacaaagagggaccgcaggaaaaaagggaggg

SEQ ID NO: 122263 - RNA, 62 nt, Homo sapiens
aggccggacgcacccggggggcccagagacacggggagaagagagaaaaaaaagcacacaag

SEQ ID NO: 122264 - RNA, 72 nt, Homo sapiens
accccggcccggcagcagcgacgccggaggcgcagaccggggacagcaggcaagcgccggggaaccagagga

SEQ ID NO: 122265 - RNA, 53 nt, Homo sapiens
ggcaaaaacggagggcgaaggcgagaaggggagggcagggaacacacacaaaa

SEQ ID NO: 122266 - RNA, 80 nt, Homo sapiens
gccgaccacggagcagccgaggacgggaccccagggcagcgaagcaggaaggccgcggacccccccccccccaccccaca

SEQ ID NO: 122267 - RNA, 102 nt, Homo sapiens
aaaagaagagacagcgagaacaaaggagagaggaccacccagaggagcaaccagcaggcgcaaaaacgaacccacaaccgaacgacggacgggaacaaagaa

SEQ ID NO: 122268 - RNA, 114 nt, Homo sapiens
cgacgcggaggcggcagcggcgggccgaggcgaaggagcggccgggagcccgccgcgcggagcggaaaccccccaggcaagaggcgcaggaccgggaagaccaacaaacgcacc

SEQ ID NO: 122269 - RNA, 76 nt, Homo sapiens
agagggcagcaggcccagaaacgcacacaagaaggcgcaccgacccaggcggagcgcagggcacgcccggccacgc

SEQ ID NO: 122270 - RNA, 100 nt, Homo sapiens
ggcaccgccccgcgcgcgcccggccccggccccacccgagcggccccaagggcccacccagaaaacacgaaggagaagcggaaggaaaagccccaggaag

SEQ ID NO: 122271 - RNA, 78 nt, Homo sapiens
gaagggcccggagcgccagagcacgaaggagaaggaaggagaagggaaggaaccgcagaagcagggaaggagagcgag

SEQ ID NO: 122272 - RNA, 66 nt, Homo sapiens
caagaacacacgagagcaggaagcaggcggcaagcccgggagcaaggaccccacggggcagccggg

SEQ ID NO: 122273 - RNA, 83 nt, Homo sapiens
gagacaaaaaacaaacagagagccagagacacagaaaaagaagaagcggaaacaacgccccgcaaaacggaaaagcaaagagc

SEQ ID NO: 122274 - RNA, 70 nt, Homo sapiens
aagcaccagcgaggaagagagccaccgaaaacgccaaggacgacacgcacgggccaggccagaagaaggc

SEQ ID NO: 122275 - RNA, 83 nt, Homo sapiens
cggcgaccggggcgggcgcggcgaggagagagagcggagacaaggccacagcaggccacggcgggggcagccagccagaaaag

SEQ ID NO: 122276 - RNA, 68 nt, Homo sapiens
ccaagcgcgccaccagcgacaacacccaggcagcgagacaggaaacagggggcaggagcaagaaccag

SEQ ID NO: 122277 - RNA, 86 nt, Homo sapiens
cggagggagagcaggagccacgagagaggaggcgcgcgcgcgccgagccgcgggcccgcaggagagaaaacagacagaaaagaacc

SEQ ID NO: 122278 - RNA, 80 nt, Homo sapiens
gccaaaacgggccccaggggacagccgggagaggaacagaagcagggagcgaacacagagcggcgacaagcagcgggcag

SEQ ID NO: 122279 - RNA, 84 nt, Homo sapiens
cagggacacaacgggaaaccggaccggcgaccccgcacacacacccaccagccacggcagcccagcggggacccagccgccccg

SEQ ID NO: 122280 - RNA, 67 nt, Homo sapiens
aggcaacagggagggacacacccaagcacggaccaaagcggggccggggagcccgggccagaccccc

SEQ ID NO: 122281 - RNA, 80 nt, Homo sapiens
gaaggaggcaaccggaccccaaaaaccgaacagaagagggacaagccaagaaacccggaacgaggaaaacacggaggaca

SEQ ID NO: 122282 - RNA, 83 nt, Homo sapiens
accgggagcacgcacgccacgaaggacaaacagagcaacgaacagcaggacggcgggggcagcagacacagagaagcaccgag

SEQ ID NO: 122283 - RNA, 68 nt, Homo sapiens
gcgagaccgaaaaccggcgcaaaaagaaaagcccaccgaagggggaaagagacacagggaggaaccaa

SEQ ID NO: 122284 - RNA, 63 nt, Homo sapiens
gcggccgcgccaacaccccagggggacagcggccagagggagcagaaagagaaaagaagagag

SEQ ID NO: 122285 - RNA, 74 nt, Homo sapiens
cgggcagggccccgagaggcaggcaggggacccggacgcgagagagaggcggggagaccagaaccaacgagcag

SEQ ID NO: 122286 - RNA, 98 nt, Homo sapiens
ccacgggacaagagagaagcgcggggagagggccacaagccaagccggaagaaaacaagagcccaaaacaacccgcccagagccgacgcaccgccaga

SEQ ID NO: 122287 - RNA, 67 nt, Homo sapiens
accacaaagaaccaaaaaccaggaccaaaaaggaagggaccccaaagagcagaaaaccaaggagcag

SEQ ID NO: 122288 - RNA, 87 nt, Homo sapiens
cagcaccgccaggcgggcccccgcggcccgggcgagcccggagaagaggaaggggacggcaaaacagaacagaaaggcggagaaaaa

SEQ ID NO: 122289 - RNA, 53 nt, Homo sapiens
gaaccaggaccggacccggacccaaaggccagcaagcgcgcagcccagagagg

SEQ ID NO: 122290 - RNA, 81 nt, Homo sapiens
ggaggggcccacgaggagccaacacaccagcagaggccgagggagccaaccggagcaacaccccgaaccgggggaaaggag

SEQ ID NO: 122291 - RNA, 74 nt, Homo sapiens
aagaccacccccagagggcgcgcccgacaccagaagaacccaccagagaagagcaccgcaggccgaagcagaca

SEQ ID NO: 122292 - RNA, 79 nt, Homo sapiens
ccagaaccaccccgcggagagcgcaagccgggcagcagcccagcggcagcagaaagagcagcgaagcgcgaaagaggca

SEQ ID NO: 122293 - RNA, 41 nt, Homo sapiens
ccgacagcacgccgagaagggaaaggaggacaaaaggaaaa

SEQ ID NO: 122294 - RNA, 67 nt, Homo sapiens
gaaaaagcaacaaaagaagaggcaaagacccaggaaagggcgacgccaggagcacaccgaaaagaaa

SEQ ID NO: 122295 - RNA, 55 nt, Homo sapiens
gcacggagcgcccccacaggagagaggcagcgagaagaaaaagaagagagagaca

SEQ ID NO: 122296 - RNA, 76 nt, Homo sapiens
ccagcgcaagcacacacagaaccagacccaaaagagcaaacaaccgacggagaaggaaaaaagccgagaaagggag

SEQ ID NO: 122297 - RNA, 55 nt, Homo sapiens
accggccgggggacacagagggcaggggacgcccacaggggcagagccccgagag

SEQ ID NO: 122298 - RNA, 35 nt, Homo sapiens
cagccaggcggcgggccaggcgaagagccaccagc

SEQ ID NO: 122299 - RNA, 77 nt, Homo sapiens
gccacccagcccaccaaacacgccggaaaccccgcccacagcacgagcaacaggggggcaaaaagcccgaggaagag

SEQ ID NO: 122300 - RNA, 66 nt, Homo sapiens
agggggaaccgacccaacccccagacccacacaccgaacagagcaacacagaaggagaaaaagaca

SEQ ID NO: 122301 - RNA, 50 nt, Homo sapiens
ggcagcaaagagggaacagcaagggaacaggccaggggccgcacagacac

SEQ ID NO: 122302 - RNA, 61 nt, Homo sapiens
acgcaagcggggaggggaaggccagcacccagaaaaagcaccccgaggaggaagacgaacg

SEQ ID NO: 122303 - RNA, 80 nt, Homo sapiens
acgcagaggcgcggccccaggcgcagagcccaagccacccagggaaggcaacagagacaggaggacagagaaggaccaga

SEQ ID NO: 122304 - RNA, 71 nt, Homo sapiens
aggcagggccgccccgcgcgggccaggagggaagggccagaacgagaaaggcgcgccaggacagaaaaaag

SEQ ID NO: 122305 - RNA, 79 nt, Homo sapiens
cgcgagagaggagagggcagacggacaagagcgcggaacaggacgccccgagggaccgagacccgacgagagagacgag

SEQ ID NO: 122306 - RNA, 76 nt, Homo sapiens
cccgcggcccggcagggggaacgggagggggggccacccccaaccaggaccaaagacgaccaccaaagccagcccc

SEQ ID NO: 122307 - RNA, 79 nt, Homo sapiens
acagagcaaccaggaaagaagaggaccccaccaacaacgaacgcggcaggcgcacaaggaaggaaggggcaaggggaac

SEQ ID NO: 122308 - RNA, 59 nt, Homo sapiens
gagcaacagagaccgcgagagcaacaagaaggagccgggccccggagagcacaggcagg

SEQ ID NO: 122309 - RNA, 83 nt, Homo sapiens
cggagcagggagcccaaagaccccggagacaggcagacccaacaccaacacgaggagaaggcagccccaggggcccagccaga

SEQ ID NO: 122310 - RNA, 77 nt, Homo sapiens
ccaccgccaccagccaccaaggcaagaagaacacccgcggacacgacaacacacacgcacaagcgaaaccaagagag

SEQ ID NO: 122311 - RNA, 52 nt, Homo sapiens
cccacggacccaccgcgcaggccccgaggcaaagcccaacacaccgcgccac

SEQ ID NO: 122312 - RNA, 79 nt, Homo sapiens
acagcagcagcccacgaacagaaaggagaccagacaagaggacacagaaaaaacgaagcccgaaagacaagcaaaagca

SEQ ID NO: 122313 - RNA, 75 nt, Homo sapiens
gaacgaggaaacagaaagaagaacaagcagaaagcacgaacaacgagaacaagacacgagcaaaccccaccgagg

SEQ ID NO: 122314 - RNA, 75 nt, Homo sapiens
aaagaacgaacccagaaaagaagaagagaagaagaggcggagaagcggaggagaccaaggaggccaccaccacag

SEQ ID NO: 122315 - RNA, 66 nt, Homo sapiens
gggcgcgcccgccgacgggagggggcccccaagcaacagcagcccagagaccagggaccacccaca

SEQ ID NO: 122316 - RNA, 79 nt, Homo sapiens
gcgaccaggagccggggcggcgcaggaggagccgaggcgagccaacagcacccaagggaagaagcagaagcaagcccag

SEQ ID NO: 122317 - RNA, 60 nt, Homo sapiens
cgggcgcggagcccccacaggcagggggaggaagaaaccccagaaaagaggcgcaccaaa

SEQ ID NO: 122318 - RNA, 68 nt, Homo sapiens
cacgcgcggcccgcacagcggcgcgcgccacgccgcgccacccgccaggcaccggcggagaaaccacc

SEQ ID NO: 122319 - RNA, 76 nt, Homo sapiens
acaccagcgccagggcaggccgcccccgaagagacccaaaaaggagggagaggagaggagaccggaggaagaacac

SEQ ID NO: 122320 - RNA, 56 nt, Homo sapiens
cgcacaacggacagcacacgcccccacccaggaaggaacaaccccacaccaccaca

SEQ ID NO: 122321 - RNA, 76 nt, Homo sapiens
gcgagcgccacaccagcgacaggcccaggaagcaccaaggagaaacggaacagaccagggcagaagaagacaagga

SEQ ID NO: 122322 - RNA, 36 nt, Homo sapiens
gcgacaggcaacagacgagcccagaacgcccccagc

SEQ ID NO: 122323 - RNA, 82 nt, Homo sapiens
aaccaaccaagaaaaagcaaggagaggaggagcacaacggagacaaaggcccgaggccggaaggcccccggaagagcgcagc

SEQ ID NO: 122324 - RNA, 60 nt, Homo sapiens
agacccagacccggacgacccccagcgagccagcggagcgcgcaaacgaacacaagagac

SEQ ID NO: 122325 - RNA, 78 nt, Homo sapiens
gaaggaacggaggccccggacggagaaaaagagcaccgcagaggaagcaagcccaccagagaagcgacccaggaccag

SEQ ID NO: 122326 - RNA, 80 nt, Homo sapiens
cgagcggcggcggcggcagcgggcgggccccgagagcagcagcgggcccggccaggccccaccgccacaagcaggggaac

SEQ ID NO: 122327 - RNA, 71 nt, Homo sapiens
gcccgacggggccaccgcggcggcgcccgcaccgcgcccgcaaaggacaagagaaaaaaagggcgggcgaa

SEQ ID NO: 122328 - RNA, 52 nt, Homo sapiens
gggacccggccccaaccacccccgccccccagacagacagggaggacggaga

SEQ ID NO: 122329 - RNA, 60 nt, Homo sapiens
gggaggagcaccgggaaccacaccaccccgcgcaggccaaaagccaaaagccgagaacga

SEQ ID NO: 122330 - RNA, 73 nt, Homo sapiens
agcaggagaagaccagagcaaaccagaacggccccaaaaaaaaggcaggaaagccaagacaaagaaaccaaca

SEQ ID NO: 122331 - RNA, 42 nt, Homo sapiens
agaccggaggggacgaagaacgggaaacggcccacaccagaa

SEQ ID NO: 122332 - RNA, 78 nt, Homo sapiens
accggaagaacccggcccagagccaaaggagccccacaaaagggagaagagcaaccggacacagaaggggaaggaaac

SEQ ID NO: 122333 - RNA, 72 nt, Homo sapiens
aacaccaagaagagaaccaaccccaacaggagccgcccagcaaaacccaacgggaacccgccggaaaacgga

SEQ ID NO: 122334 - RNA, 74 nt, Homo sapiens
ccaccgcagcagacaaagccccacgcggagagaaggccaagcagaagacccacacgaaaaggcgccggcggcac

SEQ ID NO: 122335 - RNA, 69 nt, Homo sapiens
cccccagaagagaccaacgccaccaaccaaccggagaaaccagaggcaagcgacgggaaggaccaccaa

SEQ ID NO: 122336 - RNA, 74 nt, Homo sapiens
cgaccggcaaaaagggccagaaggccaagagcccaggaagccgggagaaagacacaaaccacacaaccaaccca

SEQ ID NO: 122337 - RNA, 76 nt, Homo sapiens
ccgccgcgcagcccccgcgcgggcagccaccccgcccccgccccccccgccgcaccaggcgacggggccaaggggc

SEQ ID NO: 122338 - RNA, 77 nt, Homo sapiens
cccccggccggccgcggcggcggcgcacgcccaggcccacccaccacgcagcgagaacagggaagcggaaccaaaaa

SEQ ID NO: 122339 - RNA, 71 nt, Homo sapiens
cgaagaaaagggaaaacgcgcgggccaaggaccgagcaccgagacagaagacacccaagagacggacagag

SEQ ID NO: 122340 - RNA, 71 nt, Homo sapiens
cgaaggcgaccgacgagcagggaagcgaccgcccgcacagagaagaccgaagaaaccggacggaaggaaag

SEQ ID NO: 122341 - RNA, 75 nt, Homo sapiens
aacaagagcggagaccggacggggccaggagcaggaccagagaacacccgcgagggcccaggccgaaacaaccag

SEQ ID NO: 122342 - RNA, 79 nt, Homo sapiens
ccacagagacgggagcggggggacccaggcgggccccgcggcggaaagaagcacgccccagcacaaccaacaacgcaaa

SEQ ID NO: 122343 - RNA, 58 nt, Homo sapiens
cgacgggggggacgagcggagcccgggacaggaggaaccaagaacagagaccagcaca

SEQ ID NO: 122344 - RNA, 77 nt, Homo sapiens
gaagcaaagaagggcgccggcagaggaccgagccaaaagagcaggccccaaggacgccccccaaggacacggaagca

SEQ ID NO: 122345 - RNA, 83 nt, Homo sapiens
cccggacgaaggaccgcagcacggagcgcagaaccggccgcgcccggaagaagaagcgcacaaggagcacaacagggagcgga

SEQ ID NO: 122346 - RNA, 72 nt, Homo sapiens
ggagaagagagaggggacaaaggaaaaaaccagaagacaaaaacaaggccgcgcagacggagcgacggcaga

SEQ ID NO: 122347 - RNA, 73 nt, Homo sapiens
cggacgggcgcccagccaggaaagcagcgagcagccacagaaccccccagaggaaaccaaaccagagacagga

SEQ ID NO: 122348 - RNA, 37 nt, Homo sapiens
cccaggcagccccgcgccacccacaccgagagaaaag

SEQ ID NO: 122349 - RNA, 86 nt, Homo sapiens
caggaagaagagggggacacccaaaggagagaccgcacgcagggccacagcagcacgaggacagcccgaggcggagaacaccgaac

SEQ ID NO: 122350 - RNA, 69 nt, Homo sapiens
caaaagaggaaacgagccgccaaacagcgacagagccaacgcaaaaccagaccaacagccacaggacca

SEQ ID NO: 122351 - RNA, 56 nt, Homo sapiens
agcgagcaaaggaaagaagacagaacagagagccaagaaaaccagaggacaccacc

SEQ ID NO: 122352 - RNA, 64 nt, Homo sapiens
ggaagaagcacagaaagccagacagagaacacagacaggagaacaggcaaagaccagcaaggca

SEQ ID NO: 122353 - RNA, 85 nt, Homo sapiens
cagaacagcagcagcgccaacacaccacgccagcgcaagcggcggaagccgggcagaaaacggccaagggcggagcacgagaaag

SEQ ID NO: 122354 - RNA, 61 nt, Homo sapiens
cgcgcccgcgcggcgcggggaccgcggcccggccggcaggcgcccggggccacagcggccc

SEQ ID NO: 122355 - RNA, 75 nt, Homo sapiens
aacacacaagaacacccaaagaccccggagaaacacgaagaaagcccacaggcaccgaggagggagccgcaaaaa

SEQ ID NO: 122356 - RNA, 70 nt, Homo sapiens
ggccggacaggcgcaccccggcccggggccagcccacccacagggagaacacccagcagaggcgcaggaa

SEQ ID NO: 122357 - RNA, 70 nt, Homo sapiens
acccaaaaggcagaaaggacacggaacagaaccaccaaaaggccagggccggagcaagccacagccagcg

SEQ ID NO: 122358 - RNA, 55 nt, Homo sapiens
aggaaaacgcggaaaaccgacacaacagaagcacagcccgacagaccgaagaaaa

SEQ ID NO: 122359 - RNA, 76 nt, Homo sapiens
agcgggaagcgggccagacacgagagggaagaacggaagggggcgcccccaggggccaggacccagcccgagagcc

SEQ ID NO: 122360 - RNA, 55 nt, Homo sapiens
gagagcccagcgcgggaagagcagaaagaaggaaaaccgcaccgaagcagccaag

SEQ ID NO: 122361 - RNA, 64 nt, Homo sapiens
gaagaacacaggcacagagagaagaggaacaggacaaaacaggcacagaaaacgaacgagaaac

SEQ ID NO: 122362 - RNA, 86 nt, Homo sapiens
caacaccccggccaccgacccacaaggaacggcccaaaaaggaaggaggaaaaagagaagaaaagacgccgcccgagaacacaggc

SEQ ID NO: 122363 - RNA, 90 nt, Homo sapiens
aagcccaccccaaggaagaagccagaagaggaggaagaggaaagaaaaggagcaggaagcccaggagaccaaggaccggacagaggaaga

SEQ ID NO: 122364 - RNA, 55 nt, Homo sapiens
aaggaccaagaaccaggcaccaagcagccgaagagaaacaagggacagcagacaa

SEQ ID NO: 122365 - RNA, 86 nt, Homo sapiens
cgcaagcccccgagacagaaggccagccccaggagcgagcccagggcggggcgaaaggccacaaaccaagagcaggagagagcagg

SEQ ID NO: 122366 - RNA, 82 nt, Homo sapiens
ggagcgccaggcaaccgacgccaggaagagccagaccgcacaggcgggccaggacaccccaagcgcagaaacaggcacaccc

SEQ ID NO: 122367 - RNA, 81 nt, Homo sapiens
aagaaacacggcaaaaagaaaaaccagcgaagcacagcgggagaacagagacccaccaagaaaccagaacccggacaaggg

SEQ ID NO: 122368 - RNA, 75 nt, Homo sapiens
aggacacccaacccgggcgagcccacaccaaccggcccacccaccgacgcggcaggacgcgcggaggaaacaccc

SEQ ID NO: 122369 - RNA, 100 nt, Homo sapiens
gccaccggcaggagaaggcgcgcgcgaaccccggccccacagccccgcgcacaggccccggcagaccgaaaagggcggaaaaggaccaaggcccgcaaaa

SEQ ID NO: 122370 - RNA, 79 nt, Homo sapiens
aacagagcacacccccggggaggcaacgcagaagaagaccgaccgaaacgcgcacaggagaccgggcaccccccaaccc

SEQ ID NO: 122371 - RNA, 97 nt, Homo sapiens
gggcggcgcgaagcgcggggcgggcccgggcgcggcgggcgcgcccgccagcgcccggagaacggaagacaacgaggggcacgcgcccacccaggcg

SEQ ID NO: 122372 - RNA, 77 nt, Homo sapiens
gcggagggccgagggagggccgagccagccgcggccggaggagcccccaggccgagaaggaagcgccggccaaacga

SEQ ID NO: 122373 - RNA, 80 nt, Homo sapiens
cgggagagggcgaggccgccgcgacacccccgcaccggggccggggcggagaacggaaaagcaccaggaagcagagagga

SEQ ID NO: 122374 - RNA, 84 nt, Homo sapiens
gacgcgcggcgccgacagaagagaggccgcgagcacccggcgaggccaaggccccaggacaacacccagcgacaagaaggccag

SEQ ID NO: 122375 - RNA, 77 nt, Homo sapiens
aaagcaggaaggaaaaggaaacagacagggagaaagacgcagaaagaggggcaaaaaagagcacaaagcgccgcggg

SEQ ID NO: 122376 - RNA, 65 nt, Homo sapiens
gcggaggggcacgagcgccacaaccccaggaacgcaacgaaagcgggagaagacacggcgagaac

SEQ ID NO: 122377 - RNA, 75 nt, Homo sapiens
cgagcagcggacgccggccgccgcaggagggcagcggggaagaagaaaaggaaccgaggccccccggcgacacgg

SEQ ID NO: 122378 - RNA, 76 nt, Homo sapiens
gaagcgcccggccggaggcaggggaaagacagaagcgaaggggacagggggagaaccgccagggaaacccggggga

SEQ ID NO: 122379 - RNA, 57 nt, Homo sapiens
ggcggaagccacacaggccagaacgagggaccaagaggcccacacaaaggcgcgaaa

SEQ ID NO: 122380 - RNA, 79 nt, Homo sapiens
aggcggcggacgggccggagggaggagaaagccccgcgcagaaaacacagagaaaacacggagaaacagcaacaggaga

SEQ ID NO: 122381 - RNA, 80 nt, Homo sapiens
gcggcgccggcggagggaagaagacggcgaagcaccaacgccaagaccaggagagaagacgaaaaagaagaagcagcgaa

SEQ ID NO: 122382 - RNA, 51 nt, Homo sapiens
cacagcagacggacaccaggcggcaccaggacgccgaaaagcgaccggacg

SEQ ID NO: 122383 - RNA, 103 nt, Homo sapiens
caaagggagacgcagcacagggaaccgaggggagccgaccacggacgccaggccgaggcccgagacgcggggaaccgggggaagaacaagaaggcccagggag

SEQ ID NO: 122384 - RNA, 69 nt, Homo sapiens
gcggacacgcccggggcgaggcccgcggggccaggaggggaaaggacaagggacagcagccgcagaaga

SEQ ID NO: 122385 - RNA, 87 nt, Homo sapiens
ccaggaggcccaagacaccacagaagcccccgagcccaggagaacagcggaagcccggcagaggcagccggagagccccaggccagc

SEQ ID NO: 122386 - RNA, 95 nt, Homo sapiens
cagccggagggcggaaggacccccagcgggcacgcgcggcagccagccgcccgcagggcagagcggcgggaaaccaccaacaacacccccaaacc

SEQ ID NO: 122387 - RNA, 74 nt, Homo sapiens
caaaaggcccggaccccccggacgacggggcgggaccggcgccaccgcagccaaccaggaaaccgccagacggc

SEQ ID NO: 122388 - RNA, 77 nt, Homo sapiens
cgcgggaaggcagcccgcacgaccagcgaaccgcccaagcacggcagaagaagaaggcccaacgaaaaagcggaaag

SEQ ID NO: 122389 - RNA, 77 nt, Homo sapiens
agacaagaaagcccccacggaaggccacgagggcggaccccggacaccaggggggaaaaaccacacaggcaaagaac

SEQ ID NO: 122390 - RNA, 43 nt, Homo sapiens
gcgcgggagccgcacgggccaaggcgagcgggaaagccgaaga

SEQ ID NO: 122391 - RNA, 69 nt, Homo sapiens
cgccagccggacccaagagccagaaagaagaccaggaggcgcaagccagggccgaaacggggaacccag

SEQ ID NO: 122392 - RNA, 57 nt, Homo sapiens
accggagggcagacacacgcagccaaggccaccgagccacaagaccacagcaccgac

SEQ ID NO: 122393 - RNA, 79 nt, Homo sapiens
caacgccaccggccacgcacggacaagcagaccggaagaccgacggaagaccacaccccgagggagcccaggacaccac

SEQ ID NO: 122394 - RNA, 61 nt, Homo sapiens
ccacagcaccgaagccgggagagggccgagggaacaagcacaagcccggcggagcccacca

SEQ ID NO: 122395 - RNA, 83 nt, Homo sapiens
accccggcccggacaccccgggcccgccagcccagggccgcgccgccagacgaggaacagaggagacagccgacagagcaccg

SEQ ID NO: 122396 - RNA, 86 nt, Homo sapiens
accgcgacacccgaagcgagaaagaagggagaggaagaaagaccaaacgagagacaaaagagaacaacagaacgcaaggagaggcc

SEQ ID NO: 122397 - RNA, 81 nt, Homo sapiens
gccgcccacaaggaccggagagcagcaaacccacccaggcccaggaccgagcccgacgcccacagacaggcgaacgccggc

SEQ ID NO: 122398 - RNA, 56 nt, Homo sapiens
cgcaaaaagggccgggaaacaaaaggcgaaccggggagacaagggaggcgaggacg

SEQ ID NO: 122399 - RNA, 75 nt, Homo sapiens
agaccgagcaaagagaccccggaacagaccacaggggcaggaacacggccacaagcggcccacgcgaaaccaaaa

SEQ ID NO: 122400 - RNA, 79 nt, Homo sapiens
cgagcgcgagagcggccccagccggcggcggccggccgcccagcgggacccgccaggaaacaagagcccgccagccagc

SEQ ID NO: 122401 - RNA, 73 nt, Homo sapiens
aggcaacgcagcaccgaagaaccagagcgcaaacgagaacagcacgcacccaagacgccgagacaaggaagca

SEQ ID NO: 122402 - RNA, 70 nt, Homo sapiens
gcagggaccgagaaccaagacgcggcgcgcaacgcaagccccaaccgcgaggagagcgcagcaggcgcgc

SEQ ID NO: 122403 - RNA, 41 nt, Homo sapiens
aaggagaggggaacggccagaagcgccggaagaaccgggga

SEQ ID NO: 122404 - RNA, 74 nt, Homo sapiens
ggaccggacggccgagagcgacacgcgcgacggaggccgcagggccagaacaacgaacagaagaccacggcggg

SEQ ID NO: 122405 - RNA, 68 nt, Homo sapiens
accggccacacagagcggcagacccgccccaagcgaacagagcaaggaaagagacaggggccgggccc

SEQ ID NO: 122406 - RNA, 66 nt, Homo sapiens
agggcagacgaaggaacagagcaagggaaaaacacagggagaaagccaagaaaacccaaccgaccc

SEQ ID NO: 122407 - RNA, 74 nt, Homo sapiens
agaagggacccaaaaagacggacagcccacgggaacaagaggggacagaaagggcggcgacggcggcgcgagga

SEQ ID NO: 122408 - RNA, 78 nt, Homo sapiens
ccccacgacagaaaaacaacaagaccccagccaacagaggacgaaagagaggaacggcaccgccggccgccacaaccg

SEQ ID NO: 122409 - RNA, 87 nt, Homo sapiens
ggggccagccagacaagacggggaggcaagcccgggagaagcacggaaaaccaacggcccggaggaccacagcccaggggccccagg

SEQ ID NO: 122410 - RNA, 70 nt, Homo sapiens
gaagaagcacgaaagccccacccgccgcagcaagcagagacggagccaccaccaccccgagagacggacc

SEQ ID NO: 122411 - RNA, 72 nt, Homo sapiens
cagaacacgcagggacaaagagcgggaaaagggagacaggcagccgaaaaccggagggaaaaaaggaagaga

SEQ ID NO: 122412 - RNA, 68 nt, Homo sapiens
gcaagcgagcaaggggcgaccaaagagccagccgaggaaccgccaaggccgcaggaaaggagaacagc

SEQ ID NO: 122413 - RNA, 107 nt, Homo sapiens
gagcagggaccgggccaagacgagcgacaggagcacacccggagaagcaggagcccaccggcagggcgaagcggccaggcccgggcggacgcagagccagagcgccc

SEQ ID NO: 122414 - RNA, 79 nt, Homo sapiens
ccggccggagcgggaggcgggccagcgacaaaaagagaacaccgcccagccaagggggagggcagcgccaaacagcgca

SEQ ID NO: 122415 - RNA, 53 nt, Homo sapiens
gcaggaaggaccacccaagagaaccagggaaccaggcccccacggcgccgaga

SEQ ID NO: 122416 - RNA, 86 nt, Homo sapiens
caccaagaagaggggccgaaccagacaacagggccagcggggaggaccccaggaccagacaaggaaaccaaagccacaagggcaca

SEQ ID NO: 122417 - RNA, 84 nt, Homo sapiens
cccggagcgcggcgcccgcggccgggcggcgcggccgcccgggccgggccccaccggacgagagaaccgagccaccgcaacgga

SEQ ID NO: 122418 - RNA, 72 nt, Homo sapiens
gagaaagaagagccaagcccagaaccggagcggacagagaaggccgagccggaaggcacgggaggggagaga

SEQ ID NO: 122419 - RNA, 76 nt, Homo sapiens
ccaggagcaagggaaagaacccggcggggaaaagggaaggaaaagagacgcaggcccagcgggagaagccggaaaa

SEQ ID NO: 122420 - RNA, 77 nt, Homo sapiens
ggaacccgcggggaggccccaaccaggggcgagccgcgcgggagaagccagagagcgaccaaacccccacaacaagg

SEQ ID NO: 122421 - RNA, 81 nt, Homo sapiens
ggagaacgcgaggcagagcgggagcgcgcagccaggcacaagcagaggaaccagggaaccgccgccagcaaccaacaggca

SEQ ID NO: 122422 - RNA, 71 nt, Homo sapiens
gggggccccaggcccgagggcccagcgagaccgaagggggaaggcccacgggggaacgcgcagcacacggc

SEQ ID NO: 122423 - RNA, 39 nt, Homo sapiens
aagagagcgccgcacaaccaccgcccaagaacggcggcc

SEQ ID NO: 122424 - RNA, 51 nt, Homo sapiens
gaacaccccgagcgaggccaacccaggaggaggagcagaaaacacagagaa

SEQ ID NO: 122425 - RNA, 100 nt, Homo sapiens
aaagcaaccaaagcacaggggccgagcgcaagcagggaacgaacaggcacaacgcacagagaacaaaagaaaggccacagcccggcaaagccaagcccag

SEQ ID NO: 122426 - RNA, 69 nt, Homo sapiens
caaaaacaagacggggcgccccacagaggggcgacgggagcagacggcggggacgaggcagccaggagg

SEQ ID NO: 122427 - RNA, 75 nt, Homo sapiens
caggccgaagaaaggcgcagccgcaagaggggcacacgcccgcacgagcagcggagaaggcgcccaggcgcgagg

SEQ ID NO: 122428 - RNA, 71 nt, Homo sapiens
ggagagagcacgaaggacccagcagggcaccagagccgcgagaaggggccagcaaagacggagcgggaaga

SEQ ID NO: 122429 - RNA, 105 nt, Homo sapiens
gccgcccgacgccacgcccggcccggccgcgcccgcggaaccagaccaggcagacaacagagcaaagaacgagcggaaaacaccagaaaaaaaacggagagagag

SEQ ID NO: 122430 - RNA, 94 nt, Homo sapiens
ccgggggaccccgcacacgaagagacgccgggcaccccaacacaacgaaaacaaacggaagagagggcagcaagaaagaacaagaaagcgaacg

SEQ ID NO: 122431 - RNA, 84 nt, Homo sapiens
aaaacgcaaaaccaccgggcggaaaacgaagaccccaggacgagcaaggcaacgaggacacggagggccagccccagacgacag

SEQ ID NO: 122432 - RNA, 74 nt, Homo sapiens
gagcggcacagccagaagaccgaagcgcgacggaaggcgagaacgcggacaagcaaacaaagaggaaaaagagg

SEQ ID NO: 122433 - RNA, 32 nt, Homo sapiens
aaaacagcagcccgaaagcgagggacccaggc

SEQ ID NO: 122434 - RNA, 76 nt, Homo sapiens
aagggcgggaggcagcggcccccacagaagcgacccaggaggcccaccagcagggacggacgccgacgcagaggga

SEQ ID NO: 122435 - RNA, 76 nt, Homo sapiens
ccaaagaaggcagggagccccccagaagcacaaaagaccggcaagcaggcaagaagaagaaagcaaagaacagcca

SEQ ID NO: 122436 - RNA, 56 nt, Homo sapiens
gagagggaagccacaacaagccaaagaagaaggagcgaagcggccacccgaccggc

SEQ ID NO: 122437 - RNA, 79 nt, Homo sapiens
cagcaagacccccagcgccggggcgcagagaacgcccaaagacccggcaggggaagcaaaggcgcgccccgacaagaaa

SEQ ID NO: 122438 - RNA, 70 nt, Homo sapiens
cacacggggggcgaagcaacacaagacagcagaagacgagaggcccaggagcagagccccgcagccaccc

SEQ ID NO: 122439 - RNA, 77 nt, Homo sapiens
gccccccgccccaaagagacggggacccccgaccggccagccacacgggcaagcaaaacggagaccgagaagcgagc

SEQ ID NO: 122440 - RNA, 80 nt, Homo sapiens
agaccgcaaggccgcccgggaacgcgacgcgagagaaggacccacggcgcgcgaagcaccacccggcaagggaaaaggca

SEQ ID NO: 122441 - RNA, 63 nt, Homo sapiens
cccgccgcgcccaggagcggaacaacgcggcgagcggggaacaggaggcccggacccccagca

SEQ ID NO: 122442 - RNA, 75 nt, Homo sapiens
cgcacaaagagaggaaccaacacgagaagaagccccacacggacaggaggcaggggaagcacaaaagcgcacccg

SEQ ID NO: 122443 - RNA, 79 nt, Homo sapiens
ggcggagaagagccagaagaagagcagcaccagcaagcccgagacaacaggcacaaagagagaaggaacacccacaggg

SEQ ID NO: 122444 - RNA, 59 nt, Homo sapiens
accaggagacagagcccaaagggccacagagccgaacacagcagagggggacaagccca

SEQ ID NO: 122445 - RNA, 76 nt, Homo sapiens
cccacgcgggagaccggggggcggacgcgcgcggggcaggggagccgccaccaaaagcagacggaaaacccacggg

SEQ ID NO: 122446 - RNA, 73 nt, Homo sapiens
gaaacaccgaacaaaagaaggacaagggcagaaacgcaggagcacggcgcagacacacgaacaaagaagaaga

SEQ ID NO: 122447 - RNA, 69 nt, Homo sapiens
ggacaagcaggaaacaagaaacaccaacacaaaaaaaaccaacagccccccagcgaccaccgcagaggc

SEQ ID NO: 122448 - RNA, 81 nt, Homo sapiens
agcgccgaagcagccgggagccggagcgggcgcggacgccgaggcaccgaggcaccagaggaggcaccgcaagcggaccca

SEQ ID NO: 122449 - RNA, 73 nt, Homo sapiens
gaaaaacccaagccgacaaccggaggacacagccagggcggacgggaaagcagaaggagccaagaagaaccgg

SEQ ID NO: 122450 - RNA, 74 nt, Homo sapiens
cgcggcgggccccgcgccgcgcgcgcgccgggacaccagaggacgcccggcagaagggagcgagcagcacgggc

SEQ ID NO: 122451 - RNA, 80 nt, Homo sapiens
caccagacccaccaacaagggcccccagggcccggccgaagcaagaacaagaccaaaacacgcgacgagagcaggacacc

SEQ ID NO: 122452 - RNA, 72 nt, Homo sapiens
caacaagcgcaacaggaccagcaaaaaaagaacccaacacggaaacacacgccgagaagacggccccacgga

SEQ ID NO: 122453 - RNA, 81 nt, Homo sapiens
ccaaaaccgccgcgcgcgaccaaaggagaagaggggagccccgaggagaccgagggaccacccggaccacagcaggagccc

SEQ ID NO: 122454 - RNA, 69 nt, Homo sapiens
cgagaaacagccagacgcaaagacgcaaagacagcagcggagcaacaggaggcaaacaggcccccgggg

SEQ ID NO: 122455 - RNA, 57 nt, Homo sapiens
ggagggccggcacaggcgagggaagggcgccggaaaaccgcacagccggccaaggac

SEQ ID NO: 122456 - RNA, 78 nt, Homo sapiens
ggaggacgcggagaaccggcacagcccccgggagacgggcagacaacgaacaagcgaagaaccagcagcaagacaacg

SEQ ID NO: 122457 - RNA, 84 nt, Homo sapiens
cgcacggcagccagcgcaagaggcgggcagcacgcgacaagacgcggacggagcccacacccgcaagaagagcccggcgcacca

SEQ ID NO: 122458 - RNA, 37 nt, Homo sapiens
cgcgcccgggagagcaagacgacaggacaccagacca

SEQ ID NO: 122459 - RNA, 77 nt, Homo sapiens
ccgcgcaccgacccgacgcgccggcccacgcgcggccaaggacgagcagggggaggaacaaagcgaggaagggaagg

SEQ ID NO: 122460 - RNA, 60 nt, Homo sapiens
agaacggccaggagacgcaacggcagaaaaaaccagcaggccaggaacacaacccaccga

SEQ ID NO: 122461 - RNA, 76 nt, Homo sapiens
gcggaaaccaacagccacaaaggagaaagagcacaccagggagggcaacggagacagaaaccaggaggccaagcaa

SEQ ID NO: 122462 - RNA, 82 nt, Homo sapiens
gcgccaccaagagcggggccgcgagcagcgcacgcgccgggccgcgaggagcgcgccaggcccgggcaggacggggcgggga

SEQ ID NO: 122463 - RNA, 72 nt, Homo sapiens
gaaccacgcgaaaaaaggaagagacacgcagagaagcacagaagcgaggggcgacacggcacagaaacacgc

SEQ ID NO: 122464 - RNA, 80 nt, Homo sapiens
agagcggaccacgggggccggccgcaagcacagcaagagccgaaaagagcagcacacagaaacagagagaacggaccggc

SEQ ID NO: 122465 - RNA, 73 nt, Homo sapiens
gcgccgccgcccccgggccgcggccgcagggaccgagcagagaaccaacggagaacagcccaccgagaaacac

SEQ ID NO: 122466 - RNA, 80 nt, Homo sapiens
agccacgaagaaaaggggaaggaggcgaacaggaaggggaagaacccaagacacacacagcggagcaacaaggagggaag

SEQ ID NO: 122467 - RNA, 59 nt, Homo sapiens
ccagggccgcggggaccgaaaggacagaacaggaccggaaagagccagcgggccggcac

SEQ ID NO: 122468 - RNA, 71 nt, Homo sapiens
cggccgggggcggcggccgggggcccagcccgggcggcgcggccaggaccacaaccagaacggaaggcgac

SEQ ID NO: 122469 - RNA, 63 nt, Homo sapiens
ggcggcaaaaccacccaaaggccacggcagagacaacgggaccccaaggcacaggcgaccacc

SEQ ID NO: 122470 - RNA, 76 nt, Homo sapiens
aaggaccaagaaccagaaggccggcccacagcccaaaaagaaacaggaccgaaagccagagcgaagccaaagccgg

SEQ ID NO: 122471 - RNA, 91 nt, Homo sapiens
ggacacgcaggcggcccaggaccaggaggagagaagggcacagaagccagcacgcggaagcccccgccagagcccaggcagccgaaggccg

SEQ ID NO: 122472 - RNA, 55 nt, Homo sapiens
caccaggcggcaaaaaagaacagccagaagaaccagcgaaaagggcgacagcaag

SEQ ID NO: 122473 - RNA, 57 nt, Homo sapiens
ccaccaggcggcaagagcgccacccggcggacccacagcggggccgggccccgacca

SEQ ID NO: 122474 - RNA, 76 nt, Homo sapiens
aaggacgaaaaggggcggaagaaaaacaaacacacgcaaaggagaaaggaaccgacaggaagacaacgaggggcac

SEQ ID NO: 122475 - RNA, 89 nt, Homo sapiens
agaggcagcggaaggagacaagcggaggccaggaacaaagagcaccagaaaaaacaagcagagacacaggaagggcccccgcaggagaa

SEQ ID NO: 122476 - RNA, 82 nt, Homo sapiens
acgggcgcaaccgcagcacacagcgaccgggagaacaagacggaacaagcagaaagcacgaacaacgagaacaagacacgag

SEQ ID NO: 122477 - RNA, 63 nt, Homo sapiens
ccgcgaccagggccgcaggaagacgcaggcgcgccgcagccgggagaagcggccgcgcccgag

SEQ ID NO: 122478 - RNA, 42 nt, Homo sapiens
cccccccagcccgccccaaaaggggggaggcaaagaaagaag

SEQ ID NO: 122479 - RNA, 74 nt, Homo sapiens
gccggccgcgccgcgaggagacagaaggagcgagcagcagaagggaggaggaaagccagcaaaccgccaaagcc

SEQ ID NO: 122480 - RNA, 67 nt, Homo sapiens
ggccacaccaaaaaaccggagcccaccagaagaaggaagcggcaagagcggaagcacgaaaacccca

SEQ ID NO: 122481 - RNA, 76 nt, Homo sapiens
caaagcgaacgaagagcaccgggagcggcgaagaggcaccggaggaggaggaaagacaagccccaaaagcagccgg

SEQ ID NO: 122482 - RNA, 76 nt, Homo sapiens
caggcagcccagcccgcccccagaaaccagggcgcagcgaggaggggaagccccccgcaggaccagggaaagagga

SEQ ID NO: 122483 - RNA, 77 nt, Homo sapiens
gaggagcagccaaaaagaaagcaccgccgcacagacccaacagggcggagaacggaaaagcaccaggaagcagagag

SEQ ID NO: 122484 - RNA, 79 nt, Homo sapiens
ggggagaggcagcccagggccggagccaggaagcgaaggcacgacccccaggagaccggaggacgaagcgcgcccccaa

SEQ ID NO: 122485 - RNA, 76 nt, Homo sapiens
gcagcacaaccgccagaaggaagacaagacaaagggagccaaaggaaaaaagaccccagacccgcagaaaaccaca

SEQ ID NO: 122486 - RNA, 42 nt, Homo sapiens
aaacgccaggagccgaagacagggcagccgaccgaagaagcg

SEQ ID NO: 122487 - RNA, 72 nt, Homo sapiens
aagacaacagaaccaacaaagcgggccggcgcccagaaagccccgaagcgcccgaagaccccgaccacaaaa

SEQ ID NO: 122488 - RNA, 56 nt, Homo sapiens
gaccccgaggcgagacggaaaggagccaaaaaccgaacacccggaaggggacaagg

SEQ ID NO: 122489 - RNA, 97 nt, Homo sapiens
aaaggacgccccggggagaggacaagagcgcaaggagaacaaaacagcacccggaaccgcacggacacgacagggcagggcacggaccgggaggaga

SEQ ID NO: 122490 - RNA, 83 nt, Homo sapiens
gagacccaggaagcgcgagaccaggacggcgcgggaaccacgccaacggggcggggaagccagcagaacggccaaggcacggg

SEQ ID NO: 122491 - RNA, 79 nt, Homo sapiens
gcggagcgagcccgcgcaccaagaaccaagagggggccgaacaccaaaggccaccccaggaaaacagagggcagggaga

SEQ ID NO: 122492 - RNA, 61 nt, Homo sapiens
gcaccgcgcgggcggccaggagcgagccagggcccgacaggcagaaaggagcagaagacaa

SEQ ID NO: 122493 - RNA, 89 nt, Homo sapiens
gccgacagccggaacaacgcaagacggcccagcgagagccagccggaggacccagcagcaggccacccaggccgaaggccagcacagag

SEQ ID NO: 122494 - RNA, 75 nt, Homo sapiens
ggcgccccgccggggccgcccaccggggcccgcccagcggacccagagagggaccagggccaaagaagagccggg

SEQ ID NO: 122495 - RNA, 71 nt, Homo sapiens
gcgcccccaagcccacccaccagggaagcccgcacgcggaagcgccagagccgaaaaccaaccccggacca

SEQ ID NO: 122496 - RNA, 73 nt, Homo sapiens
cagaggcacaacaaacagggaggagaggccgagagaggagcagccgcaaccagccggacaggccgaaggcaaa

SEQ ID NO: 122497 - RNA, 90 nt, Homo sapiens
ccagcgccagcggcacggcccgccgcccaagaccccaggaaggaaaacaagcagaagcaacagcaaacccaggaaagaaaggacagcaac

SEQ ID NO: 122498 - RNA, 77 nt, Homo sapiens
gcgccacagaaaggacggacgcagaaacacaaaggcaaaacggaggaggcagggagagagcaccggacacagccagc

SEQ ID NO: 122499 - RNA, 69 nt, Homo sapiens
gagggcacggagaaacacaccgacagagaaaggaccaggcacagacaccacgaacagggaggaaagcca

SEQ ID NO: 122500 - RNA, 85 nt, Homo sapiens
aggcgcgaccggacgacgagaacccaacaccgagccccagcagggagaacccgcccggaggaagaaggaaggcgcgggccgggga

SEQ ID NO: 122501 - RNA, 69 nt, Homo sapiens
cagaggagagaacacggaccgcggcaagcgggagcggacccacccaagccaccgaacccggcccgacgg

SEQ ID NO: 122502 - RNA, 60 nt, Homo sapiens
aggcgaaaggacgacacgagggagcagaaaaccaaggagcaggccccgcgccaccgccag

SEQ ID NO: 122503 - RNA, 77 nt, Homo sapiens
agccgccagccgagaagaggcacacagacccgccagcccggaccccggggcagagcccagccccgccccgggccccg

SEQ ID NO: 122504 - RNA, 59 nt, Homo sapiens
gaagggaacaagaggggcagcaagggccaaaaggggggcagaaagaagaggaggacaac

SEQ ID NO: 122505 - RNA, 77 nt, Homo sapiens
gacagacggggccacccccacacgcccccagccaaacagggcaccgccgaccgaaaccgcaaacacacgacagaggc

SEQ ID NO: 122506 - RNA, 81 nt, Homo sapiens
cccgaccgagagaaccagcgccagccacgacggaccaaccccagcaaaaccgggagaagggagaggaccaggaggagagca

SEQ ID NO: 122507 - RNA, 61 nt, Homo sapiens
gaaagagagagacagacccggacgagagaggaggagaggagagccagagaaggacagggaa

SEQ ID NO: 122508 - RNA, 81 nt, Homo sapiens
gcgaaaggaagcaagcagcagaagagccaaggaaaaacagcaagaacccaaaagggaagcgcacaagccaaagcgagaggc

SEQ ID NO: 122509 - RNA, 72 nt, Homo sapiens
gaaggcccggcacacggacccggacccccacaccggagcagggccacgccgcagcgcagggagcaagaccgg

SEQ ID NO: 122510 - RNA, 69 nt, Homo sapiens
aggcccgcagcacaggcagcccagaccagccgcaggacaggccagccgaccagcagaccgaggaaggaa

SEQ ID NO: 122511 - RNA, 50 nt, Homo sapiens
cagagggaccggagggggacgcacagcggaggacgccgccagccaccggc

SEQ ID NO: 122512 - RNA, 52 nt, Homo sapiens
ggacagggggagaaacacccgaacgaaggaggcccccacagagagcacacaa

SEQ ID NO: 122513 - RNA, 74 nt, Homo sapiens
aacaacaacaacgcgaggaaaagagcagccgcccccgccggccggcccaacagaggagccaggaggagagaaca

SEQ ID NO: 122514 - RNA, 79 nt, Homo sapiens
gccgagcacgccggacaaggagaggagagaagaggggcaaggccaggcccgagagacagaggcagccgggggcaagcag

SEQ ID NO: 122515 - RNA, 62 nt, Homo sapiens
aaagacacaccgagcccaagacaaccaggggaaagcacgggacgagagaagggaaaaacaag

SEQ ID NO: 122516 - RNA, 63 nt, Homo sapiens
ggaccagcaaaacagaaagaggaggagaagggagaaagggcgaaccccaagcccgacggggac

SEQ ID NO: 122517 - RNA, 58 nt, Homo sapiens
ccggccggagccccagggccgaggaagaagaccgaggaaagcccgcagagccccaggg

SEQ ID NO: 122518 - RNA, 68 nt, Homo sapiens
gcgggacgcaacacgcgggaaaaacgggggacagcaacacaaggaagagcggccagccccggagggag

SEQ ID NO: 122519 - RNA, 79 nt, Homo sapiens
aaagcaacgaagaagacaaagaagcgaaaaacacaggcggacggaagacccggcaggaccagagcggggggaggacaac

SEQ ID NO: 122520 - RNA, 59 nt, Homo sapiens
aggggaggcgaagccgagagagcgggggaaggagcaggagcgacaggagggccacaaac

SEQ ID NO: 122521 - RNA, 58 nt, Homo sapiens
gccagaggggaggaaacacaagaagaagccaagaggggcaacaagacaccaggagcag

SEQ ID NO: 122522 - RNA, 53 nt, Homo sapiens
cccgccgccgcgagaagagggaacaggcacgccccacccgccagccgagcccc

SEQ ID NO: 122523 - RNA, 70 nt, Homo sapiens
aaaaacgaaagaacagcaccggaaccgaggcaggaaccgcagaacgaagccacaaagggacggagacaca

SEQ ID NO: 122524 - RNA, 79 nt, Homo sapiens
cggcgccagcccggcgggaaggaaaaccgcgcagagagcgaggggcacagaggcaggcacaaaaccacaagcgacaaca

SEQ ID NO: 122525 - RNA, 77 nt, Homo sapiens
aaaaacaggcggaccagaacggaaaggaagggcaaagcaccgcaccccaggagacgccggggaggcaagacggaggg

SEQ ID NO: 122526 - RNA, 76 nt, Homo sapiens
gcgaaggcggaggcccaggcccccagcgagggcagcagcgcccaagaggagcagaggaaaggcaagggcagaaaag

SEQ ID NO: 122527 - RNA, 78 nt, Homo sapiens
aaggggcagcgcaccagaaacggaaaaacagaaaccgaaaaggcagagaccacaacgacccagaaagcaccaaagaga

SEQ ID NO: 122528 - RNA, 88 nt, Homo sapiens
ccaagccgcacagccgcggcggcagcagcaggagagcgccgcccaagagagagaagagaggcgcgagggcagggaagaggcggacaag

SEQ ID NO: 122529 - RNA, 69 nt, Homo sapiens
ccaccaacacgaagacaccagagggaccccgaggaaacgcaacccggaacaagcacaaccaccgccaaa

SEQ ID NO: 122530 - RNA, 70 nt, Homo sapiens
ggggcggcgccaagcgggggccccgaggacggcgacggaggggcggcggagaaaccaccacaaacacgag

SEQ ID NO: 122531 - RNA, 74 nt, Homo sapiens
agaaaggcgacaaagggaccggacaagcaggcccaggcccggccaaagaccagcaaagcaagcaacaagaagca

SEQ ID NO: 122532 - RNA, 80 nt, Homo sapiens
cacgagaccgccaaccggaggagagaccaaccgaagcggcggcaggggccgcggcccggagcaacagaacgaggagccca

SEQ ID NO: 122533 - RNA, 76 nt, Homo sapiens
ggaggcgcgaggggcccgggggcagggcgccaggagaacgaacagacaagcacgccggagggaagagcgagggaga

SEQ ID NO: 122534 - RNA, 79 nt, Homo sapiens
acccaggccccgcaagaagggccgggggcgagccggagcgaccccggcagacccagaagggcagagccggaggagaggg

SEQ ID NO: 122535 - RNA, 78 nt, Homo sapiens
ccgaggcgcaccaagggcgaaggagccggcccaagcaggcccccacgggaacgacgccgcgagagccagggagccaaa

SEQ ID NO: 122536 - RNA, 62 nt, Homo sapiens
gcagaagaggggcagacggccgcaccgcgaggaacccgagcccaccggcagcaccgcaccgg

SEQ ID NO: 122537 - RNA, 65 nt, Homo sapiens
gcggagaacgccacagccgcgcaaagacacagcaggggccagacaaccagacccgggaggcaaga

SEQ ID NO: 122538 - RNA, 80 nt, Homo sapiens
cccgacccgccaagaagccgcgagcaccacaggcagagaaggacaagaccgaagcgaggcagagaaccgaggagaaggca

SEQ ID NO: 122539 - RNA, 34 nt, Homo sapiens
aggccgggaggagacagaggagccgccgcgccca

SEQ ID NO: 122540 - RNA, 77 nt, Homo sapiens
cagaagacacacgcggacaaaagacaaagccaagcccaaggcagagaaggcaaaagcaacaaccagcaaggagaggc

SEQ ID NO: 122541 - RNA, 78 nt, Homo sapiens
ccgcccgggcacgcccccacacggcccagaaccgggacaacccagcaaacaggccagacccgacaggagcgacaaaca

SEQ ID NO: 122542 - RNA, 59 nt, Homo sapiens
cgcgccacccggggccgccgcgcaggagcccccggagcgaacacagcccggccagcggg

SEQ ID NO: 122543 - RNA, 79 nt, Homo sapiens
ggaggagggggcaggagacaagccggaaagacaagcacagcccgaccaggcccagggcgggacaacgacccgggacagc

SEQ ID NO: 122544 - RNA, 71 nt, Homo sapiens
cgaccaggacagagaggcagggagccagaagccagacgccgggaaggccaaacccagacacaggaaaaccc

SEQ ID NO: 122545 - RNA, 88 nt, Homo sapiens
ggcagggcaccgcgcgaagcggccaaagccgcccagacggccaccggcgggaggaacaaaagaaggacagaaaacgggccccagacac

SEQ ID NO: 122546 - RNA, 78 nt, Homo sapiens
caaaacaggacggcgaacacaaccagaggccaccggcagcccccaccccgcacacgggcccgccccacaggcccaaca

SEQ ID NO: 122547 - RNA, 59 nt, Homo sapiens
aagaggacgacgcgacacaaacaaaaggggcgccccacgcccccaccaaagcccagaag

SEQ ID NO: 122548 - RNA, 76 nt, Homo sapiens
gggcgcgcccggccgcgacgcccgggacccagagcgggcagagcccaaaaggcagagcgaggagagaagaaggagg

SEQ ID NO: 122549 - RNA, 76 nt, Homo sapiens
ccagaccgggcagaagccacccgcagaaacaggagggggaagaagggaagccagcagagccacagcccacaccagc

SEQ ID NO: 122550 - RNA, 73 nt, Homo sapiens
ggagagccacaaaaaaggaagcgaaaagcccaacgaaagggaaggcagaacagccggagccagacgcgaacag

SEQ ID NO: 122551 - RNA, 88 nt, Homo sapiens
cgcagccgcgggcagaggcgggccgccgagcggacccggaccgggggcaaaacacgcagaaccaaccagcaacgccacgggagccaag

SEQ ID NO: 122552 - RNA, 81 nt, Homo sapiens
ggacagacccccgaaggccggcggccagcgagcgacggcagagggagacgcgcacggaccggaaccagaacaagacgaaag

SEQ ID NO: 122553 - RNA, 77 nt, Homo sapiens
ccgagagcgggaacagcccgaagggccgaggacaagcagcgggaggaacaaccgcaaggacgcaggcgaagaagacc

SEQ ID NO: 122554 - RNA, 79 nt, Homo sapiens
ccagccccgcgaggacagggccagaagcccccaggaggagaacgagcaacggaagccagaagaagcacccccagcaggc

SEQ ID NO: 122555 - RNA, 63 nt, Homo sapiens
aggaacagagcgagggaggagagagggagagccaaagaaggcgcggaggcggaggccacccag

SEQ ID NO: 122556 - RNA, 81 nt, Homo sapiens
gccgacggccacacggcggccgcagggcgccggagccccccagcacaacaacagcaacggaggcgggaccggaacaggcac

SEQ ID NO: 122557 - RNA, 80 nt, Homo sapiens
cgagaccccacaagacgcaccaacgcaagccggccaggggcaaaggagaggaagaggaagaggaagaggcagcggcgcgc

SEQ ID NO: 122558 - RNA, 75 nt, Homo sapiens
cacaacgaacgcaaaccccagaaagcagcggagccaaccagggggggcacgaacaacaagacaagcaaccaagaa

SEQ ID NO: 122559 - RNA, 51 nt, Homo sapiens
ggaacgccacggacgggccaacaagccaaaggaagagccacggcacaagac

SEQ ID NO: 122560 - RNA, 84 nt, Homo sapiens
aaccagggccaggcgaggaccaacccaccccaaacagaccccgacagaagaaggaaggcaccagaccagaaaccgaaaaagcag

SEQ ID NO: 122561 - RNA, 72 nt, Homo sapiens
caacgcaagaacaaaccagcagcaaggaaaagaaggaggccagcgggacacacaaagaaagacgaaggacac

SEQ ID NO: 122562 - RNA, 84 nt, Homo sapiens
cagacagcgggacagcgcgagaagccggggaaccaggaggagaggggaggaggggcccagcgaggcagaacggacaccggaccc

SEQ ID NO: 122563 - RNA, 74 nt, Homo sapiens
ggacaccacgaaaaaccagccagcggcgacgacacggccaggaaacccaccagagaaggcgcggccacccagga

SEQ ID NO: 122564 - RNA, 76 nt, Homo sapiens
aagcgcccgcgaccggaccgccccggggaaacccgggcgccgccaagagccgcagaccccgaaagcccagaccgga

SEQ ID NO: 122565 - RNA, 74 nt, Homo sapiens
cgcagcccacagagcgaccagaaggcacaggaggccagcaccaacccaaacggcaaagagaacgcgcacacagg

SEQ ID NO: 122566 - RNA, 80 nt, Homo sapiens
gaaagagaaagagggcacgaagaagacacagagagaacgagaaccagagcagcaggggcagcaaagcgccggcacaggcg

SEQ ID NO: 122567 - RNA, 62 nt, Homo sapiens
ggacagcagcccggggcaaccggagccccccaggaggaccggaagccaccggcagccacaag

SEQ ID NO: 122568 - RNA, 80 nt, Homo sapiens
acagaggggaacagacaggccccagccgcaggccacaggcgccaagaagccgagacaagccagaaaagccaaaaaccgac

SEQ ID NO: 122569 - RNA, 48 nt, Homo sapiens
gcaaacggaccagaccgaccaccaaaagagccacaccccgggaggaaa

SEQ ID NO: 122570 - RNA, 56 nt, Homo sapiens
cgccgaccaacacccgaggcggacgcagagacaggaaccccaggagcaaaaagaaa

SEQ ID NO: 122571 - RNA, 52 nt, Homo sapiens
cgggagaaccaggccgaagggggccggaaacccggcccggagcccagggcgc

SEQ ID NO: 122572 - RNA, 73 nt, Homo sapiens
agggagcagcaagacaacacgcagagaaccagcaacagaaacccaccaaggagacggcggccaaagggagggc

SEQ ID NO: 122573 - RNA, 76 nt, Homo sapiens
agcgagacccggccccccacccacggcggcccacaggcagacgccaaggagcaagcccgccaacccgccaaccgca

SEQ ID NO: 122574 - RNA, 82 nt, Homo sapiens
cgccgcccccgggaggccggcgccgcagcccgggcccaggccccggcagcgccgggacaaggaacgcgaagggaagaaaaaa

SEQ ID NO: 122575 - RNA, 60 nt, Homo sapiens
ccgagcagaacccgaggcgcggcggcgaggccaccaggcaacgcaccaacaacaccacac

SEQ ID NO: 122576 - RNA, 83 nt, Homo sapiens
cgggccggacccccacccgccgaggggcccagggaggacgcggcaagcgagcccaacaagaagcacaagaaaggcgaaaacac

SEQ ID NO: 122577 - RNA, 47 nt, Homo sapiens
ccgccagcccaaacaacggcccagcccgccggagaacgaggaaaggc

SEQ ID NO: 122578 - RNA, 83 nt, Homo sapiens
aagaccgaccgccgccgcgcaccgcgagaccaggcccaggaaggaacgaggaagggccagaacggagacggggcgcgccgaga

SEQ ID NO: 122579 - RNA, 74 nt, Homo sapiens
agaaggacgccagcggagaacgcggcaaagcgagaaacccaccgaacacaagacccaccaccccaggcaaagcg

SEQ ID NO: 122580 - RNA, 52 nt, Homo sapiens
agggccaaagaagggagaccccgacacccagccagccccagcccggagacca

SEQ ID NO: 122581 - RNA, 71 nt, Homo sapiens
gccacgaaaaggaaaggaacagcgagcggaccccgaccccgaggcgagacggaaaggaaccaagcagaagg

SEQ ID NO: 122582 - RNA, 71 nt, Homo sapiens
agggcaggccggagcgagaacgccgccgaacgccgcccgcacgccgccggcacagccgaaaggaacaacgg

SEQ ID NO: 122583 - RNA, 80 nt, Homo sapiens
ccgccagggagcccccgcgcgcccggccggcccggagcaccgagccgcggcacggaggaggcgggaagcgggggcacgcg

SEQ ID NO: 122584 - RNA, 74 nt, Homo sapiens
gaacgcaccccagagccgacccccaccgcaagcaccagcagacggaacaacgagagaaaacggggaaagacacc

SEQ ID NO: 122585 - RNA, 80 nt, Homo sapiens
caaagcagccaacaccagaagaagggacaaaagagagacaagagagacaccccaaccgacaaagagcaccagacagccgg

SEQ ID NO: 122586 - RNA, 70 nt, Homo sapiens
ggaggaggagaccgcgaaccgacgacgcccccaggggggaaagacaaggagccgggccgagaaaccgaac

SEQ ID NO: 122587 - RNA, 82 nt, Homo sapiens
gccgacgccgaggcccaccgccaccgagaccagagccgcgggcgccgagaaggacgcgcgcggggggcgagacgccccagcg

SEQ ID NO: 122588 - RNA, 69 nt, Homo sapiens
gggccccgagcagggggggggggaagccgcagcggaaagcaggagcacagaagcggcaagcacgcaggc

SEQ ID NO: 122589 - RNA, 38 nt, Homo sapiens
gacgggaggagcagcaacaggcaccgggaaaacgcaga

SEQ ID NO: 122590 - RNA, 57 nt, Homo sapiens
gcgggaggaggccgccacagaacaccggcagagagagagacacaccagacgagaaag

SEQ ID NO: 122591 - RNA, 71 nt, Homo sapiens
cgccgaggccgccggagggcaacaacgcggccacccgcccccggcgggcgaaagagaagaaggagcaaaac

SEQ ID NO: 122592 - RNA, 52 nt, Homo sapiens
cagagagacagaccaagagcccgaggcaccacccaagcggggcccgccacgg

SEQ ID NO: 122593 - RNA, 75 nt, Homo sapiens
gaagcgcggcagggagcgcgggggcccgcgcagcagcgaccacggacaaaggaggcaccccccagacacaccaca

SEQ ID NO: 122594 - RNA, 84 nt, Homo sapiens
cccaagcccgcgagcaggagagggaagcgcaacggccaagggcaaaaggaagcaggaaagaagggcccggcaggccaacaggcc

SEQ ID NO: 122595 - RNA, 76 nt, Homo sapiens
gaaaagaccaaaacggacgaaaaggaggacgacacaggaagcccagcgccacagagacggagcaaagaacggggga

SEQ ID NO: 122596 - RNA, 78 nt, Homo sapiens
ggagccaagaaagagaagacaaagcagagcccacagacaaggccaaaggcaaagcgcacagaggggcccaggcagaga

SEQ ID NO: 122597 - RNA, 82 nt, Homo sapiens
caaaggccgcagcgaagaaaaagagggcaggcagcagagacgcagaaagagcgcggaagggcagaaacggccggaacaaaga

SEQ ID NO: 122598 - RNA, 89 nt, Homo sapiens
gggccgcaagacccaagaagaagaaggcgaaggaccccaacggggaggccaacggaagaaaaaagcgccaggcaggcaggaaagcgccg

SEQ ID NO: 122599 - RNA, 67 nt, Homo sapiens
ggacccacaccagcaaaaggacagggagaggaacgaaagagaaccagagcaccccaggaagaaacag

SEQ ID NO: 122600 - RNA, 74 nt, Homo sapiens
cggcaggcgacgaggaggcggagcggacaaaggaacaaggcacaaggagaggggaccaccaggaagagggacgc

SEQ ID NO: 122601 - RNA, 59 nt, Homo sapiens
gcccgacgcggaccccagaccaaggccggacccagcagggcccccggaacaaacccggg

SEQ ID NO: 122602 - RNA, 67 nt, Homo sapiens
acaaagccgacacgaaacacagggcaggaccaacgagaaacaagagaggaggaaccacgaaagacgg

SEQ ID NO: 122603 - RNA, 66 nt, Homo sapiens
caccagaagaccgccaacaccccaggaaagaagaaaagcgacagagcggacccgagcaaaagcaaa

SEQ ID NO: 122604 - RNA, 72 nt, Homo sapiens
cccgaccaagcaggcagggaaagagaaaggagaccacaagaccccgcgccaccaaagggagggcggccaacc

SEQ ID NO: 122605 - RNA, 52 nt, Homo sapiens
acccagccccacggcggaagccaaaacaagcagaagcaagaagagaaaaacc

SEQ ID NO: 122606 - RNA, 74 nt, Homo sapiens
cggacgcagaagaacaaggggaggggccccagaacagacacaaggcaagcagaagaggaacagaagaagcagag

SEQ ID NO: 122607 - RNA, 57 nt, Homo sapiens
caaagcccaggaagccgccgaaccaggagaagaccccgcccgcggcagcacagcgga

SEQ ID NO: 122608 - RNA, 69 nt, Homo sapiens
ggcaaccgagcccccacagcacccaccgcaagccccaagcgcggagccagcgcccggcaaggagcgagc

SEQ ID NO: 122609 - RNA, 60 nt, Homo sapiens
gagagaagcgcaggcgccaagcggaggacacaaggacaaaccggcgaccacacacgggga

SEQ ID NO: 122610 - RNA, 68 nt, Homo sapiens
aaaacgaagacaccaagcgggacccaaagcgggaaccaaaggcacggagaccgcccagggcgaaggaa

SEQ ID NO: 122611 - RNA, 88 nt, Homo sapiens
gcccaggaagggcgacgagaagccccaacagcacggcgggccccagcccggcaggcagcggaagagaaagaccgaggcaaagaagcag

SEQ ID NO: 122612 - RNA, 43 nt, Homo sapiens
ccgggagccgacagccgcgccgggaaagcgaagccaacaaaga

SEQ ID NO: 122613 - RNA, 77 nt, Homo sapiens
acagaccgcgggcccggacacgaccaggccaaggaaaaggaacagagagagcagaaccgaaacggggaaagaccgaa

SEQ ID NO: 122614 - RNA, 70 nt, Homo sapiens
accacccaaaaggccgggcccaaagaggggaacggcgagggaacccaggaaggagggcgacaaacaccag

SEQ ID NO: 122615 - RNA, 93 nt, Homo sapiens
ggaagaaccagaggaacgggacaaagcggccagggagcacagaagaacccaacgccaccaagcgccagaacacgaaaggaacaaagagcccgg

SEQ ID NO: 122616 - RNA, 72 nt, Homo sapiens
agaacggcgccggcacgagggcaaagaagaaggcacaagaaagcagcgggcaaaaaaaagggcaaagaccac

SEQ ID NO: 122617 - RNA, 86 nt, Homo sapiens
ggagaccagcacccagaagagagaccgcaacgagaacaaagggccgggagcgaggccacccaccccaccagagccggacaccagag

SEQ ID NO: 122618 - RNA, 77 nt, Homo sapiens
ggagcgaagcagaaacacagagagaccaggagagaggcgcagagggcaaggggggagagggcagaaaccagcagcgc

SEQ ID NO: 122619 - RNA, 48 nt, Homo sapiens
gaacgaccgagggccgacagccagagcaaacacacagcacagagcccg

SEQ ID NO: 122620 - RNA, 66 nt, Homo sapiens
aagaccagagaaggaggagggaccacgcgcgaggccaagacaaggggcgcagagcggggggacagg

SEQ ID NO: 122621 - RNA, 76 nt, Homo sapiens
acaacaaccaggggaggaacaagagcgaaggacaaacacggcaggaccacggcacgaacaggacaggcgccaaccg

SEQ ID NO: 122622 - RNA, 68 nt, Homo sapiens
caagaccagcacgaagaagccacagccgcacggacccccagggagggaacagcaaagcccaggaaacc

SEQ ID NO: 122623 - RNA, 80 nt, Homo sapiens
cagcaggacccaaggagagcagcggaggcgacgcgcccagaagcaggaccacgcaagacgggcaaggcgagcccgcagac

SEQ ID NO: 122624 - RNA, 98 nt, Homo sapiens
ggcccagcaccccagcggccaccgcgggagaacacaaggccagcaccggacccccgcacaacccgcccgagacgagaacaccaagccggagcccaaac

SEQ ID NO: 122625 - RNA, 68 nt, Homo sapiens
aagcccagggcggcaaagggccacaggcagcggcaaggccccacgggcggaggggaacaccacgacca

SEQ ID NO: 122626 - RNA, 31 nt, Homo sapiens
aaagcggcgcaacgagaaaaccgagaacagg

SEQ ID NO: 122627 - RNA, 76 nt, Homo sapiens
aggcccggccgacggccacacggcggccgcagggcgccggagccccccaggaggagggagaggaaaacgggaaacc

SEQ ID NO: 122628 - RNA, 78 nt, Homo sapiens
aacgcacccagcaccgagccgagccggaggcgccgagcgccagcaaagagagaggaggcccaccagcccggccgggcg

SEQ ID NO: 122629 - RNA, 28 nt, Homo sapiens
ggaccaagaaccagacagagagacaggc

SEQ ID NO: 122630 - RNA, 69 nt, Homo sapiens
aaagccgccaaggcagcagaacacggcggagccgaaagcaccacaacacacaggaccggaaccgcgggc

SEQ ID NO: 122631 - RNA, 73 nt, Homo sapiens
aaaaaggacacccaaggagcacaagagcgccccaagcaaggaagcgacaggcagcagacgacaggacggcaga

SEQ ID NO: 122632 - RNA, 60 nt, Homo sapiens
aggagacgacggacggcgggcaccggccgacgaggccggacggagacagagacagagagg

SEQ ID NO: 122633 - RNA, 74 nt, Homo sapiens
gccggcgcgggggaggggagcccgcgcccgccgcgggagagaggacggggggcccgggcgaaaccggaccgggc

SEQ ID NO: 122634 - RNA, 80 nt, Homo sapiens
agacaggccaaagccagccgggccaggaccaaagccgggacccgagaacaggcacagaaccaccaccagcgcggaacaca

SEQ ID NO: 122635 - RNA, 56 nt, Homo sapiens
gcggcgccgccaacgcgcccccgagagcacacacacggagccgccaccaaagcgga

SEQ ID NO: 122636 - RNA, 80 nt, Homo sapiens
aggcagccccgcacgagcggcaaccgaaagccagcagcggaaagagccgcagacgcacagcaaccaccggacccgaaggc

SEQ ID NO: 122637 - RNA, 79 nt, Homo sapiens
gccccagacagaacgaggaacaaaaacccccaccgggaaaaaggggaagcgcaggcccaggggaagacagggagcagcc

SEQ ID NO: 122638 - RNA, 38 nt, Homo sapiens
ccgacagccgcagaacgcggaggcagggcgcgaccggc

SEQ ID NO: 122639 - RNA, 83 nt, Homo sapiens
aggcaaggagcggcagacagccaaccggaccccggcacgcgagcaccgcaccaacgaccgaagcaccaggcacacccacaagc

SEQ ID NO: 122640 - RNA, 81 nt, Homo sapiens
gcgggaacaagaggcagcccccaacccaagggccgacgagggggcggggcggcaggaagaaaagcgacagacaacaggagg

SEQ ID NO: 122641 - RNA, 82 nt, Homo sapiens
gccagggggaaaggagcaaacccagaacaagcacaaccccaaaaaacaccaccaaccaagacgaccagagccccgcgaaaag

SEQ ID NO: 122642 - RNA, 56 nt, Homo sapiens
ggcgagaccagagcaacagcagcagcagagccaaagaggccgaccaagcagaaccc

SEQ ID NO: 122643 - RNA, 73 nt, Homo sapiens
aagaagaagccagacaaagagagaagaggcgggagcacggagccaagcaaggagaaaagccgacaggcaagac

SEQ ID NO: 122644 - RNA, 87 nt, Homo sapiens
gcccgccagccagagcccacgcagcaacaagggcccccgacgggcgcggccgaggcaagaaccggcgagcagcgagcagcgacaggc

SEQ ID NO: 122645 - RNA, 85 nt, Homo sapiens
cccaggccgcgccgagcccgccgcgcgggcccgcccgacgcggaaggaagagagaagggcacagaccaagacaacgaaccccggc

SEQ ID NO: 122646 - RNA, 54 nt, Homo sapiens
agcaaacaaaaagaacggccagggaaaacaaagggaccagaaacccacaacaag

SEQ ID NO: 122647 - RNA, 73 nt, Homo sapiens
gcgacgggcccacacgcgcacacccacccagaagaacgagccgagcccacggagcgagaacaccggcagagag

SEQ ID NO: 122648 - RNA, 73 nt, Homo sapiens
gggcgcagcagaaagcaaaccagcaggcaccaaggaaagcagaagacaaggagacaacagccacacaaagcag

SEQ ID NO: 122649 - RNA, 77 nt, Homo sapiens
caccgccggccggcggccggagaaacgaggagccagcgaaggagaggaaaagaggacaaggcaagggaagcacagga

SEQ ID NO: 122650 - RNA, 69 nt, Homo sapiens
gaaaaaaaagaagaggacaagacagagaaggagacgccgagagcagaaacccggacgacggagaacccg

SEQ ID NO: 122651 - RNA, 59 nt, Homo sapiens
ggcgcaacacacacagcagcaacagccgcacaggccaccccagagaagaggacgagaga

SEQ ID NO: 122652 - RNA, 57 nt, Homo sapiens
gaagacgaaccaggaccaagccaagaacaggaagaagaacggccaaggaaaggccag

SEQ ID NO: 122653 - RNA, 71 nt, Homo sapiens
gcaggcccgcgggggagacgcagccgaacagccagcaaagacaagagcagaccagcagccgcagcgcgaca

SEQ ID NO: 122654 - RNA, 73 nt, Homo sapiens
gggccgagcacagcagagaacaacccgaacaggaggaagaacccacgaaacacaggagaaacgaccaagacag

SEQ ID NO: 122655 - RNA, 74 nt, Homo sapiens
gcggcaccacggggacgcaaagagccgagaaggacagagggccagccccaggcccaggcaaaaagcaaaacaca

SEQ ID NO: 122656 - RNA, 86 nt, Homo sapiens
gccgaacccagcgcgcagcgcgcaggaaccccccaaacgcaaaagccgccccaagggaccagaagcagcagccccagaagccccga

SEQ ID NO: 122657 - RNA, 82 nt, Homo sapiens
cgggacgcggcccggagccgggaccggggaagcgagagaagcagcaacgcggagcaagagaaagaaacccggaaagaccaca

SEQ ID NO: 122658 - RNA, 60 nt, Homo sapiens
cagccggcccacaccagccacagacagggcccacgcacccaggcggagcacagcggcaca

SEQ ID NO: 122659 - RNA, 84 nt, Homo sapiens
caagagcacacgcgccccccgacgagacccgcaaccggagaacgccaagcgccgccacgacaagacagaagcgaaggggacagg

SEQ ID NO: 122660 - RNA, 77 nt, Homo sapiens
cagcccacggccccaccgggagagaccgaagccagcccaaacccaaggagacccggcgaccagaaagaaaaacaaaa

SEQ ID NO: 122661 - RNA, 81 nt, Homo sapiens
gccagggcggaaccaagcagggaaacgaaaaaggcaagcccggcgaggccaagcggaagcccacagagccacacgaagccg

SEQ ID NO: 122662 - RNA, 76 nt, Homo sapiens
cgaggagcagccaccccgggagccccgcccacgggacaccgaacagaaagggacaaagggacagagagccacccaa

SEQ ID NO: 122663 - RNA, 47 nt, Homo sapiens
gaaaccgcacgggcaacaacccccagccacaacgcgaaccgggcgga

SEQ ID NO: 122664 - RNA, 80 nt, Homo sapiens
ggcgggcgggagcggaggagcgcgccggagaacgacaccaagcccagcagacccgcggcacgggaggagaggagcgcacg

SEQ ID NO: 122665 - RNA, 62 nt, Homo sapiens
gggaggccagcggacgagagaccccagggaccaccgcaagaccggccgcaagagacaccaca

SEQ ID NO: 122666 - RNA, 74 nt, Homo sapiens
ggcagacccggaagccgaaccaacggagagagagacagagagggacacgaggaccaagcaagaagggacaaagg

SEQ ID NO: 122667 - RNA, 78 nt, Homo sapiens
caacaaaggacacacacaaggacgcccccaggcacggcggaccggagagggcacccacaagccccacagagggcagcc

SEQ ID NO: 122668 - RNA, 84 nt, Homo sapiens
cgaagaggagggggcgcggggccaccgcggcggagcccgagggggagaggcaccagcaacagaccaaccgcagcaagcacagag

SEQ ID NO: 122669 - RNA, 75 nt, Homo sapiens
agaaagccgcaaaaggccccaggagcaaggcacaacgagccagaaaagagcgccgccgcagcaacagggccggag

SEQ ID NO: 122670 - RNA, 78 nt, Homo sapiens
gacggagcagaagaagcgaagcgcgagacaaacgggggagaggaccgcgagacgcagacggagggagggagagcccac

SEQ ID NO: 122671 - RNA, 55 nt, Homo sapiens
cccgggccgcgccgccccgccccagagcgcacacaagagggaagcgcaaacgaac

SEQ ID NO: 122672 - RNA, 75 nt, Homo sapiens
aagagcaaggaagagaccaagcaccaagaaaacgccaaggaacggccggcaaagcaccaggcacagcaagcgccg

SEQ ID NO: 122673 - RNA, 71 nt, Homo sapiens
ccccagaccaggaaagacaggagccagcacgagacaacaagaccccacaccccacggagacaccagacgca

SEQ ID NO: 122674 - RNA, 83 nt, Homo sapiens
agacggaggagagacacacaccgggagagccggacagggcagcggccggcacaccgcgcgcgagcgcagagcgaagaagcccc

SEQ ID NO: 122675 - RNA, 73 nt, Homo sapiens
cgagcagagccgcccggccacggggaccccggagacgaagaacggaagcgccccagaggagagggcggagaga

SEQ ID NO: 122676 - RNA, 72 nt, Homo sapiens
gcgcgagccaagagcagggaagcgagagaagcagcaacgcggagcaagagaaagaaacccggaaagaccaca

SEQ ID NO: 122677 - RNA, 81 nt, Homo sapiens
gaagcagcccacgaaaggcagccgcggacgccgcgccagcgacaaacaaaggcagcgagaagaaaaagaagagagagacac

SEQ ID NO: 122678 - RNA, 81 nt, Homo sapiens
gcacccagggcggagccaggcagcgccccagacggccgcccccgggcagcccacccgagccccggcccggggagcagaccg

SEQ ID NO: 122679 - RNA, 74 nt, Homo sapiens
aaaaccaggaacggccaggccgaaaggggagccagccgcaggggccgagaacaaacaccaacaacaccagaaac

SEQ ID NO: 122680 - RNA, 82 nt, Homo sapiens
agcccccagagcgggaccacagccggacggaccccaggggcagagacgccacagggaccagccacgggccagggcgcggagg

SEQ ID NO: 122681 - RNA, 75 nt, Homo sapiens
agcccgggacggcaggaagaacaacacagccagccccccgagggagggacaagaggcgcagagggaccgagagga

SEQ ID NO: 122682 - RNA, 92 nt, Homo sapiens
gcgcgcggagcccgagcccggagcggccgacgcccgcccggcgcgcacacccgcggggcccggccggggacggcccgggagcaagcgcgagg

SEQ ID NO: 122683 - RNA, 73 nt, Homo sapiens
ccgagcccacgaacccgaagcccccaaagagagaaccggagagcacccaacagggagaaaaagaacaccgcag

SEQ ID NO: 122684 - RNA, 76 nt, Homo sapiens
cgccggacaagccaacaccacaccagagacgggggggaccacagcggaggggaggcggccgccccggcggaggaag

SEQ ID NO: 122685 - RNA, 75 nt, Homo sapiens
acacagaacggcgacgggaccacaggcaacagcgagggcggcagccccccaaccccggggcccgggccggcggcg

SEQ ID NO: 122686 - RNA, 79 nt, Homo sapiens
gagcagagccgccggggagggagccagaagcaacgagaacgagagcccagacagagaaagcagacacgaacaagccgag

SEQ ID NO: 122687 - RNA, 80 nt, Homo sapiens
cgcacacccgacacagcggagcgcccagaggcgagcccggggaggaagagcccggacggagcccccccggcgccggcagc

SEQ ID NO: 122688 - RNA, 79 nt, Homo sapiens
aggaaagcccccccgcgcaggccccggggcgcgacgcggaacacagggagaccgcaggaaggcaggagagacccccggg

SEQ ID NO: 122689 - RNA, 78 nt, Homo sapiens
gggaccagcccccaacagcggagcaaacgcagcacacagacagaggcccccaagggaggacaaaaagcacgcccgcca

SEQ ID NO: 122690 - RNA, 74 nt, Homo sapiens
cagaaccgagccagaaccgagccgaaagaagaaaaaccgccgagccaggcagagaggagggcaaaaagacaaac

SEQ ID NO: 122691 - RNA, 82 nt, Homo sapiens
aaaaaaagagcccgcaagaagaacagagacagcagccaaacccccagggagaggggacggccccaggagaaaccgacgcaaa

SEQ ID NO: 122692 - RNA, 70 nt, Homo sapiens
agcaggagcgaagccacccgggccgcagacacggcacaaggacaggccaagcccccacaagaggggccag

SEQ ID NO: 122693 - RNA, 78 nt, Homo sapiens
gcaaagggaagccggaagaaaggcgcaagcaacgacccacagagaaggaccagcaagcccacagacccaaaacacgca

SEQ ID NO: 122694 - RNA, 83 nt, Homo sapiens
gggacggccaggaacggggcgggccaagcagaggagaccaagacacaccaccccagggggggcccaaccaccaggacgaacag

SEQ ID NO: 122695 - RNA, 88 nt, Homo sapiens
gaaacgagagcgcagaacccgagcaagagaaaggagagagccggaaccaaaaagaagccccagagccggggccaggagccccaagcgc

SEQ ID NO: 122696 - RNA, 79 nt, Homo sapiens
cacgaccaggccggcaaaaccacacagggacaccccaggagacagaacagacagaaaaaacaacaagaaacccacaacc

SEQ ID NO: 122697 - RNA, 79 nt, Homo sapiens
agcccgggagcagaagggaggcccaagacccacaacaaaagacaggacacaaaggaaaaggaaaaaacaaggggaagac

SEQ ID NO: 122698 - RNA, 81 nt, Homo sapiens
agacaagcagggacgccacccaacagccaggcaccagaggaaagcgaaaaagaaagaacggccaagcccgaaaaccagcag

SEQ ID NO: 122699 - RNA, 83 nt, Homo sapiens
gcgggcggggcagccggaaggccgcaccaagcgcaaggaagaaggagaaagggccaaccccgaagaagcaaacagaaacgaag

SEQ ID NO: 122700 - RNA, 71 nt, Homo sapiens
ccaggcagccgagcggagcggaagcggacgagggaagccgagaacgagcaaaaagcagaccccaccccgga

SEQ ID NO: 122701 - RNA, 63 nt, Homo sapiens
acgcagggcgcccccgcgagaaacgaacggaaggaaacagaaaccacggcgacaacggagaag

SEQ ID NO: 122702 - RNA, 72 nt, Homo sapiens
gaggcgacaggaaggaaaacccacagggaccaaagaaagcaccgccaggagacaccagggagccaacagaag

SEQ ID NO: 122703 - RNA, 69 nt, Homo sapiens
cgggccccgcccaggaagagcaacacaaccgcaaaaccaaaaaagaacggaagagaggacagcgagaca

SEQ ID NO: 122704 - RNA, 77 nt, Homo sapiens
gaaaagcggcccggcgccaagacccagcacaaacaccgggaaggcagggcagcccccaccaccggaagggcgaagag

SEQ ID NO: 122705 - RNA, 72 nt, Homo sapiens
acaagacaaacgacggaaaaggagagagaccagcagcgcagcgcccgcagccacgcaacacaagccaaccca

SEQ ID NO: 122706 - RNA, 82 nt, Homo sapiens
gaaaggccaaaacgcacagggaaggcacccagaaacgagaagccaaagaaccagacaacagagaggaccccagcagacaggc

SEQ ID NO: 122707 - RNA, 34 nt, Homo sapiens
caccccgcagggagagcagacagacagcgaacac

SEQ ID NO: 122708 - RNA, 75 nt, Homo sapiens
ggaggaggggagcagcgcgcaagcccagaagaacaggcggcgggcagagcgaggcagaaagaggagaagagccgg

SEQ ID NO: 122709 - RNA, 75 nt, Homo sapiens
gggggggcggcccggccccgcagagaggaaaacccaagacaaggaagggcaaagcccacagcacaagaggcgggc

SEQ ID NO: 122710 - RNA, 65 nt, Homo sapiens
caaggagagacacaaggcaaagagccaggcgacgccaggagcacaccgaaaagaaaggaaaaccg

SEQ ID NO: 122711 - RNA, 75 nt, Homo sapiens
ccccgagagccaagcggggcaggaccgagggagcagcgcggagggagagccagggggagaaggacggacccccag

SEQ ID NO: 122712 - RNA, 41 nt, Homo sapiens
ggcgccaagaacaccagagaaaaggccccccccaccagaac

SEQ ID NO: 122713 - RNA, 71 nt, Homo sapiens
ggaagcaccagcgaggaaggaaaagcgccagcagaagaaagcccgcaaagacagccccagcaccaaaggca

SEQ ID NO: 122714 - RNA, 39 nt, Homo sapiens
aaccaaaagcagggaaaccggcggggcggagcaccgagg

SEQ ID NO: 122715 - RNA, 54 nt, Homo sapiens
gcccagcccccgagcagcgggaacagggccgcaccacacccgggaccggcaaaa

SEQ ID NO: 122716 - RNA, 82 nt, Homo sapiens
aaacaacaacaacggccagaaacaacagggaaaagaacacacaaacaccggacaggagagagggcaagagacgacaagcaga

SEQ ID NO: 122717 - RNA, 76 nt, Homo sapiens
gaggcaaaaggacgaaagggaagggacagccacccggaggacgagggacgaagaaaagggcggaacaacacgacgg

SEQ ID NO: 122718 - RNA, 80 nt, Homo sapiens
aaggaggaggcgaaagagccgagcggccccccaccacgcgggcaggaagaagaaagcgagacgaaaacagaggcaaagaa

SEQ ID NO: 122719 - RNA, 78 nt, Homo sapiens
ggaaagccccagccacccacaaacagagagaaggaaccacccacgcaggcaggcgcgacaggagagaagaggagacag

SEQ ID NO: 122720 - RNA, 79 nt, Homo sapiens
gcgagaaacgcaagaggagcgaagcaacgaaacagccaaaaagcagaggaggagacaggcaaaagcagaccggaaaacc

SEQ ID NO: 122721 - RNA, 84 nt, Homo sapiens
gccaaggaagagaaaccagcaggcgaagcaagcacagccaacagcccacaagagacgaagagaccgcagaagcgaaaaggaggg

SEQ ID NO: 122722 - RNA, 68 nt, Homo sapiens
acaaaagaggagaaaaccgggcgcagccaggcaaacggagaggcaagaccagcagagggagccaccac

SEQ ID NO: 122723 - RNA, 36 nt, Homo sapiens
acaacaggaacaccaccaaagcggaccgcccccgaa

SEQ ID NO: 122724 - RNA, 79 nt, Homo sapiens
gacggccgccggagccgcgaggccaagagcaacgacaaggacagaacaccaggccccgaaggccaaaacccggagcggg

SEQ ID NO: 122725 - RNA, 73 nt, Homo sapiens
caccggcccccaccacaccacccacccgggaagagagaaggccacgcccgaccccaagcaacaacggggcagg

SEQ ID NO: 122726 - RNA, 80 nt, Homo sapiens
cggccccagcaccccagcgcgcagggccgccaggggcgccggacaaaaacgcggaggggaccagagaccaaaaaaaaaac

SEQ ID NO: 122727 - RNA, 81 nt, Homo sapiens
cgagcgcagcaccaaccgcagggaacaagaagcaacgcaccgagaaacaacagccaaccagaaaaccagaaacaccggcag

SEQ ID NO: 122728 - RNA, 106 nt, Homo sapiens
cgaccggcgaggggcaccgcgccagacgcccgagaagccaggcagcaaacacacagggcggagaacggaaaagcaccaggaagcagagaggaccgcagaagggaag

SEQ ID NO: 122729 - RNA, 76 nt, Homo sapiens
aaaacgccaaaaaacggagcaaagggcagcggcggagccgccaaggcggcgcagcgagccggagcccacggagagg

SEQ ID NO: 122730 - RNA, 72 nt, Homo sapiens
aggacaccaaacaccgccgccggaggggccacggggccggggagccaccaggagacagcccagacaagcagg

SEQ ID NO: 122731 - RNA, 74 nt, Homo sapiens
gccggggacaagagaagcgaagagccggaggaaaccacagagcagccagcagaagggagaaccaaaaggaaaag

SEQ ID NO: 122732 - RNA, 85 nt, Homo sapiens
cgagcgcgccaagcgcagacgagcgggcaaggcaaggcggaacacgaccagcgccccaaaaagagccgcagacgcacagcaacca

SEQ ID NO: 122733 - RNA, 66 nt, Homo sapiens
cccgcgccgcggccgagcagcggacacccagaccaggccgaagaagggccggcagccaaaagaaca

SEQ ID NO: 122734 - RNA, 51 nt, Homo sapiens
gagaacaaagcacacagacacaaggacggccagcagaagcaggcgagcccc

SEQ ID NO: 122735 - RNA, 76 nt, Homo sapiens
gggcgggaagacagaaccagggccgggggccaggccacagcgagggaccacaaggcaacgcggggggccggggacc

SEQ ID NO: 122736 - RNA, 69 nt, Homo sapiens
ccaggcagcagcagagccacccgcagccaaagaccacgggggccaaacaccaggagaagggcgagccaa

SEQ ID NO: 122737 - RNA, 62 nt, Homo sapiens
gggcccccgggggacggcaagcgcgacgccaggcgagaccgccagacccgggaagaggaaga

SEQ ID NO: 122738 - RNA, 81 nt, Homo sapiens
gaggacccagggccagcccgccgcagcaagagagagcaaggagcaggcgcagagcagagcagagcagggcggggaggcgag

SEQ ID NO: 122739 - RNA, 96 nt, Homo sapiens
gaaaaggccccgaagacagccaagaaaacaggaagagggggaggcaaagccgaaagggagaggcaacggaggagacaagaaccagacgggacaacc

SEQ ID NO: 122740 - RNA, 75 nt, Homo sapiens
cgggcccgaaagccaccgccagccacaccaaccccaaggacacgaccaacaggaggaaagggaagcaagcagaaa

SEQ ID NO: 122741 - RNA, 80 nt, Homo sapiens
gacaagaggaagaagaaggaccgcaccgggccgaggcgcccgccgggccaaggccgccacccaacaagaagaagggggaa

SEQ ID NO: 122742 - RNA, 73 nt, Homo sapiens
ggaacggcacggagccagacacaaaacggaagggcggaaaaggcaaaacagcgcaaccaagagagaggaagag

SEQ ID NO: 122743 - RNA, 76 nt, Homo sapiens
acacgccggcggccaagggggacgcggaagagacagcagaacaagagccaggaccggacaggaagggagcccgggc

SEQ ID NO: 122744 - RNA, 82 nt, Homo sapiens
gcggcccacggcgggcgcgcccagagggcggagcgcaaaggaaaagccaaggagacgggccgggaccagggaccaggccccc

SEQ ID NO: 122745 - RNA, 75 nt, Homo sapiens
gccgcccaggacacccaggcacagcacccggggcgaccggcccgaggaccgccgcacgaccaaacgcagaaccca

SEQ ID NO: 122746 - RNA, 74 nt, Homo sapiens
ccaggagcgccacgcgcggaaggcagcgcccagcagcgcaggagccggggcgacgggagagacacgccagcgag

SEQ ID NO: 122747 - RNA, 86 nt, Homo sapiens
ccacaggagaccggaggccaacggcagaagccaccacaaaagcgaaagggcacaccacaggccgcaacagaccaaagaaagacccc

SEQ ID NO: 122748 - RNA, 60 nt, Homo sapiens
ggcgggggcgcgggccgcgcgggggcgcaggcccagccgcgggggcgcgggaggggaccg

SEQ ID NO: 122749 - RNA, 39 nt, Homo sapiens
ccagagaaggagggaggagacgcaggcagaaggaaaggg

SEQ ID NO: 122750 - RNA, 44 nt, Homo sapiens
cagccgcaccaccacacaaaagaccaagcgacacccgccgcaag

SEQ ID NO: 122751 - RNA, 61 nt, Homo sapiens
ccgacagccgcagaacgcgaccaggccgcgggaagcgcggacgccccaccaacggcgcgga

SEQ ID NO: 122752 - RNA, 81 nt, Homo sapiens
ccggaaaaagcaagcgaagacacaagaagaccgagcaaagagaccccggaacggagacccgaccaccggaagccacggccc

SEQ ID NO: 122753 - RNA, 57 nt, Homo sapiens
ggccacccccgggcagcgggccgcccggcagcagaaccaagccgccacagggagaaa

SEQ ID NO: 122754 - RNA, 72 nt, Homo sapiens
cggcaacgaagacgcagggcacgagagaaacagaggacgaccgggaggacaagaagaggaagaggaccacaa

SEQ ID NO: 122755 - RNA, 83 nt, Homo sapiens
gagcggccagcgagagccagggcccaaagaaccggggccggccgcgcgaagacgcggaccacggccacccacggcgccgacac

SEQ ID NO: 122756 - RNA, 66 nt, Homo sapiens
gacgccaaggaagggaggagagaggccgcaggcgagcagaaccagcggcagagcagccggcccagg

SEQ ID NO: 122757 - RNA, 74 nt, Homo sapiens
ggacagcccacgggaacaagaggggacagaaaggaaagagaagggagggcgacgagagccgaagcagaggccaa

SEQ ID NO: 122758 - RNA, 43 nt, Homo sapiens
acaacgcgcaggccgcaggcggaaaaagagcacagagcagaaa

SEQ ID NO: 122759 - RNA, 70 nt, Homo sapiens
cagaccggagccagacagcagccaagagacccggaaaagaaaaccagaggggcgaagagaaagaaaacga

SEQ ID NO: 122760 - RNA, 72 nt, Homo sapiens
cgaagcaagcacacaacaaacagaacgcaaaggcgacagcccaaaaaaaaacacagaagaacaaagacaagc

SEQ ID NO: 122761 - RNA, 77 nt, Homo sapiens
aacaagcggaggacaaggcagaagacagagcaacgaggccgggccggaaaagagagaaaccacacaccaaggacgga

SEQ ID NO: 122762 - RNA, 79 nt, Homo sapiens
gacgagcggagaaggccacaccacgcagaacgcaacaccaaggcacaccaccccagacaaacggacagcccagaaaaga

SEQ ID NO: 122763 - RNA, 64 nt, Homo sapiens
aaagagaacacccccgagcggagacagagggaaaagaggacgaggcgcgaaaaggcaaaggcaa

SEQ ID NO: 122764 - RNA, 74 nt, Homo sapiens
gcagccaagcaggaccacccaccagccaccagggcaacgagcaaccaaaaccacggaagaaaacccagaagaaa

SEQ ID NO: 122765 - RNA, 85 nt, Homo sapiens
gcgcggcgcggcggccgggccccgagacggggacgagcccagcccgacccgcgcggggacgaggccgcggcgaggacgcgcccca

SEQ ID NO: 122766 - RNA, 74 nt, Homo sapiens
ccaggacccacccgggcaaagaagagcaaaggcgagagccacagaaggaggaggggacagcagcaggagcccag

SEQ ID NO: 122767 - RNA, 79 nt, Homo sapiens
aggaccagggagggaaaagcagacccaagcggagggcgacacgagaacaaaagacgaaacggaggagcccaggaggaag

SEQ ID NO: 122768 - RNA, 68 nt, Homo sapiens
caggaagagagcggacagcaaggcgaggaagaagcgcagccagaacggccacaggcgggacccaccgc

SEQ ID NO: 122769 - RNA, 62 nt, Homo sapiens
cgggcgccgagccccagagcgcggaagaaggccgccaggcacgcagaagggagcaccgggag

SEQ ID NO: 122770 - RNA, 57 nt, Homo sapiens
aggagaagcgaggaacaacccggaagcaggccgacagaaacagcgaggccgcagcaa

SEQ ID NO: 122771 - RNA, 78 nt, Homo sapiens
gggcacgaagcaaccaggaggccaaagaggaccgagacaaaccacggggcgaagaaaccacgaaagagccagagaagc

SEQ ID NO: 122772 - RNA, 56 nt, Homo sapiens
cgagaaacaccgggcgggccccgggcgagcggggggcggaaacagggagggccaca

SEQ ID NO: 122773 - RNA, 90 nt, Homo sapiens
gaaccgggaggcccgccagaccagcaagaggaggggcccggagagggggaagggcccaaagccagaagaggagccaccgcgcccaggcgg

SEQ ID NO: 122774 - RNA, 40 nt, Homo sapiens
aaccaccggacccgcagccgaagacccagaaaccaccgcc

SEQ ID NO: 122775 - RNA, 64 nt, Homo sapiens
gaaggaccaagaaccaggacaagcacccccaggcagaggcgggcccgggagaagcggagaccaa

SEQ ID NO: 122776 - RNA, 78 nt, Homo sapiens
ccacgagcgcggggcacggcccagcggccgaccgcacccgcgcagccgcagcccagcgccccccccccacgcaaccgg

SEQ ID NO: 122777 - RNA, 75 nt, Homo sapiens
gccgacgccgcaaaggaacgagcagacggcccaccacggaaaggacgcacaggagaaagggaacaaagcagcaga

SEQ ID NO: 122778 - RNA, 78 nt, Homo sapiens
aaaaggcagaacccgagacaaccaccgggggccaccaccgaggaggcagcggaacgcgccgacgccgcaaccagcacc

SEQ ID NO: 122779 - RNA, 97 nt, Homo sapiens
aaagcaaaccaaggcaggagaggagccagcccccaccccacagggagacgacccggggaaggcgcacaacgggggagaaaggacgccaggaggaccc

SEQ ID NO: 122780 - RNA, 72 nt, Homo sapiens
aagaaggaagggaaaaaaaccaaagcaggacagagcaacaagaaggaggaaagaagagacaccggaaagcca

SEQ ID NO: 122781 - RNA, 53 nt, Homo sapiens
gcaagacaccggacaccgagggcccccaaaaggggacaccagcagcgccgccg

SEQ ID NO: 122782 - RNA, 62 nt, Homo sapiens
agaggccggcgggacgcgggcgccaggaccggccgaacgcagaggccacaaacgaacagcga

SEQ ID NO: 122783 - RNA, 89 nt, Homo sapiens
ccgggaagcggaccccagagggagaagcagacgggccagcagcgggcagacggggacagaagacccacgccgagccgcggcagaaccac

SEQ ID NO: 122784 - RNA, 60 nt, Homo sapiens
cgagccgaaaagcgagcgcgaggaaaaggcggcgggagggaccaaagcagaccacaaaac

SEQ ID NO: 122785 - RNA, 54 nt, Homo sapiens
ccggaagcaccagcgaggaaggacagcagaccacagcccggcaggcccaaaaac

SEQ ID NO: 122786 - RNA, 72 nt, Homo sapiens
ccaaagcagcaaaccgacgggacggcagggcaaaaaaacgcagacgggcaaagacggcggggcggaagaagc

SEQ ID NO: 122787 - RNA, 63 nt, Homo sapiens
cggccagagcggggcagccgcccaggagggaaaccacaacaaagggcgcccaggccccgcccc

SEQ ID NO: 122788 - RNA, 49 nt, Homo sapiens
gggagacacgggaccaagaaacagcaaaggcccgagagcccccagacag

SEQ ID NO: 122789 - RNA, 76 nt, Homo sapiens
acaaggaaaagagcccggaaagaagagacagagaggggagccaaacacaggaaagaccacagcaagaccacgcccc

SEQ ID NO: 122790 - RNA, 83 nt, Homo sapiens
cacccaacgcgaagacggaacccgggacgacggcacagggaccagaccagggaagacaacggaagcagcaggcacaaacaggc

SEQ ID NO: 122791 - RNA, 82 nt, Homo sapiens
aggcgcagcggcccagggcgccacgagccaggagaccaaggaccagccaccacggagaacacaccgcacagggaacaccaga

SEQ ID NO: 122792 - RNA, 77 nt, Homo sapiens
ccaccccgcacgcggaagcggcgcggggaggcccagcccgccgcagggccaccccgcggcccaccgccgccgccccg

SEQ ID NO: 122793 - RNA, 78 nt, Homo sapiens
cgaggcagaacacagagccacaggacccccgacagaagcgcgggaaggcagagaccgcagaaggcccaggaaacgagg

SEQ ID NO: 122794 - RNA, 88 nt, Homo sapiens
gggaacggaaggaaaccagagccagcgggccaagagaagaggcggggaggacacgacgcgcaaaggaccggaaggccaaaacaaggga

SEQ ID NO: 122795 - RNA, 83 nt, Homo sapiens
caagacgggcacgcacccagccgggcaagaccaacgcaaggacgacgagcggacgccagccaaagaggcccggggcccacaac

SEQ ID NO: 122796 - RNA, 83 nt, Homo sapiens
gagggcggagcggagacgggagaagaaaagacgccgggcccaagaagcacgaagcgggggcagcccaaagcaggagcggaaaa

SEQ ID NO: 122797 - RNA, 51 nt, Homo sapiens
cgcaaagaaacgaacaacgcgcaaaagaaagagcggaggacccggaccgga

SEQ ID NO: 122798 - RNA, 83 nt, Homo sapiens
ccacggccacagccgccgcagacccagcagccaagagggaagcagacgagagcaagggcgccagaacaaagaagagaaacgca

SEQ ID NO: 122799 - RNA, 70 nt, Homo sapiens
ggcaagagcgcccgcgccgagacaccccagccccccaggaagagcaagcgcggaccgagccgagagagca

SEQ ID NO: 122800 - RNA, 66 nt, Homo sapiens
ccggcacacaccacggaaccccgaccccagaccggagagaacagaaaaaaagcggcccgggaccag

SEQ ID NO: 122801 - RNA, 75 nt, Homo sapiens
ggcgcggaaggccggggagcgcggcagcgggacccgccggaaggcgagcacaggagaagaaggaggcccggagcg

SEQ ID NO: 122802 - RNA, 72 nt, Homo sapiens
agcccggagagcccagccagcgcccggcagcccgacgcgagccgccggagcgaacgagcccgaaaacgggac

SEQ ID NO: 122803 - RNA, 64 nt, Homo sapiens
gcaaggagccaccagcacggaccaggaggcgagcaacagagccaccaaaaccggcaaaggccgc

SEQ ID NO: 122804 - RNA, 77 nt, Homo sapiens
ccgccccgaggcgggggcgcggacgcggccgacacaacccgagagggccgggaagcggaaccagagggcccgaagaa

SEQ ID NO: 122805 - RNA, 82 nt, Homo sapiens
acaggagaaagaaggcggaacaccacaaggcaccgcaaggacacgcccaccaagaaagaaccggaaaggggaccgggccagg

SEQ ID NO: 122806 - RNA, 77 nt, Homo sapiens
aggcccaccgccgaacccgaaccacacgggaaccgagacggaaggccaaagacagacgggcccagcacacagggaca

SEQ ID NO: 122807 - RNA, 61 nt, Homo sapiens
ggaaaaagcagggaggagaggcaaaaagaagagccaaagggaccgggacaggggaagaaaa

SEQ ID NO: 122808 - RNA, 69 nt, Homo sapiens
gggcagaggcacgcaggggacgagagcgcggcaaagcagaaaacacagagaaaacacggagaaacagca

SEQ ID NO: 122809 - RNA, 84 nt, Homo sapiens
ccagcacgggccagaacccaaggagaaaggcggcgacaagcagaccggaagaccgacggaagaccacaccccgagggagcccag

SEQ ID NO: 122810 - RNA, 65 nt, Homo sapiens
caaaagccaagaggaggacagcgcacacagcaagcacgagaagccagcaggacacccgcaagacg

SEQ ID NO: 122811 - RNA, 79 nt, Homo sapiens
gccaagagagaccggagaacgcgacagagcggaaaaggaggagaaagccgcagccgaacaaagccgccgcgcaaaacaa

SEQ ID NO: 122812 - RNA, 69 nt, Homo sapiens
agggcagaagccgaacacgacagaaagaaaggccaaagcagcaggagaggagccaagcccaacgggacg

SEQ ID NO: 122813 - RNA, 73 nt, Homo sapiens
agggcagcggcggagccgccaaggcggcgcagcgcggagaaccgaacaacggccgcgaccagaaaaaggcacg

SEQ ID NO: 122814 - RNA, 71 nt, Homo sapiens
cgcgccaggcacagcagcagggcggagaacggaaaagcaccaggaagcagagaggaccgcagaagggaagg

SEQ ID NO: 122815 - RNA, 71 nt, Homo sapiens
aacacccacccgaagagacaacaacaaacaaacgaaaaagcggggaaaacaaaaaaaagaaggagggaaga

SEQ ID NO: 122816 - RNA, 119 nt, Homo sapiens
gggcgccgcggagcagcccccccgcgcccccgcccgcccgggacccgcggccccgccgcgcagacgacccacgagcaaaagaccggccaacaccgggagggagccgggccaagaagcca

SEQ ID NO: 122817 - RNA, 56 nt, Homo sapiens
ccaacccaagcgaagaagagcggaaaacaaggggcggaccggaagcgagcaggagc

SEQ ID NO: 122818 - RNA, 69 nt, Homo sapiens
gaacaagccccaggcacagaaagcagcacaagaggaacagaggggacgagcccgacgacgccaaacccg

SEQ ID NO: 122819 - RNA, 77 nt, Homo sapiens
cggacgccggagaggcaccggaccggaagaaaagcacgggaagcccaaacgccggcggcaggaggacagcgagaaaa

SEQ ID NO: 122820 - RNA, 71 nt, Homo sapiens
ccccgcagccagggcgaacccccgcaggggggaaccgaagagcaaggaaaagaaaagggggaaggaaaccc

SEQ ID NO: 122821 - RNA, 57 nt, Homo sapiens
ccgggcgagcgacccaggaaggagagagggccacccgcacggcagcaagaggaaagc

SEQ ID NO: 122822 - RNA, 69 nt, Homo sapiens
agcaagagagcacagcaaacccaagaagacggcagaacacccagcacgcccagaacgaccagaggccga

SEQ ID NO: 122823 - RNA, 74 nt, Homo sapiens
cccgcgcgccggagagccgcgcgcggacagcgcgacggcgcgcgggcggcgcggccggcacaagaagaagaaac

SEQ ID NO: 122824 - RNA, 80 nt, Homo sapiens
agagaaagaaggaaggagggccgagcgggaagcacaggagagcaggcacgaccccagcggcaacacggggcgaccggacg

SEQ ID NO: 122825 - RNA, 97 nt, Homo sapiens
gcaccacgacccagacccagcggaaaggagcgcgcccggcggggagcgcagcgcggagcccaaagggcacgcaaaaagaacagaggaacccaaggaa

SEQ ID NO: 122826 - RNA, 69 nt, Homo sapiens
agcagaagagaaggaagagccaggagggcgggaaaccaacccgcaaggcagaaccagcaagggaagggc

SEQ ID NO: 122827 - RNA, 76 nt, Homo sapiens
ggacagacgcacagacaccgcagcggagcggaggcagacacacacggggggagagggagggggggacacggccgcg

SEQ ID NO: 122828 - RNA, 84 nt, Homo sapiens
cccaagaggcagaggggaagaggaggaagggaggaaccaggggaccccccacggggaggacacagggccggagcgcgaagacgc

SEQ ID NO: 122829 - RNA, 79 nt, Homo sapiens
ccccaggaaccgacagaaccacaggagaaccccgcccaggaggcaaaaaggcccgagagagaaagggaaagaaggagcg

SEQ ID NO: 122830 - RNA, 51 nt, Homo sapiens
aacccgaacaaaggggcgggaaccgacgaggaccccagagacacgcccaga

SEQ ID NO: 122831 - RNA, 50 nt, Homo sapiens
ccagagagaccaaggaacagggcgaccgacagacaagaacggaaagcaga

SEQ ID NO: 122832 - RNA, 82 nt, Homo sapiens
aaaaagaggaagagaagagaacaacaaacagaggcagcaaaagaggcaaaagaggagaagagcaggcccagaaaaggcaaaa

SEQ ID NO: 122833 - RNA, 70 nt, Homo sapiens
ccacggaggaacggcagagcggaagccggacacaagagggcaagaaaggcgcgacgggccgaaaagggac

SEQ ID NO: 122834 - RNA, 75 nt, Homo sapiens
ccccaggagaaacgaggagcgcggccaccccccggacagccgaggaagaagaaggcagcagaaaagagaagagca

SEQ ID NO: 122835 - RNA, 67 nt, Homo sapiens
aaccggcagcaagagccagaagcaacaccaacgaacgaacaggccagccgcgacaggacaagggacc

SEQ ID NO: 122836 - RNA, 85 nt, Homo sapiens
cacaaccgcccaccacgccagccaccacgcggcgcacaacgcaggaacaccgcacgcgcggaggaggcgcagggcccagcggaag

SEQ ID NO: 122837 - RNA, 89 nt, Homo sapiens
gggcgaaacgaggaggagaaacgcggccgggccgaaaaacaaccaccagcgagcaaaaaggcaaagaccaagaccaccaagaagcgccc

SEQ ID NO: 122838 - RNA, 80 nt, Homo sapiens
acccaccacaagaacagaggcagacgacaccaggaacagcaggcaggccggagcgcgagaggcgcccgcacggcccccca

SEQ ID NO: 122839 - RNA, 86 nt, Homo sapiens
agggccgccgccagggaaggagccaccgcccccgcccgaccaggccgaggggcggagaacggaaaagcaccaggaagcagagagga

SEQ ID NO: 122840 - RNA, 84 nt, Homo sapiens
aacacggcccacacacccaggcgcggagggaagacgcccgggccaccaagcaaggccccacaccccccgagacgccagcaaccg

SEQ ID NO: 122841 - RNA, 85 nt, Homo sapiens
cgccgcgcaggccccaagagcagcaccagcccagcagaacccaggaccgggggccgggcgaggaggccgggagaagccgaagcgc

SEQ ID NO: 122842 - RNA, 76 nt, Homo sapiens
acagcaccagcgggccggaggagccagagcgcagaaagaacaaggaagccccccagaaaagaggcgaggcaccaca

SEQ ID NO: 122843 - RNA, 51 nt, Homo sapiens
agaagaggcaggacgacggaaggacagaacggaaaagagaaaacaaagcca

SEQ ID NO: 122844 - RNA, 77 nt, Homo sapiens
gacagccagccccggccgcaggaagcccggaggcgaggagagagcaccaggaagaagaggcggaagaaacaacaagc

SEQ ID NO: 122845 - RNA, 82 nt, Homo sapiens
gcggcggcggggcacgcggccaggcggcgacacgccaaccccggcgaggcgaggggccccgaaccgaggaccagcgggaaga

SEQ ID NO: 122846 - RNA, 64 nt, Homo sapiens
cccagcagcccaagagaaccaaggaaggagaagacaaaagcaagccgggaggcggcgccccccc

SEQ ID NO: 122847 - RNA, 74 nt, Homo sapiens
agaaaagaagccaaagggacacgggcacacgggcgaggggggggccaaccagcgacggaggggagccaaaggaa

SEQ ID NO: 122848 - RNA, 80 nt, Homo sapiens
gccacggaagcgcccagagccggggaccgaccgacagacagaccggagggagcagaagaccgcagagagaaagaaaaacc

SEQ ID NO: 122849 - RNA, 118 nt, Homo sapiens
cagaggccggggcgggcgcgccccgcggagccggagccgcagaggccccgggcggaccaggcccagacggggcgccagccagagcccgagaccgacagaggaaggccagaggccacag

SEQ ID NO: 122850 - RNA, 55 nt, Homo sapiens
gaccggacgggagggcggaaggaaccagccaggggagcccccacccgaaccagaa

SEQ ID NO: 122851 - RNA, 87 nt, Homo sapiens
ggaagaggcggccccgcggcgagccacgacgagacaagccccaggagcaccaccaacccgcccgaccggccgcagcacagagcccgc

SEQ ID NO: 122852 - RNA, 80 nt, Homo sapiens
gagcgcaggagggggggcacaagaagagaggcccaccaaaagacacgggaaacacccgggaggcgaggacaacgggcagc

SEQ ID NO: 122853 - RNA, 76 nt, Homo sapiens
gcagagcagcaccccacaggacaacccgaggagccaccagggccaagggcggagcacgagaaagcggcaccggcag

SEQ ID NO: 122854 - RNA, 68 nt, Homo sapiens
cggaaacacgacaagccaaagcaaagagagagaacccgagcgccgcagcggagaaagaaggaacgagc

SEQ ID NO: 122855 - RNA, 109 nt, Homo sapiens
gccaaggaaaaacggagagccacaaaaaaggaagcgaaaaaacccgagaggagcaggagcaaccgacaggcgggccggacagcgcgcccagcacaggagccgcacgcgc

SEQ ID NO: 122856 - RNA, 77 nt, Homo sapiens
ggacgccggggagacgcaggcgagggaaagcaggcaggagggagagcgccgaagaaccaccccccgccccgggcggg

SEQ ID NO: 122857 - RNA, 71 nt, Homo sapiens
caccaacaaggcccggacaaagccgaaaccaggaccagacacaagcaagcgcagccaaagcgacggaagaa

SEQ ID NO: 122858 - RNA, 76 nt, Homo sapiens
ggaaggaaccagccaaaaagcaaggacaaaaccgggaagaaaagaaaggagcaaagcaacagaagacaaggcgcac

SEQ ID NO: 122859 - RNA, 75 nt, Homo sapiens
cgaagaagacaagaaagagaggacccaaaaccagaacaaaccggagaacacgggggagagccccaggaaaggaga

SEQ ID NO: 122860 - RNA, 69 nt, Homo sapiens
aaggaccaagaaccaggcgagaaaggcgcacaccaagcggcgcacaggaaccaccaggacagccagcag

SEQ ID NO: 122861 - RNA, 88 nt, Homo sapiens
aggacgaggacgacgaggaggaggaggaggaggaaaaagaaaaggggagcggacgggcccaggagcaggagccacgcagacgggccgc

SEQ ID NO: 122862 - RNA, 63 nt, Homo sapiens
acaaacacaacggaaaggcggaagcacagccggggaaagggggcccgagggcaggacagcagg

SEQ ID NO: 122863 - RNA, 116 nt, Homo sapiens
cacgaccaaggggcgagagcccccaccccagacaggggaacagggcacagcccacccagaacgaccgaagcaggagcagagagcccaagaaaaacaggagaccagcaggaaacccc

SEQ ID NO: 122864 - RNA, 75 nt, Homo sapiens
cgccgacccacaccccgccagacgcaaaacaaaaggggccaaggacgcacacaccagagaaggcagaccaagggc

SEQ ID NO: 122865 - RNA, 68 nt, Homo sapiens
ggaaccgcggcgaaccggcgggaccccaaaaccggaacaccaggaacgacacaggagcccgagaaaag

SEQ ID NO: 122866 - RNA, 77 nt, Homo sapiens
ccgagaaaagcaagaaggaacgaaaagggaagcccggaagccaaaccacaaccggcacgggaggaagccggccgcca

SEQ ID NO: 122867 - RNA, 84 nt, Homo sapiens
gaacgcgcgcgcgcggacgcggcgccccggcacgagccagggagccgccgggaccggcccgggagacgacaacccaaaccgaaa

SEQ ID NO: 122868 - RNA, 81 nt, Homo sapiens
cgcggcggagagaagaggaccggcgggaaccgaccggcgccaccgcccagcacggagcccggaccaagagacgaggaaaac

SEQ ID NO: 122869 - RNA, 73 nt, Homo sapiens
aaacagagaggggaaggagcccagcgacacagcccaccgaggaagaccaaaggaccaaccaacaagaagcaca

SEQ ID NO: 122870 - RNA, 54 nt, Homo sapiens
aagcgagcagcagcgccgccagaagacaaggccgacgcgcacgaacacgggggc

SEQ ID NO: 122871 - RNA, 79 nt, Homo sapiens
caaagccgaacaggcagggccagacccaggggacgaagggaacccgccgggcggcccggcacccagccccccggcaccc

SEQ ID NO: 122872 - RNA, 59 nt, Homo sapiens
gaagagacgcacccgcgcgacggcaagcgacaccggcaaagaacagagcagcaccagca

SEQ ID NO: 122873 - RNA, 77 nt, Homo sapiens
ccaacaaaacagacaaggaaagagaaaacaagcacgggggccaaggagacaccgaccaaacgaaaaacgaccaccag

SEQ ID NO: 122874 - RNA, 77 nt, Homo sapiens
caagagcgaaaagccagaggggaaagaaccagacgacaggaaggcacagaacgaagccgcagaagccaaacaagcag

SEQ ID NO: 122875 - RNA, 70 nt, Homo sapiens
cgacccgagaccccgaaaagcgccgcagacagaagggggagaagcggaggccgggcgcagggccacaccg

SEQ ID NO: 122876 - RNA, 80 nt, Homo sapiens
cggcggagacagcggaagggaggcgcgcggcagcaggggcgacgaggcgggacgcaggaaggccaggaggagcaacaccc

SEQ ID NO: 122877 - RNA, 77 nt, Homo sapiens
aaacccagacaccgacgggccgcgaggggaagaggaagcaaagccaagggcaaaaaggcgaaggccaaccgacaaca

SEQ ID NO: 122878 - RNA, 70 nt, Homo sapiens
cgcggccagcaccccaacgggccaaaggcagcaggaggagccagagcagggcagaagacaagcaacgcag

SEQ ID NO: 122879 - RNA, 82 nt, Homo sapiens
cggcggccgccggggggccggggcgcggcggccgccaccaggcacccggaagagcgcggccgaagaaacaaagcaccaagcc

SEQ ID NO: 122880 - RNA, 80 nt, Homo sapiens
gccaagccgacccacacaggaggagggagcccaggagagacgcgcaagcacagcaaggcgccaccggaagaaacgggagg

SEQ ID NO: 122881 - RNA, 74 nt, Homo sapiens
cgagggaaaaaccccggaagggcggacaccccacacgccgccacccccaccggaggacccggaggagcacccga

SEQ ID NO: 122882 - RNA, 79 nt, Homo sapiens
gccgcggccccaacgcgccccgggacgcacacggcaccaaacaaagcaccgggaggaaagagagccacacgaagaacac

SEQ ID NO: 122883 - RNA, 70 nt, Homo sapiens
aaaaagccccagaccagagacagaagcagaggacgccaggaaaagggcgggggaccgacaaaaccaaggc

SEQ ID NO: 122884 - RNA, 76 nt, Homo sapiens
cagcggaaaacggaggaaccggccaggggccaggcgaaccagccgaaaaaggagaaaccaaaaggaaaagcgaacc

SEQ ID NO: 122885 - RNA, 69 nt, Homo sapiens
ccaccaccacagacccagacagagacgaagcgaaagaaaagccagggccagcggaagaagaggagccgg

SEQ ID NO: 122886 - RNA, 63 nt, Homo sapiens
gcacccccagcggggaccgcccgggacaacagcgcggggcacagcaacccacagagagagagg

SEQ ID NO: 122887 - RNA, 67 nt, Homo sapiens
ggaagaagggagccaacaaaaagcaccggacggcaagcacaacgcgcgacaagagcgaaaaaccaag

SEQ ID NO: 122888 - RNA, 89 nt, Homo sapiens
gaaaggcgagcggcccagagcaacaacacggagcagcagccccgagaaggaagaggaggaagcgagggcccgcgagggcgcaggaccga

SEQ ID NO: 122889 - RNA, 75 nt, Homo sapiens
aagggcagcaacgcccacggaccgagaaaaggcagcgcagacagaccccgcccagaacacacggggagacagaga

SEQ ID NO: 122890 - RNA, 64 nt, Homo sapiens
gcagccaggggggaaagggacaggggccgcagccagggcaggacccgaggcgccagcagcagca

SEQ ID NO: 122891 - RNA, 73 nt, Homo sapiens
cagccgaaccaaggaaccgcgagacaaagggcacacgccacgggcgccaacacagggcaccacaagccgaaca

SEQ ID NO: 122892 - RNA, 71 nt, Homo sapiens
ccgcaccaaacccggaaggaagcgccggcgaaagcaacgaagggacgccagaacaagagaaggagagcaga

SEQ ID NO: 122893 - RNA, 60 nt, Homo sapiens
gggacccggacaaccagaggcagccagcagggggagccccccagggcagggacgaggccg

SEQ ID NO: 122894 - RNA, 77 nt, Homo sapiens
cgcgcaccgccaggcgccccgggcgcggcaaggacgagccggggcgcgaagggccacaaccaaagcgggccacagac

SEQ ID NO: 122895 - RNA, 80 nt, Homo sapiens
aggggaggaaaaccgacgccggacaaaaaccagaaaaccagaaggcaccgacaggaaaggaaaaggagaaccaggcaccc

SEQ ID NO: 122896 - RNA, 72 nt, Homo sapiens
agagagggccccgaaccgccagggcagcgcaccgcaaaggccccagggagccccgcgccaggcaccagacag

SEQ ID NO: 122897 - RNA, 79 nt, Homo sapiens
aaaagccagagagcaaaaaaagaaaacagaggaaaagaaacgagagacgacaacccagaaccagagaacagcagaggcc

SEQ ID NO: 122898 - RNA, 70 nt, Homo sapiens
gcaccaggcgcagagggggcggcgaccgagaggcgcggagccggggacgcacgaacaaaagcggccccgg

SEQ ID NO: 122899 - RNA, 83 nt, Homo sapiens
ggccggggaggaggaggaagaggaagaggaggagacccacggacacaaccagagggaagcacgcccgggcacagcggaagaga

SEQ ID NO: 122900 - RNA, 62 nt, Homo sapiens
cagagacgcgcaacccagaaggagcgaaaagacagcaaagagagaagaagaacgcaaaagaa

SEQ ID NO: 122901 - RNA, 71 nt, Homo sapiens
gaggaaaagccagaaccaagacagagagggaagaacagacacagcaccgacacgcgcaaaagcacgacagg

SEQ ID NO: 122902 - RNA, 72 nt, Homo sapiens
gaaacccgcaaaggacacaggccagaggagcacacacaaagaggacccgacagggcagcaccccagaacacg

SEQ ID NO: 122903 - RNA, 112 nt, Homo sapiens
cacaacgcggccggcgcccgcacccaccgagaaccagccaccgacccaggacagcagcggacggccggaccaagaggcgccgccccccagcaaacgagaaaaacccagcgac

SEQ ID NO: 122904 - RNA, 77 nt, Homo sapiens
cccgccccgccccccccccggcccgcggcgacggcggcggggcggcggacgaccggagagccggaaggccgcggacc

SEQ ID NO: 122905 - RNA, 87 nt, Homo sapiens
cccacaggggggggcaaacccgagagaacggggccgaagcacgaggacaaacgggaggagcggaccacaacggggaacgcaaagacg

SEQ ID NO: 122906 - RNA, 82 nt, Homo sapiens
cgaagcccgagaggagccacaaggagacgccgccgcgcccccgcagaaggacggagaagcgaaagccagaccggcaagagcg

SEQ ID NO: 122907 - RNA, 82 nt, Homo sapiens
cccccggggcccaggcccggacccgcggccggcccggcgcggcccagcgccccaggccagggagaccagggggcaggggagg

SEQ ID NO: 122908 - RNA, 82 nt, Homo sapiens
agcgggccccagaaaaacaaggaaagaggggaaaggagggcggaccggaagcgagcaggagcagagcggaagacccaccaga

SEQ ID NO: 122909 - RNA, 58 nt, Homo sapiens
cagaaacggaacaccaagcgaaaagggcgacagcaagccagggggcagagacccggga

SEQ ID NO: 122910 - RNA, 68 nt, Homo sapiens
gaccacccagggaaacggccggggggaagccgagccacggcacgagggcaagccagcgacgagacacc

SEQ ID NO: 122911 - RNA, 78 nt, Homo sapiens
caaaaacaagcaccagaggcccgagcagccagcacggaggcaaaaacaaccaggcagagagacaagcaggagcgaagc

SEQ ID NO: 122912 - RNA, 83 nt, Homo sapiens
cagagagccagaggcagccacggacagacacaccacggagcggcaacccacacgagaacgaaggcagaccgcgggcccacgcc

SEQ ID NO: 122913 - RNA, 73 nt, Homo sapiens
gggcgccccgaaccgcaccaggacccaaagacaggaccacgcaccagcagagaaggaaagcaaaccgaagcag

SEQ ID NO: 122914 - RNA, 80 nt, Homo sapiens
ccagaaggcgccgggcagaggaccggaggccgggaagccaacgaccacacgcagagcagggccgccccgaggagagcgac

SEQ ID NO: 122915 - RNA, 80 nt, Homo sapiens
cccaaaaggcgggaacaggaaacggagaggcgggcggaccaagaccccccccaggagcaggccccccccccaacaaccgg

SEQ ID NO: 122916 - RNA, 68 nt, Homo sapiens
aagggcaggagcaaggggagccaaaagcagcccgccacaacaaacaggaagggaccaaagagaggaag

SEQ ID NO: 122917 - RNA, 77 nt, Homo sapiens
aacggcggagcggaggcacccgaagcgcccggggaggcccccacggccccaggagaaagcgcgggcgaccggccggc

SEQ ID NO: 122918 - RNA, 80 nt, Homo sapiens
ccacagccgaaacaaccaacgacaacaaggcagaagaaaccaggacgggaccacgccagaaggaccagccccccaccacc

SEQ ID NO: 122919 - RNA, 58 nt, Homo sapiens
acagccaccgcacccgcccggaagcgacgcccagggaagccgaagcgccccagagaag

SEQ ID NO: 122920 - RNA, 84 nt, Homo sapiens
cgcccccgcagcagcgccagggcgggacgaccccacaacccgagcgcccaagccccccgcgcagagggagaaggcacccgggcc

SEQ ID NO: 122921 - RNA, 87 nt, Homo sapiens
acagaaaaaacaggaggggaagcgaaaaagaacgcggaggcaagggccgaaacaaaaaaaaaaaccaaggagcaaccacaagaaaag

SEQ ID NO: 122922 - RNA, 62 nt, Homo sapiens
cagccaaggagacacacacaggggcgcaagacaggcgcgggccccccgaccggcagagcgcg

SEQ ID NO: 122923 - RNA, 89 nt, Homo sapiens
ccgcccagccccgagaggaccagaggagcgagagcagcaagaaccacacccagcagcaagcagcggaagggaaacccagagggggagac

SEQ ID NO: 122924 - RNA, 31 nt, Homo sapiens
acggagagccaaagggacagcaccggcccag

SEQ ID NO: 122925 - RNA, 79 nt, Homo sapiens
ggagagggccaccgcccgccacccgcgcgccgccgccgaggagaaagggggagaggcaccagcaacagaccaaccgcag

SEQ ID NO: 122926 - RNA, 74 nt, Homo sapiens
accggcagcagcgcgccgccgcgcccagccaccgccccccccacgggccgcaagagacaccacaaaaggacacc

SEQ ID NO: 122927 - RNA, 86 nt, Homo sapiens
cccggccgccccggagggagacgcgcgccgaggagaacccagcgggcgcaaggaagaagagacgccgcgcggcagacaaggcccgg

SEQ ID NO: 122928 - RNA, 84 nt, Homo sapiens
gagggcgcacagcgcccgaggacagcgaaagggcccccacacggccgaccaaagaaggaagaggcgccacaagaggcgccagac

SEQ ID NO: 122929 - RNA, 77 nt, Homo sapiens
aaggaccaagaaccaggccccgaagagcgaaagcgccaccggaggccgagccaccaccagacaagcacagagaccca

SEQ ID NO: 122930 - RNA, 88 nt, Homo sapiens
cggaggagccccagcgccgaacgggcagaccccccgagccgcgaaggagcccgagaagcagccacgaggcggagaaccagccaaaaaa

SEQ ID NO: 122931 - RNA, 62 nt, Homo sapiens
ggcccagcaccccgagaaccgcaggagccagagggcgcccgcgccggcagaggaggcgagca

SEQ ID NO: 122932 - RNA, 75 nt, Homo sapiens
ccggggacaagcgcgggaacggcgcggaagggaccggagggccggaagcgggccgggacaacgggcaggagccgg

SEQ ID NO: 122933 - RNA, 82 nt, Homo sapiens
cgcggcggggacggcgcccgcgccaccaccggcgaagcaagaggagccaggagcacggggggaacaagaccgccgggacgga

SEQ ID NO: 122934 - RNA, 112 nt, Homo sapiens
ccggggccgcaccgccaccgccaaaaaagcaccgccgcagggcgccggcacgggcagggcaaggacggggacaagcggcggagcccgaggcacaccgcggcagcaccacaag

SEQ ID NO: 122935 - RNA, 78 nt, Homo sapiens
cccagcagccgccaggccggccggagccgagcggagaccagggccggagcaaagagcggaggggagcgggcgggcggc

SEQ ID NO: 122936 - RNA, 85 nt, Homo sapiens
ggcggcggcggcgggagcgcagcggcggcggccgccgagggaaacggagagaaccagagaaaaccaccaaaggccaggaagagcc

SEQ ID NO: 122937 - RNA, 79 nt, Homo sapiens
cacaaggcagcgcgcagggaagaggagcggaaaaacaagcaaaagaaaaacagggaaagaggagaaagaaaggaagagg

SEQ ID NO: 122938 - RNA, 57 nt, Homo sapiens
gcgacaggggggccggccgcgcagccggccaacaggaaccggaaaacaacgcgcagg

SEQ ID NO: 122939 - RNA, 50 nt, Homo sapiens
cccagagagcaaaaggcagcgaaacaggcgcgggagccaccacaacaaca

SEQ ID NO: 122940 - RNA, 87 nt, Homo sapiens
cacaacacccccgggcccccaagacacaccaccgagcggccggacggcccggcagaccccgccccccgaggcgcagcccgaacccag

SEQ ID NO: 122941 - RNA, 80 nt, Homo sapiens
caacaacaggcggagggcccaccccgcaggccccaagaccacagccccacagcgacacaaggagacgcagcccagaaagc

SEQ ID NO: 122942 - RNA, 83 nt, Homo sapiens
ggagcgcggagcccggccccgcaccaggaggaggacgacagcacgaagacgaccccgacgcaggccaggagccgcggacagaa

SEQ ID NO: 122943 - RNA, 74 nt, Homo sapiens
cggacccggagacaccccgcagcacagccgcgaccaaggcacaccggccaacgacccgggcacagcacccagaa

SEQ ID NO: 122944 - RNA, 60 nt, Homo sapiens
agccgcagacgggggaagccaggcaccccccacagaaagggcgaggagcgccgcccccag

SEQ ID NO: 122945 - RNA, 67 nt, Homo sapiens
acccaaaacgggcccacagggaaaccgcaagaagcaagcgaacagaagcgcccgggggcaggggacg

SEQ ID NO: 122946 - RNA, 43 nt, Homo sapiens
ccggagcggccgccccagccaccccgagcccggagaggaccca

SEQ ID NO: 122947 - RNA, 66 nt, Homo sapiens
gccacaaagaaagacaagagcagcacccaaaagaccaggagccacaaaggaggccaaagagcacag

SEQ ID NO: 122948 - RNA, 84 nt, Homo sapiens
gcgcgagggacaagagcagaaacaaggcagcaggagcccgaacaggacacagagcaggcgagaaggggcaggcagcgcggcaga

SEQ ID NO: 122949 - RNA, 53 nt, Homo sapiens
gaagacagcgggcccaaccggaccagaaaaagccgaggacgggcccggagcag

SEQ ID NO: 122950 - RNA, 84 nt, Homo sapiens
ccagcgcagcagccgcaccagcgccgggacgggggggccggcagggcgcccgcgccggcagaggaggcgagcacccgccaggga

SEQ ID NO: 122951 - RNA, 42 nt, Homo sapiens
cccagccggggcccagcgaacgccaggcaaaccccacaagac

SEQ ID NO: 122952 - RNA, 81 nt, Homo sapiens
gggacacaaccgcagaaaggaagagaggggggcggaagcgaggaagcgcggagacccacacaagggccacacgaacgagcg

SEQ ID NO: 122953 - RNA, 78 nt, Homo sapiens
ccagggcacggagcgcaaagaggcacacaacagaaaccaccgacaccacccgcgaagcgcacgcgcagaaggggacgg

SEQ ID NO: 122954 - RNA, 78 nt, Homo sapiens
agcacaccccgcgaaaggaggaggcacagacacggccaaccaccccgccagcaaaaagacacccaggaagacgcaaag

SEQ ID NO: 122955 - RNA, 75 nt, Homo sapiens
cccagagggcgcggaagccccagcaaacaagaccaccggcacccagaaacccaggagaaaagaggagagcagcag

SEQ ID NO: 122956 - RNA, 79 nt, Homo sapiens
ggaaaccgacgcccgggggaaacagagaaagaaggcggccaggccaaccgaagaacaccccaccagaccacccagcaag

SEQ ID NO: 122957 - RNA, 71 nt, Homo sapiens
cacgggggcgacggaccacaagacgcacccacagacagagaggcgcaggcaagacccggaaggcccagaag

SEQ ID NO: 122958 - RNA, 71 nt, Homo sapiens
cggagcccccaaaaacaaggcagaggaagccccggccacaggcagaagcccccgagaccaggaaaacgcca

SEQ ID NO: 122959 - RNA, 52 nt, Homo sapiens
cagcggccgcgcacccccggccggaggcaccagcggcagcggggaagaagaa

SEQ ID NO: 122960 - RNA, 68 nt, Homo sapiens
gcgcgcgcggcaccaggccggggaaaagagaagaacacgaaaagaagaacccaacagccccacacaag

SEQ ID NO: 122961 - RNA, 81 nt, Homo sapiens
gggcacccgccggcacccagaccgaagagccaccgcgaaccacacaggagagaaaccaccagagcaacgaagcacagcgaa

SEQ ID NO: 122962 - RNA, 69 nt, Homo sapiens
ccagcacgaaagaacaagaacaacgccagaaagaaagccaccagagagggcagccggggagaagaaacg

SEQ ID NO: 122963 - RNA, 72 nt, Homo sapiens
cagacccccgaaggccggcggccagcgagcgacggcagaacgcccgcgccaagcgggggcagcggggacggc

SEQ ID NO: 122964 - RNA, 77 nt, Homo sapiens
agggacacacggcagagcaggccaagccagaaaggagccacacgaccccgccagcgcagcaaggcaccagcagaaca

SEQ ID NO: 122965 - RNA, 112 nt, Homo sapiens
caggaggaagcccgacaccgcaaggggaccaagaacccgcgccggggaggaaaccaggaaagaaggcgaaggcagaaggccccccgccacccagacaaaaaccagaaaccca

SEQ ID NO: 122966 - RNA, 81 nt, Homo sapiens
acagcaaccgaccagggaaagccaggccagaagaaggaaggccggggaggggacaggaaagacacaccaccccaccgaaca

SEQ ID NO: 122967 - RNA, 77 nt, Homo sapiens
agggcccccgaagcagggagagaggccagccaggaacaagcagaaagcacgaacaacgagaacaagacacgagcaaa

SEQ ID NO: 122968 - RNA, 76 nt, Homo sapiens
gaagaaaaagccaggccagcgcagagccccacacccgaaaaccgcaaagaaaaaggacaccaggggggaaaaacca

SEQ ID NO: 122969 - RNA, 74 nt, Homo sapiens
ggacccccccgaacaaccccaaaagaagcacgaggcaggagagcgcagccacgaaaaaggggaaggaggcggga

SEQ ID NO: 122970 - RNA, 94 nt, Homo sapiens
cccaccaccccaagaccaaggcaggaggaggaaggaagagaaaggcggagcaagcggacaacccaacacacagcaacaccagaaaaaagaccag

SEQ ID NO: 122971 - RNA, 76 nt, Homo sapiens
gaccccacggagcgggcgacgagcgacccgggagacacgacggcggcccagggcagcagcacacaaacaaccacaa

SEQ ID NO: 122972 - RNA, 80 nt, Homo sapiens
gaggccaccagcacacacgcaccagcacacaggacgggacagagcccacgcagcaagagcagcggggcggcccccggcga

SEQ ID NO: 122973 - RNA, 73 nt, Homo sapiens
aacccagcacggaggccgaggcaagaaagacacccacagcagcagccaggcaggcccgggacgggggaccagg

SEQ ID NO: 122974 - RNA, 82 nt, Homo sapiens
cggagcgcgcgggagcccgggcaccagagcgacgggcaggaaggagggggcgcacaaacgagagcacgcgccaagggcacac

SEQ ID NO: 122975 - RNA, 63 nt, Homo sapiens
ggagaagaagcgccgaacacaaacgcaaagggaacagaagccagggccaaaaagcagaaaaac

SEQ ID NO: 122976 - RNA, 60 nt, Homo sapiens
ggcggagcagaccaccggccaccaagaccccaggaccagagagaagacccaccgagccgc

SEQ ID NO: 122977 - RNA, 60 nt, Homo sapiens
gcaaaggggaaaaaaaagggagaaacagaccaagggcacgcagcagcaccggcagacaaa

SEQ ID NO: 122978 - RNA, 76 nt, Homo sapiens
gagggagagccaaagaagggaagccaaaaaccccccacccggggccgagcaagagagggagcacgcacgggaaccg

SEQ ID NO: 122979 - RNA, 81 nt, Homo sapiens
ggacacgacgacggaaggagcagaacaaacggccaagaagggccaccccacagacggaagaaaacgacgaagccaccgcag

SEQ ID NO: 122980 - RNA, 84 nt, Homo sapiens
gacgcgcgggaacaacgcgagcggcgcgcgggacgaaggaacagaacagcggcagcggaccagaacgaaagaaccaaacagaag

SEQ ID NO: 122981 - RNA, 70 nt, Homo sapiens
caagagcaccacgggcaggaaggcagcgcacgacagcaaaagggacgggggacaggaaagaacacaagac

SEQ ID NO: 122982 - RNA, 75 nt, Homo sapiens
caccgagaggagggagaacacaggaacaggcgcggcccagaagcgaggcgaagcagcggcgagaaacgagagcac

SEQ ID NO: 122983 - RNA, 64 nt, Homo sapiens
cccaccccccaagggggacaaacacccacagccagcaggacccgagcggggaccgagaaagacc

SEQ ID NO: 122984 - RNA, 77 nt, Homo sapiens
ccgcgccagaacgaccccgagaggcgcccgccccgagagcaagcaccgaggagcaacacccccagggagcccagacc

SEQ ID NO: 122985 - RNA, 54 nt, Homo sapiens
gaacgcccaccgcggagagcagcacgaccccagcacagcccgcccgggagaaag

SEQ ID NO: 122986 - RNA, 75 nt, Homo sapiens
agcccacaccagcggcagcagcacgagccccccagccgcgaagagacccgacagagaagccccaacagaagagag

SEQ ID NO: 122987 - RNA, 84 nt, Homo sapiens
gaagccacgcacaccagccacagccagcaggccgcccacgcggagccgccagacaaagaggccaggagacacgccaccgccggc

SEQ ID NO: 122988 - RNA, 78 nt, Homo sapiens
cacggcaggaggaaaggacgaccagcggacacgaacaggaagccaccgacaagagcacagggaaggggaagacgcagc

SEQ ID NO: 122989 - RNA, 73 nt, Homo sapiens
aagcacggaggcagcggcggaggaagaaaaagagcaggaagcaacaggaaggcacggcgcaaacggcgccggg

SEQ ID NO: 122990 - RNA, 67 nt, Homo sapiens
gaaaacaaaagaggagaaagaacacccaggagggcaagaaacgcagaagaagacgaccccacgcccg

SEQ ID NO: 122991 - RNA, 78 nt, Homo sapiens
cacgaaacaacacaaaacccaccaagaacgaaccccggggagagcagacaaaaggccagaaggccaccaaagaggacc

SEQ ID NO: 122992 - RNA, 38 nt, Homo sapiens
agacgagagccggacgacaccgggaaccccaagaggaa

SEQ ID NO: 122993 - RNA, 60 nt, Homo sapiens
acaagaggcaaggggggaggagcgccgccccccgcacaagaccacacaaagcgaagcagg

SEQ ID NO: 122994 - RNA, 71 nt, Homo sapiens
cgagagccgggaacagcccaagaggaacaaagacggagagcccagagacaccagcaggcgcaaaaacgaac

SEQ ID NO: 122995 - RNA, 78 nt, Homo sapiens
acggagcggggccaggcggccaggacggcgggcggcccggcggccggggcccagggcccagccacagagaggagccca

SEQ ID NO: 122996 - RNA, 60 nt, Homo sapiens
cggaccagcaggacgcccaccggagggcagacacacgcaggggacagaccagagcaggac

SEQ ID NO: 122997 - RNA, 81 nt, Homo sapiens
gacaagggcgccgaggggcgcaccagaacgcccgcgcacgagccagggcgaaaagccccaagaaagcccaggacgggccaa

SEQ ID NO: 122998 - RNA, 79 nt, Homo sapiens
ggaagcaaaagcccaaaagccaaggaacgggacaaccgaaagggaggcgcgaaaaaggaaggcagcaagaaacagaccg

SEQ ID NO: 122999 - RNA, 72 nt, Homo sapiens
acccagcggggggcgccgacaggagagaacaacccccaggaacaggcaccaagcaggagacccccaccaccg

SEQ ID NO: 123000 - RNA, 101 nt, Homo sapiens
gaaggggcaaaggggacgcggcaccacggcacgcacaaggcgaggcggaaagagggccagggggcagaacagggaagccgacagcaaggcggaaaagaagc

SEQ ID NO: 123001 - RNA, 75 nt, Homo sapiens
accgcaagcggagcagccccaccaggaccaacagacgcaccaaagccccagacagagaaccaaacaaagccggaa

SEQ ID NO: 123002 - RNA, 70 nt, Homo sapiens
ggggcgggggcgcccgccgcgccgccacgaacaccaggcagaacgaaaacaggcccaacagcccagagga

SEQ ID NO: 123003 - RNA, 82 nt, Homo sapiens
caaaaagccagaagcccaccccaaagaaaaggcacacacacccgcaggagagcgccggagaaaggaagaacccagacacaga

SEQ ID NO: 123004 - RNA, 78 nt, Homo sapiens
cagcgcgccccgccaccacggccgccgcacaccagccgccgcacgcaagccagaggcacggacgaccccggagagagc

SEQ ID NO: 123005 - RNA, 77 nt, Homo sapiens
agggacggcacagggaggccagccggagaagcgagcagcgagcccagcgagcaaaacggaaaaaaaagaccgcgccc

SEQ ID NO: 123006 - RNA, 77 nt, Homo sapiens
aggacccggccgaggcgggcgcaagagaaggcaccaagagggcagaacagccaaaccagagcacagggacccaaggg

SEQ ID NO: 123007 - RNA, 78 nt, Homo sapiens
ggagcgcagagcgggcgagcgcgccaaccgaggcaaaagaaacaaacacgcacaccaaaagccgcagaaggcccgcca

SEQ ID NO: 123008 - RNA, 69 nt, Homo sapiens
aacagagagccacacacccgaaagccgaagaaaaggagagaggcagaccaaaacgggcccgcggaacca

SEQ ID NO: 123009 - RNA, 79 nt, Homo sapiens
cagcacaaacacggggggaccacggaaagaggggcccagacccccccccagcagccggagaaggcgacaacaaccagac

SEQ ID NO: 123010 - RNA, 79 nt, Homo sapiens
agcgagaccgcaccagagggaaggaagacgagaaaggccacacagagaagcaacaagccgagacagacgccacagagag

SEQ ID NO: 123011 - RNA, 84 nt, Homo sapiens
cacgcagggagggaaacagacagcagcggcagcagcggagaaggcgggagcagcaccgccgcagacagcaagaagcagcggcag

SEQ ID NO: 123012 - RNA, 76 nt, Homo sapiens
aaaggacagcagaaaaacccagaagcagaacgaaggaaaccacagcccacacagcaccaaggaagaagagacacac

SEQ ID NO: 123013 - RNA, 75 nt, Homo sapiens
gaacagaagagaggaagaaaggacagggagagaagccaagaaagacaggcggaggcaaggcggaccagccacgca

SEQ ID NO: 123014 - RNA, 80 nt, Homo sapiens
cggcggagcggagcggagcccggagggggcgcgggcaggacaccgccgcccgggacccggcgcaggacggcaaggcgcag

SEQ ID NO: 123015 - RNA, 78 nt, Homo sapiens
ccacaagaggcggcggcggggccgaggcgcgaggaggaacgggggacccacggggcagggacgacgcaccaggccgag

SEQ ID NO: 123016 - RNA, 73 nt, Homo sapiens
caacaaccacgggaagccgcggccccaagcaccagcccacaggcgcggccagcgaagaagacgcagccagacc

SEQ ID NO: 123017 - RNA, 67 nt, Homo sapiens
gcacgaaagcaccaacgagacccgccacacgaaaagcaaggcaaaccagggggccacacagagcgca

SEQ ID NO: 123018 - RNA, 83 nt, Homo sapiens
gaaaggaaaagagaagaaccggagccggagaggcacgacccccaggagaccggaggacgaagcgcgcccccaaggaggaggcg

SEQ ID NO: 123019 - RNA, 73 nt, Homo sapiens
gccagaagagccccggggacgcagcaaagcggagggacaaggcacacgcgggacggagcccggacccagacca

SEQ ID NO: 123020 - RNA, 75 nt, Homo sapiens
agggacccccgcagcgacgcggcggcaagacggggcgggggccggaccaagagccgagagcgccggaggaccaca

SEQ ID NO: 123021 - RNA, 51 nt, Homo sapiens
cgaggcgcagaaaccccggacaaggcacgccagacgcccagagcgacgggc

SEQ ID NO: 123022 - RNA, 82 nt, Homo sapiens
cgggacgccaggacgcggcgagcaagcaggagcagaagagcgaagaagcgggcacgcagaaaaacagccggacacgcaaacc

SEQ ID NO: 123023 - RNA, 117 nt, Homo sapiens
cccgcgccagcaccacgcccgcgccgcgccgccgccaccagcccaagagaaagccaccaggagagaacgccgcgccgcgcgacaacggcccggcaggcaaggccggccgcgggcgac

SEQ ID NO: 123024 - RNA, 70 nt, Homo sapiens
gagagggagagccaaagaagagagaacccaccgcaagagaccaaaggccaagagcaccgcagccaccagc

SEQ ID NO: 123025 - RNA, 84 nt, Homo sapiens
cgccagcggccgagcgggcggcccggccgggcgcccggggcggcggagacaagcagaccggaagaccgacggaagaccacaccc

SEQ ID NO: 123026 - RNA, 78 nt, Homo sapiens
gaaggagaaacccagggaccacgcgacggccacccgcgggcgcacgcgcgacaagagaggcccacgcggaccggcagc

SEQ ID NO: 123027 - RNA, 73 nt, Homo sapiens
gacacaaaagcggaagagcagagagaaggcagggcaaaccagaaagacggaaaccacacgagacgcgacgaga

SEQ ID NO: 123028 - RNA, 82 nt, Homo sapiens
gcgccgcgcccgcacagcccgccgcagaggacaccagaggaccagaacccacgagaaacagacgagccaaccagaccccagg

SEQ ID NO: 123029 - RNA, 90 nt, Homo sapiens
ggaccgggacgcagagcgcggacccggcgccgaggcggccacccgagacgcggcgcgcacgcccggccgcgcgcgccgggggcccggaaa

SEQ ID NO: 123030 - RNA, 79 nt, Homo sapiens
aaggcccccccgagagaggacaccagagaagcaggacaggcaaaaagacagccgaaaaagggcggaaaagcagaagccc

SEQ ID NO: 123031 - RNA, 76 nt, Homo sapiens
gcccaaccaacccaccagccagacaacacaagaaacaagccgaaacagggacaagagccacgaaaggaagcgcgag

SEQ ID NO: 123032 - RNA, 80 nt, Homo sapiens
aacgagaaacccaaaccgaaaaccaggacgccacaggcacaaaaggaaccacagacagcgaccccagggcaggacaggaa

SEQ ID NO: 123033 - RNA, 81 nt, Homo sapiens
acccacggagccccggggcgccgggccgcccgcggcagagcagcagagcgccgcccacaagagacaaagaaaaggaggaaa

SEQ ID NO: 123034 - RNA, 74 nt, Homo sapiens
gagccgcccaagcccgggccagggccaccccggcgagaaggagagaagcaagcacgcccggagaggaaacagac

SEQ ID NO: 123035 - RNA, 61 nt, Homo sapiens
caaggcacgccagacggaaaaaagcagagagaacacaagccaagccgagacacagccaaca

SEQ ID NO: 123036 - RNA, 82 nt, Homo sapiens
cccgcgccgcccgggcgcgcgggcgcgccgcgcgcgcgcgcgcgccgggccaggcgcaaggaagaagagacgccgcgcggca

SEQ ID NO: 123037 - RNA, 85 nt, Homo sapiens
cacccagaagaaacacgaaagagaccaaccccacgagaagcggggggggagcggcagcggcagagagcaacgcccagacggcgga

SEQ ID NO: 123038 - RNA, 60 nt, Homo sapiens
agaacccagaggcgggaggggccgggaggcagaggggcaggggaaagggcacacggcccg

SEQ ID NO: 123039 - RNA, 66 nt, Homo sapiens
cggcgcccgcgccacagccaccagagccggcagcaaagagggaacagagcgcccaaaggacgcgga

SEQ ID NO: 123040 - RNA, 67 nt, Homo sapiens
agcacaggaaaaaccaaaggaaccagccagaagccagacgccgggaaggccaaacccagacacagga

SEQ ID NO: 123041 - RNA, 54 nt, Homo sapiens
cagggggagcgcgccagccggggcccggacggcccagagcggcaagagaaagaa

SEQ ID NO: 123042 - RNA, 62 nt, Homo sapiens
ccacggagcgggcgacgagcgacccgggagacacgacgacgaggcgaggaaccaaaggccac

SEQ ID NO: 123043 - RNA, 75 nt, Homo sapiens
cacaacagaagggaaggggaaggagaccacaaagcaagccacacccagaaccagcagcccgcagaagaaaggcaa

SEQ ID NO: 123044 - RNA, 62 nt, Homo sapiens
caagaccggagagagggagacgcagcaaagggcaagaaggaacagacaaaaacggccggaag

SEQ ID NO: 123045 - RNA, 72 nt, Homo sapiens
aaaaggaacagagaagacacaaaacggcagaacaagaagggcaaccaggggggaaggagggagcggagaacg

SEQ ID NO: 123046 - RNA, 73 nt, Homo sapiens
cagcgaaagaaaggaaagacaaaaaacacggaaaacccacaggaaaacgccccacaggagccaccgcgcccag

SEQ ID NO: 123047 - RNA, 74 nt, Homo sapiens
cacacaaacaaggggcgacaaagagcacaggggaaggggagcaccagaggaccgaaaagacgcggccccaaagg

SEQ ID NO: 123048 - RNA, 78 nt, Homo sapiens
gccgagagccgcccgggccagcggccgcgcacccccggccggaggcaccagccgccgcccaagagagagaagagaggc

SEQ ID NO: 123049 - RNA, 117 nt, Homo sapiens
agggaggagcgcagggcgagccggagagccggccgagcgaggcggcgcggccagaagagccgcgaagcagccacggaccccagcacgaaaagacgggagaaaaaggggccagggaca

SEQ ID NO: 123050 - RNA, 78 nt, Homo sapiens
gacgcgccaaaacccgcccggaaaggggacaccgagagcccagaggaccggcggcccgaccaaagaagaaccacagcc

SEQ ID NO: 123051 - RNA, 78 nt, Homo sapiens
ccagacacccagaaccccgggaacgagcgccccagggacgcccagaggagaagaggaagcgcagacagagcggaccag

SEQ ID NO: 123052 - RNA, 87 nt, Homo sapiens
agagacacgggaggagcgccacacccacacacaagggaacacagccgccagggcgcccaacgcccccgacaggcgcagcaagcaggg

SEQ ID NO: 123053 - RNA, 55 nt, Homo sapiens
cggggagccagcgagcccccccgacacggccaagcagcaaaagaaagcgcagaag

SEQ ID NO: 123054 - RNA, 84 nt, Homo sapiens
ccagagaaggaggagggaccacgcgcgaggaggggagggggggccagcggcggagcggaggaagggaccacgcgagaacggaca

SEQ ID NO: 123055 - RNA, 76 nt, Homo sapiens
gaagcgggagcggaaaccccagaagcgcaaaggcaagaacaacccaagaaggacagcgcgacagaaggacagcagc

SEQ ID NO: 123056 - RNA, 79 nt, Homo sapiens
caacaccgcccccagccgggcgacagcgaccgcccggggggacgagagccgcgagccccgacgaccggaccagagccgc

SEQ ID NO: 123057 - RNA, 83 nt, Homo sapiens
ggaggggcccacgaggagccaacacaccagcagacaacaggcaggaggaaagcacagagaccccagccaggccaaacaagaca

SEQ ID NO: 123058 - RNA, 59 nt, Homo sapiens
gcaaggacaccaccagggagccaggagagggaccgagcagagaaccaacggagaacagc

SEQ ID NO: 123059 - RNA, 53 nt, Homo sapiens
cggggacaacagggcagcggagaagcggaggagaccaaggaggccaccaccac

SEQ ID NO: 123060 - RNA, 73 nt, Homo sapiens
ggaccaccccgaagaaagcacagacccccggagacagaaaaaaccgccgcaccagaggaaaccgaaccaaaac

SEQ ID NO: 123061 - RNA, 72 nt, Homo sapiens
aggacaaccgggagggcaagcaaagcacccaagagcacccgggacaaaggacggaccgaaaagacgcggccc

SEQ ID NO: 123062 - RNA, 62 nt, Homo sapiens
ccgccgaggcccggagggagagaagagaaaaagcaacagggagacgcaagaaagaaggcgaa

SEQ ID NO: 123063 - RNA, 61 nt, Homo sapiens
cccaaaggcgggaacgggggagccaccggcccggccgacaccaaaaaacggaggacgcccc

SEQ ID NO: 123064 - RNA, 79 nt, Homo sapiens
cgcgcggcggccgcgagccgcggagcgacaacaggcacaaagagagaaggaacacccacagggcagacagagaaagaac

SEQ ID NO: 123065 - RNA, 34 nt, Homo sapiens
gacgagaggggacgccagagaagacagaaccacc

SEQ ID NO: 123066 - RNA, 69 nt, Homo sapiens
gcaagggacaacagaagagcccaccgaagaccgaaaaaaccacggaaggccccgaccgagggcccgacc

SEQ ID NO: 123067 - RNA, 70 nt, Homo sapiens
gaaaagcgccgggcggaccagcagggacagagagccgaaagccgggcaaggggaaagaaggccgaagaac

SEQ ID NO: 123068 - RNA, 77 nt, Homo sapiens
caggaagccaccaacgccacaccgacccacaggagcgcccgcggaggagcgcccggacaagagcgagcaagccgccg

SEQ ID NO: 123069 - RNA, 82 nt, Homo sapiens
gacccgggcgccgcgccgcacgagcaccagccagagccaggacagggagcccagcagagggcgcaaagcccgaggaaggcca

SEQ ID NO: 123070 - RNA, 52 nt, Homo sapiens
caccgacaccggccgggacacacggccaccagcccccgggccaagagcagca

SEQ ID NO: 123071 - RNA, 103 nt, Homo sapiens
ggcggcacgacgggcaaagaggccacagaggcagccaaggaaccgcggcagaaaagggccgggaaaacacaaacaagcgcggaccgaaacacaccgaaaaccg

SEQ ID NO: 123072 - RNA, 72 nt, Homo sapiens
ccaaaaaagcaaaacacaacccagcacggccaaaaagaagggccagaacacaaagcggaaccggaagaaaag

SEQ ID NO: 123073 - RNA, 81 nt, Homo sapiens
ggccccacccgggaggggggagcggcgggaggccaccgccagagcccgaagacaaggggaacacccaaaaaggaccaccac

SEQ ID NO: 123074 - RNA, 75 nt, Homo sapiens
gcccaacaaacagaggacaggcacgcgcagaaagaaaaacgggggaagcagcgcccagcaagccagccccccggg

SEQ ID NO: 123075 - RNA, 75 nt, Homo sapiens
aacccagacaccgacgggccgcgaggggaagaggaagcaaagccaagggcccacacccaacccagccgagccgcc

SEQ ID NO: 123076 - RNA, 75 nt, Homo sapiens
cccacgcgcgacgaaaagaaccaaacaagacaaaggaggcagcaaacagcacacaacggacggagaaccaaccag

SEQ ID NO: 123077 - RNA, 56 nt, Homo sapiens
ggaaaaagagcgagacagaggagcacagaacccacggaggaaggaccccgaggcac

SEQ ID NO: 123078 - RNA, 61 nt, Homo sapiens
cagccagcagcgggaccgacgagagccgggcacaaagccagcgagcgaaaaagccagcaag

SEQ ID NO: 123079 - RNA, 79 nt, Homo sapiens
ccgcaggagggagaacggagggccacaacgagaaagaccgacgaaaagaagaaagaaccgcaaacacgcagaacagccc

SEQ ID NO: 123080 - RNA, 79 nt, Homo sapiens
accaacaacgcgcaggcacaagcggaccggcgagccggcggcacgacagcaaaagccagggcacagggccgcaccccag

SEQ ID NO: 123081 - RNA, 81 nt, Homo sapiens
agcgcccggagccccggacagccaggcggaagcaggcgaagccgcgccgggaaagaacgccaggagccagaaccccgagga

SEQ ID NO: 123082 - RNA, 80 nt, Homo sapiens
aggacaacgcaagggggaagagagagaaacaaaagcgccagagccaagaacggcaccagacacgaaagagcagaaggcaa

SEQ ID NO: 123083 - RNA, 80 nt, Homo sapiens
cgccgcgggaccgaggaaaagccgcaccagagcccaaggcccgcaagaaggagcgccacggcccccacggcggacgggac

SEQ ID NO: 123084 - RNA, 81 nt, Homo sapiens
gccgcgcccgggagcggcgccaggccggagcgcgacacggagacaggggcaggaggcaggggaagcacaaaagcgcacccg

SEQ ID NO: 123085 - RNA, 88 nt, Homo sapiens
ggcggaggccccagggaagcgcagaaagcaggcgaacccgcggcgcaaaacggcgaagggagggccgccccaaccgacgcaccagccg

SEQ ID NO: 123086 - RNA, 81 nt, Homo sapiens
agagaaaaggagggaacacagacccagccgccaagaccccggaggaaaagcggaagcggcagcggcgaacgccggaacgga

SEQ ID NO: 123087 - RNA, 65 nt, Homo sapiens
aaggacaagcaggaacccccagcacaaggcggcccaccaagggaccagcgcagcacccgaacgcg

SEQ ID NO: 123088 - RNA, 108 nt, Homo sapiens
ggaagcggcggcagcggcggggcggggcgagcagaggacccggcgggcggcccgcgggcaggacacagcgggcaggcggaacacggaccgcgaaggagcagagagagc

SEQ ID NO: 123089 - RNA, 75 nt, Homo sapiens
acaccccggccacacgggccccaccggccggagccaccccacccaggcccgcgccgcaggcacaaaaaggacggc

SEQ ID NO: 123090 - RNA, 62 nt, Homo sapiens
ggggacaaaccaacagaagggcaaccagaaaagggacgacccaggggaacacaaagcaagga

SEQ ID NO: 123091 - RNA, 79 nt, Homo sapiens
aaggcaagagcccagagccaggccgaggccaaacacacgccacgggcacagccagaccggccagaaacgggcaggaccc

SEQ ID NO: 123092 - RNA, 77 nt, Homo sapiens
ccaccgccagcggaacccggggacacgacgccccaaaccgccaggagaaaaaaggagcggagcggccaaaacaacag

SEQ ID NO: 123093 - RNA, 82 nt, Homo sapiens
gcgagcagagcggacgcccccaggagaaacgaggagcgcggccaccccccggagaaacaggagccagaaaaaaaaaaagaaa

SEQ ID NO: 123094 - RNA, 58 nt, Homo sapiens
cggccggcgcagcaacaagaggccccagacgacccgaccccagcgaaagagaagccag

SEQ ID NO: 123095 - RNA, 65 nt, Homo sapiens
gggagacagcgcaggggcaaaccaaggagaccaccgggcccacaggagcgaccagggaagcccac

SEQ ID NO: 123096 - RNA, 88 nt, Homo sapiens
cacccccacaggaggccaggggaaaggagacaagcgcaagcagccagagcccgggcgcaaagaaccaggcccggaccagagccgccag

SEQ ID NO: 123097 - RNA, 37 nt, Homo sapiens
cccaagccacgcacccaggacgcaaggaccaaaaaac

SEQ ID NO: 123098 - RNA, 80 nt, Homo sapiens
ggcaaacggaggaagaaccagcccggaagcgccgaaaaggaaaagagaaaagagaaggagccgggagaagcaaacaacag

SEQ ID NO: 123099 - RNA, 69 nt, Homo sapiens
gacccaggaccgcgacacgacagggggacagcagcaccagaaccaaaaagccacaacagggaggggcga

SEQ ID NO: 123100 - RNA, 89 nt, Homo sapiens
gaggaggcgcgggagggcgagaacgaccccgagacggcaagaacgcgcaacacagcgaccgacgggaccggcgcaagcagcggagggga

SEQ ID NO: 123101 - RNA, 74 nt, Homo sapiens
caagcagccccggaagacaacgcagacgccagcaccaagccgcgacggaacgcgaaaagaccaggagaaggaag

SEQ ID NO: 123102 - RNA, 71 nt, Homo sapiens
cgcagggcgcccccgcccaggcggagcagggcaggccagaagaccacgaaaccgacaccaggaaagagcga

SEQ ID NO: 123103 - RNA, 72 nt, Homo sapiens
ggggcgccacccaggagagcagagaagaccgcaaagccagaaccagcagcccggacgaggggcaggaccggg

SEQ ID NO: 123104 - RNA, 71 nt, Homo sapiens
ggggcaaaagcggaagcccccacccggaccacagccaggcccgacaagcaacagaagccaggcaaggaacg

SEQ ID NO: 123105 - RNA, 71 nt, Homo sapiens
ggagcacccgaccaacaggagaaagaggagacgaaaccgcgcgacgccaggggcagcaaagaacgggagca

SEQ ID NO: 123106 - RNA, 63 nt, Homo sapiens
cgccacaaacgccgcaccaggcgagcagcgcccccgagagaagaagaaggaggccgcggccag

SEQ ID NO: 123107 - RNA, 77 nt, Homo sapiens
gacccacaccaacaccagcacccgggaaggagcccacagaggagaaggggaccagccccggacacggcacacccgaa

SEQ ID NO: 123108 - RNA, 27 nt, Homo sapiens
aaccggaagggcaagagacaagcagac

SEQ ID NO: 123109 - RNA, 81 nt, Homo sapiens
ccccaccccggagccaggcgccggggcgaggaccgccagcagcagccgaaaacgcacaagaccaacagaccagcgcagcgc

SEQ ID NO: 123110 - RNA, 54 nt, Homo sapiens
ggaagacccaccccaccacaaaacgcacgagcacagacagacagaaagcgccca

SEQ ID NO: 123111 - RNA, 76 nt, Homo sapiens
cccccggcgccgcgccggcggcggcgcagggggcccccgcccgaccgacaggccagagcgggccggacccggcccg

SEQ ID NO: 123112 - RNA, 72 nt, Homo sapiens
agagccagacacagagcagcagccccacaagaacgcaacagccagcaccccgaaccggacaagggcgacccc

SEQ ID NO: 123113 - RNA, 81 nt, Homo sapiens
aaaagacaagaaacacaagaaggaacaacagcgggcaaaccagaagacagaagaagaacggaccgaagccaaagaacaaga

SEQ ID NO: 123114 - RNA, 74 nt, Homo sapiens
cgcggagagaaccgaggccccaggagagccgccgcacggaagagacgcccccgaagcccccccagacccaacac

SEQ ID NO: 123115 - RNA, 89 nt, Homo sapiens
ggcgaaggacacccgcaggaaccggcagaggagaaacagacggccccgaggaaacggcgaggaaagagaggagccccggaaagaaaagg

SEQ ID NO: 123116 - RNA, 52 nt, Homo sapiens
aggagacaaaccccagacgcgccggagggccaggaaggccgccaacaaagac

SEQ ID NO: 123117 - RNA, 67 nt, Homo sapiens
ggcacaacaggaccagcaagaggaccgggggaagcagaccaagaagacagaaggggcccgccaccgc

SEQ ID NO: 123118 - RNA, 80 nt, Homo sapiens
acggaacgggaccgacgacggccggccggccccggaacggaagcggcggagaaaccaccacaaacacgaggccagcaacg

SEQ ID NO: 123119 - RNA, 82 nt, Homo sapiens
cccgaaggaggagaagaaccaccccgccccccgaggcgcagcccgaacccagcagccacacgccaacaacgagacagccgcg

SEQ ID NO: 123120 - RNA, 73 nt, Homo sapiens
gcacggaccaaaaacccgcaacagcccccgcccaaggaacgggccacaggcagcagcagcacacccccgagca

SEQ ID NO: 123121 - RNA, 83 nt, Homo sapiens
ggagcaaaaaaagagcccgcaagaagaacagagacagcagccaaacccccaggggaccccacaccacaaaccgaggaaagaag

SEQ ID NO: 123122 - RNA, 78 nt, Homo sapiens
acacaggcccaggaagagcgccagccgcagccggcggacgcacccaccagcaagggacaagacccgcaccgcagcaag

SEQ ID NO: 123123 - RNA, 73 nt, Homo sapiens
acccccggaccccggagaagcagaggaaaaggggcgggccaagaagagcggagaagcagcccagcggggagcc

SEQ ID NO: 123124 - RNA, 68 nt, Homo sapiens
gccacggcaacccggcccgaagaggaaagaagggagccgcgacgaaaccagagcacgcgccgcaaacc

SEQ ID NO: 123125 - RNA, 75 nt, Homo sapiens
acagaaggaacgcagaaacacaggaccccccccaacgaggggagaccaacaaaaccgaaacaaaggcccaacacc

SEQ ID NO: 123126 - RNA, 71 nt, Homo sapiens
caggagccgaaagccacggggacgccacagggcaagaggagaaagacgcccccccccagccacacggggcc

SEQ ID NO: 123127 - RNA, 106 nt, Homo sapiens
agacagccgaccccaacgagaagaccaccagcaggcagcgaaaaacaaggcagaacggaagaagaggcaccagaggaccgccgccccgggcggcgcgacgggacac

SEQ ID NO: 123128 - RNA, 68 nt, Homo sapiens
ccacgacccagcggccccggaaaagacagaggaaggacacagacaaaagaccaggagagagcagcaaa

SEQ ID NO: 123129 - RNA, 87 nt, Homo sapiens
ggccgccgcagcccaggcgcgggggcgacgacagaagccggagaggagaccaggccagaagggaggcccggagaaagaagcgaagaa

SEQ ID NO: 123130 - RNA, 85 nt, Homo sapiens
cccagggccaggagcagccccaccgaggagccccccagggcgcccccagccacagggcaccccggccgccccagacggcaaccaa

SEQ ID NO: 123131 - RNA, 78 nt, Homo sapiens
aggaggcggagcgcccggagaccggacgcagaggcccgcacggcggagaggcaagaacacaagcggaaaccaaagacc

SEQ ID NO: 123132 - RNA, 73 nt, Homo sapiens
cggaccaagccgcaggagaaacgaagacagacaccaaaaggccgcgggagagcgggggcgggaggcgggcccc

SEQ ID NO: 123133 - RNA, 60 nt, Homo sapiens
cagaaacagagggaggaagacagccagcagcccagccagcaccgcgcacccagcagcacc

SEQ ID NO: 123134 - RNA, 69 nt, Homo sapiens
caagcccggcccggcccgacaccgcgggccgccagacgggaagggcgcgagaccgcacagcaaggaaag

SEQ ID NO: 123135 - RNA, 35 nt, Homo sapiens
cgccaggacaacccaccaagaaaagcgcacgcggc

SEQ ID NO: 123136 - RNA, 87 nt, Homo sapiens
gcaagacgggccgagaagcagcgcgagagcagcggcgcgccaaggcccaacaggagcaggagcggcggcgagcccaaggagcggaga

SEQ ID NO: 123137 - RNA, 85 nt, Homo sapiens
cgcggcacccggccaccaagaaccgcagggcgcccgcgccggcagaggaggcgagcacccgccagggagaggaacccccgcgcac

SEQ ID NO: 123138 - RNA, 78 nt, Homo sapiens
ggcgccgaccagcaccaggggaagcgggacaacggggggaaccaagaccaggacaaagaagacccggagagacaagcc

SEQ ID NO: 123139 - RNA, 84 nt, Homo sapiens
ggcggcgggggggcccgcgcgcggggccggggaaaaagcagcaaagggagaaaagaaggccaaacagaagcaggcccagccgca

SEQ ID NO: 123140 - RNA, 75 nt, Homo sapiens
cgggacccgccgcggcgagcgccaccgcaggagggcaccaagagcgaaggccaacaagaggaacaaagaagggaa

SEQ ID NO: 123141 - RNA, 35 nt, Homo sapiens
gggacacaccagaaaacgcgagagaagaagagaag

SEQ ID NO: 123142 - RNA, 76 nt, Homo sapiens
cgaggccaaggacaccacggaaccacaaaggaacaggacacaaagaggcgggaccacccaggaagaaggaccagcg

SEQ ID NO: 123143 - RNA, 79 nt, Homo sapiens
gaaggacgggagaacaccccacagggaagaggggaaccgagcaagggggcgagaggggaacgccaccggagggagaaga

SEQ ID NO: 123144 - RNA, 83 nt, Homo sapiens
cgcacccacacgggcgagaagcccacgaggcaacacgcaaggccgccaccagggaggcaccgccccaacccccccccgcccgg

SEQ ID NO: 123145 - RNA, 76 nt, Homo sapiens
ggcgcggggcccccagaaggacgccagcggagaacgcggcaaagcgaggacgccgcaggccggccaacggccacca

SEQ ID NO: 123146 - RNA, 76 nt, Homo sapiens
gagccgggaggccggccgggccagcacccggccgagacggcggcagcagcggcacaggcaaaaggccaaaacggaa

SEQ ID NO: 123147 - RNA, 79 nt, Homo sapiens
cggccacacccagcacgcccacccgaggcaggcggggagggggaacgcggaaggaagagccaaccgagcaacgaaggcc

SEQ ID NO: 123148 - RNA, 85 nt, Homo sapiens
acgggccaacccaaaaccagggcggcaaaacgagcgggccaggcgaccccgcacacacacccaccagccacggcagcccagcggg

SEQ ID NO: 123149 - RNA, 77 nt, Homo sapiens
acgccgggccgccgaaaacccgacccccaggcggcgcccagacccacacccagcaagaagcacaaaaggacaaacca

SEQ ID NO: 123150 - RNA, 81 nt, Homo sapiens
ggcgccccgggcgcggcaaggacgagccggggcgcgaagccgggacagaccggagcggggaggagcgccggccgaaacgag

SEQ ID NO: 123151 - RNA, 71 nt, Homo sapiens
aaaacacaaccagagcgccaagaagcaccacaaagaaagacaacgaagagaggaaagaagcggaaaggagg

SEQ ID NO: 123152 - RNA, 74 nt, Homo sapiens
ggccaccacagaaacaaaagcaacaaagaggaccaaaaaaccaaggacgacgggaaaccggacccgcaaagagg

SEQ ID NO: 123153 - RNA, 78 nt, Homo sapiens
gggaccaccggggaaacagcagcaccaaaacgaggacagagcggccccaacgcaaaacgggccaaagcgcggggcggg

SEQ ID NO: 123154 - RNA, 80 nt, Homo sapiens
ggccagccccccaccacaggcacaccagggcagaagagccacgaggagggagaaccgaggagcagccacaagggacgagg

SEQ ID NO: 123155 - RNA, 73 nt, Homo sapiens
ggggggcgcgccgcgaccgcccgccggacagccagcaggggcagaagcagcagacggaacgagggcaaagaag

SEQ ID NO: 123156 - RNA, 76 nt, Homo sapiens
caagaagcaggaaaggccggacaccaggaaggaagaaggaaaagcggaagcgcagacaagaaaagagagaagccag

SEQ ID NO: 123157 - RNA, 73 nt, Homo sapiens
caagcaacaggcaggaggaaaccgacaagcccaaacggaagaagaggaagccaaagcacagagccaaaaggga

SEQ ID NO: 123158 - RNA, 75 nt, Homo sapiens
aggaccggaagcacacaacaggaaaacaaaagaggagaaagagcccccgaggaaagcacgcacaacgaggaaaag

SEQ ID NO: 123159 - RNA, 71 nt, Homo sapiens
cacgaggaacagacagccagaggagagagagagacaacagaggagcacagaacccacggaggaaggacccc

SEQ ID NO: 123160 - RNA, 63 nt, Homo sapiens
gaagagagacacaacaaggacagagcgggagccaccagcgccaaagggaagccaggagcccgg

SEQ ID NO: 123161 - RNA, 67 nt, Homo sapiens
acgcggcccgacaaacaaagcgaggacacaccaaacaagagaaggcgagacaagggaaccagcgacc

SEQ ID NO: 123162 - RNA, 83 nt, Homo sapiens
gcagaaacacaagacaagagcagaagcgaagcaagcagcccgacggccaggaggcgaagagacgaggaagcccaggagcccga

SEQ ID NO: 123163 - RNA, 79 nt, Homo sapiens
acgacggagagcagagagggcaagaggccaaaaacccaggacagggcagaccgccagcagcacagcaagccacagagag

SEQ ID NO: 123164 - RNA, 76 nt, Homo sapiens
gcccgcccggcgcccgccgccgcccggccaagaggcgggaaccgcgcggcgcgcggacggcaaagccacgccaccc

SEQ ID NO: 123165 - RNA, 53 nt, Homo sapiens
gggcgggggccccgcgccgcggccgagcagcgggacagcgcccgcgccgaccc

SEQ ID NO: 123166 - RNA, 61 nt, Homo sapiens
ccggaggcgcccgagcggcccccggggcccgccccacagcacagaggggaaaccccccggg

SEQ ID NO: 123167 - RNA, 81 nt, Homo sapiens
caaggacacggagacagagaagaccccaacgacaaaagccgcagaccacagagacccccgagagccccagagcaggaggaa

SEQ ID NO: 123168 - RNA, 70 nt, Homo sapiens
gggaaagggacaagaagggcaaagccgaagggggaagaggaagaagcaaacgacagggaaccacagcccc

SEQ ID NO: 123169 - RNA, 83 nt, Homo sapiens
gaagcgaggacacacccaggaaaagaccaggacggacaagcacagccggaagcggaagccgcagaaggaccggccagaagcaa

SEQ ID NO: 123170 - RNA, 88 nt, Homo sapiens
acgagacagaggaacccagggcaagaaccggacaccggaagcggaggagagcggcagccagcagaagaagcgaaagggacagaggaga

SEQ ID NO: 123171 - RNA, 78 nt, Homo sapiens
gacagcagaacggaaagaaaggcggcgaggaagagccagaagcccagccacaggcaacgaaaacaacgagccacaagg

SEQ ID NO: 123172 - RNA, 74 nt, Homo sapiens
aaagcgagagagggaagcgcccggccagcagggcagaacgggagcacggggaccagagccccacgcacccgcac

SEQ ID NO: 123173 - RNA, 65 nt, Homo sapiens
ggaagaggcggcgggggcgaggggagccgccaccaaaagcagacggaaaacccacggggaagacc

SEQ ID NO: 123174 - RNA, 83 nt, Homo sapiens
agcgcgagccaggacccggacacaaccagagggaagcacgcccgggcacagcggaagagacgacggaacagccccggcgaggg

SEQ ID NO: 123175 - RNA, 80 nt, Homo sapiens
gaggaagccgcaggcgggcagcccaggaccagcacacagggccaccgcgcgggccaacaagcacaagccaggagaggcag

SEQ ID NO: 123176 - RNA, 83 nt, Homo sapiens
ccagcccaggcccgcgacagaaggaagagaccgcaccacgccgggaacggggaacaaagagcagaggccagcagccaccgaca

SEQ ID NO: 123177 - RNA, 80 nt, Homo sapiens
cagccacagcagcccccaaggagcgcaagggcgacacaaggccaacggacacacgggcagcgcccgacagagcgcccgag

SEQ ID NO: 123178 - RNA, 89 nt, Homo sapiens
caggagccaggccgggccgcgacgcacgccagagacaccaagcagggccgcggagggcgcacgggcccagagacgacgcaggacccaca

SEQ ID NO: 123179 - RNA, 62 nt, Homo sapiens
agaaacgggcagccaggcccccacagcccgcagaccgacacaaggacagagcaccaagaccg

SEQ ID NO: 123180 - RNA, 113 nt, Homo sapiens
gggcggaccaccgcccccgcgccccgcaccgcggcaaagagaggacgcagcgagaaaggacccaaagacaggaccacgcaccagcagagaaggaaagcaaaccgaagcaggcg

SEQ ID NO: 123181 - RNA, 71 nt, Homo sapiens
cggcgccaccacacggcacgcacaggccgagccggcccaagaaggaaagaccacagcaagaccacgccccc

SEQ ID NO: 123182 - RNA, 86 nt, Homo sapiens
cccccaccccggccgcgcccaagcgcaggggccccgggccaggggccagggagaccagggggcaggggaggagcgcccaggcgacc

SEQ ID NO: 123183 - RNA, 71 nt, Homo sapiens
agcaggcccgggcgaagagcccccccccaaggcaagcggcagccacacccggagaaggagccgcccaggga

SEQ ID NO: 123184 - RNA, 78 nt, Homo sapiens
caggaagaccgcaccacgcgcccacacagggaaccggagaagaaaaagcagaaaggaacagaaaacaaaagaacaagg

SEQ ID NO: 123185 - RNA, 79 nt, Homo sapiens
agacagaaggagcaggaaccaaaggagcgaccaaagcagggcacccccgaaggacaggcacccggcccacccgcggagg

SEQ ID NO: 123186 - RNA, 77 nt, Homo sapiens
gcggggaggaggaggaagagggaggagaaaggcggaggacgagccaggggaggagacccgcaggggggagaagagga

SEQ ID NO: 123187 - RNA, 65 nt, Homo sapiens
aagcaagcagcagaagagccaaggaaaaacagcaagaacccaaaaggggccggagcgagggagag

SEQ ID NO: 123188 - RNA, 88 nt, Homo sapiens
gcaccgcggagcaaaaaaagagcccgcaagaagaacagagacagcagccaaacccccagcgaggagaccgcagccgagcagcaccgca

SEQ ID NO: 123189 - RNA, 84 nt, Homo sapiens
ccaaccagacggcggcaggagagcaaggagaaggacgccagggcggaggaccccaacgggccggcccagggagaacgcaaaacc

SEQ ID NO: 123190 - RNA, 70 nt, Homo sapiens
ggccggaagcaacaagcaaaacccaaggccagggcgaagacagaggcaggcgaccggcccgaggaccgcc

SEQ ID NO: 123191 - RNA, 89 nt, Homo sapiens
ccggccccagccgagccccagccaggacgagaggagcggagcccgcagaaccccacagcaagaggacgcccgcacagagacaccccaga

SEQ ID NO: 123192 - RNA, 72 nt, Homo sapiens
cgggcagagccccaaccaccaggaggaaagcccagcggaggcacccaccacgggccaggcgggccagaggca

SEQ ID NO: 123193 - RNA, 67 nt, Homo sapiens
gggacgcacggaccaaaaacccgcaacagcccccgcccaaacgcggggaaacacaggcagcggaacc

SEQ ID NO: 123194 - RNA, 52 nt, Homo sapiens
gccgacagccgcggccgggcccgagacgaggggaagcacgagcaagaaggga

SEQ ID NO: 123195 - RNA, 48 nt, Homo sapiens
aacccgggccccacagcaaccccaccgcacgcggacgccgccaaaagc

SEQ ID NO: 123196 - RNA, 84 nt, Homo sapiens
ccgcgccagaacgaccccgagaggcgcccgccccgagagcaaggccccggggaagggaagcaggggcggggcgggcccagaagc

SEQ ID NO: 123197 - RNA, 75 nt, Homo sapiens
aagaagaagaaggaaaaaaaccgaacaaggagcggcaccaccaaagcaagaccaaaaaagcgaacgcaaggggcc

SEQ ID NO: 123198 - RNA, 75 nt, Homo sapiens
ggccccggcggggcaagagcgggggcgggaccccgccgcggcgggagggcagacagccacacacacccccgccgg

SEQ ID NO: 123199 - RNA, 79 nt, Homo sapiens
gggcgcggagggccgagggagggccgagccagccgcggccggaggagcccccaggccagaagacccggggcaggcgcag

SEQ ID NO: 123200 - RNA, 85 nt, Homo sapiens
agcacgggaggccgcccgggagaagcccaccacgcaacgggacggcgcggcggaaggcgcgccagacgagccacgcgccacaccg

SEQ ID NO: 123201 - RNA, 36 nt, Homo sapiens
aaacaggagaagaccagccaagacagggaaaagaac

SEQ ID NO: 123202 - RNA, 74 nt, Homo sapiens
ccggcgcagcgagcgcggacggagaggaaagcggaacgaaaaccacacaagggacaacagaagaggacagacca

SEQ ID NO: 123203 - RNA, 83 nt, Homo sapiens
agccgcggaaccggcggccgccaggcgccaacaggaccgggagagaccggcggacaggaacaagccagccagcaccacccaac

SEQ ID NO: 123204 - RNA, 49 nt, Homo sapiens
cccaggaggccagaaggaaaacgaaaaaaagaaggggagcgcgagaagg

SEQ ID NO: 123205 - RNA, 79 nt, Homo sapiens
ggagagaccacaaggaaaaccaagaaccagaacggccacagaacacaaccaacccggaaggccccagccaggacagccc

SEQ ID NO: 123206 - RNA, 79 nt, Homo sapiens
agcccccccgcccgcgcgccccggagcgcgaaggagcgcgggaagaagccaagaggagaaagaagcgacacccacacga

SEQ ID NO: 123207 - RNA, 73 nt, Homo sapiens
gcgagagagggaagcgcccggccggaggcaggggaaagaccagcaaaaacaggaagccggaggcaccaacaag

SEQ ID NO: 123208 - RNA, 77 nt, Homo sapiens
ggaccaggaggcgagcaacagagggaaaacgggaacacaagccaggacagcccagcaagcggagggcagccaaggga

SEQ ID NO: 123209 - RNA, 60 nt, Homo sapiens
aacaaccgacacagcaccgacaaaagacccacaccaagcccgcaagaagcccagcgcagc

SEQ ID NO: 123210 - RNA, 75 nt, Homo sapiens
ggccccagccgcggaggaggcgagaagaggaaaacagcaccggggccagcagcgccgcccaccgagcgggggccg

SEQ ID NO: 123211 - RNA, 62 nt, Homo sapiens
agacacaagcacagcgagaccgcggcgcaggaggaggaggagaagcaagcgggcaacaggaa

SEQ ID NO: 123212 - RNA, 77 nt, Homo sapiens
ccgcgccgcgcccagccgggaaagcccagccccgggcaagcccaggaggacacacaaagaggaaacacggagcgaag

SEQ ID NO: 123213 - RNA, 70 nt, Homo sapiens
agaaagaacagcggccaagaggaaaaaacggacacccgcaacgcacgcagggggcgaggaagagacaggc

SEQ ID NO: 123214 - RNA, 36 nt, Homo sapiens
gacggagcacccaggacacgaacagagacagacccg

SEQ ID NO: 123215 - RNA, 80 nt, Homo sapiens
gggaggagaggagaggaggcgcgggcggagcggaaagaggaggagaggggaggaggcgaaggcgcccacagcggcagaac

SEQ ID NO: 123216 - RNA, 38 nt, Homo sapiens
gagccaccccccgcagaccaggagggaagcagccagaa

SEQ ID NO: 123217 - RNA, 66 nt, Homo sapiens
acagagcacccaccacaggagagccgggccagaagaaaccagaaccacagacaaagccgcccccaa

SEQ ID NO: 123218 - RNA, 76 nt, Homo sapiens
cggggcggaggacgcggcagcccgggagcggcgagggaaaagcgaggcaaggcaggcgggacaggaacacaagaca

SEQ ID NO: 123219 - RNA, 74 nt, Homo sapiens
cgacccgaacaaggccaacaccagcaggcgcgcacgaaaagaccagccagaagcgagccgaaggaagacagggc

SEQ ID NO: 123220 - RNA, 78 nt, Homo sapiens
ccgaccgacccaccacacccaacggacccagggaaaggcaacaggaggagggaagcgaaccaaagcacccgcggcacg

SEQ ID NO: 123221 - RNA, 64 nt, Homo sapiens
cccccgccccccaggaggggcgagagggagccgcagcgagcaggagccaccgaggccacccgag

SEQ ID NO: 123222 - RNA, 55 nt, Homo sapiens
gcgaacgagggaccaagcacgccagaaagagcgagccacccccggcgcccgcggg

SEQ ID NO: 123223 - RNA, 86 nt, Homo sapiens
cgcgggcggcggcgccggcaggaaggcggacgaaagaaagaaggagcaccaacgcaaagaaaaagaccaagaagaccagggacgcg

SEQ ID NO: 123224 - RNA, 84 nt, Homo sapiens
cggcccgccaagagccagaccccgccccccgaggcgcagcccgaacccagcagccacacgccaacaacgagacagccgcggacg

SEQ ID NO: 123225 - RNA, 74 nt, Homo sapiens
acccagggcgcccaaggccccagggcaggggcccggagagcgcgccccccaggacccagaccgagccccgcagg

SEQ ID NO: 123226 - RNA, 85 nt, Homo sapiens
gcccaggcgcaaggccgggagcgcgacgaaggcccccacccgccggcggcgcgccgccggaggaccaagacccacggcgaagacc

SEQ ID NO: 123227 - RNA, 75 nt, Homo sapiens
caaaaaagcaaggcaggggccccaaaaccggaaaggacgcgaggacaggacacccgcaggagcaaacagccaagg

SEQ ID NO: 123228 - RNA, 71 nt, Homo sapiens
cccgcgacccgagacagccccaagacaaccccaccagcaccacagaagggaagaaagcggaggcggcggcg

SEQ ID NO: 123229 - RNA, 73 nt, Homo sapiens
ggggggagaagaaagagccaaacaacgccacagagaggcagaaacgaagcgaaaggaaaccaaaaggaaaaaa

SEQ ID NO: 123230 - RNA, 70 nt, Homo sapiens
cacaaggagcgagcggaagccacagcccaaacaacggcaaacaacgaccagagagagggaagacgaccca

SEQ ID NO: 123231 - RNA, 80 nt, Homo sapiens
gccccgccaaggagacgccccacgaggcccaaaccgccaagacacagcgagaagaggccaccagaaaacggccacgacac

SEQ ID NO: 123232 - RNA, 84 nt, Homo sapiens
cgcaaaaagaggcgaaaggaagcaagcagcagaagagccaaggaaaaacagcaagaacccaaaaggggcgcgccagaggacacc

SEQ ID NO: 123233 - RNA, 75 nt, Homo sapiens
agcggagcggcgggggggggagcccgcccccggcggccccccgcgcacagaacggaagccgagccacggagcacc

SEQ ID NO: 123234 - RNA, 64 nt, Homo sapiens
agacgggagagggacggcggaggcaaagaaagggccgaaagaagaaggggaaagaaacaaaaac

SEQ ID NO: 123235 - RNA, 64 nt, Homo sapiens
ccagccacgcgcccccgacgaccgcccgacggcacccggcgagagcacggagcaccagaagcac

SEQ ID NO: 123236 - RNA, 59 nt, Homo sapiens
acgggccgcgccgcccgcaagcagagacgagaccagcagacagaacggagccccggaag

SEQ ID NO: 123237 - RNA, 71 nt, Homo sapiens
cagcgccggaaaccaacaaacgaagaagacacgaacaggggacgaaaaacgagccgggggcaaaaggaaga

SEQ ID NO: 123238 - RNA, 74 nt, Homo sapiens
agaagccaggagggaaaagcaggagaaacaagggccaaaggaggaaccaaagcccagccgaaaggcgacagccg

SEQ ID NO: 123239 - RNA, 83 nt, Homo sapiens
cccccgccgcgcccgggagacgccccgccgcccacccaggggaacaccgcagcaggagacgcgccgaaaaagcaaagcaaaaa

SEQ ID NO: 123240 - RNA, 74 nt, Homo sapiens
ggcccccccgagaggaaaagggagagaaggcgcgcaggagagcgcagagacccgcccggaagcgaggcaacagg

SEQ ID NO: 123241 - RNA, 78 nt, Homo sapiens
accccagccaccccagccagggaaccaagccgcggagaaccgaaccaacagccagccaaagccaggcagcacagcaca

SEQ ID NO: 123242 - RNA, 67 nt, Homo sapiens
gccccccgggggacacggacccaacaacaaaccaccggggcaaaagaccaacccaaacccagacgga

SEQ ID NO: 123243 - RNA, 69 nt, Homo sapiens
gcgcagcacaggcaaagagcgagaggaacaggcaaaaaggggaggcaagcaggggggcaaaggaaagaa

SEQ ID NO: 123244 - RNA, 74 nt, Homo sapiens
ggaggccccaggcacaaacgccccccgggaagacacaaacgcaccaccagaaagccaagcggaaaaggaaaccc

SEQ ID NO: 123245 - RNA, 77 nt, Homo sapiens
gcagaccaggaacaagagagaaagagggacagccgcacggaggcgaaacacaaaggggagaggaacagggcgcacca

SEQ ID NO: 123246 - RNA, 77 nt, Homo sapiens
agcaacgccggacgcccacgcaagcaggccaaagccaccgccccgcgccgccccccggccaccgcacaggcaagaaa

SEQ ID NO: 123247 - RNA, 92 nt, Homo sapiens
caacgcaaaagccggggccgcaaagaaagcaaacggcgcgaggaccagacgaaccagggaccgacccagccccccagcagacgccagaagga

SEQ ID NO: 123248 - RNA, 104 nt, Homo sapiens
cggcgcgccgggagaccgcggaggccgacaggacgggcgccgccccgcgcggcagggaagaagacggcacgggacccccagcacaggcagcaggccgggagaga

SEQ ID NO: 123249 - RNA, 67 nt, Homo sapiens
ccggcgcacggggcgcacaccacggcccgggccgcgggcccccagcgccagacccgcacgaaagagg

SEQ ID NO: 123250 - RNA, 83 nt, Homo sapiens
gacaggccgcacaaaaaggggacggaaagagagccgcagcgcagaacaagggaaaaaagggcaaaaagggcaaaaaagacagg

SEQ ID NO: 123251 - RNA, 70 nt, Homo sapiens
agcagcgcagccgggggccagccggaaggaggcggccaaccagggcacggacgcccgccacagcaaggac

SEQ ID NO: 123252 - RNA, 84 nt, Homo sapiens
caaacaagacaacgagcgaaagcgaaaaacagcgaccagagcacccacaccaaggaggagcaccccgggcaaggcacggggccg

SEQ ID NO: 123253 - RNA, 67 nt, Homo sapiens
ggcgaggagaacgcccgcggacgacccgagggaccaagaaaggcccagggaccaaagcccggacaag

SEQ ID NO: 123254 - RNA, 75 nt, Homo sapiens
gccaacgcacccccgacaaacaccacgagaaccgcagcccacacggccgggagagagcgcgaaccggaaaaagaa

SEQ ID NO: 123255 - RNA, 80 nt, Homo sapiens
aagcaaaaagaggccaagaacaagaacgacggagcccagagccaaaaggagaagcgaacaaaaaaaaccccaaagaaccc

SEQ ID NO: 123256 - RNA, 80 nt, Homo sapiens
aagaaccgccaagaaacaaagcagcaagccacacccagaaccagcagcccgcagaagaaaggcaaacccaaggcccaaaa

SEQ ID NO: 123257 - RNA, 83 nt, Homo sapiens
aaaggaacacaacgggccaaggacccagcggccaagcccgggcccagccccacaagcgggacgaagccaaacgaggaacacag

SEQ ID NO: 123258 - RNA, 83 nt, Homo sapiens
ggccgggaaggcacaccgggaagagagggaagacagaccaggggagacaaaacccaagacacgagagagcaggagacggaggg

SEQ ID NO: 123259 - RNA, 70 nt, Homo sapiens
aagcccccaaagagagaaccggagagcacccaacaccccaaaagcacgcacgaaaccggcaagccagcgg

SEQ ID NO: 123260 - RNA, 58 nt, Homo sapiens
acgccgccccgacgcgagggcagccccgccaggcgagcaggcgacccaaaagagcgaa

SEQ ID NO: 123261 - RNA, 61 nt, Homo sapiens
agaagaggggccccaaaggcagcgcggcaggaccccagccacagcggaggacgaggccaac

SEQ ID NO: 123262 - RNA, 39 nt, Homo sapiens
ggaaacccggagaccaaaccgaggaggaagagacaccga

SEQ ID NO: 123263 - RNA, 79 nt, Homo sapiens
ccagaagggagagacccgcccaccgaaggacgccgcagaagagcagagcagccgagaagaagccaaaaaacacggagga

SEQ ID NO: 123264 - RNA, 76 nt, Homo sapiens
aaagcccaccgaagaacagaaaacgcaaggagaaacccaagagcagcggcagaagagcccggaacgccagagcgga

SEQ ID NO: 123265 - RNA, 78 nt, Homo sapiens
cgggcaacacaaagcccagggaaaccacagaaaccccaaggcgcagacaccgacggagcgggagccagagagcgccgc

SEQ ID NO: 123266 - RNA, 71 nt, Homo sapiens
agccgagccccccccgagaaacgagacagagcaaaagggaagaagagccgggcaagggcacccaaaaaccg

SEQ ID NO: 123267 - RNA, 73 nt, Homo sapiens
gaagggagggcagaaggaacaaaacgaaaggaccgggcaggcagcagcgaagggccaccaaagcaagaaagaa

SEQ ID NO: 123268 - RNA, 43 nt, Homo sapiens
cgcgccgcgcccggaccccagaaaggacccaggagcgaaacag

SEQ ID NO: 123269 - RNA, 72 nt, Homo sapiens
gaaggaccaagaaccagcccgacagagaaaggcacaacccagaccagagaagcgaccagacgcaccagagac

SEQ ID NO: 123270 - RNA, 85 nt, Homo sapiens
cgacacccccagggggaccccgccggaccaaggagcggcgcggggaccaaacccggagccagccaccccgacccaaagaggagag

SEQ ID NO: 123271 - RNA, 64 nt, Homo sapiens
acacaacaccacgcagagggacgagcagagaacagcaaaagagcacaagcgccaacccaaacga

SEQ ID NO: 123272 - RNA, 57 nt, Homo sapiens
aaggggacggggcggaaacgccccgaggagcaggaagggggcagcacgccgaaggag

SEQ ID NO: 123273 - RNA, 50 nt, Homo sapiens
accgacacagaagcacggagcccaagagggaggaaccgaaaggaaaccga

SEQ ID NO: 123274 - RNA, 70 nt, Homo sapiens
ccagaggcccagacggccaaaggaggaagggacgacggaccgaaaaggagaggggacggggcaaccgcca

SEQ ID NO: 123275 - RNA, 80 nt, Homo sapiens
aggccacccccggcgggcccgaggcggcgagagaggcaggcggagccgaccgggccagacagacacggagacgagcgggg

SEQ ID NO: 123276 - RNA, 81 nt, Homo sapiens
acacgcaggggccaacggcccaccagcccccacgcagaggccagcgaccacaagcagaagaggacggaagcacgggaaacc

SEQ ID NO: 123277 - RNA, 71 nt, Homo sapiens
gaaagacccaggacccagaacacaacacgagagagaacacagcacgaaaacaggagcggggaaacagcgga

SEQ ID NO: 123278 - RNA, 60 nt, Homo sapiens
gccggggaaacgcaggaggccaagaacccaaagcaaggcgagacaaggggccaaccagcc

SEQ ID NO: 123279 - RNA, 84 nt, Homo sapiens
aacaccacaaaaccacagccaaggccccgagccccggccccaaagacccaaaacagagacaccccccagcccccgcgccccgaa

SEQ ID NO: 123280 - RNA, 81 nt, Homo sapiens
gaagacaaacaaccagcccagcaaacaagagccagagaagagaaaggaagagaaccgaccaaggggcagaccgggaaacaa

SEQ ID NO: 123281 - RNA, 128 nt, Homo sapiens
ggagcggcgcccccccccccccggcgcggaccccgcggcgccgccgcccgcagccccgagaccgcagaagacgaccccgacgcaggccaggagccgcggacagaagccgagcacggccgagacaaaag

SEQ ID NO: 123282 - RNA, 71 nt, Homo sapiens
cggagcaagacccccgagcggcagcccacaagcaggaagaccagccccaggagggaaacagagcacccacc

SEQ ID NO: 123283 - RNA, 75 nt, Homo sapiens
aagaaccagggagaagccgcccgaacaccagaacaccccaccagaccacccagcaagcccacaaaaaaggcacaa

SEQ ID NO: 123284 - RNA, 81 nt, Homo sapiens
cggaggagaagggacagcccgggcccggggaaggggaaccggcaaacaaggccccggagcaaggggaacgggcccccggcc

SEQ ID NO: 123285 - RNA, 71 nt, Homo sapiens
ccaagagcagaccggccagccacgaagcagagagcggggccaggacacacgagcaagaagaccccaagagc

SEQ ID NO: 123286 - RNA, 56 nt, Homo sapiens
acagaacagaacccaaaagccgacaaccccagaaacaggaaggacacagacaaaag

SEQ ID NO: 123287 - RNA, 72 nt, Homo sapiens
aaagcgcaccggccccaaagggagcacagccaggcaggggcccgggcacagcgcagcgagcgccaccgcggg

SEQ ID NO: 123288 - RNA, 69 nt, Homo sapiens
cagacgcagggcgcccccggaaaaaaggggcagacagccaaggaaagcggggagacccagaaccggaag

SEQ ID NO: 123289 - RNA, 78 nt, Homo sapiens
ccgcccagccaggacgcgcccggagaagcaccaggacaaaagaagggcagcacaaaggaaagccccaaaccccggaac

SEQ ID NO: 123290 - RNA, 51 nt, Homo sapiens
gccccagcacccgccccggggcaccacccccaaggggccgcaaggccaggc

SEQ ID NO: 123291 - RNA, 60 nt, Homo sapiens
cagccacgccgggcccagcaggccgcagaggccaagcacggcgccccgcgcacggccggc

SEQ ID NO: 123292 - RNA, 80 nt, Homo sapiens
cagcgcgccggccggcccccgcgaaggaggacggaggagcgaaagcacacgaagaggcagcccagaagaagaaagcaagc

SEQ ID NO: 123293 - RNA, 75 nt, Homo sapiens
agaaggggaggggagggaaaggcccaggaaaaagggaggccacgggcgacgaacccgacccaagcaacccgcggc

SEQ ID NO: 123294 - RNA, 79 nt, Homo sapiens
gcacccgaccacgggagagcaccacagcaacggccaagcggcccccagccaacaccagcggacagaggggaccggagac

SEQ ID NO: 123295 - RNA, 73 nt, Homo sapiens
caggggacacacggcagaaacggaccgagaaaagagaacacagggcacgggaggccgcgcagggagaagagcg

SEQ ID NO: 123296 - RNA, 76 nt, Homo sapiens
gccacacaccaagagcgccaggaccacgagaggcgcgcaggggggccagcgcaccaagcagaggaaggagccaggc

SEQ ID NO: 123297 - RNA, 68 nt, Homo sapiens
ggaacaacgggaaagccgcacacccaccagggggcagagaagacacagccgaaagaggaccgcacagc

SEQ ID NO: 123298 - RNA, 77 nt, Homo sapiens
cgggaagcaggacgcgccgcgccccaagcaccacacccccaaggcaagggcgcaaagccaacaacgagcgagcggga

SEQ ID NO: 123299 - RNA, 63 nt, Homo sapiens
gcgccgagcgcccgcgagcagccacccgcgcgccgccgcagcgcagaggcggccccagggggg

SEQ ID NO: 123300 - RNA, 71 nt, Homo sapiens
aacaaaggccacagcgagcacccacgggagaccggggggcaagaaaaggaagaagaagcacaccaccccaa

SEQ ID NO: 123301 - RNA, 80 nt, Homo sapiens
cggaccgggccgcgcacgccgcccaggacccgaacacggaagaaagacacgcaggaggccgcggccgagcagcgccaccc

SEQ ID NO: 123302 - RNA, 37 nt, Homo sapiens
agaaggccggagacaccagcaggcgaccggcccgagg

SEQ ID NO: 123303 - RNA, 87 nt, Homo sapiens
ggagggagccgcgggaggaccgcaggaaccgcccgcccaggccagggcagccacggcgaagccccaacccagcggaggagacaaccc

SEQ ID NO: 123304 - RNA, 89 nt, Homo sapiens
cgggaacgggccgcgcggcccgggaacggcccaggccccgcccgcaggcccgggcagagacgcccaagcagaggccgcgagaagagaag

SEQ ID NO: 123305 - RNA, 79 nt, Homo sapiens
gcccgcccgggcggggaggggcgcccgcccaagcagaggaaagaccacagcaagaccacgcccccagccgggggaccag

SEQ ID NO: 123306 - RNA, 79 nt, Homo sapiens
cacagccacccgggagagcccggaaaggcccgcggcgaggagcgagcagagaaaaagcggggaaggggggcaaaaaaaa

SEQ ID NO: 123307 - RNA, 72 nt, Homo sapiens
gcgggccgacagagaaggccaccaaggacagggcagcaagcccggacgaggggcaggaccggggacacacga

SEQ ID NO: 123308 - RNA, 70 nt, Homo sapiens
gagcaagcaaaggacagccagaacaagcggaagaacaacaaacgaaggcgacggggcaagcaagggccaa

SEQ ID NO: 123309 - RNA, 56 nt, Homo sapiens
cggagagacacgcggaggcgagggggcggggacacaacggggccgcgcaagaacca

SEQ ID NO: 123310 - RNA, 76 nt, Homo sapiens
gacggaggagggcggccacaaggcaccgccgaggaagaaccggccccccagcaaggccagcagagcccaagggcgc

SEQ ID NO: 123311 - RNA, 77 nt, Homo sapiens
gggccagagcaccggaggcacaacccgggccgaggagccacagaggagggcccgggaagggcaccacacaccacaaa

SEQ ID NO: 123312 - RNA, 37 nt, Homo sapiens
gacaagacccgccagaacagagccggggccggacgag

SEQ ID NO: 123313 - RNA, 79 nt, Homo sapiens
agcccggacccacgaccccccggccagacaggacgaacagcggggacgccccagcagaccgcccaggagaggaaagcag

SEQ ID NO: 123314 - RNA, 72 nt, Homo sapiens
gccgaccccagaggacaggcgggccagcggccgccccccccacacaccagcccgcgcagaccacagaagcgc

SEQ ID NO: 123315 - RNA, 69 nt, Homo sapiens
caccaccggagcaaacaaccgaggaccaccggcaccacaccaccaaagaaagacagacccagacgaaga

SEQ ID NO: 123316 - RNA, 70 nt, Homo sapiens
cccgggacccagagcgggcagggacaggcccagaggcacaccacaggagcacaaagagagagagagaggc

SEQ ID NO: 123317 - RNA, 57 nt, Homo sapiens
caggacccggccgcgcccgcagaaagccagaccaacgagcgagcacgcgccaaggaa

SEQ ID NO: 123318 - RNA, 81 nt, Homo sapiens
ggaagcggcagccgcacacgaggccccccaacacccccgcacaggaacgcgcggacgccaccaggcggcaaaaccgcgcac

SEQ ID NO: 123319 - RNA, 43 nt, Homo sapiens
cggagcggagcccggaggccaagaaggacaagaaggggagaag

SEQ ID NO: 123320 - RNA, 70 nt, Homo sapiens
cagccagccgcaacggcggcgcagggccaccagagaaggacaccgcaggccaagccgcgggaagaaccac

SEQ ID NO: 123321 - RNA, 84 nt, Homo sapiens
gccggcccgcgcccgacgagcaggaccaccaggccacgaggagggcgcgagaagacaaagacgccgagaggagcaacgagacca

SEQ ID NO: 123322 - RNA, 59 nt, Homo sapiens
agcgccggggcacgacacaaaaacagagaccacaccgcgccagaccccccaggagagcc

SEQ ID NO: 123323 - RNA, 76 nt, Homo sapiens
acaacagacgaaaaagcagaggcaagaaccaggaaaaacggagccgagaccaaggaaagaaagcccaacagcacag

SEQ ID NO: 123324 - RNA, 59 nt, Homo sapiens
acaggggggccgacacaagagcgcgagaccaacaggcggaggagagaggacgcgagaaa

SEQ ID NO: 123325 - RNA, 67 nt, Homo sapiens
gcggcagcggcagacaccagcagcaggggacccccaaaagacaagggcaaaacggaccagacacaaa

SEQ ID NO: 123326 - RNA, 70 nt, Homo sapiens
aaggcgacggcgccgaaacggaacccgcaccaaggagccagcaaccacagagcaagcaggaaacaaaaga

SEQ ID NO: 123327 - RNA, 82 nt, Homo sapiens
ggagaaggcggcggcccggccgcagcggcaacagaacgaaaaacagggcacagcaaagcaagccaagagggcccagccaaga

SEQ ID NO: 123328 - RNA, 37 nt, Homo sapiens
ccccgggcgcccggagccccagccacggaaccaagcc

SEQ ID NO: 123329 - RNA, 72 nt, Homo sapiens
ggccacgaacacgccggagccgccagggcccgcagccaccagggcaaacacacccgcacggaacagcgcgcc

SEQ ID NO: 123330 - RNA, 89 nt, Homo sapiens
aaaagacccagaagcccaaccaagggcagaaggaaaggcagaaaagggaccaagaaaggcccagggaccaaagcccggacaaggcccga

SEQ ID NO: 123331 - RNA, 75 nt, Homo sapiens
caacccgcggaggcagaccgcacggggaacggcacagggaggggacagaccaaccggcagccaaccgcacaaaag

SEQ ID NO: 123332 - RNA, 57 nt, Homo sapiens
cgaaggcgccggccaaaagaggaaaccgagacaggaaagccaagagcaaagaacaag

SEQ ID NO: 123333 - RNA, 74 nt, Homo sapiens
cgcgccgccccgcgcgcgagccacgcagcccccaggagagcgcgggcgacggggcgagagagccggggggacag

SEQ ID NO: 123334 - RNA, 58 nt, Homo sapiens
gacaagggccgcgcaagcggcagggacaagaagggagagaccaccaccgggaacagag

SEQ ID NO: 123335 - RNA, 77 nt, Homo sapiens
gaacacaagcaagagagagggggagacacagccaaacgaacagggagccgccaccaaaagcagacggaaaacccacg

SEQ ID NO: 123336 - RNA, 76 nt, Homo sapiens
cgggagaagcccaggaagacggccagggaaccaaacagcagagcagaaaaacaccagcaaccgacggcagcaacaa

SEQ ID NO: 123337 - RNA, 75 nt, Homo sapiens
gggccccgccgagcccagcccccagaaaggaggacaacgggacccagaagagacggcccgccacgggccccgcag

SEQ ID NO: 123338 - RNA, 87 nt, Homo sapiens
acccacacgggcgagaagcccacgaggcaacacgcaaggccgccaccagcccgggcgcgccaggcacagccaagagcggaccggcag

SEQ ID NO: 123339 - RNA, 86 nt, Homo sapiens
agcgaacgaggaagcagcgaacgagaaccaaggcggacgcggcgagaaggggaaaggaaaccaaaccaggaaagaaggacaaggag

SEQ ID NO: 123340 - RNA, 62 nt, Homo sapiens
agcaagaggccgccgcggagacccagcgcacgggagcagccagaagcggagaaagagggaga

SEQ ID NO: 123341 - RNA, 81 nt, Homo sapiens
ccaaggcccgaacacccgcccccgcccaggccccgacggcccagaccccaacaggcaagcaccacaggcagagagcccacc

SEQ ID NO: 123342 - RNA, 88 nt, Homo sapiens
acaagacccaagaagacaagaggagagaagggagagaaacaagcaaggaccccagagaccagcaagggcccagagcgcagagcggaga

SEQ ID NO: 123343 - RNA, 84 nt, Homo sapiens
cacaccccccaggagaagcgggcagcagccagaagaggacgcaccaccagcgaggaacaaagacagaggagcagagccaggaag

SEQ ID NO: 123344 - RNA, 76 nt, Homo sapiens
cgcaaccgaaaaaagaacagagaacaaaaccagaggggagcgcaggcagcccgaccacagcgccccaggaggcggc

SEQ ID NO: 123345 - RNA, 54 nt, Homo sapiens
acaagaggagagaaggacaagaacagagaacgaggaagaaaaggaaacccaaaa

SEQ ID NO: 123346 - RNA, 76 nt, Homo sapiens
agggcggggaggagagggggcgacaacgagcaaggaaaccgggaccgacaagacggaaaccgggagggggaaaagc

SEQ ID NO: 123347 - RNA, 58 nt, Homo sapiens
ccgggggcagcgcgccggaacggccgagcggccccgagccgggacacccggcggcggc

SEQ ID NO: 123348 - RNA, 79 nt, Homo sapiens
gccagaggggaggaaacacaagaaagccaggccaagcagcagaacagaagagacccggccacgaaagacagcacaaaga

SEQ ID NO: 123349 - RNA, 78 nt, Homo sapiens
ggggaggccaccaacacgcacaaagaaacgcgaacaagaagcaggagaagcaagaagaaggaccgcagaacagaacaa

SEQ ID NO: 123350 - RNA, 83 nt, Homo sapiens
agcgcagcccacagccagggccacgaggacaagcagaaaccaagcggaccgagacacagccgcccggcccccgcccccggacc

SEQ ID NO: 123351 - RNA, 76 nt, Homo sapiens
caccggagaggagggagaacaagacgaggaacaaaaaccgaaaagggcgacagcaagccagggggcagagacccgg

SEQ ID NO: 123352 - RNA, 39 nt, Homo sapiens
cagcacgaggaagcgaagaaaccagcccgccgcacccag

SEQ ID NO: 123353 - RNA, 64 nt, Homo sapiens
gcccggcgccggccgagaaggcagaggcgaaagaagagcaaacgcgcgccaccgaagggcccaa

SEQ ID NO: 123354 - RNA, 53 nt, Homo sapiens
acccggcgagacgacaggagacgccgcacccaggcggaggcagggggaccggc

SEQ ID NO: 123355 - RNA, 62 nt, Homo sapiens
ccaaggaggagacaaggacaccgcgcaaggccggcagaaggggacgaagggaacccgccggg

SEQ ID NO: 123356 - RNA, 61 nt, Homo sapiens
acccccgcgccgcacggggacgagaaaaagcggggaaggggggcaaaaaaaagaagcaagc

SEQ ID NO: 123357 - RNA, 81 nt, Homo sapiens
aagcagcggcagaaaacagaagccagccgccagcaggccagaagcggacccagaagaggggagcagcaaggaggaagacag

SEQ ID NO: 123358 - RNA, 56 nt, Homo sapiens
gccacagagagaaaaccagaacagggcagggggccgcagagcaccggggcgcacaa

SEQ ID NO: 123359 - RNA, 76 nt, Homo sapiens
cgggaagaacgccgggagaggcggcggcagggccggcggccccgggagcgagacaagaggagccccaccaccgacg

SEQ ID NO: 123360 - RNA, 77 nt, Homo sapiens
gcgggcgcggccggaccgcagccgcaagggggccagcaggcgcgccaaccacaaggaaaggaaggagacaagagcca

SEQ ID NO: 123361 - RNA, 76 nt, Homo sapiens
accagacagcaacccaacaaccagagagaaaaggaacagccgaagccaggggcaagcgaaaccacagaagaaagga

SEQ ID NO: 123362 - RNA, 104 nt, Homo sapiens
ggaaccaacaaagcagcccacggagcgggcccgaggccaggagcgccccggggaccgagacccgacgagagagacgaggggaagagaggaaggaggggcgggcc

SEQ ID NO: 123363 - RNA, 83 nt, Homo sapiens
ggcaacgaggccgagcgcgcggcgccgcaacaaagcagacaccagcgaccaccgagacaagccggccaccggaaccagacacc

SEQ ID NO: 123364 - RNA, 57 nt, Homo sapiens
aggaaggcacacagcagcaagagcccaaacgccggagaagcggaggagaccaaggag

SEQ ID NO: 123365 - RNA, 81 nt, Homo sapiens
agagaaaaaggacaaaagccaagaggaggacagcgcacacagcaagcacgagggacagacaggacgagaggacagaacgag

SEQ ID NO: 123366 - RNA, 77 nt, Homo sapiens
cacagccccgccgaggcaggaggagcaagccgacagacagcaacacaagacacccagccccggaagagacagaaggc

SEQ ID NO: 123367 - RNA, 52 nt, Homo sapiens
ccaaaaaaccaccccccaggccggcagaggccgcccagacagagcacaggga

SEQ ID NO: 123368 - RNA, 34 nt, Homo sapiens
accgacgacacagaaaaagagcgggcagagcaaa

SEQ ID NO: 123369 - RNA, 81 nt, Homo sapiens
cagaaccaggagcagaaccaccggcagaaaagagacggacgcggagcccccgggcgcgccggacaggccgccgcggcggga

SEQ ID NO: 123370 - RNA, 76 nt, Homo sapiens
cgccccaaccacgccaaagggaccacagcgcgcagacaggacaaccagcggaggcacgacgccaaaccaaaaagca

SEQ ID NO: 123371 - RNA, 73 nt, Homo sapiens
ccaacgggcaacaaggaggaccagaaaacgggaaaaacgagcacaacgagaaccgcgaaagaacgccgaaagc

SEQ ID NO: 123372 - RNA, 78 nt, Homo sapiens
caccaggcacccgggcccagccgggaacccccacgcggccagcgaaaacgcccaggaggaggaccagacaagcggagg

SEQ ID NO: 123373 - RNA, 68 nt, Homo sapiens
gggcccacaggaacaggcggaccagggagacaacgaagagaggaaagaagcggaaaggagggagcaca

SEQ ID NO: 123374 - RNA, 127 nt, Homo sapiens
caggcgggcggacgaacaggcacaggcgccaccaggagccccagcccaagaggaaccagcaggccccgaggccagagagaaccccagaagggcagccgcggcagggacaccaggacagaaggaccgg

SEQ ID NO: 123375 - RNA, 93 nt, Homo sapiens
cagccaaaaaccccagggaaaagccaaaacggacaaaggccaacggaaaggaagcgccaaaggacacacaggaagacgaacacggaacgggcg

SEQ ID NO: 123376 - RNA, 77 nt, Homo sapiens
acggaagccgcgaggggaacgaagaggaagcccagacccacgccccgcgcaggcagcccgccgacagaggaggagaa

SEQ ID NO: 123377 - RNA, 76 nt, Homo sapiens
cgagcaaaggcggaggagaaggagcgaaagcgcggggagaacgagggcacagccccaccagaagggccccaggaga

SEQ ID NO: 123378 - RNA, 59 nt, Homo sapiens
gacaagcagagcgccaccagaaagagccgcagacgcacagcaaccaccggacccgaagg

SEQ ID NO: 123379 - RNA, 53 nt, Homo sapiens
cccgcgcagagcagacagaacagccgcgcggccagggagccaacagagagcgc

SEQ ID NO: 123380 - RNA, 41 nt, Homo sapiens
acagacccccaccaagcagaccgaggccaaaagaaaggaag

SEQ ID NO: 123381 - RNA, 75 nt, Homo sapiens
ggagaaccagaagacgagaggcccgcaaaaggaggggaggaccagcgcaaccacgacagcaacgccaaagaggcg

SEQ ID NO: 123382 - RNA, 82 nt, Homo sapiens
agaggggaggcgcgaaaggggaacgcccgcggacggcagggcgcgacaagaagcgcccgcccgacgagcggcccgccaccac

SEQ ID NO: 123383 - RNA, 80 nt, Homo sapiens
ggggcccgaggaagcgcgggcggacgacagaggagccgaaccacccaccgaaaggacaggggagcagaggaacacgagcg

SEQ ID NO: 123384 - RNA, 79 nt, Homo sapiens
agaaaaggccaagaaggcaggacaacccccaagaaagggagcccagaacgaaacaacccagcagagacccacaaaccac

SEQ ID NO: 123385 - RNA, 86 nt, Homo sapiens
cgggaaccggggaccccgcgcgcggggacggccggcggggcgcgggagcccgaggccgcggggccagaccaaaggaaccagagcag

SEQ ID NO: 123386 - RNA, 82 nt, Homo sapiens
ccgccgcggccaggaggacgagcggaaaaacggagccacggagaagacagaggagccagaccaagagacagcacaggcgagc

SEQ ID NO: 123387 - RNA, 72 nt, Homo sapiens
gaaaagcaccccccagaacaaaaagcgcgaagggaaccaggaccggggggggaggaacacgaccggaagaca

SEQ ID NO: 123388 - RNA, 78 nt, Homo sapiens
gccgagcacacgccgccgccgccgcacgcgcacaggcgagccaagcccagccccaggacgccgaggaggggacgaccg

SEQ ID NO: 123389 - RNA, 68 nt, Homo sapiens
gggacgagcaaaggaagcgcgaacagcagcgcagacgcccagaagagcacaaagaaccaacgccaagg

SEQ ID NO: 123390 - RNA, 71 nt, Homo sapiens
accaacagggacggagcggagaaaaggaaccggccccggggcagcggcaacagacaacgagaaacaaggga

SEQ ID NO: 123391 - RNA, 65 nt, Homo sapiens
agaagggcagagagggaacgccaaggacgacagagggggcagagacaagaagcaacgaagagaca

SEQ ID NO: 123392 - RNA, 67 nt, Homo sapiens
gcgggcgccgagcgaacgcgcaacagggccgcacgcaaggcaagccaaaaccccggaagaaagaacc

SEQ ID NO: 123393 - RNA, 58 nt, Homo sapiens
aagaggaaccacgccagcggaacgaaacacacaagacaagggagccagaaaagaccga

SEQ ID NO: 123394 - RNA, 76 nt, Homo sapiens
aacaggcgcccccacagagaagcagagcagcacaagccagaaccgaccgcgcacagccccacaaaggacggcacag

SEQ ID NO: 123395 - RNA, 57 nt, Homo sapiens
cgcacccagagaaagcgcggacaacaccaggaaaagacagagagacggagcgccagg

SEQ ID NO: 123396 - RNA, 69 nt, Homo sapiens
agaagaacaggacgagcaacaacagcacagccggaagccgccaaaacgagaccaaaagggaaaagagag

SEQ ID NO: 123397 - RNA, 76 nt, Homo sapiens
ccggaccgaccaaggcaccgggccccgcccaggccccggacaaaggaagaagagccgccccacacgcagaaaaggg

SEQ ID NO: 123398 - RNA, 76 nt, Homo sapiens
agagagcaagaggaagcagggggaaagaggccgggggaagccacgccacacacaggccagagccaccagcccaacc

SEQ ID NO: 123399 - RNA, 56 nt, Homo sapiens
agaagaggcacccacagggggcgacgacagacccaggccccagcccgacagaccag

SEQ ID NO: 123400 - RNA, 58 nt, Homo sapiens
ccccgagaaccgcaggagccagaggagaaaagaaagccagaaggaaggaagcaacgaa

SEQ ID NO: 123401 - RNA, 58 nt, Homo sapiens
cacgcgcggaaggcagcgcccagcagcgcaggagcacccacgggaacagcccagaaac

SEQ ID NO: 123402 - RNA, 75 nt, Homo sapiens
gaacagacacaaggacggccccagggcagagcaaggagaagcggagagcgccgccgcggcccccgggagacgacc

SEQ ID NO: 123403 - RNA, 76 nt, Homo sapiens
agggccaaagaagggagaagcagagaaagggggaggcggacccggcaacacgaaccggaaagccaaggaagagcca

SEQ ID NO: 123404 - RNA, 74 nt, Homo sapiens
agacaacgggccggagggacaaaaagcaagcaagagcgcgacacccaaggccgaaccacacgacgcgggaacca

SEQ ID NO: 123405 - RNA, 76 nt, Homo sapiens
ccaccggccgacagccgcgacggcgagcccgggccgcgcccgagcaccccagaccagaccacagacaaccgccccc

SEQ ID NO: 123406 - RNA, 66 nt, Homo sapiens
ggaaccgggaagcacgcaagcgacagggaggcaacaaagaagggcagagggagccgggggaccggc

SEQ ID NO: 123407 - RNA, 75 nt, Homo sapiens
gaagggcggggggcgggccggaggggagacgggaggcagagaagaacaccgggacccagaaaagcccaaacagaa

SEQ ID NO: 123408 - RNA, 73 nt, Homo sapiens
cgccccgaacgggggcccccccgccggacaggggcccgggcagagggaaagcagaggacggaacaacccgggg

SEQ ID NO: 123409 - RNA, 66 nt, Homo sapiens
cgcacggcgacgccccaggggaaaacccccgggaccagcagaaacggggggggagggggacccgga

SEQ ID NO: 123410 - RNA, 63 nt, Homo sapiens
cgaggcggcgggcggagacaggaccgcggcgagcaaggagcagaaaaccacagaggaggggac

SEQ ID NO: 123411 - RNA, 77 nt, Homo sapiens
cgaggagacagaaagagaccggaccagaaaccaggagccacggacaagaccaaaagcgggaacagcccgggccgccg

SEQ ID NO: 123412 - RNA, 83 nt, Homo sapiens
ggaagacccaggaggggcccagggcccgccgcgcagcggggccgcgagcgacgccgagcgagaagccaacggggccaaacaag

SEQ ID NO: 123413 - RNA, 70 nt, Homo sapiens
aaacccagcggaaagcaacaaaaggacacccgacaggggccggcacccaccccccacgcaccacgcacaa

SEQ ID NO: 123414 - RNA, 78 nt, Homo sapiens
cggaccgagggaggacaagagcaagaccccggaacccgaagcgggaaaggggaagaagagcgcaacaggaggaaacca

SEQ ID NO: 123415 - RNA, 83 nt, Homo sapiens
ggagaagaagacaggcaagaaggaaaggcagcggaaagaggcggaggggaaagaggcagagaaagccagaggccaagacaaag

SEQ ID NO: 123416 - RNA, 75 nt, Homo sapiens
cagcccccgcaaggaggccccaccagcgcaagccccggggcagagacacaggacacccacccgccggggacagac

SEQ ID NO: 123417 - RNA, 82 nt, Homo sapiens
gcccccgccccaggagcgcgagcccacaacacccccagcggccgccggccccccacgagggaaaagagggcgaggaagacga

SEQ ID NO: 123418 - RNA, 78 nt, Homo sapiens
cggggggagagaacccaaccagggggaaacacagaacgcaggaaacccagaagcaagaaccgcggcaggaaagccacc

SEQ ID NO: 123419 - RNA, 70 nt, Homo sapiens
gagaggccccccgggcacaggcagccacaggcgcagggccacgccaggcggggccagggggcgacggcga

SEQ ID NO: 123420 - RNA, 84 nt, Homo sapiens
gcgcacccgcgccccagccaaagaagaaacaggacgagaagaggccccccaaaggacacaggacagaccgagaacgagagccca

SEQ ID NO: 123421 - RNA, 50 nt, Homo sapiens
gacagaaccgcggcgcagcgcagagacccagggccgacgcccaaggagga

SEQ ID NO: 123422 - RNA, 38 nt, Homo sapiens
aacagcccgggcacaccaaaacagcagcgaacgccgac

SEQ ID NO: 123423 - RNA, 83 nt, Homo sapiens
ggaggaggaaccggagaccccgaaaacggaagcgcagggagaaggaagaggggaaaaggcagaaggccgccacgccccaggaa

SEQ ID NO: 123424 - RNA, 68 nt, Homo sapiens
agcaggaggcggcgcaagagagcaccacgggcgcacccccgagccaaaggcaggaacaacacgacaac

SEQ ID NO: 123425 - RNA, 96 nt, Homo sapiens
caggcaaaaagcacggcacccaggccggaggccacgaaacagaggaccgcggggccccgagagggccggcacagcgaccaccggagccgcgcccca

SEQ ID NO: 123426 - RNA, 76 nt, Homo sapiens
aaggaacggcccccccccagcccgccccaaaagggagaagaaccaacaacggaaaaccagcgggacaaggcaccaa

SEQ ID NO: 123427 - RNA, 47 nt, Homo sapiens
acacccccagaggaccagagcaagagcaagaagaaccgaaggcagaa

SEQ ID NO: 123428 - RNA, 70 nt, Homo sapiens
gcacccccagcagcacacaggcagagaaagcaagagacgcaaccgaacgcagagcggagaacggcggcaa

SEQ ID NO: 123429 - RNA, 83 nt, Homo sapiens
ccggcggcgcgcggcccccgcgcaggaaaagcagggaaccagggagaccaggacaaggaacagaaagacccacgggagacccc

SEQ ID NO: 123430 - RNA, 74 nt, Homo sapiens
ccggccaccgccgagacccagcacacgccgaccaggcagagcccagcacccgaagcccagccgcagccccacca

SEQ ID NO: 123431 - RNA, 74 nt, Homo sapiens
cagacacaacagagcagaaggaccggaagccagagcacagaagagcccgggcccagggccgaggaaggagaagc

SEQ ID NO: 123432 - RNA, 72 nt, Homo sapiens
ggggaagccaccgcacagcgaccagggcggagaacggaaaagcaccaggaagcagagaggaccgcagaaggg

SEQ ID NO: 123433 - RNA, 51 nt, Homo sapiens
cagaggcggccgggaccagaagacaaacagaccccagaaagaagaagagga

SEQ ID NO: 123434 - RNA, 91 nt, Homo sapiens
acagccgcccgagaccgaagaaaagaagaagaagaagaaggccaggaaaccgacgcccccgaaaaggacacagcacaagcaagacacgccc

SEQ ID NO: 123435 - RNA, 66 nt, Homo sapiens
caacaagcaaggcacaaagcaggcagcgcgagcagaaggcgcgcgaggcacccagggaagaaagac

SEQ ID NO: 123436 - RNA, 37 nt, Homo sapiens
aggcacggacacacaaaaagcgaaggagaggaaaaga

SEQ ID NO: 123437 - RNA, 81 nt, Homo sapiens
ccaggggccccccaggcccgcggaggggcgggaccgcagggccccccccaggaacggaaagaacgccggacaacagcggcg

SEQ ID NO: 123438 - RNA, 64 nt, Homo sapiens
aagaggacaaaagagcggaggagcggcgaggaaggagagaaccaggagaccgaagcaaccaaca

SEQ ID NO: 123439 - RNA, 75 nt, Homo sapiens
ggagcgccccggcccggacggagccggcggcgcggccggcagccggcagcgcagcggagccaaaggcagcgaccg

SEQ ID NO: 123440 - RNA, 93 nt, Homo sapiens
cgcggcggcagcacgacagcgccggcaacacgcggcacaagacgagacgagagggccccaaagggaccagggacgcgcccgcgcgggagacgg

SEQ ID NO: 123441 - RNA, 60 nt, Homo sapiens
cagggccgcaccaggacagcggagacgggcacggagggacaggcaagaaggaagaaggca

SEQ ID NO: 123442 - RNA, 61 nt, Homo sapiens
cgcaccgcaggcagacaaaagggccaaagaagggagagaggaaccccggagcccgagggag

SEQ ID NO: 123443 - RNA, 37 nt, Homo sapiens
acacagagggaaacggaaagggacaaacagcaggggc

SEQ ID NO: 123444 - RNA, 92 nt, Homo sapiens
cccacaacccgccagcgagacacccgaggcacgaggaccgcgaaggaggacaccgggcccagacagaagcacggacagaagagaccgagcac

SEQ ID NO: 123445 - RNA, 37 nt, Homo sapiens
ccaaagaaggaagcgcgcaccgaagcgaggggaccag

SEQ ID NO: 123446 - RNA, 70 nt, Homo sapiens
gcggaggagcccccccgcaaccgaaggaggcacccagccacaccgaacaagacccccgaaaggaaccggg

SEQ ID NO: 123447 - RNA, 78 nt, Homo sapiens
gccagggcagcaccgggcagcgagacgaaaaacgcgccacggggggaaccagaagcacaagcacgaaagccacaaaag

SEQ ID NO: 123448 - RNA, 73 nt, Homo sapiens
gaccgcccacaaggaagggccaggggcaaggaccccagccagaaggcgccgcgggcaacaggaagccgggaaa

SEQ ID NO: 123449 - RNA, 75 nt, Homo sapiens
gaacagagccggaagcaacacgcaaccccacggaagaaccaaacagcgcacaccaggacagggcaccagccaacc

SEQ ID NO: 123450 - RNA, 75 nt, Homo sapiens
caccgaaagcggcgcaacgaggcgagggaaaaagcgggaggaggcgggccagaacacgaccggggcacaggcaag

SEQ ID NO: 123451 - RNA, 70 nt, Homo sapiens
caacacagaacgaagagaagaagcgagggcgggggcggagggcaagacgacgacaggagaacaacaagcg

SEQ ID NO: 123452 - RNA, 74 nt, Homo sapiens
ggggggaggaggccaacacgcccgaacgggcaggcccagacaggccagccccacagagcaggggccaagcgcgg

SEQ ID NO: 123453 - RNA, 58 nt, Homo sapiens
aaaggcagagaaacccagcccagagacggccagaaagagagacgaggcaccggagcca

SEQ ID NO: 123454 - RNA, 84 nt, Homo sapiens
gcgccagcaccacgcccgcgccgcgccgccgccaccagcccaagagaaagagaggggagaagagcgagacgagaaagaagagga

SEQ ID NO: 123455 - RNA, 80 nt, Homo sapiens
agaggacgaagcagaaagcaaggaaacgagcagaagcgagcgacgggacaaggcaggcagagggaggagaggcaaaacgg

SEQ ID NO: 123456 - RNA, 72 nt, Homo sapiens
aagaggacaaaggggcagggaaaaaaagggcgcgcgggggcacagcccaggcgcagcagcggacccccccgg

SEQ ID NO: 123457 - RNA, 79 nt, Homo sapiens
gagcgagaagcagccgcgagggcgcgggggagagggggaggccggcggaccagaccccggcggcacacccggaccggcc

SEQ ID NO: 123458 - RNA, 74 nt, Homo sapiens
aaagaacgggcacagcagcggaaaaacacagagggcacacggcacagaccagaagccccccagggaaagcccaa

SEQ ID NO: 123459 - RNA, 65 nt, Homo sapiens
cccaacgacaagaggagaggaagaggaagaggcgcaacccagaagaaaggcaagaaggcgcgcaa

SEQ ID NO: 123460 - RNA, 46 nt, Homo sapiens
gacccacagccagcaacaccccacgccaaaaaaagggccgcggaac

SEQ ID NO: 123461 - RNA, 71 nt, Homo sapiens
accgacacccaacgccacggcccccgcggaggagccgccccggccgcacaagcggccagcgagccgggagc

SEQ ID NO: 123462 - RNA, 76 nt, Homo sapiens
ggaaaaggagccccaccaagacgcggcgcgcaacgcaagccccaaccgcgaggagagcgcagcaggcgcgcacaca

SEQ ID NO: 123463 - RNA, 69 nt, Homo sapiens
aaaggaaccaggcgccccaggagaaggaccgaagagagcccagaggaccggcggcccgaccaaagaaga

SEQ ID NO: 123464 - RNA, 70 nt, Homo sapiens
gagaggaacggccaaaacgggaggacaacgaaaaaggcaagaaagcaaagaacaagaaacaagagagcga

SEQ ID NO: 123465 - RNA, 89 nt, Homo sapiens
cagaccaggaacccaccagaaggaaccaaccggacacaaacaagcagcaggaggacaccaaaggcgaagcaacaaaccaccacccagag

SEQ ID NO: 123466 - RNA, 71 nt, Homo sapiens
gaaacccaaggccggcaagaacacagaagcaagggaagcagaaacaggcagagaagaagagagaaaaacca

SEQ ID NO: 123467 - RNA, 74 nt, Homo sapiens
gaaagacaagccggcaaagagcaacccgcagcagaagaggacgcccacgaaggaacagagcaaggaaacaggcc

SEQ ID NO: 123468 - RNA, 54 nt, Homo sapiens
gggggaggaggacaggagcccgccaggaaacccaccggcggagacacagaggcc

SEQ ID NO: 123469 - RNA, 81 nt, Homo sapiens
cggcggcggcggcggcggcgcagggggcggagccgccgaagcgcccgcgcggagcgggaaccgaacccagcccagaagagg

SEQ ID NO: 123470 - RNA, 86 nt, Homo sapiens
gcaggcggcgcaggcaggggcggccggagccgcggccacccagcgagaggagaggcgcccccggggacgggaaggcgccagacaca

SEQ ID NO: 123471 - RNA, 65 nt, Homo sapiens
aaggccggggcgcccggcgccggccgagaaggcagaggcggcaacccaaggaagaaggaggcaaa

SEQ ID NO: 123472 - RNA, 68 nt, Homo sapiens
caacacaccgccaccgaagacgggccccaacacccagagacgaaaggcggaacccacgaggagcagcc

SEQ ID NO: 123473 - RNA, 87 nt, Homo sapiens
ccagagagcgggaacagaggaggaagaagggggaaagggaaaagaggaagagagaaacagagagaaggagaagagaaagaccccaga

SEQ ID NO: 123474 - RNA, 59 nt, Homo sapiens
cgcagaccagaccgccgaccggcgcccgccggcccaggacccaggaacccagcgagccc

SEQ ID NO: 123475 - RNA, 75 nt, Homo sapiens
acgcggagcccggaggaggaccgaagcagcggcaagaacgccccggcaaggacggaggcaggcaccaccaacagc

SEQ ID NO: 123476 - RNA, 85 nt, Homo sapiens
ccggcgccccggagcaccggggaagaacaagggcaggcccagcccccggacacgggcggccggaaggcgaggccccgccagcccg

SEQ ID NO: 123477 - RNA, 79 nt, Homo sapiens
ggggagagacaaaacggagcaagacagccccaaagacggcaggcggacaccgaccgcaggaaggaggaggaggagggag

SEQ ID NO: 123478 - RNA, 81 nt, Homo sapiens
cccaacggggcccacaagcagccagacgccccgggcacgccaggaggagccgcagcagaccagcgcgagccccccgagcag

SEQ ID NO: 123479 - RNA, 83 nt, Homo sapiens
ggagagcgcgccggcgagaagcggccgagccagcagcagagaggaaacgaggcgggaagacgaaacgccaaaacacacaacga

SEQ ID NO: 123480 - RNA, 77 nt, Homo sapiens
agaagcggaggggcagcagaaaccacccacccaaggaagacccacgccacaccaccccccagggacaaggaggagga

SEQ ID NO: 123481 - RNA, 82 nt, Homo sapiens
agacgcgggggacggggcaggaccacaggacagcccagagcaagcacacggaggcccgggagccagaccgggagcccgcccc

SEQ ID NO: 123482 - RNA, 32 nt, Homo sapiens
gacagcgcacaacgggcgcgcgggaccaaggg

SEQ ID NO: 123483 - RNA, 85 nt, Homo sapiens
ggccgaaagaccagagaagccggaacaaacgaacagagcagagcacgcccagaaggccggaaaggagcacacccagcaaagaagc

SEQ ID NO: 123484 - RNA, 57 nt, Homo sapiens
cagggaacagcccacccaacaagacaccggacaagggcccaaagcacaagcgaccgc

SEQ ID NO: 123485 - RNA, 84 nt, Homo sapiens
acgcgccagccagcgaaagccgggccccgcaggacagaaggaagcaccaggaacgagacagcaaacaaagaagaaaagagagcg

SEQ ID NO: 123486 - RNA, 83 nt, Homo sapiens
gacaggaaggggaaaccggagaaaaagaaacgcaagaacagcgagggagcggacccgaggaaaccaccaacgcacaaagggac

SEQ ID NO: 123487 - RNA, 93 nt, Homo sapiens
cgacaagccgcggcagccgcggaccaccgccgccagggggacggcaaaacagaacagaaaggcggagaaaaaagagggggaaaagaccacgag

SEQ ID NO: 123488 - RNA, 83 nt, Homo sapiens
aaaaggagcaaacaccaaaggcagccagaacccaaccgccccccgggccacgacgccacaccgcccgcagggcagacccacag

SEQ ID NO: 123489 - RNA, 68 nt, Homo sapiens
cccgcaacaagcacacgcaaaaaggcgacggggcaagcaagggccaaaggcgcggaaagagcacccgg

SEQ ID NO: 123490 - RNA, 81 nt, Homo sapiens
gacacaaggccccggcagcagcagagacgacaacccccccggcggaagcccccgaacggcaaaacaccggccgccacgcgg

SEQ ID NO: 123491 - RNA, 92 nt, Homo sapiens
aggacccggaccaaaagcaagaacaagccaacacgaggaaacggccgaagagaagaacgccaccaggcaaaccccggcgagagccggagacc

SEQ ID NO: 123492 - RNA, 51 nt, Homo sapiens
agcagagaacgaacaaagaggaagaggagaaggagaaacggaggacgcccc

SEQ ID NO: 123493 - RNA, 91 nt, Homo sapiens
gaggaggcacagaggaggggagcaaaccgcagagagcgagagcacgaaccagagcaagcagcaggcggcccccagccggcggcgggcaaag

SEQ ID NO: 123494 - RNA, 65 nt, Homo sapiens
gaaacgcaagaaaagcgacccacaggaccgcgaacaaggaggccacaaaacacccggacccacca

SEQ ID NO: 123495 - RNA, 70 nt, Homo sapiens
acacacgcagcggggggacacacgcgaccggcgaggcccaccaagccaggagaacacccacacgaggcac

SEQ ID NO: 123496 - RNA, 75 nt, Homo sapiens
cacaccgccgacggccacagcccccaccaagagcccccggccagaagagcagaaacggaaaaacgcggagggcaa

SEQ ID NO: 123497 - RNA, 57 nt, Homo sapiens
cccaccccggagcgaccagccccagacaaacccagacccagaagggaacgggaaacc

SEQ ID NO: 123498 - RNA, 75 nt, Homo sapiens
cagcacgccaccgggaaggcggggaggaggccccaaagggcgagggggggccgcccgcccaaggcaggaagaggg

SEQ ID NO: 123499 - RNA, 89 nt, Homo sapiens
cagacaggggcgaaggcagaggagggggcagaagaaaaagcaggacaacagggcaaggagcgggaggacagaaagccaagggaccaacg

SEQ ID NO: 123500 - RNA, 83 nt, Homo sapiens
gacacggagggcggccggaaacccggcacggcccccaggccagcagccgggcagccagagcacagcgagcagggcggcgccgg

SEQ ID NO: 123501 - RNA, 75 nt, Homo sapiens
aaagcccaagagaggcaggcagcgacagccacacaacggacagggacggcagggacacggacagcgggaggggca

SEQ ID NO: 123502 - RNA, 73 nt, Homo sapiens
aacccaaggaaggaccaaacggagaaccaggagccagcaccgccgaccgccagcgccagaagccagagagggc

SEQ ID NO: 123503 - RNA, 76 nt, Homo sapiens
caaaagcccagggaggaacaacagggaagaaagagccaaacaggcgagaggaagaagcaaagacaaagcaagagaa

SEQ ID NO: 123504 - RNA, 86 nt, Homo sapiens
gcaagaaagaccaaaaggaaaaccagagggccggaaccagagcaaaccagccagcacgggggcccagccagccagcagcgaggggg

SEQ ID NO: 123505 - RNA, 81 nt, Homo sapiens
ccggccacaaaaccagagcggagacacccaggaggcagaagccaaaggaccacgggcgcgaggagcgcagcagcaggacgg

SEQ ID NO: 123506 - RNA, 56 nt, Homo sapiens
ggcggcgagggaccgccggaccaggggaaccagaagaggccaaccagcacgaacgc

SEQ ID NO: 123507 - RNA, 74 nt, Homo sapiens
gggccacgggccgggcgcggcaccacgcccgccccagcggagaggccaagaagccaggaaccaaacgcgaagca

SEQ ID NO: 123508 - RNA, 64 nt, Homo sapiens
ggagcaaccacaacccgcaacaacggcaagcggagaagagcaaggccgaaccgagaggaagggc

SEQ ID NO: 123509 - RNA, 74 nt, Homo sapiens
aggacaaccaccaacaacgaggcacccaaaagacacagcaggaagagaacagaggaccccacaacccgccacgc

SEQ ID NO: 123510 - RNA, 63 nt, Homo sapiens
aaggaccaagaaccagaaaagaggaaaggccaaaagccccacgagaagggggcccggggcagg

SEQ ID NO: 123511 - RNA, 77 nt, Homo sapiens
aagccgaaggcaccagacagcagagcaccaaacaggggggaaggaagacaaacagagccaagcagacagaaacccgg

SEQ ID NO: 123512 - RNA, 59 nt, Homo sapiens
acgacgccagcgacgagcagggagcagaggcaccagcccaggcagaagaacacccagga

SEQ ID NO: 123513 - RNA, 76 nt, Homo sapiens
acgaccaagccagagaacagcccccacgcagcccagaaggaacgggacccgaacaacgaaaaacaagcgaacagag

SEQ ID NO: 123514 - RNA, 75 nt, Homo sapiens
aaacgagcggaacagcgaggaacaccaaccagaaaacccaggaaaaccagggaggaagccaaaaggaaaaagcag

SEQ ID NO: 123515 - RNA, 85 nt, Homo sapiens
gggagggacgaagcgcacagcaaacagcgcacggcggaaggaccgggggagagcaggccaagcaccccccccaaaaaagaggaac

SEQ ID NO: 123516 - RNA, 80 nt, Homo sapiens
cgggcccagacccccgccaaacagggaaagaacggccgggcgggccaagcggagggaggccaggggcgggccgaaccaga

SEQ ID NO: 123517 - RNA, 78 nt, Homo sapiens
agcagaggaagagcaggggcacagagagaggagagagaccagagcggaacaagcaacgaagacagagaaagcgcagac

SEQ ID NO: 123518 - RNA, 75 nt, Homo sapiens
ccgccaccaacagagaagacagagcaccaacgagggacgcacaccacagacaaaggcacgcaacaagcgaacggc

SEQ ID NO: 123519 - RNA, 69 nt, Homo sapiens
aacagaggaaggaaaggcgcaacaacacaaaaaaagcagcaaggcaacccgaccaaaccgagaaagaga

SEQ ID NO: 123520 - RNA, 85 nt, Homo sapiens
cggcaaccgccccgcgagaaggccaggaaggaaacgggagaaccggaagcccaggccggccaacaaccccaagcaaagccagagg

SEQ ID NO: 123521 - RNA, 54 nt, Homo sapiens
gccgccaccagcccaaaacgagaagggaaagggaaggacccgaggggccggacc

SEQ ID NO: 123522 - RNA, 84 nt, Homo sapiens
acgacgacggcggacgcagcggcgggggcgaaagcgagaaccccgaacagaggagccaacagaacgacacgcaaggagagcagg

SEQ ID NO: 123523 - RNA, 83 nt, Homo sapiens
cacccaccaacaacaccacaaaaccacagccaagcggcggagaaaccaccacaaacacgaggccagcaacgaccaacaagaca

SEQ ID NO: 123524 - RNA, 70 nt, Homo sapiens
aaaagagaaagggggacaaagacagcccagaaccaagcagaaagggccgccaaaacagggagagagacgc

SEQ ID NO: 123525 - RNA, 80 nt, Homo sapiens
aggaagcaggaaaaacaaagaagacccaggagcgaagacccacaacagagggggcacgggcggagagaaaagcaacggac

SEQ ID NO: 123526 - RNA, 76 nt, Homo sapiens
ccagccccgagagcaaggacacagccagcgaggggggccggggcaaagaccggcaagacggaagggcgacacgggg

SEQ ID NO: 123527 - RNA, 78 nt, Homo sapiens
agagacccacagaccaggcacccgcaggagaggccccaacaagacgaaaagagagagacagagaagacaagaaagcag

SEQ ID NO: 123528 - RNA, 67 nt, Homo sapiens
ggaccaggagacgcagggccaggagcgaaaccaggggagagcgcgaaacgcagaaaacgggaagacc

SEQ ID NO: 123529 - RNA, 88 nt, Homo sapiens
cgccgcggggcggccgccagcacaagcgcacccgcacagaggaaggaacagagccacagagaaaaagacgccacaacagaagagccag

SEQ ID NO: 123530 - RNA, 96 nt, Homo sapiens
cgcagcccggcggacgccggcacagaacagaccgaaggagcagacgaggcacgagcgccagcgcgagacagacggggcgcagaagcggcggagcgc

SEQ ID NO: 123531 - RNA, 70 nt, Homo sapiens
caggcggagccgaccgggccaggcagggacacagcggaaagaaaaacgaagaaaaagagagcagaacaca

SEQ ID NO: 123532 - RNA, 80 nt, Homo sapiens
aggggcggccggagccgcggccacccagcgagaggagaggcgcccccggggacgagaccggggcaagcggaacggcaccc

SEQ ID NO: 123533 - RNA, 80 nt, Homo sapiens
gagaaccccaaccggggaggaaaaccgacgaaggagaagcacaagaagacaagggcccagaaaccacaaaggcccccgac

SEQ ID NO: 123534 - RNA, 71 nt, Homo sapiens
gaaaaccgagacccgagaccagaaacacacagaccaaagcgggacgagcagggaaaaccgaaccgcagaaa

SEQ ID NO: 123535 - RNA, 75 nt, Homo sapiens
gcccggagagcggcgcgcagggacccaaagaacaagccacacgcccacaaggaagaaggaaacaggaaaggcgaa

SEQ ID NO: 123536 - RNA, 73 nt, Homo sapiens
cccggcggcgggaggccacgccagccgccaggcggcgcaggggacccgaagaagagagcaaaaacgggggaca

SEQ ID NO: 123537 - RNA, 95 nt, Homo sapiens
agcgacaggaggagacaggcgagagaggaggacacgaccgagcccggagagggaaagaagcagaagcggcacgagcaggcaagagagaagcgaga

SEQ ID NO: 123538 - RNA, 56 nt, Homo sapiens
accgcagaggcaaggggccaccaggaggccagggggcgccagggggagagagacgc

SEQ ID NO: 123539 - RNA, 74 nt, Homo sapiens
aagagaccacagacacacacacagcacagcacgcgcaccacaacgcaggaaggaacgagaaaccagggagcacg

SEQ ID NO: 123540 - RNA, 69 nt, Homo sapiens
gggacgcgcgacgcccgcgccccgaccgacccgcgagacacgcggacggacggagggcaccacgaccag

SEQ ID NO: 123541 - RNA, 64 nt, Homo sapiens
gaagagcaaccccagaaggcaacgcgccgcaaaacagaacgcgcaaagaaggcaccgaaggggc

SEQ ID NO: 123542 - RNA, 119 nt, Homo sapiens
ggaggcggaagacgcaagacgccaggcgacagaagacgcggaaggagcacgaggaagcagagcgcggcaagggcggaccgcgggccacagccgagaagaggaaacacaccccagcagcg

SEQ ID NO: 123543 - RNA, 61 nt, Homo sapiens
ccaagaacaccccagaaaaggagagggcagaacagccaaaccagagcacagggacccaagg

SEQ ID NO: 123544 - RNA, 66 nt, Homo sapiens
cccagagaagggagcacgcacgcgcaagggggcagacccaaaggaaacgcacgaaagaaacaggag

SEQ ID NO: 123545 - RNA, 82 nt, Homo sapiens
caggccgcccgggacccccccaccgcgggaggagacccagcggcgccgcggagggaccccaagccggaggagccaccaacag

SEQ ID NO: 123546 - RNA, 53 nt, Homo sapiens
gcaggcaccacaaaaaggacagaccccaggacaacaaggccccagcgggaggc

SEQ ID NO: 123547 - RNA, 72 nt, Homo sapiens
ggacgagagaacaacagggaccagggcacagccacagggcgaaccaaagaaggaaggcgacccaaaaccacg

SEQ ID NO: 123548 - RNA, 74 nt, Homo sapiens
gggagacaacaggaggacacggaagagggaagaaagaagcagcgccaggcgaagcccgaagagagcacagggaa

SEQ ID NO: 123549 - RNA, 89 nt, Homo sapiens
aagcagaagaaccgggcagccgcccagcgaagccggcagaagcacacagacaaggcagacgcccgcaccaggcacggggagcaagagaa

SEQ ID NO: 123550 - RNA, 101 nt, Homo sapiens
gccgggacgaagaagcacaaggaggaggggacgaagagaaagcacaaacaacaggacccgaggggagcgcagcgggagcagaccaggccaggagacagcag

SEQ ID NO: 123551 - RNA, 74 nt, Homo sapiens
ggaggcacgaggccaaacccgccacccagaaaccaggagaggaaagcggaacacgggcaacgggggaagacggc

SEQ ID NO: 123552 - RNA, 44 nt, Homo sapiens
gggcaaggggacgcgcagcgagaaacggaacgccaagcgaagaa

SEQ ID NO: 123553 - RNA, 42 nt, Homo sapiens
ggaagaacggcacgcgggggcaggacgggaggacagcgcggg

SEQ ID NO: 123554 - RNA, 83 nt, Homo sapiens
ggaaaccacagcccagcaaaaagccgggggcccggaagcagccgaccagaggaacgagagaagagagggaacaggagcaggcc

SEQ ID NO: 123555 - RNA, 74 nt, Homo sapiens
gccgccgaggaggcccggggagcgaaggagcgcagcaccaggagagcagccagcgggacagaaggaggaagagg

SEQ ID NO: 123556 - RNA, 68 nt, Homo sapiens
ggaaggggccggagggcagggggcagggcggcagaggagcagcagcagagagggaccgagaagggccg

SEQ ID NO: 123557 - RNA, 80 nt, Homo sapiens
agaggaaacccaaagccgggccaagacgcgggagggcaggaagaaggcagccacgacaccgaaagaaccgcacgacagaa

SEQ ID NO: 123558 - RNA, 91 nt, Homo sapiens
agagggccgggggcgcggccgcgcgccgccggcgaaggaggaggcggccggagcgcagaggcaggcgggccgggggcagcgagcccgggca

SEQ ID NO: 123559 - RNA, 75 nt, Homo sapiens
acgaagaagacaagagcaggaaaaaaccaagggcggaacaaaggaaacagaaagccaaggacacgcaggacgaag

SEQ ID NO: 123560 - RNA, 72 nt, Homo sapiens
gacagaaccgccaaaagacaaacccgagcagcaagcaggacgacccagccaacggcaagcagcaagcagcca

SEQ ID NO: 123561 - RNA, 56 nt, Homo sapiens
ggggagagaacccaaccagggggaaacacagaacgcaggggaggagcgcggcaaga

SEQ ID NO: 123562 - RNA, 74 nt, Homo sapiens
gaacggggaggccgggaccaccgcgcagcgcccccgggcacacgggaaaaacgcagacaggacggaggcaaaaa

SEQ ID NO: 123563 - RNA, 71 nt, Homo sapiens
caacacaaggacaacggcccccggaagggcgaccgaggcggaggaccccaagggagcaagggacccggggc

SEQ ID NO: 123564 - RNA, 53 nt, Homo sapiens
caagcaacagcacgggaaacgagagcagaagccggacgagcgggagaggacac

SEQ ID NO: 123565 - RNA, 101 nt, Homo sapiens
gaccggaggaggacgcagcaacacaagaggagacggaggcagagagaagagggagaggccggaggaagggaaggggccgggccgaggaccccacccagcaa

SEQ ID NO: 123566 - RNA, 71 nt, Homo sapiens
caggggaagccgggaaacaggagagcggccagcacagcagagagaagccaggaaaccagggaaaacacaaa

SEQ ID NO: 123567 - RNA, 62 nt, Homo sapiens
cccgggccgggggacccgcccgccaggccaccaagggcggagaacggaaaagcaccaggaag

SEQ ID NO: 123568 - RNA, 84 nt, Homo sapiens
accaggaccggacccggacccaaaggccagcaaaggcgcgaacagggcccacccgccacgacacaggggaagaagaccaccgca

SEQ ID NO: 123569 - RNA, 83 nt, Homo sapiens
caagcagccacagcccacgcccaggcacggagaggcaggacggacaggaggcacccagccgccgccagcgcgcacgcaaggag

SEQ ID NO: 123570 - RNA, 87 nt, Homo sapiens
ccaccccgacgagcccgccaaagcaggagggcacagccagggagaccggaaagaagggagaccgcggggaaaagagaaaggccaacc

SEQ ID NO: 123571 - RNA, 74 nt, Homo sapiens
gaggcgcccagacaccccccccgcccagaacgaagagaaagggccagaaggaagacccagaaagagagcgaaac

SEQ ID NO: 123572 - RNA, 39 nt, Homo sapiens
aaaaacagggagcacggagagaaggagcccaaaaccaaa

SEQ ID NO: 123573 - RNA, 40 nt, Homo sapiens
gccacaagaccagcacaaggacagaaacaacaccgagaac

SEQ ID NO: 123574 - RNA, 79 nt, Homo sapiens
gccaacacgggaacaggcagaaaaagcggggaaaacaaaaaaaagaaggagggaagagggggccaggaccaggccccac

SEQ ID NO: 123575 - RNA, 70 nt, Homo sapiens
agcacagaagaacccagaagagaaaaccccggccggcgccaggcaagcagaccgcgcgagcaagagcaac

SEQ ID NO: 123576 - RNA, 72 nt, Homo sapiens
gcgccgcgaaggacaaggggcacccgcgcgcacacgcagcaaaccagcggcgcgacgagggcggacggaggg

SEQ ID NO: 123577 - RNA, 75 nt, Homo sapiens
ggaccggcacccggacaggaggagccagggcccggcccgaaaggagagcccaacgcacacggcgccacacgaggc

SEQ ID NO: 123578 - RNA, 67 nt, Homo sapiens
ccggacacgccagggacacccaaagccaaccaccgaaacgggcgaaaaagaagaacagcaaaacacg

SEQ ID NO: 123579 - RNA, 74 nt, Homo sapiens
gcccagccgggaacccccacgcggccagcgaaaacgcccagagaggcgccacaaccaggcaaggagcaagagag

SEQ ID NO: 123580 - RNA, 52 nt, Homo sapiens
caaggaggaagaagaccaaaaagcacgagaagaaacagacaggagccaaacc

SEQ ID NO: 123581 - RNA, 76 nt, Homo sapiens
ggcgcgggcgcggcgcgcccccgcgccccccggagccccgggccagaggcccccacagagagcacacaaacaaagc

SEQ ID NO: 123582 - RNA, 42 nt, Homo sapiens
gcggcaacagaacgaaaaacagggcccacgacagcaggaagc

SEQ ID NO: 123583 - RNA, 72 nt, Homo sapiens
ccaagccacggaagcgggaggaaacagagcgagaacacccggaggaaaacgaaggaagagggaaaaggcaac

SEQ ID NO: 123584 - RNA, 76 nt, Homo sapiens
cggaagagagaaagaaaagagcggcaaaggagaagggaagccaacgaccaacacacagccaaacacggcaaagcac

SEQ ID NO: 123585 - RNA, 72 nt, Homo sapiens
gagaaaccggaagaccgagcaaagagcgaaaccagagcaagcagggcaaaagggaccccgcgagcaaaggag

SEQ ID NO: 123586 - RNA, 62 nt, Homo sapiens
ggaaaagccaggccccgaggacaaggcagagcaggcacaaaccgaagaccaaacccaccaca

SEQ ID NO: 123587 - RNA, 73 nt, Homo sapiens
acccccccgacaagaccccgcggacgaagacaagcagaccggaagaccgacggaagaccacaccccgagggag

SEQ ID NO: 123588 - RNA, 36 nt, Homo sapiens
aggcggaagcccgaccaggcagaccccgagaagaag

SEQ ID NO: 123589 - RNA, 82 nt, Homo sapiens
gaagagagagaagagggcagagccggcaggggcgcccccaggaccgagcaggaaccggagcagagggaacaggcacgcccca

SEQ ID NO: 123590 - RNA, 84 nt, Homo sapiens
caacaccgcggcccacgggacccccaggagggacccgcagaaaacaggacaggagaagaacacccccaagagcaaccccacaaa

SEQ ID NO: 123591 - RNA, 76 nt, Homo sapiens
gcagagaaaaaaaaagcacaacccagccagagccccgggaagcgcgaccagcacagagacacacagggaagaccac

SEQ ID NO: 123592 - RNA, 90 nt, Homo sapiens
ggaggaggcaggcgcggcgccggcggcgggacgaagagggacgggcccgcggcgagcgagcccgagaaccgccaagacccagccccccag

SEQ ID NO: 123593 - RNA, 74 nt, Homo sapiens
agacaccaaaaagcaaacggaccagaccgaccaccaaaagaaacaaagcagcaggagaggagagccagagaagg

SEQ ID NO: 123594 - RNA, 83 nt, Homo sapiens
caagaaggaccagaaaaccgacaacccccagaaagccaagccggggggggaaaaggcgccgaggcggaaggagcccccgggcg

SEQ ID NO: 123595 - RNA, 81 nt, Homo sapiens
ggcgagaggaggccgccagcagaggcggagcccgcagaccgcagaaggccggagacaccagcagcaccaggacaaaagaag

SEQ ID NO: 123596 - RNA, 73 nt, Homo sapiens
ccagaacagcaacgagaaggggaggccaaagagacacagcccaagcggccggcgcaacaagaggaaccaagga

SEQ ID NO: 123597 - RNA, 80 nt, Homo sapiens
ggccgccaggggcccccccagggacggccaaaccaggcacgcccccaccaaaggccggagcaccgaaggaacgaagcaag

SEQ ID NO: 123598 - RNA, 85 nt, Homo sapiens
ccagcccacaacccacgcgcaccggaggaccagcagaaaggcccccgagacggagaccagggaccagacacagagaaacccaacc

SEQ ID NO: 123599 - RNA, 59 nt, Homo sapiens
agacaggcgagaggaagacgacgaggaagagcccgccgaagaaaggaacaggacacccc

SEQ ID NO: 123600 - RNA, 74 nt, Homo sapiens
gagcgagagcggaagaaaggagaaggaaaggcgccccagcccaaagggaagacgcaacacagcaaccaacccca

SEQ ID NO: 123601 - RNA, 62 nt, Homo sapiens
aggacacccccgaaccgcaggagggagccgggaaaccgaagaaggcagagaaggcaaacagg

SEQ ID NO: 123602 - RNA, 69 nt, Homo sapiens
ccaagacgacaacaacaacccaaacaacaccaacaacaagagggcaggacacaaaaacgccaggaacga

SEQ ID NO: 123603 - RNA, 34 nt, Homo sapiens
gggggaagaagaaaagagaaagggacaaagcaag

SEQ ID NO: 123604 - RNA, 83 nt, Homo sapiens
cagggcgcgagacaaccaccgggggccaggacagagacaccacgggcagaccacggagggcgcccaccaacccgaggagagcg

SEQ ID NO: 123605 - RNA, 75 nt, Homo sapiens
gcagcacacccaccgagccgagagggacacacaacgcagcaccaaggccaggcgcgaccccgggaggcggcgaca

SEQ ID NO: 123606 - RNA, 119 nt, Homo sapiens
ggcagcacagggcccggagaggacccgacagagaggagcggagaacacagccacccgccaggggcacaggcacaaggacggacaagaacacccaggaggagggcagcaaaggccccgca

SEQ ID NO: 123607 - RNA, 77 nt, Homo sapiens
ccggaccccaagacccaaagcgcgcgcacgcgcggccgcgccaaaggaagcggacaaggcagcggcgcagaaaagag

SEQ ID NO: 123608 - RNA, 75 nt, Homo sapiens
acggagcaggcagcagcccaggagaggagccaagcccaacgggacgggaaaacggccacagccaacgacgcagca

SEQ ID NO: 123609 - RNA, 78 nt, Homo sapiens
agacccacaggaccgaaacgagcaaagcaggccgggccgggaccaacaccacacgacagcacacgagacccccgcgac

SEQ ID NO: 123610 - RNA, 70 nt, Homo sapiens
cccgccccacaccggacacgggacaacaagcgggacaacacaagggaaccaaggagggcgccgcgggcgc

SEQ ID NO: 123611 - RNA, 85 nt, Homo sapiens
ccaggccaggcccggagccgccccagccacaggaggcaacgcacgggccacaggcagccgcagaacaggccggggacggaggggg

SEQ ID NO: 123612 - RNA, 71 nt, Homo sapiens
acagagccaacgcacagaaagcgccaccacagggccccgacgcccagaggagaaggagggagacgaggcga

SEQ ID NO: 123613 - RNA, 73 nt, Homo sapiens
gaagaaggagcccaaacaacccagaggcaggccgcagaaagccgcaacaccgagaaaaaaaccacggccacca

SEQ ID NO: 123614 - RNA, 82 nt, Homo sapiens
aaaggacaggaaaccagcgcacagcaaccaacaggcacgacaagcggacaccccgagagggaaggacgagaacccccgcgaa

SEQ ID NO: 123615 - RNA, 84 nt, Homo sapiens
ccgaggcggcgagagaggcaggcggagccgaccgggccagaagcccggcaaagcacggaaagaacgcccacgcacggcaccaag

SEQ ID NO: 123616 - RNA, 52 nt, Homo sapiens
ggggaacccgaaggaaccaagcagaagaacggccagacggagggagagcgcc

SEQ ID NO: 123617 - RNA, 83 nt, Homo sapiens
ggagggcgagaacgaccccgagacgggcgccggccgagcccgggaaaacgacagcagcagcagggccggaagacgccaccgca

SEQ ID NO: 123618 - RNA, 83 nt, Homo sapiens
ccgcgaggagacagcgaggcccgcggagaccagggcacagagcaagcccgggaaccaggaagcagcccaccagcaaccacaca

SEQ ID NO: 123619 - RNA, 79 nt, Homo sapiens
ggaccgccgggcaagacccaaggaaccgacagaagccaggaccccagagagggccaagcccaagaacaaaaaccgaaaa

SEQ ID NO: 123620 - RNA, 76 nt, Homo sapiens
ccaacgacaagaagcggaaaagaagaggccaaacaaccacagaaacacaaacccgggaggaaaaagcggccaacag

SEQ ID NO: 123621 - RNA, 63 nt, Homo sapiens
ccgagagaggacgccaccagcacagagaggggaagaacgaaaagacaacaaagaccggaacca

SEQ ID NO: 123622 - RNA, 79 nt, Homo sapiens
cgggggagaggcggcgcgaggagcagcgaaaacggggagagccggaccccagaacggcggccaaagcgccagacaaggg

SEQ ID NO: 123623 - RNA, 74 nt, Homo sapiens
acccaacacacgcagcggggggacacacgcgaccggcgaggcccaccaagccaggcgggccacaggaaccaacg

SEQ ID NO: 123624 - RNA, 72 nt, Homo sapiens
cgggcggaggacacagccggacccgggaggagcggccgcagaagggcgcggcccgcccgcccggacgagccg

SEQ ID NO: 123625 - RNA, 86 nt, Homo sapiens
aggaagaagaggacgacgacgacgaggaagaggaggcgagcaaaagaggcggcaaggcagcccaggcaaagaagaaaggcgagggc

SEQ ID NO: 123626 - RNA, 72 nt, Homo sapiens
ccggaagggcaaaacacaaggcaagggacgaaagcgagaaaagccgacgcaagagggaaagcggagcacagc

SEQ ID NO: 123627 - RNA, 56 nt, Homo sapiens
cacgaggccgcacccaggcccaagagcccagagggagaccggacagaccaccgaag

SEQ ID NO: 123628 - RNA, 83 nt, Homo sapiens
ccgcgcgcgacgcgacggcacagcacggaagccgcagacccccccgcggcggcgaggcccgagccagagaggaggacccgcgc

SEQ ID NO: 123629 - RNA, 82 nt, Homo sapiens
cggaaacaggggccacggagccacggccacggccgcaaggcccggcccggagcccacgccagccagagggagaggagccggg

SEQ ID NO: 123630 - RNA, 74 nt, Homo sapiens
aaaaagacacgggaccgaggccgaggagcgaaggacaggagcacaggaaaaagaaccgacagagcggcccacag

SEQ ID NO: 123631 - RNA, 76 nt, Homo sapiens
ggagaacgaaaaaaagagaaaccggggaaccacggacaacccagaggacaacgaaggcggcaaccagaggccaggc

SEQ ID NO: 123632 - RNA, 71 nt, Homo sapiens
gcagacgaccaccacacacggagcggaaccaggaaaacgcacaaggcgacaaggacagaaggacccaccca

SEQ ID NO: 123633 - RNA, 38 nt, Homo sapiens
gcgaagacaagagagccagggccgggcggagaaaggaa

SEQ ID NO: 123634 - RNA, 74 nt, Homo sapiens
cccgccgccggcagccgcggaaggacaagagacacgcaaaccaaggcgacggaaggcagccaaaaaaacagacg

SEQ ID NO: 123635 - RNA, 58 nt, Homo sapiens
cggcgcgaggagcagcgaaaacggggagagccggaccccaggaggaagacgcacgccg

SEQ ID NO: 123636 - RNA, 74 nt, Homo sapiens
aaaggagagaccagaggaggaagagcaagcgggggaccgaacaaggcaaaagggagaggagacgccggaggaga

SEQ ID NO: 123637 - RNA, 80 nt, Homo sapiens
agaagaggagagaggaacccgaagaagaaaggacgacagccagagagggggggccgcccgcccaaggcaggaagaggggc

SEQ ID NO: 123638 - RNA, 82 nt, Homo sapiens
cccaaacccggaaacccagcggcccagccggggcgcaagaggcagacagacaggcgacgggcagccaacaagaaacgacacc

SEQ ID NO: 123639 - RNA, 81 nt, Homo sapiens
agaggaccacagggaccccacccggcggaggaacaggagcacaggcggaggcagcggaggccccgccgcgccgcagccgcc

SEQ ID NO: 123640 - RNA, 62 nt, Homo sapiens
cagcaaaaagaacacaaaggacagacagagagagggccagaagcccccaggaggagaacgag

SEQ ID NO: 123641 - RNA, 72 nt, Homo sapiens
cgccagcaaagccagagaaggacgaggacacgacgcggcccacaacaggcgcggggaaaccagcaccaagac

SEQ ID NO: 123642 - RNA, 88 nt, Homo sapiens
aaagcggccggagaaagggagcggcagccccgagaccccaacaccccacggcaagagaacccgaacgagcgcacggcagcgaagcgcc

SEQ ID NO: 123643 - RNA, 71 nt, Homo sapiens
ggagaaggagacaccggaggacgaagagggggaggaggaggaaaagcccccacgcccaggcagaaggggca

SEQ ID NO: 123644 - RNA, 36 nt, Homo sapiens
gaagaagcaggaaagggaaacgagacagaacaccac

SEQ ID NO: 123645 - RNA, 79 nt, Homo sapiens
acagccaaaccccacccaggcacacgcacacaacacaaccagagcagaccagccccacagacaaaaaagacgaccacca

SEQ ID NO: 123646 - RNA, 87 nt, Homo sapiens
ccgaagcgcaccacggagagcacgagagacccgagcacgccacccccacccgcacaggaccaagaacagaacgaggagcccacgcca

SEQ ID NO: 123647 - RNA, 75 nt, Homo sapiens
cggcagcaagcaccagcacccgcagcccggaaccacgcaccagacaacacagggcgggggacacggcgcgggggc

SEQ ID NO: 123648 - RNA, 71 nt, Homo sapiens
ccgcccccgcagcagcgccaggcggcgcccagcggccacacgccccaagcgccacgcccgggcgcccacgc

SEQ ID NO: 123649 - RNA, 68 nt, Homo sapiens
cacgcaaccacgggcccccgcgcgcagaccgcaacccaccaaggagcacaggacgaagaggaaggaaa

SEQ ID NO: 123650 - RNA, 74 nt, Homo sapiens
gggaggcgggaacacaagaggggaacgcccgcggacggcagggcgcgacaagaagcgcccgcccgacgagcggc

SEQ ID NO: 123651 - RNA, 60 nt, Homo sapiens
caagaggcggccagcaggaggcgagaaggaaacagagccgggggcggcaccgacgacagc

SEQ ID NO: 123652 - RNA, 80 nt, Homo sapiens
aaaagaagaagccccgagcaccaaaacagacaggccccccggagccccccgagaagcggaggagacaagaaggggcgccc

SEQ ID NO: 123653 - RNA, 64 nt, Homo sapiens
gaccaggcccgggccaccgagaccagcagcaacccccagccacaacgcgaaccgggcggacgaa

SEQ ID NO: 123654 - RNA, 67 nt, Homo sapiens
cgccaggggcacgagaaggcaaaaagcaccgccacaagacagagggaggcccaggaacacaccacca

SEQ ID NO: 123655 - RNA, 82 nt, Homo sapiens
ccgcacgggaagcaggcccgccacaggcaaagggaaagagaggggacacaggaagaaaaagaaaggagaccaaaaccaagca

SEQ ID NO: 123656 - RNA, 70 nt, Homo sapiens
caccacccagaaggaaccgaggggcaacccggcaagacccacaggcaaaaagaagcagagggacagaaga

SEQ ID NO: 123657 - RNA, 74 nt, Homo sapiens
gccggcagcaccacaggaggggcaggaaacgaagggaaccaaagaaagcggagaaaacaaagaaaagaacgaag

SEQ ID NO: 123658 - RNA, 83 nt, Homo sapiens
ggacaacagggacagacagaccccagaaacccagaggagaggcagagaacgcgccgcaggggcggaccagaaaccggggcccc

SEQ ID NO: 123659 - RNA, 70 nt, Homo sapiens
agcgggcgcccgaacaagcacgccccggaccgcgaaaacagagcagcaaggccgaacccacaggaagaag

SEQ ID NO: 123660 - RNA, 63 nt, Homo sapiens
aggaagcacggcgggcgaaacaggacaaaccggcgaccacacacggggacgacggggaagccg

SEQ ID NO: 123661 - RNA, 94 nt, Homo sapiens
ggcaccgacagcaacccccccacgccacacagggaaggcacacagcagcacccgaaagagcgaaagcccagacaggaagcaacgagggagaagg

SEQ ID NO: 123662 - RNA, 53 nt, Homo sapiens
ggaaagccaccaggggagcagagcccgaaagaacagcaaagcaaacagagagg

SEQ ID NO: 123663 - RNA, 79 nt, Homo sapiens
agaagcggggaaacgcagacgggcaacagcaagagaaaagcccacagaagaggggccgaggcagcacacagaggaacac

SEQ ID NO: 123664 - RNA, 80 nt, Homo sapiens
caaggccccgaacgcacagggacagaggaggagagcagccgagcaccagggggggccgaagaagccagggggaggaaagc

SEQ ID NO: 123665 - RNA, 81 nt, Homo sapiens
aagagcccggaaggaagagacaggaggcagagccaaacacccaggcggggacccagaccaccgcgcacaagaacggaaaga

SEQ ID NO: 123666 - RNA, 61 nt, Homo sapiens
caccgagagacagaagacgagacaagggcaacgagacacccagcggcccggccccgccggg

SEQ ID NO: 123667 - RNA, 60 nt, Homo sapiens
aaggaagaggcaaagacgggacagacggccagcagaagcaggcgagccccccgagaaaaa

SEQ ID NO: 123668 - RNA, 74 nt, Homo sapiens
ccaaagcagcggcgccggccgccccaccggcggaacccagcaaggcagacagccaagggaccggccggcagcac

SEQ ID NO: 123669 - RNA, 73 nt, Homo sapiens
gacccgcccagcagaagaagagaggagggagaacacagaaaccggccccaggaggccagagggaagcaaagca

SEQ ID NO: 123670 - RNA, 81 nt, Homo sapiens
gaaccgcccggccgggagccgccgcgggcaggacgcgcgcgcagggagacaaaacaccgaagcgacccacaggggagaaca

SEQ ID NO: 123671 - RNA, 87 nt, Homo sapiens
gcgcagccaggccgagaaccccagcggagaaccaccgcacaagagccaagaacaagggccgcgagggaaaaacagaagccacaggcg

SEQ ID NO: 123672 - RNA, 71 nt, Homo sapiens
gcagcaaggcaagggaaaaccccacaaaaccagaggaagagaagcccagacacgaagaagagagccagagc

SEQ ID NO: 123673 - RNA, 79 nt, Homo sapiens
ccagagcccgggccggcagaggcagcagcggacaggagaaccaacgccacacccgcgccccaggccacaagaagaaacc

SEQ ID NO: 123674 - RNA, 72 nt, Homo sapiens
acacggcgaccgcgcagaagaaggagggaccggcagaaacaccagaaaagacaagcgcccgagcggcgccga

SEQ ID NO: 123675 - RNA, 46 nt, Homo sapiens
ggccggcggccaggggcgcgaccccccggcacgacgacggagagag

SEQ ID NO: 123676 - RNA, 85 nt, Homo sapiens
gagaccagaggccgaaccgggcgacaagaggccgggcgccccgcaggacacaagagcaaacaggaggaagaaaaaaacagggcac

SEQ ID NO: 123677 - RNA, 80 nt, Homo sapiens
cagcaagcaaaggcgggggaagccccagacacgcggagccggcggagaggcgagaccagcaagaggagccaggagcacgg

SEQ ID NO: 123678 - RNA, 77 nt, Homo sapiens
ccagccaaagaaacaagccgggaaagggacaagaagggcaaagccgaaaggaagaggcaaagcagacacccggacca

SEQ ID NO: 123679 - RNA, 52 nt, Homo sapiens
gaaccccaaccggggaggaaaaccgacgaagaccagggcaaagcaccccaga

SEQ ID NO: 123680 - RNA, 76 nt, Homo sapiens
gcgccgcggagaccccaccgccggcgcgggaaacgggcgaagcgacgagccgcgaggaggggcgaccccaacagga

SEQ ID NO: 123681 - RNA, 76 nt, Homo sapiens
gggggcggccgggacggaggacgcgcagaggaagagaaacaccaaggaaccacacaagaaaagaaagcaaaaggac

SEQ ID NO: 123682 - RNA, 76 nt, Homo sapiens
cccaacacagaccgaacaacaacaaggaccaacaccaaggaccagccaccgaaccacacaccaaagaaaaaagaaa

SEQ ID NO: 123683 - RNA, 67 nt, Homo sapiens
aagaggacaagacacacacagaaaacacacgaacaaccaagaaaaggagaccacaaccaaggaccac

SEQ ID NO: 123684 - RNA, 80 nt, Homo sapiens
cggcggacagcgaagaccaccaagggacacagccacagaaacggaggcgcgcacaccaccgggacgcagacccacgagca

SEQ ID NO: 123685 - RNA, 86 nt, Homo sapiens
cgcgaaggccgggacccggccccggcccacaggggggggcaaacccgagagaacgggcaaagcgaaggcggagcaggagaaagcgg

SEQ ID NO: 123686 - RNA, 71 nt, Homo sapiens
agaagaggaaaagagcccgaacgggcacacgggcgaggggcaggacccgcgagacaggggaaggaaaaaac

SEQ ID NO: 123687 - RNA, 58 nt, Homo sapiens
caacgcccccggaaggacaacccccaggaaaagaaggaggccagcgggacacacaaag

SEQ ID NO: 123688 - RNA, 77 nt, Homo sapiens
ccaggagagcagcgacaaacgcgagccgccaagcaacagccacggaagaaagcaggcacagcccagggaggccaaaa

SEQ ID NO: 123689 - RNA, 81 nt, Homo sapiens
cagaaagcgcgagagcaagaacagggcccaccagcccaggcagaggccgggcaggaccagccacgcaaccccaccccggcc

SEQ ID NO: 123690 - RNA, 60 nt, Homo sapiens
cgcccgcgcggcgcggggaccgcggcccgcacgggccgaggagcccagcacgcgcagggc

SEQ ID NO: 123691 - RNA, 72 nt, Homo sapiens
gaagcgcaaaaaacgcagggcgcacagagaccgggccacacccagggagcccacaggcgggagccgcaggca

SEQ ID NO: 123692 - RNA, 82 nt, Homo sapiens
gaggaaggcggcggcgccgcaggaccgcagcacccagaggacaaagggccggagagagcccgcaggccaccagcccagaaaa

SEQ ID NO: 123693 - RNA, 58 nt, Homo sapiens
cacacgacccaacggggcaggaagaaaacaccggagcccaagacaccaaaacagacgc

SEQ ID NO: 123694 - RNA, 62 nt, Homo sapiens
caagaccaccgggcgggggaaagcaacggcgcaagcggcggcggcgggcagaggacacacag

SEQ ID NO: 123695 - RNA, 44 nt, Homo sapiens
cagcgaccgggagaacaagacgacaaggagccccaaacgccaca

SEQ ID NO: 123696 - RNA, 59 nt, Homo sapiens
ccgaacccacaacaggagagcgcgccgggcagacccagaagagcaacgagaagccggaa

SEQ ID NO: 123697 - RNA, 61 nt, Homo sapiens
gggcacagcaaagcgaggaccagaccggccgcaagaaggcaaccaacacaaggacagagac

SEQ ID NO: 123698 - RNA, 84 nt, Homo sapiens
agacgcgaaggccaaggacgccgggcggcgacggcggcgcgaggaccgaccgggcccgcggacgaagaaggcacccccccgccg

SEQ ID NO: 123699 - RNA, 56 nt, Homo sapiens
ccaggagggagcagccccggaggccccaaacccaggaaccgcagaccgaaccccca

SEQ ID NO: 123700 - RNA, 70 nt, Homo sapiens
gcgaaccaggagaggcagccagacaaccaagggcagcaggccccgcgagaccggcgcggcggcagacagc

SEQ ID NO: 123701 - RNA, 78 nt, Homo sapiens
gaggcgccccagggacgagaggaagaccgaaggacaaggggggacacagcgagccacgcgccaggaagcccggccaag

SEQ ID NO: 123702 - RNA, 73 nt, Homo sapiens
aggcagcgcccagcagcgcagggaaccaagagaggccaggaacaaggccgagagccccaagggcccggaacga

SEQ ID NO: 123703 - RNA, 67 nt, Homo sapiens
cccaccgggccccagaccggcgaccgagagcccggaccagcagagggccgacgcgggaccagcaccg

SEQ ID NO: 123704 - RNA, 76 nt, Homo sapiens
ggaaccaagggggccagccgccgcgcccgcccgacccgccaccgccaggccagagacgggccaggccacccacaag

SEQ ID NO: 123705 - RNA, 60 nt, Homo sapiens
ccccgaaagaagaagaggcaagggcagaccagaaacgggggcagagccggccaggggcac

SEQ ID NO: 123706 - RNA, 86 nt, Homo sapiens
cgcagcgggggggcgcgggagcaacgggaggccggacccagcgagcgggcggcacgcacgcaggaccagaaggcaccacaacaccg

SEQ ID NO: 123707 - RNA, 84 nt, Homo sapiens
gggagggggcccgagccccgcaacaccgcggcccacgggacccccaggagggacccgcaggagagaaaagacacaggagaacgg

SEQ ID NO: 123708 - RNA, 63 nt, Homo sapiens
gaacacccccagcggccagagcagcccgacggccaggaggcgaagagacgaggaagcccagga

SEQ ID NO: 123709 - RNA, 74 nt, Homo sapiens
cgccaggaacacaccagggcggcgacggcggcgcgaggaccgaccgggcccgcggacgaagaaggcaccccccc

SEQ ID NO: 123710 - RNA, 79 nt, Homo sapiens
gaaaaaaccacgacaaaaccacccaccaaaggagagaccaaccgacggggagccgaggagcaaaagaacaggaacggaa

SEQ ID NO: 123711 - RNA, 80 nt, Homo sapiens
agggccccgcggaccaccgccggggacaccaccagaaacggcgaggaaagagaggagccccggaaagaaaaggacagacc

SEQ ID NO: 123712 - RNA, 81 nt, Homo sapiens
gcgggaaagaaggcaaaacacggaagccccgaaggacaggaccgcaggggggaaaaacaccagcagacgccaacacgcggg

SEQ ID NO: 123713 - RNA, 72 nt, Homo sapiens
ggaccaagaaccagccgcagaaagcaacaaagcgagagcacaagaaaacagccccgagcaccagaccacgcc

SEQ ID NO: 123714 - RNA, 73 nt, Homo sapiens
acaaggacccgaggaacagcgcacgggcgggcgaaggcagcccacgaggggaaaacggcccagggaaacgccg

SEQ ID NO: 123715 - RNA, 49 nt, Homo sapiens
gaaggcaaagcagaggaagaacagagggcccaaaaaagggaaccgcaca

SEQ ID NO: 123716 - RNA, 106 nt, Homo sapiens
gaccgagaccggaccgagagcggaccgagagcgcgaaacgcacgagaaggacacagagcgggacaaaacagcaggaggacaaaaagaagacagaacgcaaaagcga

SEQ ID NO: 123717 - RNA, 82 nt, Homo sapiens
cgccgaccacccgcgccgagcgcgggcgcggggacagacgcccgcgcgcgcagggcacgcccagggcccgagggcaggacag

SEQ ID NO: 123718 - RNA, 78 nt, Homo sapiens
gccggcggccaccccccccccaccccgcacccacgcccggcccggcccggccccgacacgagcccccgaggaaagcac

SEQ ID NO: 123719 - RNA, 78 nt, Homo sapiens
cggaggggcgcggacccagcacccccgcacccacgcggcccgcgaaagggcgcaaagacagggccggaccgggcccgg

SEQ ID NO: 123720 - RNA, 76 nt, Homo sapiens
gcgccgcgcgccgggccgcgccccaggagacccgagagcccggagcgagagcgagagaagggaccagccagaagaa

SEQ ID NO: 123721 - RNA, 85 nt, Homo sapiens
gagaccgaggacgacagagaagggcaagacccaggaggacccgaccaacaaggaccagaaaggaggagacggaaggaacagacca

SEQ ID NO: 123722 - RNA, 74 nt, Homo sapiens
gcagagcagcccccagccagccgcgagaacaccgcccagccaagggggagggcagcgccaaacagcgcaaaggc

SEQ ID NO: 123723 - RNA, 72 nt, Homo sapiens
gacagcgccggccacccaaagcacgggggcaacagaggcagaggggcgggcaaaggagaggcacaggaagca

SEQ ID NO: 123724 - RNA, 73 nt, Homo sapiens
caaaccaaagaccaaccaagaggccagagagcaacaccccccagagaaggacggagaagcgaaagccagaccg

SEQ ID NO: 123725 - RNA, 85 nt, Homo sapiens
gaagggaaacagagagccagaaggaagacaagcgaaggccgggacagcagaaaacagccagcagaaaaagccaaaaagcaagcgg

SEQ ID NO: 123726 - RNA, 75 nt, Homo sapiens
cgggaggcggcgacgggcccgggagccggggggggccccaagcgagccgacggccaccggggagcggaggggggg

SEQ ID NO: 123727 - RNA, 80 nt, Homo sapiens
gaccagaaaagcaaaaagacagaaaaaaccggaaggagcaacagaacaaacacccacagcaggacccaggagggacccag

SEQ ID NO: 123728 - RNA, 70 nt, Homo sapiens
cgagcccaggagcgccacgcgcggaaggcagcgcccagcagcgcaggcgaaccggcagaggcccgacggc

SEQ ID NO: 123729 - RNA, 76 nt, Homo sapiens
ggagcggcccagaccccgcccgcgggagcgggcagaaagaagaggaagagccaaagcgaggggcccaaaaaagcca

SEQ ID NO: 123730 - RNA, 77 nt, Homo sapiens
aagcccgccaggcccagccaacccgcagggaacccgagaagcacgaagacccacagagcgcggcagcccccgcagaa

SEQ ID NO: 123731 - RNA, 74 nt, Homo sapiens
gcgaaacgcacgagaagagaacaacgcgaccggggacacaacccacagaaggcaaaaagaaaaacacagaagga

SEQ ID NO: 123732 - RNA, 75 nt, Homo sapiens
aacacaaggaaacagccccgagggaaaggccagccgggagaagacccccacaaagacagaggcggacacaaggag

SEQ ID NO: 123733 - RNA, 70 nt, Homo sapiens
ccaccgcacccagggccccccccaacacaggggaagccagagccggcaggagacgcagagcgcggagccg

SEQ ID NO: 123734 - RNA, 81 nt, Homo sapiens
ccgcggccgcggcccggggaagcccccggggcgcggcagcgcgggcccgccccaaccgagcggcccgggagaagaaggcgg

SEQ ID NO: 123735 - RNA, 48 nt, Homo sapiens
aaaaaaggcggcacaacacaagggcagagcaaacaaagcaaaaaacaa

SEQ ID NO: 123736 - RNA, 55 nt, Homo sapiens
cggaggcgcagcgccaagagaagcacaaaaacaaccaaaccagcacccaaagcaa

SEQ ID NO: 123737 - RNA, 73 nt, Homo sapiens
agcacgacggcaggaaggaggagacgaagaaaggagggggacaggagccagagaaaaaacgacgggcaacacc

SEQ ID NO: 123738 - RNA, 54 nt, Homo sapiens
cacccacagaaggagagcaaaggagacagggcgcgagggcgagagcgcggggag

SEQ ID NO: 123739 - RNA, 60 nt, Homo sapiens
acagaccaaaggacagggaaccagaggaccaggccacaccagggcagaaggaccccagga

SEQ ID NO: 123740 - RNA, 66 nt, Homo sapiens
agaaggagaccgagaagggaaacagacagccaggacagccacaccgggaagacaaaacacaagaga

SEQ ID NO: 123741 - RNA, 69 nt, Homo sapiens
cgcgggggcaacggagaaaacccggaaccgcgacggcggcagacaagagcgagcaagccgccgcagcaa

SEQ ID NO: 123742 - RNA, 75 nt, Homo sapiens
gcgaaacaccggcgaagaagcaacaaacgcagaggggaaaaggggcccaccgcacagaggccacccggacaccca

SEQ ID NO: 123743 - RNA, 66 nt, Homo sapiens
ggcggagcagaccagagaagagcacagaagaccagagagacaggacccagaccagccaaagagaag

SEQ ID NO: 123744 - RNA, 58 nt, Homo sapiens
agaaacaaaagcaacaaagaggggacagcgaaacagcaaccgagcagcacggccccac

SEQ ID NO: 123745 - RNA, 70 nt, Homo sapiens
cggccgagcacggagagaaaggaggaaagggccgccacagaaaccagggaggcaggccagagcacagaag

SEQ ID NO: 123746 - RNA, 59 nt, Homo sapiens
aacccagggggccagggacgccagaggagcagccaagaagccccccaggggcccgcaga

SEQ ID NO: 123747 - RNA, 56 nt, Homo sapiens
cgaaaccacgacccacagaaagcaaaccagccggcgggcgccacaacggacgacga

SEQ ID NO: 123748 - RNA, 56 nt, Homo sapiens
acgaacaccgaggaggccaaggaagaccgccggaccaaacagagggccccacgcca

SEQ ID NO: 123749 - RNA, 91 nt, Homo sapiens
aaccaacggggccggggcgccccacgccagcaaacgggccaagcggcagcccccccgggcacccacaaagcggagaccccagaccccaccg

SEQ ID NO: 123750 - RNA, 79 nt, Homo sapiens
gacaccagagcaaagagagaaccacccgcacacagccacgagcaaagggcaaagagcagacccagaaagaaaaagaaag

SEQ ID NO: 123751 - RNA, 83 nt, Homo sapiens
accgccgagagccagcgccccagggggcaggggaagaaacgagcgagcccgggacagcaagagccaagcgccgggacagccag

SEQ ID NO: 123752 - RNA, 83 nt, Homo sapiens
acaccccaccaggagcagggccacacgcccccacaccagaagaggaccacagcaaaaaaaaagacgagcaagggggagcccac

SEQ ID NO: 123753 - RNA, 85 nt, Homo sapiens
cgcgggggcacacgaggcgcacaagagccaagagagcagcaccagcagaagagggcccgaccacggcaacccagaggcgaagcag

SEQ ID NO: 123754 - RNA, 78 nt, Homo sapiens
gaaggagcagaacaaacggccaagaagggccaccccacagacgaaaacagccaacagcgaggaagaacagaaaaagaa

SEQ ID NO: 123755 - RNA, 68 nt, Homo sapiens
gggccccaaggaggcaggcacaagcggaccacagaccgcagaggacaggaaaagaaggacggcgccag

SEQ ID NO: 123756 - RNA, 72 nt, Homo sapiens
acccccacgcggccagcgaaaacgcccaggaaaaccagcgccccacaggaaagccccaagagacacgcaaag

SEQ ID NO: 123757 - RNA, 36 nt, Homo sapiens
cgaaaccgcacaagaccaaaccaaccgagccacccc

SEQ ID NO: 123758 - RNA, 65 nt, Homo sapiens
ggcggcgcacaggcgcgccccacaacagacccaggccacaccaaagaccaccgcccacgaagccc

SEQ ID NO: 123759 - RNA, 66 nt, Homo sapiens
gggggcagcacaccggcaggcgccacaggagccgcagaagcaaaggcaccgccaaaccgaaaacgc

SEQ ID NO: 123760 - RNA, 80 nt, Homo sapiens
ccagcaccaccccacggccagggccaccaaccccaacccggagagcggcgagccagagacgcgcacgaaacgacgaagag

SEQ ID NO: 123761 - RNA, 62 nt, Homo sapiens
ccacgggacccagacgagaggacggggaggacgcacgacgcgcggcacgggaacgcagccgg

SEQ ID NO: 123762 - RNA, 78 nt, Homo sapiens
aaggagcccgcccgaagggccccaggcacggggagaccgcgccgagcaacccagggcacgggcacgccagccacggcc

SEQ ID NO: 123763 - RNA, 75 nt, Homo sapiens
cccacaggccgccccaacaccagggaagagacacacccagggggagaagcgagcggacaccagcgaacagccggc

SEQ ID NO: 123764 - RNA, 80 nt, Homo sapiens
agaggggagcacccacacgccaggcgcggcccaagcaaagaagaaggaggagacgggacaggagaaaccgccaaaaggac

SEQ ID NO: 123765 - RNA, 54 nt, Homo sapiens
gacgggggccacacacgcaaaaagccacaccaacaagacaagaaccaaacagaa

SEQ ID NO: 123766 - RNA, 35 nt, Homo sapiens
acgggccccaggagccggcgccaccagcaaaacca

SEQ ID NO: 123767 - RNA, 83 nt, Homo sapiens
gcggcacagcgccgccagcagggccgaccagaagacagcccaacaaggcgggacgacaacaccacagacacccccaaaccacc

SEQ ID NO: 123768 - RNA, 85 nt, Homo sapiens
gccacgcaccggacgacgcccggcgccagcacacgcaggggacggaaagagagccgcagcgcagaacaagggaaaaaagggcaaa

SEQ ID NO: 123769 - RNA, 71 nt, Homo sapiens
ccaggggcaccgcagcgaccacccacacaaacccgggacgggccgagaggcaccggcacggaccaccccaa

SEQ ID NO: 123770 - RNA, 72 nt, Homo sapiens
agccgcacgggacccagcaaagaaggccacaggaggggaagcaaggaagaaccaccgaggacaaaagggcaa

SEQ ID NO: 123771 - RNA, 66 nt, Homo sapiens
aacagacagaaagggaggaaggccggccagcagacagaacaagaaagggacaccaaggcccccaag

SEQ ID NO: 123772 - RNA, 109 nt, Homo sapiens
gagagcgccacacagagggacgagccagagccgaccagcgcgcagcccgagggggcagaagccaagccccaggcggaggcaaacaccaaaaacgaaaccagcgccagcc

SEQ ID NO: 123773 - RNA, 67 nt, Homo sapiens
cgcccggggggaagaggaacagccaggggcccacggaggggacagagcacaggaaagggacccccac

SEQ ID NO: 123774 - RNA, 114 nt, Homo sapiens
gggagcggaggggccagcacccggagaagaccaccgaccaggcggggaggggcgccggcagaaaccggagagcaaggggacccgcacacgcaacccgccccagggcaagggccc

SEQ ID NO: 123775 - RNA, 76 nt, Homo sapiens
agcagccccggcccacggccagcaacaggaagagccacggcaaagacaccaaacgagacaaacaggaaagaaagcc

SEQ ID NO: 123776 - RNA, 104 nt, Homo sapiens
accaagaggggggagacggggaagacaggccagcgcggccaagacccaccgcaaggggcaagaccaacggagccaccggagaaccaccgaagagagcgaaaagg

SEQ ID NO: 123777 - RNA, 102 nt, Homo sapiens
cgcacaggcgacgcggggccaggcaggacccaacgacaggcgccccggcccaacgacaagcagaccggaagaccgacggaagaccacaccccgagggagccc

SEQ ID NO: 123778 - RNA, 101 nt, Homo sapiens
aaacacggcggccagggccgcggggaccgaaaggacagaacaggaccggaaaggagaccaggaccaacggccagccacgcagacaaccccgcgcgcacgga

SEQ ID NO: 123779 - RNA, 59 nt, Homo sapiens
cgcagccaaaagccacaaagagagggcaggaggggcacacccgaccaggccaaccgacc

SEQ ID NO: 123780 - RNA, 35 nt, Homo sapiens
cccagagcgggaacaggaccaccgaagaaaggagc

SEQ ID NO: 123781 - RNA, 57 nt, Homo sapiens
ggggacaaggacaccggagagagaggaaaggaagcagacaccaagccaaaaagcaga

SEQ ID NO: 123782 - RNA, 67 nt, Homo sapiens
gacccaaaaagacggacagcccacgggaacaagaggggacagaaaggacaagcccccacgaggaaaa

SEQ ID NO: 123783 - RNA, 78 nt, Homo sapiens
cagaaaccaaaaaagcagcccacagacacacccaaagcagcccacacagggcagacagaccgaaaacacgaagcagca

SEQ ID NO: 123784 - RNA, 78 nt, Homo sapiens
gagagaggggaagcaccaggggcccagacccgggacaccgagacgagaggcacagcaagagcgcccgcccaggcggag

SEQ ID NO: 123785 - RNA, 56 nt, Homo sapiens
cacagcacagccgggaaggggagccaccagcccccgaagagagccaaaacccccgc

SEQ ID NO: 123786 - RNA, 78 nt, Homo sapiens
aggacaaaaccgaaggagggcaaaagcagaccggaaaacccaccggcaagaccacacccgaggggagcccaggacacc

SEQ ID NO: 123787 - RNA, 45 nt, Homo sapiens
ggaccgagaccgcggccgggaccgagggcggaggcagggcacgac

SEQ ID NO: 123788 - RNA, 74 nt, Homo sapiens
aaacaaccgagcggaagggcaaaaacgaagcacagcgggcacccgccacggacaggacgacgggggacagaaga

SEQ ID NO: 123789 - RNA, 72 nt, Homo sapiens
gagaccagccggcaaaggagaccaggaccaacggccagccacgcagacaaccccgcgcgcacggacacacca

SEQ ID NO: 123790 - RNA, 74 nt, Homo sapiens
gacggaggacaccaagcgaagacagagagcaggaccacaggaagcaagagaagaggagaaaccgccggaaccga

SEQ ID NO: 123791 - RNA, 63 nt, Homo sapiens
acagcccgccgaacccgaaaggaggggcgagaagagagaagacgcagaccgacaaacggaagg

SEQ ID NO: 123792 - RNA, 56 nt, Homo sapiens
caagcgaaggcgcgcaccggaagcaccagcgaggaagaaacagcaagagaacacgc

SEQ ID NO: 123793 - RNA, 61 nt, Homo sapiens
agcgcggaagccccgaaaccccaggacccagacacaagcccaaaagcaaagcagggcagca

SEQ ID NO: 123794 - RNA, 74 nt, Homo sapiens
agggagccccgcagacgggacacagcacaccggagagacgaggcccagaaccgggacaacccagcaaacaggcc

SEQ ID NO: 123795 - RNA, 83 nt, Homo sapiens
agcgagcgagggggggcgcgccggaaaccggagcgcgcagcaggggccagacaagcacaaaccccaggagcccaccacgacaa

SEQ ID NO: 123796 - RNA, 66 nt, Homo sapiens
gaaggagcccggcagcgccgggaaacaccggcgcgcgagaagaagcagaagaaacgaggagacaaa

SEQ ID NO: 123797 - RNA, 72 nt, Homo sapiens
ggaaggcagcaagaagggacgaccaccacagccacagccgacaaccccgaaaccaaagagaagcagcgaaga

SEQ ID NO: 123798 - RNA, 63 nt, Homo sapiens
accaaaacagaaccgccggaaagcgcaaaccaagcaaacgggaaaggcaggggacaccgaacg

SEQ ID NO: 123799 - RNA, 79 nt, Homo sapiens
cgccccagccaggccgcgccggcaccccgagcacaccgacagagaacccaggccaacacacagacagaggcagccaccc

SEQ ID NO: 123800 - RNA, 68 nt, Homo sapiens
ccgggggcggcgaccggagggcggcgaggccgccaaagggagcgaggagacacgaagcagaagcagcc

SEQ ID NO: 123801 - RNA, 71 nt, Homo sapiens
agacaacaagcgaggggacccagagaagaaacaacacagaaaacaagccgacagaagaaagcagacagaga

SEQ ID NO: 123802 - RNA, 80 nt, Homo sapiens
aggaacagggaccacggggaacagccaaagaggcgccaacaagcagaaaggaaaggaagacccgcaagaagaagaaaaag

SEQ ID NO: 123803 - RNA, 79 nt, Homo sapiens
cccgggccgcgcccgagggcggcgacggcggcgcgaggaccgaccgggcccgcggacgaagaaggcacccccccgccgg

SEQ ID NO: 123804 - RNA, 82 nt, Homo sapiens
ccccggcccccgaagcccaccggccccaacgcacagccagggagccaagcgccgcccggccagcagcaagcggcaagagcca

SEQ ID NO: 123805 - RNA, 70 nt, Homo sapiens
gcgacgacgccaccgaccgacagagcaggagacacaggacccggaacggaacgagcggcgggggcgccag

SEQ ID NO: 123806 - RNA, 77 nt, Homo sapiens
gcaggccagcccggacccggaggcccccagcccagagcccgggccgaccaagcagaacccgagaagagccgagaaac

SEQ ID NO: 123807 - RNA, 81 nt, Homo sapiens
acagagacacaagagcccgggaaccccagcgaccagcgaggacagagaaaaaagaacagaagagcaaggaaaacacgcaaa

SEQ ID NO: 123808 - RNA, 79 nt, Homo sapiens
ccccagcccacaggaaaggcgacagcgagggacgcgccaaggcgcagagaacaccgagcggagcaaggagaagccgccc

SEQ ID NO: 123809 - RNA, 83 nt, Homo sapiens
acaaacgccaagggacggaccacgcccgcaccagaggggaaacgaggcccaagagggcagcccagagccaccagcaagcggga

SEQ ID NO: 123810 - RNA, 58 nt, Homo sapiens
acagacgggaacaaacacaagccccagcaccacgaacagaggcaacacggaccaggcc

SEQ ID NO: 123811 - RNA, 83 nt, Homo sapiens
caggaggcgagcccgcggaaccgcagccagaaggggccgcccgaaagaagcccggaggggacggagcaggagaaagcaaaggc

SEQ ID NO: 123812 - RNA, 72 nt, Homo sapiens
gacaaccaggggaccagagaggacggcaccagccaggagcccgcagacacaaaacgcacacgacagcccacc

SEQ ID NO: 123813 - RNA, 50 nt, Homo sapiens
cgcagaccgcagaaggccggagacaccagcagaaaaggcgcggccgcgaa

SEQ ID NO: 123814 - RNA, 67 nt, Homo sapiens
caaccagggcagaagccgaacacgacagaaagaaaggccaaagcagcagagaggagcacggcagcca

SEQ ID NO: 123815 - RNA, 75 nt, Homo sapiens
acggagagaaaccgagaaacagaacggagaaaagcacaaggaggagggagaacgagaggaaccaagagagaagaa

SEQ ID NO: 123816 - RNA, 73 nt, Homo sapiens
accccgcgccaggaggaccgcaggaggacgcagacggagggcccccgcacccaggcggaggaggcaaggggac

SEQ ID NO: 123817 - RNA, 74 nt, Homo sapiens
cgagagcgacagaagggccgcggcgaacacggaaagccccagccgacagccccccaggcagagagcaaagcaga

SEQ ID NO: 123818 - RNA, 56 nt, Homo sapiens
acaagccgaccagccaaggcagaaccagagaccacagaagaaggaagggccaccca

SEQ ID NO: 123819 - RNA, 52 nt, Homo sapiens
aagccagccacgaaagaaagcgaagccaacaaagaaaggaccggggcaaaac

SEQ ID NO: 123820 - RNA, 75 nt, Homo sapiens
gacgcggcgagaacagcaaagcccaagagaggcaggcagcgacagccacacaacggacaggcaagaaggaaggac

SEQ ID NO: 123821 - RNA, 79 nt, Homo sapiens
ccggaccacggcgcggagcgccgccagaggagaagaccccaggccagacaaacaagagcagcacaaagggaaggagcag

SEQ ID NO: 123822 - RNA, 86 nt, Homo sapiens
acggccagacccggagacgacccgacgaagcccacgccgggacccagcgcagcagagaggaagaggagcgaaggaaaaggcgccgg

SEQ ID NO: 123823 - RNA, 81 nt, Homo sapiens
cccacaaaaccacagcaccccccaggccaggaggaaagaagggagggcaaggccacaggccccaagaaccgacgagccccg

SEQ ID NO: 123824 - RNA, 51 nt, Homo sapiens
acaaggcggccccagcgcaggaaggggagccgcacgaaggggggcagaaag

SEQ ID NO: 123825 - RNA, 74 nt, Homo sapiens
agagcagacacaccccagagggcgcaagcagagaaaagggggcgaggaagagacaggcgggggagaagaagcag

SEQ ID NO: 123826 - RNA, 107 nt, Homo sapiens
gcgcgaaggccgggacccggccccggcccacaggggggggcaaacccgagagaacggcccccaaaacacaagaggacggagaagcgacgaaagaagccgggacaagg

SEQ ID NO: 123827 - RNA, 80 nt, Homo sapiens
cggccggagcagcagcccgaggagaagacagaggagccagaccaagagacagcacaggcgagcgagcagagacaccaggg

SEQ ID NO: 123828 - RNA, 73 nt, Homo sapiens
aaagacaccaccacccacacccaagggaaaaaaaaggacaacccgacaccggaagaggagaaagcaggaccgc

SEQ ID NO: 123829 - RNA, 78 nt, Homo sapiens
cgcaggggaccggccgggccggaggcaaggggccagaggacagaggacagggccagcacccccaaagcccaagaggag

SEQ ID NO: 123830 - RNA, 75 nt, Homo sapiens
cgcacccaccaagcccacgggcaacaagcgacaggagcagacaggaaaccggaacaaaagcaggaagcgagaagc

SEQ ID NO: 123831 - RNA, 75 nt, Homo sapiens
ggcggaggcggggaaaaaggagcggagaagggccccccaaagaaccccagacgcaagaagaccggccgccccggg

SEQ ID NO: 123832 - RNA, 84 nt, Homo sapiens
cgcggaccgggcccgccggcccccccagagaggccacacgcaaaaggggccggaggcgaaggacgaaacgcacacagacaggag

SEQ ID NO: 123833 - RNA, 64 nt, Homo sapiens
aagaagaagaaggcgaaggaccccaacggggaggccaacggaagaaacccacgccccaccaagg

SEQ ID NO: 123834 - RNA, 76 nt, Homo sapiens
aaagcaaaacgggcaaaagaccaaagaaggcaaggagagaagagaagaacagcacaggacagaacacgaagcaaag

SEQ ID NO: 123835 - RNA, 74 nt, Homo sapiens
gcggcaagaccgccagagaacgaccgaagggacgaagccacgacagcagagaggagcacggcagaggggcaaac

SEQ ID NO: 123836 - RNA, 104 nt, Homo sapiens
gcgagagaagacgcaaggggagcacggggccggaccagccccgaaacacggggacacacagcaacgaagcaggggaggagggaagaccggacagcgagccaaga

SEQ ID NO: 123837 - RNA, 68 nt, Homo sapiens
gccgcgggagagaggacccccccccccccccaagaccggagaagaacaagccgacccaaagccgccgc

SEQ ID NO: 123838 - RNA, 73 nt, Homo sapiens
cccggcgcaaccgcggaaaacagagaggaccaaagcagcagaccacagccaacgaaaccaagcgccagggaag

SEQ ID NO: 123839 - RNA, 79 nt, Homo sapiens
cccgcaccgcagccccaggaccgaacgaccgccgcggcggggcccaaacagcagaggggcaggcccccacagagagcac

SEQ ID NO: 123840 - RNA, 77 nt, Homo sapiens
cacggcgggagagcggcaagaagggggagcaacagacaagcccgaaaggaacagcagcaggaacgaaaccccaggcc

SEQ ID NO: 123841 - RNA, 76 nt, Homo sapiens
ccaccagccggcaagccaggccaaaggcgccaggaaggaggacaccgaccagaccccggaaacagggaggacccag

SEQ ID NO: 123842 - RNA, 72 nt, Homo sapiens
ggaggagggagaacacagcaaccgaccagggcgcccaggcgcgaggcgcagacccagcaccgcaaggggagc

SEQ ID NO: 123843 - RNA, 75 nt, Homo sapiens
cagcccgcaagagcgggaacagaggagcgccggcccaggcggaagcaaggcagaccggccacgcaacccgccccc

SEQ ID NO: 123844 - RNA, 76 nt, Homo sapiens
acccaggaaccgccgacacgggccacaaccaggcgggccggaacaggacaggcaggggcccgaagaaaggagaaca

SEQ ID NO: 123845 - RNA, 72 nt, Homo sapiens
aaaacagacggaagacaaggacagaacccaccagacaacacacgggaagagcaagaccagaggaaagaacaa

SEQ ID NO: 123846 - RNA, 76 nt, Homo sapiens
cgaccggggaaccagacggagaaaggcaagaaacgacaccaggacagcccgcacaagacccggccaccagaagaaa

SEQ ID NO: 123847 - RNA, 76 nt, Homo sapiens
gaggcgggcaggagcggcggccaggccagacccgaaggccaggagacccgaccccaagaacagccagcaaagacaa

SEQ ID NO: 123848 - RNA, 56 nt, Homo sapiens
acaaaacaaccaacgaagacaccgagcgaaagagaaagagaacccggccggagccc

SEQ ID NO: 123849 - RNA, 66 nt, Homo sapiens
ccagaaaggaagccagcagccaaaccgagagagaaggccaacaggaaccggaaaacaacgcgcagg

SEQ ID NO: 123850 - RNA, 76 nt, Homo sapiens
ggaaggcggaccaggcacaagaacgcccaccacaccgggagcaaggggaagagagcacaacagggccacccccaac

SEQ ID NO: 123851 - RNA, 83 nt, Homo sapiens
aggacggggcgccggcgccgccgcccccgggccgcggccgcaggagaacaaccgcaacgaacaaacaggagacagagagcaag

SEQ ID NO: 123852 - RNA, 77 nt, Homo sapiens
ggagaccacagaggggccggcccaaaagccccaggagccgaggccagagcagaaaccagcccaggaacccagcgccc

SEQ ID NO: 123853 - RNA, 74 nt, Homo sapiens
gcccgccgcccggagcacgagaagcaagaggagagaagacaaaaagcaggagcccgaaaggacaggcacaaaga

SEQ ID NO: 123854 - RNA, 58 nt, Homo sapiens
aagccacggcagacacacaacccgacccgacgagacgaaggagacgcaggagggagag

SEQ ID NO: 123855 - RNA, 55 nt, Homo sapiens
ggcggagcagaccaccgggacaaaccggcgaccacacacggggacgacggggaag

SEQ ID NO: 123856 - RNA, 86 nt, Homo sapiens
acggcccgagacacaccaggccggcaggcgagaaaagcgagaccgcggcgaggaccggccccggagcccacccagccccgggcgcc

SEQ ID NO: 123857 - RNA, 80 nt, Homo sapiens
ccgggacagagcaccagaggaacagcagggcaagaccagccacaggaaagcagggggcggggcacccggcccgcagcgga

SEQ ID NO: 123858 - RNA, 74 nt, Homo sapiens
accgagacggggagcccaaagcaaaggccgaaaaggaaaaggagccagggcggaccccgcgggacagaacgcac

SEQ ID NO: 123859 - RNA, 73 nt, Homo sapiens
ccggggaaagacagcccacagccaggccaggcgaaccagccgaaaaaggagaaaccaaaaggaaaagcgaacc

SEQ ID NO: 123860 - RNA, 87 nt, Homo sapiens
cgagcggccccgggacgggcagcagcgcgacccgagccggcgcccgggccggccaggacgacccgggcgacaaaacagccacgaggg

SEQ ID NO: 123861 - RNA, 74 nt, Homo sapiens
cacacccaacaccgggcccacaccagcaggcaagggcccggcgacgacgcccgcgggggggccaggccccacgc

SEQ ID NO: 123862 - RNA, 64 nt, Homo sapiens
gccccgcgacgcgcccggcccggagcccccagcgcagcggccgcgacagaacgagacgaaaaag

SEQ ID NO: 123863 - RNA, 68 nt, Homo sapiens
caaaagaagaccgggaaccaaccaaccgaagggagaaaacgggccggaggaaaagggcggcaggggac

SEQ ID NO: 123864 - RNA, 73 nt, Homo sapiens
gaagccccagggcccggaggacggccgcaagcgccccaccccaacgccgggccggagggaaggaaacgcaaga

SEQ ID NO: 123865 - RNA, 78 nt, Homo sapiens
cccaccggaccacacggcgaggaccacccgcacccaggggacgcacggcccaaccccgagcaaggacgcccacccagc

SEQ ID NO: 123866 - RNA, 71 nt, Homo sapiens
cgagcgccggcaggggccccacgggaagccgccgaaaagcgaaaagaaacaagccgcggcaacagcgaccc

SEQ ID NO: 123867 - RNA, 76 nt, Homo sapiens
gaggcgagagcggcagcagcaccagcccaagagaagagccacccaggaccccaggaccagaaggcaaccaacagaa

SEQ ID NO: 123868 - RNA, 82 nt, Homo sapiens
gccacacccacagcgcggcaccgcgacacggaaccccacccaacaagacaagccgagaccaccaggagcagagcggaggcaa

SEQ ID NO: 123869 - RNA, 65 nt, Homo sapiens
ggcaggcaaaccccgccagggccaccagaaacgaggacccacaggcagagccagaaaccacaaag

SEQ ID NO: 123870 - RNA, 80 nt, Homo sapiens
gccgaaaacagacagaacagaacccaaaagccgacaaccccagaaacagggccggcaaccgccagacaggaggaacgaag

SEQ ID NO: 123871 - RNA, 40 nt, Homo sapiens
gcgacgcgggccgagccccccagaaaagaagcaagacaag

SEQ ID NO: 123872 - RNA, 75 nt, Homo sapiens
aaagcagcagcaaaagcacagaaagaccacaagcaaacaaaaccagacacgcaacgcagcaagacgcccagaccc

SEQ ID NO: 123873 - RNA, 63 nt, Homo sapiens
agagccacccgcacgccccggccgggccaagcgcaggaccgccgggagagccgcccacccccc

SEQ ID NO: 123874 - RNA, 69 nt, Homo sapiens
gacacgcaaaccacacaaggaaacggacccagccaaccccgaacagacaccagacccgacacaagaagc

SEQ ID NO: 123875 - RNA, 65 nt, Homo sapiens
aggccccagggcagccggacccgggagccgcaggaggaggagaggaaggagcgaagagaagcagg

SEQ ID NO: 123876 - RNA, 71 nt, Homo sapiens
accggccaccgcaaccccgcccccaggaggcagccaccagcaggaggaaaaccaacgccacgaccagagac

SEQ ID NO: 123877 - RNA, 74 nt, Homo sapiens
gaccagggaccacgccaaaggaaaaccggcagaggacaagcagacccgcagaccaacgaaaaccacggcgccac

SEQ ID NO: 123878 - RNA, 75 nt, Homo sapiens
gcagcccggcggacgccggcacagaacgcacggagcgcggacgcccaggagcgggcgccggcggagcgccgcccc

SEQ ID NO: 123879 - RNA, 74 nt, Homo sapiens
ccaggggagggcagacggaggccccggagccaggcaggcagcaggcacaacaaaagcagaacccgggaacgaac

SEQ ID NO: 123880 - RNA, 87 nt, Homo sapiens
cgggccgagagccgcccgggccagcggccgcgcacccccggccggaggcaccagccacaggaagccggagaaccgaaggaccgcgga

SEQ ID NO: 123881 - RNA, 75 nt, Homo sapiens
gagacaccagaacacccacacacagaggggaaagacccagagaagaggacagaagccagccaggcgcaagagagc

SEQ ID NO: 123882 - RNA, 41 nt, Homo sapiens
cgcggagcgcaccgcagaagaggaaaaggggagcaggaggc

SEQ ID NO: 123883 - RNA, 67 nt, Homo sapiens
acaggaccaccggaacgcgggaacaggacggagggagagcgcacccaggaacgagcgcgagaagaac

SEQ ID NO: 123884 - RNA, 78 nt, Homo sapiens
accacgcccaaacaacaggggacccccaagcagacgcggggaggaggaggaggaagggagcggcagcaggaaggagac

SEQ ID NO: 123885 - RNA, 75 nt, Homo sapiens
gaaccaacccacaccagaaaggacacacagggcggagaacggaaaagcaccaggaagcagagaggaccgcagaag

SEQ ID NO: 123886 - RNA, 101 nt, Homo sapiens
cgggccacggaagccaccgacaggcccgagggcccgagagcaccgcgccagacagacgcaaacagcagacggaagaccccacggcaaaaccacacccgagg

SEQ ID NO: 123887 - RNA, 62 nt, Homo sapiens
ccaggaggccagggggcgccaggccccggagacgggggcaggggagcagcagaacaagcaga

SEQ ID NO: 123888 - RNA, 83 nt, Homo sapiens
gcgcggcaaccggggagcccgccagacgcaaacagcagacggaagaccccacggcaaaaccacacccgaggcgagcccaggac

SEQ ID NO: 123889 - RNA, 68 nt, Homo sapiens
caacccgaagccacagcccaacccccggcacccaacagccccccccccagaaccggaaacagacacag

SEQ ID NO: 123890 - RNA, 87 nt, Homo sapiens
gaggccaagagcagcaggcggaggaaacagccagaccgagagcagccgccggggcggagcagcgaggaagcaaacaagaagaaaaga

SEQ ID NO: 123891 - RNA, 80 nt, Homo sapiens
gcgcgagccaggacccgggaacgaagcccaaaaggcagagacggaccgagacaggagagcaggggcccagccacccccaa

SEQ ID NO: 123892 - RNA, 69 nt, Homo sapiens
acgaccaccgcaagcacaccggcgggccagaggcaggaagaagaagacgagacagggcgaaccagggga

SEQ ID NO: 123893 - RNA, 114 nt, Homo sapiens
gaggaggagaggggaggagaagagagggggaaaccaagaccccaggacaacaaggagggcagaagggacggggagagaagcagagccacccacggcgagcggcacggggggcgc

SEQ ID NO: 123894 - RNA, 73 nt, Homo sapiens
gagcggccacacaacggagagcgcaagcccagcgggacagggcaaggccagagaaggcgggagaaagacacga

SEQ ID NO: 123895 - RNA, 75 nt, Homo sapiens
gggccgcacaagaagaagaggagaagcccgccacaggggaccgacacacagcacaaacacaccaaagcgaacccg

SEQ ID NO: 123896 - RNA, 78 nt, Homo sapiens
ggaaaaccagcagaggcggaaggacccggaagccacaaagcaaaacggcacgggagagggcgggggcggagggcaaga

SEQ ID NO: 123897 - RNA, 68 nt, Homo sapiens
gaagacgaacaaacagcaagaaagaccacaagaccaggggcgaaacacaggacccgcaaaacccccag

SEQ ID NO: 123898 - RNA, 73 nt, Homo sapiens
gggcccaggcccccacgccgagggccaccaggccgccgggggccgcgcgcccggggccagagggggcgaccgg

SEQ ID NO: 123899 - RNA, 71 nt, Homo sapiens
cagcaggccaaagaccagaggggaagcaccgggacacgcaagccccacaggaagaagcggagggaacggag

SEQ ID NO: 123900 - RNA, 74 nt, Homo sapiens
aagaagccacaaccaccgagcccccgcccggggagcacccgaagacacccagcgccaaccaaaccccagagcag

SEQ ID NO: 123901 - RNA, 74 nt, Homo sapiens
aaaggccacggcgcccacggccaaacccgcacaccaccgacgacccacgccgggaaccccaccaaggaaagccg

SEQ ID NO: 123902 - RNA, 73 nt, Homo sapiens
cgaaagccccacccgccgcagcaagcagagaaacaacgagagcccgagaaggagccgcaaccaggccggaacc

SEQ ID NO: 123903 - RNA, 74 nt, Homo sapiens
agagcccggagaacaagagggcggcagggcagccagagggaagggcacagcaggggggagcgagacccaagcaa

SEQ ID NO: 123904 - RNA, 51 nt, Homo sapiens
ccgaacgaagaaaaaaccaaagcaacagcagacgggcgcgcagggcgggac

SEQ ID NO: 123905 - RNA, 77 nt, Homo sapiens
gggagaacgagaagacaaggccccagggaagcagaggcaccagcgcggggcagcgccaggacacgccgaggacaagc

SEQ ID NO: 123906 - RNA, 83 nt, Homo sapiens
accacgggcaaagaggaaccaggaaaccgggaaagggccaccaggcggagcccggcacgggcaaacagagcaggcagggaacc

SEQ ID NO: 123907 - RNA, 35 nt, Homo sapiens
aagagggacccacccggcgagccggcagcgcccga

SEQ ID NO: 123908 - RNA, 76 nt, Homo sapiens
ccccccgacaagaccccgcggacgaaggaggccgcgggggagcgacgaccagccccgaccagcgacggagcggcag

SEQ ID NO: 123909 - RNA, 83 nt, Homo sapiens
ggagcggaaaaccacgcgggaggagggggggaaggacgagcaccgaggcccccggggccggagcgagggagagcaggaacaca

SEQ ID NO: 123910 - RNA, 83 nt, Homo sapiens
cccaggaaaaacagccgcaccgggaacaggcggagccaccgcacccaggcggagcacaaggcagacccagccaccacaacccg

SEQ ID NO: 123911 - RNA, 69 nt, Homo sapiens
caacaggcagacagccacaagaggaacacggggagaagagaaaaggccccagagagacgaagaagagaa

SEQ ID NO: 123912 - RNA, 72 nt, Homo sapiens
aggaggaagcacaagaggaaccggcgccccaccaagaacagaccaggagagggaaaacagggagaacagcag

SEQ ID NO: 123913 - RNA, 81 nt, Homo sapiens
gccaaagccgcccagacggccaccggcgggaggaacaaaaggaggagcacggcgaaccgcaaacagaagagggagccagaa

SEQ ID NO: 123914 - RNA, 76 nt, Homo sapiens
gaagcaaagggacaggagaccggagaaagcaaacaaaacccccccaaaccggccccacacagcaccccacccaagc

SEQ ID NO: 123915 - RNA, 80 nt, Homo sapiens
aacgcgcagggagcagaggaagaaggggaagaaagagacagccgcggaaccaccaggagcccagcagccggggccgccca

SEQ ID NO: 123916 - RNA, 72 nt, Homo sapiens
caaaaccagcacggcgcaacaggaccacagcaagacgacaagcacgccaaacacagaagcagagcccgggag

SEQ ID NO: 123917 - RNA, 78 nt, Homo sapiens
aaagcgaagaagaagaggaagagccaaagagcaacaacgagcgacaccaaaggaacacagagacacggcgacggaagg

SEQ ID NO: 123918 - RNA, 73 nt, Homo sapiens
gaaacagagaaagaaggcggccaggccaaccgaaggacgaaggccaccagaccaacaggaccaccggcccaac

SEQ ID NO: 123919 - RNA, 67 nt, Homo sapiens
acaccaaaagcgggggaagaagagaggacggacggcgaagcgccggcccagccgaagacgcaaagga

SEQ ID NO: 123920 - RNA, 86 nt, Homo sapiens
cgccaggaccccccaggagagcgccccagggcaagccccgcccggccaacaagagcagaacggagcccgcagaggaccggagaagg

SEQ ID NO: 123921 - RNA, 81 nt, Homo sapiens
gagggccccagagggcagccccaggcccccagcccgggagaggggagagagcccccgccaagaacaccagcccaggcccgc

SEQ ID NO: 123922 - RNA, 57 nt, Homo sapiens
gcccccccggaaccgggcacaggcccagacacccaaagggaaccagagcgacgacgg

SEQ ID NO: 123923 - RNA, 76 nt, Homo sapiens
caggcgccgaccaccccagcaccagcccagagggaaagcacaccaccccagccagagacccaaaaaaaagccgaag

SEQ ID NO: 123924 - RNA, 62 nt, Homo sapiens
ggaccgaaccgcaagagaacggcaccaggcgacaggcgccaaggagagaagagcgccagagc

SEQ ID NO: 123925 - RNA, 74 nt, Homo sapiens
ggaccagcacaggaccacacaagaaacgaaaacagggggagaccggaagacagaaaaggcacacacacccgcag

SEQ ID NO: 123926 - RNA, 80 nt, Homo sapiens
acacacagcggagcggggcccgcagcacgagagggacaggaccgccgcccagcaccccacacggcggcgacggcgccgag

SEQ ID NO: 123927 - RNA, 86 nt, Homo sapiens
ccaaacggaaacacccacagacgccaaggggacaaccggcgaaaggcccccaggacagcagggaagaacggaaaccagagaaagaa

SEQ ID NO: 123928 - RNA, 82 nt, Homo sapiens
cgaggggaagggcaggaggaggaggaggggcccggcggcggggaggaccgaggaccggaagaagcagaggagccagacagga

SEQ ID NO: 123929 - RNA, 87 nt, Homo sapiens
aaggcaaggggcagacgagaagaggaagcgcgggagaagcggcgcccaccggcgggcaacacccgccgcagagaacgaaggggacca

SEQ ID NO: 123930 - RNA, 54 nt, Homo sapiens
agagagacacggacaaggggaggagggggaacaagcacgggacccggaccacag

SEQ ID NO: 123931 - RNA, 71 nt, Homo sapiens
agaaggaccaagaaccagggcggcaccccaccgcccagccacagccccccccacaggagcaccggccgaag

SEQ ID NO: 123932 - RNA, 99 nt, Homo sapiens
ccggcaagagaaagagaggccagaacagccggcaagagcacaggaagcaagagaagcacaagaagacaagggcccagaaaccacaaaggcccccgacgg

SEQ ID NO: 123933 - RNA, 75 nt, Homo sapiens
aacacagcagcgaaaaccacaggccagcaaccaagaacccacaagccaccgggagcaggagagggccagaagaca

SEQ ID NO: 123934 - RNA, 64 nt, Homo sapiens
gccccgcccccgccgccgcgcacaaccgcacggcaggggcacaaggaccacaaacgcagaggcc

SEQ ID NO: 123935 - RNA, 40 nt, Homo sapiens
caccacagaggcgccaggggggaaaccccgaaacaccgga

SEQ ID NO: 123936 - RNA, 86 nt, Homo sapiens
gagccccccacagagccccccgagcccgacaaccccaccggcgaccagcccacgaagcaaccgacaggaaacagagccaggcagcc

SEQ ID NO: 123937 - RNA, 84 nt, Homo sapiens
gcaggcggcgcggcaagcaggggcaacccacaccgcgaacccaggccacaacacccggcccaaagaggcgaggagaagggaagc

SEQ ID NO: 123938 - RNA, 79 nt, Homo sapiens
ccggaaaccccgcccacagcacgaggccccaaaagaagaagggcaaggcgagcgaagagaaacaaaagcggcggccaca

SEQ ID NO: 123939 - RNA, 88 nt, Homo sapiens
gaggagcgagcggacccgcgaggggaaggaggagacgcgaaggaaagacccgcaggagcggaggaggcagaagaccggaggcgagacc

SEQ ID NO: 123940 - RNA, 83 nt, Homo sapiens
ggggccgcaaggccggagaaggccgccgggcccgggcaggggcggggcaacgcggaagccgccgccagcgcgcacgcaaggag

SEQ ID NO: 123941 - RNA, 79 nt, Homo sapiens
ccacaggacgcagcccaccagcccgagaacacgaaacaaggaagaaagaagcaagaaaaacagaccgggggaaaaagcc

SEQ ID NO: 123942 - RNA, 76 nt, Homo sapiens
ccggcagaaggcacgcgcccggacagacaggcagacgcggagaacaacccgagaaaagccaagaaacaggagcagc

SEQ ID NO: 123943 - RNA, 52 nt, Homo sapiens
agggagaaaggaagggacagaggccagggcgacagacaagaaggcacagaaa

SEQ ID NO: 123944 - RNA, 73 nt, Homo sapiens
ggaagaaagagaaagaagacgaagaccagagggagaaggaggagggagacaggggcaaaaaacggcagggaag

SEQ ID NO: 123945 - RNA, 79 nt, Homo sapiens
cagggacccgcgaaagcggggcacaggcgggcacgcgcccagaggaaggaaagcccaacaaaaacagaaaggaagaagc

SEQ ID NO: 123946 - RNA, 72 nt, Homo sapiens
aacgggcaaggcggcaagagcgagcacaccaggggggccaggaggagccccagcacagcagagaaaaaacca

SEQ ID NO: 123947 - RNA, 79 nt, Homo sapiens
ggcgggcgcgagcgacccccggcgagcccacaacccacagacgaacagagagaagggcgggagaaaccaaggaaagaga

SEQ ID NO: 123948 - RNA, 70 nt, Homo sapiens
gcggagacgcgggcccgagcgggccgcgagccccagccgagaggcgaaagagacaaacccacaaacccca

SEQ ID NO: 123949 - RNA, 71 nt, Homo sapiens
cgggaagcgagaaaacagacagagcagaagaaaccaagacggcagagagcagcagacgacaggacggcaga

SEQ ID NO: 123950 - RNA, 81 nt, Homo sapiens
cgcaccccgcggacgccacagcgccacacggcggcggcgaagccaagacacgggcccgccgagggcgggacccgcgcaggc

SEQ ID NO: 123951 - RNA, 71 nt, Homo sapiens
ccgcgcccgccgcgggagagaggacccccccccccccccaagacccagaagggcagagccggaggagaggg

SEQ ID NO: 123952 - RNA, 59 nt, Homo sapiens
gggccgcgagcggggcgacccgagggcagcccaaggaccaagggagaagagacccagga

SEQ ID NO: 123953 - RNA, 84 nt, Homo sapiens
cccgccacccaaccccacccaaggagcaaccccaacggaccccacacccgccaggccgcccaggcagcgccagacccggccacg

SEQ ID NO: 123954 - RNA, 75 nt, Homo sapiens
ggccgcgggggcaacggagaaaacccggaaccgcgacggcggcagcccacaagagagggaaggagaaaggcagac

SEQ ID NO: 123955 - RNA, 74 nt, Homo sapiens
gagaggggaaacaacaggaaaggggacaagggagacaacaagaaacaggagaagggaggccgaaaagacagaga

SEQ ID NO: 123956 - RNA, 81 nt, Homo sapiens
cgccgaccaagacagagcaaggccacgacccacgagacaggggcccaagaaaaagcaccggacccaggggaaaccagccca

SEQ ID NO: 123957 - RNA, 67 nt, Homo sapiens
gccaaacccacggggaacgaacagagcccagaccgagaaccgggggaacgcgggcgccggaacgacc

SEQ ID NO: 123958 - RNA, 82 nt, Homo sapiens
acgcagccgagacaccagcccgaaacaccaccaagggagccggcgcggcaggggcgggcgcaggccggcaggggcagcccca

SEQ ID NO: 123959 - RNA, 75 nt, Homo sapiens
gcccccccagccgcaccaccaaggccggacaagacgcagagagccgacagaccccgaagggacagggaaagagcg

SEQ ID NO: 123960 - RNA, 50 nt, Homo sapiens
gcgcccgagcgaccaaagaccgggaaaacgagaaaagccgacgcaagagg

SEQ ID NO: 123961 - RNA, 82 nt, Homo sapiens
aaccgcaaccagacgccagcgggacgaggaccgagaccgcggccgggaccgagggcagggacagcagggacagccgggagag

SEQ ID NO: 123962 - RNA, 84 nt, Homo sapiens
gagcagaaccaccggcagaaaagagacggacgcggagcaagaggagccaggagcacggggggaacaagaccgccgggacggaag

SEQ ID NO: 123963 - RNA, 75 nt, Homo sapiens
ccgcagcaagaggaaaggaaagaggcgggcagaacacggagaagaagaagcgaagccggaaaaaacgaggaaaaa

SEQ ID NO: 123964 - RNA, 66 nt, Homo sapiens
gaacagagccccgagacccgcacgcagaacgcaggaacagaggagcggaagacgggaagccaagca

SEQ ID NO: 123965 - RNA, 74 nt, Homo sapiens
accacggggaacagcgcagacgcccagagcgccacggagaagccgccgaagagggacaagagaaaaaaagggcg

SEQ ID NO: 123966 - RNA, 87 nt, Homo sapiens
gcagcggaggagaagcggcgggagcgaaggcgccgaacccgccggcagccggcgaggagggcgagagaacacgagacccgcacaaaa

SEQ ID NO: 123967 - RNA, 81 nt, Homo sapiens
gaggaggagcgggaagccggcccggacacgcaacggagccgccgacgcaccaaggaagccccccgggaacacccagcagcc

SEQ ID NO: 123968 - RNA, 96 nt, Homo sapiens
aaagccccacaccagaccacggagggagcggaaaccgacgcagacggagcacgccggcagccagaaagaggaggaggaaaaaaaacagaaacacaa

SEQ ID NO: 123969 - RNA, 91 nt, Homo sapiens
cgaagcccggacgacgaggaaccgcccaacaggcccggagggggagaggcaccagcaacagaccaaccgcagcaagcacagagacaggaag

SEQ ID NO: 123970 - RNA, 95 nt, Homo sapiens
gaaaaccgcgacagcgagaagccggaagagaggcggggcgaagcccagggaaccagagccggagaacggcggaagcagagcacggcggaggggga

SEQ ID NO: 123971 - RNA, 81 nt, Homo sapiens
ggagaaaggagcagccagaaagcggcacgaacagagccgggagcaagaagaacacccagagaagccccagcggccagagca

SEQ ID NO: 123972 - RNA, 72 nt, Homo sapiens
gcagcacccagggccgcaaaaacacagggagaggacagaaggcgacacaggcagaggaagggacaaaagaga

SEQ ID NO: 123973 - RNA, 69 nt, Homo sapiens
gagaccagccgaacaacaaggaggaggaggagagaggaccaagagcagccgaaaacccacgaaccgggg

SEQ ID NO: 123974 - RNA, 78 nt, Homo sapiens
ccagcggggaccgcccgggacaacagcgcggggcacagagaggacaccgagaaaaagggccggccgcagacccaaaaa

SEQ ID NO: 123975 - RNA, 52 nt, Homo sapiens
agcggcgagagacgacagaccaccagagagcgcggacgccaaaacacagccc

SEQ ID NO: 123976 - RNA, 79 nt, Homo sapiens
gcggacccacggggccaagccgcgccggagcggagcgcgggcgccggggagccagccaaggacaccgcacaccaaccaa

SEQ ID NO: 123977 - RNA, 80 nt, Homo sapiens
ggaacccgacacgggcacggagcaaagaagggaaccggagcgcaggaacaggagcgaccaggacacccccgcccgccacg

SEQ ID NO: 123978 - RNA, 71 nt, Homo sapiens
cggaagagggagagacccccacccaagaaccgccagcgggcccaaagggggaaaagcaagacagcagacca

SEQ ID NO: 123979 - RNA, 61 nt, Homo sapiens
gaaggaccaagaaccaggggaagaggaccaaccacaaaagccagcaccagaacagagaaaa

SEQ ID NO: 123980 - RNA, 74 nt, Homo sapiens
gaggaccccgcaggccaggccgaggcccgagacgcggggaaccgggggaagaacaagaaggcccagggagaccc

SEQ ID NO: 123981 - RNA, 81 nt, Homo sapiens
cggcggcggcgccgccgccgggcaggacccacccgcccccccggcgggcagagcccagacaccgggaagcccacgggaccc

SEQ ID NO: 123982 - RNA, 78 nt, Homo sapiens
ggaggcgaaagcggaacgagaaaagaaacgaagccgggcacggacaggacagagaaagcaggcgccagcgacccgccg

SEQ ID NO: 123983 - RNA, 73 nt, Homo sapiens
cgaagcccagaaaagaaaggggacaggccgaaagaccgcaaagggaaagcccgaaaaggaccagcgaagcaag

SEQ ID NO: 123984 - RNA, 74 nt, Homo sapiens
cagaagaagagaggagggagaacacagaaaccggccccagggcccggggacacgagcggccccagcgcccgcac

SEQ ID NO: 123985 - RNA, 74 nt, Homo sapiens
gggcaggccggacccaaagccggagcgggaagaaaaggacccccagagagcaaaaacaaacaaaccaagcggac

SEQ ID NO: 123986 - RNA, 78 nt, Homo sapiens
gccccagccaagggccgcgaggaccagaagacacggaaaaacgccgggagagaccgaggggcccgaaagaccacgcca

SEQ ID NO: 123987 - RNA, 84 nt, Homo sapiens
cgggggagcgcgggcgaagcacgcacaccgggcagggccgagaggacgccagcggcgcgcaggaaaccaccccacccaaccccc

SEQ ID NO: 123988 - RNA, 115 nt, Homo sapiens
aaccgaaacggaaagaagcaccggagagacagcacagcacccacaaagcaacgaccgcgagaggaggaggaccagccccagccgccggcccgaaacccgcaagcaagcacgcgag

SEQ ID NO: 123989 - RNA, 83 nt, Homo sapiens
gaccggagggggaagaaaacaaccaacagagcccgcagagcaccaggcccaccggaaaggggcggagaaaccacaccaccgcg

SEQ ID NO: 123990 - RNA, 71 nt, Homo sapiens
gaccgcgagggagccagcggaggcgcgaccacggacagcccaaggcggaaaagcgaaggaagccacaagca

SEQ ID NO: 123991 - RNA, 74 nt, Homo sapiens
aggggccggccaccaggagcaacgagagaggcccccgccgagcacggagccagagcacagagcaccacgaacaa

SEQ ID NO: 123992 - RNA, 77 nt, Homo sapiens
cgccgcacgaggaccaccaggcacggcacggggcagagcagcgaggaagaaaggacccggcaggagcgcggccagcc

SEQ ID NO: 123993 - RNA, 81 nt, Homo sapiens
acaccggagagcgacgggacccccccgcagaagggcgaaaagccaggagcaaaagacgagcgcgacgccaccagcaacgaa

SEQ ID NO: 123994 - RNA, 79 nt, Homo sapiens
agaaaacggaaagaccggggcacagcaaggaccagacccaggcccccggaacgccacccaacccacgcccccgcccgcc

SEQ ID NO: 123995 - RNA, 71 nt, Homo sapiens
aaagggccaaagaagggagaaaagccaaggacacgcaggacgaagaaggaggagagcccagaagaaaccaa

SEQ ID NO: 123996 - RNA, 64 nt, Homo sapiens
ccgcaggcagacaaaagggccaaagaagggagagaggaacacagggacccaaccagagaaacgg

SEQ ID NO: 123997 - RNA, 58 nt, Homo sapiens
acccggggaggcagggaacggggcgcaggaggggaagcagcaggggacggggccgcca

SEQ ID NO: 123998 - RNA, 69 nt, Homo sapiens
gggacccggccagcgacgcaccgagaaaggaaggaaaaccgacgagacgcaagcgcaaacacaccagca

SEQ ID NO: 123999 - RNA, 72 nt, Homo sapiens
acacagagcaggagaacgccaggccaccaggagaccaaaccaacccagaggcaaacaccaacaagaaagcac

SEQ ID NO: 124000 - RNA, 80 nt, Homo sapiens
accgagcccagccacagccaagggcaggaccccgcagaagcggcaacacgggcgcggaccgggcggcaggggggggagcg

SEQ ID NO: 124001 - RNA, 75 nt, Homo sapiens
gccaagaagcagagagcaccgcccgacgcgcgggagaggagcagcgggcgggaggaggagaaaagaaagccagaa

SEQ ID NO: 124002 - RNA, 74 nt, Homo sapiens
caaaaacgggaggaagaaacagcgaagccggccacagccacccaggccggaccaggacgacagccacaccaacc

SEQ ID NO: 124003 - RNA, 59 nt, Homo sapiens
cgagcccaaaaagcccgcaggggcgagggagggcagccccgggcaaccagcaagcccag

SEQ ID NO: 124004 - RNA, 74 nt, Homo sapiens
aacaggcgaaggagcggggccgcaccgccccggagccacagcaaagccacccaaggcaggcacagcaccagacc

SEQ ID NO: 124005 - RNA, 84 nt, Homo sapiens
gccagccagcaggaaccaaagcggacagagagggcaccggaagaaggagaaaaaggcagccccggagacgaaaagacaaagcac

SEQ ID NO: 124006 - RNA, 66 nt, Homo sapiens
cgaccaccgaggcggagggggagaacacccagaaggccaagagaggccaacagaggaacaaggccc

SEQ ID NO: 124007 - RNA, 85 nt, Homo sapiens
gaagaaagcagggggacgcaaaggccaaggggcggcaaaaaggcaaggacggggacacaagaccagccagcccagccacagagac

SEQ ID NO: 124008 - RNA, 77 nt, Homo sapiens
gagagaaaccgagaaacagaacggagaaaagcacaaggaggggggagaagcgcaggagccacacacccaggagaggc

SEQ ID NO: 124009 - RNA, 78 nt, Homo sapiens
cgacaggggagggacccaggcccccacagagagcacacaaacaaagcgaaaccacggaagaaaagggcaaaggaagac

SEQ ID NO: 124010 - RNA, 83 nt, Homo sapiens
ggccagcacgcggacgaggaaacgagccccaggaccaaaaccacacagggacgaaaagaacacagaagcgccagggagcaacg

SEQ ID NO: 124011 - RNA, 73 nt, Homo sapiens
agcagcgccagagagcgagcagagaaccacccgaaggaagccgggagcgggacgcccgaccgccacagccagg

SEQ ID NO: 124012 - RNA, 75 nt, Homo sapiens
ggcagcagcagacagcccagccgaggagcagcgaggcgggcaagcgcagcaggcgacagagaccggggccggagc

SEQ ID NO: 124013 - RNA, 60 nt, Homo sapiens
gcaggagagccgaccacgaggaaccgaaaaccagagacccagacacgcgaaggaacgaaa

SEQ ID NO: 124014 - RNA, 74 nt, Homo sapiens
ccagcccgcgcacgagaggagagaaagagaccacagaaggaaggaagaagacaaagagcggaaggcagggacaa

SEQ ID NO: 124015 - RNA, 106 nt, Homo sapiens
gagaaacgcagccagacaggcaggcaaaaacaggagaccgcggccgaccagagaacagagcaaagaccaggggacgaaggccgcagacgaaggggaaagggaagca

SEQ ID NO: 124016 - RNA, 74 nt, Homo sapiens
cgagcccgcgggacaacaccgcccgagcgggggcgggaagaccacgaaggaaaccagcgagaaaagaggagagc

SEQ ID NO: 124017 - RNA, 77 nt, Homo sapiens
cagcccacagaggcgcggaaagcacggaagggccgaagggcaagagggcacagaagacggcgccccacacacggccc

SEQ ID NO: 124018 - RNA, 81 nt, Homo sapiens
accggagacgaggggggagaaccagccgacggagcaggcagcagcccagagaagccgaacaagggccacccgagaacacgc

SEQ ID NO: 124019 - RNA, 69 nt, Homo sapiens
aaacacccggccaagggcccggagcgaagcccaggcagaagcaggcacggcagacccacaacagcacgg

SEQ ID NO: 124020 - RNA, 87 nt, Homo sapiens
ccagcaccacgcccgcgccgcgccgccgccaccagcccaagagaaagccggggccaaagcgaccaaccccccaccgcacgcaggggg

SEQ ID NO: 124021 - RNA, 64 nt, Homo sapiens
gagggcaccagccagccaagaagccaagaaccacaccagggcgaggaagacaaggggcacccgg

SEQ ID NO: 124022 - RNA, 76 nt, Homo sapiens
gcaagcaccacaaaggaacgccacacgcgaaaaacgacgacgagaagcacccacaagccagaccaccgggaggaag

SEQ ID NO: 124023 - RNA, 57 nt, Homo sapiens
gccccgagagcgggaacaggcagaaaaaaccagcaggccaggaacacaacccaccga

SEQ ID NO: 124024 - RNA, 76 nt, Homo sapiens
aagacggaagggaccgggaaggagggcggagaaagacgccagaagaagagcgccggaggaagagcggaaaaggcgg

SEQ ID NO: 124025 - RNA, 45 nt, Homo sapiens
aagggcccagcagggggcccaaggcgcagggggcccccgcccgac

SEQ ID NO: 124026 - RNA, 56 nt, Homo sapiens
gaacaacgcggaccacacccgggagagaggggggccaccagaacaaaccaggggag

SEQ ID NO: 124027 - RNA, 73 nt, Homo sapiens
aaagggaaaacccccacacggaggggacgaagacaaaaaccagaacaaaaccagaggcaaaccaagaaggcag

SEQ ID NO: 124028 - RNA, 82 nt, Homo sapiens
cagccccggagccgcccaagccgcgccccagagagcgcccgagagaacagggggccgcggccaggagcagaaaagaagccac

SEQ ID NO: 124029 - RNA, 63 nt, Homo sapiens
ccaacaagaccaaccgaacaggagagacacaccggaaggcgggacgaaagagcacagaagaaa

SEQ ID NO: 124030 - RNA, 85 nt, Homo sapiens
gacgaggcgcgggcgcgcacccgagccgcaagggcggccggaggaggccaacgccgaccggaaggaagaccggacggaccagagg

SEQ ID NO: 124031 - RNA, 70 nt, Homo sapiens
ccgcagagaccagacgcgggccagcgccacccaaccaacccgcagcaggccgcggacagagaagaggacg

SEQ ID NO: 124032 - RNA, 93 nt, Homo sapiens
cgaggaaagcgaacaaaccagaacaggacggacagaggagcacgccaacccaaccgggcccaaccaagaccgaacccaagccagggaaacacg

SEQ ID NO: 124033 - RNA, 82 nt, Homo sapiens
cggcgccgcgccccggccgcacggcacaagcaggagaggaaaagcaaagcacacaacagacacagagggacccaccgacgag

SEQ ID NO: 124034 - RNA, 80 nt, Homo sapiens
gccagagcaagagcggaccgccaggccaggcgcgaggaagcagaggcacgagcggggggagaccaggcaacgcaggaaac

SEQ ID NO: 124035 - RNA, 64 nt, Homo sapiens
ggcaccgaaagcgagacaccaaagaaacgcaggccaacaaaacgagcaaaagggaccggggcaa

SEQ ID NO: 124036 - RNA, 93 nt, Homo sapiens
cgccagagccggcggagcagggcagcaccacgagccagaagcagagccgggcaaacagaagacgggcaaaagagcggaagaaccaacgacaga

SEQ ID NO: 124037 - RNA, 79 nt, Homo sapiens
acacaaaccaagggaagacgaggcccgaccacgaagcacacggcgcaccgccgaaggcccggccacagcgaggccgggc

SEQ ID NO: 124038 - RNA, 85 nt, Homo sapiens
ccagccccccagagcgggacacaggcagccagcacgagcccccccaccaccacagccccccacccacaagccagcgggcgcggac

SEQ ID NO: 124039 - RNA, 76 nt, Homo sapiens
cggaaccccacccaacaggcccaagaacgacgaccacgcacaccagggggcggggccgacaaaacagacggggcgg

SEQ ID NO: 124040 - RNA, 70 nt, Homo sapiens
acacccacacggcggcgagggcggacacgggccgagcgcacagacgagaccgcgcagcaacggggcggca

SEQ ID NO: 124041 - RNA, 62 nt, Homo sapiens
agggcggggaggggacgaaccaggcagcccaaaagagacccgccccgcgcacgagccggaac

SEQ ID NO: 124042 - RNA, 73 nt, Homo sapiens
agaaggaccaagaaccagggccccgcaccaccccagcaaccaaacaccacccggacccgcgaccgcacaaaga

SEQ ID NO: 124043 - RNA, 50 nt, Homo sapiens
acaagacgcagcggaaacaacgaggaagccacgacaaacacccgaccgaa

SEQ ID NO: 124044 - RNA, 74 nt, Homo sapiens
cgccaagcggggagcgcccgcgacagaggagggaggaaaacaaccgagggcagaggggaagaccacaagggccg

SEQ ID NO: 124045 - RNA, 83 nt, Homo sapiens
gaggcggcggcggcggcagcgacagcagcagcagcagccagacgggaaaggcagacaggccggccgccaaaacagaggccagg

SEQ ID NO: 124046 - RNA, 76 nt, Homo sapiens
ggaaaagagcaaacgagggggccgagacaacaagaaggggaggaacaaaagcgcaaaccggagccagaaacaaccg

SEQ ID NO: 124047 - RNA, 77 nt, Homo sapiens
gacgcggcgagaggccggacccgaaaaacgagacgggcggcgaacggcggaggcagcgcgcacaggcggaacccggc

SEQ ID NO: 124048 - RNA, 80 nt, Homo sapiens
aacacgggcggacggaacggggcggaacgcaggaacgcgaacaacgcagcaggcgcaggggagcgcgaggagcggagcgg

SEQ ID NO: 124049 - RNA, 74 nt, Homo sapiens
acgggaacaagggagggggacagaccaaagagggaccagcggggaacaaggaccacaagaaggaggccaaaaaa

SEQ ID NO: 124050 - RNA, 74 nt, Homo sapiens
acccagaacacgggagaaaaaggaaaacgcggaaaaccgacacaacagaaaaggcacacacacccgcaggagag

SEQ ID NO: 124051 - RNA, 55 nt, Homo sapiens
gacagggaaaagaaagagaccaaagaagaagcaggcaacaaagacggaaaacagg

SEQ ID NO: 124052 - RNA, 80 nt, Homo sapiens
gacagcggcaaacagagagggacaacagcgacaaaacaaacccaaaagaaggggaaagaacaagggagccaccaggggga

SEQ ID NO: 124053 - RNA, 93 nt, Homo sapiens
cagagacaccaggacagaaaagacaggcgccaggagcacagaagagcgaggagagcagcaacccggaaacggaaaagacaaacacaaacaccc

SEQ ID NO: 124054 - RNA, 76 nt, Homo sapiens
aagcgagccacccccaagacaggaaagaagaaggaaagggcaaaaggaaaacgccccaaaggaaagcggaggcaca

SEQ ID NO: 124055 - RNA, 58 nt, Homo sapiens
ccaaaccgcagcgcccgaaaggcccacccccccacgagcacaaaaaaccccacaccag

SEQ ID NO: 124056 - RNA, 37 nt, Homo sapiens
aggcaacgggaccaaagacagagagaaagcaggccgc

SEQ ID NO: 124057 - RNA, 68 nt, Homo sapiens
cccacgaaccaaaagggacggacaaaggaacaggaccagggggccgagaggagagagcgaaaaaagga

SEQ ID NO: 124058 - RNA, 76 nt, Homo sapiens
gcaggcaaaaaagagagccacagaagaggacgaaaaaaacgcgccaaaccggaacgcagcgagcaagaacaagcca

SEQ ID NO: 124059 - RNA, 82 nt, Homo sapiens
ccgacagccgcagaacgcacaccgggccgagcggcgccacaccggagacgccagggagccacacagaaaaagagcaaagcag

SEQ ID NO: 124060 - RNA, 73 nt, Homo sapiens
ggggcggcccggcggaggggacaagaaaaccagaaacgggggcccgacaagacacaaaaagggaacggacggg

SEQ ID NO: 124061 - RNA, 81 nt, Homo sapiens
ggccgggacacggggcagcgacccgcccacgcccagcagcagcagcaacaggaacagacaagaaaaagggaagggagaaaa

SEQ ID NO: 124062 - RNA, 78 nt, Homo sapiens
cagcaggaaaccaagagaaggaaagaacaagcaccggagagagagcaccagcggcaagcgcccacccagcacaaggaa

SEQ ID NO: 124063 - RNA, 56 nt, Homo sapiens
agggcgagcacagcacacaaggaccaccaagcaggacaaaccggcgaccacacacg

SEQ ID NO: 124064 - RNA, 77 nt, Homo sapiens
gagaacggccaggcggccccgagcggaacggagaaagcgaggcaccgccggccaggaggagagcgcaccaccaaaaa

SEQ ID NO: 124065 - RNA, 86 nt, Homo sapiens
agaagaggcagccaccgagaagcagaagaacaggaacgcggaggacgggccaggagacacaccaagaacgacacgaggccgacacc

SEQ ID NO: 124066 - RNA, 80 nt, Homo sapiens
aagaaacccgggagcccaagacaacgaccccacagaaacaagccaccaggagaagcaaaagagggcccacccaaaaacag

SEQ ID NO: 124067 - RNA, 69 nt, Homo sapiens
aaagaacaaaagagaagaccagagagaggaaaggcaacagagacccgagcggaagagaagccaaggaac

SEQ ID NO: 124068 - RNA, 81 nt, Homo sapiens
gagcgcggaacgggcgccccaccaggcggggagccggaaggaggagccaagcggagagggcaccggagcggaccagccaca

SEQ ID NO: 124069 - RNA, 74 nt, Homo sapiens
agaaaacgacccaacagcaaaggacccccacccacccgagaacaggggggcacaaggcccgcggagacaacaaa

SEQ ID NO: 124070 - RNA, 48 nt, Homo sapiens
gaaagcaggacaagcagccgcgaaaccaagacagacagaaagcgccca

SEQ ID NO: 124071 - RNA, 77 nt, Homo sapiens
cccccgaggcgcagaagggagaggaacgcaacaccagaggcacaggaaacagacaaccaccccaaggggcccaagag

SEQ ID NO: 124072 - RNA, 80 nt, Homo sapiens
cgcgccggaccgcaggacgacagaccgagggaggacaccggaccccggacgcgggaaaggcgggacaacacaagggaacc

SEQ ID NO: 124073 - RNA, 53 nt, Homo sapiens
ggaaaaaggagaggaacaagagagcagcacccagaacggggcaggaacaggac

SEQ ID NO: 124074 - RNA, 69 nt, Homo sapiens
gaagcgggacagaacagccaccaaaacagaagaaacaacgaacgagcaaggaagggccaaggcagaccc

SEQ ID NO: 124075 - RNA, 66 nt, Homo sapiens
gcgggaaccgcccgggggaagacagaaggcgacacaggcagaggaagggacaaaagagagaaagaa

SEQ ID NO: 124076 - RNA, 76 nt, Homo sapiens
aagaaaaagccggcagacccacagacaagcacgccaagcaagagagcgaccagggggaaccgaaggagccaggcag

SEQ ID NO: 124077 - RNA, 86 nt, Homo sapiens
ggcaccaaaaccaggcaccaggcacaagaccccgccgcacaacgcagaacggagggaacggaagaggacccaaaaaagaagaaaag

SEQ ID NO: 124078 - RNA, 57 nt, Homo sapiens
gcagcccaggacgcggccgcacccggaccgcacaggacgagcgaagacagggaaaag

SEQ ID NO: 124079 - RNA, 79 nt, Homo sapiens
gagggaaggcacgaggaagagacaacaccagagggccccagggcccccaccaccggagccagagaaggggcacacgcca

SEQ ID NO: 124080 - RNA, 73 nt, Homo sapiens
agaaagcgacacagaagccagcgaacagcacacagaaaggccccggagagaaaaccgccaacaagacacgggg

SEQ ID NO: 124081 - RNA, 72 nt, Homo sapiens
aaagcgcaacagaaacagagagacggcagccgcacaaaagaagaaagaggacaccaaagcagaacgcgagga

SEQ ID NO: 124082 - RNA, 75 nt, Homo sapiens
ccaaagcagcagccacgcgccggaggagagacaaagaaaggaggggcagcagcaggacagggaacccgggagaca

SEQ ID NO: 124083 - RNA, 76 nt, Homo sapiens
cacaaggagacgaggggaagagggcaacagcaggcgggacacggggcgacccacccaaaagccccacggggggcgc

SEQ ID NO: 124084 - RNA, 79 nt, Homo sapiens
aagagccagacaacaggcgccaaaaaggagcaagaggcagggagccggggagcccgggaccagggccagggacgcccgc

SEQ ID NO: 124085 - RNA, 39 nt, Homo sapiens
gaaggcgcgacccagccaggcagacggaggaagaaagaa

SEQ ID NO: 124086 - RNA, 74 nt, Homo sapiens
ggaccgaaacagaaacggaacaccaagcgccacgccaggacacagaccagcccaagacaagcccccagacggca

SEQ ID NO: 124087 - RNA, 77 nt, Homo sapiens
ccgacaaggggcggaggaagggaggagacccgaccccagaagggaagacagccgccaccaggcgcccccccagcaac

SEQ ID NO: 124088 - RNA, 86 nt, Homo sapiens
cgcgagacagcgcaccggcggcgcggacgacagcgagacaccgcaccaccagaaaacaggacaggagaagaacacccccaagagca

SEQ ID NO: 124089 - RNA, 88 nt, Homo sapiens
cgggagccgagagagcaacagacagccggcggacacggaccgcggaccggagcccgggcgcgccaggcacagccaagagcggaccggc

SEQ ID NO: 124090 - RNA, 76 nt, Homo sapiens
ggaaggcgcaaggcacaaaccaggggcccaaaacagcaaggagggagaagaggacaggggacccaacgcgggcaca

SEQ ID NO: 124091 - RNA, 63 nt, Homo sapiens
cgggggaccagcgcgaaagagaaacaaagagcgccaacccaaacgagcgagacacacagaaag

SEQ ID NO: 124092 - RNA, 62 nt, Homo sapiens
ccggacccaaggcccggaccagggagcgcaggggaacaggccaccaggcagccagccggaca

SEQ ID NO: 124093 - RNA, 61 nt, Homo sapiens
agcaaggcccagcgggaggcggagcccggccaccagcgggccagggcagcagagcacggag

SEQ ID NO: 124094 - RNA, 79 nt, Homo sapiens
gggcagcgccgaaccaggaccggacccggacccaaaggccagcaaggaggcgggaggcccccggcaggaggacacccaa

SEQ ID NO: 124095 - RNA, 80 nt, Homo sapiens
ggcgaggcccaccaagccagccaacgggacaggaaaaccagcccacagcgcaagaagacgcagcgcgccgggagaagccc

SEQ ID NO: 124096 - RNA, 76 nt, Homo sapiens
cccaaaaccggaaaggacgcgaggacagagcccgggaccacaagacagaaggacgccgaggggaccaaaaaaaaca

SEQ ID NO: 124097 - RNA, 74 nt, Homo sapiens
gcagggacaacagcccacccagcacaggacaaaaaggccagaaccagagaacagcagaggcccaggaaacagcc

SEQ ID NO: 124098 - RNA, 75 nt, Homo sapiens
cggagagcaaaaccgaagacaaccccaaaacccggaccaccgcccagcaaacaggaagcacaggaggcaaacacg

SEQ ID NO: 124099 - RNA, 80 nt, Homo sapiens
gcggcggcggcaagcggcgcgagcggcgagaggagccggcccagacaacccaacccgccaaggagccaccggccacaagg

SEQ ID NO: 124100 - RNA, 61 nt, Homo sapiens
cgcggccggagaccgggggcccccgggccgccccccggcgccgacaccagggaccaggcgg

SEQ ID NO: 124101 - RNA, 79 nt, Homo sapiens
cggccagaagcgggcggcgcgggggagaggcaccccggcaaaccgcagccgcccggccgcccgacgggccaaaggaccc

SEQ ID NO: 124102 - RNA, 58 nt, Homo sapiens
gacaaaacagaggagaccagaccagaagccccgaaaaggccgagacgcaccagagccg

SEQ ID NO: 124103 - RNA, 76 nt, Homo sapiens
ccaccgcaccagaagaagaaggccagaaaaagggaggagggggccagaaaagcccccagccaaccgacaccccacg

SEQ ID NO: 124104 - RNA, 81 nt, Homo sapiens
gagaaccaggcagccccggagacacccaagggaggagggaaccgcccgagcaccccccacgacccacacggggcacacaca

SEQ ID NO: 124105 - RNA, 71 nt, Homo sapiens
ggaacagaagcagaggaacacaaggaggagagaaagaacccacgcaggacgacagaagaggccggacaaga

SEQ ID NO: 124106 - RNA, 72 nt, Homo sapiens
gacgggccgccacagaagggaccgaggcagagaggcaagaacccaggcacagagcgacagggcgccaggccc

SEQ ID NO: 124107 - RNA, 67 nt, Homo sapiens
gggaagagagccaacggcacggggcaagcccaggacaccaaaacaccagaacaggagaaaggacaac

SEQ ID NO: 124108 - RNA, 71 nt, Homo sapiens
agcggcacgccaaggagcagcaggagcagacggccgaggaaagcgcggagccagcgcccggcaaggagcga

SEQ ID NO: 124109 - RNA, 98 nt, Homo sapiens
gggaccccggccggcccccgccggcccggccccacggggaagaaagaaagaagcccccgcaaagggagggacgccacaaccacaggccagggccagcc

SEQ ID NO: 124110 - RNA, 67 nt, Homo sapiens
aaggaccgcgggcaagagacccgacgccgcccccaaggccgaccgcgggccgcgcacccaccgccaa

SEQ ID NO: 124111 - RNA, 74 nt, Homo sapiens
cagcacgagagaacaaaaaaacaacaccgcgaaagagcaaaggcaggagagggaaaaccagcagacagagaaaa

SEQ ID NO: 124112 - RNA, 76 nt, Homo sapiens
gggaaaaagcaaaaccgaacacgaccagcccaggcacccaaaggcaaccaagaaaaagcacgccacgaagagaagg

SEQ ID NO: 124113 - RNA, 76 nt, Homo sapiens
gcgaaacgcacgagaaggagaagacaccacacccccaccggaaagccccccagacaaagaagaaaacaacaaacag

SEQ ID NO: 124114 - RNA, 94 nt, Homo sapiens
cacacgcccagacggggcagaaagaagagaaaagcagcaaaaagaaggccagaaaaacggaaccgggagaaaacaagcgagagacagacacacg

SEQ ID NO: 124115 - RNA, 70 nt, Homo sapiens
ggccgggccaccagaggggagagaccaccagcgacgagaaacagcccgaagggccccaaagcgccagggc

SEQ ID NO: 124116 - RNA, 78 nt, Homo sapiens
aggaacgggccccaaagcggaacagcgacgacaaggcggaaacaacacaggaacgagaaagggagagacagcccagac

SEQ ID NO: 124117 - RNA, 82 nt, Homo sapiens
gaccggaggggaccgacgccggcagaacacgcgcgggaccccgggcacggcgcgcgggagacacgcaggaggccggggaaca

SEQ ID NO: 124118 - RNA, 77 nt, Homo sapiens
ggaaaaccgcgggcgggggaccacacgggggcagcacgcaaaggggcccgccccaaggggcaggccccaggccgccc

SEQ ID NO: 124119 - RNA, 87 nt, Homo sapiens
gcacaagggacaagacagcccaggccgggaaaggaaggcagacagcaacaagcagaaggcccaacaggaaggccaaagcagcaagcg

SEQ ID NO: 124120 - RNA, 72 nt, Homo sapiens
agcaagccagccccaccgacccaacgagcaagacacgacgggacgcccaaaaaaaacggaaagccgcagaag

SEQ ID NO: 124121 - RNA, 61 nt, Homo sapiens
cgagagcggaccgagagcgcgaaacgcacgagaagggaccgggggaacagaaagcaacgag

SEQ ID NO: 124122 - RNA, 54 nt, Homo sapiens
caggcccgggcgaaggggccacgcgaggcgagcagcaaccgaaggcccccaggg

SEQ ID NO: 124123 - RNA, 67 nt, Homo sapiens
caggcgagaaaccggagggcgacgcaaaggaagaagcagagcgaggccgggggccgcgacagagcgg

SEQ ID NO: 124124 - RNA, 58 nt, Homo sapiens
cagaggacaacagaacgccagaggaacagaaaaacgaaacgccacacagagaaaaacg

SEQ ID NO: 124125 - RNA, 67 nt, Homo sapiens
gccagcgcggggcaacagcaggcaaaagggaaaaacacccaaagagcaaggggcacagccacgccgc

SEQ ID NO: 124126 - RNA, 81 nt, Homo sapiens
ggagggggcggccgggcggagagaaccagcgaggacgaggggccgacgagaagaacaggaacaaccgacacccggaagaaa

SEQ ID NO: 124127 - RNA, 72 nt, Homo sapiens
ccaaagaaccccaggacaggagccaggggaccccagcggaacacacccaccacaaggcagagcacagacagc

SEQ ID NO: 124128 - RNA, 78 nt, Homo sapiens
caaaggcccacacaggacagcgccggccacccaaagcacgggggcaacagagccacaccagcggacagccaccaagag

SEQ ID NO: 124129 - RNA, 55 nt, Homo sapiens
ggagaagcacaacgaggcaagagcggaaaggagacgacccaaaaaggaaacccag

SEQ ID NO: 124130 - RNA, 72 nt, Homo sapiens
cagccccagagagcggaaaacaggaggaaacaggggccaggaaggaaggccgaaagcagaacgaaacagaaa

SEQ ID NO: 124131 - RNA, 50 nt, Homo sapiens
aaacaggccgacgcaaacgaagagcccaaacaaggagcacccagacggcc

SEQ ID NO: 124132 - RNA, 74 nt, Homo sapiens
ccgagaacccaggcagagcaaagcccccaggagaaagaaccccgaccacgcgacccccccaggcgagcacggag

SEQ ID NO: 124133 - RNA, 119 nt, Homo sapiens
ccgcgggagccacgagagcggcagagcggcgacgagccccaggcagaaggaggcaggccaagggccaagccgcccgccaaccggcagcgccgacgacaaaccaggggccagggggaccc

SEQ ID NO: 124134 - RNA, 83 nt, Homo sapiens
gcacgaggacggggagcaagaaaaaacaagcacgggggccaaggagacaccgaccaaacgaaaaacgaccaccaggaaggaag

SEQ ID NO: 124135 - RNA, 68 nt, Homo sapiens
gaacgacagccggcagggcggggcaggggaagggacccgcggggccccggcgcggagcggcgcccaag

SEQ ID NO: 124136 - RNA, 75 nt, Homo sapiens
cgaaagccgaggaaaaagcggccgcggcggagaacggaaaagcaccaggaagcagagaggaccgcagaagggaag

SEQ ID NO: 124137 - RNA, 78 nt, Homo sapiens
ccgaaccgaggagagacacggaccaccacgcccggaagggaaaggaacaaaacaggaagcggaaaacagaaccacaga

SEQ ID NO: 124138 - RNA, 66 nt, Homo sapiens
cgggacaacccaggagcagacagagaagcgcgcagcaggcccccgggccacgggcaccagggccca

SEQ ID NO: 124139 - RNA, 85 nt, Homo sapiens
cccaagccggcggccaagacggagccgaaccccaaaggaaacgagagagagaccacgggggcccgacgagccgccgggaaaggag

SEQ ID NO: 124140 - RNA, 76 nt, Homo sapiens
gacagagcacggaccagccgcaaagagccagaggggagacacgccaaagccccaagacacggccgaagggacaaag

SEQ ID NO: 124141 - RNA, 82 nt, Homo sapiens
cgcaggaccggcgccgaaggcccgccaggcgaagaggacgcccaccggaggggcgccacccgcagcacgggaaggagggaga

SEQ ID NO: 124142 - RNA, 63 nt, Homo sapiens
gggccggcccacggaccaaggaacgggacccgaacaacgaaaaacaagcgaacagagaaaaga

SEQ ID NO: 124143 - RNA, 60 nt, Homo sapiens
agggaacccacccccacccacgagaagagacagcagccgcgcgcggcgaaaccccacaac

SEQ ID NO: 124144 - RNA, 62 nt, Homo sapiens
gaccgagaaggcagccacgaaacccaggccgagggggagacacgcccagggagaccacgccc

SEQ ID NO: 124145 - RNA, 63 nt, Homo sapiens
ggaggggaaccagaaagccaaggaaggcggccccagaagggccagaagagagccgaaacccac

SEQ ID NO: 124146 - RNA, 78 nt, Homo sapiens
gaggcacagagaaccgaccagaacgcagcaacaaaggaaggaagagccaggagcagaagcgaagagagagagagagaa

SEQ ID NO: 124147 - RNA, 77 nt, Homo sapiens
gacgcagcacgaccccggggccaaggacccaccagcccccagagcgagacacagaaaaaaccacgcgcaaaaaaagg

SEQ ID NO: 124148 - RNA, 68 nt, Homo sapiens
agacaccgacgacccacgaggggcagggagaaggagaggacacagcaggggccagacaaccagacccg

SEQ ID NO: 124149 - RNA, 53 nt, Homo sapiens
ccacgcaggggaacagaaggggacaggaggggcagaggccacaccaccggacc

SEQ ID NO: 124150 - RNA, 64 nt, Homo sapiens
gcagccaacagcaaagccaggaaagccagaggggacggcagagacaaaaccccgccagacagaa

SEQ ID NO: 124151 - RNA, 35 nt, Homo sapiens
ccgggagggcgagagaaagggccaaccagaagacg

SEQ ID NO: 124152 - RNA, 69 nt, Homo sapiens
gagccaacggcccaagcccgggagccccacaacagggcagaaggaggggagagggccggcacagcaaga

SEQ ID NO: 124153 - RNA, 85 nt, Homo sapiens
cgaaacgaaagggagccgccagcgcgggcggaccgacggagacggaaagccgggacaggagaaacagaccaccccaggaaaagag

SEQ ID NO: 124154 - RNA, 56 nt, Homo sapiens
ggacacagagccaacccagaagagccaaggacccaaagacaggaccacgcaccagc

SEQ ID NO: 124155 - RNA, 77 nt, Homo sapiens
aaaagggcagccgcacggaggggcaccccccaccccgggacaccccagggcaccacagagcggcagagcgcaaagcg

SEQ ID NO: 124156 - RNA, 90 nt, Homo sapiens
ccgcggcccgggccgcaccagagcgcccggcccacgacacaggaagaagacagcgaaggggaggcgagggcaccgcccagaccggaacca

SEQ ID NO: 124157 - RNA, 77 nt, Homo sapiens
gccaaagaaaccagcccgaccaaacggcccaggaaagacccgagaaaaggccaaggagcaccaaccagaagcaagag

SEQ ID NO: 124158 - RNA, 51 nt, Homo sapiens
aagcggccgaagggagcccaggccgcggcagagccaaccaccggcccccca

SEQ ID NO: 124159 - RNA, 40 nt, Homo sapiens
aagaaacagaggcaacaaagcacgccagcacgcaggcagg

SEQ ID NO: 124160 - RNA, 73 nt, Homo sapiens
cccgaccgcggccagacacggaggcgggaacgacacgcaggccgcacgggcccaggcagcccgcagaggggcc

SEQ ID NO: 124161 - RNA, 67 nt, Homo sapiens
gacaacggcgagaccgcccacgagaaccgccgacgaccaacccacagaaagcccaccacccgagcaa

SEQ ID NO: 124162 - RNA, 76 nt, Homo sapiens
aaggccaaaccaacacaagaccagaagcccgacggagcagcagcgccgggaaggaaagcacacaggacagaagcag

SEQ ID NO: 124163 - RNA, 74 nt, Homo sapiens
cggaagaacagggaaacgaaggaagaaggaaacccaagggggagcgcggagcgggcacggacacaagaacgaga

SEQ ID NO: 124164 - RNA, 84 nt, Homo sapiens
gagcagcggcacaggaggaggggagaaaccccacccacacaggaccaaagggagacacacacggggagcgacagaccaaagccg

SEQ ID NO: 124165 - RNA, 75 nt, Homo sapiens
gaggccgcgaaaggaaaagaaagggggcccgagcagcaagaagaacagccccaagacgcaggaggcggaaagggg

SEQ ID NO: 124166 - RNA, 73 nt, Homo sapiens
ggccgccgcccagcggcggagggccagggcgaaaagccaggagcaaaagacgagcgcgacgccaccagcaacg

SEQ ID NO: 124167 - RNA, 75 nt, Homo sapiens
aagaaggacgaacaacacggaagggagaggcagaggaaaagaaccaggcaacacaaaaggccgccacagaagacc

SEQ ID NO: 124168 - RNA, 74 nt, Homo sapiens
ccaaggcaaaacgacgaccaggaagaacggagcacgacagaaacacagccgcagaagcgagagaaaacgccaga

SEQ ID NO: 124169 - RNA, 79 nt, Homo sapiens
aagacaagccgcgcaaccagggggagcccggcccagccccccaccccccgcccccccgagcgaccagggccggcaggac

SEQ ID NO: 124170 - RNA, 74 nt, Homo sapiens
cagcgcaaagacacccaccccacacaccaaaccacaaaccagccgacaaaacagaccccagaacggaccaacac

SEQ ID NO: 124171 - RNA, 87 nt, Homo sapiens
gcgagccagggaacagggggccccgccccccggccacgcgagcgggaacagcccccaccggagcgagaaaaggccaagcagaagcaa

SEQ ID NO: 124172 - RNA, 90 nt, Homo sapiens
aggcggagccacaagcacgcggaagagccacaaaagcgagaagcagaaagccaaagaaagaaagaggaagaagcaaagagaagaaaggag

SEQ ID NO: 124173 - RNA, 57 nt, Homo sapiens
cgcacagcccaagaagaaggggaacaacaggaggaaaagaaaggggaacaggaacgg

SEQ ID NO: 124174 - RNA, 103 nt, Homo sapiens
acgcggccgagacaaaggcaccaggccaccacagaaacaaaagcaacaaagaggggcggagaacggaaaagcaccaggaagcagagaggaccgcagaagggaa

SEQ ID NO: 124175 - RNA, 71 nt, Homo sapiens
cagacagacacaggagcacaaacagcagacaaacgaacccacaggagggccagaggacaaagcacggcgga

SEQ ID NO: 124176 - RNA, 59 nt, Homo sapiens
cccggcgccgcgccggcggcggccaagacaaggggcgcagagcggggggacaggcgcaa

SEQ ID NO: 124177 - RNA, 90 nt, Homo sapiens
ccgccgaagcaccggaccgagaacgaaggaccacaaccccgagccggaaggaaaagaaggaggccagcgggacacacaaagaaagacgaa

SEQ ID NO: 124178 - RNA, 73 nt, Homo sapiens
gaacgccccccggcagggacagaaggaccaaaccaccacggagcagagaaaggaagcaagcgggacccgcgga

SEQ ID NO: 124179 - RNA, 79 nt, Homo sapiens
aggaggagcaggaggaacgaaaagaacagggacgaagaaaccccaggagcaaaggagcagcaaaagggggacaagccaa

SEQ ID NO: 124180 - RNA, 101 nt, Homo sapiens
gaagacgacgcaccgcaggcagacaaaagggccaaagaagggagagagaaacagacaagcaagcagagacacacagcaaaagccaacacacagagcccgag

SEQ ID NO: 124181 - RNA, 76 nt, Homo sapiens
gagccagaccgccaaaccagagaaagaaacacccgaacagcgagaagcgggacgaccaggacacaccacgaggagg

SEQ ID NO: 124182 - RNA, 35 nt, Homo sapiens
cagcgcaggcagcagaaccagaggaccggcaacaa

SEQ ID NO: 124183 - RNA, 59 nt, Homo sapiens
ggcagacgagcggaggacacccaacccgggccaagcgaagcccagccaagacggcagcc

SEQ ID NO: 124184 - RNA, 63 nt, Homo sapiens
cgaggcagcaggcgccagcaggaaaggcccgagccaaaagacccagagaaaggagcacgaagg

SEQ ID NO: 124185 - RNA, 78 nt, Homo sapiens
ggcgagcggagcgcaacaccgcggggggagacggcgcggccggcccggccaacgcaacagggagcccacgcaagaggg

SEQ ID NO: 124186 - RNA, 32 nt, Homo sapiens
gcgggcgcgcggcaacggacgcgacccggggc

SEQ ID NO: 124187 - RNA, 68 nt, Homo sapiens
ggcgacacccacccggagggaacggaaaaagcaacaaaacacaccaagaaaagggaaccgaagcggac

SEQ ID NO: 124188 - RNA, 78 nt, Homo sapiens
gagagcgagcagagaaccacccgaaggaagccgggaggggaccccacaccacaaaccgaggaaagaagggacagcaga

SEQ ID NO: 124189 - RNA, 82 nt, Homo sapiens
gacgcagagccgaggcagaagacggggcccgggaccacaggccccggcccagagggaggggcgaccccggggcccggccagc

SEQ ID NO: 124190 - RNA, 71 nt, Homo sapiens
caagccagcgcgaggaaagcaaaaaagggagcaagagaggcagcaagcaacgggagaagccccaagaccga

SEQ ID NO: 124191 - RNA, 67 nt, Homo sapiens
ggagagcgagcggcaacccggagacaacggcaagcggagaagagcaaggccgaaccgagaggaaggg

SEQ ID NO: 124192 - RNA, 73 nt, Homo sapiens
agacaagacacgaagaaagcacgccaggaaggaccccaagacaggaggagagcaaacacacacggagaaagcg

SEQ ID NO: 124193 - RNA, 75 nt, Homo sapiens
aggcccagaagaacaaaggggacgggcagagaaacagaaagggcgcaaaaagaaagaaaacaaaagccagccaaa

SEQ ID NO: 124194 - RNA, 57 nt, Homo sapiens
cacccgaagaaggcagcccacgaacaccgcaggaaccaagcggcacgcaggcaacac

SEQ ID NO: 124195 - RNA, 83 nt, Homo sapiens
ggaacacggcccacacacccaggcgcggagggaagacgcccgggccaccaagcaagaagacgaccccgacgcaggccaggagc

SEQ ID NO: 124196 - RNA, 88 nt, Homo sapiens
gacgccaacgaacgaggggggaccagggagggacaccgccaaacaaggaccgaaaggcggcgcaaggagcccaagagccaggaacacc

SEQ ID NO: 124197 - RNA, 79 nt, Homo sapiens
ccagagccccgaagagacccagcaagcgcgagccgaagagaagccggagggagggagccaaaaagaaaaagaagaaaca

SEQ ID NO: 124198 - RNA, 58 nt, Homo sapiens
aggcccagggaggcaggggcagaaacagagaaggaacagcacaaagcaagccagaaga

SEQ ID NO: 124199 - RNA, 53 nt, Homo sapiens
cacgcgcggaaggcagcgcccagcagcgcaggagaaaacggggacaccgggag

SEQ ID NO: 124200 - RNA, 79 nt, Homo sapiens
agcaggggcccgcagcgcccgcaaccggggcgaacaggcggccgccaagcccaccacaaaccaaacgagcaagaaggag

SEQ ID NO: 124201 - RNA, 59 nt, Homo sapiens
ggaaacagccgggaagaacaggcacaacaaggcgcagagaagcaaaagaagaacacacc

SEQ ID NO: 124202 - RNA, 63 nt, Homo sapiens
accacagaaagaccgaagacaaaaaccagaagacaagcagcgaaccggacaacagaagcaaac

SEQ ID NO: 124203 - RNA, 61 nt, Homo sapiens
gcaagacagggcggcaagagaaagacagcaaagaaaaggagaagaaaggaaaaaaacaacc

SEQ ID NO: 124204 - RNA, 79 nt, Homo sapiens
ggggccggagggaggcggcggaaccagccaggaaaggagaggaaacggagaaaaaggaggacagacaagagaacagcaa

SEQ ID NO: 124205 - RNA, 116 nt, Homo sapiens
gcacaggcaggaacgagcggcggcggcggcagcgggcgggccccgagagcagcagcgagccccgaggcaaagaggagcgagaagaaaagacaaccgcgcagccaaagacacaccca

SEQ ID NO: 124206 - RNA, 67 nt, Homo sapiens
gagccaagacgccagggaagaaggaggaggaggagaggaaggcccgcgaggagcaggcccagcggga

SEQ ID NO: 124207 - RNA, 61 nt, Homo sapiens
gaaacaaaggacaccagagccagacaaggccagacagaaaaaacgggacggcaaaacagaa

SEQ ID NO: 124208 - RNA, 72 nt, Homo sapiens
gagcaagacgcgcagagcggggcccgaggccccgaccagagggcacgaaaggagccacaaggagcagcaaga

SEQ ID NO: 124209 - RNA, 64 nt, Homo sapiens
gccggccgacggagcgacgccagcagcacagcccggggaaccacagacacacgaagccagaaga

SEQ ID NO: 124210 - RNA, 76 nt, Homo sapiens
aacgggaccaggagcacacgaaagccggcgagcgcaggagcccgggcacacaaggacaaaagcggcaagagaagac

SEQ ID NO: 124211 - RNA, 68 nt, Homo sapiens
cccaaggacacgcaccagaagaaggagaaccagaaacaacaaacacagggagagccgcccagagaaag

SEQ ID NO: 124212 - RNA, 83 nt, Homo sapiens
caggcggcgcgcgcggcgcgggacgcgcgcgggcacccacggagccccggggcggaaacgccaagagcgagcggacgaggagc

SEQ ID NO: 124213 - RNA, 72 nt, Homo sapiens
gacaccaggaaaacccagaaagcaagagaagagggaccaccccagaacgcaaaggacaccgcaacgaggcca

SEQ ID NO: 124214 - RNA, 71 nt, Homo sapiens
cacccaagaagggacggcgacagcaggccagggggaaccaaacccggcagccggagcgaagaacaccacag

SEQ ID NO: 124215 - RNA, 77 nt, Homo sapiens
gcgacggccaccacgagcacggcccgcgcacgcccggagagagggcggagaacggaaaagcaccaggaagcagagag

SEQ ID NO: 124216 - RNA, 83 nt, Homo sapiens
ccgagacgggcggagaggagaaggcccagacaagggcaccaacaacagggaccaaggacggacgaagaaggcgcagagcagag

SEQ ID NO: 124217 - RNA, 72 nt, Homo sapiens
aaaacccaccgggagcacgaagggcggagaacggaaaagcaccaggaagcagagaggaccgcagaagggaag

SEQ ID NO: 124218 - RNA, 81 nt, Homo sapiens
cgggcggggccgagggccgcgggcgccaggaggggggcgacaagggaccaacacgagcggcggagaaagaggggaaacagc

SEQ ID NO: 124219 - RNA, 74 nt, Homo sapiens
aaagcacaaccaaagaaggccacaccaggcgaacccaggccggaacgaagcaaaacgacccagcaccccccccg

SEQ ID NO: 124220 - RNA, 73 nt, Homo sapiens
agggccagcccgggaccacggaccaaaggccgggcgcagaacccccagaccacagagaaaaccaccaaaaaaa

SEQ ID NO: 124221 - RNA, 77 nt, Homo sapiens
aaacccgcaccgaaagggccaagcaacggagaccgggggggcaagcaaccagggaggaacaggggcgacaagagagg

SEQ ID NO: 124222 - RNA, 74 nt, Homo sapiens
agagaagccccggccgggccggccagcgccggaaaccaacaaaaacaacgaacgagcaaggaagggccaaggca

SEQ ID NO: 124223 - RNA, 79 nt, Homo sapiens
aaaaacaagaaaaaaaggccccaaaacaccaaagaggacagcccagaagagaggacgaaggaacagggacacaaagaga

SEQ ID NO: 124224 - RNA, 71 nt, Homo sapiens
ggagacggagcgaaggccggaggacaagggacaaaggaaaaagaggaggaaaacagcagggacgaacaaaa

SEQ ID NO: 124225 - RNA, 38 nt, Homo sapiens
ccaacgagaagagaacaacacgaagacacaggagaaac

SEQ ID NO: 124226 - RNA, 66 nt, Homo sapiens
ggaaggacacccagacgcaggaagaggaggacagggcaaggcaaaggcagccgagcaccacgacgg

SEQ ID NO: 124227 - RNA, 83 nt, Homo sapiens
ccccaaggcccgggcaggggagaagcaccggaggcccacaccagccccagcggccggcggagagaagcagcccccggagccac

SEQ ID NO: 124228 - RNA, 65 nt, Homo sapiens
gccggcccggagcaccgagccgcggcacggaggagaacccaggagaaacgagagggacagcaagg

SEQ ID NO: 124229 - RNA, 76 nt, Homo sapiens
gggcgaggaagaggagaaaggaaacggaagaaaaaagaaaagaaacgacaaaaacacgaggaaggcaaacaggggg

SEQ ID NO: 124230 - RNA, 79 nt, Homo sapiens
ggcgaacaccgggaaggaaggcacggagccggacaacaaaacgggaccacaacagacaaagaacagaaaaagaaagcca

SEQ ID NO: 124231 - RNA, 78 nt, Homo sapiens
acgagaaccaccccgacacaacaccaccaagcacgaccgcacaggcaaaggaaggcgaacacaaagagaaggaccgga

SEQ ID NO: 124232 - RNA, 70 nt, Homo sapiens
ccccacccaccccccgacgcagcacgcccacccgaccaccaccgggagggagagcacggcgcaccaacgg

SEQ ID NO: 124233 - RNA, 70 nt, Homo sapiens
cgccccggagggagacgcgcgccgaggagaacccagcggaaaacaggggcacagacgacagaagccaaga

SEQ ID NO: 124234 - RNA, 73 nt, Homo sapiens
accagcagcacaagaaaacgcagacccaaccgcggaccaggcacagacaccacgaacagggaggaaagccagg

SEQ ID NO: 124235 - RNA, 82 nt, Homo sapiens
agcacccacagccaaggcgggagccacggaagaggacaccagcccgggagaagaggcaacacccgagcggggcccgaaaacg

SEQ ID NO: 124236 - RNA, 78 nt, Homo sapiens
ggaccggacggccgagaacaaaaccagaggcaaaccaagaaggcagaaacccggggcgaggaggaaaccccgaaaagg

SEQ ID NO: 124237 - RNA, 84 nt, Homo sapiens
caccggaggcgacggccaggccacaggcccagcaggcgcagcagcaagagggaaaaaggcaacgggaccgcggcaaaggccaac

SEQ ID NO: 124238 - RNA, 73 nt, Homo sapiens
acagcagaaaaaaacagaaaacgaaggaaggaggacccgaggagagagaagacggaaaggaaacacggaagca

SEQ ID NO: 124239 - RNA, 55 nt, Homo sapiens
gaagggaaggcgcgaggaggaaaggaggacgagcgagacgacgggaccgaaggac

SEQ ID NO: 124240 - RNA, 77 nt, Homo sapiens
ggcgccaaacagcaaccagaggaaaaaccagaagagaaaaaacaaaggggagaggcaccccgcgggacgaccggaca

SEQ ID NO: 124241 - RNA, 69 nt, Homo sapiens
cgcggcgacggagccacgcagcaacaggagaaccgaaagcaggggagcagacaaggggcccaagcagag

SEQ ID NO: 124242 - RNA, 64 nt, Homo sapiens
cgagagagcagggaggaaagaaacgcaaggaccaggcacagacaccacgaacagggaggaaagc

SEQ ID NO: 124243 - RNA, 69 nt, Homo sapiens
cagccgcaaccaaagggaaggaagagaaccgaagaagaaaaccaaaaacgaaaaagcaagggagagcac

SEQ ID NO: 124244 - RNA, 76 nt, Homo sapiens
agccaagcggagagccaggacacaacaccgcggagcccgcaggcggaaggccgcggacccccccccccccacccca

SEQ ID NO: 124245 - RNA, 64 nt, Homo sapiens
cagcgaagcgcggacagagagagagcggaagagcggaaaagggccggcccagggagaacgcaaa

SEQ ID NO: 124246 - RNA, 54 nt, Homo sapiens
gccgaagaccgcaaaaaagccaggaagggaccgaacaccagacaaaccaccccg

SEQ ID NO: 124247 - RNA, 88 nt, Homo sapiens
acacccaggcgcggagggaagacgcccgggccaccaagcaaggcacagaacacaccagaggcggaccaagaccccaggaagccccggg

SEQ ID NO: 124248 - RNA, 71 nt, Homo sapiens
gagccccagcacaagagacggaacagaaagcagaccacacagacaaccgacccagcaagggacccccacgc

SEQ ID NO: 124249 - RNA, 76 nt, Homo sapiens
cggaacaccgcagagaaaaagggacggcagcggagagcagaaacaccagaggccgcagcaagagaaggccagcaga

SEQ ID NO: 124250 - RNA, 87 nt, Homo sapiens
cggcacaagggcccaacggaaccacacggaaggcccccggaaggccagccagccggaggaccaccccgcagaccacacgcccagggc

SEQ ID NO: 124251 - RNA, 76 nt, Homo sapiens
gaacccgaagcccccaaagagagaaccggagagcacccaacaccgaggccgccggagccccagacaccccccacac

SEQ ID NO: 124252 - RNA, 72 nt, Homo sapiens
cgcagacgcagcaccaaaaaacccaccagacaggaccgcccacgaagcgagggcagaaagggcccagccggc

SEQ ID NO: 124253 - RNA, 77 nt, Homo sapiens
aggagaccaggaagcgagcaccagcagacacaagacacccaagaagcccagcagacccaacgcccagcaccaaaagg

SEQ ID NO: 124254 - RNA, 77 nt, Homo sapiens
cccccccccccggcggaggcccgccggagggagcccccggcgggggcaaggaggagcggggagaaggagccacagac

SEQ ID NO: 124255 - RNA, 85 nt, Homo sapiens
cagagacggcggagaccccgaaggcgcaaacgacaccacccgaccgccaccagccaaggacagagggcaagagagacccagccaa

SEQ ID NO: 124256 - RNA, 71 nt, Homo sapiens
ggccacggacaggggggcacgacccccccagaggcgaggagagaaaacccgacagcgggggcggaagaaca

SEQ ID NO: 124257 - RNA, 101 nt, Homo sapiens
cgggggaggcaagaccgccccgccgcccagaggacgcccaacaccacccacccaccacggcgaagccgacgagcccgaacagacgcaccagcgggaggaag

SEQ ID NO: 124258 - RNA, 77 nt, Homo sapiens
ccgagacaaaggcaccaggccaccacagaaacaaaagcaacaaagaggaaacagcgcgaacgaagaacagacacgag

SEQ ID NO: 124259 - RNA, 72 nt, Homo sapiens
agacaaaaaggcaaaacccacgacaagaaggcaccgagccccgccggccaggcaaccccgccacggagcaga

SEQ ID NO: 124260 - RNA, 57 nt, Homo sapiens
cacacaaagggaggccacagaaggaacacagcccgacgccgccgcaggaagagggaa

SEQ ID NO: 124261 - RNA, 60 nt, Homo sapiens
agaggccggcggggcgacaggggaggacgcgagcggaagagaagcaaaaagacaaggagg

SEQ ID NO: 124262 - RNA, 75 nt, Homo sapiens
acagcaaaaacaggagaccgggcgcgacacaagacagacaaaccaggaaccgaaccaacagaggcaaaacccgac

SEQ ID NO: 124263 - RNA, 64 nt, Homo sapiens
ggaaagggaaaaccagggggcagggcaaacagaacccgggaacagggaaaccccaaaaccacaa

SEQ ID NO: 124264 - RNA, 90 nt, Homo sapiens
cagggagaaaaagcagacacaaacgaacaggccaggccacagggcaccacaacacgcccacccaggaggcggccggccaagcccagccag

SEQ ID NO: 124265 - RNA, 76 nt, Homo sapiens
ccggaccaagccgcaggagaaacgaagacagacaccaaaaggaagaccggggcgcggcaagccaagaccgaagacc

SEQ ID NO: 124266 - RNA, 69 nt, Homo sapiens
ccaacgagaaaagccaccaggaacgcacgaccagcagggccaccgccccagagccagccgaaagccaca

SEQ ID NO: 124267 - RNA, 67 nt, Homo sapiens
caccacgcgccacgcggggaccggcagaacgccgacgggacgccggaaaacagcggaagaggcgacc

SEQ ID NO: 124268 - RNA, 76 nt, Homo sapiens
gagcgcgcgcccgccccgccgggaggaccgcgagagaggagcacggcagccaggaggccgacccgacccggaccgc

SEQ ID NO: 124269 - RNA, 83 nt, Homo sapiens
aaaacgcaccaaggggcaacaagcacaagaagcaccgcaccaacgaccgaagcaccaggcacacccacaagccgagcgcccag

SEQ ID NO: 124270 - RNA, 57 nt, Homo sapiens
agccggaagaccaggaaggagccggggcggcagcaccggcccagcgaagaaggagcc

SEQ ID NO: 124271 - RNA, 74 nt, Homo sapiens
cgcccccaggaccgagcaggaaccggagcagggaaacccagacgacaaggaaggccaagggacccacgaccaac

SEQ ID NO: 124272 - RNA, 50 nt, Homo sapiens
agagcaagcgggggaccgaacaaggcaaaagggcgcggcccggaaaaaga

SEQ ID NO: 124273 - RNA, 43 nt, Homo sapiens
ggaggcgggaggacgggcgccgcagagggaaccggggcaagga

SEQ ID NO: 124274 - RNA, 66 nt, Homo sapiens
ccgaagccgcagggaggggaaacgaagcgcacgaaacaccaaggagcgcccaacagagcacgaacg

SEQ ID NO: 124275 - RNA, 70 nt, Homo sapiens
caccaggacgggggcccccccccccccagacccacggaggagacacacagccccagacgggaggaaaaaa

SEQ ID NO: 124276 - RNA, 111 nt, Homo sapiens
cgggaccggcgccacagcagggacgaggagcgccgccgccccgagcccggcagaggggaggagacacgaagcgacgcagagccagaagggaggcagggaacacgcggaaca

SEQ ID NO: 124277 - RNA, 82 nt, Homo sapiens
cgaccggcccgcagcaagaggcggacgagaaggacagggaaggggagcgaacgaagaaaggccaagagggagagacaaggag

SEQ ID NO: 124278 - RNA, 59 nt, Homo sapiens
cagaaagaaaaaagaagaagccccgagcaccaaaacagacaaggaagcccagacccacg

SEQ ID NO: 124279 - RNA, 72 nt, Homo sapiens
caacacgcacaagacggacgaaagccagagaaaaagcggagaaaaggcacggcccccccaagacggggccaa

SEQ ID NO: 124280 - RNA, 84 nt, Homo sapiens
ccaggggggcgacccacacagcagcacagaggaaggcagggacaaacaaccaccccagcggcacgagcagcagagcaaccagag

SEQ ID NO: 124281 - RNA, 54 nt, Homo sapiens
aaacggaggcagacaccaacggagcacacgcagacacagaaaagcaacgaagcc

SEQ ID NO: 124282 - RNA, 94 nt, Homo sapiens
gaaaaaaccagagaccacagaaggacgggagaacaccccacagggaagaggaaacaggaagcaacaccggagaaagacaccacagggacagcaa

SEQ ID NO: 124283 - RNA, 73 nt, Homo sapiens
ccgacggcgggggcccgcaaggaacccggcccccagggccacggcagcgggcgcgagcgaaaagcggcaagaa

SEQ ID NO: 124284 - RNA, 69 nt, Homo sapiens
gcacccgacccaccagcgacggaaagcccaacccaggccggagagacacagggccgccagaagcgacag

SEQ ID NO: 124285 - RNA, 56 nt, Homo sapiens
aaaaaaacaaggaaagccgcaacagaagggcgccagggaccgggcagagggaggaa

SEQ ID NO: 124286 - RNA, 57 nt, Homo sapiens
caagggggcgcgaagcgggcagaaaaacgaggccgggaaggaagcaccaaccaggcc

SEQ ID NO: 124287 - RNA, 96 nt, Homo sapiens
gagcaaagcccccacgcccagccaggagcaccgccgaggacccagcacaccgaggggagagcaacaagccccggccccagagccagccggagagcg

SEQ ID NO: 124288 - RNA, 73 nt, Homo sapiens
gaagaggcagccacagccaggagcaccggggaccagccaaggaccgggcagccggagccggggcaccccgcca

SEQ ID NO: 124289 - RNA, 62 nt, Homo sapiens
gaggaaccccaaaaaacaaccaggaccgaaaaacagagcaaggagggagcgcgcaaggaagc

SEQ ID NO: 124290 - RNA, 83 nt, Homo sapiens
aaaggcagaagaccggaacccgccggagaacgaggaaaggcggagcagcggaaagaaggaaacgagaaagaaaggcacaagcg

SEQ ID NO: 124291 - RNA, 68 nt, Homo sapiens
gcaccaaaggccggaggcaccacaacacacagggaggccgcacagaggaggagcaccaaaccgaggga

SEQ ID NO: 124292 - RNA, 80 nt, Homo sapiens
aggaccccgagaccggagacgcaccccaggaccgcaggacaacggccacacagccaggggaccacagaaaggacgcagga

SEQ ID NO: 124293 - RNA, 82 nt, Homo sapiens
caacccccgcgggcaggcccccgcccagccggaggaggaagacaaacagggggacccagagaaaccaccgacggggcccccc

SEQ ID NO: 124294 - RNA, 76 nt, Homo sapiens
ggaaagcgccgagagacgggccgcgccgcccgcaagcagaggggaaagggggcgaaacccaaacacaccaagagcg

SEQ ID NO: 124295 - RNA, 73 nt, Homo sapiens
aaccgcccgcgcgcgcaggcgggcgcaggcccggcgcagcgcgggccaggacacgcagcacagcagaggacga

SEQ ID NO: 124296 - RNA, 72 nt, Homo sapiens
aaccgcccagccggcgagggacgccgcagaccggaaacaggcacagaacagaaggaaaggacgaagagccca

SEQ ID NO: 124297 - RNA, 80 nt, Homo sapiens
ccccggcgccgggcacggggcagaggaccggagcgccccgccgcaccgaggagcaacacccccagggagcccagaccgac

SEQ ID NO: 124298 - RNA, 94 nt, Homo sapiens
ccgaagaacgggaagcaaggcggacccggaagcccccaaagaaagcaccagaaaaggacaggccaacagcagcgaggaagggaagagccgaagc

SEQ ID NO: 124299 - RNA, 77 nt, Homo sapiens
cagcccacgccgcaacccgccccagagccgccaccccggccagaccggcaaaaagaagaaacacagacaaggcgaaa

SEQ ID NO: 124300 - RNA, 86 nt, Homo sapiens
ccggcggacgccggcacagaacgaagcgcaacaggaaaggagagaagaaggcaagggccacggcacccagaaggcgcgagaagggc

SEQ ID NO: 124301 - RNA, 71 nt, Homo sapiens
aacgcacgaaaaggaaccaggcgccccaggagaaggaccgaagagagaggccgcagaagggcagaagaaca

SEQ ID NO: 124302 - RNA, 73 nt, Homo sapiens
cgggccaggccacgggcccagggagcagacgccggccgggaacgaaggggaaaagcaccaggaaaggaaggcg

SEQ ID NO: 124303 - RNA, 67 nt, Homo sapiens
cggcggagagacaaagagcagaggagcgcagaaaccaaaaaagcaggaagacagcaagacaggaaaa

SEQ ID NO: 124304 - RNA, 58 nt, Homo sapiens
cgacacgagacaaccgggagccggaggcgaaagagggccagagacaagacaaaagaca

SEQ ID NO: 124305 - RNA, 75 nt, Homo sapiens
cgcagcggggggggcgcccgcaacgaggaccaggaagcacacccgccgccggcggaaaggggcggccacgcaagc

SEQ ID NO: 124306 - RNA, 74 nt, Homo sapiens
gaaggacgagcaacggggaagggagaggaagaccacaagccaacagagcacagcgccccaccagccagaagggg

SEQ ID NO: 124307 - RNA, 52 nt, Homo sapiens
agagcagggagggccaaagaccagaaccagaaaccagagacgaccacaagaa

SEQ ID NO: 124308 - RNA, 76 nt, Homo sapiens
gagccagggaggcgaggcccgcaccggaaggaaggcccggcgggggcaacgagaaggacagccaacaccagggagg

SEQ ID NO: 124309 - RNA, 61 nt, Homo sapiens
gcgaagccaggagggcccgaggacagcggccgaagccagagccggggcggcgccaggcccc

SEQ ID NO: 124310 - RNA, 47 nt, Homo sapiens
ggccaagcccgccgcgcccgaaggaaggcagagcccacaaacccaag

SEQ ID NO: 124311 - RNA, 76 nt, Homo sapiens
cggcgcccccccagccccccaggacccgggccgcagcagcccccagaaggaagagcaacagcccacggaaaagacc

SEQ ID NO: 124312 - RNA, 63 nt, Homo sapiens
cgaacgaccaagaggggcgacgcagagccgagcgaagcgaaacccaccagagaaggcgcggcc

SEQ ID NO: 124313 - RNA, 37 nt, Homo sapiens
aggaaagcagaagacaagcagggaccacagcccacac

SEQ ID NO: 124314 - RNA, 81 nt, Homo sapiens
cgggacgcaccgaggccagaccgccgaggcaaaagcagaccggaaaacccaccggcaagaccacacccgaggggagcccag

SEQ ID NO: 124315 - RNA, 71 nt, Homo sapiens
acgagaaagaccgcaagcgcagacacagacaccagcagacggccaagacagagagacccaaagagacagag

SEQ ID NO: 124316 - RNA, 79 nt, Homo sapiens
acaaaggcaggggcgccagggcaccagacgggcgggaaagagaggcccgggggagcaggagggggcgcgggaccacgcc

SEQ ID NO: 124317 - RNA, 75 nt, Homo sapiens
ggcggccggacccccccccggcgcccaagcggaaggacagaaggcgacacaggcagaggaagggacaaaagagag

SEQ ID NO: 124318 - RNA, 79 nt, Homo sapiens
ccgcgcgcccgcacccggccgccggggccgcccaggcccaggaggggcaggagaggaagggaaacaaggaagagccagg

SEQ ID NO: 124319 - RNA, 61 nt, Homo sapiens
cggacgcaccgccaacaccgcagcaccacggcccgacaggagaccaaccggagaggcaaga

SEQ ID NO: 124320 - RNA, 78 nt, Homo sapiens
caacacgcgaacggcgaggcccagcaaaaaccaaagcaccaggaagaagaggcggaagaaacaacaagcgcaaggagc

SEQ ID NO: 124321 - RNA, 58 nt, Homo sapiens
cagagggccccgccagcccggggcccgcgccggccccagacacgccaccaaaccggac

SEQ ID NO: 124322 - RNA, 69 nt, Homo sapiens
aaaaacagggccaagacccaccaggcaacaggaccgggccgagaggacccccccgaacccacagagagg

SEQ ID NO: 124323 - RNA, 75 nt, Homo sapiens
caggggccagaacccaccgggcaagcaaggccagcggacgcgcaccggcaaaccaggcgccccgaggagaagccc

SEQ ID NO: 124324 - RNA, 69 nt, Homo sapiens
gcgacggaaaggcacgaaagccaggagcggcagcccacaagcaggaagaccagccccaggagggaaaca

SEQ ID NO: 124325 - RNA, 73 nt, Homo sapiens
ccaacccacagacgcccagaggacaaaaggggccgggcaccacaaggcgcccggcaaaccaggagacagcccg

SEQ ID NO: 124326 - RNA, 55 nt, Homo sapiens
ccggaagcaacccagaaacccagggaagaaaacgccagagaagcagagcagcccg

SEQ ID NO: 124327 - RNA, 55 nt, Homo sapiens
caacgaaccggcggacaagagcacacgaggggcggcgaagaccaaagcagagagc

SEQ ID NO: 124328 - RNA, 55 nt, Homo sapiens
gcggaccgagagcgcgaaacgcacgagaagaagacccaagaacggaacgaagagg

SEQ ID NO: 124329 - RNA, 77 nt, Homo sapiens
gccgcacaccacacgcacgaggagcccagagaccaagagggcgcagagggcgaggaggagaacccaccaagccccgc

SEQ ID NO: 124330 - RNA, 64 nt, Homo sapiens
caccggaaaggaagaccgcccagaaagagcagccccagggaaaaggggaaggaacaaaccaaag

SEQ ID NO: 124331 - RNA, 77 nt, Homo sapiens
gcagaacccccagaccacaggggaagagcggggacccagaccacgccaggccgggggccccacagcccgggcagcac

SEQ ID NO: 124332 - RNA, 70 nt, Homo sapiens
ggcaggggcccagaccaacaccaagaagccggcccagagacgaggacgcgcacaggaaaggacgcggaac

SEQ ID NO: 124333 - RNA, 77 nt, Homo sapiens
ggcaacgcggaaaagaggccggggaggcagaacgaggcacagggcccgaccaacacgggaaaggggcgaggagccga

SEQ ID NO: 124334 - RNA, 64 nt, Homo sapiens
gagccaagaagcagaagacggaggagaggggaacgggacaccaagcagaaccacgccagacaag

SEQ ID NO: 124335 - RNA, 64 nt, Homo sapiens
agagaacacgacaagcggcagcacgaaagacagggacgaagcaaggggaccgggacgagcagcc

SEQ ID NO: 124336 - RNA, 78 nt, Homo sapiens
gacacccgcccaggcagcaccagggggaaggacagcaaacgcccgcagaacaagaaggagaggggccagaaaacggaa

SEQ ID NO: 124337 - RNA, 81 nt, Homo sapiens
gcggcgccgggcgcgacgagcgcagcccgaggaccagcagcaggggcggggccccgaacgagacagaggcaggagcgggga

SEQ ID NO: 124338 - RNA, 58 nt, Homo sapiens
caccgaggacgagaaaacccaccggacgaacaaaacgaaggcacgagaacagggcgga

SEQ ID NO: 124339 - RNA, 67 nt, Homo sapiens
gcacccacagaaggccacagaaggaaagaagccagccccgggaaccaccacgacccggcaggccccg

SEQ ID NO: 124340 - RNA, 76 nt, Homo sapiens
ggaaacgcgccggcggcgaaggagccgagccccaccagaaaagccagacagacccccagagacccagccagcgaga

SEQ ID NO: 124341 - RNA, 55 nt, Homo sapiens
gcagagcggcgaccaccagaagacaaggcgcagcaacccggccaaccagaccgaa

SEQ ID NO: 124342 - RNA, 74 nt, Homo sapiens
ccagaggggccaacggacgacagggacgcggcgcggcagccagccccccaccgaagaagaaaccggccgagcgc

SEQ ID NO: 124343 - RNA, 74 nt, Homo sapiens
agagcgccccccgaccacaaaagacaccagaccaacccaggagaagaaggaaaggacgaacacaaaggggcagc

SEQ ID NO: 124344 - RNA, 81 nt, Homo sapiens
caagaagcacggacccgcagcagcagaacaaagcagccggaaaggagccaagagggcaagaagcaagcaaccaggcgccgc

SEQ ID NO: 124345 - RNA, 89 nt, Homo sapiens
ccgccgccaccagcccaaaacggacaaccaccaccagcgagcaaaagaacaaagaccaagaccaagaagcgccccagcggcaacaccaa

SEQ ID NO: 124346 - RNA, 77 nt, Homo sapiens
accgcagaacccaaaggcggcacagaacagaggggaaaccacgccgggacgggggagaaggaaaggcagaccgagag

SEQ ID NO: 124347 - RNA, 55 nt, Homo sapiens
gccaggaccggccgaacgcagaggagaaggggcgccacgcacccgggacggacag

SEQ ID NO: 124348 - RNA, 77 nt, Homo sapiens
gaccacaaaaaagagacccacagccagcaacaccagcacacgaagcgaaccgcccccgaaccagacccgaccgagca

SEQ ID NO: 124349 - RNA, 78 nt, Homo sapiens
gggcgaggacccgggccagccaggagaggcgccggaccgaaggcgcgaccacgacgagaagcgggggccgcagcgggg

SEQ ID NO: 124350 - RNA, 54 nt, Homo sapiens
cccgcgcgaccgcagggcgcccggcaaggacccaaagacaggaccacgcaccag

SEQ ID NO: 124351 - RNA, 44 nt, Homo sapiens
cgcagggcgcccccggcaaccaagggcagaccgcacaagcagcc

SEQ ID NO: 124352 - RNA, 69 nt, Homo sapiens
agaaagaggaaaaagccgcaagaaaagagacagacgaaaaagccagcaacagaaaacaagccgacagaa

SEQ ID NO: 124353 - RNA, 69 nt, Homo sapiens
accggagacggcgggagggggcaaggcgaaggggcgccgaaccgagcccgaagggaagggccggcgggc

SEQ ID NO: 124354 - RNA, 74 nt, Homo sapiens
ggaaagaccaagagagaaagaaaaaacgcgaagagcaacagagagagcacgaaggaagaggcccggaaaggaag

SEQ ID NO: 124355 - RNA, 85 nt, Homo sapiens
gccacggggccccaggaaaaaggaccagaacgagggagagcagacggccgagaacgccacaacaacccggcccacccggagacgg

SEQ ID NO: 124356 - RNA, 70 nt, Homo sapiens
aacaacaaccggacacagagcgcagcaaaaaaaccgacaggaccaacgaggcaaagcacagaggcacaac

SEQ ID NO: 124357 - RNA, 66 nt, Homo sapiens
accagaaaaaccagaacaaccaaccacggaagagcacccaaaccaacccgaaggggaaacgaagaa

SEQ ID NO: 124358 - RNA, 77 nt, Homo sapiens
caccacagcgacaaccggcgaaccacaggagaaagcaccaggcccgcccccgaggcgcaggcccccggcgccggaga

SEQ ID NO: 124359 - RNA, 72 nt, Homo sapiens
ggagaagcaaccggcgccaccagcaaccagagggccagagggaaggacagggcacacaccccaggaggggga

SEQ ID NO: 124360 - RNA, 63 nt, Homo sapiens
caagccagcgggaggagcggccccccccccagaccggaccacgccacaagcgaaggcacccga

SEQ ID NO: 124361 - RNA, 70 nt, Homo sapiens
cgcaaaggacacaggccagaggagcacacacaaagaggacccgacagccgaagccacaaccgaacgccgc

SEQ ID NO: 124362 - RNA, 61 nt, Homo sapiens
gaggcggacggggagcgaacgggacagcccacacccggcgcggaggcagcaagagcaccgc

SEQ ID NO: 124363 - RNA, 74 nt, Homo sapiens
ggccaagagacagggcacaccaaacccacggccgccaggcacagagaaggcaaacgggagggcgaggacaccaa

SEQ ID NO: 124364 - RNA, 73 nt, Homo sapiens
aacgcgacggaaaggcacgaaagccagggagaacggaaaaaacaaagcgaaacagcggggccacccagaacaa

SEQ ID NO: 124365 - RNA, 52 nt, Homo sapiens
cgaggaacagccacaaacggaagaaacagagagaacaccgaccgaggacaac

SEQ ID NO: 124366 - RNA, 40 nt, Homo sapiens
cagcgccgacggagaccgccgggacagcacagaaggccgg

SEQ ID NO: 124367 - RNA, 74 nt, Homo sapiens
ggcaggaacagacacggggaagcgcaaaaacaagacggggcgccccacagaggggcgacgagggacaacacgaa

SEQ ID NO: 124368 - RNA, 70 nt, Homo sapiens
gaggagcaggcggagcacccaccacggagggaaagaccaggcagggggacggaagcggcagcgggcagcc

SEQ ID NO: 124369 - RNA, 84 nt, Homo sapiens
cccggccagcgcgcgccggaaggggcgaccggaccgggagaagaaggcgccgaggcaaggggacagcacgggagcggccgcgcc

SEQ ID NO: 124370 - RNA, 72 nt, Homo sapiens
aaaagaaccgaaagaagcggaaagcagaagcgcgcagcaacggcgggagcgcagcgaagggaacaacaaaag

SEQ ID NO: 124371 - RNA, 66 nt, Homo sapiens
caagcggacagaacagacgggacccccagccaaaggcaaagaagcagaaacccaagaaccgcggac

SEQ ID NO: 124372 - RNA, 77 nt, Homo sapiens
cagggcgcacggcacacaggaagaacggcaaggagcgaaggaacgccccaaacagaagaagacggcacgggaccccc

SEQ ID NO: 124373 - RNA, 78 nt, Homo sapiens
ggcggaccaaccacggcaaaccaacaaggcacaagcagaggaaccagggaaccgccgccagcaaccaacaggcacgag

SEQ ID NO: 124374 - RNA, 80 nt, Homo sapiens
gccgagccggacggccgcgaagaggcgggccggacgaaaccacaaaacgcccaccagcacagcggcagaaacaaagcaac

SEQ ID NO: 124375 - RNA, 65 nt, Homo sapiens
aggaccaagaaccagggggaaaagcccaaaggaacccaaacaggccacaaagcaaccgaacccag

SEQ ID NO: 124376 - RNA, 72 nt, Homo sapiens
accaggcccagcagcacaacgaggacgacaagcaccaaggagcgaaacaaacccgggggcggcagcgggccc

SEQ ID NO: 124377 - RNA, 77 nt, Homo sapiens
ccggccaccggccccacacgaccggcgaaggcaagagaggggagggagaaaaacccgaccccccagggcagagacaa

SEQ ID NO: 124378 - RNA, 47 nt, Homo sapiens
gagaagacagagcaccaacgaggaaagcaagcaagggagaccaagac

SEQ ID NO: 124379 - RNA, 74 nt, Homo sapiens
cagaagaaacgcaccggaaaggccaccagcggggaagcgcgggaagacacccgggacgcggggcaggcagaggg

SEQ ID NO: 124380 - RNA, 36 nt, Homo sapiens
caggacaaggccaaccaaggaagagaccgagaccag

SEQ ID NO: 124381 - RNA, 36 nt, Homo sapiens
cggacggggccaggagcaggggacggacagaacgag

SEQ ID NO: 124382 - RNA, 78 nt, Homo sapiens
agcccaagcgccccccccgccccccaggaggggcgagagggagccgcagcgagcaggaagaagagagggcgaaggagg

SEQ ID NO: 124383 - RNA, 88 nt, Homo sapiens
caagccccaccagaagagggagggaccaaggaggagacaaggacaccgcgcaaggccggcagaaggagcagcgaacagaggccagccg

SEQ ID NO: 124384 - RNA, 83 nt, Homo sapiens
cgcggagcccaagaaacgggcagccaggcccccacagcccgcaggcgccacggccggaacgcacagcggaaggccgccacccg

SEQ ID NO: 124385 - RNA, 78 nt, Homo sapiens
acccacaaccgacacagccaaaacacggacgaacaggaagaaaacgaccccaggaagccaagaccaagaaagagcgga

SEQ ID NO: 124386 - RNA, 76 nt, Homo sapiens
ggaagcccaccgacgaggacggaggacggagaggaccgcaccagcacgcccacccagagaaccgggagagaaccca

SEQ ID NO: 124387 - RNA, 76 nt, Homo sapiens
accaacagagggccagcaccccgcgcagaggccgaagacaagccccggcacaggaggagagaaaccagccgaggca

SEQ ID NO: 124388 - RNA, 47 nt, Homo sapiens
cgggccgaggccgcaggaggagggagacaaccggagcgagcgagcag

SEQ ID NO: 124389 - RNA, 77 nt, Homo sapiens
ccgcacgccacagcgaaggcgcgagggacaagagcagagagcggcagcccacaagcaggaagaccagccccaggagg

SEQ ID NO: 124390 - RNA, 83 nt, Homo sapiens
caccgaccccgaccagagcgcgacggcagggcgaggcacggggagggacgaaggggccgaccccagacgaaaaccagaggaac

SEQ ID NO: 124391 - RNA, 98 nt, Homo sapiens
ggggagagacacacgggacaaacagaagaaggccagccaaaaaagaggccaggagaaaaccaggcagcacgcccgggccccccacaccggccagagaa

SEQ ID NO: 124392 - RNA, 79 nt, Homo sapiens
cgcgaaagagggaagcggcaaaccaaaagagcaacggggccaccacagagcccgcagggacacagcagaacaagcaacc

SEQ ID NO: 124393 - RNA, 67 nt, Homo sapiens
aaacagcaagagccggaagaaaggaaagaggacacacgcccacagaggaacacaaaaaacaggcgac

SEQ ID NO: 124394 - RNA, 69 nt, Homo sapiens
aacagaaggagcggcggacacacagacccccaccaagcagacgcgacccggggcgccgcgggggccaag

SEQ ID NO: 124395 - RNA, 69 nt, Homo sapiens
acacagcaagaacggaaggggcaaagcggggacggaagcaagagccgaaaacccaaacacagaacagga

SEQ ID NO: 124396 - RNA, 70 nt, Homo sapiens
gacccagcgccgaggggggggaaccacacgaccagaccgccgacccagcggacgccaagaagaaaggccc

SEQ ID NO: 124397 - RNA, 61 nt, Homo sapiens
agaggagcgaacgagacagaacaggaaaaagggaccgggggagcggccgaggacaagcaca

SEQ ID NO: 124398 - RNA, 60 nt, Homo sapiens
acagagccaacaccgcagccggaacagggacgaccgaggagagcaaaagacaacacccag

SEQ ID NO: 124399 - RNA, 40 nt, Homo sapiens
agagaaagccggcagaggcagcaaggcgaaccccacccac

SEQ ID NO: 124400 - RNA, 78 nt, Homo sapiens
ggcaggaggcgacggcggccacgagcagcgaagccggcggagaaaccaccacaaacacgaggccagcaacgaccaaca

SEQ ID NO: 124401 - RNA, 70 nt, Homo sapiens
aggaacccggacagaagccagagggagcaccagccggaagaagggcgaggggggcacccaaggccgaggc

SEQ ID NO: 124402 - RNA, 69 nt, Homo sapiens
acccacaaccgacacagccaaaacacggacgaacagggcgaaaaaacgagaaagaaagcaggagaccaa

SEQ ID NO: 124403 - RNA, 95 nt, Homo sapiens
caaccaaagacgggaacaagggagggggacagaccaaagaggggagcaacagcgagcaacaggcaacgaaaacagacaaaacaacggaaaagcag

SEQ ID NO: 124404 - RNA, 86 nt, Homo sapiens
ggcaacgaaaagagcccgcgaggccgacaagagccacccggagcagagagggccgaggcagacaagggaaaggccgcgcaggggac

SEQ ID NO: 124405 - RNA, 79 nt, Homo sapiens
acgagggcacccacaccacgacaccgaaaacccaccgagcccgccaaagggccggaaagagggcgggcccgcacggagc

SEQ ID NO: 124406 - RNA, 77 nt, Homo sapiens
acaaccgcgggcacccacggaaaagacagggcgaagagcccagaggcacgccacgacgggggccggaaacggacgga

SEQ ID NO: 124407 - RNA, 52 nt, Homo sapiens
aacgagaccgcacagcgacacgagaaacaagaacaccggaaggaagaggaag

SEQ ID NO: 124408 - RNA, 69 nt, Homo sapiens
cgcggcgcgccgaggcgcccaccagggaaaaggaaaccagaagagggacgaagaaaacagcgcagcgcc

SEQ ID NO: 124409 - RNA, 70 nt, Homo sapiens
cacaagaccgcccggggaacagggcagcaagcgacaggaaaaagaagagcacaagaccagcagacgacca

SEQ ID NO: 124410 - RNA, 57 nt, Homo sapiens
ggagcggagaaaaggaacccgccccggaaaacccgccaggccaagcaacccccaaga

SEQ ID NO: 124411 - RNA, 82 nt, Homo sapiens
ccgccccggacgggaggaccgcggacgacggccgcagaagacaggggccaggccaggggcaggggaagcacccaaccaacga

SEQ ID NO: 124412 - RNA, 72 nt, Homo sapiens
gaagaccagagaggaaagcagaaaacacggaaccagaggcagcagcccaaccccgaggacagcccaggccac

SEQ ID NO: 124413 - RNA, 63 nt, Homo sapiens
aaggagagaacagaggaaccaggagacagagcccaaagccacgcaaacaaccacagggaacaa

SEQ ID NO: 124414 - RNA, 81 nt, Homo sapiens
cagacgggaccggggaagccgcacaccagaggccagcaagcggagcggacagacgcacgacgaaggcaagaccacaagaac

SEQ ID NO: 124415 - RNA, 52 nt, Homo sapiens
gcaagccggcacacagggaggaaagaccacagcaagaccacgcccccagccg

SEQ ID NO: 124416 - RNA, 74 nt, Homo sapiens
cgaaccagaagccgaagccggagaaccaaggggccgcaaggccaggcgcgcagaggcacccaacggcacagacc

SEQ ID NO: 124417 - RNA, 65 nt, Homo sapiens
cggccggaggagcccccaggccgacaggaagagcacccaagcgcaagcaaaagaaggccccccca

SEQ ID NO: 124418 - RNA, 90 nt, Homo sapiens
gaagaccggagaacaaaaacaaccagaggaagaagcacccagagacgacaaagagagacgaccaggaaagccggcgcggaacggcgggag

SEQ ID NO: 124419 - RNA, 79 nt, Homo sapiens
ccagaagaacaagaagaggcagaccccgccagaccaacaagcggagagacaaggccaaaagcagcacaccaaacgcaaa

SEQ ID NO: 124420 - RNA, 73 nt, Homo sapiens
caaggacagaggaccaaagcggaccagagacagacaagaccaaccagcgcggagcccgaagcaaacagcagac

SEQ ID NO: 124421 - RNA, 83 nt, Homo sapiens
gcgcccggcgccccaggacaggacggggcgcagaaggccagacacagaaccaggaaagcaccaccacaaagaggagaagcccc

SEQ ID NO: 124422 - RNA, 70 nt, Homo sapiens
agcaaacaaaaaaaggccaaggagagagaagaagaccagacggccacccacacagaaagccagggccgga

SEQ ID NO: 124423 - RNA, 80 nt, Homo sapiens
agagaacacgccacccccacccccacaggcacccgcgggaaggacaaggcccgaaggcccacaggacagagcccacagca

SEQ ID NO: 124424 - RNA, 72 nt, Homo sapiens
agagcagcgggcagcaaccagcgaagagggaaggcaccaggagaaggcaccgggaaacagaaagcaaggaag

SEQ ID NO: 124425 - RNA, 85 nt, Homo sapiens
gggaaaccacgcaggcaaacgagaaaaagccgagaaggccagacgacaagggaggcgaggacggacaaaaggaaacggacgggag

SEQ ID NO: 124426 - RNA, 74 nt, Homo sapiens
acagagaagagagaccacaacacagaagaaacccacagccacgagagaagaaagaaaaagaaaccgccagccca

SEQ ID NO: 124427 - RNA, 78 nt, Homo sapiens
gcgcgcccccgccgccgccaggcgcggcagaaggcggcgccgcgaccggccgggacccgaacacggaagaaagacacg

SEQ ID NO: 124428 - RNA, 73 nt, Homo sapiens
caaagccagaaacaaagggaccgacgcaggcgggcccaagcgcgaaggaaaaacggaagaccagagagacgag

SEQ ID NO: 124429 - RNA, 57 nt, Homo sapiens
agccacgaacgcccagcagacaacagaacccccagacaggcagaaacgccaaccgcg

SEQ ID NO: 124430 - RNA, 38 nt, Homo sapiens
ggaagcaaacagcaccaaagagagaagggagaccgagc

SEQ ID NO: 124431 - RNA, 51 nt, Homo sapiens
aagcggaccgaacggacagacaaggccaaagcaaagagcaaaagcgaagac

SEQ ID NO: 124432 - RNA, 83 nt, Homo sapiens
cccgagaagggagacgacgcgcgggccgcgagcggggcgacccgagacagcccaccgaggaagaccaaaggaccaaccaacaa

SEQ ID NO: 124433 - RNA, 76 nt, Homo sapiens
gccgggggaggcgcggcaaggccacgcgcaaccgggcccgcccgccgggaaaggaaggcggaggaaggcgggagcc

SEQ ID NO: 124434 - RNA, 66 nt, Homo sapiens
gcccgccggcagcccaaccagggaggccgcgcccgcggcgcgcgagcgggccgggcgggcggccga

SEQ ID NO: 124435 - RNA, 67 nt, Homo sapiens
cggcgccccgcaagggggaaacccgcccagggcgggagaccgccaagaaacaccacaaggagacaaa

SEQ ID NO: 124436 - RNA, 84 nt, Homo sapiens
acaaggggacaccagccgaagaagcacagagaacgcgcacgcaacaacagcagggcagcccaaggaccaagggagaagagaccc

SEQ ID NO: 124437 - RNA, 69 nt, Homo sapiens
agcggcgagaaaaggccccagggacagccagcaggggcagaagcagcagacggaacgagggcaaagaag

SEQ ID NO: 124438 - RNA, 77 nt, Homo sapiens
cgaaagggccgcggcggccgcccaagcccaggccggcccccagaaccccaggagcaacgaaaacgaagacacacagg

SEQ ID NO: 124439 - RNA, 61 nt, Homo sapiens
gggcaccagcacaggaggagcaagaaaggcgggccccgcgcgacacccccacagcagcgcc

SEQ ID NO: 124440 - RNA, 70 nt, Homo sapiens
aaaggaaaaagacccgccgagcaaaagagcaagaaggggagaacaacgaggcgaggacaaaccacgcaga

SEQ ID NO: 124441 - RNA, 84 nt, Homo sapiens
acagggagcccggagacacccggcggacagcaccaaaagggggacgcaaaagacgaccaggagacacaacaggccaaagccaag

SEQ ID NO: 124442 - RNA, 34 nt, Homo sapiens
gagagaaaccaccgaaagagacagcgcagaagcc

SEQ ID NO: 124443 - RNA, 76 nt, Homo sapiens
gacccacccgacccgagaaccaggggaccagcagagggggcgcaagacgggcagacaacgaacaagcgaagaacca

SEQ ID NO: 124444 - RNA, 48 nt, Homo sapiens
ggccggggcacgacgacccaacagcaaggaagaggcccaaaggccacc

SEQ ID NO: 124445 - RNA, 80 nt, Homo sapiens
gcggccgcgggcccacagcaggcgagacccggccgaaccacgcgcgcaccgcggaacggggagaagaaccacgagggcca

SEQ ID NO: 124446 - RNA, 58 nt, Homo sapiens
gaacagaacccaaaagccgacaaccccagaaacaggacgaagacgaccgaagcagaac

SEQ ID NO: 124447 - RNA, 73 nt, Homo sapiens
ggcggcgaggcggacaggacggaagccgcgaacccccgaccgggagcccacggggggccgacgacgagccccg

SEQ ID NO: 124448 - RNA, 94 nt, Homo sapiens
gacaagaaaagcgggcaaccgaaagagacccccagaccaggaaagacagaaagcaccgggaggaaagagagccacacgaagaacacggccaaag

SEQ ID NO: 124449 - RNA, 65 nt, Homo sapiens
aacaccaacaaagggaaggagaacaaaggacacgccagccccaaggaccgggaggggcaaacgga

SEQ ID NO: 124450 - RNA, 75 nt, Homo sapiens
gccacaagggccaggaacaaaagcaaccaccccccagagggaacggagaagcccagggaaacaagaacaacagcc

SEQ ID NO: 124451 - RNA, 77 nt, Homo sapiens
gcaccggcgcggcgagggagcagcaccagggaggacgccccggccgaagagaccaggacaagacgggcccgcgccag

SEQ ID NO: 124452 - RNA, 80 nt, Homo sapiens
aagcgcccagacgaggcgagggaggcagcagaccgcacaaccccagaagcgcgcccgggagacaaacaaggggggaagag

SEQ ID NO: 124453 - RNA, 71 nt, Homo sapiens
acaagcccaaggagcccaggggacaagaaaacacagcgaaccccaagaacccgggcgcaaaggaaacccgg

SEQ ID NO: 124454 - RNA, 76 nt, Homo sapiens
ccacggacgccacagagggaagaccccaaggaagccagcagaccgcagaacggccccgggacccacccaccaaaac

SEQ ID NO: 124455 - RNA, 64 nt, Homo sapiens
agcgcgacgagggcgccgccgcggccgccccaggggccaggcacaaagagggcgggacacccag

SEQ ID NO: 124456 - RNA, 95 nt, Homo sapiens
caggaccacacggacgcgccagcaagccggccaaacaacaagcagaagagcaaagcggccgccaacccaggcaagaccccgacagcccgcaggag

SEQ ID NO: 124457 - RNA, 38 nt, Homo sapiens
cgcaggccccgcgccagggccgaggccccagcagcgga

SEQ ID NO: 124458 - RNA, 62 nt, Homo sapiens
ccagcagggcagccgaagccagcccaggaccacaccacggagccaggaggaagccaggacac

SEQ ID NO: 124459 - RNA, 66 nt, Homo sapiens
acagagcagcggcacaaccagcacagaaaagaaagaaacaccaccaagcccagagagaaacgcgac

SEQ ID NO: 124460 - RNA, 78 nt, Homo sapiens
gaagcgacagcaaccaaggaacaagagagcaagaggacagacccaaagagacagagaacccccaagcccagaaaagaa

SEQ ID NO: 124461 - RNA, 77 nt, Homo sapiens
gacggccggggcggcgaagcggaggccggagaagggcacggcagaacgacgagaccccagggggcacggcaaccgca

SEQ ID NO: 124462 - RNA, 53 nt, Homo sapiens
cgcccgcgaacacccaggagccaaaaggcagcaaaggcgagcaaaacaagaga

SEQ ID NO: 124463 - RNA, 66 nt, Homo sapiens
aaacaagaaccacggcacgaaaggccaccagagcggaacgaacgaacagccgcgaacacccagcag

SEQ ID NO: 124464 - RNA, 78 nt, Homo sapiens
acaaaagggcaggagagcaggcgaagacaacaggaaggaaaacaggagaaagaaggggcaagaggaagaagcagaagc

SEQ ID NO: 124465 - RNA, 76 nt, Homo sapiens
gacgaaggggcagaggccaagagcccaacaccacccgagagccccaagggaggggggaagacagggcccagcacca

SEQ ID NO: 124466 - RNA, 64 nt, Homo sapiens
cccgcgcggcgcggggaccgcggcccggagaaggcgaggagcaccgaaggggacggccccgaga

SEQ ID NO: 124467 - RNA, 75 nt, Homo sapiens
caccagccacggggccaccaggacaagcgggcagaacagcgcggcaggaggcagcacggcaggagacgaggagag

SEQ ID NO: 124468 - RNA, 68 nt, Homo sapiens
gcgcgccccgcccggaccgcgcagaaccagggcggcggccagcgccacgcagacacgagaccagaagc

SEQ ID NO: 124469 - RNA, 77 nt, Homo sapiens
gccacgcggaggccgagggaacggaccgagcagcagcagaggcaaccagaggccaggccagagacaccccaagccgc

SEQ ID NO: 124470 - RNA, 71 nt, Homo sapiens
ggccacggacacagaaccacaggggaagaaccacaggcccgaagcagagaccacgagagcaaagaaacaac

SEQ ID NO: 124471 - RNA, 78 nt, Homo sapiens
cggcggccgggagggaggcggcgccgcggccgcgcggacggacgccgccgccggcgagcacgcacccggcaaagaacg

SEQ ID NO: 124472 - RNA, 71 nt, Homo sapiens
ccaaagccaagccaccaccgccgggaggagggaggaagagaccgacgccggccagccccacccagcaagga

SEQ ID NO: 124473 - RNA, 72 nt, Homo sapiens
cggcaggccagggcacgaggagggcaacaacacggcaccacacaagcgaagaagccgagaaaccagccacgc

SEQ ID NO: 124474 - RNA, 86 nt, Homo sapiens
gaccgcagcccacgcagcaagacccgcgccgccgggacccccaggacgacggaccggacacaccgaaacggaacaccgggcagaga

SEQ ID NO: 124475 - RNA, 71 nt, Homo sapiens
ccaagagggagccccgcagacgggacacagcacaccggagagacgagggagaaagagagaagaaagaaagg

SEQ ID NO: 124476 - RNA, 76 nt, Homo sapiens
cagcggccgcgcacccccggccggaggcaccagcacccgggaggcccccgggagaagaagacgaggaccagaaagg

SEQ ID NO: 124477 - RNA, 78 nt, Homo sapiens
agagagcggggacagacaggcaagaacgcaaggggaaagggaacgacggggacggaaaggggccccgaacggaacaca

SEQ ID NO: 124478 - RNA, 70 nt, Homo sapiens
aggccccggccccccgcgggcccccgggaccacccggcgccccgacgagagacaagaggggggcacaccg

SEQ ID NO: 124479 - RNA, 73 nt, Homo sapiens
cgaacgggccgggaagccggcggaccgcgccgcgccggagcaggcaccggaacgcaagcacagacccccagaa

SEQ ID NO: 124480 - RNA, 59 nt, Homo sapiens
caaagcagcagaccacagacgcgacacaaccgacgacagcagaggcgcaggaagggcaa

SEQ ID NO: 124481 - RNA, 64 nt, Homo sapiens
cagaaaccgccccagcgaggaagaggacaggagcggagaggcaccaccggagaccgggcccacc

SEQ ID NO: 124482 - RNA, 80 nt, Homo sapiens
aagcgaggaccagaccagccgcaagacaccgcacccacaaagccaagagacaagcgacccgcagggaggacagcgcaccg

SEQ ID NO: 124483 - RNA, 78 nt, Homo sapiens
caacccgcgccggccgcgggaaggagagaacagaaaaccaggaccgcagaggacccaggagcacaaccgaacagagaa

SEQ ID NO: 124484 - RNA, 82 nt, Homo sapiens
cagggggaccaagcagaggacggaaaacagaggcacaccgacaaacgaagcggggccaggggaggacccgcccccagccggg

SEQ ID NO: 124485 - RNA, 81 nt, Homo sapiens
cccaagagcccagcagcagaacaagaagaaggcgacagagcacagccaagcgcaaagcagcaccaaagaacacaaaaaaag

SEQ ID NO: 124486 - RNA, 87 nt, Homo sapiens
cgaaccggggcggagccaaacccgcggcagcagcaccagcaaaccaagccaggcccgaagagcacccagacagggaccccgcccgcc

SEQ ID NO: 124487 - RNA, 76 nt, Homo sapiens
aacgcccacaaaacccagcacgcacgagccgagcggaagggaacccagaaccgcggaccacagcaaaccaagcaga

SEQ ID NO: 124488 - RNA, 72 nt, Homo sapiens
cagaggccgggcggagcgcccagacgcggggagccgccggagcgagaagccagcagcagaaagcaccccagc

SEQ ID NO: 124489 - RNA, 65 nt, Homo sapiens
agcagagaagcgagaggggcggacaaccaggggcacgcccaaagaacagacagccccgggaacac

SEQ ID NO: 124490 - RNA, 70 nt, Homo sapiens
cgggaaaaggaagcccagggcccaagccacacaaagagggaccccaaacaggagaaagcaaaacccaacc

SEQ ID NO: 124491 - RNA, 77 nt, Homo sapiens
gggaggaggcaacgccgcgaccggaccgcacaagcagcagcagcggcaccaagcgcggggacagagacagggggcac

SEQ ID NO: 124492 - RNA, 90 nt, Homo sapiens
gcaccccacacgacccacaggagccccaggagcccagacaccagccccccaccaggagccacaggcaaaagccaaaggagaccccgaaca

SEQ ID NO: 124493 - RNA, 78 nt, Homo sapiens
caagaggaaagggggccagcaacccagacgcccacaggacaaaagagaagcgaaggacgacagccaggggaggacacc

SEQ ID NO: 124494 - RNA, 82 nt, Homo sapiens
aaacagacaggagacaaagggccgccgcaacccaaaggaacaccgggcgcccgccaggagccccagcccagccccgccagag

SEQ ID NO: 124495 - RNA, 78 nt, Homo sapiens
ggaaacaaggaagccccaagcccacagggagcaggcaacaaggacccaacagggcagccacaccgcccgaccaccccc

SEQ ID NO: 124496 - RNA, 74 nt, Homo sapiens
caaaccaagaagaggcggaaaagacaaccaaagccaagaagaggccagggggacccacggggagcgagggagga

SEQ ID NO: 124497 - RNA, 39 nt, Homo sapiens
gggcccagcgggccacaagccgaccgccgcgccacagag

SEQ ID NO: 124498 - RNA, 53 nt, Homo sapiens
acaaaggcgcaaggcaggcagagcggcaggcggggcagaagagaccgaagcag

SEQ ID NO: 124499 - RNA, 79 nt, Homo sapiens
cagcgaggacagcacgggggccccgaccgaaccagcgagggcagaaagggcccagccggcagagggaccggagaacgcc

SEQ ID NO: 124500 - RNA, 67 nt, Homo sapiens
caaaagcgagcgcaaggaggcagagaaagaacgccaggcaaacaaaagacaggaccacgaagccaag

SEQ ID NO: 124501 - RNA, 72 nt, Homo sapiens
ccccaagcggggaagcagaagccagcagaagaaagagaaaagaaaggcccgccaagacaccgaccgcacacc

SEQ ID NO: 124502 - RNA, 83 nt, Homo sapiens
gggaggcgcacgccaggaccgacgggaagaacgacaccgaacaccgcacagaaagcagaccaaccgacaccagaggaaacaaa

SEQ ID NO: 124503 - RNA, 73 nt, Homo sapiens
cgcccccagccagccaaaaaagaccgccccccaaaagccggccaacagagaggccggaacccaggagagggaa

SEQ ID NO: 124504 - RNA, 81 nt, Homo sapiens
caagccacgaccggcggggcgcgccaaggacacggcacaccgaccgacgcgccggccgcccgcaggacaccgagggcccag

SEQ ID NO: 124505 - RNA, 62 nt, Homo sapiens
gcggaccaaaaccgcgaccaagacaggggcacgggaggacggccagccggggccaaaaggaa

SEQ ID NO: 124506 - RNA, 74 nt, Homo sapiens
ggcagcggacaccaggaacccgagcccggaaaggagcaccaaaacacggaaagagaaaaccggccagagcagca

SEQ ID NO: 124507 - RNA, 73 nt, Homo sapiens
cagaaggagcaggaaccaaagggcaccggacaagagcagagaaagagacgaggaggggaccccaaagcagccg

SEQ ID NO: 124508 - RNA, 83 nt, Homo sapiens
gcacgaccacaccagccccgggggaacggggagaagacgcaggcagaaagggggcacaaggagcagacaaccagcaacagaca

SEQ ID NO: 124509 - RNA, 66 nt, Homo sapiens
ccgcgaggcccccgggcccgggaaaacacacggccagggacaagaacccaagaaacaggaaaaaac

SEQ ID NO: 124510 - RNA, 83 nt, Homo sapiens
ggaaggaagagacagagaggaacgaacccccaggggcgacagcaagaaggagccagcacagaggcaaaagaaccaacaaaggc

SEQ ID NO: 124511 - RNA, 66 nt, Homo sapiens
cagggcccccgagaaacaccggggccaggagacaggccgagcagaccccccagagggcagcacccc

SEQ ID NO: 124512 - RNA, 64 nt, Homo sapiens
acaaagaacgaaccaaggggggcggcgacggcggcgcgaggaccgaccgggcccgcggacgaag

SEQ ID NO: 124513 - RNA, 76 nt, Homo sapiens
ggagcgagccacgagcagcaaggaacaagggacaaaccaaagaccaaccaagaggccagagagcaacaccccccag

SEQ ID NO: 124514 - RNA, 57 nt, Homo sapiens
gaagcacaacgccaggagggcaagccagccaagcaaagacaagggaggcgaggacgg

SEQ ID NO: 124515 - RNA, 86 nt, Homo sapiens
gccggcgagcgcaccggagacgccgaaggaccggaggaggaccacgccgcaccccacaaggcaagccccgaggggaggccacgcac

SEQ ID NO: 124516 - RNA, 75 nt, Homo sapiens
ggaagcgcaaaaacaagacggggcgccccacagaggggcgacgagaaagaacagcaacccacagaaaagaagcac

SEQ ID NO: 124517 - RNA, 82 nt, Homo sapiens
caaaaccaagccaaacacaagcagaaggagcgaagaagagggaacagagcaacagcaaagcgaggcaaacaccgaaggagga

SEQ ID NO: 124518 - RNA, 67 nt, Homo sapiens
acaaggcaacagaaagagcaacagcagggcaacagaagcgaagcacgccaccgcgaagggcgccccc

SEQ ID NO: 124519 - RNA, 76 nt, Homo sapiens
ccaccgaggccccccggcaccgcgccgcgccggggcgcccggcacccgcgggaaagcggggcagcaaggcaaggaa

SEQ ID NO: 124520 - RNA, 80 nt, Homo sapiens
ggcagacgggagcgcaaggcgccccaaggccagacaaaacaggccccccccgcagagcgggaccgccagcaccgccgcag

SEQ ID NO: 124521 - RNA, 77 nt, Homo sapiens
caaggcacggagcccgcggagaacaccagagcaaagccaccccccgaggaaaaaaagcaaacaggggcaggaaaacc

SEQ ID NO: 124522 - RNA, 76 nt, Homo sapiens
cacccccggcacccccagacgcacacaacgaaggccagcaagccaccgggggacaggccgaaaccggagcacgagc

SEQ ID NO: 124523 - RNA, 68 nt, Homo sapiens
cgcaaaagcggccaggaaaaagaggaccagaagaaggacggccgaaggacagggacaaaggaaaaaga

SEQ ID NO: 124524 - RNA, 79 nt, Homo sapiens
agacaccgaagggccacccaggaaggaagaagaaagaagaaaccgcacagcaggccaagaaaaggagacggggcggcgc

SEQ ID NO: 124525 - RNA, 63 nt, Homo sapiens
ccacccccgcagacacgggggccaggggaaaccgagaaccagcgccgcaaacaggcacagaga

SEQ ID NO: 124526 - RNA, 77 nt, Homo sapiens
gcccccccagggaccagcaccggcaggagagagagcggagacaaggccacagcaggccacggcgggggcagccagcc

SEQ ID NO: 124527 - RNA, 80 nt, Homo sapiens
aaaagcgggcgggacagaccccaaaacgcccaaacacagggcgaccacagaaggaagggagaggaggagggaccacggag

SEQ ID NO: 124528 - RNA, 75 nt, Homo sapiens
gacacggcccggcaaccaagaaaggcgaaggaaaaccccagcgaaacaccaagagggcaccacacgaaccgaggc

SEQ ID NO: 124529 - RNA, 73 nt, Homo sapiens
cccgggcccgccccgacgcggccgcagcgccgcgcgcgcgggaggcgacacaccaaagaaaaaacacaccaag

SEQ ID NO: 124530 - RNA, 53 nt, Homo sapiens
gggcaaaaacggagaaacagacaccagccagccagcgggacacgcagccaagc

SEQ ID NO: 124531 - RNA, 78 nt, Homo sapiens
agaccccacccccacccgagcagccagagcggaccggggcagaccaaacggcaaggagcgcacgcggccgagggcgca

SEQ ID NO: 124532 - RNA, 81 nt, Homo sapiens
ggaaacaaccacgccccaagagaacacaagaaggcaagagcagccggcccagcccaccccaggcccccccagcccagcacc

SEQ ID NO: 124533 - RNA, 82 nt, Homo sapiens
gcaccacccggaggagaccggcagcaggcacacaaaccaaggcggaccagaagcagccggccgaggaggagcaaccaacagc

SEQ ID NO: 124534 - RNA, 81 nt, Homo sapiens
cccacccgcccccgcgggcgccgggccaggacggcaccgcaggcagcagaagaccggaggaccggggcgagggaccgagaa

SEQ ID NO: 124535 - RNA, 75 nt, Homo sapiens
acagaaaccggccggacgcaacaggggaccagcaaaggagcagggcacaaaggaaaaaaaccaccgcagcccaca

SEQ ID NO: 124536 - RNA, 80 nt, Homo sapiens
cacgaggaggcggcggccgacggggcggcgggagcagcgcagaacaaaaaaggaaacaaaaaagggccaagacagcaaca

SEQ ID NO: 124537 - RNA, 78 nt, Homo sapiens
gacaaagcagaccgaaacagaagaggcagggccggggggggcacagagccccggaagacagcccccagcgaccagacc

SEQ ID NO: 124538 - RNA, 72 nt, Homo sapiens
ccagacagcaagagcacccgacccacaggccagagaggggcaagaagaaacgcacagaaccaggaacaacaa

SEQ ID NO: 124539 - RNA, 75 nt, Homo sapiens
ggagagggcagaagaggaggaggcagacagaacaagaaagggacaccaaggcccccaagggggcaaggcaacaca

SEQ ID NO: 124540 - RNA, 71 nt, Homo sapiens
aaagaagccacgccaaaagacgaaagggggcgaccacagcccacgaaagaacgagacaaccaaaagaggaa

SEQ ID NO: 124541 - RNA, 66 nt, Homo sapiens
aggaagacgagccgggaggaacggcccggaaacaggaggacgcccagagggggaaccccgggcggg

SEQ ID NO: 124542 - RNA, 82 nt, Homo sapiens
gccgagccacgcggccacacacaagaaaagccagccaggagcggggaggaaacgccccagaaagagaccgcggcacgacaaa

SEQ ID NO: 124543 - RNA, 89 nt, Homo sapiens
cgcagccgcggcccggagccccggggcggcggacggccgcgggcaggcagcgagagacgaggaggaggggacagaggagcggacagcga

SEQ ID NO: 124544 - RNA, 41 nt, Homo sapiens
cgaaacagggaggcagacaaaggggccgccgaggccggccc

SEQ ID NO: 124545 - RNA, 75 nt, Homo sapiens
acggcaggaaggaggagacgaagaaaggagccagaaagcgagcgacggaacacaaacaggcggaaagaaacaaga

SEQ ID NO: 124546 - RNA, 76 nt, Homo sapiens
ccgcccgccggccccgacaccgcggaccaccgggcgcccgcgccggagaccccgcggcccagccaacccgcaacaa

SEQ ID NO: 124547 - RNA, 77 nt, Homo sapiens
gaaaaccgaagggaaggccagcagcgcgcggagaagaacggggagccagggacaagggcccacgacgaaagggaaag

SEQ ID NO: 124548 - RNA, 76 nt, Homo sapiens
cagcccgccgggacacaccccaggaaaaagacagcccgcagcacgaccagcaggaacgggcgaaccgaccaagaac

SEQ ID NO: 124549 - RNA, 78 nt, Homo sapiens
gaggggacgcgcacggcgggccggccaggagccgggggacgcaccaaagaagacagacacgcagaaaaggagccggac

SEQ ID NO: 124550 - RNA, 74 nt, Homo sapiens
acgaacccggacgaacaaagaggaaagcaggcccccccaaaggaccagcccgaggacaacaaccgacagccccc

SEQ ID NO: 124551 - RNA, 82 nt, Homo sapiens
cgcaagacccggcggggcggggaggagacgacggggagggcacgcccaagaagcagcgacacaggagagaacgagcgggaga

SEQ ID NO: 124552 - RNA, 84 nt, Homo sapiens
aaggaaagagccggaaaaggagcagaccggacgaggccacacacgccgggggaggacaagccagcacaggaacagcaggacagc

SEQ ID NO: 124553 - RNA, 103 nt, Homo sapiens
cagagacaggccagagggggccgccgcggcagcaagaacagagagagaggggacagacgagagaacgaggaagaagacggcacgggacccccagcacaggcag

SEQ ID NO: 124554 - RNA, 97 nt, Homo sapiens
gacccgcggcaacggcgccggcaggcacaacaaccaagaaaaacgggggccgccgccaagaaccagggccagagcacccgcgaggaaaaagccaaca

SEQ ID NO: 124555 - RNA, 76 nt, Homo sapiens
caagcggccaagcacaaagagcgccccacgagagaacggcacacgcgagcggacaacaaaacaagcgcagacgaca

SEQ ID NO: 124556 - RNA, 76 nt, Homo sapiens
gaggccccccagccagggaacaagcacgaggcagcaaagagagcaaaagcaccagaaaccagagaaccaaccacgc

SEQ ID NO: 124557 - RNA, 36 nt, Homo sapiens
cggaccggaaccagcagccaagaagagggaaagaag

SEQ ID NO: 124558 - RNA, 74 nt, Homo sapiens
ggacagcgcacacagcaagcacgagaaaggaagcggaagagaagaccggcaacaagaaaaaaagccagaaacgc

SEQ ID NO: 124559 - RNA, 69 nt, Homo sapiens
gaaaccccaccccggaaaggagagccagacaacaacaaaccccaaaccggacagaagggaaaaaagccg

SEQ ID NO: 124560 - RNA, 82 nt, Homo sapiens
gaaaccaccgccaggcggaccccaccccgggcaagagcagcggaggcagcgaaggagcaacaaaagagaacgaacgcagacc

SEQ ID NO: 124561 - RNA, 76 nt, Homo sapiens
cgaaggaggcgggagggaaggaggagaaacgcgaagagaagccgcggcggcgacaagggggcggcagggggaccag

SEQ ID NO: 124562 - RNA, 75 nt, Homo sapiens
gaacaaggaaaggaaagacgccaaagaaagcagcaacgaccaagacagagagaagggggaggacgcagccagaaa

SEQ ID NO: 124563 - RNA, 74 nt, Homo sapiens
cgccgccagacccgcgcgcccgcgccgccagcgccgcccccgccaacaggacggccacccggaagagagacagc

SEQ ID NO: 124564 - RNA, 59 nt, Homo sapiens
cccaggagacgacaagagcgggcacggagaaagccacgaacaggagagagaaaccaaca

SEQ ID NO: 124565 - RNA, 82 nt, Homo sapiens
gaagaagaaaccggcggccaaaaaaaaaaaaggaagcacaccaagcaaaagcggcaggcgacagaggcggcccaggacggac

SEQ ID NO: 124566 - RNA, 74 nt, Homo sapiens
gagggcacccccgcgcaccccaggcaacgccagcaaaaagaaagcggagacggagcggcggcaagcagcgagag

SEQ ID NO: 124567 - RNA, 78 nt, Homo sapiens
cacccagcacaccccgcgaaaggaggaggcacagaggaaggcgccagacacagaaaagaaagagagcaaccacccaca

SEQ ID NO: 124568 - RNA, 74 nt, Homo sapiens
gaaggccaccgggggagcggggggacaggaaagcagggggcgccgacccaccaaaggacccggagcaggaacga

SEQ ID NO: 124569 - RNA, 75 nt, Homo sapiens
cagagcgagggaccccaagcccgagcagacgaaaggaaacaaaacgccggaaggaaacccgaccgccccaggggc

SEQ ID NO: 124570 - RNA, 67 nt, Homo sapiens
ccaggcgaagcggccgagcaggcgagcgaacgacgcagccgagaccgacccgcccgcccgcggcccc

SEQ ID NO: 124571 - RNA, 74 nt, Homo sapiens
accgagcccaggagcgccacgcgcggaaggcagcgcccagcagcgcagccacagaaagcccgccccagacaggg

SEQ ID NO: 124572 - RNA, 69 nt, Homo sapiens
gccagaaaccaggaaaaggcaccgggagagggaaacaaggcagcggggcaaacaagacggagaacccac

SEQ ID NO: 124573 - RNA, 120 nt, Homo sapiens
caagaggcagaagagaaaaaaacccacagcaaaacgcccggacgacaggaaagagagaccagaggcggagcaagcggccccggaccaccacacagccaagcagcggagacaaaagaagca

SEQ ID NO: 124574 - RNA, 55 nt, Homo sapiens
agacagcgcagcaaggccacggcaagccccaaggacggggcccacgaggccagag

SEQ ID NO: 124575 - RNA, 72 nt, Homo sapiens
cacagcggagcgcccagaggcgagcccggggaggaagaggcccagcaagagaggaaaaccagacgcggaagg

SEQ ID NO: 124576 - RNA, 63 nt, Homo sapiens
cccacccgagaggcacacccagagagggacggaccccgggcccccccggccagggcgcaggag

SEQ ID NO: 124577 - RNA, 118 nt, Homo sapiens
aacaaagaggcaaaagcacaaacagcaagcacgacaagcagcacaccaagagcacacaggccaagaacccaaagcaaggcgagacaaggggccaaccagccagggccaacaaacagga

SEQ ID NO: 124578 - RNA, 89 nt, Homo sapiens
ggcaacaagaagcgcaacgcagaaaccacaagaggaagaacaccagacaagaaaaccggccgaagcaggccaaagaaagacggagaaag

SEQ ID NO: 124579 - RNA, 77 nt, Homo sapiens
gaggggcgaccaagcacgccaagccaacccagaaacggcgaggaaagagaggagccccggaaagaaaaggacagacc

SEQ ID NO: 124580 - RNA, 79 nt, Homo sapiens
gaacgggcaggagcggcacgcacccacccacgccaggaccccgccaaggagccccacgagagcaggcgcaaaaaccaga

SEQ ID NO: 124581 - RNA, 75 nt, Homo sapiens
gcaggggcggaggcggaggcagaggggaggcgcgaaaggaagcgcggcgcagccagacgcaaaaaggagccacca

SEQ ID NO: 124582 - RNA, 71 nt, Homo sapiens
gcacccaggcagcagaacgaggccccacccagcgcacacaccaccacacacggcggacccccccccagcag

SEQ ID NO: 124583 - RNA, 127 nt, Homo sapiens
ggcgcagcagaaccgcagccaccggcacggggcgggcagcggcgccgggcacaggagggaagagcaaggcgaaggaggggaggagaccacgagggcagccccaggcggaagaggcagccggcgaccg

SEQ ID NO: 124584 - RNA, 56 nt, Homo sapiens
cgggcgcacgggaggggaacgggccgaacgcagcccggccgaggggagggagggca

SEQ ID NO: 124585 - RNA, 75 nt, Homo sapiens
cccccggggagccagcgagcccccccgacacggccaaggcaccggggacaaggaagcaagaagcagcgggaaaag

SEQ ID NO: 124586 - RNA, 71 nt, Homo sapiens
ccgacccccgacgccgaccggacagcggcacagaggagggagcacacagcaagaaggaggccacagcaaac

SEQ ID NO: 124587 - RNA, 85 nt, Homo sapiens
acagagggagccaggcagaggcccgcggcaggcggggccaggcccgagccagaaggaggcccacagagccccccacacagcaacg

SEQ ID NO: 124588 - RNA, 59 nt, Homo sapiens
gcggaagggcacggcagccccggcaggccgcggagaaccgaaccaacagccagccaaag

SEQ ID NO: 124589 - RNA, 54 nt, Homo sapiens
gaccacaggggaaccccaggagcggccggcgcggaaagagaaaacaaccggcag

SEQ ID NO: 124590 - RNA, 75 nt, Homo sapiens
ggccaggcacccgggccagcaggggcagaggcaggagaaaaagagaagaaacgagcgaaaaaccacaccaagcaa

SEQ ID NO: 124591 - RNA, 79 nt, Homo sapiens
aaagacaaaaggagacaggacacagaacagaagcgaagaagggacgaaaggcagcagccgccgcaaagggacgacgaag

SEQ ID NO: 124592 - RNA, 58 nt, Homo sapiens
ggacccggcgcagaagcaacaaggagccagcccccacagagcgggagcgaccggacca

SEQ ID NO: 124593 - RNA, 49 nt, Homo sapiens
cgagcggcaaccgaaagccagcagcgggaaggccgcggacccccccccc

SEQ ID NO: 124594 - RNA, 90 nt, Homo sapiens
cagacagacgccggggaggcagcgcgggacccagcccaggcggcgcggacggggcggcacccaagggcgaaaaagaaaaaaggccaaagg

SEQ ID NO: 124595 - RNA, 52 nt, Homo sapiens
gaggccccccagccacgggaacgggcccccggacagccggacagcccagccg

SEQ ID NO: 124596 - RNA, 75 nt, Homo sapiens
ccagaagaaggaccggaagcacacaacaggaaaacaaaagaggagaaagggcccggcaggaaccggaacaaccca

SEQ ID NO: 124597 - RNA, 78 nt, Homo sapiens
ggcagaaggccaccaggcacgacccaccgcaacaccaccaacccaccggcaggaagagacgaagagaaaaaaagggaa

SEQ ID NO: 124598 - RNA, 84 nt, Homo sapiens
cccgggcagaggaagcgggggcaccccccaggggccgcgaggcaaccgccagaaccgagccggcaccggccccagcggcgcacc

SEQ ID NO: 124599 - RNA, 72 nt, Homo sapiens
acaaggcggaaaaagacaccaccaacggaaaacaacacagggcgacaagccaccccacgaccaacaaaggcc

SEQ ID NO: 124600 - RNA, 77 nt, Homo sapiens
gaaggaggaggacaaagagcccccacgagcccgcaagaccgacacacaagggagaacaggggaagcagccaaggaga

SEQ ID NO: 124601 - RNA, 104 nt, Homo sapiens
gccacacggacccgacgcgacgagggagcgaaccggagaaaggaggccggcgaggaaagagaccagaccgagaggaaacaaaacagagaggagagagagcggag

SEQ ID NO: 124602 - RNA, 85 nt, Homo sapiens
agcggagcacgggcaaggcggagaggacggagcggcgagcccccgcggcgacagaggacagcagcggacggccggaccaagaggc

SEQ ID NO: 124603 - RNA, 73 nt, Homo sapiens
aacaaacggccggcaccagaacccggaggcagccaccagacagaacgggaggcggacgccacccaaccaaagc

SEQ ID NO: 124604 - RNA, 59 nt, Homo sapiens
gaacaacacaaagcacaccgccaaacccaggccagagcacagacggagccgcggcgccc

SEQ ID NO: 124605 - RNA, 55 nt, Homo sapiens
ggaaagagggggacccaaggacgcgaaaggcaggcccaccgaagacagaaaaaac

SEQ ID NO: 124606 - RNA, 73 nt, Homo sapiens
gcacgcgagccgagcagggcccgacccagccgggggagacaaagcgagagccgagagaacggaagggacccag

SEQ ID NO: 124607 - RNA, 74 nt, Homo sapiens
acaaaacaaaaacggacaccagagaggacagaagggagaaagcaggagacaaagccagagagaacaacgaagga

SEQ ID NO: 124608 - RNA, 77 nt, Homo sapiens
cgaacggaggagagaaaccaagaagaaaccacagaagccaaccagccaagggaccgcagggagacggcaccaccacc

SEQ ID NO: 124609 - RNA, 79 nt, Homo sapiens
agccgcaccaccaacgcggccgacaacagccggcgccgccacgcggggcagcgacggacagggcgggggccgcccgcgc

SEQ ID NO: 124610 - RNA, 54 nt, Homo sapiens
cggcacaggaaccaggaagaagacggcacgggacccccagcacaggcagcaggc

SEQ ID NO: 124611 - RNA, 84 nt, Homo sapiens
gcggaaacgcaagacgggccgagaagcagcgcgagccggcaaagccgcgaccccgcagccaggcagcaacaccccaccccgggc

SEQ ID NO: 124612 - RNA, 73 nt, Homo sapiens
gcaccgagaggcagacaagacacccgcagggccaaccagaagacggagcaggcaaaggagaaaagccaagaag

SEQ ID NO: 124613 - RNA, 88 nt, Homo sapiens
ggacaccgcgcaaggccggcagaagggccaggccgagggcccgcccggccccaggagaagaaccagccgcagaggaggcgccggggca

SEQ ID NO: 124614 - RNA, 91 nt, Homo sapiens
ggaggccgccacgcccccgggccgacgccagaagacaaagagccaagaaaccccccacaaaccggaggacacccccagacgcagaagggca

SEQ ID NO: 124615 - RNA, 76 nt, Homo sapiens
acagcgagacacccaccagaagagggagaagcggagacaacaaggcgcccgcgaagagcccgcggccccaggcccc

SEQ ID NO: 124616 - RNA, 71 nt, Homo sapiens
gggagaccggggcacggacgcacgccacccgcgaccaggagccaaggcgagcgcaacagcagggacaaaag

SEQ ID NO: 124617 - RNA, 79 nt, Homo sapiens
gcggagacaggaccgcggcgagcaaggaaagcgaagccaacaaagaaaggaccggggcaaaacggccagaaggcccaag

SEQ ID NO: 124618 - RNA, 81 nt, Homo sapiens
cgggcccggccacggcggagccaagaggggggcgggccgagcacccgcaggccccgcagaggcgcccacagcggacggcag

SEQ ID NO: 124619 - RNA, 79 nt, Homo sapiens
cggggcacgccgaaagcccgccacaacggcagcgacaccgcagacaacccacggcaagccaaagagaagaggaagcccg

SEQ ID NO: 124620 - RNA, 84 nt, Homo sapiens
cagccgccggcgcgccgccaggaccaggaacccggagagcgaagacgggggcgacaaagcccaggggccaccaagcccaacacg

SEQ ID NO: 124621 - RNA, 57 nt, Homo sapiens
ggaaacagagaaagaaggcggccaggccaaccgaaggggcgaaacaccggaaaacgg

SEQ ID NO: 124622 - RNA, 70 nt, Homo sapiens
ggaagcgagggcacgggcggcagcccgagaccgcagcagaaacagacgaagggacacagaaaaaaggccg

SEQ ID NO: 124623 - RNA, 67 nt, Homo sapiens
aaaaacgcaagggagaacggcagcgggagcagggaggaacggagaaagccagaaggagcacaacagg

SEQ ID NO: 124624 - RNA, 72 nt, Homo sapiens
gggcccgaccgcagcgcgcagcgcgcacagaaaaagcgaacagacagacgaggagcagaaggaccccaaggg

SEQ ID NO: 124625 - RNA, 81 nt, Homo sapiens
gccgaggggacagaggcaccgcagcgagaggagcagccaaggaggccccaagcccggagcgccgccagggggcgcaggcgg

SEQ ID NO: 124626 - RNA, 76 nt, Homo sapiens
accggccaagaggccacggggacacgacgaccaagccagacgagggaggaggaacaaaacccaggggcgggcgcag

SEQ ID NO: 124627 - RNA, 85 nt, Homo sapiens
gggacagcccaagggccagcaccgcgcccaggcagagccagaccgacccagaccagccaaagaaacaaaaaaacgggaggagagg

SEQ ID NO: 124628 - RNA, 81 nt, Homo sapiens
ccagggacccggcaggccgcccccggcaagggccgagagagcgcgccacggcagcagcggggagccacaccagccgcccac

SEQ ID NO: 124629 - RNA, 68 nt, Homo sapiens
aaccacgaccacgaacaacccagacagaagaaagggagcccccaagaacagcgagcacaggaaggaaa

SEQ ID NO: 124630 - RNA, 83 nt, Homo sapiens
ccggccaagaggcaaaggggaggacgcagcaaaccaccagaaggaggccgccgagcggcgaaccgggagccggcaggcaccac

SEQ ID NO: 124631 - RNA, 55 nt, Homo sapiens
gaccagaccacccaggagaaggcggggccccgggccgcaccccccaccgcaaccc

SEQ ID NO: 124632 - RNA, 74 nt, Homo sapiens
aggacgcccaaacggaacagcgagacacgggacaaaaaccaaaggggccaacaggacaaaaccacgacagaagc

SEQ ID NO: 124633 - RNA, 72 nt, Homo sapiens
cccccgagacggaggagagggccgccccaccagcgcaaagaaccggagcgggccaagaagcggaaacagagc

SEQ ID NO: 124634 - RNA, 80 nt, Homo sapiens
caaagaaagcaacgagaaacccaaaccgaaaaccaggacgccacaggcacaaaaggccacaagggaaaaccacccaaaga

SEQ ID NO: 124635 - RNA, 68 nt, Homo sapiens
cgcagggcgcccccgggcagggcagcaggacaaacaaagccagagaaccccggcaaggcagcgcggag

SEQ ID NO: 124636 - RNA, 129 nt, Homo sapiens
cacaacaccagcacgcgagcggccacacggaggcagggagaaacggcccgacccccacagaggaaggagaacgaccgccagaagagaagaggaaggagaaaaacaaaaaagaggaggcaacgcgagcca

SEQ ID NO: 124637 - RNA, 42 nt, Homo sapiens
gcgcccagggggggaaaccaccggcagaacaaccgggagggc

SEQ ID NO: 124638 - RNA, 58 nt, Homo sapiens
gggaccagagcgccgcgcaccgcagccgcgcccggacgagaacccccgcgaaccagag

SEQ ID NO: 124639 - RNA, 77 nt, Homo sapiens
ccaggccccgccagaggcaaacccaaagcaaacagagcagaccaaccagcagccaagcaacccagcagcccacaagg

SEQ ID NO: 124640 - RNA, 52 nt, Homo sapiens
ccgccagccagagaacgcgagaccggggcgaaacaagaggcagagcaacagg

SEQ ID NO: 124641 - RNA, 55 nt, Homo sapiens
caaggaccgaaacagaaacggaacaccaagggaaaccacaaggcacacagaccgc

SEQ ID NO: 124642 - RNA, 59 nt, Homo sapiens
gcaagagccacaaagggaccgagaagcgaagacaaggacaaaccggcgaccacacacgg

SEQ ID NO: 124643 - RNA, 82 nt, Homo sapiens
gcggaaggcgggaccaagacgcgcgggagcccggcgccggagcccaaggaaagagacaaggaccaccagcgaaggcaacaaa

SEQ ID NO: 124644 - RNA, 63 nt, Homo sapiens
ggccgacaaggaggggaggccgcgggggcgggccagccgcagacaacaagggagggcacagcc

SEQ ID NO: 124645 - RNA, 79 nt, Homo sapiens
cgcacggaggcggcccgcccggaaggcaagcgcagcaacaacagagagcacggagaagacggaacaagaaaggaccagg

SEQ ID NO: 124646 - RNA, 75 nt, Homo sapiens
accccagccaaagccaacaagaccaagcccgcggacgccaggggccagacccacagccaaaggcagcgaccggag

SEQ ID NO: 124647 - RNA, 58 nt, Homo sapiens
gggggccccagccccacagaccagcccagcacaggaggacagcacaaaaacacaccaa

SEQ ID NO: 124648 - RNA, 73 nt, Homo sapiens
gccaaggagccaaaaaacccggggagccagaacagacagaagcacccgcggaccgcaccaggcgcagaaccca

SEQ ID NO: 124649 - RNA, 78 nt, Homo sapiens
ccccgacccccgaacccccagcccaaacccggaaacccagcggcccagccggcgaaggagaggaaaagaggacaaggc

SEQ ID NO: 124650 - RNA, 69 nt, Homo sapiens
caccgcggagcccgcaggcggacaacagggagccggcaggaaccagacgggaaaggggccccggcggcg

SEQ ID NO: 124651 - RNA, 78 nt, Homo sapiens
ccgggacccacccgggcgggcaaacagaagacgggcaaaagagcggaagaaccaacgacagaagacggagccgaggga

SEQ ID NO: 124652 - RNA, 71 nt, Homo sapiens
ccccaaaggcaggaacagaccagaaggaaaacacaccaggcacagaaaggccccccgccaagccaaggcca

SEQ ID NO: 124653 - RNA, 72 nt, Homo sapiens
ccacgacagacacaaggagggagaacagcacaaaaaccggcagaaaggaaacagaacgggggaaaaaggaag

SEQ ID NO: 124654 - RNA, 70 nt, Homo sapiens
agggaaccagcggacgcggaggcccaaccgaagaaaacaagggggaaagaagcagccgaaaggaagaaga

SEQ ID NO: 124655 - RNA, 76 nt, Homo sapiens
agcacacaacaaggagcaaaaggaggagaggaggacagacaaaaggaggcaagggacaacaggggaagagccaggg

SEQ ID NO: 124656 - RNA, 70 nt, Homo sapiens
gacagcgcgagcaaagcccagaaaccaaggagaaaaggacgaggaacgcggcagaacggaggcaggcagc

SEQ ID NO: 124657 - RNA, 79 nt, Homo sapiens
acaaggaaacacgacacaaaaagcaagcgggccaccacagaaaagccgccaggagcaaggcagcgacccagggcacagc

SEQ ID NO: 124658 - RNA, 77 nt, Homo sapiens
ggaggagacccgaccccagaagaggaagaaaagagccgcaacggaaaacaaagcccggaaaagaccgagcggcagca

SEQ ID NO: 124659 - RNA, 82 nt, Homo sapiens
gacgggcggggccgcacgggaccccggaacccgcgcgcgcccacgacgccgagcgagcgacgcgcccacggaggaggcgggg

SEQ ID NO: 124660 - RNA, 82 nt, Homo sapiens
agagggccccccaccccgccccgccggggcgccagcccacccagagaagccggagggccaagcgaaccaaaacccgggcaga

SEQ ID NO: 124661 - RNA, 72 nt, Homo sapiens
ccacaagacaacgcggagcggcgaagagcaaccagccgagaagaaaccgcaagaaagaaagcgggcacaaca

SEQ ID NO: 124662 - RNA, 71 nt, Homo sapiens
gacagaggagggaggaaaacaaccgagggcagagccaaagagcacagggacagaaaaacagcgcagacgag

SEQ ID NO: 124663 - RNA, 75 nt, Homo sapiens
ccacagacaccggagggccgcacaacagcgcagggacgccaacagccagcccaagcgaaccagaaagcaccacgg

SEQ ID NO: 124664 - RNA, 29 nt, Homo sapiens
caaggaacaaccggaaggaggaagcaccg

SEQ ID NO: 124665 - RNA, 72 nt, Homo sapiens
gcacggagaacaggacaggagaaaccggcagcagggccggcaccgccagaaggacgaaaagcaaaggcaaaa

SEQ ID NO: 124666 - RNA, 86 nt, Homo sapiens
caccacgacgaacccccgacgcacaagagagaggaaccagaaccaccacgaccaagaggccagaaccaccagagcccagcaaaaca

SEQ ID NO: 124667 - RNA, 74 nt, Homo sapiens
aagcggaaccagaagacacggccccagaaacgaaaacggacaaagaggcagaccggcgcggggagcaagggaca

SEQ ID NO: 124668 - RNA, 70 nt, Homo sapiens
gagccagccgcacggccagacagcggccccccacccggcgccccgggccagcgggacaccagcaagcagg

SEQ ID NO: 124669 - RNA, 64 nt, Homo sapiens
gaacagcgccgcggggagcaccgagcccagcacaggaaagagaggagaggagcgccggggcgca

SEQ ID NO: 124670 - RNA, 67 nt, Homo sapiens
ggacgggccccgagagcaagagcgcacacaagagggaagcgcaaacgaacagagaaacaccaaccaa

SEQ ID NO: 124671 - RNA, 97 nt, Homo sapiens
ggcagcaccccgcagacaccggcgacaccccggcagccgcggagaaccgaaccaacagccagccaaagccaggcagcacagcacaggaaaacaaacg

SEQ ID NO: 124672 - RNA, 67 nt, Homo sapiens
ccacagacggcgaaggcagccacagcgcccagagaggcggacgggaccggaggcacaaaagaagaaa

SEQ ID NO: 124673 - RNA, 79 nt, Homo sapiens
cgcggcgcgggcagccgggaggagacaacaacaagcccagagcgacgggcggaaacccaaaccccaaggaggccggcgc

SEQ ID NO: 124674 - RNA, 97 nt, Homo sapiens
accccaccgccggcgcgggaaacgggcgaagcgacgagccgcgaggagggacagcacaagaccacaaagaacggggcaaaccaagcaacggacaaaa

SEQ ID NO: 124675 - RNA, 72 nt, Homo sapiens
acgaagggaggaaaagggcagggacagcgcaggcagcagaccaacgcgcgagcgggaagacaacggacggaa

SEQ ID NO: 124676 - RNA, 68 nt, Homo sapiens
cgaggaggaaaggaggacgaggaaggcacacacagaaggccaaacaagaaaaccacacgccccacccc

SEQ ID NO: 124677 - RNA, 80 nt, Homo sapiens
gacgagaaaaacacgggcgccaggaacgcggaacagaaccaaaggcaggacagccagcagggaccggaagcccacggcca

SEQ ID NO: 124678 - RNA, 39 nt, Homo sapiens
aaaaaacccagaggcaaggagaccgaccacaaacggcga

SEQ ID NO: 124679 - RNA, 76 nt, Homo sapiens
gacccccccacgcacgcccgcgccgggaaccaaggaaccagaaggcccagacaggggccagcaaggaagagacgcg

SEQ ID NO: 124680 - RNA, 78 nt, Homo sapiens
ggcagcagggccgggccgcggcggccgcgccggccgacgcgccaggacccacaaccccagcccggccgaccgacagaa

SEQ ID NO: 124681 - RNA, 82 nt, Homo sapiens
ggaccagcgggaaggcagacagcgagggcgacgagggggccagaaccgcaagaccaccggagacacacagcaggcagcaccc

SEQ ID NO: 124682 - RNA, 39 nt, Homo sapiens
ccagaggccgcggccgcgaaggagaccagaaggagccca

SEQ ID NO: 124683 - RNA, 73 nt, Homo sapiens
aagaccgacgaacacacgagaccgacggagaaaagaaacgggagacccacaagagcggccaaaagaaaaccac

SEQ ID NO: 124684 - RNA, 89 nt, Homo sapiens
cgcagagagagagcgcgagagaggagagggcagacggacaagagcgcggaacaggacgccccgaacaggaaagagagacaaaaagcaaa

SEQ ID NO: 124685 - RNA, 76 nt, Homo sapiens
gggacgcgggcgcggcacgcgggcccgagcgcagccgcgcagggagaagaggcacccagcgagaaccgccggcgag

SEQ ID NO: 124686 - RNA, 50 nt, Homo sapiens
gcacagccggccgagggaccaacgaagggccgaacgcccaaaaaacgggg

SEQ ID NO: 124687 - RNA, 68 nt, Homo sapiens
cgagagccgcccgggccagcggccgcgcacccccggccggaggcaccagcccaagcggaagcagaagg

SEQ ID NO: 124688 - RNA, 60 nt, Homo sapiens
ccagcccgacagacagaggaggaccacaccacggagccaggaggaagccaggacacggaa

SEQ ID NO: 124689 - RNA, 78 nt, Homo sapiens
gggcaaggagccacgcaggcgggaaaggacgggacaaggaggacaaccccgacgaagcaggggagcggagcagaggag

SEQ ID NO: 124690 - RNA, 81 nt, Homo sapiens
caaggggagaagaaaaccggggggaaaggaggagaaccccgcgaaacgagaggaggagcggcgcagagagagagagaagag

SEQ ID NO: 124691 - RNA, 76 nt, Homo sapiens
ccgccagcgccagagcgagcgccccgcccagaacaacaagaaccagccaccaggaccaccagggcgggccgaacag

SEQ ID NO: 124692 - RNA, 75 nt, Homo sapiens
gcaaacagggcaacccgcagcacgcccagagggagccacacccacaacggcaagcggagaagagcaaggccgaac

SEQ ID NO: 124693 - RNA, 72 nt, Homo sapiens
agggccagggcgcaacaagagagagccgaagacacagagaccgcagggcaagacaaaagcacgcgagagcac

SEQ ID NO: 124694 - RNA, 84 nt, Homo sapiens
acagggacacccaccacacagaaggagcacacagagcacaaaagaagaaccgaggaccaagaccggaagggaaagcccagcagc

SEQ ID NO: 124695 - RNA, 100 nt, Homo sapiens
acccaagaacgagaccgagggaaaacacaaggaaggcagaaaaggaggaaaaaccagaagagaaaaaacaaaggggagaggcaccccgcgggacgaccgg

SEQ ID NO: 124696 - RNA, 79 nt, Homo sapiens
aaggaaagagaggcgacccagccaaagaccagaggagcgagagcagcaagaaccacacccagcagcaagcagcggaagg

SEQ ID NO: 124697 - RNA, 76 nt, Homo sapiens
accccagacgacacaaggcacacggggcacccggaccggagaggaggggagagcggggcccggcgcacccaccacc

SEQ ID NO: 124698 - RNA, 49 nt, Homo sapiens
gcagcgacagaccgaaagagcacgaggagcagcacggacgagagaccgc

SEQ ID NO: 124699 - RNA, 75 nt, Homo sapiens
caccgaggagagcggccgccggacaacaggcacaaagagagaaggaacacccacagggcagacagagaaagaaca

SEQ ID NO: 124700 - RNA, 71 nt, Homo sapiens
cgacagccggcaaaacgaaaaaacaaggaaaaacggagagccaagacagcaaaagacccagcagacgcgcg

SEQ ID NO: 124701 - RNA, 75 nt, Homo sapiens
cggccaacacgcaggggcagacagcaggacagcgacgcgagggcgggaggaggaagaagaagccagaacacaaac

SEQ ID NO: 124702 - RNA, 69 nt, Homo sapiens
gcgaggagaaacacacccagagggacagagcacacccacggcaacgcacagaaacagaacacccaccca

SEQ ID NO: 124703 - RNA, 76 nt, Homo sapiens
caagagggaaggggacccgccgggaggacgcgccccaggcaggccacacaagccccgaaaaaccacaggaacacag

SEQ ID NO: 124704 - RNA, 81 nt, Homo sapiens
ccccccaggagagcgccccagggcaagccccgcccggccaacaaggccacccccaaccaggaccaaagacgaccaccaaag

SEQ ID NO: 124705 - RNA, 92 nt, Homo sapiens
ccccggccgaggcggcgccagacaccaccgcggaccccgccacgcgcccggaccccgccaccaagagagcaccagccaggacgcccacccgg

SEQ ID NO: 124706 - RNA, 72 nt, Homo sapiens
ggaccaagaaccagaccggggaaccagcaccccagaaggaggagagccagagcccacaaccagaaagccgag

SEQ ID NO: 124707 - RNA, 77 nt, Homo sapiens
caaaaaaaacagcgaacggccaaccaacggacagaaccaggcggaagaggagaaggccagggagggcagccccccag

SEQ ID NO: 124708 - RNA, 75 nt, Homo sapiens
accaccagggaccggcaaagaccagaacaccccagaagcagcggcacaccagaagggacaagacaaagcaagcga

SEQ ID NO: 124709 - RNA, 85 nt, Homo sapiens
cgaaccccgcccgagcccgccggaccccccgacccaggcccaccgccggcgcaggcagcacagaagaacgaagaaggcaacaaga

SEQ ID NO: 124710 - RNA, 54 nt, Homo sapiens
gccgaccagagaacagaaagccaaggacacgcaggacgaagaaggaggagagcc

SEQ ID NO: 124711 - RNA, 73 nt, Homo sapiens
cccacagccccacccaggcagacgcccggacgcacacgggcccccgcccccacccaccccaacgcgacccggc

SEQ ID NO: 124712 - RNA, 72 nt, Homo sapiens
cgccgcggccacgcgccgacccaaagacaggaccacgcaccagcagagaaggaaagcaaaccgaagcaggcg

SEQ ID NO: 124713 - RNA, 92 nt, Homo sapiens
ggggccccgagcagggggggggggaagccgcagcggaaagcaggagcacagaacaaaaccagccaagcagaggagaaaaagacagcacccca

SEQ ID NO: 124714 - RNA, 82 nt, Homo sapiens
aggcgcgcgcgcggcacaccgaaaagcaaaccaagccgcccccaggcggagcaagaagacccaccaagcacgcgccacccgg

SEQ ID NO: 124715 - RNA, 75 nt, Homo sapiens
gacgcgccggcccacgcgcggccaagaagccccccagccgaggagaacggcaaaaagcgagggagacaacaaggc

SEQ ID NO: 124716 - RNA, 72 nt, Homo sapiens
gccagcccggcaagagcaccagaagcggccgaggcggcaaagaaacggacagcagaccacagcccggcaggc

SEQ ID NO: 124717 - RNA, 56 nt, Homo sapiens
gcccaccaagccagcagacgccgggcagaaccagaaagccggaaacaagccaccgc

SEQ ID NO: 124718 - RNA, 68 nt, Homo sapiens
cacagcaaacccacccagcacaccccgcgaaaggaggaggcacagacacaggagggagcaggaaaaag

SEQ ID NO: 124719 - RNA, 77 nt, Homo sapiens
gaagcagaaaacgagcacccccgagcggaaaacgccagcggacaaaagggacgcgcggagaccgaacacgcacagac

SEQ ID NO: 124720 - RNA, 81 nt, Homo sapiens
ggaaaaaccgaaaagagaacaagagaggagaaaccaagccaaggcgagaaaaggaaaaggaaagggaaaaagcgcccagcc

SEQ ID NO: 124721 - RNA, 105 nt, Homo sapiens
aaaaaaaggagacgaagaaagaagagaaagcagcagcacccaaaccggggagaaggcaggcgaacgaaggagggcgagggagcaaggacaccgcggagcacggag

SEQ ID NO: 124722 - RNA, 78 nt, Homo sapiens
agcgaaggcaaaaccaaacaccccagcccacagagagcaaaacacaagagagcagggaggagccgccgcggagaggcc

SEQ ID NO: 124723 - RNA, 63 nt, Homo sapiens
cggagacagcacgcacgaaacagaaacaggcacccggcccacaggccacccgccagacgcagc

SEQ ID NO: 124724 - RNA, 61 nt, Homo sapiens
gagacgggaacaaaagccaggcacaagaaagcgaaaaaccagggaaaccagaaggcacgac

SEQ ID NO: 124725 - RNA, 79 nt, Homo sapiens
gggcgaaggagccggcccaaggaccagggaagacacgggagcgccgccgccggagggcaggacgaccccgcgaccccac

SEQ ID NO: 124726 - RNA, 56 nt, Homo sapiens
cggggggcgacccgcagggcgcagcccaggacaccgcgagcaagccgacgggacca

SEQ ID NO: 124727 - RNA, 87 nt, Homo sapiens
cgcgcaccccgcggacgccacagcgcgccggccacgggagagagcccgagaaggaacgggacgcagccgcacaagcggcccgacgag

SEQ ID NO: 124728 - RNA, 73 nt, Homo sapiens
ccgcccagccccaagagcgggagacagcgggggagccggaaggacgcacaaccacacacggacacccacagaa

SEQ ID NO: 124729 - RNA, 86 nt, Homo sapiens
cgggccccgcgcacagccccagcgcaggaaacaggaacacgaaagaggaaaaacgcacaagaaaccgaagccaaggaggagaggag

SEQ ID NO: 124730 - RNA, 71 nt, Homo sapiens
caccagccccaaaaggcggcaacaggggcgcaagacaaacccagaaaacagaacagggaagccggaaacca

SEQ ID NO: 124731 - RNA, 66 nt, Homo sapiens
aagaacaaccagaagaaggcgaaaccgagggaggaagacaccccacacagagggacagacggaacc

SEQ ID NO: 124732 - RNA, 49 nt, Homo sapiens
agcccgcaagaggccagcgaaaaccgaagccacagcaaggaagggcgaa

SEQ ID NO: 124733 - RNA, 78 nt, Homo sapiens
caggcacagaagcacgaaaaagcgggaaggccggaaaggaccagaccgcccaggaaacgggcaagaaagccgagggaa

SEQ ID NO: 124734 - RNA, 70 nt, Homo sapiens
gacaagagaaccaccgggaccacaggaacaagcagaaagcacgaacaacgagaacaagacacgagcaaac

SEQ ID NO: 124735 - RNA, 80 nt, Homo sapiens
accgcggcgcagacagccaaggagacggccgcaccgcgaggaacccgagcccaccggcagcaccgcaccggagccccggc

SEQ ID NO: 124736 - RNA, 77 nt, Homo sapiens
gcaagcgcgggacaggacagcaggaccaggccggagaagcaggaaaaaccaaagaaagcggccaaaggcgacaaaag

SEQ ID NO: 124737 - RNA, 37 nt, Homo sapiens
acccagggcgagaaagaggagcgaaggcccccagagg

SEQ ID NO: 124738 - RNA, 60 nt, Homo sapiens
cgcgcacccccggccggaggcaccagcagcgaagaagcaggggagaggccgagcgaagaa

SEQ ID NO: 124739 - RNA, 76 nt, Homo sapiens
gaagacacaggccccgagggcgggggacagacaccaacaccaagcggggagaggaagaaacccaccacccggacga

SEQ ID NO: 124740 - RNA, 51 nt, Homo sapiens
gacaaggaaacaaacacaaacgggacagggaaggccgccaaggggaacaga

SEQ ID NO: 124741 - RNA, 78 nt, Homo sapiens
gagcgccagagagagaagacggggggcgaaaccaccaccaccgcccgcccaaggccggcccacagcccaaaaagaaac

SEQ ID NO: 124742 - RNA, 76 nt, Homo sapiens
aaccgcaagggggccagggcaaacagcgaaaaccgaaacaggcggccacacacccggagcaccgcacacagcggca

SEQ ID NO: 124743 - RNA, 79 nt, Homo sapiens
caacgggagcaaagcacagccgggccaaaggaaagaacacaggacagcacagcaaaaccaaagccaggcggacccccaa

SEQ ID NO: 124744 - RNA, 71 nt, Homo sapiens
agcacggacaaaggacggcaaggcgcgccaagcgcaccgcaaaccggggaccagcggggggccggcaaccg

SEQ ID NO: 124745 - RNA, 80 nt, Homo sapiens
acaaccaacgaagacaccgagcgaaagagaaagagggcaacagaagacacacaaagaccacaagccagcagcacaccccc

SEQ ID NO: 124746 - RNA, 80 nt, Homo sapiens
gcccgacacaggagcgggcagaggagcagggaggccacaggggccgaaacacagagcaaggaggagccaccgacccaggc

SEQ ID NO: 124747 - RNA, 78 nt, Homo sapiens
gacccgaccccgcaacccagaacccggcgaccacgaaggaggagcccagcagagccacagacgagagggcagacccgg

SEQ ID NO: 124748 - RNA, 67 nt, Homo sapiens
ggacagacacccaccggcggaacaggagcagggagcccagagaagagacaggaaggggaccaaaaaa

SEQ ID NO: 124749 - RNA, 82 nt, Homo sapiens
cccaagccgcacagccgcggcggcagcagcaggagagggcggagaacggaaaagcaccaggaagcagagaggaccgcagaag

SEQ ID NO: 124750 - RNA, 74 nt, Homo sapiens
ccacagagagagagagggaggggacagggacaagcgcacagcggagaaagcagcgcggccaggaggcgggaaag

SEQ ID NO: 124751 - RNA, 76 nt, Homo sapiens
cgggcgcgagagcgaggaggcaaaaaggcggcaaacgccaagggggaaaacaggaagagaacgaggagcaacccaa

SEQ ID NO: 124752 - RNA, 75 nt, Homo sapiens
gaagggcagcaggagaagggcccacggaaccaaggaccaccaacccagggcaggcacggccacgacagggccacg

SEQ ID NO: 124753 - RNA, 40 nt, Homo sapiens
acacacaagggccaagggagccaaggccgcgagacacggc

SEQ ID NO: 124754 - RNA, 53 nt, Homo sapiens
gaacagggacagccgaacaacacaccgaagaaaagagacagcccggggacccg

SEQ ID NO: 124755 - RNA, 83 nt, Homo sapiens
cgaccgagccacacccgcgcgggccaacgggggagacaaccggagcagggaccagaacggcagcgcggagggggccgcacgga

SEQ ID NO: 124756 - RNA, 72 nt, Homo sapiens
gcgcccgggaaaagaacccgccaaaacacagcgaggagacagagaccaggaagacacgagcagaaggaagag

SEQ ID NO: 124757 - RNA, 82 nt, Homo sapiens
ggggaagagagagaaacaaaagcgccagagccaagaacggccggagcccaacagaaagcccagccccccccaccgccaccac

SEQ ID NO: 124758 - RNA, 76 nt, Homo sapiens
cccccacagccccgcgccgccgaccccccggcgccgcgccggcggcgagcgcacagcgaggaggggggcgcgcagc

SEQ ID NO: 124759 - RNA, 75 nt, Homo sapiens
cagcccgacagcggggcccccgcggggggcaaggaccaccacgggaggacgagcgcccagcacgcccagccagcc

SEQ ID NO: 124760 - RNA, 73 nt, Homo sapiens
gaaccacgcccgcaccagccacgaacccgcgacgccaacagaggagaagaggagaacagcaagcccaaaaaag

SEQ ID NO: 124761 - RNA, 74 nt, Homo sapiens
aacgcaggcccccgagggcagcccgagacccaccagagggcgccacaaacggggggagagcgaggagccgaaga

SEQ ID NO: 124762 - RNA, 74 nt, Homo sapiens
ccggggcgcccggcgccggccgagaaggcagaggcgaggggaaagaaccagacgacaggaaggcacagaacgaa

SEQ ID NO: 124763 - RNA, 84 nt, Homo sapiens
cccgccggggcacgcgcgggaaagcggcgcgagacaacgccgcaagcgcggcaggagaaggcggaggggccgaggggaccaagc

SEQ ID NO: 124764 - RNA, 56 nt, Homo sapiens
gagaagcaccggggaaaggaggcaagcggagcagaacaagagcaacgaagggaggg

SEQ ID NO: 124765 - RNA, 58 nt, Homo sapiens
cagcaaggcaggacaacacaggggggggggggagcaggaaacaggaacacgaaagagg

SEQ ID NO: 124766 - RNA, 94 nt, Homo sapiens
agccgccggaaaaggccgccgccgccgccgccgcgccgagcggaggaggaggaggaggcgaggaggagagacgcaaggggagagccaggcgcag

SEQ ID NO: 124767 - RNA, 97 nt, Homo sapiens
aggaagcaaaaaaaaacggagaaggcagaggaacgagccaagaaaccaacggaggaaaggaagccgggggaccaacaacaaagcacacggacacagg

SEQ ID NO: 124768 - RNA, 79 nt, Homo sapiens
aagccagaagcaggagcccgaagcagcgacccgaccaagggagcaaggagcagccgggaagcagcgggagagcagcaga

SEQ ID NO: 124769 - RNA, 82 nt, Homo sapiens
cggagcaaggaaaaaaacccgacagcagagacagagaggagccaacccccagaacccaacaagggagggcaaccggaaagga

SEQ ID NO: 124770 - RNA, 74 nt, Homo sapiens
gacagagcaaccaggaaagaagagggcagggccaaagacccagggacaggacgggcaacaggggaaccaaggca

SEQ ID NO: 124771 - RNA, 73 nt, Homo sapiens
ggagaagaaacagagagaacaggaagacgggaagccaagcaggacaaccacaaaagcagcaaacagaagccag

SEQ ID NO: 124772 - RNA, 75 nt, Homo sapiens
aaaggacacacagggagaaaagcgcacacccaaagcacacaaggcaaccaagaaaaagcacgccacgaagagaag

SEQ ID NO: 124773 - RNA, 72 nt, Homo sapiens
ggcgcgaggaggaaaggaggacgaggaagaagacggcacgggacccccagcacaggcagcaggccgggagag

SEQ ID NO: 124774 - RNA, 81 nt, Homo sapiens
gacaacacaagaccacagaaacccgacagcggagcagaggcacggcagaaagggggagagagagcggagccggaacagcaa

SEQ ID NO: 124775 - RNA, 83 nt, Homo sapiens
cacgcgagacgcagccccggccaaacggccagacgccgacgcgaccagcagagacgcaaggagcagggacaagacaggaagcc

SEQ ID NO: 124776 - RNA, 71 nt, Homo sapiens
agcgccagaaagagagagcagagaccggacaacaggaggagagaccagcagcaaacccacgcggcgcaccg

SEQ ID NO: 124777 - RNA, 81 nt, Homo sapiens
caacgcagaagacaagaaagagaaaccgaaccagaaggacaaccagggaagcagaaggcaaggaccccggcaaggagaaac

SEQ ID NO: 124778 - RNA, 73 nt, Homo sapiens
cagcagcggaaaaacacagagggcacacggcacagaccagcacgaacggggcagagggcacggacaaaagagc

SEQ ID NO: 124779 - RNA, 34 nt, Homo sapiens
ccccgggcgaaggcagaaggcggcagggagcacg

SEQ ID NO: 124780 - RNA, 80 nt, Homo sapiens
ccaggaacaggacgaagaccagcgccagggaaagaaggacgccaaggaggcccgaacggcgcagagcaggagcagacgcg

SEQ ID NO: 124781 - RNA, 54 nt, Homo sapiens
gcgcaggacccagagaaggacgaaaaggcccaggccggcggaaaacccaccgcc

SEQ ID NO: 124782 - RNA, 78 nt, Homo sapiens
aaagcgccgccgccggcccgggagcgcaacacgcagacaagcaacgcaccacaacgggcgagcacaacgaaccagggg

SEQ ID NO: 124783 - RNA, 74 nt, Homo sapiens
ggacgcgaccacgacaacacaagcggccggcagcgggcaagaaaacaggcccgacaccggggccgcgcgcccgg

SEQ ID NO: 124784 - RNA, 83 nt, Homo sapiens
ggaggacaccggcaagggacagcacccccccaggcagcagcagcagcaccggagacaagccccagcccaggggcccggcggag

SEQ ID NO: 124785 - RNA, 75 nt, Homo sapiens
cgcgcgccacgcgccaggagcacgcacgggggcccgggccgaccgagcaccaggcggaccaagaaaacggggaaa

SEQ ID NO: 124786 - RNA, 97 nt, Homo sapiens
aaccgaagaacaagaagcaacaaggcaagaaaaaggaaccgaagaacaaagggcggcgacggcggcgcgaggaccgaccgggcccgcggacgaagaa

SEQ ID NO: 124787 - RNA, 83 nt, Homo sapiens
acacccaggcgcggagggaagacgcccgggccaccaagcaaggagaaggacagaacggcaaagacccaaggaagagagagaaa

SEQ ID NO: 124788 - RNA, 79 nt, Homo sapiens
ccaccacgcgggaagagaccagcgaagaaggcccgaggaaaggggagccgccaccaaaagcagacggaaaacccacggg

SEQ ID NO: 124789 - RNA, 62 nt, Homo sapiens
accagagggcaaaccggcaggcgcccggacacagaagaggacaggagaaaagaaagccagaa

SEQ ID NO: 124790 - RNA, 77 nt, Homo sapiens
caaaaacaaccagggcacaaccagggcagcagggagcaggggagcagcaagccgggaaacagcgcgcccagaaagcc

SEQ ID NO: 124791 - RNA, 67 nt, Homo sapiens
cgacggccagagggaccggagcaaaaagcgcacgcaaggaaaccggccccgcgagaccggcgcggcg

SEQ ID NO: 124792 - RNA, 65 nt, Homo sapiens
ccccggcccacaggggggggcaaacccgagagaacggcaaagcccagacaagccagggaacgaag

SEQ ID NO: 124793 - RNA, 74 nt, Homo sapiens
gagacaggggccaaacccacaggcccaggaacagcaggcccagcaaaggagaccccccagaaacagccaacaca

SEQ ID NO: 124794 - RNA, 81 nt, Homo sapiens
cacagacaccgccacaggagagagcaaggaaaccccccaggcaagaggcgcaggaccgggaagaccaacaaacgcaccgcg

SEQ ID NO: 124795 - RNA, 80 nt, Homo sapiens
acaaagagagaagaggcgggagcacggagccaagcaaggagaaaaggagacggggccagggagaaaggaaggccaggagc

SEQ ID NO: 124796 - RNA, 47 nt, Homo sapiens
cggaaccaaggaccaccaacccagggcagcacgcaagcaaaacgacc

SEQ ID NO: 124797 - RNA, 67 nt, Homo sapiens
gaaaagacccccagacgaacaagaggcagagcaacagggacacaagcaagaagaaagggaccgacag

SEQ ID NO: 124798 - RNA, 40 nt, Homo sapiens
acaaaagcaacaaagaggggagacaacgagcagcagaaga

SEQ ID NO: 124799 - RNA, 73 nt, Homo sapiens
caggaaccgccccgagaggaaacacccccagaagaggcgcccggcggacacaggacggccaccaggcagcaag

SEQ ID NO: 124800 - RNA, 58 nt, Homo sapiens
aggagacgcggaggacagcccgcagcacccagccaaacccaggcccgagaagaagagg

SEQ ID NO: 124801 - RNA, 53 nt, Homo sapiens
aaaaagccaggcccaccagcagaaagaacaggagcagcagggacggccgacaa

SEQ ID NO: 124802 - RNA, 82 nt, Homo sapiens
agacggcgaaagagccagcaaaacaggaagcgccaggaaacacaacgcaagggccaacgcaaaacacagccaaggccaacca

SEQ ID NO: 124803 - RNA, 70 nt, Homo sapiens
aggcgagaggaagacgacgaggaagagcccgccgaaggggcaaaaggaaaaaggaaaccgggcggggcag

SEQ ID NO: 124804 - RNA, 113 nt, Homo sapiens
agcccaagcgcagcagccccaagggcaccacgcagcaccaggggagaagccgcagaggaggcacgaccgggcacaacgacggcgcaaggagaggaggggggggggggcacagc

SEQ ID NO: 124805 - RNA, 78 nt, Homo sapiens
ccccacgaagcaccgacccggagggcaaaaaagagaagcgcagcgaaaagaagagcaccgaggaacggcagcacccca

SEQ ID NO: 124806 - RNA, 80 nt, Homo sapiens
ggccccgcaccaggaggaggacgacagcacggacgaacagcccggagaggccaccggccaacagcgacacgaggagaaga

SEQ ID NO: 124807 - RNA, 70 nt, Homo sapiens
caccaccagggaccggcaaagaccagaacaccccagaagcagcggcagcaagcaaaacccagaaccagag

SEQ ID NO: 124808 - RNA, 77 nt, Homo sapiens
caaccaagcgcagccaagaagcgaaaggccaggccaccacggacggagccaccgccccaggcggagacagggcaaga

SEQ ID NO: 124809 - RNA, 75 nt, Homo sapiens
cagaggccaaaggcaggagcccaccaccaggaggccgagaaggacagagaaccgggaacaggcggacggccagcc

SEQ ID NO: 124810 - RNA, 125 nt, Homo sapiens
gcggcagcgaagacccggccgcccagagagcgggggggggaccgccggcacgcgacccccccgggcccaaagggcccgggcagagggaaagcagaggacggaacaacccgggggaccgcgggggc

SEQ ID NO: 124811 - RNA, 58 nt, Homo sapiens
cagggcggaagcccgccccagagcaggaaggaacggccaggagaacaaccagcaccgg

SEQ ID NO: 124812 - RNA, 71 nt, Homo sapiens
caggaagggacccacgagaagacgcagaggcaaaaaccacaagcagaagagacaacacagaaaccagggcg

SEQ ID NO: 124813 - RNA, 67 nt, Homo sapiens
gaagagcgccccaggagaaacaaagccacccagagccccacgaagacgagcagacccgggacgaggc

SEQ ID NO: 124814 - RNA, 74 nt, Homo sapiens
cccgacccggagcgacgacggccgcgccaagcggaaaggcaacggagacagaaaccaggaggccaagcaaggga

SEQ ID NO: 124815 - RNA, 75 nt, Homo sapiens
cacggccccccaccagcccaaccaccccacacagaccgcgccccaggcgaccacacaccacgccaccagagaggc

SEQ ID NO: 124816 - RNA, 81 nt, Homo sapiens
ggacgaagaggggagaaggaagcgagaccaacgcaacccaagaagcaaaccagccccagaaaagaaaagaagcaggcccgc

SEQ ID NO: 124817 - RNA, 84 nt, Homo sapiens
gagggacagccccaggagccggggccgcagccaccaggacgcaaagacacacaccagagggagcaccgacggcaacacggaggg

SEQ ID NO: 124818 - RNA, 86 nt, Homo sapiens
cagaaggagcaggaaccaaagggcggaggcaaagcggaaaggacaggggaaggccaaggcaaggcagaccgccacagagagcgggc

SEQ ID NO: 124819 - RNA, 34 nt, Homo sapiens
caagagagaaaagccaaggccaacggagagacac

SEQ ID NO: 124820 - RNA, 81 nt, Homo sapiens
cggggagcgggggggcggggacgggaggagcaggggcagaggagacagggcccgaccagccaaaagacacacgggccagcg

SEQ ID NO: 124821 - RNA, 73 nt, Homo sapiens
acggggggaggacccgaccaggacccaaaccaaaaagggggaagaaagaaaaccggccagcagcagccacgga

SEQ ID NO: 124822 - RNA, 73 nt, Homo sapiens
aacgaagaaaggccgcaaggcacaaagacagcagaagacggaaggccagcagcaacgagaaacagaacaaagg

SEQ ID NO: 124823 - RNA, 59 nt, Homo sapiens
ggaggcgaaggaccgccccgccaggacaaccagagggaaaaaacaaaggcagcacggcc

SEQ ID NO: 124824 - RNA, 78 nt, Homo sapiens
gcgaccgacgccacacgggcaggcgcccgcaggacccacgacggcgaaccagacggggaaagagaggcaaaacccaaa

SEQ ID NO: 124825 - RNA, 68 nt, Homo sapiens
cggggggcgggccagccacggcaccgcgccgacagggcagaagcacaggggagaagcagaccgcacca

SEQ ID NO: 124826 - RNA, 90 nt, Homo sapiens
gcccgcgaagagaagcaggcggccagcccacggagcccaaggagcgaggagcgcggacaagaagagagaaacgcagcccagcggagcggc

SEQ ID NO: 124827 - RNA, 83 nt, Homo sapiens
agcagaagccgcaacaggaaagcagcccgaaaaagacgcgagaagccacacgaaaaagggcaagaacgagcgaaccccacccc

SEQ ID NO: 124828 - RNA, 62 nt, Homo sapiens
aaagggaaggagaaggagggacgcaggcgcaggccagggggacagaggagccaaaggccaaa

SEQ ID NO: 124829 - RNA, 76 nt, Homo sapiens
aaggggggccccaaacgaggcagcacacggaacggaccccagggaaagagaacacgaccagcgcgaccgcagcccc

SEQ ID NO: 124830 - RNA, 82 nt, Homo sapiens
gcgacccggcgaagggagccgaccgggcccgggcggaggaaaaccccacgggcggacacaagacagcgaacgcaagaggagg

SEQ ID NO: 124831 - RNA, 70 nt, Homo sapiens
gaagaccaaaacagggacagggcgaagcacagaaccagcacgggacaagacggacagaaacgaacagcgg

SEQ ID NO: 124832 - RNA, 32 nt, Homo sapiens
agaccgaccaccaaaaggggcggggacacaac

SEQ ID NO: 124833 - RNA, 58 nt, Homo sapiens
cagaccggaagacccgacggaagaccacacccgaagggaacgggacaccaagcagaac

SEQ ID NO: 124834 - RNA, 76 nt, Homo sapiens
agaccgcccagaaaaccgcagaccgggccgggccgccacaggagggaaggccaggacaggggaacaggcacacgag

SEQ ID NO: 124835 - RNA, 79 nt, Homo sapiens
cggacaagaagggacacacgcgccggcgcgcacacaccacgggcgaggcaacgacagagcacccgacccaggcggagga

SEQ ID NO: 124836 - RNA, 77 nt, Homo sapiens
caccccaccgcgcagggagcggcgcgaccacaagcgagcaggaagcagcagcgcaggcccaggacggagccaggacc

SEQ ID NO: 124837 - RNA, 68 nt, Homo sapiens
aacggggagaccaaagaacccccaggcagaaaaccgcgcgggagggggcaagccaccaggaggggccc

SEQ ID NO: 124838 - RNA, 68 nt, Homo sapiens
aaaaaaaccacaaagcggccgaaacagaaaacaagagaccacagaaggaacgccagacccgggaggga

SEQ ID NO: 124839 - RNA, 82 nt, Homo sapiens
ggggccgggcgaacagccgccaccggccccgcccgcgaccaggccccccgaggggcgcggcaccggccaggccacacaagcc

SEQ ID NO: 124840 - RNA, 79 nt, Homo sapiens
aaggcaagagcagaggccccagaccgccaagaggcacagcaacaaaggccaggggcagcaccccaccagccacccccca

SEQ ID NO: 124841 - RNA, 84 nt, Homo sapiens
gaccaccgcacacccgacacagcggagcgcccagaggcgagcccggggaggaagaggggaccacgggagaggaggaagagaccc

SEQ ID NO: 124842 - RNA, 71 nt, Homo sapiens
agcgggaaacgggagggaaccagcaacaagccgagcggggacgggaaagagggcagaagcagcaagaaaag

SEQ ID NO: 124843 - RNA, 61 nt, Homo sapiens
cgggagaagaaaagacgaacgcacaccagcaccagcccaccaaaccagcacgaccccggag

SEQ ID NO: 124844 - RNA, 81 nt, Homo sapiens
gcgaggcggcggcagcgagccgggcccaccaggccgcgaaagccaaagggaccgggacaggggaagaaaagaagaagaaga

SEQ ID NO: 124845 - RNA, 58 nt, Homo sapiens
gcgacccgcaccggccgcgcgagaggggcacaaccacagacaacgacaccaaaccgag

SEQ ID NO: 124846 - RNA, 75 nt, Homo sapiens
cccggacaaagacccggaacagacaccaagagcccagcccggagcaccagggggccaacggaacacgacagacag

SEQ ID NO: 124847 - RNA, 31 nt, Homo sapiens
cgagaaacccacgaggccgggggggcaaagc

SEQ ID NO: 124848 - RNA, 68 nt, Homo sapiens
acacccgcagggccagagggcaacgccaaagaaaggaaaaccaaagagaagaaacaaagacgaacaaa

SEQ ID NO: 124849 - RNA, 82 nt, Homo sapiens
agcggcggaggaggaggaggcggaggggcgcggaggcgaccgccaggcgcccaaacccggaccagcggggacgagagccccg

SEQ ID NO: 124850 - RNA, 63 nt, Homo sapiens
cacagccgaaaagaaaaggaagccaggggagacagcccgaagcacacgagagcaagagacaag

SEQ ID NO: 124851 - RNA, 85 nt, Homo sapiens
gcccgcgggaagcggcaggagccgccgccgacaccgaagaagaaaagcccacccacaagaccagacaaggaggaacaccgcaaaa

SEQ ID NO: 124852 - RNA, 77 nt, Homo sapiens
gggagaagacaccggggaacaaagcaagggccagagaaggaggagaaggagacaggcggcaagcagggcgaagggag

SEQ ID NO: 124853 - RNA, 69 nt, Homo sapiens
cccacacgcgacaagaaaaccaaaacccaacaccaccgacggcaacagcagcgccaacgcaaacacagc

SEQ ID NO: 124854 - RNA, 75 nt, Homo sapiens
gcacaccggagaggaccaccgcccgggggcacgagcagaccaggccgccaggcacagagaaggcaaacgggaggg

SEQ ID NO: 124855 - RNA, 82 nt, Homo sapiens
agaaagccacacagggaccgagacgcggaacccgaggacagccgcacagagggcgcaagcagggcgccgcacccaggcggag

SEQ ID NO: 124856 - RNA, 58 nt, Homo sapiens
gggaaagggacaagaagggcaaagccgaaaccaaacagagcagaacgaaacagcacag

SEQ ID NO: 124857 - RNA, 68 nt, Homo sapiens
ggaccaacggagcgcgaggcgggcgcggagaagcgcggagcgaagcaaaccaacaccccccgggaaca

SEQ ID NO: 124858 - RNA, 61 nt, Homo sapiens
gaagagacgaaaaagacggaagggaaaaggccgaggcacagcgggaagaccgcaaagacga

SEQ ID NO: 124859 - RNA, 76 nt, Homo sapiens
aaccccaggaagaagaccagcccgccgcccgacggcccccgacgcagcgcaccagcagcccaacacgaagaccgcc

SEQ ID NO: 124860 - RNA, 76 nt, Homo sapiens
agccggacgccccgaccaaggacaagaagaacgaaggccccacggggcaccccaccagccacaaggccgggaacac

SEQ ID NO: 124861 - RNA, 54 nt, Homo sapiens
gaccggcccacaacacgcccggcaaaaagcggaagcaggaggccagcgccaaaa

SEQ ID NO: 124862 - RNA, 82 nt, Homo sapiens
gaaaacagggccggccgcagagcccaccggaaggagaaggaagaggagcgagcaccacaagcaaggaacaaaagaaagcaag

SEQ ID NO: 124863 - RNA, 60 nt, Homo sapiens
ccaggccagacccgaaggccaggagacccgaccccaaggggaccagaagccaggagaggc

SEQ ID NO: 124864 - RNA, 37 nt, Homo sapiens
cgacggaaaccaagccaggccaagacaaggccgagac

SEQ ID NO: 124865 - RNA, 65 nt, Homo sapiens
cggaaggcgggcgacagcggcaggggccccgaaccagaagccgaaccacaagacaaacaaggaca

SEQ ID NO: 124866 - RNA, 109 nt, Homo sapiens
ggagcagccggcgccggcgcacggcccgagcgggggcagccgcagaggcgcgggagagaagcaggaaagccaggggggccaggacgcaggggagcgcaggccgagaaag

SEQ ID NO: 124867 - RNA, 77 nt, Homo sapiens
cgggacaggggaacaaccgcagaccagacaaagggagcaccagccagaccgggaagaaacgaaggggggaggcccag

SEQ ID NO: 124868 - RNA, 63 nt, Homo sapiens
agagcccacgggggacgcggccaagggaccaaggggaaacaaaccaaggcgccaccggaagaa

SEQ ID NO: 124869 - RNA, 78 nt, Homo sapiens
accgcagacgggggacgcagggaggagcgggacaccccggaagcgggaaagacacaccagaccccaccacccaccccc

SEQ ID NO: 124870 - RNA, 51 nt, Homo sapiens
aacaaaaaaaggaaacacacaaacgcaggaggcaggggaagcacaaaagcg

SEQ ID NO: 124871 - RNA, 67 nt, Homo sapiens
acgcgcggaaggcagcgcccagcagcgcagacaagagcgagcaagccgccgcagcaagccagagacc

SEQ ID NO: 124872 - RNA, 81 nt, Homo sapiens
ggacccagcggcagaggggcggagcggcgacagaccccaaaacacgagacgcgcagaacgcggaggcgacccaaccaggag

SEQ ID NO: 124873 - RNA, 73 nt, Homo sapiens
cgaacgacaggacgggggcggccggcccccaggaggggcacagggccagagcagagggaggaagcggagggga

SEQ ID NO: 124874 - RNA, 84 nt, Homo sapiens
cagggcaccggagcccgaggacacaccagcaggcgccccagccgaccagcacggccggccccacgccgccgaggccgcgagcag

SEQ ID NO: 124875 - RNA, 83 nt, Homo sapiens
acggaccgggacgcggagccgaagccggcggacggcgacgggcggccggcgcgaggcgagacgcgcagcgagcagaggacgga

SEQ ID NO: 124876 - RNA, 91 nt, Homo sapiens
cggcgcgagcccagaggaaccaaggaagagaaaccagagcaaaggcagacaagaccagccacaaaaagcggacaaagcaagagagaagggg

SEQ ID NO: 124877 - RNA, 78 nt, Homo sapiens
caccggccgaagaaccagaagcaggggcagagagaagagcacacagaaggccaggagcgacagagcggggaacacgag

SEQ ID NO: 124878 - RNA, 70 nt, Homo sapiens
gcggaacgcaggagacacaagaagcggaccaggcgcgggacaaccaacacaaccaaagagaagaaaacgc

SEQ ID NO: 124879 - RNA, 72 nt, Homo sapiens
gaaaaaggaagaagacccgaaggaacaaacagaaaaggagagagaggcacgacgaaaacaacaagcaaaaaa

SEQ ID NO: 124880 - RNA, 73 nt, Homo sapiens
gggacccgcgaaaacaccgagcgaggacacccccagaacgaccccaacggcacagaaacaccaggaaggaggg

SEQ ID NO: 124881 - RNA, 79 nt, Homo sapiens
gcgcagacagagcaccagcaccagcagaggcccccccagcgccgccgcccagccagccccagggaagagacccggccca

SEQ ID NO: 124882 - RNA, 78 nt, Homo sapiens
gcggccaggccccagacacagacgagcaggggaaggccacagacccccgccccggagaaggaggagcaggccgaccag

SEQ ID NO: 124883 - RNA, 74 nt, Homo sapiens
gagcaggaaccggagcaggcgggagcggaaaggacgaagaaaggagggcaggggaaggggaggaaggcaaacga

SEQ ID NO: 124884 - RNA, 70 nt, Homo sapiens
cggcccggagcaacgagcgcagcgccggccagaagcggacccagaagaggggagcagcaaggaggaagac

SEQ ID NO: 124885 - RNA, 75 nt, Homo sapiens
cgaccaaggagggcaaagcgccgcgggggcacccgaggaggaagagggcagggcccacggaaagaagggaaaccc

SEQ ID NO: 124886 - RNA, 83 nt, Homo sapiens
cgcggaaggccgcagggacccgccaggaaagccagggaaaaccaagacccagaccggagaccgagagacgaaggcagagcacg

SEQ ID NO: 124887 - RNA, 86 nt, Homo sapiens
gccgggaggccaggagacccgccccggagcccgagaagacagaacagcagcagcaacagcagcgcagcgaaagcacagcgcagccc

SEQ ID NO: 124888 - RNA, 73 nt, Homo sapiens
agaaagaaacaagcggcaagagaggcaccccgaagaggcgaggagcaacccagagaggagggggcgcagcaaa

SEQ ID NO: 124889 - RNA, 82 nt, Homo sapiens
gcaaagggcacacggaaaggaaggcagcaaaacagagaggcacgcaagagccccaagggggggcaggcagcagagaggcccc

SEQ ID NO: 124890 - RNA, 84 nt, Homo sapiens
ccaaggcgccccgcgggcccccgccgccgcgaaggaccgaaggagaagaaggagaaggggaggagaaggcaagccggaaagagc

SEQ ID NO: 124891 - RNA, 78 nt, Homo sapiens
agcggggaggacccaccacccacaagccagccggccaaaacacgaacagccagaacaccgaccccggcgcgcgacacc

SEQ ID NO: 124892 - RNA, 82 nt, Homo sapiens
ccccccacgccacacagggaaggcacacagcagaaccaagaaggagcgagggaggagcagcgagacagcaagagacgaccac

SEQ ID NO: 124893 - RNA, 84 nt, Homo sapiens
gcccccagcgggaggaaggacccggggaggccggccacgccccgcacgggggcccgaaggcaccgcagaacggggcgggacgac

SEQ ID NO: 124894 - RNA, 79 nt, Homo sapiens
ccaggaaccaccacaaagaaacaaaaggcagaaccagcccggaggcaaagggaagccggaagagagagggacccagaga

SEQ ID NO: 124895 - RNA, 74 nt, Homo sapiens
cggcgcgccgggcccgccggcccccccagccagagacgcgcacgaaacgacgaagaggcccgaggacagaggag

SEQ ID NO: 124896 - RNA, 59 nt, Homo sapiens
gccggaacaaacgagggcccgggaggaccgacgcagccaggagggagcaacaacaagga

SEQ ID NO: 124897 - RNA, 75 nt, Homo sapiens
gaaacggacaaacaggaagcgcacaagccaaagcgagaggcaggacaagccagaaaaacaagaaaaaaaacgaga

SEQ ID NO: 124898 - RNA, 75 nt, Homo sapiens
cgggacaccccgaccagaacgggccaccgcgccacgagacccccgggaccgaggaaaccagacgagcggagagaa

SEQ ID NO: 124899 - RNA, 71 nt, Homo sapiens
cagcaggacaggaaaaaaagaggaacacgaggacccaaagaacaaacccggagagaagaaaaccccagcag

SEQ ID NO: 124900 - RNA, 76 nt, Homo sapiens
ggcgaagacgcgaccgcggcgcgagcaccaggagccgcaaagccaacccagccaacagaccccagcaccgcagaaa

SEQ ID NO: 124901 - RNA, 80 nt, Homo sapiens
cggaagacaagaagccaaagagcggaggcggcccgcggaaagacgcgccagcaggcaacaaaaccaaggggaccaaaagc

SEQ ID NO: 124902 - RNA, 94 nt, Homo sapiens
gaagacgacgcaccgcaggcagacaaaagggccaaagaagggagagagggggcccacggggcagggaagagcacaagcgccgcgcgccacgaca

SEQ ID NO: 124903 - RNA, 77 nt, Homo sapiens
acaagacagagaccccgaggaagacaacgcaaaacagagagaacccaccaaccaaagaggaacacagaacggagacc

SEQ ID NO: 124904 - RNA, 69 nt, Homo sapiens
ccgccaaagccaagccaccaaacgaagagccccagcaggagggagagcccagagacaagcaaagaggca

SEQ ID NO: 124905 - RNA, 50 nt, Homo sapiens
ccacgccgccccaagaggcagcgagaagaaaaagaagagagagacacgga

SEQ ID NO: 124906 - RNA, 64 nt, Homo sapiens
acaccagggcgaggcaggaccggcgcccaaggagaggccaaagaggcagccaccaaccaggcca

SEQ ID NO: 124907 - RNA, 38 nt, Homo sapiens
ccacagagagagagagggaggggacagcggagacagcc

SEQ ID NO: 124908 - RNA, 76 nt, Homo sapiens
acagaggagaccagaccagaagccccgaaaaggcagcgcacagcccagcggaggacacgccggggcagggcagccg

SEQ ID NO: 124909 - RNA, 60 nt, Homo sapiens
cagcccccagagcggaacacagagacagaagacagcccacgacacaggcccagaccagcc

SEQ ID NO: 124910 - RNA, 60 nt, Homo sapiens
cgcgacgcaggcgcacggagacccgccggcaggaacaggcaggaaaacgacccaaaacag

SEQ ID NO: 124911 - RNA, 75 nt, Homo sapiens
agagaagagaagacgacccaccagacagccagcacagaccaaacgacccggagacgaaagcaaggaaaagcagaa

SEQ ID NO: 124912 - RNA, 54 nt, Homo sapiens
cagcccccagagcggaacacagcaaaaccgcacggagacgccaaacgcaacaga

SEQ ID NO: 124913 - RNA, 73 nt, Homo sapiens
gaagccacaccaggcaacccgccaggaggacgaacacggaacaaagaaacaaacccacaagcgaaagaacacg

SEQ ID NO: 124914 - RNA, 78 nt, Homo sapiens
gcaaagcagagcgggcaggacaaccaggggaccagagaggacggcaccagccaggaggacgaaagcaacgcagaagca

SEQ ID NO: 124915 - RNA, 77 nt, Homo sapiens
gaggcacggaaaaggggaacgggaaaggcgcagagaagcacaggcgggacaacacaagggaaccaaggagggcgccg

SEQ ID NO: 124916 - RNA, 58 nt, Homo sapiens
cgcggccacggaccggaaggcccggcacacgggaaagcggcaacggggaagaagacgc

SEQ ID NO: 124917 - RNA, 77 nt, Homo sapiens
ggcgcacaaaaaacaacgagaaagagagaaaacaccgggaggcacgggccaagcacaccacagagcagcgaaaaagg

SEQ ID NO: 124918 - RNA, 79 nt, Homo sapiens
gagggaccaggccgacccgcggagacagacaagacaagaccggcggggaagcgggcgacccaccaacaggcaacccaga

SEQ ID NO: 124919 - RNA, 73 nt, Homo sapiens
cgaaccggcaacaagacgaccagcagcggaagacacacaccaggcacagaccggcgagcaggcggaaggcggc

SEQ ID NO: 124920 - RNA, 77 nt, Homo sapiens
cacacccgcggaaggaaaagcggaaaagagacacccaacccccaaagggcagcggaagaggacgcccccaaggggcc

SEQ ID NO: 124921 - RNA, 77 nt, Homo sapiens
caagaacagaaaaagaacccagaaagcagaaccaaccggaaggaggacgcgcagagaaaccagacaaaaaaaacaag

SEQ ID NO: 124922 - RNA, 82 nt, Homo sapiens
gaaacgggccgcgaaccgcagacagcggccaagaagacacaaaggacggaggcacgcgaggaaaagggaccaacggagccag

SEQ ID NO: 124923 - RNA, 81 nt, Homo sapiens
cggaggcaggaggaccgcagagaggcgccgccgcccgaggccgggcgagggaagagccaagccaagacagaaacaagaaaa

SEQ ID NO: 124924 - RNA, 82 nt, Homo sapiens
cgccgcgccccgccgcgccgcgcccaaccgcccccccccagaacgcggacaagcaagcgacaagaaggcagcggaaaaaacg

SEQ ID NO: 124925 - RNA, 72 nt, Homo sapiens
cacacacagagacccagggagcacagggggaaacaagcgcccaggaggacacgggcgaggacaacaacggaa

SEQ ID NO: 124926 - RNA, 74 nt, Homo sapiens
ggaaggcgcccacaacaccaaccacaccggagcaggacaagcgaacagcaggaagggaacggagagacggcaac

SEQ ID NO: 124927 - RNA, 72 nt, Homo sapiens
gacggcccgacaccacaaccccgccggccaacgcaaaggacaaagacggcaggcaagggccggaaaaaagaa

SEQ ID NO: 124928 - RNA, 115 nt, Homo sapiens
gggagcacccccagccggagcagccggaccagcccagaaggcagcggcggcccaggccagcacccgcacccgagcgggaagaagccgcagcaagccgcagcggcgcgcaccgggc

SEQ ID NO: 124929 - RNA, 69 nt, Homo sapiens
aaggccaccagcccagaaaagagaagaggagcaccacgaagaaacgcccagaggagccagaaacagcca

SEQ ID NO: 124930 - RNA, 73 nt, Homo sapiens
gaccacggccagcgagaggagaagacgccgcaacaggagcgaggcaccaggcggcccaacccgacccaaagac

SEQ ID NO: 124931 - RNA, 83 nt, Homo sapiens
ccagcacccggccgagacggcggcagcagcggcacagggggggccgcccgcccaaggcaggaagaggggccgcaaagaagacg

SEQ ID NO: 124932 - RNA, 76 nt, Homo sapiens
ggggaaagccaaggaaaaacggagagccacaaaaaaggaagcgaaagccggggggggcacagagccccggaagaca

SEQ ID NO: 124933 - RNA, 83 nt, Homo sapiens
gccccagccgaagcagccaccaggaggcgcaggcacaaggagacgagacccaacaggcagaagccaaaggaagcagcagacca

SEQ ID NO: 124934 - RNA, 72 nt, Homo sapiens
cgaaaaggaaccaggcgccccaggagaaggaccgaaggggagccccaacccggccaggaggaggccccaaaa

SEQ ID NO: 124935 - RNA, 75 nt, Homo sapiens
gggcccaaccccggacgcaggacgcaacccggagacgggaagagaagacaaagggaccggggaacccagaagacg

SEQ ID NO: 124936 - RNA, 72 nt, Homo sapiens
gacacggcccggcaaccaagaaaggcgaaggaaaaccccagcgaaacaccaagaggcacagccacaggagca

SEQ ID NO: 124937 - RNA, 70 nt, Homo sapiens
ggcaggcaccacaaaaaggacagggaagcccaacacccgcaaggccggccggagagccagggacagcgag

SEQ ID NO: 124938 - RNA, 72 nt, Homo sapiens
ccaagccaccccggcggaaccgcccccagagccagcgggccggcaccggcacgaggagcgcacacccgccca

SEQ ID NO: 124939 - RNA, 40 nt, Homo sapiens
cgacgacaaaacacagagaaaccggaaacaggacgaggca

SEQ ID NO: 124940 - RNA, 81 nt, Homo sapiens
gcgaccgccgcgcagaaggcacgccgacaaacgcagcccaagagaacaggggacagaccagagcaggaccaaaggcgcaca

SEQ ID NO: 124941 - RNA, 55 nt, Homo sapiens
ccagcagcggaagcaaccagagcccaggaagaggcggccgcagacaggaagagag

SEQ ID NO: 124942 - RNA, 68 nt, Homo sapiens
aaccaagaagaaccagcccagacaaagaagagccagagaaaaccgcggaccccgagacggccgggaaa

SEQ ID NO: 124943 - RNA, 72 nt, Homo sapiens
ccccagagcaggaaaccagccacgccacacacgaggcaggccgacagaaaacaaagaaaagaggcaggagca

SEQ ID NO: 124944 - RNA, 80 nt, Homo sapiens
gggccgcgcgcccacccaacccgaggagagagagcggagacaaggccacagcaggccacggcgggggcagccagccagaa

SEQ ID NO: 124945 - RNA, 76 nt, Homo sapiens
gaccagaagaaacgcaccggaaaggccaccaggaagaccgcaggaaagcaggaaggcaagaaagccaaggacgaaa

SEQ ID NO: 124946 - RNA, 54 nt, Homo sapiens
acaagaggcagccaggcagaccacaggagacaggaagccagccggccccaaccc

SEQ ID NO: 124947 - RNA, 62 nt, Homo sapiens
gcgggacaagcgccggcggcgcccgacggagcagggcaagaggaaaaccaacgaacaaagga

SEQ ID NO: 124948 - RNA, 42 nt, Homo sapiens
cagcaagggcaccgcgagcaaggagaacgcccaaaaaggaac

SEQ ID NO: 124949 - RNA, 74 nt, Homo sapiens
aagcagcaaggagcagagaagacccgagaccaaaaccacaacggggagaagagggagacccgaacgaagacgca

SEQ ID NO: 124950 - RNA, 82 nt, Homo sapiens
cccagccgaaggagaaggggggccacagcccacaccagaagcaaaagcaccaagagcgagaagccagccgaggggcgggacg

SEQ ID NO: 124951 - RNA, 79 nt, Homo sapiens
aagacaaagccaggagcagaggaacagcgacggaagagccagggaacacacagcacaaggccaaaacagaagaggcaaa

SEQ ID NO: 124952 - RNA, 79 nt, Homo sapiens
ccgagaagagaagaaagcagcacaggcaaggcagaaaacacaaggaagaaaaccaagcgagagccgaaacagaagaaga

SEQ ID NO: 124953 - RNA, 64 nt, Homo sapiens
ccccccccccaaggaaaggcccgagccaaaagacccagagaaaggagcacgaaggaacaaagcc

SEQ ID NO: 124954 - RNA, 66 nt, Homo sapiens
aagcagagaccaagggcagcagaacgggaggaagcagacacgagcaaagccaggagacacaagaca

SEQ ID NO: 124955 - RNA, 73 nt, Homo sapiens
aaagacaccagaaaacacacggagcagagcgaaaagagcgcccaaaccagagggggaaacccgaaaaagaagc

SEQ ID NO: 124956 - RNA, 52 nt, Homo sapiens
agcccggaccagcagagggccgacgaaaggaagacgaaacgcggccaagaca

SEQ ID NO: 124957 - RNA, 60 nt, Homo sapiens
aaacaccggagccgaaccacaagcggacagccagcggaaccaagaccaccggcccaccgg

SEQ ID NO: 124958 - RNA, 81 nt, Homo sapiens
ggaaaaggcggacgggaaggcgggagacgagaagccgaaaagcgcagcgagcggagccgccggagcaggcccgcgcgggag

SEQ ID NO: 124959 - RNA, 67 nt, Homo sapiens
ggggcaagccggaaccagacgagcccagggggcacgcggaaacggcaacggggcggcacacaaggag

SEQ ID NO: 124960 - RNA, 82 nt, Homo sapiens
gagcagcgccaagaacgagcaggagcgagagagccacacgcggcagccgaccagccccaccccccaacaacaagggcacgac

SEQ ID NO: 124961 - RNA, 90 nt, Homo sapiens
gaggagggccacgggccccagcagcccaggcaggcagaggggaggagacacgaagcgacgcagagccagaagggaggcagggaacacgcg

SEQ ID NO: 124962 - RNA, 77 nt, Homo sapiens
cggccgggaggaaaccaggacgcagagggagcagccaaggacccaaaccaagcgccccaggccacacgaagacccag

SEQ ID NO: 124963 - RNA, 80 nt, Homo sapiens
gcggggggacgcccacccgggccacgaagcagacaccccaccccgacaggacagcggagcggcccggccaccagaaacgc

SEQ ID NO: 124964 - RNA, 75 nt, Homo sapiens
gcagcaggagccccgcgggaggaaacagagcagaaacgaaaggagaaaaaccaagaaagcaaaggaaaagagaga

SEQ ID NO: 124965 - RNA, 73 nt, Homo sapiens
ccccacgagaaacggaaaaagaaacgacagaaaaacagggacaaggaggagagaaagaacccacgcaggacga

SEQ ID NO: 124966 - RNA, 75 nt, Homo sapiens
ccagggagaaaccgacacaaaagcagagcgcgaacggagaaagggagacaagccggggggggcacagagccccgg

SEQ ID NO: 124967 - RNA, 90 nt, Homo sapiens
cggaggccccagggaagcgcagaaagcaggcgaacccgcggcgcaaaacggaaagagcaaagaggacaggaagggggggagagggcagaa

SEQ ID NO: 124968 - RNA, 80 nt, Homo sapiens
ggagcgggcagccgccgccaccccgcggccgcacccccgccccagggaaggcgaggagcggaaggcgagcggagcggcgg

SEQ ID NO: 124969 - RNA, 79 nt, Homo sapiens
gacccaggacaggacccagcgcgggacagccaggcaagccgacaggaacacccgacgggaccaagcgcaacggaggaca

SEQ ID NO: 124970 - RNA, 100 nt, Homo sapiens
gagggaccgggcacgaaacgcgcgcccccgaaggcggccaacggccagaccaaaaccacacccacacagcccaggccaaggagccagacggaaggacgac

SEQ ID NO: 124971 - RNA, 54 nt, Homo sapiens
cggccaccccccagaaaacgacaaacagacaagaaagaaaggccaaggggagag

SEQ ID NO: 124972 - RNA, 77 nt, Homo sapiens
cgcgcagacaggacccaaagcgcgggaggaagagcagagcagaagagaagaggaggaggaggaaaccaagaacggaa

SEQ ID NO: 124973 - RNA, 74 nt, Homo sapiens
agacggggcggggaaacaacgagaaggcgaccaaaggagggccgcaggggcgcggcacaggagagggggccaaa

SEQ ID NO: 124974 - RNA, 66 nt, Homo sapiens
gacggaggagcgaccaccggaaagccaggccagaagaaggaaggccggggaggggacaggaaagac

SEQ ID NO: 124975 - RNA, 36 nt, Homo sapiens
gcaccaggacaaaaagcacgcaacagaaaagaagac

SEQ ID NO: 124976 - RNA, 75 nt, Homo sapiens
ggcggagaaaggcggggaagaagccacggaaaacgagacaagagaaccaaaagcgcggaagaaaagaagaaaaaa

SEQ ID NO: 124977 - RNA, 52 nt, Homo sapiens
caggcagacaaaagggccaaagaagggagagagagaaaccaaggggaaggaa

SEQ ID NO: 124978 - RNA, 75 nt, Homo sapiens
acgcaccaggccaaagaaagagaaaggccggaagagcgggagcgggagccaggcagaaggccaaccaaccccagg

SEQ ID NO: 124979 - RNA, 82 nt, Homo sapiens
acggggaccgccccggaccggccgagcggacgccaggaggggcgcgaaggcggagacgcccgccgagacagagccgcgggcc

SEQ ID NO: 124980 - RNA, 68 nt, Homo sapiens
acaggcagagaaagggaacaccagcgggaggcagacaacacggccagcacggaggagaccgggagagg

SEQ ID NO: 124981 - RNA, 72 nt, Homo sapiens
cagaaacgggccccgcgccaggaggcccaccccgccggcacagggaacaccagaggcgggaccacgggcagc

SEQ ID NO: 124982 - RNA, 83 nt, Homo sapiens
cccacacaaggcagccgccgggagccagaagcacaggcccgggcgaaggggccacgcgaaaaccgcccaccaaaaccgaaccc

SEQ ID NO: 124983 - RNA, 83 nt, Homo sapiens
gggggcacgaagggggacacaggcgagaagcaaagaccaggggacgaaggccgcagacgaaggggaaagggaagcaagagcca

SEQ ID NO: 124984 - RNA, 77 nt, Homo sapiens
ggcccggcccgacaagaggaccaaaacagggaaggaagaaccaggagggaaaaccccagcgggcagaccaaagagaa

SEQ ID NO: 124985 - RNA, 61 nt, Homo sapiens
aaggcaccggaccggacagcccccagacagacagaggccagccagaccaaggacagccaag

SEQ ID NO: 124986 - RNA, 65 nt, Homo sapiens
cccagaccggaacagcaacaacacaaccgggagaacgcaaacaggcacggcaaaacacaagacaa

SEQ ID NO: 124987 - RNA, 67 nt, Homo sapiens
gcacaagaacgcacaagcagcacaggcaagggcggaggacgaaaaggaacaagcgcaggacaaaaac

SEQ ID NO: 124988 - RNA, 73 nt, Homo sapiens
ggagaggagcaggggagagaaggcaaagaaaaagcaaaaacgaaggaccgaagcgaggccagacaggagcgaa

SEQ ID NO: 124989 - RNA, 72 nt, Homo sapiens
agacggcacgagaacgggacccggccagaggaaagaacccgagggacccagagacccaggcagcaggggaca

SEQ ID NO: 124990 - RNA, 61 nt, Homo sapiens
cgggccaagcacgccacccggaagaagggacggggagggcggagaaggaagacgcagcagg

SEQ ID NO: 124991 - RNA, 74 nt, Homo sapiens
cggaagaggggaagagggacgggagaagaagagggcaagaaggagagacacagcgccggaaccggagagaccgc

SEQ ID NO: 124992 - RNA, 82 nt, Homo sapiens
cccgaagagcgggaacaggcgagcagagggcgggggcaggcggaaggccccggcccagaggagaccacggaaggggcagaaa

SEQ ID NO: 124993 - RNA, 54 nt, Homo sapiens
cagggaccagaagacacggaacggacaggaagcacaaggaccgaggaaccacgc

SEQ ID NO: 124994 - RNA, 65 nt, Homo sapiens
ggccccagcgcaggaaggggagccgcacggccaagacccaggaaaagccgaagcaggagagaaac

SEQ ID NO: 124995 - RNA, 78 nt, Homo sapiens
gcagagcggccgggcgggccgggaagaccgcaggaaagcaggaaggcaagaaagccaaggacgaaacccacacggagg

SEQ ID NO: 124996 - RNA, 77 nt, Homo sapiens
ccgccccgccggcccaccccggggagcaacagggaacacaagccagaaaaagggggaagccagagagagagaaaccg

SEQ ID NO: 124997 - RNA, 67 nt, Homo sapiens
gaagaagaaacccacgaaccaaaagggacggacaaaggaacaggaccagggggcggagcagaaacca

SEQ ID NO: 124998 - RNA, 64 nt, Homo sapiens
gcagagagcgccacaggcgaaaaaaaacagaaaccaccaacaaagccgaccaagcaaacgggcc

SEQ ID NO: 124999 - RNA, 80 nt, Homo sapiens
ggagcggcgggggagggccccaaggcagggcccaggccacagcccccccggcacccagcagagcacccagcggcacaggg

SEQ ID NO: 125000 - RNA, 80 nt, Homo sapiens
ggcaccgaggagcgggccagccgcgcggcgggaagcggcggcggcggcccagcgccaagaggacacccagagcaacaaac

SEQ ID NO: 125001 - RNA, 81 nt, Homo sapiens
aagagggagcaccacggaccccaaggaagccacggcagacacacaacccgacccgacgagaccaggagaaacgggaggccc

SEQ ID NO: 125002 - RNA, 72 nt, Homo sapiens
acaccagaccggggaaacaggccccgggacccacgacaccacacggggaagccccggcgagagagggacaaa

SEQ ID NO: 125003 - RNA, 73 nt, Homo sapiens
gcgggcggcggcagcgggccagacccaggaccgcgacacggccgaaccacagcagcgcagcaagaagggccgg

SEQ ID NO: 125004 - RNA, 80 nt, Homo sapiens
cgccggagcaaacgacgagaaagcccacagccaaagccgggcggacgcgccagagacccagagcagcagcgaagagaagg

SEQ ID NO: 125005 - RNA, 47 nt, Homo sapiens
aggaccaagaaccagaaggaagggacacagccccagggaagccgggc

SEQ ID NO: 125006 - RNA, 72 nt, Homo sapiens
aggacagcgacacaggcaggcggaacgggcgcaccacgccaccccgccacgagagcaggaaacggaacgccc

SEQ ID NO: 125007 - RNA, 73 nt, Homo sapiens
cgagcaaagaagagcccgaacaaacaaacacccagaaacaagagacagggaaggccgccaaggggaacagaaa

SEQ ID NO: 125008 - RNA, 76 nt, Homo sapiens
acgggcggcgcggaagggagcgccagcaggccgggcgcagggccgggacaacgagaccagcccaggacggaaggcg

SEQ ID NO: 125009 - RNA, 85 nt, Homo sapiens
cccgcggcgcggggggcggaggcgccaggggcgaggcagcggcacccgagcgcccaggacagcggccgaagccagagccggggcg

SEQ ID NO: 125010 - RNA, 66 nt, Homo sapiens
aacgagcaaacacaggaacccaacgagccaaaggagagagacgaggaaagaaggaagcagcgaagc

SEQ ID NO: 125011 - RNA, 87 nt, Homo sapiens
cgacagccaggcccgcgagaacgccgcgccaggacggcagccagacgagcagggccgcagcaggccgcagcgccaaagaccacagcg

SEQ ID NO: 125012 - RNA, 68 nt, Homo sapiens
caaagaaggagaaaagggagcagcaggagccccgcggggaacagagacgcaggcaagagcgcggagga

SEQ ID NO: 125013 - RNA, 71 nt, Homo sapiens
aagggcagagaaaaaagagcagcgaggcgaaagcaaccacaggaagaaacaagcccaggacgaagaaaaca

SEQ ID NO: 125014 - RNA, 80 nt, Homo sapiens
acccgaggaggaaggcccgcgggcccaaggaccgcgagggaagagacagcgagcagagaccaggagaagagaagagaaca

SEQ ID NO: 125015 - RNA, 72 nt, Homo sapiens
acgagaaccccacacaagagcccggcgaacagggaagggacgcgaagaaccccaaggacaagaaggaagcga

SEQ ID NO: 125016 - RNA, 85 nt, Homo sapiens
ccccccgagaaccggcgccagccagcgccggaccccccacccacgcgaacgagagggacacggagcagaacccagcccgcgacac

SEQ ID NO: 125017 - RNA, 73 nt, Homo sapiens
gcggcgcgagacaacgccgcaagcggccgaaacacaagcaaggaacacaaagaagaaagaaaggaacggaagg

SEQ ID NO: 125018 - RNA, 80 nt, Homo sapiens
ggcggccaccaggggccaaaagccaccagcaggggcgacaacagcacagcaaaacaaacggagagaggagggagaaacaa

SEQ ID NO: 125019 - RNA, 83 nt, Homo sapiens
ggcggcgccggcgaggaggcgcccggagcggccgccccagcaggcgaggggacggcggggagcgcaggacagacgcccccgcg

SEQ ID NO: 125020 - RNA, 84 nt, Homo sapiens
cgccaccgccgccagaagaagcagcaaccgcagaagcagcggcaaccagaccggggcagcccagaagaaaaggaagcaaaagga

SEQ ID NO: 125021 - RNA, 85 nt, Homo sapiens
ggcaggagagggacgcgcggcggcagcgagcgcagcaccaggacaaaagaagggcagcacaaaggaaagccccaaaccccggaac

SEQ ID NO: 125022 - RNA, 88 nt, Homo sapiens
cgggccgggagcggcggcgcggcggaaccagggccgacccgggccggaccgaccccaggcggcggagaaagcgcgcaagaaacgaagg

SEQ ID NO: 125023 - RNA, 99 nt, Homo sapiens
gcccagagcagagcaccaaaccacaggcgcccacccaggaaggccgccgagcagcacagaggaaaggaaaggagcggaggcaggccaaagggaaagaca

SEQ ID NO: 125024 - RNA, 78 nt, Homo sapiens
gggcggcggagcgaccccgcaggaaagggcaaaggaaggagcggaggagaagaacgggggaacaaaccaagagagcgc

SEQ ID NO: 125025 - RNA, 80 nt, Homo sapiens
cggaaaaccgaagggaaggccagcagcgcgcggagaagaacggggagccagggccggagcgagggagagcaggaacacag

SEQ ID NO: 125026 - RNA, 70 nt, Homo sapiens
cacggaaaaaaaacaaccaacccacagagagaacaacaggggggagaggagagaaccagaagagaggagc

SEQ ID NO: 125027 - RNA, 54 nt, Homo sapiens
acgacgggaaacacaaaggcaaagaggccagcgcgacagaaggacagagaccgc

SEQ ID NO: 125028 - RNA, 70 nt, Homo sapiens
gagacaacagagagacaacggggaaggcaggagcgagaggagcagaacaaaggaaccccaaccaggccag

SEQ ID NO: 125029 - RNA, 55 nt, Homo sapiens
cgccggccgagaaggcagaggcggccacaagggagcaccagccgaagcagaagcg

SEQ ID NO: 125030 - RNA, 75 nt, Homo sapiens
agcaccaacaaaccagaccacccaaaggagaaacaccaaaaggaaccgcaggagcacaacacgaagcgaagcagc

SEQ ID NO: 125031 - RNA, 84 nt, Homo sapiens
cggaaggaagcggccgcccgcccacacccggcccgccccggccaaaggagccgaacccaaaaagagcagcaccgcgagcgagaa

SEQ ID NO: 125032 - RNA, 77 nt, Homo sapiens
caccagcaccgcagaggcaaggggccaccaggaggccagggggcgccagggcccaaggaccaagccgacacgcaccg

SEQ ID NO: 125033 - RNA, 61 nt, Homo sapiens
gagccaacaggagaccgagaacacaccgaaagccgagggcaccgaaacccgggcggccaag

SEQ ID NO: 125034 - RNA, 70 nt, Homo sapiens
aacgacagcggaaagcgagcagcaagcagagagaagcaagccggagaaacaggaagaggcgaaaaaaaag

SEQ ID NO: 125035 - RNA, 77 nt, Homo sapiens
agagcgaaccccacgcaacgcggaagagaaggcacaaaggccggggcgagagccacgagccaagggggcacgagcgg

SEQ ID NO: 125036 - RNA, 71 nt, Homo sapiens
ccaaagaagcaaaacacgagcaccaggagacaaagccacaaaaacaccagaaaaaccaagcagaaaaggag

SEQ ID NO: 125037 - RNA, 72 nt, Homo sapiens
cagcaccggcccaggggccgaaggcagcaagaaacagaccgaagagcaagaaacacgagaacagcacccaca

SEQ ID NO: 125038 - RNA, 76 nt, Homo sapiens
gcgaggggccaaggcagaagaaacggagaagggcaaagccacaagaaggagagacgcagagccagacaagaccagg

SEQ ID NO: 125039 - RNA, 80 nt, Homo sapiens
gacgcaccgcggggaccggacacacccccccagcacacccacccgggcagcggggggacgcgacagagcagcagaggcgg

SEQ ID NO: 125040 - RNA, 45 nt, Homo sapiens
cagagaaccgaggaggaagcaggggcggcccgaaaaggcggaggg

SEQ ID NO: 125041 - RNA, 80 nt, Homo sapiens
aaagccagaaaaaaggaacgccaaagaagagaaaacaggacaccaaccgaaagagcccaaaacgcggaggcgggggcgac

SEQ ID NO: 125042 - RNA, 83 nt, Homo sapiens
caagaggacggcacacccggaccaacggcacgaaaaccagaacaacacagcacccggcggcaaaccaaacaaaaccagagcac

SEQ ID NO: 125043 - RNA, 64 nt, Homo sapiens
cggcacgccaccgacaagcaagccgaagagaaaggcccgagggcccggaaaggggagcacagag

SEQ ID NO: 125044 - RNA, 69 nt, Homo sapiens
ggcgccggccgagaaggcagaggcggccacggggacagggacccacacaccggaccccccaacacacca

SEQ ID NO: 125045 - RNA, 66 nt, Homo sapiens
ccacaaagaggcccgagccgcaaagagcaagagcagggaacaggccccaggggcgccacagccgag

SEQ ID NO: 125046 - RNA, 75 nt, Homo sapiens
cccaccccccacgccccaccacaacaaacgaggaaccagcacaagacaaagccgaagcggagcccccaaaagagg

SEQ ID NO: 125047 - RNA, 83 nt, Homo sapiens
agggacacaacgggaaaccggaccgaccccaagaagaagcggaagaggagccgcggaaccaagacacaaggaacagaagacag

SEQ ID NO: 125048 - RNA, 58 nt, Homo sapiens
ccaccacaaaaacgaaggcggcggggccacacggcagccccagccccagcaggagcgg

SEQ ID NO: 125049 - RNA, 75 nt, Homo sapiens
gaagaaagcggaaagagcgacaaacaaagaaagacggacgagcagaacagaaggcgcacaaaggaaagagaagca

SEQ ID NO: 125050 - RNA, 53 nt, Homo sapiens
gcagaggggccaacggcggcggccaagaagagagcgggcccagagccgacaag

SEQ ID NO: 125051 - RNA, 77 nt, Homo sapiens
ccggagggcggccacgcgggaccaccggcaccaccaaagaaggaacaccagccagccgggaacccagggcaacagag

SEQ ID NO: 125052 - RNA, 61 nt, Homo sapiens
cacagccgcagcgcgaggccccccaggcacggcaaaggaccgaaaagacgcggccccaaag

SEQ ID NO: 125053 - RNA, 38 nt, Homo sapiens
agggccccgaaccgccaggcccacccacacggagagga

SEQ ID NO: 125054 - RNA, 59 nt, Homo sapiens
gcagcagcagccccccgcccccccgccccagacagcaggacggggggccagcgcgagaa

SEQ ID NO: 125055 - RNA, 56 nt, Homo sapiens
agcaacgagagaggcccccgccgagcacgggaagccagagagccaacaacgggagg

SEQ ID NO: 125056 - RNA, 77 nt, Homo sapiens
ccaggcccggcaaccagccgcggaaagacggcgcacacgcacccggagaacgaggcaccggacacagggcaccggga

SEQ ID NO: 125057 - RNA, 60 nt, Homo sapiens
ggagacaagccgagagaaccgcacagccccgacaagggaccgggcgggccccgcaggaaa

SEQ ID NO: 125058 - RNA, 42 nt, Homo sapiens
accccagggagcgccaaggcgccgcgaggccgcggccaggcc

SEQ ID NO: 125059 - RNA, 74 nt, Homo sapiens
ggcgggccgcaacgccacgacagaaggcgccaggcgggaaaccggcccagcggcgagccggaaagccagggaaa

SEQ ID NO: 125060 - RNA, 79 nt, Homo sapiens
cagccgccgccaccccgcggccgcacccccgccccaggcaggggaagggacgggaaggcagaagaaggcagagggggga

SEQ ID NO: 125061 - RNA, 33 nt, Homo sapiens
accaagaaccagcaggccgcggacagagaagag

SEQ ID NO: 125062 - RNA, 80 nt, Homo sapiens
aaaccaaaacccccagcccagaaggacacacaccaaaccgggaagcaaagcgaagcaaacccccgaagcagagcaggaag

SEQ ID NO: 125063 - RNA, 94 nt, Homo sapiens
gaccacacaaagacagccacaggcgggaccagcccacacccaaggagagaaggggacaagagaagaccaagaggagacggcacaaaggcggaac

SEQ ID NO: 125064 - RNA, 77 nt, Homo sapiens
cccccacccgaggaaacaaggcgcgcgggccccgacagccgccccacaccagacacaaaacaaagaagaagagccag

SEQ ID NO: 125065 - RNA, 70 nt, Homo sapiens
ggccgccggccaccgcgcacccacgaacgcccaccccccgaacccagccgcaccgcaaggcaacaacaga

SEQ ID NO: 125066 - RNA, 40 nt, Homo sapiens
cccgacacaccacacaaaaaggcaaacgaacacgcgcagc

SEQ ID NO: 125067 - RNA, 81 nt, Homo sapiens
cgcgcgaaagccgaggaaaaagcggccgcccggcagggccagaagaccaagcccgagagagggggagcccagaagcacgcc

SEQ ID NO: 125068 - RNA, 81 nt, Homo sapiens
cacccaggagaaggagcagacaagaccccaacaacaaggcccccaagacaagaaggcgccagccagcgcagaaggcgccca

SEQ ID NO: 125069 - RNA, 78 nt, Homo sapiens
aacgcagccgccggccgaccaccggaacggacagcccccccaggggacgaagggaacccgccgggcggcccggcaccc

SEQ ID NO: 125070 - RNA, 72 nt, Homo sapiens
caaacggagcgccacaccacgggcggacgcagcgcgccccagaagaagacacaaaaacgagcaagcagaacc

SEQ ID NO: 125071 - RNA, 58 nt, Homo sapiens
ccagcccaaaacaggaaggccggacaagcggaaagacaaccaccgaagaagcaagggg

SEQ ID NO: 125072 - RNA, 85 nt, Homo sapiens
ccgcaggaggaccgagcgacagcgcacggcagcggcaccacggcgacgcacaagagcagagggaaggcaacacgagcggaagaac

SEQ ID NO: 125073 - RNA, 77 nt, Homo sapiens
aacacaacaacagaggcaccagggacggcagcccacgccgcaacccgccccagagccgccgggcaggcggcacacag

SEQ ID NO: 125074 - RNA, 82 nt, Homo sapiens
accgcagcgcagcacggcccaccagcacaccaggacagccgcccagggaaagggaagggagccgaagggacaggcgcaggaa

SEQ ID NO: 125075 - RNA, 72 nt, Homo sapiens
gcagaaaccagccacgggccggaggcaaaaaacacaagggacccaggcaggccaaacccaccggaaaaagaa

SEQ ID NO: 125076 - RNA, 65 nt, Homo sapiens
cacccgccgggccgaaccggaagggcaagcgccaaggggcgaagaccaagacacacagccagcga

SEQ ID NO: 125077 - RNA, 85 nt, Homo sapiens
cggaacaaggaccgcacccggccaagcagggggcagggaagacggagcacggacgcagagaaggaaccccgaagcaagcccggag

SEQ ID NO: 125078 - RNA, 36 nt, Homo sapiens
cgacgacaaacagaaggaacaggagacagcggagaa

SEQ ID NO: 125079 - RNA, 83 nt, Homo sapiens
ggcgagagggggcaccggagggacaacaaaacaagacgcccggacaagaggcagggagaccccaaggcaaaaccaccacacga

SEQ ID NO: 125080 - RNA, 62 nt, Homo sapiens
caggggcagacccacccgagaaacaaggaggagcaaaaaggacagagcacagagccagcaca

SEQ ID NO: 125081 - RNA, 69 nt, Homo sapiens
gaaagcaaagaagcgggagaagccggaaggcacggcagacacaccgaccagaggaaggcgaacccgcca

SEQ ID NO: 125082 - RNA, 79 nt, Homo sapiens
cgcgccgagggcgaggcggacgcgcggcgcgcagacagggaacaagccgccaaaggaagagcaacagagggaacagcag

SEQ ID NO: 125083 - RNA, 78 nt, Homo sapiens
gaggacagggacacaagaggggcaaggcagcgcccggaccacaggccaagcgacacaagggcaccccacggcgacgcg

SEQ ID NO: 125084 - RNA, 80 nt, Homo sapiens
agcgagcgcgcccggcaggccgccgcgagcagccaggcggcgggccaggcccgcacccaaccagccaaaggaggaaccgg

SEQ ID NO: 125085 - RNA, 55 nt, Homo sapiens
gacaccccacgggagggcaggcaaaagcagaccggaaaacccaccggcaagacca

SEQ ID NO: 125086 - RNA, 65 nt, Homo sapiens
acgcacggaggcggggacagacagcacccaccgggaaaggcgaaggcgcgaaagggccagagagc

SEQ ID NO: 125087 - RNA, 74 nt, Homo sapiens
acagcaaccggagaaggggcaccaaaacagagaggccaggagcacagaaacacccaccaggagccaagcagaag

SEQ ID NO: 125088 - RNA, 73 nt, Homo sapiens
agcaacggagcgggagagcgggggacgcagacacgagcagggcgacaccagccaacacaggggaaaggaccca

SEQ ID NO: 125089 - RNA, 81 nt, Homo sapiens
cagcaccaaacggacacgcaagagccaaaagcaaacgaccaaagacaggaagaaaccaaaagacggacccgaaccacgaag

SEQ ID NO: 125090 - RNA, 71 nt, Homo sapiens
ccgcacccgaccgcccaccccgccggacacgaacgaagagaggccacaccccggcgccagagacccacggg

SEQ ID NO: 125091 - RNA, 76 nt, Homo sapiens
cgaccgagcccaggagcgccacgcgcggaaggcagcgcccagcagcgcagacaggggcaaggccgaggggaacagc

SEQ ID NO: 125092 - RNA, 74 nt, Homo sapiens
gagcgaagggggaggccgggacccaggcaggcaggccacagaagaacagccccccggggacagaggaaagagac

SEQ ID NO: 125093 - RNA, 52 nt, Homo sapiens
ccccaggcgcaaaacccgagaaagggcaaccgacagcagaggcacacaaacg

SEQ ID NO: 125094 - RNA, 79 nt, Homo sapiens
gacaacaccgaagaggaagacggggcggaagaccaagacacgagagaccgagcgcccagcaagccaagaccagccaagg

SEQ ID NO: 125095 - RNA, 90 nt, Homo sapiens
gacacccaagagggcgagcaggacgaagcgcccgccaccaagggcccaggaacccgaagcgggcgagccagagcgcgccagaaccccgca

SEQ ID NO: 125096 - RNA, 73 nt, Homo sapiens
ccaaccagagaggaagacaacgagagagacaggaggagaacgaggaaacccaagcaagagaaggaagagacaa

SEQ ID NO: 125097 - RNA, 72 nt, Homo sapiens
gaccagggccgccgccccaagagagcgaggcggccgcgcgccgggccccgaagagaggcgaggcaacaccca

SEQ ID NO: 125098 - RNA, 79 nt, Homo sapiens
gacgggacaggaagagaggaggagcggcaggggcggagaagaggagaaaccggcaaagagaagcaacacaagaagacca

SEQ ID NO: 125099 - RNA, 77 nt, Homo sapiens
aaagggggcagggggaagaagccgggcagcccaggggggaggaggaggcggcccggaccggaggaagcagaggcagg

SEQ ID NO: 125100 - RNA, 85 nt, Homo sapiens
ccggagaccccccccggggagccggcgggcacggcggggcgacgggacaaaagccccgacaagggaccgggcgggccccgcagga

SEQ ID NO: 125101 - RNA, 95 nt, Homo sapiens
cggacgagcgacggcaagaccaaggaggcgggggagacaccgcaccgcacccacaaagccaagagacaagcgacccgcagggaggacagcgcacc

SEQ ID NO: 125102 - RNA, 84 nt, Homo sapiens
acaagcggaccccggcccaggcggcccgagaaaagcaggagaagcgggcacgagaagagaagcccagagcaaaacaccccaaac

SEQ ID NO: 125103 - RNA, 67 nt, Homo sapiens
aaaacagcggaggagaccgggaaaccgccgaagacgaaggcacaagaagaggcaagcagggagcaaa

SEQ ID NO: 125104 - RNA, 35 nt, Homo sapiens
ggaaggaaaagagacgcaggcagaggaaggcggaa

SEQ ID NO: 125105 - RNA, 57 nt, Homo sapiens
caggaagccagcaagacggagcccgaggaaagcagaaagcgaagagagagaaacgaa

SEQ ID NO: 125106 - RNA, 57 nt, Homo sapiens
cccagcacccgccccggggcaccacccccaagggcgggggggggcacccccaaagga

SEQ ID NO: 125107 - RNA, 69 nt, Homo sapiens
agcgcgcaagaaaccgaaggggacccagcccggggacacaagcccccaagcccggccccgggcccgcac

SEQ ID NO: 125108 - RNA, 86 nt, Homo sapiens
gccagggaccccggacacagacgacgcgcggcccagccccccagagcaacacgggaggggaaaggcggggaccaagagaagagcag

SEQ ID NO: 125109 - RNA, 73 nt, Homo sapiens
cggcaggagccccaggggaaagacaaggagccgggccgagaaaccgaaccagagaccagagaagaaacgcaaa

SEQ ID NO: 125110 - RNA, 70 nt, Homo sapiens
gacaaggagaggaggagacccggcacagagccccccccccagaggaagaacccgggcaggaagggagggc

SEQ ID NO: 125111 - RNA, 72 nt, Homo sapiens
ggaccacagaaccagaaacaggaagagagaggggggcaggggcccgcaccaaaccacggaaggacagagaaa

SEQ ID NO: 125112 - RNA, 75 nt, Homo sapiens
ccgggagccagccgccgcccgagcggggccagcggggcggaaccagagcccgacggcgcccggcgcaggccaaag

SEQ ID NO: 125113 - RNA, 75 nt, Homo sapiens
cacggcaaaacaggacggcgaacacaaccagaggacacgagcgagccacagcggaagaaaaagagcaacaggaag

SEQ ID NO: 125114 - RNA, 36 nt, Homo sapiens
gcggcgccaggccggcccagaaggacgacagacgcc

SEQ ID NO: 125115 - RNA, 82 nt, Homo sapiens
ggaggggccgggaggcagaggggcaggggaggccgagacgagaccggagcgagcgcggaaggagggcggcacgaagaggcgc

SEQ ID NO: 125116 - RNA, 56 nt, Homo sapiens
cccgagcaaaacggaggacggcggagaaggagagagagggccaggggaaggacacc

SEQ ID NO: 125117 - RNA, 56 nt, Homo sapiens
cagacaacaagagcccaaacaagaggagacgggacgaacaacacccaggcggccag

SEQ ID NO: 125118 - RNA, 70 nt, Homo sapiens
aaaagccaggcacaagaaagcgaaaagagaaccccagagggcgcggaagccccagcaaacaagaccaccg

SEQ ID NO: 125119 - RNA, 96 nt, Homo sapiens
aaaccccaggccaagcagccaccagcagcccccagagcgggaccacaggcagcacagcaccagaagcagcacgagccccaggcagaccaaagacaa

SEQ ID NO: 125120 - RNA, 70 nt, Homo sapiens
caaaggaacagcacagggcgcaacaagagcgacaaacgcagggaaacacaaagaagacaccagaagggcc

SEQ ID NO: 125121 - RNA, 77 nt, Homo sapiens
gccggcagaggcgggagagccaccggccacacgcggcgagcacacagagaggggaagggcagcagcagcagagaacc

SEQ ID NO: 125122 - RNA, 81 nt, Homo sapiens
gcgcgccgggccccgggccccgaggccccgaccgcggcggagcccgacccacccaagccaaacggaggaaaaggacgccga

SEQ ID NO: 125123 - RNA, 72 nt, Homo sapiens
acaggaggacccaggcccggaggaaaagaagacgaggaaaaggaaacaggaagcccccagacacgaaacaga

SEQ ID NO: 125124 - RNA, 74 nt, Homo sapiens
agaaggagccaccaaccgcccggacccgcggcaccgcgccccacgccggccagcgagaccgaggagaaggcccg

SEQ ID NO: 125125 - RNA, 55 nt, Homo sapiens
gaaacccaccaaggaaaagcccggaaaagcagccaagcggaagacagagccgcaa

SEQ ID NO: 125126 - RNA, 80 nt, Homo sapiens
aggacggcgcaaccgcgcccgccggcccccccccgcgcccgcgaccgccgcggcgaagaggcaaagaaaggcagaagaga

SEQ ID NO: 125127 - RNA, 54 nt, Homo sapiens
caggggggggacgcggcaggcggggaccaagagaagagcagaggaccagcaccg

SEQ ID NO: 125128 - RNA, 71 nt, Homo sapiens
cagcccccagagcggaacacagcacaacacaggaaaccgagaaagcaaggaaggaaacggacagagggaaa

SEQ ID NO: 125129 - RNA, 72 nt, Homo sapiens
gggaagagcagagagcagggggcaggccccagccgcacgccgagccagccgaagcgaggggaagacgaaagg

SEQ ID NO: 125130 - RNA, 71 nt, Homo sapiens
ggcaggagaacaaagagcacaggcaaaagacgagagggcaaagggggagaaaaagggagaagcacagagac

SEQ ID NO: 125131 - RNA, 80 nt, Homo sapiens
gaggacggcgggcgcaaagggaagccgaggcccgcggccccagacgcaaccaggccccgcggaaccaagcagaagccaca

SEQ ID NO: 125132 - RNA, 87 nt, Homo sapiens
acgaacacaaagcaggagggagagggccaagaagcagcggacacaacccaggagaaacgagagggacagcaaggaagacgccagaga

SEQ ID NO: 125133 - RNA, 72 nt, Homo sapiens
gccagacgcaacggaccggaccgcgagaggggcaccaggcccaggcggcgaacaccggaccaagccaccacc

SEQ ID NO: 125134 - RNA, 70 nt, Homo sapiens
gaaggcacggggaggaggggcccaagaccagcagggaaagaccaccacacccacaagacacaccagaaag

SEQ ID NO: 125135 - RNA, 66 nt, Homo sapiens
gacggagaaaaacggagggagaaaaagcaagaggaaagcaggaggaggacagaagaccacacaccc

SEQ ID NO: 125136 - RNA, 67 nt, Homo sapiens
aacagagcaaaaaccggaaagaaacggggacagaagaacgaagaacaaggacaaggaaaacaggaga

SEQ ID NO: 125137 - RNA, 52 nt, Homo sapiens
gcaaaacggagccgccgcgcagaggaaacaaaagggcgacagcccagaggac

SEQ ID NO: 125138 - RNA, 71 nt, Homo sapiens
ccagaggaccccagccgcgcccgggagagcaagggggagagacaaccagagcggaaagggagaaaagcccc

SEQ ID NO: 125139 - RNA, 74 nt, Homo sapiens
ggccacgggcgggcaggcaaggcggaagccaaaccgaagggacagacccccaacaccaagagccccacccccag

SEQ ID NO: 125140 - RNA, 73 nt, Homo sapiens
caaacgaaaagagaagacacgcagggaacagaaaagagagggacagacacaacaacccaaagccaagcccccg

SEQ ID NO: 125141 - RNA, 71 nt, Homo sapiens
ccgaaagaaagccgcgaacccaaggcagacacaacaccacaagcaggcaaaccgacaccagcgacacaagc

SEQ ID NO: 125142 - RNA, 59 nt, Homo sapiens
gccaagggcccacacaccaagaccaagagcaggcgccggggcggagagaggggaagcaa

SEQ ID NO: 125143 - RNA, 79 nt, Homo sapiens
caccaaccccacccccacaccagccgcagagcccggccaacaacagccggggggggcacagagccccggaagacagccc

SEQ ID NO: 125144 - RNA, 88 nt, Homo sapiens
ccaagccaggcccaagagccgaaccagcacggccagggaaagcacgaagggagcccagcgacacaccagcagcagccaaagaccaacc

SEQ ID NO: 125145 - RNA, 75 nt, Homo sapiens
aggaacgccaaggcacgggcggccggcggccacaaggggagaggacgaagaaccggaagcccagccagggacaag

SEQ ID NO: 125146 - RNA, 53 nt, Homo sapiens
acacacacggcacagaaggcaacagaccaagaagaacagccaagagggagcac

SEQ ID NO: 125147 - RNA, 68 nt, Homo sapiens
ggaaccaaaaagcgaaaacaggaccaagagaagacagaacacacgacaccagaagaaaccagaacaga

SEQ ID NO: 125148 - RNA, 80 nt, Homo sapiens
gcagcagagaggaccccagaaacacaggaacaaggccaagcgaaggcgaaagacagggccggggcgcggaagagaaggcg

SEQ ID NO: 125149 - RNA, 35 nt, Homo sapiens
agcagacccaggcagccgcgcaagcgcccaagcca

SEQ ID NO: 125150 - RNA, 97 nt, Homo sapiens
ggcaacaagaagaggaccggcacgcaccaaagagaagagcccggaagccaggggagaaacagagaacagcgccaaacccacgggagagggcgagccc

SEQ ID NO: 125151 - RNA, 43 nt, Homo sapiens
cgagggagcgagcgggcagcgcggaaacaggaacacgaaagag

SEQ ID NO: 125152 - RNA, 64 nt, Homo sapiens
caacgacccacccagcaggagaacggacccggagggacagagcgaagaaccccccaagaagacg

SEQ ID NO: 125153 - RNA, 78 nt, Homo sapiens
cacccaccgccgccgccgaaaccagcggggagcggccacagagagccccaaaacccagaaggaagaagaagaaagaca

SEQ ID NO: 125154 - RNA, 71 nt, Homo sapiens
acccccggggagccagcgagcccccccgacacggccaaggcgggccaaaggagaaacaagaaggagacaac

SEQ ID NO: 125155 - RNA, 84 nt, Homo sapiens
cacccccgcccgggccgggggccgccgggacccggccaccagcaagccgagacaaagcaggaggacacaagaagggaggaaagg

SEQ ID NO: 125156 - RNA, 55 nt, Homo sapiens
cgcacacgcccccgccaagggccaggagccacggggccagaagccaaggggggca

SEQ ID NO: 125157 - RNA, 75 nt, Homo sapiens
gccaacgaggagaagaacaagccacgagaggcagccaccaaagaacaaggccaagcaaacaaaacacaccccgag

SEQ ID NO: 125158 - RNA, 69 nt, Homo sapiens
cacgagcgccacaaccccagcacaaacgccagaagacaacacaaggacaaaaggaacaggaaaagagac

SEQ ID NO: 125159 - RNA, 70 nt, Homo sapiens
gagacggggcccggcaccaaaacaggagacagccggacagaggcaaaccgacaccagcgacacaagcgcg

SEQ ID NO: 125160 - RNA, 74 nt, Homo sapiens
gcaccagcaggcccggccccagacgagccgagaaggggggcgcccccgaggagaagcaccgacaaccggagaaa

SEQ ID NO: 125161 - RNA, 41 nt, Homo sapiens
ggaggaaccacagcaagggaagaaccccagcacaagaagaa

SEQ ID NO: 125162 - RNA, 70 nt, Homo sapiens
ccgaagaaaacagcgggaagagacagccaagacagcacccggcgcaccccgagaccgaccgaggaaccgg

SEQ ID NO: 125163 - RNA, 76 nt, Homo sapiens
cccagaccaggcgggggcccgaccgaccccggacgacgccgacgaagcaggagaccccgaaggcgccgaacccgcc

SEQ ID NO: 125164 - RNA, 68 nt, Homo sapiens
caccagggccagggaccgcccagccccacacgcagagaacacggaccagaaaggaggggcaagacgca

SEQ ID NO: 125165 - RNA, 31 nt, Homo sapiens
cgggaggagagaaccgcgggaaggaagaaag

SEQ ID NO: 125166 - RNA, 78 nt, Homo sapiens
cgagcgaagcacccccagcggggaccgcccgggacaacagcgcggggcacaggagccaagaaggcaagaagaggagcg

SEQ ID NO: 125167 - RNA, 90 nt, Homo sapiens
gccggcaggcggccgcagcaacccgccgggaagaaggaccggggagacaggaacacgggcaagacagcgcgggcaccgccgcagggccgg

SEQ ID NO: 125168 - RNA, 58 nt, Homo sapiens
cacggacaccaacgagcgaagcaggaaaagccaagaaagacccaaaagaccccagacc

SEQ ID NO: 125169 - RNA, 67 nt, Homo sapiens
gggcacaacaaacaaaaaccacgaaccggcaccaaaaggaagagacaagccacaagcaaaaaacaga

SEQ ID NO: 125170 - RNA, 80 nt, Homo sapiens
ccgagcgggaggccacagcagccagccggcccgaggacaccgacaccagcagaggacccaccggagaggcaccacagcgc

SEQ ID NO: 125171 - RNA, 73 nt, Homo sapiens
ccgacacgggccgcgccaggaaagagaaaggagaccacaagaccccgcgccaccaaagggagggcggccaacc

SEQ ID NO: 125172 - RNA, 86 nt, Homo sapiens
ccggcggcggccagcccgacacagaagggagagaaggacccaaagggaaaaagggaaaagcgagcggcaaggaggggaaaacccgc

SEQ ID NO: 125173 - RNA, 62 nt, Homo sapiens
ggaaacagagaaaagacaaaccggcgaccacacacggggacgacggggaagccggacagcaa

SEQ ID NO: 125174 - RNA, 73 nt, Homo sapiens
acagaggaaagcacaaaggaagacgaaccggagaagagggagagcccagagacaagcaaagaggcaggacaga

SEQ ID NO: 125175 - RNA, 75 nt, Homo sapiens
gcacacagcacgggcgggggacgggcagaaaaacagaggaccacccgcacccaggggacgcacggcccaaccccg

SEQ ID NO: 125176 - RNA, 76 nt, Homo sapiens
gccgcgccgcgccgcaccccgagcgaccggccccgagccccggccccaaagacccaaaacagagacaccccccagc

SEQ ID NO: 125177 - RNA, 83 nt, Homo sapiens
gcggcgcagcacgagccaggaacgcgcagccccgagcgccgcggacgcgcacgagggacggggaaagccgcgacagggcggga

SEQ ID NO: 125178 - RNA, 88 nt, Homo sapiens
gcaggaccccggcggcgcgcggaccagggggcggcgccaggacaggaggggcacgcccggaagaccagacccgcagcccagccagacc

SEQ ID NO: 125179 - RNA, 58 nt, Homo sapiens
gagaaagggcaaccaacaccggaaacgccaggccacaagggagcaaacgaaaagccac

SEQ ID NO: 125180 - RNA, 38 nt, Homo sapiens
ggggggcaaacccgagagaacggacccgaagaagcgca

SEQ ID NO: 125181 - RNA, 79 nt, Homo sapiens
gcccccaacgacgcggacaggcagagcggaaccgggcaaacaccagcaacacccgggacaaaaacgggggccaccaccc

SEQ ID NO: 125182 - RNA, 81 nt, Homo sapiens
agcacccagccaggaggaggggaaggaaggcgcaacgacccacaaacaccggcacagggcgggcagccccaggcccagaga

SEQ ID NO: 125183 - RNA, 83 nt, Homo sapiens
cgccgccgccccgccagcgccagacggacgaggcggcggagaacaagcggcagggggggaccagaccaggccaggagaagccc

SEQ ID NO: 125184 - RNA, 69 nt, Homo sapiens
gggacaggaggccccgcaggaccgcacccgcggagacggacgcccgggaaggagaagcgaggggcggaa

SEQ ID NO: 125185 - RNA, 81 nt, Homo sapiens
caagacagggcaaaggacagaccaggccaagcgcccgaccgggaggggacgggagaagggaccacccgagcacagacgcag

SEQ ID NO: 125186 - RNA, 71 nt, Homo sapiens
agcagccagaccaagaacaaccgcggacacggagaggaaggaaccccacaaggacaacgaggcaacgcaga

SEQ ID NO: 125187 - RNA, 46 nt, Homo sapiens
gaacacggagcggccaacagggggagccgccagaccagcaggccag

SEQ ID NO: 125188 - RNA, 78 nt, Homo sapiens
caagaaagcagaaggaacacccgaaccaaggaagcaggccagaggacacaaaaggaccgacaccaccaaccaaggacg

SEQ ID NO: 125189 - RNA, 60 nt, Homo sapiens
ggcccagacggcaagcaggcaagacagacacaggacacgacgccccacgccacccggacc

SEQ ID NO: 125190 - RNA, 72 nt, Homo sapiens
aacagcgaacaacagagggaaaaagacccgagaagcgcagacccaccagggaaagcaaaggcagggccaaaa

SEQ ID NO: 125191 - RNA, 83 nt, Homo sapiens
acgccgaacccagcacgggaggccgagggggacacgccagcggcgcagccgacggaagaccgggagacaaaacaacagcagga

SEQ ID NO: 125192 - RNA, 68 nt, Homo sapiens
agagcgaacagaaagaaaaaagagcccgaggaccacaggcggaaagaaagcgagaaggaaaggacgcg

SEQ ID NO: 125193 - RNA, 80 nt, Homo sapiens
aaaaaacggaaaagaaggcagcggaaacgcagacacgaacgggccgaagccaacaacacaagcagcaggagcgacggaaa

SEQ ID NO: 125194 - RNA, 34 nt, Homo sapiens
gagggggggcgccagcgcagacccaggggagccc

SEQ ID NO: 125195 - RNA, 63 nt, Homo sapiens
ggaaaaccaggaacggccaggagagcagagaacacggggacggccggagcccggagccgggag

SEQ ID NO: 125196 - RNA, 83 nt, Homo sapiens
agggggagagacccgcgcccccccgagcccagggcacggccaacaccagcccacgcaaaaggaggggaacagagcacaccaca

SEQ ID NO: 125197 - RNA, 78 nt, Homo sapiens
aggcggcccgccggcagagcgaggcgcagcccagcccgaaagcagaacgacgccggcgagcgggaccgacggccgcgg

SEQ ID NO: 125198 - RNA, 83 nt, Homo sapiens
gaagaacaaggaagcggagaggcaagagcggagaagcggaggagaccaaggaggccaccaccacagaaggagcggcacggagc

SEQ ID NO: 125199 - RNA, 73 nt, Homo sapiens
gaggaaacagaaagaaccagcaggacaggcacacccgggcagccccagcccgcagaagcccagaacaagcaca

SEQ ID NO: 125200 - RNA, 78 nt, Homo sapiens
accacggaccccaaggaagccacggcagacacacaacccgacccgacgaaaggccggcccacagcccaaaaagaaaca

SEQ ID NO: 125201 - RNA, 71 nt, Homo sapiens
aacaggacacgccccacgaagggacacacccacaaacggcaccggaacagcacaaccgcccggcggaggaa

SEQ ID NO: 125202 - RNA, 62 nt, Homo sapiens
cggggaaggaagagaccagcgggcagagcgcgagggcaagaaggccagcaacagaagaaagc

SEQ ID NO: 125203 - RNA, 77 nt, Homo sapiens
gcccccgccaccggaccacagcgcacacgcagagccacggccaacagagaacaaccaaggacgaagacgaccgaagc

SEQ ID NO: 125204 - RNA, 72 nt, Homo sapiens
ggagggagccgaggcaacagaggaaaacaaacaaacgcaaacgggaacggcagacacaggaaaggaaaggaa

SEQ ID NO: 125205 - RNA, 83 nt, Homo sapiens
gacggagaaaaaaggcgcaagaagggcaagagacggaaagaacaggccaagaaaagccaaagaaagcaaaaccagcagcagca

SEQ ID NO: 125206 - RNA, 65 nt, Homo sapiens
aaaagacgccagaagagaaccacaagacggagccaccaccaccccgagagacggaccggaccacc

SEQ ID NO: 125207 - RNA, 72 nt, Homo sapiens
cgccaaagcgcggaaacaaaggccacccgggcaggaccagaaagagaaccaccgggagcgaggagagcacac

SEQ ID NO: 125208 - RNA, 73 nt, Homo sapiens
cagcccacagagaaaccagcgacccaccggagacaaggggccccgcgagaagacgccaaaagaccagacccag

SEQ ID NO: 125209 - RNA, 73 nt, Homo sapiens
acagcgccagggacaagaacagacaacccagaaaagaaaaggccaggggcgccgaaaaacccgggaacaaaca

SEQ ID NO: 125210 - RNA, 75 nt, Homo sapiens
cgccaaagaagagaaaacaggacaccaaccgaaagagcccaaaacgagagccacagaaacagggcaccaacaccc

SEQ ID NO: 125211 - RNA, 54 nt, Homo sapiens
cgccggccgaacagcccacgccaagcagagagacgcaggaaaaccgcagacgaa

SEQ ID NO: 125212 - RNA, 74 nt, Homo sapiens
gagaaagagcccaacacgcccgggagcgcggcggggaggggaacaaaggccgacaaagaacacaaggggaaaga

SEQ ID NO: 125213 - RNA, 78 nt, Homo sapiens
accgaggagagacacggaccaccacgcccggaagggaaaggaacccagcagaagccagccgccacgccgagccagcca

SEQ ID NO: 125214 - RNA, 70 nt, Homo sapiens
aggggcagacaagcacgccgcccagacaacccaagaggacggaaaccgagagaacaaccaccggagcgca

SEQ ID NO: 125215 - RNA, 57 nt, Homo sapiens
acacaccaaaacaggaagcaaggagcagcagacccaggaaaagcgcaagcaacacag

SEQ ID NO: 125216 - RNA, 74 nt, Homo sapiens
cgaggcgcaccagagaccggacccgccagcacgagccagggagccgccgggaccggcccgggagacgacaaccc

SEQ ID NO: 125217 - RNA, 75 nt, Homo sapiens
caccgggacagagaaaggggaaagagggaacaaggagaagcaaagaggaagaacagacaacccagcaacagacgg

SEQ ID NO: 125218 - RNA, 71 nt, Homo sapiens
cgagcggaccccgaccccgaggcgagacggaaagggacacggcccagggagagcgaagagagaggacccgc

SEQ ID NO: 125219 - RNA, 68 nt, Homo sapiens
cgaacagcgcgacacaggaggcagcacaccgcgcccacaggacgaaaccgggcggggaagggcagcgg

SEQ ID NO: 125220 - RNA, 64 nt, Homo sapiens
gagaagcgagcacaaaaagaaagaagagaaccagacgccagagaaaaagaaggaaagacaacag

SEQ ID NO: 125221 - RNA, 73 nt, Homo sapiens
aacaggcggcgcccagggcgccaccgccgccgcagaggagggcaggagaaaggagaaaaagaggcagggagaa

SEQ ID NO: 125222 - RNA, 79 nt, Homo sapiens
ggggcgacgccacagagaaaggccagaggacccgagaggaagacacgaggcagcagcgaggagcaggcaggagggagga

SEQ ID NO: 125223 - RNA, 74 nt, Homo sapiens
agaaaaagcagccggagacaggcgagaggaagacgacgaggaagagcccgccgaagggaagaagacgccgaaca

SEQ ID NO: 125224 - RNA, 74 nt, Homo sapiens
cccacgggacacgcggcaggaacggcgaaaccacagaaacaaccgaaccagagacagcgaaagccgcagcaagg

SEQ ID NO: 125225 - RNA, 79 nt, Homo sapiens
gccaccaaggagaggagcccaagaggcacgcaccccacaaaaaaaagacagagaccaccaaaagagggaaccaacaaca

SEQ ID NO: 125226 - RNA, 78 nt, Homo sapiens
ccaaaaccagaaccacgccccccaccccaaggaggccaggccagagggaccaacgaaggcaaacaccacacgcagagg

SEQ ID NO: 125227 - RNA, 72 nt, Homo sapiens
gcagggcaagcggcgacacacgacggggaagacagaaggaagcaaagacagagcaaaaggagcggaggagca

SEQ ID NO: 125228 - RNA, 66 nt, Homo sapiens
caccaagaggaaggagaacaaccgaaagaaagccgggcagacccgaaaagcggacgacaagggaac

SEQ ID NO: 125229 - RNA, 60 nt, Homo sapiens
ggccgagccagccgcggccggaggagcccccaggccgaagcgccacgcagagagcaaggc

SEQ ID NO: 125230 - RNA, 74 nt, Homo sapiens
ccacccgagcagccagagcggaccggggcagaccaaacggcaaggacacaggaacgccacaagaaacaacagca

SEQ ID NO: 125231 - RNA, 39 nt, Homo sapiens
gccccacgcacgcacagagcacaagcgggagaacgaccg

SEQ ID NO: 125232 - RNA, 67 nt, Homo sapiens
gccggggcgccgcgcgccagcccaggaaaggcgccgaagaggaaggaagcagccaccccgccaggcc

SEQ ID NO: 125233 - RNA, 71 nt, Homo sapiens
agccaacacaaggcaggagaagggcccagccgacagcaccagagaagcaaaaaagcgaacgcaaggggcca

SEQ ID NO: 125234 - RNA, 73 nt, Homo sapiens
aaaacggagagccacaaaaaaggaagcgaaagaagagagaagacagcagcgaacaagaaggggcagcccaccg

SEQ ID NO: 125235 - RNA, 59 nt, Homo sapiens
gaccgaagacgaccgacccgcccagcacgaccagccagcaggcccgggcccccacaacc

SEQ ID NO: 125236 - RNA, 77 nt, Homo sapiens
accaggcaccgcgcccgacaacgccgcggaagaggagaaccggaaccgggagcacaggaggcgcgagacggcagccc

SEQ ID NO: 125237 - RNA, 69 nt, Homo sapiens
aggaagacacacaaacggcgcggcagaaaaaccagcccggcgcagcccacggcagacacagcaggccaa

SEQ ID NO: 125238 - RNA, 59 nt, Homo sapiens
gcgcaaccgcagcacacagcgaccgggagaacaagacggcacacagagaaaaaaaggga

SEQ ID NO: 125239 - RNA, 76 nt, Homo sapiens
cggaccccgccccccccgcgcggcgcgggcgccgggggcaccgagggggggcaagagcagacggcggcagacaaca

SEQ ID NO: 125240 - RNA, 70 nt, Homo sapiens
ggaagaggaccaaagcgaacaacaacggcaagcggagaagagcaaggccgaaccgagaggaagggcaaca

SEQ ID NO: 125241 - RNA, 56 nt, Homo sapiens
cacagcggagcggaacagcaaacagggggccgacgacgagccccgcgaggagcgca

SEQ ID NO: 125242 - RNA, 73 nt, Homo sapiens
agcaacccagccgccggccgcgggccccgaggagacgagaaagagcggggaaggcaaagccgaagaagcagca

SEQ ID NO: 125243 - RNA, 73 nt, Homo sapiens
ggacaaggcaacacccgaagaaacaagcacagggaaacacaaagaagacaccagaagggccagcaccacgaca

SEQ ID NO: 125244 - RNA, 82 nt, Homo sapiens
gacccgcaaagaccgggagaccaaggccgagaagccaggaaggaaggaagcagccaggcggccagggagaaaccaggaggcg

SEQ ID NO: 125245 - RNA, 60 nt, Homo sapiens
ggacccggaccagccgaaaagccccgcccgcccggaaggggagagcacaagcgaaaccag

SEQ ID NO: 125246 - RNA, 73 nt, Homo sapiens
aaacaagaaacagcagccaaccaggcccgagacaaaaagaccaccgcccacgaagcccgacgaggcccgagag

SEQ ID NO: 125247 - RNA, 78 nt, Homo sapiens
cggaagaggccacgaggcgcacaccgccagcccaagaaaaagggcggagaacggaaaagcaccaggaagcagagagga

SEQ ID NO: 125248 - RNA, 86 nt, Homo sapiens
gcgcggagccggagcggacgccgccgccgccaccgccaccgcgcggcagcacaagaagcaccagcaccaagaccagccagggagac

SEQ ID NO: 125249 - RNA, 33 nt, Homo sapiens
gcacaccagaacaacacagacccagagaagacg

SEQ ID NO: 125250 - RNA, 95 nt, Homo sapiens
gggaacagcgagcggagccggcaggaaggggaccgggcggcggagcggcggaagaaggagaaggggcgccacgcacccgggacggacaggcgcgg

SEQ ID NO: 125251 - RNA, 76 nt, Homo sapiens
gacccggagaccagggggagccggcgccgcgcccaagccggacggggacgagcggcaggcgcaagagagcaaagcg

SEQ ID NO: 125252 - RNA, 86 nt, Homo sapiens
ccggaagcaccccggcggccgcggaagcggggcgcacaccaccggacaaccgacaaaacaggacagcggccgaagccagagccggg

SEQ ID NO: 125253 - RNA, 80 nt, Homo sapiens
gaacaacagaggcgcaaagccgggacagccagaacaccccaccagaccacccagcaagcccacaaaaaaggcacaagcag

SEQ ID NO: 125254 - RNA, 72 nt, Homo sapiens
cggaaaaagggagggacaagagcagcaccaagcgcagagcgcgcccaggagaagggagcaggagaagcacca

SEQ ID NO: 125255 - RNA, 76 nt, Homo sapiens
cagaagaaaccagccagagagccaagaagaacagacagacaggcccaggaacgaagcagagcccaacaggggagcc

SEQ ID NO: 125256 - RNA, 123 nt, Homo sapiens
caaccgggaaggacaagccggaaaggaggaagaagaaaagcgaaaagcaaacacacgcagcagcgaacagagcagagcacgcccagaaggccggaaaggagcacacccagcaaagaagcgaag

SEQ ID NO: 125257 - RNA, 76 nt, Homo sapiens
gcgggcaggagggacccagagcgaacgcaacagaacagagcgagcgcagcagcagcccagggcgagggacaggccg

SEQ ID NO: 125258 - RNA, 85 nt, Homo sapiens
gaggccaggggagcggacccgagccgcaagcagcgcggccaagccacgccaacggaggcagcacccagggcaccggagcaaaacg

SEQ ID NO: 125259 - RNA, 67 nt, Homo sapiens
aggggggagcggccaacccaagggccccagcccgggcccccaacgagagcccaaaaggcagagcgag

SEQ ID NO: 125260 - RNA, 69 nt, Homo sapiens
gcagcgcggagcacggaagaaggcagacagggaccgaacggcggccaaagcgccagacaagggccgagc

SEQ ID NO: 125261 - RNA, 80 nt, Homo sapiens
gcgggaaaaaggcggggccgccgcccccagcgcgcaacccaggaacccggacacggccacacagaccgaacacaaacagc

SEQ ID NO: 125262 - RNA, 84 nt, Homo sapiens
ggaagacgagccgggaggaacggcccggaaacaggaggacgaaccgggacggaagggggaggaccaggccccaacccagcagga

SEQ ID NO: 125263 - RNA, 69 nt, Homo sapiens
gacccgcgcccaggaaagccaaagcccagaagaacaggcggcgggcagagcgaggcagaaagaggagaa

SEQ ID NO: 125264 - RNA, 88 nt, Homo sapiens
cccgggaggccggcgccgcagcccgggcccaggccccggcagcgccgggacaaggaaggacaaaggaccaaacagaaaaggaaaagag

SEQ ID NO: 125265 - RNA, 85 nt, Homo sapiens
caacccagacccgcgcccccgccagaggcccggcgcagcggagagccaccccccaaagcaggacaacggacggccggcaggggga

SEQ ID NO: 125266 - RNA, 110 nt, Homo sapiens
gggaaggcccaggacagcgggacgaagaggaacgcccgggaaacaaacacgagcacgagacgacggagagggacaaacaaccaagggagggaacccagcgccccaagcgc

SEQ ID NO: 125267 - RNA, 72 nt, Homo sapiens
gccggacccgccagaggaccaacagggacggagcggagaaaaggaaccggccccgggccggaagcggccgga

SEQ ID NO: 125268 - RNA, 72 nt, Homo sapiens
gacaaagcagaggggaagcgccagaagggcagagagggaacgacaccaaaaaggcaaggacagaacccaagc

SEQ ID NO: 125269 - RNA, 83 nt, Homo sapiens
ccacgggcagggcaaagaccaaggagcagggacaggagggccacacgggcacgcaggcggcgccacacggcacaggccccgcc

SEQ ID NO: 125270 - RNA, 84 nt, Homo sapiens
ccagaggaagcaggccaagacacacccccaccccccagcgcgcccacagaaccccacagggcagaggagagagaccaggaaggg

SEQ ID NO: 125271 - RNA, 80 nt, Homo sapiens
gcaaccggcacgggaggccaaggaggcgcaaacgggcgcaaggcgccaaaacaagagaccgcagagcggggcgcagacaa

SEQ ID NO: 125272 - RNA, 83 nt, Homo sapiens
gcagcccgggagaaccgcggcggccggagcgagcccgcggcgagggagggagaaacaagacccaggaccaccaccacgggacg

SEQ ID NO: 125273 - RNA, 58 nt, Homo sapiens
aaaaaaaaacgcgaacaccgacggagccagggggggccgcccgcccaaggcaggaaga

SEQ ID NO: 125274 - RNA, 87 nt, Homo sapiens
gcgcgaggcgggggccggccccggaggcggcggggcggcagagagcggggcggcggcaggcacacggaagcaggcgaacacggaggc

SEQ ID NO: 125275 - RNA, 90 nt, Homo sapiens
ggacagagcgaccaggggcgagagcgggcaccccccaaacgacgcagccacggagaggacaccccccaggcacagccacaccccagcggc

SEQ ID NO: 125276 - RNA, 66 nt, Homo sapiens
ggacagcgccacggcgggccgcgggaggacaccacccacaggcacgagaggaagccgaacccggag

SEQ ID NO: 125277 - RNA, 76 nt, Homo sapiens
agcacccggacagggcgccagacaccaaaggaaaacacccaaacaggacacccaggcacgaaagaacggaggaagc

SEQ ID NO: 125278 - RNA, 71 nt, Homo sapiens
aaacggcggcccacgcaacacgcaccgagagagcgggaaagagcaaaaaacaacagggaacggaggagcca

SEQ ID NO: 125279 - RNA, 81 nt, Homo sapiens
aacagcaaggaagcccgaaggggaggagcgaccaggaagaccacgacaggacaacagaaaaacacacacagggggaagaac

SEQ ID NO: 125280 - RNA, 74 nt, Homo sapiens
gaaggaccgagaccaggaggaagacggcgaaggcccaggaagaagaaccgcagagaggaaaggcgccacacacc

SEQ ID NO: 125281 - RNA, 57 nt, Homo sapiens
gcggcggccgcgcgaggcccccggccagggcaccggcgggcacgcgagaagggaaga

SEQ ID NO: 125282 - RNA, 47 nt, Homo sapiens
gccccagggacgagaggaagaccgaaggacaagcgcgggggcgcgga

SEQ ID NO: 125283 - RNA, 67 nt, Homo sapiens
aaggaagagagccaacccacacagcagggaggagcgggagcacccgagcggaagacccggacaaccg

SEQ ID NO: 125284 - RNA, 71 nt, Homo sapiens
ggagaggaaagaaggccaaacgaacaccaagcaaagaagagacaggggccaggccaggggcaggggaagca

SEQ ID NO: 125285 - RNA, 59 nt, Homo sapiens
aaagcagcacgcgaggaggaaaggcaccccaccagggcagggaggggagcgaagagcca

SEQ ID NO: 125286 - RNA, 75 nt, Homo sapiens
gccccacagggaagaagagaagagcccagcgagaaaggaccccaacgaagcagaaagaacaacacaagcgggagg

SEQ ID NO: 125287 - RNA, 77 nt, Homo sapiens
acagaaaaggaagaaagggacaaagagaggagcaggaaagagagccccagcacagcacaacagcaagcagccccaac

SEQ ID NO: 125288 - RNA, 95 nt, Homo sapiens
ccaccgacgcggggcggcagccccaacgaccacgcaagccaccgggacagcccgggcaggggagagagcccgagggagacccgccccccggccca

SEQ ID NO: 125289 - RNA, 57 nt, Homo sapiens
ggcgggccggagcggcccgcgccgggcgccggcaccgcggcaggcggaccagaccca

SEQ ID NO: 125290 - RNA, 74 nt, Homo sapiens
gcgggccgaacaaggagggagacaaaagggacacaagaaaggccagcccgagacgaaaggaccgcccggagagg

SEQ ID NO: 125291 - RNA, 61 nt, Homo sapiens
acaagaaaaggggcggacagaaaaggggaccagagacagaggccccccggaggccagcccc

SEQ ID NO: 125292 - RNA, 69 nt, Homo sapiens
aaaacagcggccaaaaaagaaagcacagagaccgaagggagagcgcgacccccggccaagaagaggaga

SEQ ID NO: 125293 - RNA, 81 nt, Homo sapiens
cgcgaccagacaggcggcgccaccgaacagacccggaaggacggcgagggacccaaagacaggaccacgcaccagcagaga

SEQ ID NO: 125294 - RNA, 70 nt, Homo sapiens
gcccgcacccgaccgcccaccccgccggacacgaacgaagcgggggggcgaacaggcgccggcaccggga

SEQ ID NO: 125295 - RNA, 66 nt, Homo sapiens
cacagccagcaacaccgggaggcgggggagcgcgggcgagccaagcagcgggcggacgcccagccg

SEQ ID NO: 125296 - RNA, 83 nt, Homo sapiens
cgaggacaggccccgacgaggacaggccgagaacacggggcgggccagaacacacggacgcgggggggcccccccgcaacggg

SEQ ID NO: 125297 - RNA, 76 nt, Homo sapiens
aaaaggcgcggaaaaaggaacgaaccagaagccgaagccggagaaccaaggaagaagagagggcgaaggaggccac

SEQ ID NO: 125298 - RNA, 77 nt, Homo sapiens
gccggggcagcggggagcagagcggcgaaagagccgcagacgcacagcaaccaccggacccgaaggccaccacccag

SEQ ID NO: 125299 - RNA, 71 nt, Homo sapiens
agggcgccccccacacaaggacaggaccgcaagcccgcagggacgaggccccaagccaggacccgaaaagc

SEQ ID NO: 125300 - RNA, 63 nt, Homo sapiens
cgcccaaaaaagcacgcggaggcagcccaaccggcagaagggagagaaagaacaaagacccga

SEQ ID NO: 125301 - RNA, 75 nt, Homo sapiens
ggacaccagcgagggccacacaggagcccggacggcacagggcagccaggcgagcggcagggagacagcgcaccc

SEQ ID NO: 125302 - RNA, 79 nt, Homo sapiens
ggagcggaggcgcggcgccgggagcgaggacccaaccgcggcacacagaaaacccggacccaccccgcccagaaccccg

SEQ ID NO: 125303 - RNA, 61 nt, Homo sapiens
gagaaaacaacaagagaaggacagcggccaacaagaaggcgccgcgcccggggagacagaa

SEQ ID NO: 125304 - RNA, 89 nt, Homo sapiens
cccacgcccagccaggagcaccgccgaggacccagcacaccgaggggcgaaccgaccaagaacaacacccagagggccaggagaaggcg

SEQ ID NO: 125305 - RNA, 92 nt, Homo sapiens
caccgagggcgaggccgcgcagccgggacacgccaaagcgcagggccacgcaagcaaaagaacacgccaggaggaacgcagcaccagcccac

SEQ ID NO: 125306 - RNA, 77 nt, Homo sapiens
cacgaaccaagcgggaacacggacagcccggccaccgacccccacgacgggaagccaaggagaagagaccaaggcgc

SEQ ID NO: 125307 - RNA, 81 nt, Homo sapiens
gcgagcccgaggccaggcgccggccggcgcgaagacgcgggggccgccccccggaagcagaagaaagaaggcaagccacca

SEQ ID NO: 125308 - RNA, 66 nt, Homo sapiens
aaagcagaccagaaaaaacagcacaccaggaagcaagggaggagggagacaggggcaaaaaacggc

SEQ ID NO: 125309 - RNA, 105 nt, Homo sapiens
ccggccaagcgagacgggcagagcccaacccagacccaccagaggcaggggagggcgaagaaccgaagaacacccagggccacacaaaaaaagaccaggacagca

SEQ ID NO: 125310 - RNA, 75 nt, Homo sapiens
gcacacaacagcagcagggggagaggcaccagcaacagaccaaccgcagcaagcacagagacaggaagcccgcca

SEQ ID NO: 125311 - RNA, 108 nt, Homo sapiens
aaagcccgggaaaacggccaacgaccacccagggaccgcccagaggagcccagacaagagagacaaaaggacccaggaaaggaagacagcagagacaaagccgccccc

SEQ ID NO: 125312 - RNA, 84 nt, Homo sapiens
ggcggaaccagggccgacccgggccggaccgaccccaggcggcggagagaacagaaagaccaagcagaagagaggacaaagcac

SEQ ID NO: 125313 - RNA, 70 nt, Homo sapiens
acaaaggggggacacccagacgggcccggagcggacccagacacgcgaccaagcccccacagagagcaca

SEQ ID NO: 125314 - RNA, 75 nt, Homo sapiens
acggcagcccagagagacggaaacaggaacaccaaggaagcaaaagccccagaacaaaagagcaccggccagcag

SEQ ID NO: 125315 - RNA, 49 nt, Homo sapiens
agccaccgcagaggacagacagaggcagagcaccggcacccgggcggcg

SEQ ID NO: 125316 - RNA, 62 nt, Homo sapiens
aggaagagagaccgacacccaagacaagacagcgcaaggcaggggacacgcgcccaccaggg

SEQ ID NO: 125317 - RNA, 73 nt, Homo sapiens
cggggccccccgccagcggggggaagaagagcgcaccgaaggcacaagggaaaccagaacaaaaggccagagc

SEQ ID NO: 125318 - RNA, 71 nt, Homo sapiens
ccgaagcggccaggagaacaacacacaaaaacgcgaaggccaacagcagggacggggaaagacggaacgag

SEQ ID NO: 125319 - RNA, 53 nt, Homo sapiens
caaggggaggcaaaccgaggaacagcagccaggaagggcagagacaggcaaca

SEQ ID NO: 125320 - RNA, 79 nt, Homo sapiens
cgaagcccgcccggggccccccgcgcggaccacaggcacagcagagagaagcgccgccccagagggcgcccacgggccg

SEQ ID NO: 125321 - RNA, 67 nt, Homo sapiens
aggacaaaccgcgcccgggaccacaggcaccagccagcaaaggaaacggggaaaaaggaacgacgga

SEQ ID NO: 125322 - RNA, 80 nt, Homo sapiens
aagcggcccgacaaacggacggagagaaggggcaaacacggggaggaaaaagcagcgaaacagacaaccccccacacaac

SEQ ID NO: 125323 - RNA, 76 nt, Homo sapiens
ccgcggaaaagacacgccgacgaagggcagaggaacaaagagagcgaagcggagcagaacaggagaagacgcacca

SEQ ID NO: 125324 - RNA, 74 nt, Homo sapiens
ggcggggcggcccaccaacaggaacagggcagacgagcggaggacacccaacccgggaacacagaaacgccccg

SEQ ID NO: 125325 - RNA, 76 nt, Homo sapiens
accggaagggcggggcaccacggaaccgggccgacggccgggcgggaaggcagcccagcagagcacccgaaggccc

SEQ ID NO: 125326 - RNA, 70 nt, Homo sapiens
aaaggagcagcccgggcaccacagaaaagacacccgaggaagacaaggcagaggaggaaaaacaaaaagg

SEQ ID NO: 125327 - RNA, 81 nt, Homo sapiens
cgagcccgcaccccgaccagaacgaccaaacccagccagaacagaagacccaacagaggaagccgcaagaaacgggacgac

SEQ ID NO: 125328 - RNA, 60 nt, Homo sapiens
ccagacagcagccaagacaggcaaagacacggggaccaccagcacggacacaagaggaag

SEQ ID NO: 125329 - RNA, 76 nt, Homo sapiens
acgccgccccgacgcgagggcagccccgccagggccaagggccgcgaagaacacgagacccgagcagcccaacccc

SEQ ID NO: 125330 - RNA, 74 nt, Homo sapiens
ggacgcccaccacgggaagcccggggccgcgggcagcaggaagaccaacggggagccggggaagaggcgcccgg

SEQ ID NO: 125331 - RNA, 79 nt, Homo sapiens
gcaacgaaaacccccgggcccggagacgcgacaggggaaaaagaaaagggcgaagacccgaagcagcgcaggaacagaa

SEQ ID NO: 125332 - RNA, 56 nt, Homo sapiens
cagggggcagggcggcagaggaggaaggggagaagaaaaagcagcaaaagagaagc

SEQ ID NO: 125333 - RNA, 55 nt, Homo sapiens
caggcacgagaaaaaaccggaaaacccagaaaccagagacgaccacaagaaccca

SEQ ID NO: 125334 - RNA, 83 nt, Homo sapiens
gcagggcagggccccgcccggcggggaaggccaccggccagaacggaggaaaaacgacgagccaggaaacaacgcaagaacgg

SEQ ID NO: 125335 - RNA, 83 nt, Homo sapiens
acgagcagaccccaaacccaaaaccacgccaggagccaaagcggggacccccaccccaggagcaacccagccccaaggccaac

SEQ ID NO: 125336 - RNA, 75 nt, Homo sapiens
aaacggggggcgcggagggaccagcgagcgggaggcaagccgcaaaggaccccaccccccagaagaggagaagag

SEQ ID NO: 125337 - RNA, 70 nt, Homo sapiens
gcaaggaacgaaagcgggaagacggaagaaacagaaacaagacagacgaagaaggaaaagcgaacagaac

SEQ ID NO: 125338 - RNA, 81 nt, Homo sapiens
gggaggaggaggaccggaggcaacgcagaagaagaccgaccgaaacgcgcacaggagaccgggcaccccccaacccgagga

SEQ ID NO: 125339 - RNA, 74 nt, Homo sapiens
cggcaaacgcgagcgaggacccaaaggggagaaaagacacacagagcggacacggacgacaccgagcccaaccg

SEQ ID NO: 125340 - RNA, 77 nt, Homo sapiens
ccaaaccggagggggaaaaaacccaaggcgcaaagccagagccaagccggagaccgagagacgccccacagacacgg

SEQ ID NO: 125341 - RNA, 70 nt, Homo sapiens
aggaaccaggagagagcagccagagggaggacaaccggaaacacacaggaacagaccaggcaccccaaca

SEQ ID NO: 125342 - RNA, 85 nt, Homo sapiens
gggcgaccgcaggcagcaccggaggcccaggcccggcagcccaacccagcaggacaagaaggagacccaacaccccggccagacg

SEQ ID NO: 125343 - RNA, 83 nt, Homo sapiens
cgggccgacggaacaagaagccccagcagggagagcaccacagcaaccaggaagaggaagcagggaacgggggaaagccagcc

SEQ ID NO: 125344 - RNA, 78 nt, Homo sapiens
ggggaggcgaacagccggcgcccggacgcgaggggggaggaagagaccgagaccaggaaccaggcaggggaacggagc

SEQ ID NO: 125345 - RNA, 84 nt, Homo sapiens
aaaagaggcacggagaaaagaaggcccaaaccagccagagcggaggagaaggacgggacgagacaagggcaacgagacacccag

SEQ ID NO: 125346 - RNA, 74 nt, Homo sapiens
cgggccggcgagcgcagcgcgaccgggaggcccaggcagagaacagcagaccacagcagggagcgggcgcacca

SEQ ID NO: 125347 - RNA, 75 nt, Homo sapiens
gcgaccgcagaggcacagaaacaccgaccagagagcccgaaggaccggaaccagccccgaccaccacacagcagc

SEQ ID NO: 125348 - RNA, 72 nt, Homo sapiens
gcgaggcggaggcgacgggcgacggcgcgagaggagcgcgcgcagagggccacccgcccacagccacagaag

SEQ ID NO: 125349 - RNA, 67 nt, Homo sapiens
aaacccccaccaacccgccgagccagggagccggggccggggcccacggacagcccagccaagcgcc

SEQ ID NO: 125350 - RNA, 82 nt, Homo sapiens
acgcgccaacacagaaaaaggagcgggcgcggggccccaggagcgagcagagggccccgggagagaagccgccggaagccag

SEQ ID NO: 125351 - RNA, 84 nt, Homo sapiens
cagagccaggaacgcccggccgcgcccgcgcccagcccgggccccgcgcacagccccagcgcagggaccaggccggcacgacaa

SEQ ID NO: 125352 - RNA, 62 nt, Homo sapiens
cggaaggaggaagaagagccaggaaacaagccccaggcgcccccgcaaaggacaacaggcaa

SEQ ID NO: 125353 - RNA, 37 nt, Homo sapiens
gaccgcggcccccggagcgccaggacacagccagcag

SEQ ID NO: 125354 - RNA, 72 nt, Homo sapiens
gacagagaagaggacgcggagacaagagagacgaggacgcgcacaggaaaggacgcggaacaagcaggcagc

SEQ ID NO: 125355 - RNA, 73 nt, Homo sapiens
ccaggcacagcgcaccagcaggggggacccacggaagaggcgggcccgagaggcagccacccgccaaaccagg

SEQ ID NO: 125356 - RNA, 70 nt, Homo sapiens
gccggcggaagagagcgcaccacgcacgaagggaagaaccgaagcaaaacaaagggcagaacgggacaag

SEQ ID NO: 125357 - RNA, 74 nt, Homo sapiens
aagaaagagaaagaaggaagaaccaggcgcaggagacacagacaaaggggcccggaggccgaaccgagggaagc

SEQ ID NO: 125358 - RNA, 67 nt, Homo sapiens
gccccggcacaaacggaccaccagaaagcaccccacaggcgaacagcgcggagaacacaaggaagaa

SEQ ID NO: 125359 - RNA, 82 nt, Homo sapiens
cccccccggcccacgacccaaggacacaacccggccgcagagcccaggcaaaagcagaccggaaaacccaccggcaagacca

SEQ ID NO: 125360 - RNA, 62 nt, Homo sapiens
cgccacgccgcaggaggcggaggaccaggccaaccggagcgcacccacgccacaagccggac

SEQ ID NO: 125361 - RNA, 85 nt, Homo sapiens
cccccccggcgcaacaggcgcggccgccgccccgcccccaggagagcgagccgacgcagcagggcccagggcaaagagggcgcac

SEQ ID NO: 125362 - RNA, 55 nt, Homo sapiens
agccggaagcggcaggccacaaagccacagaccgcagaagccggcggacagcgaa

SEQ ID NO: 125363 - RNA, 80 nt, Homo sapiens
ggcgcggcacagcgccgccagcagggccgaccagaccagcagggacacagcaggacaagaacgacagaaagagcaggcag

SEQ ID NO: 125364 - RNA, 76 nt, Homo sapiens
aagggggagaacagccggaaggcacaaggacaaacccacccacaaagggagagacccgggccagaggccaggcacc

SEQ ID NO: 125365 - RNA, 72 nt, Homo sapiens
acgggacccgcaccgggggcacccgaggaggaagagggcagggcccacggaaagaagggaaacccggggaga

SEQ ID NO: 125366 - RNA, 80 nt, Homo sapiens
ggcgggccggaggggagacgggaggcaggacgaaggacaggcgggcgggacccccaggcgccacagaggggccccggccg

SEQ ID NO: 125367 - RNA, 75 nt, Homo sapiens
gccagccaccgaggaagccccacagccccagaagccagcaccgcccgggggacaacaagcaccgcgcgccgcgcc

SEQ ID NO: 125368 - RNA, 120 nt, Homo sapiens
cgagcccccacagccccccggcgagacagccgaggcaggaagcccggcggacgagaccggggacgacgacgaggcaccaccccagccgacaagagcgagcgcaccacacccgaagaaccc

SEQ ID NO: 125369 - RNA, 108 nt, Homo sapiens
ccgcagaccagaccgggaggagcagccgcgcgccgagaagcacccgcgacccagaaggaggcaaggaggccacggggccgaagacaccaaccgggcaccagccaaacg

SEQ ID NO: 125370 - RNA, 85 nt, Homo sapiens
gcccggaccggccgagaggaagacgagccgggaggaacggcccggaaacaggaggacccacacccaccgcccgggcaggccacgg

SEQ ID NO: 125371 - RNA, 61 nt, Homo sapiens
cgcggccgcacccccgccccagggaaagggagcagcaccggccacacccacagcacgaccg

SEQ ID NO: 125372 - RNA, 76 nt, Homo sapiens
cggagcgaagcgaacaaaaagcagcaaaccggaccaccccgaagaaagcacagcgaagaagaaaccgaacggcgcc

SEQ ID NO: 125373 - RNA, 84 nt, Homo sapiens
gaacacacaaggagcgccaagagcagagcagaccagaagagccaccagggagcgaaaccaaagccgggcacaaagccagcgagc

SEQ ID NO: 125374 - RNA, 63 nt, Homo sapiens
agacaccgcccgcccgagaacaccaggagacacaagggcccaaaggaccagccaaaacccacc

SEQ ID NO: 125375 - RNA, 74 nt, Homo sapiens
gagcgagggaaaggacaaaagccagacacacaacagagggacccacgacagagccgaggcgcgaacagggccca

SEQ ID NO: 125376 - RNA, 87 nt, Homo sapiens
acggagcgaacgccgcagcagaaagccaagaaccagcggaccagaaacaccacgacagacacaagaagaagaaaaagaaaaaagaag

SEQ ID NO: 125377 - RNA, 59 nt, Homo sapiens
cagaaacaaaagcaacaaagagggccagcagaagaggaccagacgcccgggggggcggc

SEQ ID NO: 125378 - RNA, 66 nt, Homo sapiens
cagggaccccccccgcgccgcacagccccgcgcccgaggcagcgagagcccagagaagggaagaaa

SEQ ID NO: 125379 - RNA, 83 nt, Homo sapiens
ccgaggacgaggcaccccaggcgaccggcccgcagcaagaggcggacgagaaggacagggaaggaaggagggccccggagcag

SEQ ID NO: 125380 - RNA, 76 nt, Homo sapiens
cggacagaagaaaagcccccccggacagaaacaccaaacacgagggacaccaccaggaaagagaaaggagaccaca

SEQ ID NO: 125381 - RNA, 68 nt, Homo sapiens
caagaagagacgcagaccagccaggaacagacaaagcaggccaaaagccgcaggccagggaccaggga

SEQ ID NO: 125382 - RNA, 78 nt, Homo sapiens
aagcagcaaaccggaccaccccgaagaaagcacagacccggaggaaagcccagagggaagcgcaagaagcaggccaga

SEQ ID NO: 125383 - RNA, 50 nt, Homo sapiens
cccgggccgccgggaggcggcagcagaaggaacgaggcacgaaggaggca

SEQ ID NO: 125384 - RNA, 78 nt, Homo sapiens
cgcaccccggccggggggggcgcaaccgggagcccaggaagcgcagacacacaacccaaggagacggcgcgggggcgg

SEQ ID NO: 125385 - RNA, 62 nt, Homo sapiens
aggacacccaaggagagaagccccagagcccaggaggcaacacgaagagagcgagcggaaaa

SEQ ID NO: 125386 - RNA, 75 nt, Homo sapiens
ggaccgcgggacaagaaaacagcgaggagggacagcacaacagagcccaacaggaaccgcagacaaggaggaagc

SEQ ID NO: 125387 - RNA, 63 nt, Homo sapiens
gccacacaagaggcagaagcaccacgcaaacaagaaggaaagaggaaacagggagggagccaa

SEQ ID NO: 125388 - RNA, 71 nt, Homo sapiens
acccacccacgaagggaggaaaagggcagggacagcgcaggcagcaggaaaggacagaagccacaaaacac

SEQ ID NO: 125389 - RNA, 78 nt, Homo sapiens
gacaggaccagggagcccacagcgcccaaaaaggggacccaagggagagagggaacggcgaaagggcagcccggaagg

SEQ ID NO: 125390 - RNA, 56 nt, Homo sapiens
ggcccacgacgggacacgccccggaggacccacaggaccgcgaacaaggaggccac

SEQ ID NO: 125391 - RNA, 72 nt, Homo sapiens
ggaacacgaggcagggggccacacgcaaggggaacagaacccaagaagcaacgcaccaaacccagaagagcc

SEQ ID NO: 125392 - RNA, 92 nt, Homo sapiens
ccgaccgcagcccccgggcacgaccccggacacgggcaggcagggcggagaacggaaaagcaccaggaagcagagaggaccgcagaagggaa

SEQ ID NO: 125393 - RNA, 77 nt, Homo sapiens
ccaggacgcgcccccgggagcgggcgcccagagaacagcgcaaaagagaacggcgagagagaaagagcaacaccaga

SEQ ID NO: 125394 - RNA, 83 nt, Homo sapiens
ccgcagcccaggagcccggaagacccgcaccggagcaaaggcccacagaaaggggcggaaaggaggaaagaccacagaagaaa

SEQ ID NO: 125395 - RNA, 72 nt, Homo sapiens
accgaaaacagaaaggaggcccacgcggaccggcagcgccaccggaccaccagacaaggacacggcccaagc

SEQ ID NO: 125396 - RNA, 86 nt, Homo sapiens
gcaaggggccaccaggaggccagggggcgccaggcgcagagccagaaggcaaacacaaccgcagcggcagagaacaacaagagcag

SEQ ID NO: 125397 - RNA, 77 nt, Homo sapiens
gcgcccaaggcccgcccgggagggccggggccgcgccaggggcgcgagcagaggacagcgcccggcccagccgaaga

SEQ ID NO: 125398 - RNA, 77 nt, Homo sapiens
acaagcagagaaacagcccagcacgaaagagcaaacccggggcaggacaaacaggccagcacgcagcgccaagccgc

SEQ ID NO: 125399 - RNA, 38 nt, Homo sapiens
aggcccggccgggccaaaccacaggagcagcaacccag

SEQ ID NO: 125400 - RNA, 70 nt, Homo sapiens
ccggccagaaaaggacgcaaggacccaaacccccgagcccggaccccagcagagccacaggcccacccgc

SEQ ID NO: 125401 - RNA, 70 nt, Homo sapiens
gacagcacagaaaaacagggaaaacacgacagaaggcaacagcagcgcgcagacaggacaaccagcggag

SEQ ID NO: 125402 - RNA, 70 nt, Homo sapiens
gagggcacacaaacagagcagcacacaggaacagcgacacccagcagaagcagcaggaaacgaaccgaca

SEQ ID NO: 125403 - RNA, 78 nt, Homo sapiens
gcagaaagaaaccgcgaaggagacccccacgggccaaggacccggggggccgaagaagccagggggaggaaagcagac

SEQ ID NO: 125404 - RNA, 81 nt, Homo sapiens
cagcggcaggagagccggccgcgacaggacgaggaaaggcaagggcagaaaagaggggaaaaggccagccgcacgcaggca

SEQ ID NO: 125405 - RNA, 80 nt, Homo sapiens
cggaggccaacgaccccagccaccgaaaggagggaagacaaaggcgcggcaagcggggaagcacaggaccaaacaagaca

SEQ ID NO: 125406 - RNA, 54 nt, Homo sapiens
gaagaagaagacaaagagggacagcaagaaaaggcaaagagcagacccagaaag

SEQ ID NO: 125407 - RNA, 66 nt, Homo sapiens
ggcggaagcggggcgcccccaccgcagagcgcagcccgacgggacggggaagcgcccgcggggcac

SEQ ID NO: 125408 - RNA, 71 nt, Homo sapiens
cgcgacccgaagaccaaaaggggcgggacagcggggagccggcccaccggcacaccaaacgccggaagaca

SEQ ID NO: 125409 - RNA, 74 nt, Homo sapiens
ccagcgcaccgggcagaagcccaggggggacaggaagcgaaaagagacacacaacaaacaaggagcacgccaga

SEQ ID NO: 125410 - RNA, 90 nt, Homo sapiens
accgcgaggcaggagagaggaggaggaggcggcgcggcggccccgggaccaaggagaggcacagggccaggcacacaacgagaccacggc

SEQ ID NO: 125411 - RNA, 74 nt, Homo sapiens
gacccagcccggggacacaagcccccaagggacccccaccaaccaggaaaaggagcgccacaggacagcgcgga

SEQ ID NO: 125412 - RNA, 72 nt, Homo sapiens
agaagcagccgcacagaacacaccggccgagcaggacaagcccaagcgccaaagacgaacggcaggaaagca

SEQ ID NO: 125413 - RNA, 64 nt, Homo sapiens
caagaaaaggcgcaaccgaaaggacacggcgcagcaacaaacagcggcgacaaaccgagacagc

SEQ ID NO: 125414 - RNA, 105 nt, Homo sapiens
aagacacgagaacaagacccgggcgcccgagcaccgagcaaaaacgaagcagccaaccgaggacgagaagggcagcgcacgacgagcagaagaagggaacaccac

SEQ ID NO: 125415 - RNA, 63 nt, Homo sapiens
cacgagaacaaggaggcgaggaggcaagcagagacggggggaaacgacagccaagccaaggag

SEQ ID NO: 125416 - RNA, 67 nt, Homo sapiens
cccagagaagcggcacaagggggcacagcgacaccagggcgaggcaggaccggcgcccaaggagagg

SEQ ID NO: 125417 - RNA, 76 nt, Homo sapiens
acacccaccaccgaaccaggggagaagcccgacagagaaaggagaaaaggccgacggagagaaccagaagggcacg

SEQ ID NO: 125418 - RNA, 62 nt, Homo sapiens
gccgagcggaccaaaaggggaaaagacccaacagaggaagccgcaagaaacgggacgacagg

SEQ ID NO: 125419 - RNA, 59 nt, Homo sapiens
caagaaggacgaacaacacggaagggagaggcagagagagccgacgcccacgagaccag

SEQ ID NO: 125420 - RNA, 76 nt, Homo sapiens
ggagggaaggaccggaccggagaacaccgcgcgggaagaaggccagcgaagacgccagaggaagacagaggaccgg

SEQ ID NO: 125421 - RNA, 76 nt, Homo sapiens
caacccaaccacggggaaaaggcaaaaacccacaccgcaacccagcgagagaaagggggagaggcaccagcaacag

SEQ ID NO: 125422 - RNA, 63 nt, Homo sapiens
gaaggaccaagaaccagacaaccggagcccccacaaaaccaggaggaaaaagaacccggagag

SEQ ID NO: 125423 - RNA, 71 nt, Homo sapiens
aaaacgggccgggcgccagccaggaggaccggcaggaccgacgagcccgggagacaccaccccacaacacc

SEQ ID NO: 125424 - RNA, 58 nt, Homo sapiens
agcgaagcagggaggaagaggcaaccaggcccaaagaagggaaagggaacaggggcaa

SEQ ID NO: 125425 - RNA, 68 nt, Homo sapiens
cccagggagccaaaaacacgaaagcaaaggaaggaccaagcagaggcccgcaaacaaaggaaacgcag

SEQ ID NO: 125426 - RNA, 56 nt, Homo sapiens
caacggcggaaagcagggccagagaaggggggcagaaagaagaggaggacaacaag

SEQ ID NO: 125427 - RNA, 80 nt, Homo sapiens
cggcgaccgcggaccgcgcgccacaacagacagacaccccaaacaaagcaggcccagcggggcgagggagaacaggggac

SEQ ID NO: 125428 - RNA, 44 nt, Homo sapiens
gccgacaccgggcggaggagagaaccaggggaagggcagcagaa

SEQ ID NO: 125429 - RNA, 81 nt, Homo sapiens
aggccccacgaccccgacaggcaccggaagcaccaagccgaaagcaccgcagcagcagagaggggagaagggagagcgcac

SEQ ID NO: 125430 - RNA, 92 nt, Homo sapiens
ggccgcgcgcgcggagcccgagcccggagcggccgacgcccgcccggcgcgcacacccgcggggcccggccggggcgggaggcgggcggcgg

SEQ ID NO: 125431 - RNA, 75 nt, Homo sapiens
ccaaacaccacccaacgagggaaacaaaaaaaagaccagacagagaagccgaacccacaggagggccagaggaca

SEQ ID NO: 125432 - RNA, 75 nt, Homo sapiens
gaagaagagagcggaacagcagagcgcacaaacaacaggcacaaagagagaaggaacacccacagggcagacaga

SEQ ID NO: 125433 - RNA, 83 nt, Homo sapiens
gggcagagccagcggcccgccgcccggccgggccccggcgcagccacgcaggcgcaccgcagacaggggccaggcacaaagag

SEQ ID NO: 125434 - RNA, 95 nt, Homo sapiens
ccccccaaacgcaaaagccgccccaagcaacaaaggagagagcgggaagcagaaggcagcaggaacggaacagcgaaggagagaacaagaagaaa

SEQ ID NO: 125435 - RNA, 78 nt, Homo sapiens
ggcgaagagggacaaacgcacagacagcagcgccagacaaccagagcggagggagccgacagcccgcaagacaagaca

SEQ ID NO: 125436 - RNA, 53 nt, Homo sapiens
ggagaccacacggaaaagggagcccgcgcgagccccggcagggcccgggcccg

SEQ ID NO: 125437 - RNA, 78 nt, Homo sapiens
cgacgaagcagccaaacaccacaacacagaagggaacaagcggacagaaaaagagaacaagccccggccagaaagacc

SEQ ID NO: 125438 - RNA, 81 nt, Homo sapiens
cgaagcggccaaagccgcccagacggccaccggcgggaggaacaaaaggaacaccagggagcacccaaccgagaacaccaa

SEQ ID NO: 125439 - RNA, 72 nt, Homo sapiens
aggaccgggagagaccggcggacaggccggacgggcgcccggaaaagacgacagaagccacgaaccgacgca

SEQ ID NO: 125440 - RNA, 66 nt, Homo sapiens
gaaagggcagcgaagcagccggcacccaagcacagcgaggaaaagggaccaacggagccaggaaaa

SEQ ID NO: 125441 - RNA, 77 nt, Homo sapiens
caagcaagggaggggacgcaacaggggaagagaagggcggcagaccaggaaaggaagagcacaacaggaagaggaga

SEQ ID NO: 125442 - RNA, 88 nt, Homo sapiens
cacggagcacgcaggcgccggagaagaggcgaaagaagagggaaaagacgagcaggagaagaaaacaagaaaaagaagcaaaagagaa

SEQ ID NO: 125443 - RNA, 62 nt, Homo sapiens
cccaggccgccaccgcaaccacacggagccagccgccgcgccaagaaacgcgcggccgggcc

SEQ ID NO: 125444 - RNA, 85 nt, Homo sapiens
cagcagccgccgcaaccacagacgcagcaacaacagcagccggcccgaacacaacagaccacggagggagagcacggcgcaccaa

SEQ ID NO: 125445 - RNA, 101 nt, Homo sapiens
aagggcagcagggacacagcggcaagaaaaggccaggacaaaacaacccagcacgaggagaacaacagaacagagagaaacaccaccagagggagcaccca

SEQ ID NO: 125446 - RNA, 69 nt, Homo sapiens
agccgacagagaaggagcggaaaacacaacgaccaggggacagacacaccagaggaagaggcgaaacca

SEQ ID NO: 125447 - RNA, 81 nt, Homo sapiens
gcgcacggaaacagccacagcaggcaggccagaaagcagacccagggaggaagcacagccggcacacgggaaggcacggcc

SEQ ID NO: 125448 - RNA, 110 nt, Homo sapiens
ccacagcccggcccgccagcccagaaacaagaagaagagaacccgcggaggagaccggcgaggagaagcagcaggcggacaccgaccgcaggaaggaggaggaggaggga

SEQ ID NO: 125449 - RNA, 82 nt, Homo sapiens
gacaggcaaggcagcaccacagacaggcggcgccgaaggggcggagcccgcggcccagacccagccgcacgcagcccccaga

SEQ ID NO: 125450 - RNA, 75 nt, Homo sapiens
cgacgaggcacagcgcgcaagaagggagggggaaagcaggggagaaaagaaaagaaagacgggaaagaagcgcaa

SEQ ID NO: 125451 - RNA, 82 nt, Homo sapiens
caccaccgcggacggccggcgcggaagcggagccggacaccccagcgaaggaccggggacaaccacgccaggggggcaggcc

SEQ ID NO: 125452 - RNA, 70 nt, Homo sapiens
ggaagcaaaagccccagaacagggaaaagggggacccgcagaccggaaggggcgcccagcaaaagggccg

SEQ ID NO: 125453 - RNA, 73 nt, Homo sapiens
cgcgcgcacgccccgacgcaagacgcccggcccggcggagcggcggacaccagaagagaaaagggcaagccag

SEQ ID NO: 125454 - RNA, 78 nt, Homo sapiens
gagcacagaaaagaaaaggaccggaggccaggggagagagaaagcccagaaagaaagcacccagggccaggaacagag

SEQ ID NO: 125455 - RNA, 80 nt, Homo sapiens
ggccagccgaagaggggcggcacccccggcggcggaaggcggaaaggacccggaaaggccaagacaaaggcggcccgccg

SEQ ID NO: 125456 - RNA, 36 nt, Homo sapiens
aggaaggaaacccggcaggccaccggcacacggaaa

SEQ ID NO: 125457 - RNA, 61 nt, Homo sapiens
cgccaacacaccacgccagcgcaagcggcggaagccgggcagaaaacgaaagcccaagcaa

SEQ ID NO: 125458 - RNA, 67 nt, Homo sapiens
ccgccagaaaccaaagacgagaggggacgggacgaggaaccagcacccggaaagacaaaagaaagga

SEQ ID NO: 125459 - RNA, 59 nt, Homo sapiens
gcccggggcccgaagcggggaaggggacaagaggacaccgaacgaacaccggcagagag

SEQ ID NO: 125460 - RNA, 79 nt, Homo sapiens
ccgaagcggcgacagcggccggggcgcaggcgcccggcggaaggcaggacaaaggccgagaaccgagaaaggacagaca

SEQ ID NO: 125461 - RNA, 75 nt, Homo sapiens
aaaagacagcccgcagcacgaccagcaggaacggcacccgcgggcgaggcccccgcacagcacgcgcagaacaaa

SEQ ID NO: 125462 - RNA, 63 nt, Homo sapiens
ggaccgacgcgcaccccggacaccccgggcgaccggcccgaggaccgccgcacgaccaaacgc

SEQ ID NO: 125463 - RNA, 78 nt, Homo sapiens
cggacgagaaaggcaggagcaacgggaaagaggaaaaaggcccgcggagccaacgggccgagcagcgccacggggaga

SEQ ID NO: 125464 - RNA, 55 nt, Homo sapiens
ggcaaacccgagagaacggggaccccgacggagagacaaagaagacggagggggg

SEQ ID NO: 125465 - RNA, 82 nt, Homo sapiens
gcccgcaccgcccccgggaccgcaggcccacacggcccgggcaagaaacgaaggaggcccaaccacaaaaggagccgacgga

SEQ ID NO: 125466 - RNA, 63 nt, Homo sapiens
gacgagccgggaggaacggcccggaaacaggaggacgagggagccaggagcgcgggagcgaag

SEQ ID NO: 125467 - RNA, 80 nt, Homo sapiens
ccaacgcgggacaggaagggccgagcggcgggaaaggagcacccacgggaacagcccagaaacgagggaaaaacgaagcc

SEQ ID NO: 125468 - RNA, 70 nt, Homo sapiens
caaaacaggagcaacaccgaagcacaaaacacacccaaagcaaaggaaggccgccaacaaagaccgaaag

SEQ ID NO: 125469 - RNA, 73 nt, Homo sapiens
gggcagccaccggccgggcgcgcgccgagccgcgcagcccacgcgcgccccaccccccccccggagccaccgg

SEQ ID NO: 125470 - RNA, 72 nt, Homo sapiens
gaaacaggcaaaacaaccagaaggggagaaggcaggcaccacaaaaaggacagacagggagacggaagagcg

SEQ ID NO: 125471 - RNA, 46 nt, Homo sapiens
acgcaacgggcgagagagcacagcagggaagcggaagaaagaagag

SEQ ID NO: 125472 - RNA, 77 nt, Homo sapiens
ccccccccacagagagagcgcccggggagccacgaccaaagccaccggcccggcagggagaggagaagcaaggcgcc

SEQ ID NO: 125473 - RNA, 74 nt, Homo sapiens
gaggaccgcccacagagaagccgcacccggagaggccgaaaccaccgcagccaggaggagacaaaagaagaagg

SEQ ID NO: 125474 - RNA, 58 nt, Homo sapiens
gccacgcaggcggggcccggaagcaccagcaccaagaccagccagggagacgacccgc

SEQ ID NO: 125475 - RNA, 76 nt, Homo sapiens
cggccggcggggcggcccgaggagcgggccgccgcagccaaacaacccaaagaaaaccagacgccagggcccccca

SEQ ID NO: 125476 - RNA, 84 nt, Homo sapiens
cagcaacggcagagagaacaagccgagggagcggcgcagaaagccagaggaggaggaggcccggagagagaggaggaaagccag

SEQ ID NO: 125477 - RNA, 78 nt, Homo sapiens
cgacccgcccgcccccgccccacgaagccagaaagaagccacccagagagaaccagaggcgggaggcggcagaagcag

SEQ ID NO: 125478 - RNA, 102 nt, Homo sapiens
cggcgagcggacggggcgagcaggcgcgcgcgagggcccgacccaggcaagcgagcaggcgagcaggagcccacagccgagcagcggcccagagcagcggag

SEQ ID NO: 125479 - RNA, 82 nt, Homo sapiens
ggaccgggagacacggccagacgcccccagccaaggaaccgaacccaaaccagccggccaaagagaagagcaaaaaaagaga

SEQ ID NO: 125480 - RNA, 77 nt, Homo sapiens
accacacgccagacggggagagccaccggccccagcaggcaaagaacagagcagcaccagcaaaagaacgaagaaga

SEQ ID NO: 125481 - RNA, 80 nt, Homo sapiens
gcggacagcagcaagcagcagcccacccgccgcagacaccacaagaaccaacagagccgaaacagaacccaagcaggaga

SEQ ID NO: 125482 - RNA, 62 nt, Homo sapiens
cggcgaggaaagcaggaggaggggcggcggcgggaagaagacgccggcccaccagccagcgg

SEQ ID NO: 125483 - RNA, 81 nt, Homo sapiens
ggcgaggcccaccaagccagacgggaacgccaggaaccagcaagagcaggagagagaggaaccaggaccgagcgagcaacc

SEQ ID NO: 125484 - RNA, 85 nt, Homo sapiens
cgcacaagcaaagaagcaacgaaaaaccccggaaaagcagcaaccggcaagaagagccaggaaagggagaggaagaagaagagac

SEQ ID NO: 125485 - RNA, 86 nt, Homo sapiens
gacccacggggcgcccccccgcgcaccccccgcgcccgggcccggagcgcagcgcggccgcacagcgcccggggacagcccggacg

SEQ ID NO: 125486 - RNA, 79 nt, Homo sapiens
cgcagaggccccgggcggaccaggcccaggcaacaacggccagcccagggagaggcacacaaaccacgggggcccccaa

SEQ ID NO: 125487 - RNA, 81 nt, Homo sapiens
gccggggggacagaccgggccagcaggaccaggagggccacccccaccccagccaggaggaagaagaggaggagaggaggc

SEQ ID NO: 125488 - RNA, 70 nt, Homo sapiens
gagccaagcgccgcccggccgaagaaaggcccgagccaaaagacccagagaaaggagcacgaaggaacaa

SEQ ID NO: 125489 - RNA, 66 nt, Homo sapiens
cggcggaacaccaccgagcacgacagccgggagaaggacaagcaggcaggagcacagggcagaaac

SEQ ID NO: 125490 - RNA, 76 nt, Homo sapiens
ccggcaccacggagagcccgccagaccagggaacggagaagcccagggaaacaagaacaacagccgcccccgccgg

SEQ ID NO: 125491 - RNA, 55 nt, Homo sapiens
cccccgcggcggcagccacagccaaaagaagaacccggacccgaccgaagcaaga

SEQ ID NO: 125492 - RNA, 66 nt, Homo sapiens
gagggaggcaaaaacgcgaaaaagcccggaaaacacaggaggccaaaggaagaccaggaaagaaca

SEQ ID NO: 125493 - RNA, 84 nt, Homo sapiens
acgacaaaagaaccagaaaaagagaaggaggcgcgagcggggcgaacgggagcgcaggcaacagccaccggaagaaggaggaga

SEQ ID NO: 125494 - RNA, 72 nt, Homo sapiens
acagccaaggcggcccgacaccgccacccccagcaggaaagaaccccaaagcgagaaaaagggggaggacac

SEQ ID NO: 125495 - RNA, 54 nt, Homo sapiens
ccgcagcacgaccagcaggaacgagagaggagcgagaggaagcggaagaaaacc

SEQ ID NO: 125496 - RNA, 68 nt, Homo sapiens
ggacccggccagcgacgcaccgagaaaggaaggaaaaccgacgaaaagaaagaagcagaaaaccagaa

SEQ ID NO: 125497 - RNA, 80 nt, Homo sapiens
ccagccagagcggccgcagcagggaacccaggacacggagaaccacggggaccaagaagcgagcagcccaaacggacccg

SEQ ID NO: 125498 - RNA, 61 nt, Homo sapiens
gcgcgcgggcacccacggagccccggggcggcgcacgggacggcagcgcggaagaccgcaa

SEQ ID NO: 125499 - RNA, 75 nt, Homo sapiens
cagggagccaggaccgccagcgcggggaccccgaacaggcgcgcccccagggccagaccaaaggaaccagagcag

SEQ ID NO: 125500 - RNA, 73 nt, Homo sapiens
gagacaaaggcaccaggccaccacagaaacaaaagcaacaaagagggaaggggaaaaccgccgccacccaaga

SEQ ID NO: 125501 - RNA, 70 nt, Homo sapiens
cacaccagcgcgggaggcagaccggacgcaaggaccagagaagacacacaacaaccccacggagccccac

SEQ ID NO: 125502 - RNA, 77 nt, Homo sapiens
gagacacaagcacacgaccgggagcgaggagccccgagaagcaagagagaggaccagccaaaggagcgcacgagacg

SEQ ID NO: 125503 - RNA, 66 nt, Homo sapiens
cggggcggaagaccaagacacgagaggggaagaacacggaaaccggacagggacaggaaagaacac

SEQ ID NO: 125504 - RNA, 62 nt, Homo sapiens
gccgaagagccccggcggccggagcggcggccagccaagacaagcaaacccaggaacacccg

SEQ ID NO: 125505 - RNA, 74 nt, Homo sapiens
acgccaaaaaacaacagcagccacaccagagccaccacccacacagcagcgggccccgggaccaaggacacgca

SEQ ID NO: 125506 - RNA, 77 nt, Homo sapiens
agcgagcgagggggggcgcgccggaaaccggagcgcgcagcaggaggggccacggggccggggagccaccaggagac

SEQ ID NO: 125507 - RNA, 64 nt, Homo sapiens
agccagcgcgcagaccagcggaacgaaaccagaacagaaagggacgggacagcaaaaggcgacc

SEQ ID NO: 125508 - RNA, 63 nt, Homo sapiens
aggaagaacaaggagccagaagcagccagaggacaggaagaggcagcagcgggaaaccagaca

SEQ ID NO: 125509 - RNA, 69 nt, Homo sapiens
ccacaaaaaaggaagcgaaaacaggagaacggcggccccgagccaaggaaaaaacaaaccaagacccag

SEQ ID NO: 125510 - RNA, 75 nt, Homo sapiens
caccgcaacaacgcccagcgaggggaaaggagacaggaaccaggaccagcagaccccaccaacacgcgaggacac

SEQ ID NO: 125511 - RNA, 65 nt, Homo sapiens
gaaaagccaggccccgaggacaaggcagagcaggagaggaggccaacagccaaaaaccaagaaag

SEQ ID NO: 125512 - RNA, 77 nt, Homo sapiens
ccgcccgccacccgcagcaaccccacaccggacccgacccccgccggaggaagaaaaaaaccccacgaaacaggcgc

SEQ ID NO: 125513 - RNA, 77 nt, Homo sapiens
gaagcaaagcaaaccaaaacaaccgccagaagaaaggcgcaaaggacgggcggacacagcaaggcacaggagagaaa

SEQ ID NO: 125514 - RNA, 75 nt, Homo sapiens
aagccaggacgcggcagagaaagagaaaaaagggaacgaggacagggggaagagcccccccaacaaaggacgaaa

SEQ ID NO: 125515 - RNA, 53 nt, Homo sapiens
gccacacccgcgcagggacggaaaaggcgcacacgacccggagaaccccacga

SEQ ID NO: 125516 - RNA, 74 nt, Homo sapiens
cgaaggggaaaccgacggaaagcagccaaagggagaccgagcagccaaaaaggaggcaaggaggccacggggcc

SEQ ID NO: 125517 - RNA, 67 nt, Homo sapiens
ggcaggcgagaaagacagagaacaaacagcggacaaaaaacaacccgcaagccgacaggaggaaaaa

SEQ ID NO: 125518 - RNA, 78 nt, Homo sapiens
cgaccggaccccggggagcaacaacagccccacacaggaccggaggaacgcgaccagaccagcgcgaaggacccagac

SEQ ID NO: 125519 - RNA, 69 nt, Homo sapiens
cagagaaagcagcaaccagaaccccgaaccagagaccggcaagaggcccacaagcggcacccaccaaga

SEQ ID NO: 125520 - RNA, 72 nt, Homo sapiens
gcccgccccgaaggccaccaaccaccccggcagggcaggcgccccaagagcaggagcacccgccccaccccc

SEQ ID NO: 125521 - RNA, 71 nt, Homo sapiens
accaacacgcacaagacggacgaaagccagagaaaaagcggagaaaaggcacggcggcagaagcaaagaga

SEQ ID NO: 125522 - RNA, 73 nt, Homo sapiens
cggaaccagaagcagagccaacagaccgaacaaagacagcgcagacgaccaacagcgggaagaagacaggacg

SEQ ID NO: 125523 - RNA, 82 nt, Homo sapiens
gcagaaggccggagacaccagcagccaggagacgacaaggcgggcagggggagcggcgcggcagagcgggcaggagaggccg

SEQ ID NO: 125524 - RNA, 74 nt, Homo sapiens
agagaagaaccaaaacggccccgccgccccagagagcacaggagcacgggagcaggggcagacacgggacacca

SEQ ID NO: 125525 - RNA, 66 nt, Homo sapiens
accacggagcggggagagccgccgcaaacccagaccggagcaacgaccgaaaaaagccggcagagc

SEQ ID NO: 125526 - RNA, 81 nt, Homo sapiens
agaacagcagaccaggcagcagccgcagcaggcaggccgcccaaagaccaacagggcagcagacccccccagccccacacg

SEQ ID NO: 125527 - RNA, 67 nt, Homo sapiens
cccgagagcaggaacagaacccaaggaccaaccgccaccaccacagaaaaaaaaggaaccaacaaaa

SEQ ID NO: 125528 - RNA, 86 nt, Homo sapiens
gcgaagaaggcgcagcagaggggccacgcgggcccgaggcgcaccaagggcgaaggagccggcccaagacccgacgggccccacac

SEQ ID NO: 125529 - RNA, 71 nt, Homo sapiens
aaacaccagacaagagaggcagccaccagcaggaggaaaaccaacgccacgaccagagacgaagaaggagg

SEQ ID NO: 125530 - RNA, 78 nt, Homo sapiens
gggcgccgcggaccaacagcccaggaggccgagcgcgggaaagcagcggaaccagaaagagacaagaagggaccggcg

SEQ ID NO: 125531 - RNA, 80 nt, Homo sapiens
gaggcggcccgcccggaaggcaagcgcagcaacaacagagagcacggcacgagccagggagccgccgggaccggcccggg

SEQ ID NO: 125532 - RNA, 65 nt, Homo sapiens
acagccagccagcagcaggaggggaaagggagcagcaccggccacacccacagcacgaccggaac

SEQ ID NO: 125533 - RNA, 83 nt, Homo sapiens
gcgggcccgaggcgcaccaagggcgaaggagccggcccaagaaggccgcgggaaaggcaaaaccccaagaggggacgaaggag

SEQ ID NO: 125534 - RNA, 84 nt, Homo sapiens
gccggagccgggccgggcagcagcagggcgccgggaaaaggcgaggagggacgcgacagaaccgccccccccccaccccggggg

SEQ ID NO: 125535 - RNA, 73 nt, Homo sapiens
agcacacccgaaaagcgccaaggaaaaggacgagaacgccgcgacagaaaaagccccaggccacccccgacgc

SEQ ID NO: 125536 - RNA, 70 nt, Homo sapiens
gcccgagacgccaaaaggaagagagcagagccggggaccgccacaagacagcgccgacaagggcccggca

SEQ ID NO: 125537 - RNA, 50 nt, Homo sapiens
ggcgcccaggcacccggcccggagagggccgaggcagacaagggaaaggc

SEQ ID NO: 125538 - RNA, 56 nt, Homo sapiens
aaagggcacgaagcaggaaagaacgacgccagggagaccggaccaaaccagagaca

SEQ ID NO: 125539 - RNA, 74 nt, Homo sapiens
aggcagccggccggcgcgacaaagagccccccccgacccacacaagcggacaaagcacaagggcgaacacagcc

SEQ ID NO: 125540 - RNA, 83 nt, Homo sapiens
cacggcagccacgcaggcaccaggacccgcggggcccagccccaccagggcccagaagaccggcaggcaccagggcaaaccca

SEQ ID NO: 125541 - RNA, 85 nt, Homo sapiens
gggagggcgagaacgaccccgagacggggaccgcaaagcggagcggcaagcccgaacaaggagggaagaagaagaggacgccgga

SEQ ID NO: 125542 - RNA, 71 nt, Homo sapiens
gcacagcagagagccaggaggcaggaggaaggaaggggaaaagcccaggaaccgggccaggaaaaggcgcc

SEQ ID NO: 125543 - RNA, 78 nt, Homo sapiens
cacgagaggacagcccaggcagagaacaaaagagaagacccgaaggaagcgggaccagaaggacaagggccagaagca

SEQ ID NO: 125544 - RNA, 78 nt, Homo sapiens
ggggggcaggcggcacagggagggggggcggaggggccgaagacaaacccacgaaggcggccgggcgaccacaaaaaa

SEQ ID NO: 125545 - RNA, 58 nt, Homo sapiens
acccggccccaggccgcagagcagaccagcagagcagcaggacacgcccaagcaaggg

SEQ ID NO: 125546 - RNA, 75 nt, Homo sapiens
cgagagcgcgaaacgcacgagaagcaccaggacaaaagaagggcagcacaaaggaaagccccaaaccccggaacg

SEQ ID NO: 125547 - RNA, 82 nt, Homo sapiens
acgcgccgaaacaccaaaagcgggggaagaagagaggacgacgacaagcccgacacccagcggcaccggacagagcggaggg

SEQ ID NO: 125548 - RNA, 43 nt, Homo sapiens
ccgacagccgcaaaacgcccggcccgggcccccgggagcagaa

SEQ ID NO: 125549 - RNA, 62 nt, Homo sapiens
agccggcgagaagggggccccggagacccgggcacggggagcccagaggaagcaccggcacg

SEQ ID NO: 125550 - RNA, 80 nt, Homo sapiens
aaggaaaaaccgagggaaccaccgggagccacaagggacaagaacacccaggaagcacacgacaacccagaacccaaaga

SEQ ID NO: 125551 - RNA, 104 nt, Homo sapiens
gagccaaagcacagcgggcgggggagacaagaggagcccgaggcagagcacacggggaaggggaccgggaccgcgccaccccggacgcccgaacaggaccagga

SEQ ID NO: 125552 - RNA, 83 nt, Homo sapiens
gcaaccggcccgcccagcccccgagggcaagaggccgggccccagccccaccccagccccaaaggaggcgcgagagggacgcc

SEQ ID NO: 125553 - RNA, 79 nt, Homo sapiens
ggcggcgcccgcgcacgcgcaagaccgcgaggcgagacccgagaagccgcgggagcggaagacaggcccggagcccgac

SEQ ID NO: 125554 - RNA, 82 nt, Homo sapiens
cagcgcacacagcaagcacgagggaagagacagcgagcagagaccaggagaagagaagagaacagggaaaacaaaagaaaga

SEQ ID NO: 125555 - RNA, 59 nt, Homo sapiens
agcgcaggaagagaccagaggacagaccgaagcaaaggacacgaggaggggacggcccg

SEQ ID NO: 125556 - RNA, 62 nt, Homo sapiens
caagaggggcacacgcccgcacgagcagcggagaagagacgaggacgcgcacaggaaaggac

SEQ ID NO: 125557 - RNA, 88 nt, Homo sapiens
gagcgaagcaccgcagccgggcagacacacgacgagaaccgggcagcggaggaggagaaagagaggacccccggaccggcccgagggc

SEQ ID NO: 125558 - RNA, 79 nt, Homo sapiens
ggaacaagggagggggacagaccaaagagggggcaaagaaaaaggagagaaaaagaggcaaaacaacaagaagaaaaga

SEQ ID NO: 125559 - RNA, 69 nt, Homo sapiens
caagccgccccgccaaggaaacagaaaccggggaacagaccggaggaaccgagcggaacaccaggacca

SEQ ID NO: 125560 - RNA, 75 nt, Homo sapiens
ccaaccggcacgacaggccagacaagaggaagcgggcacgacaaaccaggggaggagaagaagccaaaccaagga

SEQ ID NO: 125561 - RNA, 80 nt, Homo sapiens
gcacagcgaccaccaacagaccgaaggaagggccgggccggggcacgggcccacggccccccaccgggccaccccggggg

SEQ ID NO: 125562 - RNA, 42 nt, Homo sapiens
cccagggcgcccggagcgccccccagagccgggcacaaagcc

SEQ ID NO: 125563 - RNA, 78 nt, Homo sapiens
gaggagggagcacagcggaacaaccacagccacccaggacccaggacagggaggagcacacacccccagaaggaaacc

SEQ ID NO: 125564 - RNA, 69 nt, Homo sapiens
agcccggacagacccccgccccgaggacacgcccacgaaacagacgggacagcggaagaaaagcaggcc

SEQ ID NO: 125565 - RNA, 80 nt, Homo sapiens
aggaacccacaacgaagggaagccacggaagaaagggcggggaacacagaggaaggacggcgggggcagggaaagcccga

SEQ ID NO: 125566 - RNA, 89 nt, Homo sapiens
gccgggaggcccccaaggcgcagggggccaaacgcccaccaagcggcaggcaagcggcaccacgacaaccccacaccaacgagaggcaa

SEQ ID NO: 125567 - RNA, 76 nt, Homo sapiens
gcgggcgggagcggaggagcgcgccggagaacgacaccaaggcacagccagggcgaaagaagaccccgccaccggc

SEQ ID NO: 125568 - RNA, 76 nt, Homo sapiens
caaagaagggagagagcgcgcaggagaccccccgagcagcaagccgcaccacacccaccgcagcaccgccaccggc

SEQ ID NO: 125569 - RNA, 88 nt, Homo sapiens
aagggccacaaaggaccaagaacggagcaagcccaggcacagccgacgccgcgggccgcacaggaggacaggaaaaggaacgaacagg

SEQ ID NO: 125570 - RNA, 78 nt, Homo sapiens
gcagcaccaccgaacaccaacggaggcacaacggacagacaaaggccaaaacaacagcagagaaggggagagaacacg

SEQ ID NO: 125571 - RNA, 68 nt, Homo sapiens
aacaaccggggcagacaacagaggaggcagcaacacagagaccagaagaccacagcgacagcggcaga

SEQ ID NO: 125572 - RNA, 78 nt, Homo sapiens
gcgagagaggagagggcagacggacaagagcgcggaacaggacgccccgaggaccagccaccacggcccaagaacggg

SEQ ID NO: 125573 - RNA, 74 nt, Homo sapiens
ccaggcaaccccgcgaacgaggagggggaaccagccaaaccaacgccgacgcccaagcagcccaccaccccaag

SEQ ID NO: 125574 - RNA, 81 nt, Homo sapiens
aagaaagagaggaaagaagaaaaccaagaaagccccacggcagcaaagcaccgccgagggccaggggaagcgaaccggaca

SEQ ID NO: 125575 - RNA, 83 nt, Homo sapiens
cagacaaaagaaccaggagcccaagagcacaggggaagaagcacagccacgagccaacacagggcggcaggagcgcggcaggg

SEQ ID NO: 125576 - RNA, 66 nt, Homo sapiens
gggaccaagcaccccaaagaagaccagagcacaacacaagcagaaccaagccagcgaaggaaagag

SEQ ID NO: 125577 - RNA, 55 nt, Homo sapiens
aacccaaagaagacaccagaggaaccccggccgggcgaagcggggaccaagcaag

SEQ ID NO: 125578 - RNA, 73 nt, Homo sapiens
cgaggccgcggcagggcccgcaggcggcgcacaggaagcacggcgggaaaacggcacaaggcgacgagggagg

SEQ ID NO: 125579 - RNA, 58 nt, Homo sapiens
cggaaacccaaccaagaaggcccagggaaccccacaaggagccacccagaagcagaga

SEQ ID NO: 125580 - RNA, 70 nt, Homo sapiens
gacaaaggaacaggaccaggacaacaaccgacagcccccccacaaaggcaagacagagcaacggagacgc

SEQ ID NO: 125581 - RNA, 73 nt, Homo sapiens
cgcagagaaaaggggcgggcggcgacggcggagggcccggaaaagcgcaggaaaaacccgaggacccaccgca

SEQ ID NO: 125582 - RNA, 84 nt, Homo sapiens
gcgagagccagagagaacaccagaaacccggcggaccgagagcggcccaggaggaacaaccagcccacccggagagggcacgcg

SEQ ID NO: 125583 - RNA, 86 nt, Homo sapiens
accacgggcggccccagaagggacaagccgggaagagcacacacaagaagaccaagccagcggagggccacggaagaagaaggcag

SEQ ID NO: 125584 - RNA, 90 nt, Homo sapiens
ccgggacggaccgagaccggaccgagagcggaccgagagcgcgaaacgcacgagaaggggcccagggccacccccggccagcaaacgggg

SEQ ID NO: 125585 - RNA, 41 nt, Homo sapiens
cgggagaccgaaggaagaaaccggacagaagcgaaggggac

SEQ ID NO: 125586 - RNA, 70 nt, Homo sapiens
gaggcaagagaccaccccggaggcaagagcgcaagccccagggaaaggaccgaggcaggaaagaggccag

SEQ ID NO: 125587 - RNA, 84 nt, Homo sapiens
cggccggagcggcgccaggaggagggggcgccgcggcaggcgagaacgcggacaagcaaacaaagaggaaaaagagggcaacag

SEQ ID NO: 125588 - RNA, 56 nt, Homo sapiens
cacaacccgcgccggccgcgggaaggagaggacccacacagcaccaagacggagaa

SEQ ID NO: 125589 - RNA, 37 nt, Homo sapiens
cacacaaggcgaacaaggcaaggaaaggacccccggg

SEQ ID NO: 125590 - RNA, 84 nt, Homo sapiens
agcgacagaccaaagagaccagagagggcagagcgaacccccccacgcagagggacaggaggaggaagaagaagcggaggggcc

SEQ ID NO: 125591 - RNA, 75 nt, Homo sapiens
cgacagaggcgacgcaaccgcgggagaggcgcgccaaagaaaagggagaagagacgggaaagccacacacggaga

SEQ ID NO: 125592 - RNA, 84 nt, Homo sapiens
gggcgcagggccgggccgccgcgcaccgcagcgccggggcacgacacaaaaacaggaagcccggggcggcgacggagcacgacc

SEQ ID NO: 125593 - RNA, 51 nt, Homo sapiens
gcccggggaacagggcagcaagcgacaggccgcccgcaaaaccaaagaagc

SEQ ID NO: 125594 - RNA, 37 nt, Homo sapiens
aaggcgcccaaaacaagcgaaggcgaacaacaagaca

SEQ ID NO: 125595 - RNA, 69 nt, Homo sapiens
cagcaccgccagccaagggaaggagggaaaaggaaaccagaagagggacgaagaaaacagcgcagcgcc

SEQ ID NO: 125596 - RNA, 67 nt, Homo sapiens
accgacaaccaagggccccgcggaccaaggaagaacccgaagcaccgagggaacaggcacgccccac

SEQ ID NO: 125597 - RNA, 82 nt, Homo sapiens
gcggcagcaggggacagcggagaggcccagcaacagaccaccacagagccgaaggcagaaacccccgccacccaaacaaacc

SEQ ID NO: 125598 - RNA, 77 nt, Homo sapiens
ggacgcggcaaccccaggcacgggcgagggggagccaaggacaccgagggcggaggccgcgacggaagaccgcacag

SEQ ID NO: 125599 - RNA, 74 nt, Homo sapiens
gggccacacggcggagaccccccagagagcccagccaagccagaaccaggggcaacagacacagccaccacaag

SEQ ID NO: 125600 - RNA, 79 nt, Homo sapiens
gcacgccacggcgccccgcaagccccgagaaccaagaacggaagaccagcccggacccaacgacaggggccagggaagg

SEQ ID NO: 125601 - RNA, 47 nt, Homo sapiens
gaaggcaaagcagaggaagaacagaggccgcagaagggaccgccaac

SEQ ID NO: 125602 - RNA, 86 nt, Homo sapiens
gcccgcgccacggggcggccaccgggcggcggggagcgggagcgcgcagcagagccagcacgagccgccgccacgccgccccaccg

SEQ ID NO: 125603 - RNA, 65 nt, Homo sapiens
aacacgcaccgagccaccagccgacaaccccgaaaccaaagagaagcagcgaagacagaagagca

SEQ ID NO: 125604 - RNA, 71 nt, Homo sapiens
aacgccagcggacccggggaaaacgggcgcgacccacggaggacccaaagacgccggccccacggaaccac

SEQ ID NO: 125605 - RNA, 39 nt, Homo sapiens
gagggggccaaggcccccggggagggcgagacagcccgc

SEQ ID NO: 125606 - RNA, 76 nt, Homo sapiens
aagcgcgcgccgcgcccggaccccaggaaagcacagagagcaggaacaaggcagccaagcacaaggacgagaccca

SEQ ID NO: 125607 - RNA, 83 nt, Homo sapiens
acaggaaaaaaaaggaggcgacaagcaacaacaacaagcgaccccggaaagggacagggcagcggccgagagcccgagaagag

SEQ ID NO: 125608 - RNA, 80 nt, Homo sapiens
aaaaaaccccaggaagcaggcagagaaggggacgggacgaaaacacagggccagccaccaccaccgagaaagaacaccac

SEQ ID NO: 125609 - RNA, 78 nt, Homo sapiens
ggaggcgaacagggagaagacagggcagacagaagcgaaggccagagggggacggccccaaaccgaccggacgcagag

SEQ ID NO: 125610 - RNA, 75 nt, Homo sapiens
ccaccccgcccagagaagccagggcgcaggcaaacaagggcacaagcagaggaaccagggaaccgccgccagcaa

SEQ ID NO: 125611 - RNA, 55 nt, Homo sapiens
cagacgcagggcgcccccgcgcccggacggccgccagcaagaagcgggagagcgc

SEQ ID NO: 125612 - RNA, 60 nt, Homo sapiens
gccaccagcagcccccagagcgggaccacaggaagccagcagaacggccaaggcacggga

SEQ ID NO: 125613 - RNA, 77 nt, Homo sapiens
gccccaccaccccaccagacggcgccccaagaccaaaggaccccagcccaggccggggcgccggaggccgcgacacc

SEQ ID NO: 125614 - RNA, 79 nt, Homo sapiens
agaccaaaacgaagaaccgcagaacgggcgccaacagaaaccaccgcggggcgacacaaggccaacggacacacgggca

SEQ ID NO: 125615 - RNA, 72 nt, Homo sapiens
gacggaaagaaacacgagcacgccggacaggaggaacccgccagggcgacagacaagaaggcacagaaagac

SEQ ID NO: 125616 - RNA, 49 nt, Homo sapiens
cagcgagggcaagggacggaaagacgcggagagcgagacacaggagaac

SEQ ID NO: 125617 - RNA, 84 nt, Homo sapiens
ccgggcagcggccgggaacccaagagggccaaggggaggccggcaagacgggccggaagaaaacaccggagcccaagacaccaa

SEQ ID NO: 125618 - RNA, 82 nt, Homo sapiens
cacaggggaccgcaaaaccaggacggggcgggagacgcagagccagccgacacacgggcaaccccgcccccaccacccggac

SEQ ID NO: 125619 - RNA, 77 nt, Homo sapiens
agagaaagaaacacccgaacagcgaggagaagagcaaccggacacagaaggggaaggaaaccccaagcagcagaggg

SEQ ID NO: 125620 - RNA, 75 nt, Homo sapiens
cagggaagagaacaacacaagagaggacgcacacccaccccaaaacaacaagcaagcagaaaagagaggagacca

SEQ ID NO: 125621 - RNA, 79 nt, Homo sapiens
ccagccaagaccccacgcccgccacaagggccaggaacaaaagcaaccaccccccagagacaccggggaacccgaccgc

SEQ ID NO: 125622 - RNA, 60 nt, Homo sapiens
gaggaggcgcaggagacgaccgcaacggcaggggggcgccacagggaaggaccaagacgc

SEQ ID NO: 125623 - RNA, 70 nt, Homo sapiens
agccaggacagaccgccccgagacaaggagggagaaagaaacaaacgcagagcaagacacagaggaaaga

SEQ ID NO: 125624 - RNA, 81 nt, Homo sapiens
cccccgcccgcgcgccccggagcgcgaaggagcgcggaagggacaaccaagaagccaaccaaaagaaccgaaaaacacacg

SEQ ID NO: 125625 - RNA, 53 nt, Homo sapiens
gccccaagaaccggccaccggccccacacgaccgccggccacacacggcacaa

SEQ ID NO: 125626 - RNA, 91 nt, Homo sapiens
gggagaaccgcggcggccggagcggaccaaccaagaagcgaagaaaagagaaagaaacagacaagcgagagagcagcgcaacaggaagacc

SEQ ID NO: 125627 - RNA, 78 nt, Homo sapiens
accaagaaccagaggcagacgccagcagacacacagccgggcacagcgccccaccccagggccgccaggcccggggcc

SEQ ID NO: 125628 - RNA, 61 nt, Homo sapiens
acaccaagcggacgcgccggaggaacaagcgagcccgccgcccgcagccaaccgccgggac

SEQ ID NO: 125629 - RNA, 80 nt, Homo sapiens
cacaggggcgcacggagaggaggccagcaagcgcacccagccacacccgacaccagccagcccagacgacggccagcagc

SEQ ID NO: 125630 - RNA, 81 nt, Homo sapiens
gacgagcagagccccccccaccagaggacgggaggagcagcaacagcccggacaagacgacggacaagcaggcgacaggcc

SEQ ID NO: 125631 - RNA, 76 nt, Homo sapiens
cagaacccaagcgggggaaacggcggcggaaccggaaaaccaagcaacgagacacacggaaaacgcacagagaacc

SEQ ID NO: 125632 - RNA, 82 nt, Homo sapiens
aggacaccacgacgaaaccgaggacaccagacagagcaccagccccaggaaggccaggaggacgggccggcaggaggagagc

SEQ ID NO: 125633 - RNA, 75 nt, Homo sapiens
gaacggacagggcaaggaagagaggccagagaggaggaagaagagaaaggaaggaagaccaggaagaaagaagcc

SEQ ID NO: 125634 - RNA, 74 nt, Homo sapiens
cgccagccccacaacaaccaggaaacaggccgacagcggaaaagaacgaccgaaacagcccagcaaacagacaa

SEQ ID NO: 125635 - RNA, 74 nt, Homo sapiens
ggcaccacggcgcgaagaggacggaacacagcacaaaagggaggaggaccccccaaggacagcagcacaccgag

SEQ ID NO: 125636 - RNA, 75 nt, Homo sapiens
cgaaacccacacagaggagggcacgcggccagaggcgggaaagacaaggccccagcagcaggcaaagggaaggca

SEQ ID NO: 125637 - RNA, 91 nt, Homo sapiens
cggaaaagcagcaggagcacaggcagcgcggaacggaagccgagaagcgcagaacgaagcggcccgggacagccagaggagaagaggaggc

SEQ ID NO: 125638 - RNA, 54 nt, Homo sapiens
ccccgcccaaaagaccaccgcccaacacaacacgcagggacaaacggacaccag

SEQ ID NO: 125639 - RNA, 60 nt, Homo sapiens
cgcagcgccggaagaggcgcaccagccggcaaccaagagccaccgaaaggcaacgaagca

SEQ ID NO: 125640 - RNA, 82 nt, Homo sapiens
cgaccgagcgggaggccacagcagccagccggcccgaggacaccgacaccagcaggagcgggacggagcgggccaccggggc

SEQ ID NO: 125641 - RNA, 63 nt, Homo sapiens
cacccggagaagcaggagcccaccggcaggagagaccgcacgcagggccacagcagcacgagg

SEQ ID NO: 125642 - RNA, 83 nt, Homo sapiens
gggccggacacacgggcagccacccggcggcggggccgcagcccaaggaaggaggagaaagagaaggaaacccacagacccag

SEQ ID NO: 125643 - RNA, 75 nt, Homo sapiens
cgaaccacagaaacaaggggcgcgacaagcccaagaaaaagcggggaaaacaaaaaaaagaaggagggaagaggg

SEQ ID NO: 125644 - RNA, 69 nt, Homo sapiens
ggagaaggcggaagcggcgcgggggaggaacaacaacggcaacagacaagcaggcacacgaggagaaag

SEQ ID NO: 125645 - RNA, 73 nt, Homo sapiens
gggaacacaagaggaaacagagaggagccacccaccaggcggaggcagcagcgcaaccgggacagcaacccac

SEQ ID NO: 125646 - RNA, 74 nt, Homo sapiens
cgcagccacaacaccggcaggaaccaccaggacagaaaaacacccggaaaaaaagaaaacaccagagcagacca

SEQ ID NO: 125647 - RNA, 81 nt, Homo sapiens
gccccgagcgggcagcaggagcacaccaccgcgacggcccccagcgccaagagggcggcagggagaagaggagagagcagc

SEQ ID NO: 125648 - RNA, 76 nt, Homo sapiens
gaccgagaccggaccgagagcggaccgagagcgcgaaacgcacgagaagaacaccgagagagaagaaggcacagaa

SEQ ID NO: 125649 - RNA, 72 nt, Homo sapiens
cgagcaagcacgcgggaaggagagagaaaacagcggagcgggccacaaaggggagaagcagaccgcaccagg

SEQ ID NO: 125650 - RNA, 77 nt, Homo sapiens
cgaccccacccgcgccgcgacccgaggggggcgggccgagcacccgcaggccccgcagaggcgcccacagcggacgg

SEQ ID NO: 125651 - RNA, 57 nt, Homo sapiens
cgcagggcgcccccggaccgggcgaggccaccccgaggcaaggccccagaggaggac

SEQ ID NO: 125652 - RNA, 88 nt, Homo sapiens
cgggccagccgcgcggcgggaagcggcggcggcggcccagcgccaagagacacagggagggaggccgaagcggcgggaacagcacggc

SEQ ID NO: 125653 - RNA, 53 nt, Homo sapiens
aagaagaacagagacagcagccaaacccccagcaagcccaagccacagaccaa

SEQ ID NO: 125654 - RNA, 72 nt, Homo sapiens
aacagcccgccgggacacaccccaggaaaaagacagcccgcagcacgaccagcaggaacgggcgaagcagaa

SEQ ID NO: 125655 - RNA, 82 nt, Homo sapiens
aacacacaacacacaggggcacgaacgcgccaagaagagagaccaggagcaagggagcggaaggcgagagcccgcacccccc

SEQ ID NO: 125656 - RNA, 50 nt, Homo sapiens
cgcggaggaggggagcagcgcgcaagggccaggaaaaaaaccaagccagg

SEQ ID NO: 125657 - RNA, 69 nt, Homo sapiens
caccgagcgggggagggggccccacgagccggaagagaggaaggcaaacagggggcaccgacccgcacg

SEQ ID NO: 125658 - RNA, 59 nt, Homo sapiens
caggaaagacaggagaccaaaaagggaagaccacaagaggggcagcagagccccagaag

SEQ ID NO: 125659 - RNA, 54 nt, Homo sapiens
cgagcaaaggaagcgcgaacagcagcgcagacagaagcgaaggggacaggggga

SEQ ID NO: 125660 - RNA, 58 nt, Homo sapiens
gcacaagagaccgggagagaaggccagcgacagccgggaggagacggaagcggaagca

SEQ ID NO: 125661 - RNA, 77 nt, Homo sapiens
gagagagagcgcagaaacaaggcggcgacagacacagcaccggccccggcagcgggacgcaggacggcagccgggcc

SEQ ID NO: 125662 - RNA, 75 nt, Homo sapiens
cgaagagacagaccaccaccagggcggagcgacagcagggggagaccaagccaggacccgaaaagccagcaagcg

SEQ ID NO: 125663 - RNA, 71 nt, Homo sapiens
gggccaggaggacacgcgcagggcccacgacgagacaaagcaacaagaaggaggaaagaagagacaccgga

SEQ ID NO: 125664 - RNA, 74 nt, Homo sapiens
cagggcggccagagcacacaccaggcacgaagcaagcgcccaaggggggaagaaaaaaaggaagaaccaaggaa

SEQ ID NO: 125665 - RNA, 76 nt, Homo sapiens
aagaaagggacaaagagaggagcaggcagaagcccccggggagagacagacagagggacacagagaggaagaaagg

SEQ ID NO: 125666 - RNA, 73 nt, Homo sapiens
ccccagccggagaaggagcccacaacaaccacaggccgcaggagcccgacccaggggcagagacgccacagac

SEQ ID NO: 125667 - RNA, 82 nt, Homo sapiens
ccgcagagaaaaagggacggcagcgcccaggaccgacagcagaggagcgcaagaacggagaacaccgacggagaaaacagga

SEQ ID NO: 125668 - RNA, 77 nt, Homo sapiens
ggagagagcagcccggcagacgcagaaccacacaacaaccaaacagccaagaagcggggcagcaaaggacacacagc

SEQ ID NO: 125669 - RNA, 58 nt, Homo sapiens
gcaagcggacaaggcaaagcggaggggggagaacaaaagccacgggaccaggacacga

SEQ ID NO: 125670 - RNA, 89 nt, Homo sapiens
gcgacagcggcggcgggagcggcgccgagaggccggcgggacgcgggcgccaggaccggccgaacgcagaggaagaaggaccggggaga

SEQ ID NO: 125671 - RNA, 77 nt, Homo sapiens
cagaagcaaccgggggaaagcgggcaacagggcagggcacaggccaccaggccgcaaaagacaagcacagaagaaga

SEQ ID NO: 125672 - RNA, 78 nt, Homo sapiens
acggggccggaggcgggaccaccgcaggagccggcagcggccacgagccccagaagcaggccacacgacaaggaaaca

SEQ ID NO: 125673 - RNA, 77 nt, Homo sapiens
cggggagacaccaccgccaaccgcaccagggacccgggggggaccgccggggccggcgcaccccccagaccaggcgc

SEQ ID NO: 125674 - RNA, 80 nt, Homo sapiens
cgagcggggggacgccggcggagacgcgggcgaggagccccaagcgggccggggaagaaacaggggcagcgcggaccgga

SEQ ID NO: 125675 - RNA, 76 nt, Homo sapiens
caggaggaagcacaggcccaagaagccccccacacacagccccccggaaaaccacacgagaggcaaaaaaccagca

SEQ ID NO: 125676 - RNA, 82 nt, Homo sapiens
gccgccccccagacgcaaggcgagcccaagaaaggcgaaacccacagaacgcaggggggccccgcaccaccccagcaaccaa

SEQ ID NO: 125677 - RNA, 62 nt, Homo sapiens
ccggccaagcacacacaccaccggcgggacgcggcgcagcaacaaacagcggcgacaaaccg

SEQ ID NO: 125678 - RNA, 75 nt, Homo sapiens
cagaaaggcagcgggccggcgcacacggagaagaaaaaaaggaagccaaaggcacccacgccagagcaacgcggg

SEQ ID NO: 125679 - RNA, 67 nt, Homo sapiens
aaacgccacagcgggggaaacccagacgacaaggaaggccaagggacccacgaccaaccaagaaaac

SEQ ID NO: 125680 - RNA, 61 nt, Homo sapiens
ccggaacccgcgcgcgcccacgacgccgagacaggccaggcccagccaggagcacggggac

SEQ ID NO: 125681 - RNA, 69 nt, Homo sapiens
cagagagcacagaccagagcgagaacaccaagagaggcaccagagaaaaggcaccagaagaaagcacga

SEQ ID NO: 125682 - RNA, 48 nt, Homo sapiens
cgaaaaagcgggaacgcaggacccaaagcagcgcaccccggaagccaa

SEQ ID NO: 125683 - RNA, 67 nt, Homo sapiens
gcaagagcaccccaacggcccagagcccggaacgggagaccacgagcgcaaggccagagaagaagac

SEQ ID NO: 125684 - RNA, 79 nt, Homo sapiens
cgccgccagcagcccccagcccgccgccgccccgccgcggcgcacccgccccgcgccgcagacaaagagccgggaaaaa

SEQ ID NO: 125685 - RNA, 80 nt, Homo sapiens
cgagaccggaccgagagcggaccgagagcgcgaaacgcacgagaaggaacagggcgagacgaacaacgcgcgcaggagac

SEQ ID NO: 125686 - RNA, 57 nt, Homo sapiens
agacaagaccccaacaacaaggcccccacgacaagggcggccggaggaggccaacgc

SEQ ID NO: 125687 - RNA, 74 nt, Homo sapiens
cagcagggacaaggaccagaagaaacgcaccggaaaggccaccagcaacaggaaggccgaagcccacgccaagc

SEQ ID NO: 125688 - RNA, 77 nt, Homo sapiens
ggaaagcgggcagcagagaagaaagcgaagacgagcaaaaggcagcgcaggaaacacacacggaagaggggaaaggg

SEQ ID NO: 125689 - RNA, 75 nt, Homo sapiens
acgggagaagccccgcacagcagagagcaacccgaaaagcggaggcgagcagacgacagcaacggccgaaaaaag

SEQ ID NO: 125690 - RNA, 77 nt, Homo sapiens
gcagcgagaaaccagaaaacacggaacaaaggccaaagaaccgggagaggaaccaaagaaaaaggagcaggcgccag

SEQ ID NO: 125691 - RNA, 77 nt, Homo sapiens
aaaaccacaggcacaaagacagggcacggacaaggcgcccgcgaagagcccgcggccccaggcccccccccgccgcc

SEQ ID NO: 125692 - RNA, 82 nt, Homo sapiens
cgcaccgccacgcgcagggcggcgggcagcagcacaacgggcgcaccaaggcagccgccaaggaaaccgcggaagggccggc

SEQ ID NO: 125693 - RNA, 75 nt, Homo sapiens
ccgcgcagcagcgaccacgcgccggcccaggcggaggcaggggccacagccaacccgaccccggacaaggacccc

SEQ ID NO: 125694 - RNA, 80 nt, Homo sapiens
ccggccgccccggagggagacgcgcgccgaggagaacccagcggcggacggcgcgccaccggccacgcaacccccgccga

SEQ ID NO: 125695 - RNA, 59 nt, Homo sapiens
cacccacaaccaggagaaccgaccgaccccacagacagaggcacaggccaccggaaaga

SEQ ID NO: 125696 - RNA, 73 nt, Homo sapiens
cgcgccgggagaccgcggaggccgacaggacgggcgccgccccgcgcggcagggaagccaaagcagaaccaag

SEQ ID NO: 125697 - RNA, 79 nt, Homo sapiens
aacacccccagcggccaggccagggcaggacagcagcccgcaacaggccggccagccccccacaaccaccgcaccagcc

SEQ ID NO: 125698 - RNA, 69 nt, Homo sapiens
aggaagaaaggaacagggaccagaccccacaagaaaacacacaaccacaggcccaagcaaacacaccaa

SEQ ID NO: 125699 - RNA, 53 nt, Homo sapiens
acccagccccggggcccccagacaggcaaagcaaggggccaccagcccaggca

SEQ ID NO: 125700 - RNA, 56 nt, Homo sapiens
acccgagccaaagaacacagaacacacggaagacaaggacccgcgcaacgcagcgc

SEQ ID NO: 125701 - RNA, 78 nt, Homo sapiens
cggagccgccacccagagcgcacggcgacgccccaggggaaaacccccgggaccaggaaggcccgaaaggaaggacac

SEQ ID NO: 125702 - RNA, 84 nt, Homo sapiens
gaggaggagagccaggaccggcaacgaaaacgcggcgggggacggcgccccgggaaggcgcgaccgcccagggagacggaaccc

SEQ ID NO: 125703 - RNA, 71 nt, Homo sapiens
cgcccgggccagcggccgcgcacccccggccggaggcaccagcgaaaaacgaagagccgaagaacaccagc

SEQ ID NO: 125704 - RNA, 74 nt, Homo sapiens
ccacgggagccgggcccgggaacgccgaggcaggagcagagcgaggcagggccccagagacacaagacaaccag

SEQ ID NO: 125705 - RNA, 78 nt, Homo sapiens
agccagagccccacgggaaggagagcagccagcaggaaggggaaccacaaagaagagaaggcgggccaagaccgacaa

SEQ ID NO: 125706 - RNA, 66 nt, Homo sapiens
gccccaagccggaagaaccgcagccgagcggggccggccacaggaccagagaagacacacaacaac

SEQ ID NO: 125707 - RNA, 73 nt, Homo sapiens
agccgggcccagacccagccaaaagaggcagaagcccgagccagaagaaacaaagaagacagaagccacggca

SEQ ID NO: 125708 - RNA, 76 nt, Homo sapiens
gggagccaggggacagcacccggccaacaccacgccacccaagcaacccaagacccagcaagaaagccgccaagag

SEQ ID NO: 125709 - RNA, 72 nt, Homo sapiens
agggccgagcaccggagaaaacacaaacccaggagcaccacggacaaggcacgaggcgcggcgaccaccaca

SEQ ID NO: 125710 - RNA, 76 nt, Homo sapiens
ggcgaaccggcaaccaccaccaggagccagcacgaggagcaaaagaaaaggccaaaacgaaaaaccaaacagaggg

SEQ ID NO: 125711 - RNA, 80 nt, Homo sapiens
ccagaggagggaaaaggcgagaagcaagcccgggcggagcccagccaaccaagcagccccacggcgagacaaggagaacc

SEQ ID NO: 125712 - RNA, 75 nt, Homo sapiens
ccggggacccagcacccaccggcgcaaggccaagacaggggacagccggccgaacggcagccccgggacccaaac

SEQ ID NO: 125713 - RNA, 70 nt, Homo sapiens
acagcacaccggagagacgaggcacccgaaagagcgaaagcccagacaggaagcaacgagggagaagggg

SEQ ID NO: 125714 - RNA, 76 nt, Homo sapiens
acagaaaaagagaggagggagaacacagaaacccgccccggaagccccccagggaaagcccaaccagcagacacgc

SEQ ID NO: 125715 - RNA, 66 nt, Homo sapiens
gagagcgccacagaacagacgggggcgggcagggcagacagagcgaccgcccaacaccggaacgac

SEQ ID NO: 125716 - RNA, 82 nt, Homo sapiens
cccgacaaagcgaaagcacaccaagccacaggccggcacccgggaagagacaagaagaaagaagaaagaggaagaccaggac

SEQ ID NO: 125717 - RNA, 121 nt, Homo sapiens
gccgccgccgccgccgggcagcccaagcccgcacggcaacgcaaacgccgccagagcaggagacacgggagagagggaggaacacgggacgacggcgggagcgaccgcggggcccggccgc

SEQ ID NO: 125718 - RNA, 76 nt, Homo sapiens
cgcacagagacccaggcgcccagaagcgcgggaaaggggcaaaggaagcagcagcggccgaccgccagccgcgaca

SEQ ID NO: 125719 - RNA, 59 nt, Homo sapiens
gggggagaaggggcgcccccaaaccggagaacaggaagccagcgaagagagggggaaaa

SEQ ID NO: 125720 - RNA, 81 nt, Homo sapiens
cgggagccgcacgggccaaggagaaagaagaaacaaagagggacccagccaccaaaaggaggcgaagggccaggagaagca

SEQ ID NO: 125721 - RNA, 50 nt, Homo sapiens
cgagcagcagccaacggaacagggcgaagcgaggaacaaggcccaaaaaa

SEQ ID NO: 125722 - RNA, 76 nt, Homo sapiens
caggcggccgccaccaggcagagccgaggaagcgaagcagaggcccagcaaacaaaccagagcgggacaaaagcgc

SEQ ID NO: 125723 - RNA, 72 nt, Homo sapiens
ggcagacccgggcgacgccccagggacaggagaccccagccacccccagggccaggcaagaaagagcgcgac

SEQ ID NO: 125724 - RNA, 69 nt, Homo sapiens
gcaggggcccggacaaggagagcccaaaaggcagagcgaggagagaagaaggagggaaagccaaacaac

SEQ ID NO: 125725 - RNA, 84 nt, Homo sapiens
ggcgaaaagaacggacagaagaagagagcacacacaagcaggcgcagagaggacagcgcccagccccaggcccacgaggacccg

SEQ ID NO: 125726 - RNA, 82 nt, Homo sapiens
cagcccagaaagccgggacaaagcaggcaaggccagcaaggaggggggccgagccggcggcggcggcggcagggggcagcgg

SEQ ID NO: 125727 - RNA, 73 nt, Homo sapiens
caaccacagaaaaggccacgacccaccccgaagagcaacggaaccagcgccgagggcacaggacccaccgcag

SEQ ID NO: 125728 - RNA, 72 nt, Homo sapiens
aacgccagggcaaggccggcccaaagcacgccggccacggagagaagcagaaaagcgacaccaagcagggac

SEQ ID NO: 125729 - RNA, 64 nt, Homo sapiens
cccccccggggggaaacccccggggaaacgaagaaccaaacacaagacaacaggagacacggaa

SEQ ID NO: 125730 - RNA, 85 nt, Homo sapiens
ccggagcaaaagcccacgacgcccaccgaaagcggcaagaagaaaagaacaaaaaaggccaaggaagggggacaggcaaaacgaa

SEQ ID NO: 125731 - RNA, 106 nt, Homo sapiens
ccggacggaaagcgacaagggaggcgccgccagcggccgggaccgaacaggcggcaaaagcagaccggaaaacccaccggcaagaccacacccgaggggagcccag

SEQ ID NO: 125732 - RNA, 82 nt, Homo sapiens
ggagcgaagcgcaggcgcggggcgcggagcgggagaacaacccgaagagagacggagccgggcacggcaagaccaaccgggc

SEQ ID NO: 125733 - RNA, 42 nt, Homo sapiens
acggaaacccacaggcacacccaagagaagagccacgcggca

SEQ ID NO: 125734 - RNA, 80 nt, Homo sapiens
gccggcaaccccgggcggccgcaccgccaggaacccgagccggaccagcgagcaggggagccagaccaaagacagccgaa

SEQ ID NO: 125735 - RNA, 83 nt, Homo sapiens
cggcacgcagccgcgcaagccaacgaccgggaagagggcccggcgggcgagacaccgagcagccagggcccgcccaaggagcc

SEQ ID NO: 125736 - RNA, 67 nt, Homo sapiens
agaagcgccaagccggccaagcagagcaccggccagaacaagccaaggagccaagacgagagggaca

SEQ ID NO: 125737 - RNA, 79 nt, Homo sapiens
gaggaaacggacgaggaaggagaacccagaaaggcaaccggccccgcaaagccaaccgcaaccgccagggaagaccaac

SEQ ID NO: 125738 - RNA, 81 nt, Homo sapiens
ccagacacaagcacagcgagaccgcggcgcaggaggaggaggagacgccgagagggcggcccaggcagacacgaacacagg

SEQ ID NO: 125739 - RNA, 83 nt, Homo sapiens
cggaccgagaccggaccgagagcggaccgagagcgcgaaacgcacgagaaggagagcacgaagagcgagggcagacagaagca

SEQ ID NO: 125740 - RNA, 91 nt, Homo sapiens
aggaaccggagaccccgaaaacggaagcgcagggagaaggaagaggggaaaagcggggacgagagccccggcacaaacggaccaccagaaa

SEQ ID NO: 125741 - RNA, 48 nt, Homo sapiens
accccaggcccccacccagccagcccaagagagcagcgaggccgagca

SEQ ID NO: 125742 - RNA, 84 nt, Homo sapiens
caggggccaggcgaagcacgagcagaccggcccgaccgcccacagacccaaacaaaggccccgggaccaaggacacgcagaccc

SEQ ID NO: 125743 - RNA, 84 nt, Homo sapiens
agcgagggggcagccgcggaggagcggggcggaagccccacgacggcaggcgcacggaacagcgaggccagcaggagacggagc

SEQ ID NO: 125744 - RNA, 58 nt, Homo sapiens
gggaaagcaacaaccaaaggccagggcacaaaaaagggccaagccgcccgccaaccgg

SEQ ID NO: 125745 - RNA, 60 nt, Homo sapiens
aaacagcagccaaccaggcccgagacaaaaagcgccacgcagagccccgccaggaagaca

SEQ ID NO: 125746 - RNA, 76 nt, Homo sapiens
ccccagcaccagccagagccagacacggcagcgacaccacaaggccagcagagcccaagggcgccagccaccaccc

SEQ ID NO: 125747 - RNA, 68 nt, Homo sapiens
accggcaccaccaaagaggcacccaggaggagaggcaacacgcgggcagccggcaggcgcggacagaa

SEQ ID NO: 125748 - RNA, 80 nt, Homo sapiens
ccgaccacagcaagcccggggccgccagcaggaagcccagcaagcgcccagcagcacgccccagagaccccggagaagag

SEQ ID NO: 125749 - RNA, 78 nt, Homo sapiens
gccagagggacacgcgggcacggccggagggacgcacaaggaccggcacggcagaagccgccacgccgcaggcagaaa

SEQ ID NO: 125750 - RNA, 75 nt, Homo sapiens
cgcaaacacacacagagcaaaggagaagacagaaccaccaaagcgacagaagaaagaaagggcgaggggaagaag

SEQ ID NO: 125751 - RNA, 84 nt, Homo sapiens
gcggcgcagccggaacccgccagggccagggccaggccagcgcccggcggcccagccgccgcccgccagcggacccgcggcacc

SEQ ID NO: 125752 - RNA, 39 nt, Homo sapiens
gaccaggaggcgagcaacaggcgaaccgcacaggagaac

SEQ ID NO: 125753 - RNA, 76 nt, Homo sapiens
gcgcgcaaggggccagaaccacggaaggagggggcgacacacaagcaggggggaccgacgagcaggcgagaaggaa

SEQ ID NO: 125754 - RNA, 90 nt, Homo sapiens
agagcgccaccaagccgcaagcaaggcagccgggagccacacgccagcgccagacgggggagaccagcgcagcaccgcacgggccaggcc

SEQ ID NO: 125755 - RNA, 107 nt, Homo sapiens
cgcgagcggcgagccggagcgcggagcccggccccgcaccaggaggaggacgacagcacggccgggagagagcgcgaaccggaaaaagaacgacggaagaaggagaa

SEQ ID NO: 125756 - RNA, 77 nt, Homo sapiens
cggagggcgccccccccccgaggcgcccgcagggccaggacggaccgggcagccaggagggcagcacgagcggggcg

SEQ ID NO: 125757 - RNA, 84 nt, Homo sapiens
ccacggcggccgaggagaggcagggcgcgagggcgggggcagcggcaggaaagcgaacgcgaaaagaaaagccgagagcagcca

SEQ ID NO: 125758 - RNA, 88 nt, Homo sapiens
ccgccccaccagggagagaggagacccaggagacgagcggccaggaggcccccccaaagacccaaacgaacaaagcccggagacccaa

SEQ ID NO: 125759 - RNA, 80 nt, Homo sapiens
cagggaagcagccgaccagccgcggagccgggggcagggaaccaagaccaggacaaagaagacccggagagacaagccgg

SEQ ID NO: 125760 - RNA, 76 nt, Homo sapiens
cacaggcaccagacgggacagaaaaccagaggcaacaggcaccgaagcacaccggccaaaggagagggccagggcg

SEQ ID NO: 125761 - RNA, 65 nt, Homo sapiens
ggaaagggccgccacagaaaccagggaggcaggggaccccacaccacaaaccgaggaaagaaggg

SEQ ID NO: 125762 - RNA, 82 nt, Homo sapiens
gcgacagaggagggaggaaaacaaccgagggcagagcaaacggcgaaaaaccgcaaacacacgcaacggcaaacagaaggag

SEQ ID NO: 125763 - RNA, 73 nt, Homo sapiens
accaggccacagggaccgcaggcccgagaacacgcagacagccgaggaagaacagacacagcaccgacacgcg

SEQ ID NO: 125764 - RNA, 60 nt, Homo sapiens
ccaggcccgaagcgcggacgcggacgagccagccgccgcgccaagaaacgcgcggccggg

SEQ ID NO: 125765 - RNA, 75 nt, Homo sapiens
ggaggacccaacagggccgcaagaggaagaggacgggaagggacgggaaacaccaaaagcgaagaaacaaggaac

SEQ ID NO: 125766 - RNA, 92 nt, Homo sapiens
ccacaggaggcgcggaggacgccccaccgccgacgcccccagccaccagcccgggcacaggaagcaccgaagagagagagaagcaaaaggag

SEQ ID NO: 125767 - RNA, 74 nt, Homo sapiens
gggagggaccagagccacaaccaaaagaagcacaccgaggagagaaagaacccacgcaggacgacagaagaggc

SEQ ID NO: 125768 - RNA, 61 nt, Homo sapiens
ccgcccaaggaggcccagcggaaaaggggacccaaccacagccccccaggagaaaagaacg

SEQ ID NO: 125769 - RNA, 82 nt, Homo sapiens
ggaggagggcggggagaggaccaggaggggcccggagcccagcgccgcgcagaaacccaaaggacaccagagcagcacgcgc

SEQ ID NO: 125770 - RNA, 78 nt, Homo sapiens
cagaagaaaacggcgagaggggcgagaacgccacgcgggccggcgaaagcgggaaagaagaaagcaccccgcaaaaga

SEQ ID NO: 125771 - RNA, 82 nt, Homo sapiens
cgagaaccgcagcccacacggagagaccggaagaagggaaggaaggaccccaggacaggaagggaggcccgcccaccgccgg

SEQ ID NO: 125772 - RNA, 63 nt, Homo sapiens
gcgaccgccccagggaggagcagccgcgcccaccccgccagccagccccacaacccggccaca

SEQ ID NO: 125773 - RNA, 40 nt, Homo sapiens
ggacggcaggggaccgcacaacccacggcagggcaacccc

SEQ ID NO: 125774 - RNA, 79 nt, Homo sapiens
gaccaaggcaaaacgacgaccaggaagaacggagcacgacagaaacacagccgcaggcaaagaacggccaaggaaggag

SEQ ID NO: 125775 - RNA, 79 nt, Homo sapiens
gcgcccggaccccgccaccaagaaaagcggacagaagagagagacaccacaaggccagaagccacgacaaaagccgaca

SEQ ID NO: 125776 - RNA, 77 nt, Homo sapiens
gccagcagaagaccaacacaccagcgcgggaggcagaccggacgcaaggaaagagacaacacagacagcacgaggca

SEQ ID NO: 125777 - RNA, 50 nt, Homo sapiens
ggaaggaagcaccgcgaaaagggcaccaagaaacgaaagccgaaggccga

SEQ ID NO: 125778 - RNA, 53 nt, Homo sapiens
ccagccccgaaagagaaaagaaagccagaaggaaggaagcaacgaaccaagaa

SEQ ID NO: 125779 - RNA, 52 nt, Homo sapiens
cacccccgcccgaccgcccagcccccccacagaaagcaccgggaggaaagag

SEQ ID NO: 125780 - RNA, 73 nt, Homo sapiens
caggaccaccgacggaagagagagaaacaggcaaaccggaagaccagaagaagaggaggagcaccgcacagca

SEQ ID NO: 125781 - RNA, 68 nt, Homo sapiens
agaccgcggccggggagcccccggcccggcaggcagaagacgagagacaaacgccccggaaaggcgcg

SEQ ID NO: 125782 - RNA, 75 nt, Homo sapiens
aggcaccaggccaccacagaaacaaaagcaacaaagaggccgccggagaagagggaggggagaggacaagggccc

SEQ ID NO: 125783 - RNA, 82 nt, Homo sapiens
ggcccaccggcccggccggagggcagcgccagagagggacaccaggccaaaccaccccaagccgagcacggggagcgcacac

SEQ ID NO: 125784 - RNA, 58 nt, Homo sapiens
ggagccagaagcacaggcccgggcgaaggggccacgcgaagccaaaaacagaccggaa

SEQ ID NO: 125785 - RNA, 76 nt, Homo sapiens
cgagcgaaaggaccccagaggaggcgagcccccaggacaggcacacccgggaaaaccgaacacccagcccagacac

SEQ ID NO: 125786 - RNA, 74 nt, Homo sapiens
accggcaccaccaaagagggggaagacagagaagaccacacaaccgaaggggccgggcaggacggcccggggca

SEQ ID NO: 125787 - RNA, 85 nt, Homo sapiens
ccaaaggcaccaggaggacagccggagaaagcccagagcagcccgacggccaggaggcgaagagacgaggaagcccaggagcccg

SEQ ID NO: 125788 - RNA, 69 nt, Homo sapiens
ggcacagccaggccgcagaggggaagaggagagcaacggcagcgcagcgagcacgcgacagcgggcccg

SEQ ID NO: 125789 - RNA, 75 nt, Homo sapiens
cccggagagagcgggcgagcagaaacccggaaggcagaaaggcgggcacagggcgggcagccccaggcccagaga

SEQ ID NO: 125790 - RNA, 95 nt, Homo sapiens
ccggcccagacccccagcaccacagacccggagcagcacccacggccacaccaccgagaaaagggaacaaccccaaaaaaccgacacccgggaga

SEQ ID NO: 125791 - RNA, 74 nt, Homo sapiens
accacagaaaagaaaggcggggcgagagcgccaaagacccccaggcagcgaggcgcgaaaaaaaccaacaaacc

SEQ ID NO: 125792 - RNA, 89 nt, Homo sapiens
agcgcaacacgcccgcccgcgggccaagaaacggagaaaccggaggacccgccgcaaggaacaagacgccaaggagacgccgcagagac

SEQ ID NO: 125793 - RNA, 54 nt, Homo sapiens
cgacccaccaccggcccaggaccccacccccaggaaagaccgacagagaagccc

SEQ ID NO: 125794 - RNA, 66 nt, Homo sapiens
gaaaacacagcgagagccaggacacccgcgggggcgaggcccaaagacggggacgaagccccagag

SEQ ID NO: 125795 - RNA, 68 nt, Homo sapiens
gacaaaaacagccgaacaggcagcaaaaccccagaagaggcgaaccgcaggaaaccagagcaagaaac

SEQ ID NO: 125796 - RNA, 82 nt, Homo sapiens
aggagagcagcggcagccggcgggcagcagccggccgacccagaggagacaggagggaccgggcagaagaacgggggacgaa

SEQ ID NO: 125797 - RNA, 77 nt, Homo sapiens
cgcccggggcagcgaacgagcgaggccacgccgcccaggagacccccgcgcaccaccagcacgcaggccacgcacca

SEQ ID NO: 125798 - RNA, 81 nt, Homo sapiens
cagggcaagcggcgacggaccccaagaagaacaccaaccaaaaagaaagacgaaaaagaccgcaaaaaccacagaggaacg

SEQ ID NO: 125799 - RNA, 75 nt, Homo sapiens
cagcggcgcagcccggggagaacaaccgcaacgaacaaacaggagacagagagcaagagcaccccaacggcccag

SEQ ID NO: 125800 - RNA, 63 nt, Homo sapiens
cgcccggcgcacagcgccaggagcgggacggagcgggccaccggggccacgacagcgagcgac

SEQ ID NO: 125801 - RNA, 77 nt, Homo sapiens
cgggacaagagagccgaggcgcccccaccacccacaaggacggggggcccgggcgaaaccggaccgggcccggagga

SEQ ID NO: 125802 - RNA, 85 nt, Homo sapiens
cgaggcgcagcccgcccggaacaaccggaccgaacgacacggcggaaacgacgcaggaggcagggagcacgcgggcaggcagccc

SEQ ID NO: 125803 - RNA, 81 nt, Homo sapiens
cgcaccaccaacgcggccgacaacagccggcgccgccacgaaccggaaacacagaagcaccccagaccggacaagggggac

SEQ ID NO: 125804 - RNA, 89 nt, Homo sapiens
aacagccaacgaggagaagaggcaaagagagggggggcaagccgcgaggcccagacaagcgcaggaaccagggaacccaacgaagaaaa

SEQ ID NO: 125805 - RNA, 40 nt, Homo sapiens
cgaagaagaccccccacacggagcgacgacaagcgggcca

SEQ ID NO: 125806 - RNA, 80 nt, Homo sapiens
gcggagaccaggagaccccacggagcgggcgacgagcgacccgggagacacgacggccccagcagcggcaggaccagggc

SEQ ID NO: 125807 - RNA, 70 nt, Homo sapiens
gcaacaccggaggagggggcggccacggccaacgccgcgcccgcggagggaaaaggaacacgaggaccca

SEQ ID NO: 125808 - RNA, 77 nt, Homo sapiens
cgccaggaggcccaccccgccggggggaagaagagcgcaccgaaggcacaagggaaaccagaacaaaaggccagagc

SEQ ID NO: 125809 - RNA, 65 nt, Homo sapiens
aaagaggaggaggaaccagcgcagaaacacagcacaaacaccagagaccaaaaggacaggacaaa

SEQ ID NO: 125810 - RNA, 77 nt, Homo sapiens
cagacgagaagaggaagcgcgggagaagcggcgcccaccggcgggcaacacccgccgcagaggaggcacaaagagag

SEQ ID NO: 125811 - RNA, 82 nt, Homo sapiens
gacgcgacgcgcgccgaggccacaggaaaggggccgcggcgccgccagacagcgagcgaggcggagagagacggggaccagg

SEQ ID NO: 125812 - RNA, 53 nt, Homo sapiens
agacggaggaggagccggacgggccagaggagccagccaccggcaaaagccaa

SEQ ID NO: 125813 - RNA, 49 nt, Homo sapiens
ccacgaaaccccacaaaggcaagccacgaaggacccagagagggaccag

SEQ ID NO: 125814 - RNA, 53 nt, Homo sapiens
aacagccgaaggccgagcgcaagccccggggcagagacacaggacacccaccc

SEQ ID NO: 125815 - RNA, 75 nt, Homo sapiens
gagggcagacccaggacagagaccagaaacacaggcagacggaagcacagaagcgcaggcagaaacccgaaccgg

SEQ ID NO: 125816 - RNA, 64 nt, Homo sapiens
acagagaccgcacaacggagagcccaaggaaggcggggggcaagggagaaagggccacaaaacc

SEQ ID NO: 125817 - RNA, 81 nt, Homo sapiens
aaccagggcacccaacaaggccgccgggcaagcaaagccccaggagaacgcagacagaaaccaagccgccccgaacaacgc

SEQ ID NO: 125818 - RNA, 66 nt, Homo sapiens
agcgcccccaaacgacaacaaagaaggggcgggagcacccaacagagcaaaaccaaaacagcggaa

SEQ ID NO: 125819 - RNA, 80 nt, Homo sapiens
aaaaaagagcaaaacagccagaaagcgcgggaccagacaaaaggaccgccgggagagccgcccaccccccacccggacgc

SEQ ID NO: 125820 - RNA, 69 nt, Homo sapiens
cgcggacccggaccccacaagaagaacaggacaccaggccgagcacgaaccgaccaacaggcgagagga

SEQ ID NO: 125821 - RNA, 95 nt, Homo sapiens
cgacggccggcgggcgggggccccgcgccgcggccgagcagcggacggcccgccacgggccccgcagccgcgcccgagcgcccgagcagggacag

SEQ ID NO: 125822 - RNA, 63 nt, Homo sapiens
agacacagaaccacacgcccaagggcagcaagaaagggaaggcgcgccccagaccaccggcag

SEQ ID NO: 125823 - RNA, 46 nt, Homo sapiens
aacgggaagacgcaggcccgagaacccaaggaaaggcggcacaccc

SEQ ID NO: 125824 - RNA, 52 nt, Homo sapiens
gccgggcgcggagggaggaggcggagcccggagcccagagccgaggagaagg

SEQ ID NO: 125825 - RNA, 65 nt, Homo sapiens
gaaacccgaacaaaggcgggagagcagcagaaagcggaccacaggcggccagcgccggcgaagca

SEQ ID NO: 125826 - RNA, 81 nt, Homo sapiens
cccgggcacgcgcgggcagaaaggcaccacaccgcacgagacaacaagaagaccacaccaaagaagggggccaccaagcaa

SEQ ID NO: 125827 - RNA, 86 nt, Homo sapiens
ggagcgggagcgggagcgggagccggagcgagagcgcgcgggcgcggccgacagcggagcggaggcagacacacacggggggagag

SEQ ID NO: 125828 - RNA, 86 nt, Homo sapiens
ggcaccgcccgcgcagccgagagccgggggagcggggccccacacccccccggggggggaaggccgcggacccccccccccccacc

SEQ ID NO: 125829 - RNA, 74 nt, Homo sapiens
gaggggaccaccacacacagccccagggcaaagagcggcagaagggaggagaggagggggagggacaccgcccc

SEQ ID NO: 125830 - RNA, 56 nt, Homo sapiens
gacgcccaacggccacaggagagacgggacggggggccggagagaggaaaagaaag

SEQ ID NO: 125831 - RNA, 79 nt, Homo sapiens
ccgccgcgaggccgggaagggaaggcgagaaagaaccccagaagacaccaaccacagaaccgccgagaagagcacagca

SEQ ID NO: 125832 - RNA, 80 nt, Homo sapiens
ggcggcgcaagggaaacaacccgagagcacgacggggcagagaagagcaagagaccgaccaaaacacaaccgggagccaa

SEQ ID NO: 125833 - RNA, 79 nt, Homo sapiens
gagaacacgggagaagccgaagacgcacaaccaagaaggacagaaaacgggccccagacacaagccccaccaagaggac

SEQ ID NO: 125834 - RNA, 62 nt, Homo sapiens
accggacccgacagcaggaagagagcggggccaagggaccccaagccgaggaacagcgcgcc

SEQ ID NO: 125835 - RNA, 76 nt, Homo sapiens
cgccggccgccccaccggcggaacccagcaaggccagccaggagcccggaccgcaaaccacagaaaagcgaaaaac

SEQ ID NO: 125836 - RNA, 80 nt, Homo sapiens
gcacagccagggagccaagcgccgcccggccgagcgaagaaaccgcaaaggggagaaaaacccgaacaccagggagaagc

SEQ ID NO: 125837 - RNA, 68 nt, Homo sapiens
cgagcggagacccgggagcaggagcgggccaggcgcgcccgaggacggggagccgaggaggagcagga

SEQ ID NO: 125838 - RNA, 38 nt, Homo sapiens
gagcacgggcggagcgaacgccaccggggaccgcaagg

SEQ ID NO: 125839 - RNA, 73 nt, Homo sapiens
ccagggagaaaggccggaacgaaagaacgaccccacaagccgcgcgaaaggggcggagaacaagagagaaacg

SEQ ID NO: 125840 - RNA, 51 nt, Homo sapiens
gaggagggaacacacaggccgccggaacaagagaacacccacgaagcaccg

SEQ ID NO: 125841 - RNA, 83 nt, Homo sapiens
ccacaagaccggcccaagccgagcagacggcacgaagggcggccgccgccggagggcccccggacccgggagcggacccgggg

SEQ ID NO: 125842 - RNA, 67 nt, Homo sapiens
caggggaaagaacgagagccaggccgcagggggacagaggagccaaaggccaaaccaccagcagaca

SEQ ID NO: 125843 - RNA, 82 nt, Homo sapiens
gagcccgcgccccgggaacgcagaagcacaagaaggccggcaggccagcgagcgccacggccggaacgcacagcggaaggcc

SEQ ID NO: 125844 - RNA, 76 nt, Homo sapiens
agggaaaaaccccaagaggaagacaaacaaccagcccagcaacagggaaaagaaggaaaacgggcccagagaagag

SEQ ID NO: 125845 - RNA, 48 nt, Homo sapiens
cgccgccagcggccgggaccgaacaggcgacaccagcccccggacaac

SEQ ID NO: 125846 - RNA, 117 nt, Homo sapiens
ggaggcgggaggagcggcagccgcgaggaggcgcgggagggcgagaacgaccccgagacggcaaaagaaggaccccagcaggaaaagcaaagcaagagaacgcaagaagacgaacga

SEQ ID NO: 125847 - RNA, 84 nt, Homo sapiens
gagaagcaagaaggcccggacacagcaaaccgggccacagagcaaacgaggccccgagagcccaccagcacaggaaaaacccac

SEQ ID NO: 125848 - RNA, 76 nt, Homo sapiens
gcacggagccggacacgaaacgggggccccaggacccggacagacccaaaagggaaaaaggaaaaccagaagccag

SEQ ID NO: 125849 - RNA, 81 nt, Homo sapiens
agaggcagcagcagccgcggagcagagccgccggggagggagccagaagcaacgaggacgcaaaccagaaggagaaaaagg

SEQ ID NO: 125850 - RNA, 83 nt, Homo sapiens
cggcccaggcgccccaaaaaggcgcggagcccgccggccgccagggagcgcagcggcaacggcacagggcggggaggagcgcc

SEQ ID NO: 125851 - RNA, 88 nt, Homo sapiens
ccggagcggcgacgaggggcgccacacgcgcagagccaagaaagggagggggaaacagccaaggccgaggagagaagaaaaaggcagc

SEQ ID NO: 125852 - RNA, 69 nt, Homo sapiens
aaagaaacgggccacaggaccgcagcaaagagagccaacgcagaaaaggaaagaacggaaacaaaccaa

SEQ ID NO: 125853 - RNA, 63 nt, Homo sapiens
accccgaccccgcagaggacaagcaggacaccagaggaccagaacccacgagaaacagacgag

SEQ ID NO: 125854 - RNA, 85 nt, Homo sapiens
cgccgccacggcccaccacccgccgcgcgacccaccgcggaccacaccagggccgagaacgacagacaagcagaccggaagaccg

SEQ ID NO: 125855 - RNA, 71 nt, Homo sapiens
gcgccaccggcagcggccagacgagcggagaaaggaaagaccacagcaagaccacgcccccagccggggga

SEQ ID NO: 125856 - RNA, 76 nt, Homo sapiens
agggaaccagcaacaagccagaaaaccgagaaaacgggacaaagagccagcccgagcagcacccggcccaagcaga

SEQ ID NO: 125857 - RNA, 55 nt, Homo sapiens
gcaagagaaggcaccaagaggccccgggggcgccgagggcacaagggcaacgaca

SEQ ID NO: 125858 - RNA, 60 nt, Homo sapiens
gagccaccccacaccagacaacgccaccccgccccagcccaggcgggacagcacaagacg

SEQ ID NO: 125859 - RNA, 77 nt, Homo sapiens
ggacacaaccgccgccagagaggggaaagaccacaggcggagcaccccaggagacggacaagggagggccaagaacc

SEQ ID NO: 125860 - RNA, 59 nt, Homo sapiens
gcagaccagcggagcacggaaagccacgagagaagaaagaaaaagaaaccgccagccca

SEQ ID NO: 125861 - RNA, 70 nt, Homo sapiens
ggagaaggaccaagaaccaggaccacccggcccaggcggaggcagggcagacagggccacgcagccgacc

SEQ ID NO: 125862 - RNA, 88 nt, Homo sapiens
ggcgggcggagacaggaccgcggcgagcaagagccaggacaaaaccaggcagaaccaacacgaacccaagcacaaacaagaaaacgag

SEQ ID NO: 125863 - RNA, 58 nt, Homo sapiens
acgcaaggcacccgagaaccaggacccagaagaccccaccccaccccgcccggaggac

SEQ ID NO: 125864 - RNA, 38 nt, Homo sapiens
cccagggaacgcgcagcgagagaaaagcccggaaacgc

SEQ ID NO: 125865 - RNA, 76 nt, Homo sapiens
gaaagggcaaggcacagcggagccaagcagcgagcggccgacccaagggacaagggacagaccaggcaccgagccc

SEQ ID NO: 125866 - RNA, 75 nt, Homo sapiens
ccgagagcgggaacaggcgacgcccagggaggacgaggcaagcccccaccgaaagccaggcaaacagcaacgaag

SEQ ID NO: 125867 - RNA, 50 nt, Homo sapiens
cccagaacagcggaacagcggaaccggagacaggcaggcgcagcgccacg

SEQ ID NO: 125868 - RNA, 68 nt, Homo sapiens
gcgacgcgcaagggcgcggagccgcgggccggcgagcgcgcgccaccagagcggggcccgagggaaag

SEQ ID NO: 125869 - RNA, 66 nt, Homo sapiens
caggaggaagcccagggaacggcggggagagcccggaaaaccaaaagggacaaaggggaccaaagc

SEQ ID NO: 125870 - RNA, 65 nt, Homo sapiens
ggagagaggaccacccagaggagcaacacgcggcgaggaagagggcagacgcccacgcaaaggga

SEQ ID NO: 125871 - RNA, 72 nt, Homo sapiens
ggaggcccggaaaagggcccaagacagggaaaaggccagcaacaggagagagcggaaccagcaaagaagaaa

SEQ ID NO: 125872 - RNA, 79 nt, Homo sapiens
gaacgcacaaggaaacacgacacaaaaagcaagcgggccaccacagaaaagggggagggaagcagccaagcgggcagaa

SEQ ID NO: 125873 - RNA, 51 nt, Homo sapiens
gaaggcagaggcgggacgggcgggagcgaaaggcaggggagggacaaggcg

SEQ ID NO: 125874 - RNA, 74 nt, Homo sapiens
ggagaagaaccaagagacaagacgggacggaaagaagaccacagaagcaaaaccaaacccgggcagcaccgcag

SEQ ID NO: 125875 - RNA, 77 nt, Homo sapiens
gcaccccacgccgcgaacccaagcaccggagcaagagacgagagccccgccaaccacccaaacagggccgagcgcag

SEQ ID NO: 125876 - RNA, 80 nt, Homo sapiens
aagaaaaccaaacaacccaagaagagcaggcaaccgagccagaaaccgcagggaggaagcgccaccccacaccggaggag

SEQ ID NO: 125877 - RNA, 72 nt, Homo sapiens
ccccacccagcacaccacaaggaggaaggccggccaaggagagccgaacaggaaccgagaccggacagaaac

SEQ ID NO: 125878 - RNA, 76 nt, Homo sapiens
gcccagagaccagagcgagcccagggaagaaacaggagcaggacccaaggaggccaagaccgggaagagggacaag

SEQ ID NO: 125879 - RNA, 63 nt, Homo sapiens
cacgaggccggaaccgcccagccccggggcgccaggagcacagggggaagagggacgaccaaa

SEQ ID NO: 125880 - RNA, 104 nt, Homo sapiens
caggcccagacgagcggaggaggcacagggcgcggaccgcacgagcgcgcgcgagcaaggaaccccgggccccgccacccacgcgaccagcccacgccggcgag

SEQ ID NO: 125881 - RNA, 68 nt, Homo sapiens
gaaagggacacagaacggacacaggggagggcacaggcacgaacagacagagaaaccaaacaacaggg

SEQ ID NO: 125882 - RNA, 71 nt, Homo sapiens
acagccaccgagacaagacaacaaagaggcgagaagacgacaccgaaaagcaagcacgcagacacaccaca

SEQ ID NO: 125883 - RNA, 80 nt, Homo sapiens
gagggagacgcgcaggacaaaaccgaccgaggcagagcgcagccacgggcgcgcagcgaaccggccgagaacaaaggcag

SEQ ID NO: 125884 - RNA, 76 nt, Homo sapiens
acgaaagcgaaagagaagcggagaagggcagaaggaggggcagcagcaggacagggaacccgggagacagcaacag

SEQ ID NO: 125885 - RNA, 80 nt, Homo sapiens
accgggcaggacggcagcccacaaaccggaggacacccccagacgcagaagggcaggagacacagccgaggcaccaaggc

SEQ ID NO: 125886 - RNA, 71 nt, Homo sapiens
ccgaagcgcacagaaacagcaggcgagcgcccaaacaagaagccaaaggaggaaacaggaaaaagccgcca

SEQ ID NO: 125887 - RNA, 70 nt, Homo sapiens
cagcgacccgccggcaggagagcgaacacgccaccagagggggagcgcaccggaccccaagagggccgga

SEQ ID NO: 125888 - RNA, 41 nt, Homo sapiens
gcgcgccgggacggaaacagcagcaccagagaagacagaca

SEQ ID NO: 125889 - RNA, 82 nt, Homo sapiens
gcagcagagccccgagccgagcaagggcagaaaccagcaggagccaccggaacgacggagcagaggagaggaggaggccgag

SEQ ID NO: 125890 - RNA, 83 nt, Homo sapiens
cgacagccgagaaaggcagacacaagagcaagcccgcacgggaaggcaccacggcacggcagacacaccgaccagaggaaggc

SEQ ID NO: 125891 - RNA, 71 nt, Homo sapiens
gccaccgggaggcccagggaaggggggaaagcggacagaagggcggaaaagacaggaaaaacgaagggaaa

SEQ ID NO: 125892 - RNA, 68 nt, Homo sapiens
cgccgggggccgaacggcccggacacccgcagaacgagcgacggacacaagaggcccaagggagcaaa

SEQ ID NO: 125893 - RNA, 76 nt, Homo sapiens
ccgccccgccccgccccagcgcccgccgcaaggcgggggaggcggcggcccagccacgaggccggggggggcacag

SEQ ID NO: 125894 - RNA, 76 nt, Homo sapiens
agagcggacccgcgacgcggcagaacaggcgaacacgccacgaggccggccccgccagccgaggcggacgacgaca

SEQ ID NO: 125895 - RNA, 78 nt, Homo sapiens
cacaggagaagaaaggagaaacagagggagaacaagccccaccaggcggggaagagccaagacccaaacacaaccagc

SEQ ID NO: 125896 - RNA, 68 nt, Homo sapiens
gcgggccagcaaaaccaggaaccagaacaagacgaaagcagaccaacaagaaggaggcagacgggcaa

SEQ ID NO: 125897 - RNA, 79 nt, Homo sapiens
ggaaggaggcggagccagaaggccggcgaccaagcgccacccggagcaggccaagagggcgacccgcccagccagaagg

SEQ ID NO: 125898 - RNA, 112 nt, Homo sapiens
gcgaggggaaggacccgaaccagccgccggagcaccgcagcggcgcccgcagggggagggcacgcgcaccggcaccgagcgggcaaggcccgcagcacgccggcgggcaccc

SEQ ID NO: 125899 - RNA, 57 nt, Homo sapiens
cggcccaagggaacagcgggaaccggcccggcagccggcccccggggcccgggcccc

SEQ ID NO: 125900 - RNA, 78 nt, Homo sapiens
cggcgacaccacgggaggcagaccacgagaagccagggacagcaggaagccagaggagaaaaaagggccccgagagca

SEQ ID NO: 125901 - RNA, 83 nt, Homo sapiens
cagaaggaacgacgcggaccagaagccagagcgaggacgccggcaggggcaacaccggaggacagcaacccccaccgaacaaa

SEQ ID NO: 125902 - RNA, 70 nt, Homo sapiens
agaaaacagccaagcaccagaaggagagaaggaagaaagggcaggcgagagagggggaacaggaccaacg

SEQ ID NO: 125903 - RNA, 78 nt, Homo sapiens
cggcagacacgagaagcaaagacagggacaggacagcgagcgaggacgaggaacggcggagcgaccagcaccgggaca

SEQ ID NO: 125904 - RNA, 78 nt, Homo sapiens
acgcaacggagccgccgacgcaccaagcccgccaggcagagaaaaaagccaagaagcagacaggagcccaagaaggac

SEQ ID NO: 125905 - RNA, 75 nt, Homo sapiens
ggccagcacccggccgagacggcggcagcagcggcacagagggaacggaaaaagcaacaaaacacaccaagaaaa

SEQ ID NO: 125906 - RNA, 68 nt, Homo sapiens
ggcagaaggggaaaagacggacaggagaaaaggaacccccgcgaacagccaagcccccggcccccacc

SEQ ID NO: 125907 - RNA, 72 nt, Homo sapiens
gaaaaaccagcaacagcacagcccggaagaaagcgggacccccgccggagcagagagccaggaagagagaag

SEQ ID NO: 125908 - RNA, 68 nt, Homo sapiens
gaaaggacgccagacacgagaccccaacaggaccaagagagcgaagagaaaaagccaacagaagagcc

SEQ ID NO: 125909 - RNA, 81 nt, Homo sapiens
ggggagggggggaccacgaaaggagcaagagcaagacaccggacaccgagggcccccaaaagaaagaagagcgaagcacaa

SEQ ID NO: 125910 - RNA, 81 nt, Homo sapiens
gggacccaccgcgccccagcccgagccagggcgagaacccaggagaaacgagagggacagcaaggaagacgccagagagcg

SEQ ID NO: 125911 - RNA, 57 nt, Homo sapiens
cgggcaggacgaccggacaacaccgagcgcccccacccgggcgcccaggcgcgaggc

SEQ ID NO: 125912 - RNA, 80 nt, Homo sapiens
agggaacagcgagaaacgagaagcgcagaaccaacgaggggccgaaccccaggaacaagggccacaccgggacacacaga

SEQ ID NO: 125913 - RNA, 69 nt, Homo sapiens
cagaaggaacgcagaaacacaggaccccccccaacgagaaccaaaggcaagaaccggagcaggagaaaa

SEQ ID NO: 125914 - RNA, 56 nt, Homo sapiens
cagaggggaggcgcgaaagaagcaccagcaccaagaccagccagggagacgacccg

SEQ ID NO: 125915 - RNA, 37 nt, Homo sapiens
gcgccgaacggagccgcggggacaccaaaaggagcac

SEQ ID NO: 125916 - RNA, 71 nt, Homo sapiens
ggcggcggcccagcaagagaaaagagcagacgccacggggccgcgccaagccagagaggcgaagagccagg

SEQ ID NO: 125917 - RNA, 78 nt, Homo sapiens
agagagccccaaagccacggagcaccacacgaagaagaaccgcagagaggaaaggcgccacacacccccagcgggggg

SEQ ID NO: 125918 - RNA, 79 nt, Homo sapiens
cagcccacaagaaccgcgaggacagagcaaacggggacagcgccgaccggaacagggaccacggaagcccaggaccagc

SEQ ID NO: 125919 - RNA, 72 nt, Homo sapiens
ggagcacacccaggacagacagccccaggagaccaccgagaaagggagaaggggggagcagcaaagaggaca

SEQ ID NO: 125920 - RNA, 57 nt, Homo sapiens
aaacaacacagcagggaagcagaagggcggcagacgcagacaaacaaaacaagaagc

SEQ ID NO: 125921 - RNA, 47 nt, Homo sapiens
gacccggacaggcccaaaaaggaaagaagggacgaggagggagaaga

SEQ ID NO: 125922 - RNA, 55 nt, Homo sapiens
gagacggccacagacaacggagagggacggaaacagacgacgacacggacaggac

SEQ ID NO: 125923 - RNA, 78 nt, Homo sapiens
ggcccgggccggcgcccaaggcccgcccgggagggccggggccgcgccagagcccaaaaggcagagcgaggagagaag

SEQ ID NO: 125924 - RNA, 73 nt, Homo sapiens
agggcggcggccagcgccacgcaccgccgggcgaagggggggcagagccgggccccagccaggggggacaagc

SEQ ID NO: 125925 - RNA, 79 nt, Homo sapiens
cgcccgacacgccccgcaaaccgccggggaaggaccaagggaccgcgggcaacaggcacagaggcacagggccaggcac

SEQ ID NO: 125926 - RNA, 71 nt, Homo sapiens
cgcgcagaaccagggcggcggccagcgccacgcggggaggaacagcaaaaaagagggaacacgccacacca

SEQ ID NO: 125927 - RNA, 73 nt, Homo sapiens
acaacgaggaaaaagccaaaggggaccaggagaaggaagaggaaaaagagccgaccgagggcgcacaaagaag

SEQ ID NO: 125928 - RNA, 64 nt, Homo sapiens
cccccggacccagccccgggccggaggaacgaaacagcaaggagaaccaacaaccgccgacgac

SEQ ID NO: 125929 - RNA, 75 nt, Homo sapiens
gaaagaaggcgcgaaaagaaacagaaaggaaaggggcccaggcaccagaacagacacagcaaggggacgcccagc

SEQ ID NO: 125930 - RNA, 78 nt, Homo sapiens
aggaggcagggacccggagccacccacaggacccgccaccaaaggggggacacagcgagccacgcgccaggaagcccg

SEQ ID NO: 125931 - RNA, 66 nt, Homo sapiens
cacggcaaaagaccaagagcacagcagaagcaaaggccgcacggaggagagccccgagggcccggg

SEQ ID NO: 125932 - RNA, 74 nt, Homo sapiens
cgagcaacaggaaccacgagaagcgccgaaacgcaggaaagggagcagcaccggccacacccacagcacgaccg

SEQ ID NO: 125933 - RNA, 78 nt, Homo sapiens
aacgaccagacccagaccccggcacggaccacgccgggccagaaagacaaagaccaaaagacagacagaaggagaaaa

SEQ ID NO: 125934 - RNA, 78 nt, Homo sapiens
acagccccaccccaagcacgcccagccagcaccgcgcacccagcagcacccaaagggacagccggcaaggagagcaaa

SEQ ID NO: 125935 - RNA, 64 nt, Homo sapiens
ccgcaggcagacaaaagggccaaagaagggagaggaaacaccacggggcaacgccagagaagaa

SEQ ID NO: 125936 - RNA, 63 nt, Homo sapiens
gaaaagaccaaaggagaccgcgagccgagacccaagaaggagaagccccgcagccggagcagg

SEQ ID NO: 125937 - RNA, 77 nt, Homo sapiens
aaggaagcggcaaagccagaaagaggaggccagagcggggggaggggggcgaaaccgagcgcggggcagagaaacac

SEQ ID NO: 125938 - RNA, 49 nt, Homo sapiens
cgcgcgcacgcggcgcgccggaaaccacgagcggggagaaacagcaagg

SEQ ID NO: 125939 - RNA, 83 nt, Homo sapiens
ccaaggccaagggcggagaccccggccaagccagaccgagcccggaggcggagcccggcacgggcaaacagagcaggcaggga

SEQ ID NO: 125940 - RNA, 87 nt, Homo sapiens
gcgggacccacgacgccgggaccggccaagggcccacacaccaagaccaaggggcaaaggaaaggggcaggcacccccaacaagaag

SEQ ID NO: 125941 - RNA, 75 nt, Homo sapiens
gggagaacacccccccaggaggcgaggagagggggcgcagcgcgccacacaccgaggcgggggaagggaccgagg

SEQ ID NO: 125942 - RNA, 78 nt, Homo sapiens
ccgccacaggagagagcaaggcccaggcagcgcagagccaacagacgagcagaagccgcaaggagcccgcggggggcc

SEQ ID NO: 125943 - RNA, 75 nt, Homo sapiens
gggccgaggaggacgagcggggcgggacccagcccagcgcccccgcccgcaggacacccaaccccaccccggagg

SEQ ID NO: 125944 - RNA, 66 nt, Homo sapiens
cgagacccgcccgacacaccggcacgaaaaacccgcagaagcacaacgcagagcccccgggaggcg

SEQ ID NO: 125945 - RNA, 53 nt, Homo sapiens
agccgggagcggaagacaaggcccagccccccccgcgcccgcgccaagcccca

SEQ ID NO: 125946 - RNA, 80 nt, Homo sapiens
gaaggcaaagaccagcaagcgcagaagcaaaaagaagcgagacaaaggaacgacggaaaaggccaccgggagcaggagag

SEQ ID NO: 125947 - RNA, 61 nt, Homo sapiens
cggcggccacggcaccggcggggggcacgaggaaaggaagcccggggcggcgacggagcac

SEQ ID NO: 125948 - RNA, 94 nt, Homo sapiens
cgggccagggccacgagagcgaggggcccaccgcgcaccaagacaaggccacccagacaccgcaagccccacccggcacagccgcgcagaacgc

SEQ ID NO: 125949 - RNA, 74 nt, Homo sapiens
cccaccccagacaggggaacagggcacagcccacccagggggcagcggcaagcaggggagccagccacacagag

SEQ ID NO: 125950 - RNA, 58 nt, Homo sapiens
gacgacgccaagaaaggagagaagagaaagccggaggagaaaccccaaagagaggaga

SEQ ID NO: 125951 - RNA, 61 nt, Homo sapiens
caggaaaaagcacaaggacagaccagaagaaacagagggaacagaggcacagaaaagaagg

SEQ ID NO: 125952 - RNA, 69 nt, Homo sapiens
gagcgcaccacgagagcagcaacccggaaacggaaaagacaaacacaaacaccccgagaccacaaccgc

SEQ ID NO: 125953 - RNA, 78 nt, Homo sapiens
ccgagcacggcgggacaaggaagcaaccccaggcacagccggccacagcacgagggggaacacgaagagccagacccg

SEQ ID NO: 125954 - RNA, 75 nt, Homo sapiens
gagcccgcacccaaagggcccagcggcaccaggcccacacccaagggaggacgacgggagaaaggggggaagaaa

SEQ ID NO: 125955 - RNA, 77 nt, Homo sapiens
cggaggagcacagagggccccagggccgcaccaggggcccaggcaaccgccacaaggcaagccaggacgccacccgc

SEQ ID NO: 125956 - RNA, 89 nt, Homo sapiens
caggcaccaacacaggggagggaagagagcccaagggagcagggcacccgaccccaagacccgacgagaccacagccggcccccccagc

SEQ ID NO: 125957 - RNA, 58 nt, Homo sapiens
agagccacggaagccgacagacaaccagggagagagcccaccaaggaaccacgaaacc

SEQ ID NO: 125958 - RNA, 105 nt, Homo sapiens
caagccagaagccaggggaaagaagaacggcaagccacccagcccgaaaaccaacaggacagcgggcaaggaggagcgaccagaagcacggagggcagcgacaag

SEQ ID NO: 125959 - RNA, 65 nt, Homo sapiens
gggagagaggacccccccccccccccaagccgggggggcccggggccaggccggaagacacaagg

SEQ ID NO: 125960 - RNA, 77 nt, Homo sapiens
gaagcgcggcgagccgagcggccaggacgacgaggagcagggccgacgcgcaggaccgcaagaaccagggagaccac

SEQ ID NO: 125961 - RNA, 68 nt, Homo sapiens
gaaggaccaagaaccagggaaggcgccagacacagaaaagaaagagagcaaccacccacaaggaccga

SEQ ID NO: 125962 - RNA, 68 nt, Homo sapiens
gcacacaaaagaggagaaaaccgggcgcagccgacgaagagcccgggcccgccacagaggggaacgaa

SEQ ID NO: 125963 - RNA, 74 nt, Homo sapiens
cggccagcgaagagacacaaaccagcggaagcccggcgggaaagacaaggagccgggccgagaaaccgaaccag

SEQ ID NO: 125964 - RNA, 77 nt, Homo sapiens
ggcggggcggcccaccaacaggaacagggcagacgagcggaggacacccaacccgggacagagcgggagccaccagc

SEQ ID NO: 125965 - RNA, 86 nt, Homo sapiens
cccggaggccgcgagcgccgcgcccaccccgggggccagagccaggggacagggcgaccagacgaggggagacggacgggggagag

SEQ ID NO: 125966 - RNA, 105 nt, Homo sapiens
ccaaacagggccagcacgccaccgggaaggcggggaggaggccccaaagggcgaggcggcgaagaccaaagcagagagccaaaacaaagaaacagcagcagggcc

SEQ ID NO: 125967 - RNA, 64 nt, Homo sapiens
ggaccgcggacagagacaacaccgagagagaagagccaccaacagagccaggagccaggaagca

SEQ ID NO: 125968 - RNA, 69 nt, Homo sapiens
gacgaagcaggccaggaagaaagagaggaaagaagaaaaccaagaaagccccacgaggaacaccggccc

SEQ ID NO: 125969 - RNA, 75 nt, Homo sapiens
cgcacggacaagcgcagggaccgagaaccaagaccgagggcagaggcaacccggaggacacaggaccaggcggaa

SEQ ID NO: 125970 - RNA, 80 nt, Homo sapiens
cggggaaaagagccaaagcagccacacaacagcgaggaaacaccaaggaagccccgccaacgaagaaaacaccgaacagg

SEQ ID NO: 125971 - RNA, 79 nt, Homo sapiens
ggaggacgcagcaaaccaccagaaggccggaagaaggaacaagaacaggagcaaaagaaggggaagaaccccacaggcc

SEQ ID NO: 125972 - RNA, 78 nt, Homo sapiens
gaaggccagcagcgcgcggagaagaacggggagccaggggagacggacgcaaagacaagggagaagcggcggacaagg

SEQ ID NO: 125973 - RNA, 80 nt, Homo sapiens
cgcccggcagcccgccacagccacgcgggacgagccggagggaaggaggagaagcgaaccgcaggagagggaccacggca

SEQ ID NO: 125974 - RNA, 77 nt, Homo sapiens
gcagccgacgccgcaaaggaacgagccagggccccccacgcgagaacccgggccggggcccgggggcccgagccccc

SEQ ID NO: 125975 - RNA, 51 nt, Homo sapiens
agagaaggcgaaggccaggcacaacccagagccgagccagggaggaacgcc

SEQ ID NO: 125976 - RNA, 44 nt, Homo sapiens
cccgccggacacgaacgaaaggagaaggcagagcccccccaggc

SEQ ID NO: 125977 - RNA, 72 nt, Homo sapiens
ccaaaaaaaccaagaggaacgcgacaccgcccaaccaggggaaagcaggggagaaaagaaaagaaagacggg

SEQ ID NO: 125978 - RNA, 56 nt, Homo sapiens
gggcagggacagcgcaggcagcagcgacaagcccagagaacaggaaagcaaaaccc

SEQ ID NO: 125979 - RNA, 70 nt, Homo sapiens
acagaacaaccccaggacagagcccgagaaaaggagaaggcgcaaaaccccaccagagcccaggaaccac

SEQ ID NO: 125980 - RNA, 82 nt, Homo sapiens
acccggcaggccgcccccggcaaggagcgggagccaagggacgccaagaggaaccagcaaagccaaaaagcccaagcagagc

SEQ ID NO: 125981 - RNA, 68 nt, Homo sapiens
cgaccaggacacgagcgggaacgcaaacgaaggcgccgccggagagggaaagaaccgcgccagagggg

SEQ ID NO: 125982 - RNA, 63 nt, Homo sapiens
gcgaccccaccggacgggcacgacaccggggcaggcaaggaaccggaaaaacacccgggagcc

SEQ ID NO: 125983 - RNA, 80 nt, Homo sapiens
cgaccgccgccgcgcaccgccgaggggggacaggcgggacgaagaaaagcaaaggccaagcagaaaacagaaaagaggac

SEQ ID NO: 125984 - RNA, 79 nt, Homo sapiens
gaaaagcggacgccggggaggccaaaaagaaggaaagaggcagaaggccagaagggcgaagaagaaggaaaaaaggcca

SEQ ID NO: 125985 - RNA, 71 nt, Homo sapiens
agcagaacaaaaaaaaggcagcacgcaaggccagaaagaaaagcagggagcagaagaggggaagaaagaga

SEQ ID NO: 125986 - RNA, 77 nt, Homo sapiens
ccgacaggcggcagcggggcggcgcgcggcgcggcggcggcccgccccgcggcccaggagccccgacgcggcacaag

SEQ ID NO: 125987 - RNA, 80 nt, Homo sapiens
aggcaacccaggagcacgaagggaagccaaggccaccaaaacaggcaaacggacaccccccaggcacagccacaccccag

SEQ ID NO: 125988 - RNA, 83 nt, Homo sapiens
ccgcccagagccgcaagcaccacgaccgagagggccagacacaacaggccggggccccaggagggggcacggcagcggcgaga

SEQ ID NO: 125989 - RNA, 72 nt, Homo sapiens
ccccccacgcgcacgccgggggcgaggagacaaaaaagcccaaggccgccaggcacagagaaggcaaacggg

SEQ ID NO: 125990 - RNA, 74 nt, Homo sapiens
gaaagcaagacggaaccacagacaaaaacccaaagcagaacccggagagcgaagacgggggcgacaaagcccag

SEQ ID NO: 125991 - RNA, 74 nt, Homo sapiens
ggggagggaaaggcccaggaaaaagagccgcagaccgacagaagaacgagagacagagaaaggccaaaagcaaa

SEQ ID NO: 125992 - RNA, 53 nt, Homo sapiens
agcacagcacccacaaagcaacggcccgcaggagcaaaacaaaaccagcgaca

SEQ ID NO: 125993 - RNA, 78 nt, Homo sapiens
cggagagccacaaaaaaggaagcgaaagaagggaaaaggccgaggcacagcgggaagaccgcaaagacgacccgagac

SEQ ID NO: 125994 - RNA, 98 nt, Homo sapiens
ggaaaaagacagcccgcagcacgaccagcaggaacgcacacacgagaaaaagcagccaaggaaaaccagaaagaaggagaaacagcaacccaaaaaac

SEQ ID NO: 125995 - RNA, 70 nt, Homo sapiens
aaaacagggagaaacacagccagaaggacgaaggacagagagggacgggcagacgccccgacacgcagcg

SEQ ID NO: 125996 - RNA, 88 nt, Homo sapiens
ggacgcaccgcccagccgcccgcgggccagcgcaccggcccccagcggcagccgagcccgcccgcgcgccggccacccaccccaccag

SEQ ID NO: 125997 - RNA, 78 nt, Homo sapiens
gcagcacgaccagcaggaacgcgagggcggcacgccacaggacggcacccaccgcaaggccacaccaccaacgcccag

SEQ ID NO: 125998 - RNA, 75 nt, Homo sapiens
cggggagcggagccaggccccgaaaaccgagaacagggggggcaaaaccaagcacggacggaagagagaggcaac

SEQ ID NO: 125999 - RNA, 103 nt, Homo sapiens
gcaaccagacgccagcgggacgaggaccgagaccgcggccgggaccgagggagaagacagaggagccagaccaagagacagcacaggcgagcgagcagagaca

SEQ ID NO: 126000 - RNA, 71 nt, Homo sapiens
ggaccccgcccaggccgggagcgcacaaggaaacccgaagcagcaaaaaccaggacccaccaccaaagggg

SEQ ID NO: 126001 - RNA, 56 nt, Homo sapiens
ggagcccgagagagaagggggagcggcccgcacagcgcccaccaggaccggcccgc

SEQ ID NO: 126002 - RNA, 79 nt, Homo sapiens
gagaggacaggaccagggagcccacagcgcccaaaaagagggccccggaggccgccagcagagccgagcagcgggagag

SEQ ID NO: 126003 - RNA, 58 nt, Homo sapiens
gcggcagacggcaggccagcgcgaggaccggcgggagccagcaaccccaagcaagccg

SEQ ID NO: 126004 - RNA, 82 nt, Homo sapiens
cagcccgccgcccgacggcccccgacgcagcgcaccagccaggacccccagcacagccagcagcggaacagcgaaccagcag

SEQ ID NO: 126005 - RNA, 59 nt, Homo sapiens
ggcacccaccggaccgagccagagagcccgaccaagcccaaagggacaccagcaccgag

SEQ ID NO: 126006 - RNA, 83 nt, Homo sapiens
ggagaggaaaaggagcgagcagacgacaagccgggagcgggcggccaaccaggagcagagagagaaaaggcaagaagagaaag

SEQ ID NO: 126007 - RNA, 77 nt, Homo sapiens
ggacacaccccaggaaaaagacagcccgcagcacgaccagcaggaacgcgcagacgggacacggccggccaggagcg

SEQ ID NO: 126008 - RNA, 85 nt, Homo sapiens
ggaccgcaaggccgcccccccggagggcgcggaggcggggccaggaaggcggcgcagaagaaggcacagggaagagggaagcgag

SEQ ID NO: 126009 - RNA, 63 nt, Homo sapiens
ccaagcaccgggagcccgccgccccgaaaccaccgcgagcgggaaaaagacaagggcagagca

SEQ ID NO: 126010 - RNA, 95 nt, Homo sapiens
agccgaccagcaacagcccccaaggaacaggcgaggcccgacccgagacaggagaaacaggagaagcgaggaaaagaaaaaaccccggccccccg

SEQ ID NO: 126011 - RNA, 83 nt, Homo sapiens
agagaagccgaaaacagaaaagacaagccacaaaacgcccagaagcaaaaggcaaaacgggagaggacaaacagagaggaaga

SEQ ID NO: 126012 - RNA, 69 nt, Homo sapiens
ccaggcaggaacggagcagacaggcaagcagaaaaaccacagaaacgaaagaaaagacaaaaaacaacg

SEQ ID NO: 126013 - RNA, 65 nt, Homo sapiens
caaccgagaaagcagaaaggaagggacgaagcggggaacgcaccgaacacaaggaggaaccccga

SEQ ID NO: 126014 - RNA, 77 nt, Homo sapiens
cgcgccgcgccgcaccccgagcgaccggagcagcaccgaggccccccccaccccccgcccgcggcgccaccccgcgg

SEQ ID NO: 126015 - RNA, 81 nt, Homo sapiens
aagaggaccaggagcaaacagaaggcgaggaaccaaagccccggcgcgcaacagaagaggagcggagcaggccaacgagag

SEQ ID NO: 126016 - RNA, 73 nt, Homo sapiens
gaagccaacagaagaaaccacaggcaaacaagcagcaaggaccagcacgggagaacaaacggagaagaaaagc

SEQ ID NO: 126017 - RNA, 74 nt, Homo sapiens
acgccacgaagaacagcagcaagaccccccgggaaccacccgcgcccccagcgccccccagaggaggacggcgg

SEQ ID NO: 126018 - RNA, 77 nt, Homo sapiens
gaaagaggacaggagaacaaggcaaccgcgaaccaggccaccgaaggggaaacggccgggaagacaaccagacccca

SEQ ID NO: 126019 - RNA, 60 nt, Homo sapiens
agcaacagagcgcgggacgggcaaaggaaagggggggagagagcaaggaagaccggagac

SEQ ID NO: 126020 - RNA, 48 nt, Homo sapiens
cgccacagcggggcacgaagaagaaggaagaagaacagaaagaacagg

SEQ ID NO: 126021 - RNA, 70 nt, Homo sapiens
aaaagagcacagaaccaagggaagagaacacacggaccgagagagaccaagccacccggagaacaagaaa

SEQ ID NO: 126022 - RNA, 86 nt, Homo sapiens
caggagcagccaacaggagcacagccagcaggagaaaaccggaagagaaaggccgggaagcaggaaagaaaaaaacaacagaggag

SEQ ID NO: 126023 - RNA, 72 nt, Homo sapiens
cggccaaaccacccagcaggccacaaacgagacgagagaagccgagaaaaaaagagagggaacggccacgga

SEQ ID NO: 126024 - RNA, 73 nt, Homo sapiens
caaaaaagagcgacacgacacacggccggcccagcaggagaaaccacaacgaaagaggggacgcaggaggcaa

SEQ ID NO: 126025 - RNA, 77 nt, Homo sapiens
ccggccagcgcgccggagccgccgagggaaacgccgccacgaaggaccgcaccccagaaggaaacgaccaggcagaa

SEQ ID NO: 126026 - RNA, 52 nt, Homo sapiens
cagaacgccgcgaagcacccaaaggccaagccccgagccaagccacggccga

SEQ ID NO: 126027 - RNA, 77 nt, Homo sapiens
agcggaaggagccagccacaggcggcggaacggaacagaagcaagagaccagaaccaggcacccgcagaaagcggaa

SEQ ID NO: 126028 - RNA, 75 nt, Homo sapiens
cacccagaaagaagagacagacaaggccgcaagcagaaggcggcagcggagcacgcaccaggagcccgcggccca

SEQ ID NO: 126029 - RNA, 56 nt, Homo sapiens
caacacccgaggcggacgcagagacaggccgggcagaaacaaccacagcaagcccc

SEQ ID NO: 126030 - RNA, 49 nt, Homo sapiens
ccccccccccccaaggagcaccacgaagaaacgcccagaggagccagaa

SEQ ID NO: 126031 - RNA, 80 nt, Homo sapiens
cccggaggagcgaacaaggcgacaacacaggggagccgccaccaaaagcagacggaaaacccacggggaagaccacaccc

SEQ ID NO: 126032 - RNA, 36 nt, Homo sapiens
gacacacgccgccggcagacaggaacgaccaacacc

SEQ ID NO: 126033 - RNA, 69 nt, Homo sapiens
agccgcgcccggacagggaggcacaagggaaggaacaagcagggcgcccccagcggagcgggccggaac

SEQ ID NO: 126034 - RNA, 101 nt, Homo sapiens
gcaggaacacacagaaaagggaggccaaggcggagaacccaagacgccccaaaggaagagggacgacacgcccgcaaacggacaaggcgagcgcgagcccc

SEQ ID NO: 126035 - RNA, 87 nt, Homo sapiens
cccgggggggagaagaaaggggccgggggacggaggagccccggcggagaccacgcaaggccacagcccgagcgggaagaagccgca

SEQ ID NO: 126036 - RNA, 63 nt, Homo sapiens
gcgcggcgggaagcggcggcggcggcccagcgccaagaggaacaagcagaaagcacgaacaac

SEQ ID NO: 126037 - RNA, 78 nt, Homo sapiens
agaggggagcacagagcgagaccaggaaagaagggggcagaagaggggagacgagcgccaaagacagaagcaagcaga

SEQ ID NO: 126038 - RNA, 71 nt, Homo sapiens
aggaacaacaacgcagccaccagaggcaccgaccgcacgagcaacccggaagagcccgcacaaacaccgaa

SEQ ID NO: 126039 - RNA, 76 nt, Homo sapiens
caagaacacgcagcacgcacagaagagagagagagagaaagagagggagccgaggaacagaaacaggaggaaacgg

SEQ ID NO: 126040 - RNA, 68 nt, Homo sapiens
aagccaccaagaggccgcaacacgggaggccccagccacaccgggacccacgccccacacccaaaagg

SEQ ID NO: 126041 - RNA, 83 nt, Homo sapiens
gggcagacggcagaagcggcggggcccaacaagcaagcggaaccagcggagccgcccgccagaagaaagaaaaagcagagcga

SEQ ID NO: 126042 - RNA, 56 nt, Homo sapiens
aggacaccaggaaaaacacagagagccgacggcaggagaagagcccaacaccaaag

SEQ ID NO: 126043 - RNA, 71 nt, Homo sapiens
cgaacagagcgccgccaaggacgaaagaagacagagaagcaaagaagcagaaggagagagcacgaccaccg

SEQ ID NO: 126044 - RNA, 74 nt, Homo sapiens
cggacacgaggagaaacagcagaaacgcaccaggccaaagaaagagaagccaaagagggcgaaaaaaaggagcc

SEQ ID NO: 126045 - RNA, 76 nt, Homo sapiens
aagcagcagggaacgcgagcaacacaaaaaaaccggaaacacccgagcagaagaaccaacgaaagcagagcaagaa

SEQ ID NO: 126046 - RNA, 77 nt, Homo sapiens
gaagagccacccaagggaggaaccaacagagcgggggcaaaagaaagggggggccagccaaagcagcagaaagaaga

SEQ ID NO: 126047 - RNA, 77 nt, Homo sapiens
aagcggggacccagacccggagcccagggaagcagccgaccagccgcggagccgggggcaggacagggacaagcgca

SEQ ID NO: 126048 - RNA, 73 nt, Homo sapiens
caaagggaaacaccagaaggagcgcaaacaaacggacagccacagaaacagacacccaggccccagaaccgaa

SEQ ID NO: 126049 - RNA, 73 nt, Homo sapiens
gcgggacgggaaccgcgacacaaggaggcagcagcagcgagccccaccgccggccggacccaaacggccaaga

SEQ ID NO: 126050 - RNA, 72 nt, Homo sapiens
ggcgagagaggcaggcggagccgaccgggccagccaggaagaggcgcccccgcccgccagacaagccgaggc

SEQ ID NO: 126051 - RNA, 53 nt, Homo sapiens
gggagagcgcgcacaacgcacggggggaggaaccaacggagccagaaggcccg

SEQ ID NO: 126052 - RNA, 87 nt, Homo sapiens
ggaaccacggagcaggaaggagggcaccaagaaaaaggacaccagaggaccagaacccacgagaaacagacgagccaaccagacccc

SEQ ID NO: 126053 - RNA, 56 nt, Homo sapiens
aacaaggaagggacaacacgaccacccaaaacagcagcaggcgcaaaaacgaaccc

SEQ ID NO: 126054 - RNA, 72 nt, Homo sapiens
gggcccaggaacccgcacggaaaccagcacccaaaagcaagacccaagaggaaacccgacgcaaacaaacag

SEQ ID NO: 126055 - RNA, 76 nt, Homo sapiens
acccggccaagacgggagagggagggaccagggacgcaaggcccacgccacaagcagagccagcgggcaagaaccg

SEQ ID NO: 126056 - RNA, 85 nt, Homo sapiens
ccgggacccggccccggcccacaggggggggcaaacccgagagaacggaagcccacaggggcaacacagcccaacgccaaacacg

SEQ ID NO: 126057 - RNA, 86 nt, Homo sapiens
gagcaaagccaccccccgaggaaaaaacacggccaaaagaagacccagacaagaaagaggaagacgaagccagaaaccaaagggac

SEQ ID NO: 126058 - RNA, 75 nt, Homo sapiens
gaccacaggaagcaagagccgagaaccagcaaccagcaggcagggagagaggggcggaaagccaccaggcccaca

SEQ ID NO: 126059 - RNA, 80 nt, Homo sapiens
cacgcacgggaaccggaccaggaggaggcaggaccaaaagggaaaagcaccgagaacacaaggaacgaaaggaagggaag

SEQ ID NO: 126060 - RNA, 76 nt, Homo sapiens
agaggagaacgaagcccacaagaaggagggaaagcacgaccaggaacccgggcgaaccggaaggcggcgaacaggg

SEQ ID NO: 126061 - RNA, 73 nt, Homo sapiens
aaggagcgaccgggcccacagacaagagcggcacaacccccaaagacaggaggagaggaaggagccagacgac

SEQ ID NO: 126062 - RNA, 69 nt, Homo sapiens
aaggcagcaaagaagaggaccccaaacagaacgcggcagagaaacggacaagccggccccacccccgca

SEQ ID NO: 126063 - RNA, 62 nt, Homo sapiens
ggcggcgcgcggccacccggcaggaaaggaagcgacggcgcacaggaacccccacgagccag

SEQ ID NO: 126064 - RNA, 103 nt, Homo sapiens
acgaacgacagccggcgaacaaaacgacgcagaacagccaaggcagaggccccaggagaccacccacgacacagagagaaggaggagcagaagagcaacacgg

SEQ ID NO: 126065 - RNA, 40 nt, Homo sapiens
cagacgggcgcagacccccaacagccccgccggaggcggg

SEQ ID NO: 126066 - RNA, 76 nt, Homo sapiens
cacccaaagagccaccgcaaagcagacggcagaaaaaggggaaacccaaaaggggggggaaggagcgaagcaccag

SEQ ID NO: 126067 - RNA, 74 nt, Homo sapiens
aaaagcaggggaagcagcgcacgccagggcagcggaacgcgccgacgccgcaaccagcaccccgaggagcggaa

SEQ ID NO: 126068 - RNA, 77 nt, Homo sapiens
cacaaaacaccagagcgaccaagaaggagagcgacagcccaagcaccagcaggggagcacgccagacacccagaacc

SEQ ID NO: 126069 - RNA, 85 nt, Homo sapiens
ggcgcggcgcgcccccgccgcccgccgcgccccggggccggcccgcaggacagcccagagcaagcacacggaggcccgggagcca

SEQ ID NO: 126070 - RNA, 74 nt, Homo sapiens
ggcccccggcgcgggggagaacacgacacgccagcacgacaggccgaagcaacagcccagccacaggcaacgaa

SEQ ID NO: 126071 - RNA, 70 nt, Homo sapiens
gaccgaacgcgccagcgcggggcaacagggcaagcaggaggaccaagacgacagcggagggaggagacgg

SEQ ID NO: 126072 - RNA, 65 nt, Homo sapiens
ggccgagcaggaggcgccacagggggggccgcccgcccaaggcaggaagaggggccgcaaagaag

SEQ ID NO: 126073 - RNA, 67 nt, Homo sapiens
gcgagcagcgcgggcggcagcccgggggaagcgggacaagaacccaagaaacaggaaaaaacccaaa

SEQ ID NO: 126074 - RNA, 60 nt, Homo sapiens
accggggacggggagcggcaggaccggaaggaacaacaccaaacccaagagggcagcggc

SEQ ID NO: 126075 - RNA, 42 nt, Homo sapiens
ccgcccggcagccaccccacgggaaacggagccgccgcaccc

SEQ ID NO: 126076 - RNA, 76 nt, Homo sapiens
cggagacggggcgccgcagccgggaacgcaggagcagccacacgggaagcggagccccaaagcagcagcacaagcc

SEQ ID NO: 126077 - RNA, 78 nt, Homo sapiens
cagccccacccaccggcccacccacaagcgcacaggaccggagaagacggcccagcagagcacccaaccagcgggaac

SEQ ID NO: 126078 - RNA, 63 nt, Homo sapiens
cgcagagcgggcccgcggaccagccagggcacggccgggacgggcggagaacggaaaagcacc

SEQ ID NO: 126079 - RNA, 76 nt, Homo sapiens
cggggagacggccgaggagacccgcggcgggacggagaggccgcccacggagcgcagagccaaccccaagccccgc

SEQ ID NO: 126080 - RNA, 85 nt, Homo sapiens
gacgagccgagcagaggaaccaacaaagaaggagcggaaaaccaggaacggccaggcaggaaaggagcagacaggaaccgggagg

SEQ ID NO: 126081 - RNA, 77 nt, Homo sapiens
acggagcagaaaacaaggaggaggcgagagggaacggaaaaagcaacaaaacacaccaagaaaagggaaccgaagcg

SEQ ID NO: 126082 - RNA, 87 nt, Homo sapiens
ccggcaacgccaaccgcccgcgcgcgcaggcgggcgcaggcccggcgcagcgcggcggagcgggacccggggcaccagaggaccgag

SEQ ID NO: 126083 - RNA, 74 nt, Homo sapiens
ccacacgcccaagggcagcaagaaagggaagggagaaagacagcaaagaaaaggagaagaaaggaaaaaaacaa

SEQ ID NO: 126084 - RNA, 83 nt, Homo sapiens
gcccggccccccacaggacgggaagaggacagcagcggacggccggaccaagaggcgccgccccccagcaaacgagaaaaacc

SEQ ID NO: 126085 - RNA, 77 nt, Homo sapiens
gccaggcccaaagaaccagcggaccgagccaagaaaggggaagagacggacacacagaaagggagaaccgaacggga

SEQ ID NO: 126086 - RNA, 60 nt, Homo sapiens
ccaccacccaagacaaccagcaaagagaagaaccaagaaggagcgagggaggagcagcga

SEQ ID NO: 126087 - RNA, 51 nt, Homo sapiens
gacgggcagacgaagaccaagaagaacagccaagagggagcacaacaaaga

SEQ ID NO: 126088 - RNA, 73 nt, Homo sapiens
gcaggggccgcagccgacgccacacaccccagaacagggcgaaaaggcgcgccgcagccgggagaagcggccg

SEQ ID NO: 126089 - RNA, 77 nt, Homo sapiens
cgagcgagagaaaacaacacagccgaagggacaagggggaacaagagcccgggccgacccccagagagaacagccgc

SEQ ID NO: 126090 - RNA, 76 nt, Homo sapiens
aggcgagaaggaggagccccggggagcggaggggagccgaagaggcacagcccccacaagacggcgccagagcagc

SEQ ID NO: 126091 - RNA, 36 nt, Homo sapiens
cgagagagaaagacacagccaccaacaagacgggcc

SEQ ID NO: 126092 - RNA, 66 nt, Homo sapiens
agggaggcagaaacacagcgaccgagaggggccgcaaggccaggcgcgcagaggcacccaacggca

SEQ ID NO: 126093 - RNA, 70 nt, Homo sapiens
gccaaccgacggagcccagcagccgggaacagcgcccaaagacggggacgaagccccagagagacgaggc

SEQ ID NO: 126094 - RNA, 79 nt, Homo sapiens
gaccggagaccgcggggacccggagggagcccggcggccggggagacccgaccaccggaagccacggcccggacccccg

SEQ ID NO: 126095 - RNA, 81 nt, Homo sapiens
agcccggccaggaggcggcggaaaaaggcagaggagccgaccgcggccagggagaaggagcaggcggggcgggaagggagc

SEQ ID NO: 126096 - RNA, 82 nt, Homo sapiens
gaacccaggcccacggaggaagagccgggcagcccggagcgggccagacccaacagaggaagccgcaagaaacgggacgaca

SEQ ID NO: 126097 - RNA, 53 nt, Homo sapiens
aaaccggcacccggcggccgagagaccaggggaggagggacaagccacccccc

SEQ ID NO: 126098 - RNA, 74 nt, Homo sapiens
cagacccacacgcgaaagcaacagcaagagaaaagcccacagaagaggggccgaggcagcacacagaggaacac

SEQ ID NO: 126099 - RNA, 64 nt, Homo sapiens
gggagcccagccaccacagacagagcaaccggcagcacacgaaaggcagagcaagccagagaca

SEQ ID NO: 126100 - RNA, 66 nt, Homo sapiens
ggaccacaaacacggagggggaagcaacaaaggacacagagccacaaaagaggaaacaaacaggaa

SEQ ID NO: 126101 - RNA, 67 nt, Homo sapiens
gggagccgaagaggcacagccgagaagagggacacaggaacaggacacagaagaagagcagcaaagc

SEQ ID NO: 126102 - RNA, 73 nt, Homo sapiens
ccaaagcagcggcgccggccgccccaccggcggaacccagcaagacgacgcagccagagcagcaagaggccaa

SEQ ID NO: 126103 - RNA, 76 nt, Homo sapiens
gagccggagagaggagacacagccggcgaggacccggagaccaaaaccaaaccagagacggagcgccggcccaggc

SEQ ID NO: 126104 - RNA, 80 nt, Homo sapiens
gcccaccccaccgccagcggaacccggggacacgacgccccaaaccgccaggagaaaaaagggggcacccgaggaggaag

SEQ ID NO: 126105 - RNA, 84 nt, Homo sapiens
acgcccgccgcgcaacccgggcccagcgaaggcaggaccggccgggagcgcacgccaaggggaggggggagaggagcgaacgac

SEQ ID NO: 126106 - RNA, 82 nt, Homo sapiens
aggcgacgcccaccaaggggaacaccgcagcaggagacgcgccgaaaaagcaaagcaaaaaaaaaggaacagcccaacaaaa

SEQ ID NO: 126107 - RNA, 71 nt, Homo sapiens
ccacaaacagacggcagcacgccggcccagaggccagaccaacaagcaacaaagggaagaggaaagcacaa

SEQ ID NO: 126108 - RNA, 80 nt, Homo sapiens
ccagagggaaagcacaccaccccagccagcccggcgggccccccgggagccgcggcccgaggcacaccaaccggacgggc

SEQ ID NO: 126109 - RNA, 74 nt, Homo sapiens
aaagaagaaaaaaaagagcaaaacaccggaaaacccagaaaaacagacccgaggccaccccagcagacaggcca

SEQ ID NO: 126110 - RNA, 79 nt, Homo sapiens
cgcgcagggccgccaggcacccggaaggcagccccccagacggagagcaagggagaaggccgagaaccgaaaaaccgcc

SEQ ID NO: 126111 - RNA, 74 nt, Homo sapiens
gcaaccagaaagccaggagccacgcaggagggggcaagccaccgagaaagggaggaccacaacaacaaacaggc

SEQ ID NO: 126112 - RNA, 80 nt, Homo sapiens
cgcacccccggccggaggcaccagccgccacccgacagagaaaaacaaaagggacagcgcacggagaaaaagacggcgaa

SEQ ID NO: 126113 - RNA, 72 nt, Homo sapiens
gagacggggcggcccaaaggccgcccaagaaccaagggaaaagacagaagacacagcgccagcgggagcccg

SEQ ID NO: 126114 - RNA, 70 nt, Homo sapiens
caaaaagcggcccgggagcccgcgcccccccggggacgagagccccgcgacaagagaagcaccagaagac

SEQ ID NO: 126115 - RNA, 107 nt, Homo sapiens
ggcagccgcaccacaggcgggccgcaaggagcggacccaccggccaccggcggagcgaggacccaaggccagccagccccaggcaccagcggacaggacagggagga

SEQ ID NO: 126116 - RNA, 42 nt, Homo sapiens
aagcgccagagccaagaacggccaagaacccaaagcaaggcg

SEQ ID NO: 126117 - RNA, 76 nt, Homo sapiens
ggggggaccgagcggagaggagagcacacggcaccgagggaggcagaaccacagggagagaaaaaacaaggacaca

SEQ ID NO: 126118 - RNA, 77 nt, Homo sapiens
ggcgagaagaacagccaccggagagcagagcgacacgaaaagacagaccgacaacagcccagaagaagccaggagga

SEQ ID NO: 126119 - RNA, 39 nt, Homo sapiens
ggggcccgcggaaaacaggagccgcagacagggggagcc

SEQ ID NO: 126120 - RNA, 67 nt, Homo sapiens
cccgacggacaccccccagggccccaagaaaagcggaagaagaccgggagcgcccagaacagggaaa

SEQ ID NO: 126121 - RNA, 82 nt, Homo sapiens
cacacacccaggcgcggagggaagacgcccgggccaccaagcaaggaacagcgccaaccagccagcggaggacccacaaggg

SEQ ID NO: 126122 - RNA, 75 nt, Homo sapiens
agagcgagcgagggggggcgcgccggaaaccggagcgcgcagcagggcaccaagggcaggagaagggccagaccg

SEQ ID NO: 126123 - RNA, 107 nt, Homo sapiens
cagacccacgcgaccacccggagcacgccgcgccaggaacaccccaccaggggcaggggcccgaggcagccgggagacagccccccaggaaccgcgccgcgagaaac

SEQ ID NO: 126124 - RNA, 41 nt, Homo sapiens
cgaaagagaggaacaggacgacggaccgaaagggcagacag

SEQ ID NO: 126125 - RNA, 39 nt, Homo sapiens
gcaggaccagcagggaggagaggcaggccgcaccagaag

SEQ ID NO: 126126 - RNA, 72 nt, Homo sapiens
gaaacaagaggaggaggggccggagagacacagggccgccagaagcgacagccccgacgagagggcaccagg

SEQ ID NO: 126127 - RNA, 76 nt, Homo sapiens
agagggggcggcgaccgagaggcgcggagccggggacgccaaggggcacgaagagagagacccagagaccacaagg

SEQ ID NO: 126128 - RNA, 77 nt, Homo sapiens
ccagcgcggcgcgcgcgcccgccgccccgcccacgaggagcacagccgggccgcgcgaaggagggaaggccaggaca

SEQ ID NO: 126129 - RNA, 69 nt, Homo sapiens
cacaaacgcagccaacccaaaaagaagcccagcaaaaagaggagaagcacccccccagaagaaaagaga

SEQ ID NO: 126130 - RNA, 74 nt, Homo sapiens
ccacacggggacacgccccgacgccgagggcccgcaaggccacagcacggggcgccaagcccacgggcgcacca

SEQ ID NO: 126131 - RNA, 77 nt, Homo sapiens
gaagccaccgcagaaggggagacacaagggcacgaagggacaagcaggaggacagaagacaggagggcaagaccggc

SEQ ID NO: 126132 - RNA, 86 nt, Homo sapiens
agacacaacacgggggggagagccacaggcagcggcgagccaaccaagggacgaacccaaagacccagccccgcagcaccacaacc

SEQ ID NO: 126133 - RNA, 100 nt, Homo sapiens
aaacagacgcccagccaaacaaaaaggaaaggagacaagcagagacgaaccaggcaaagcaaaagagccaacacccaggccaggccgcccggaaggaggc

SEQ ID NO: 126134 - RNA, 68 nt, Homo sapiens
gaggggacaaaaccccgaaaaaggcggaccaaaagccagccccacggaggaacccgggaccggccacc

SEQ ID NO: 126135 - RNA, 78 nt, Homo sapiens
aacagcagcagcccacgaacagaaagggacaacccccaagaaagggagcccagaacgaaacaacccagcagagaccca

SEQ ID NO: 126136 - RNA, 74 nt, Homo sapiens
gagagcaagagaggaagaagaacgacccgcccggggcagcaggcacgaagacacacccaggccggaaagagcaa

SEQ ID NO: 126137 - RNA, 93 nt, Homo sapiens
cggacggacacccagcggcgacacgcgacgcgccaaaacccgcccggaaaggggacaccggacagggacaagcgcacagcggagaaagcagcg

SEQ ID NO: 126138 - RNA, 85 nt, Homo sapiens
ccgcggaccgagcccccgagggacccagcggagcacacaaccagacaggacagggcagaccgccagcagcacagcaagccacaga

SEQ ID NO: 126139 - RNA, 68 nt, Homo sapiens
gagaaagagaaaggacaagcaggaacccccagggaagggagcccaaaacaggagcgcagcaagcaccg

SEQ ID NO: 126140 - RNA, 79 nt, Homo sapiens
agacaacagaaacagaaacgagggaaacagggaaacccagacgacaaggaaggccaagggacccacgaccaaccaagaa

SEQ ID NO: 126141 - RNA, 68 nt, Homo sapiens
cacaaggcacgaggagaaggaggaggagagagggaagagccgcaaagaagcaccggaaaacgaaagaa

SEQ ID NO: 126142 - RNA, 78 nt, Homo sapiens
ggccgcccccaggaccccagggagagcgggcagccccaggggacagaggaagaaggaacgccaggggggggggaagcc

SEQ ID NO: 126143 - RNA, 100 nt, Homo sapiens
gccgaccgagcccaggagcgccacgcgcggaaggcagcgcccagcagcgcaggaaaacagccccgaggacagagaagagcggacccggcgacccacaccc

SEQ ID NO: 126144 - RNA, 83 nt, Homo sapiens
gcggaggccccgggcgcggcgcaggcgcgggggcaggcagggcgcgcgggccaaggcccggccaacggcccacgacccacgcg

SEQ ID NO: 126145 - RNA, 70 nt, Homo sapiens
gagccaagcaaacagaagcgcggccaagagagaccacggacgcgacacagacacgacacgagccggcaga

SEQ ID NO: 126146 - RNA, 57 nt, Homo sapiens
aggaaaccccaacacagagccaagcgccaagcacacgggggcaagggggcccgagcg

SEQ ID NO: 126147 - RNA, 83 nt, Homo sapiens
ggaaaggccaaagcccagccccaggcacagaccccagcgagagccaaggaacgaacagggcgggcggaggcgggaagacaaga

SEQ ID NO: 126148 - RNA, 67 nt, Homo sapiens
accacagaacgcggaccgagcccagcccagccagacaccccaggggaacgaggaagaacggacgacc

SEQ ID NO: 126149 - RNA, 80 nt, Homo sapiens
cgaaaaccaccggaacggcgaagaggcaccaaaaagaaccgcagacaggcaagcagaagcacgcaggaaagaggcagcca

SEQ ID NO: 126150 - RNA, 74 nt, Homo sapiens
agcgcgcaggcggacagcccccagaccggagaggaccgcacaccggaggcggaacaggggcccagagagcccgg

SEQ ID NO: 126151 - RNA, 55 nt, Homo sapiens
gagaaaacacaaaccgaaaggaaaggaaaagcccggaaaagcagccaagcggaag

SEQ ID NO: 126152 - RNA, 74 nt, Homo sapiens
accccacaacgacagaaagccggagaaacaacgccgggaaccaggaaagaaagagaacgcaccgaagaccagca

SEQ ID NO: 126153 - RNA, 75 nt, Homo sapiens
gcgggcgagcggcggggagcggcgaagccgcgggcgagcaaaagcggaaggagagacaggaagggcacagaaacg

SEQ ID NO: 126154 - RNA, 68 nt, Homo sapiens
aaaagcggcacccaagagaaaaggagaacggagacaggcaaaacaaaccaagggagcccggccaggag

SEQ ID NO: 126155 - RNA, 85 nt, Homo sapiens
caaggcaacaagcccacccgaaaccacaaggccgagagaggcaagagaaagccgggcaccgacaaccgggccagaggcagcggag

SEQ ID NO: 126156 - RNA, 35 nt, Homo sapiens
ggaacccgcgaagcgggaagccccggacccacaca

SEQ ID NO: 126157 - RNA, 54 nt, Homo sapiens
acaaacagcaaaagcaaggagacccacacgccagggccacgagcagggaggcaa

SEQ ID NO: 126158 - RNA, 60 nt, Homo sapiens
caccaagaggcaacagacagaggaccaggagcaccgcccagccggaacgcgcgccacccg

SEQ ID NO: 126159 - RNA, 70 nt, Homo sapiens
agaaaccagcaacaaaaagaaagcgcgaaggcaaagcagaggaagaacagaggccccaggggcgccacag

SEQ ID NO: 126160 - RNA, 40 nt, Homo sapiens
cgcggaagcaggaagacaccacacgcccccaccaccaacc

SEQ ID NO: 126161 - RNA, 70 nt, Homo sapiens
ccccaagggcgggaacagcaggccacacccaagaccaggccaggcagggcaagaagacaccacaaacaac

SEQ ID NO: 126162 - RNA, 69 nt, Homo sapiens
ggcagaggccggcggcgcaggagaggcagagccccccaagccgggcggggagcccgacgagcacaagga

SEQ ID NO: 126163 - RNA, 74 nt, Homo sapiens
accaacggacaaggcggcaaagcggggaggccagcgacgccaggaagaaaacgagagccaccaaagaagaccag

SEQ ID NO: 126164 - RNA, 77 nt, Homo sapiens
gggccagcggccgcgcacccccggccggaggcaccagccggagcagaccgcagggacaccgagacccggcagcgcgg

SEQ ID NO: 126165 - RNA, 72 nt, Homo sapiens
gaagaagagcggaaaacaaggggcacgcgagaaggggagggggagaaagaagaggaagaagccacaggcaag

SEQ ID NO: 126166 - RNA, 62 nt, Homo sapiens
ccggaaacaggggccacggagccacggccacggccgcaaggagcacggaagcccgcacgcag

SEQ ID NO: 126167 - RNA, 90 nt, Homo sapiens
ggcgggggaaagggagacggcgagacgcgcagcgccggcgcccgggagacccaggaggagcccgcaggaagcgccgcaagagaggagggc

SEQ ID NO: 126168 - RNA, 64 nt, Homo sapiens
gaaccacccaggaaacagcgcaaggcagccgccgcaaagggacgacgaagggacagccagaagg

SEQ ID NO: 126169 - RNA, 77 nt, Homo sapiens
gccacccagggccagcaggcaggcaggcaggacagacggacagaaccggaggcagcagccacggaaagagggacaag

SEQ ID NO: 126170 - RNA, 91 nt, Homo sapiens
gcaaaagacccaccccggaagaccaaagagaagaggcaaaacaaacacaaaagagcgaggccggaaccaccgcaggcacggggacccagaa

SEQ ID NO: 126171 - RNA, 77 nt, Homo sapiens
cgcacgcacagcagcgaacgacggccggaagaagcaaccggccgagcaggcaagcgcccgccacagagaagccgggc

SEQ ID NO: 126172 - RNA, 42 nt, Homo sapiens
aaagacaacagccagaagacgcggccgagagcggcccaggag

SEQ ID NO: 126173 - RNA, 85 nt, Homo sapiens
ggagcccaacgaaaccgaacaggaaagccaggccagaagaaggaaggccggggaggggacaggaaagacacaccaccccaccgaa

SEQ ID NO: 126174 - RNA, 58 nt, Homo sapiens
accgcgcgggagggggcacagcgcagacagccaccgacagcccagacaaaggccccag

SEQ ID NO: 126175 - RNA, 75 nt, Homo sapiens
ccgcgcggcccgcgggaggacacacccccgcaaccgggggaaggaggcgggaggaagggaagggaacggagacgg

SEQ ID NO: 126176 - RNA, 77 nt, Homo sapiens
agaggagaaacgccaggcgacccaggccgcaggaagagggagggcaccccagcccacgggacccagcgggcccgaaa

SEQ ID NO: 126177 - RNA, 63 nt, Homo sapiens
ccgccccccagcaccgggcggacggaaaccccccaggcaagaggcgcaggaccgggaagacca

SEQ ID NO: 126178 - RNA, 76 nt, Homo sapiens
caggaacaaagagagagaagaggggggccagcagcaagaacagagagagcagagagagccagaaggccgacaggca

SEQ ID NO: 126179 - RNA, 74 nt, Homo sapiens
ccgggggaggcaggggcgcggcaggcaccgcccaacagcgccacacgagacaaaagagcccaacccaggcacag

SEQ ID NO: 126180 - RNA, 83 nt, Homo sapiens
gggagaaaagaacgcaaggccgacaaggagcaaaacagcgcgccgccgcaacaggggcaagagaggccgaccgagccgaaccc

SEQ ID NO: 126181 - RNA, 80 nt, Homo sapiens
gaaacgaaccggacccagacccagaggcagagccgccccagcagcaggggcgccaggcgaagccgacgagcccgaacaga

SEQ ID NO: 126182 - RNA, 66 nt, Homo sapiens
ggagccgccggaagggcgcccgcagccccccacgagggggacacaagaacaaccagaggaaaccgg

SEQ ID NO: 126183 - RNA, 80 nt, Homo sapiens
aggagcggagaggcccaccaggccagagacgaagaagccaaggaaagacaaagagagaaccaaaaagaagaaaagacaag

SEQ ID NO: 126184 - RNA, 76 nt, Homo sapiens
cgcggccaggaggcacacccgcccgcagaagagagcgaccggagcggggaacacggggggaccgcggggccaaaaa

SEQ ID NO: 126185 - RNA, 51 nt, Homo sapiens
cggacaccccaccaggagacgcagggcgaacgcgggagaagcgcagccagc

SEQ ID NO: 126186 - RNA, 78 nt, Homo sapiens
gcaggcggcgcggagagggggcgcgagcggggggacaggggccacggagagacgcggagccagcagcaggacccacca

SEQ ID NO: 126187 - RNA, 73 nt, Homo sapiens
agcgcccggaggcccgaggaagggagcgggccccgggaccagccgcaccagcaaaagggccccgaggccaacc

SEQ ID NO: 126188 - RNA, 62 nt, Homo sapiens
ccgcggaccagccagggcacggccgggacgggaaaccacgccgggacgggggagaaggaaag

SEQ ID NO: 126189 - RNA, 74 nt, Homo sapiens
caccgaggcacccgaagaagagaccaccaaccaggagcacagcacagcaacagacccggaacagcccagggaaa

SEQ ID NO: 126190 - RNA, 77 nt, Homo sapiens
ccagggagaaggaacaggacaaggcgccaaacaagaaaaacaaagccaaggaaaccccaacacagagccaagcgcca

SEQ ID NO: 126191 - RNA, 131 nt, Homo sapiens
gcgcgcacacgcagagacaggccgaggagacgcgggcccgagcagccagaccgacccacccgcgcggacaggcaggagaacccaacaccccaaggcgcggccaccagggcaaggcggaacaaaggaacccc

SEQ ID NO: 126192 - RNA, 73 nt, Homo sapiens
acccggaagcaaagaaaaagaacccaaacaagacgcaagaacagcaggcggcaccacgcggggccaaggccgg

SEQ ID NO: 126193 - RNA, 73 nt, Homo sapiens
gcgcccgaggagcccagggccacaggcccaagcgccgagaccagaccaccgcacggaacagggagaaagccaa

SEQ ID NO: 126194 - RNA, 83 nt, Homo sapiens
cggaaagagcaagacggcagcccaaaagcagcggaaagagccaggcagaaagccggggggagggaccgccccagaggacggaa

SEQ ID NO: 126195 - RNA, 77 nt, Homo sapiens
gaaaaacaacaccaggacacagaaggcgaaacagaaggcggaggcagaacgaaagaggcggccaaggaacaagacac

SEQ ID NO: 126196 - RNA, 76 nt, Homo sapiens
gccggccggacaagcccaggagccgaccagagagcagggcagcgaggcacaggccccaccgcgaggcgagccaccc

SEQ ID NO: 126197 - RNA, 93 nt, Homo sapiens
ggaaacaccaggcgcggcggcccagccccgacacaggagagaaaacagacagaaaagaaccagaaccggccaaaagcgaaaaggcggaagacg

SEQ ID NO: 126198 - RNA, 88 nt, Homo sapiens
aaaagcgccgccccccgcggggcaaggggcgacgacccacgccgggagggacggcgcgggggacccaagggcgggaagagcacagggc

SEQ ID NO: 126199 - RNA, 72 nt, Homo sapiens
cgagcagaaccgagaagcgccccagaaagagcaaacgagacggaagaaaaaaccgacggcccgaaccacagc

SEQ ID NO: 126200 - RNA, 81 nt, Homo sapiens
cggcacacagcccagccgacggcagagcagcccccacagcgggcgaacacaaaaagcggggagcacaaaaccgcagaaagc

SEQ ID NO: 126201 - RNA, 78 nt, Homo sapiens
aggaaagcgaccccggggccaccgagccaaaaggacgacaggacagccagacccgccacaggccccagcagcccagga

SEQ ID NO: 126202 - RNA, 75 nt, Homo sapiens
ggcggccgcagggcgccggagccccccagggaagcaaaaaaagccaacggaccccacaaaagagagagcgaccaa

SEQ ID NO: 126203 - RNA, 77 nt, Homo sapiens
ccggcccgggagccccacacagggaggcccgcgccaccagacccagcaagggggggccgaagaagccagggggagga

SEQ ID NO: 126204 - RNA, 81 nt, Homo sapiens
gagaaggccacaaccaagagaaacaaccaagaaaaagcagcacgaaggcgaggaaccagcagacaaaaaagaagaaaaacc

SEQ ID NO: 126205 - RNA, 78 nt, Homo sapiens
ccacccgacgcagagggcaggccccagccagaaaggagggccgcccccagggaacaaacccccagccggcccgcggga

SEQ ID NO: 126206 - RNA, 86 nt, Homo sapiens
gacacgcggcccgaggcaacggccacaggagcgggaaacgcagcgacagcgaggaagagcccccacccgcccagcccccagcccga

SEQ ID NO: 126207 - RNA, 84 nt, Homo sapiens
cacccgcccccaagaaggaagcacagggccggccggaacagacgagagaaaacagagcgagggagaagagaagaaaaccggccg

SEQ ID NO: 126208 - RNA, 87 nt, Homo sapiens
ggcgcgagaagcggcggccgcgcccaagccggcaccgagcggcggagacggcgagcacaagggcgaccagacgaggggagacggacg

SEQ ID NO: 126209 - RNA, 80 nt, Homo sapiens
gggcccggcccgggggccgccccggcgagccgcgacggcgccgcccacggcgaggagagggcacccccggagccggaaag

SEQ ID NO: 126210 - RNA, 88 nt, Homo sapiens
cgcggacgaggaccagcagaggccagcacgagaacccaggagcagggggagcgcagccacgcccaacgcaaaccggaagaagccggaa

SEQ ID NO: 126211 - RNA, 75 nt, Homo sapiens
ggagccgggcccagaggaccggccggcacgccgcccggggccagacccccggagcagaagacagagggaggaggg

SEQ ID NO: 126212 - RNA, 80 nt, Homo sapiens
gagaacgagggcacaggcaggagcaagaccggaaaggacggaagcgacccgacaccaggggggacggcgcgcacccgccg

SEQ ID NO: 126213 - RNA, 70 nt, Homo sapiens
agacgagcagacacgcggaaccagcagcagggaacggaagagccaggcagagcgaagaaggcccagcacc

SEQ ID NO: 126214 - RNA, 78 nt, Homo sapiens
cgaaaacaccggaacaaaaggacggcaacaagacaagggaggcgaggacggacaaaaggaaacggacgggaggccagc

SEQ ID NO: 126215 - RNA, 90 nt, Homo sapiens
caagggcccccaggcggccccgggggacgacaccggagaaggcagcgacgacagcgacagcgagaagaggaggccgaggagcaggaggag

SEQ ID NO: 126216 - RNA, 71 nt, Homo sapiens
agaggggaaggagcccagcgacgcggcaccaggacgccgaaaagcgaccggacgcaggcacagggacacgc

SEQ ID NO: 126217 - RNA, 77 nt, Homo sapiens
acacaggaagcgccgaggccaacccccaaggagcgaacgcagggccccacaccccagccaaagacagccagcgagga

SEQ ID NO: 126218 - RNA, 74 nt, Homo sapiens
caccagcaaccagagggccagagggaaggacagaaccacaccggacggaggaagacaggaagaagacggcaggg

SEQ ID NO: 126219 - RNA, 65 nt, Homo sapiens
cgcaaagcacagaaaaggaagagggacaagagaaaaaaagggcgggcgaacaaaaagagcagagg

SEQ ID NO: 126220 - RNA, 58 nt, Homo sapiens
gggcgcggaggagaggagcgagcccagggagcgggaggccggagaaggagcacgaaca

SEQ ID NO: 126221 - RNA, 71 nt, Homo sapiens
caccagcaacaacgccagccagcagcaaggaaggcagcgcaccaccaccgccggcgagcaccaggagagcc

SEQ ID NO: 126222 - RNA, 77 nt, Homo sapiens
gagagcagggaggcaagcagcggggccaccccccccaccgcgaccaccccagcaaaccaacacgcccagcgcggagg

SEQ ID NO: 126223 - RNA, 66 nt, Homo sapiens
gcggcgcagcacggaagacaagacagcgaagggagacaggaaacagaagcgcccagaggaccgccc

SEQ ID NO: 126224 - RNA, 86 nt, Homo sapiens
aagagagaaagagaccaagcaagcagagagggcaccagaaaggcagaacagagaagaagaaacaaaagacgagccccagaaaaggg

SEQ ID NO: 126225 - RNA, 79 nt, Homo sapiens
gcggagcggaagacggcaacccaggacccggcgcccagccccagacagaacaagagaagaacaagcgccgccccgcagg

SEQ ID NO: 126226 - RNA, 77 nt, Homo sapiens
ccaccacaacacacaggacagcggggcgcgggggcggcccggcacaagggaagaccacaacaagcaagcagcagcac

SEQ ID NO: 126227 - RNA, 78 nt, Homo sapiens
gagcacagaagagcgaggagaacaccagaagaaaagaacacgcagaaggccgccacacaagcaccgacccaaggcaaa

SEQ ID NO: 126228 - RNA, 65 nt, Homo sapiens
cgacaagcgcccacgaggagacgcggaggacagcccgcaggcagccagcccggcgcgcgcaggca

SEQ ID NO: 126229 - RNA, 74 nt, Homo sapiens
agcagcacaaagaggagaaacggacccgcggccaggcggcggccaccaggggaccccacaccacaaaccgagga

SEQ ID NO: 126230 - RNA, 79 nt, Homo sapiens
cgagaaggacagagaaccgggaacaggcggacggccagcccacacaggccgacacgaacggacaacaagcagggcacac

SEQ ID NO: 126231 - RNA, 86 nt, Homo sapiens
cgcgccccgggcgggcccccggagacgcgcaggagccacacgaagagcgccgcgcgcagagaccccgcaggcggccacagagcaac

SEQ ID NO: 126232 - RNA, 65 nt, Homo sapiens
gcgagagagacgcgaaagcagacagcgacgcaagaacaaacccaaaaaagagacggaggaagaca

SEQ ID NO: 126233 - RNA, 76 nt, Homo sapiens
aaccagggcggcaaaacgagcgggccagccaccggggaccgcaaggccgcggggcccaacaaggcaagacacagcg

SEQ ID NO: 126234 - RNA, 49 nt, Homo sapiens
ggagggagaacacaggaacaggcgcgggggaggaacaggaagagaagag

SEQ ID NO: 126235 - RNA, 72 nt, Homo sapiens
aaaaacccccacacagagggacgacggaggagcacggccgggagcgaagaggcccagaccaccgcacacagc

SEQ ID NO: 126236 - RNA, 73 nt, Homo sapiens
acacaggggcggacaacgcaccgcacggagggcgggagagaacagaacacagggcagaccagcagccaaggac

SEQ ID NO: 126237 - RNA, 74 nt, Homo sapiens
aagccccagccacccacaaacagagagaaggaaccacccacgcaggcaggggaggaagcagaagaaaggacggc

SEQ ID NO: 126238 - RNA, 62 nt, Homo sapiens
gagcaacccacagcaccgaaagccacaggacagggagaaaagaagggaagggaccaccgaca

SEQ ID NO: 126239 - RNA, 77 nt, Homo sapiens
cgaccaccggaacggacagcccccccaggcggcaccaggacgccgaaaagcgaccggacgcaggcacagggacacgc

SEQ ID NO: 126240 - RNA, 80 nt, Homo sapiens
cagagcgccagcagccacggcccggggcaaggcaacgaagagagccccaagagacgacagaaaggcagagaaggaaaaaa

SEQ ID NO: 126241 - RNA, 113 nt, Homo sapiens
ccggaccgggagggaacgccgcggacccggagccgcacaaaccagggccgccagaagccagaaaagggggaaggggacaggacgaaaaccgcccaggagccaccaggaaagaa

SEQ ID NO: 126242 - RNA, 74 nt, Homo sapiens
caaggccgggccacgcaccccacagcgggccagaagagcagcagcagagaaacgagcagaacaaaaaggggaca

SEQ ID NO: 126243 - RNA, 53 nt, Homo sapiens
cgcccaaggaaccccgccggccaccggcggaaacgagcgagagagaagagggc

SEQ ID NO: 126244 - RNA, 63 nt, Homo sapiens
caaggcgacaagaccggaccggagcccagggaacccagccagcacagcagcagcagccgccca

SEQ ID NO: 126245 - RNA, 81 nt, Homo sapiens
cggcccagcccagcggcacggggcaagagcaggccagaaccagcacccggcgagaaggacgcggggaggcggagaacaccg

SEQ ID NO: 126246 - RNA, 78 nt, Homo sapiens
acgcgcggcagccagccgcccgcaggaagaaagagggccacggacagaggcgcagcagaggaaccgcagaagaacgcc

SEQ ID NO: 126247 - RNA, 76 nt, Homo sapiens
cgagagggcaccgcggacggggccgcccaggggaacagacaagagggacacaggcgaaacagagaggaagacaagc

SEQ ID NO: 126248 - RNA, 71 nt, Homo sapiens
ccagcacaaccacccgggcccaaccagcccagcgcgcggccccaccggcccaggaaaccagagaaaaaccg

SEQ ID NO: 126249 - RNA, 60 nt, Homo sapiens
cggaaagcagaagcgcgcagcaacggcgggaggcgaacagacccagggggagacggcggc

SEQ ID NO: 126250 - RNA, 78 nt, Homo sapiens
ccaacgccggggcggggagcacggaacgacagggcgcaggacgaacggcaggaaagcacaaaagacaaaggaaagcga

SEQ ID NO: 126251 - RNA, 31 nt, Homo sapiens
accaggcaggagcgaggcacgggggagggga

SEQ ID NO: 126252 - RNA, 76 nt, Homo sapiens
cgggggagagaagcgaggccggaaaaaccgagccacacgaagaacccgaggaaaggaggccaacagaaagaaccca

SEQ ID NO: 126253 - RNA, 69 nt, Homo sapiens
agaggcggagaaaagaaaaaagaagaaaaacgaaggaaaacggacacgcaggaaggacggcagagaacc

SEQ ID NO: 126254 - RNA, 58 nt, Homo sapiens
gccaggggcccacggagccaaaagccaaaagccgagaacgacgaagacggccaacaag

SEQ ID NO: 126255 - RNA, 80 nt, Homo sapiens
acagacacgccaaggagcccggggaaagggagcagcaccggccacacccacagcacgaccggaacccagcgaccgacgcc

SEQ ID NO: 126256 - RNA, 71 nt, Homo sapiens
caagacgccgagggggagccaagggccagacagcaccaggcaagaggaacccagcaccacggacagaaaaa

SEQ ID NO: 126257 - RNA, 68 nt, Homo sapiens
ccgaacacgacgcgaagaaaacaggaaggaagaaacacaggcgcccagacgagcccaccacggaccac

SEQ ID NO: 126258 - RNA, 80 nt, Homo sapiens
aagaggagacacgagggaacaaacaccggagcaccgccacaggccaacgacaacgacaagcgacagagaacgagacagcc

SEQ ID NO: 126259 - RNA, 74 nt, Homo sapiens
acgaaaccagggcaaaacaccacccccccacaggaaacagacgacaggaggcacgagacgacaaggagaggcca

SEQ ID NO: 126260 - RNA, 76 nt, Homo sapiens
gaagaggagaaaggaaccgggaaaccccgaaaccgacaaaaggagcccccgaaccagcgaaaagccccgcccgggc

SEQ ID NO: 126261 - RNA, 80 nt, Homo sapiens
cagccacaccaggcccagaggccaggcagacccagccaaaccgggagaagcagacacggccaacacgcgccagcaggggg

SEQ ID NO: 126262 - RNA, 79 nt, Homo sapiens
gccacaaacacagaggaagaccaccaggcagaggcaacagaggagcaacaaggagacaagggaggcgaggacggacaaa

SEQ ID NO: 126263 - RNA, 80 nt, Homo sapiens
ccagcagccgccggagccagccaacgagcgcggggaagaaaggccccaagacgccacaaagcagagacggcggcgaacgc

SEQ ID NO: 126264 - RNA, 59 nt, Homo sapiens
cccacaacggggaccaccgccccagcagacgcggaagcaaaccaggggacagggaaagc

SEQ ID NO: 126265 - RNA, 83 nt, Homo sapiens
aggacgacgagagccgcgaaagacaaggaggcccgcgggccgcgggccgccgcagcgccgaaccccacgaggcccggccagcc

SEQ ID NO: 126266 - RNA, 80 nt, Homo sapiens
ggacggacaagcacagccggaagaaggacagaaaacgggccccagacacaagccccaccaagaggacaccccaggaacgc

SEQ ID NO: 126267 - RNA, 109 nt, Homo sapiens
caggggccggcagcccagaaccaaaagaggaccggagcgaaccagggagcagcaaaagaaccacagacagcgaccccagggcaggacaggaagagaagccacagggaag

SEQ ID NO: 126268 - RNA, 80 nt, Homo sapiens
ccgcggcggccaggaacccgaccgcccccgcccagaacccgggcggggccggacggggggagaaggaaaagggacaaagc

SEQ ID NO: 126269 - RNA, 73 nt, Homo sapiens
gaggcggcgagagaggcaggcggagccgaccgggccagggggaaaggaccggacgccagccccccgacgagcc

SEQ ID NO: 126270 - RNA, 71 nt, Homo sapiens
ggagcgccgccccccgcacaaggagaagcacaaccacggacggcccagaaacccaaaacaccaggcgacaa

SEQ ID NO: 126271 - RNA, 80 nt, Homo sapiens
acaaaacagcagacccaagagcagcggaaaagaccagcacagggggcacccgaggaggaagagggcagggcccacggaaa

SEQ ID NO: 126272 - RNA, 71 nt, Homo sapiens
gaaagaagccacccagagagaaccagacaccagggcgcccgaggcaacccagcacgggagcgccagcagac

SEQ ID NO: 126273 - RNA, 66 nt, Homo sapiens
cggaagaggaccccagacggacgcggcccccacgaaccgcgaggacccaagaagaccagccgaagc

SEQ ID NO: 126274 - RNA, 82 nt, Homo sapiens
cggacgcggaggaaccccaggagcacaccacaccaggggggagagacaagaacgagcaagggaaccaacagcagaacaagaa

SEQ ID NO: 126275 - RNA, 74 nt, Homo sapiens
gcgcacagccgacaaagcggccccagcaagaaggggcaaggcccccccgggcgagccgccacaccagccgcgcc

SEQ ID NO: 126276 - RNA, 61 nt, Homo sapiens
gaacgccgccaccagccaccaccaagaacacagcccaaaccagagggaccagagaggaggc

SEQ ID NO: 126277 - RNA, 45 nt, Homo sapiens
ccgacgaaaggagccaaaaacacgcgcagacccgcgcacaagagc

SEQ ID NO: 126278 - RNA, 67 nt, Homo sapiens
cagccggcagcacacaaccgcgacaaaacgagaacaccagagcagcagcagacaggacgcggcgccg

SEQ ID NO: 126279 - RNA, 81 nt, Homo sapiens
gaagagggaaacagccacaagacgcaaacagcagacggaagaccccacggcaaaaccacacccgaggcgagcccaggacac

SEQ ID NO: 126280 - RNA, 57 nt, Homo sapiens
cggaaccgagcgggaaaaggaaaaggaagggaaaacaagaggaaaaaaccagcaacc

SEQ ID NO: 126281 - RNA, 85 nt, Homo sapiens
aaagaaggagcaaaaagagggaacagcggcccagggcaggcaagcaaaaaggagaacaccaacaccagcagcagaggcccccaga

SEQ ID NO: 126282 - RNA, 63 nt, Homo sapiens
agacgcagggcgcccccgaaacgaagagagaagaagaacagggagaaacccgagggacaccag

SEQ ID NO: 126283 - RNA, 77 nt, Homo sapiens
cggaacacccgccaaagcagagaaaaccacgcccccgagagccgccaacacccggccgagggcacacacaacggggc

SEQ ID NO: 126284 - RNA, 81 nt, Homo sapiens
agcgcgggacccagcccaggcggcgcggacggggcggagccgagggaggagaagaagaaacccaagcaagagagacagaga

SEQ ID NO: 126285 - RNA, 81 nt, Homo sapiens
aaaacagcaaggaaagaaaggggaggcacacgagggagaagacaaaagacacaagagaggacacagagaagcacaagaaga

SEQ ID NO: 126286 - RNA, 74 nt, Homo sapiens
ggcggcgaggcggacaggacggaagccgcgaacccccgaccgggagcccacggaagaaaggaccaggcgggccc

SEQ ID NO: 126287 - RNA, 80 nt, Homo sapiens
cacgggagccaccagaggccgggagcggcccagcaggagcgccaaccaggcagcggaaccgcagaccgaacccccaagcc

SEQ ID NO: 126288 - RNA, 65 nt, Homo sapiens
agcaggaacgcaagccagccgggaacaaaagcacagggccgggaggaagaaacccccacgcaagg

SEQ ID NO: 126289 - RNA, 75 nt, Homo sapiens
gaacgaacagaagagaagcaaaggcccgaaaaaagacagagaaacagggacacagaaggaagcccagcacggccc

SEQ ID NO: 126290 - RNA, 101 nt, Homo sapiens
cggacagcaagacaccacccaacacagcagccagcaccagaggaaaaaccagaagagaaaaaacaaaggggagaggcaccccgcgggacgaccggacagag

SEQ ID NO: 126291 - RNA, 52 nt, Homo sapiens
caaggcaccggaagccggaacaacagccaggcgccaaacaagggaaccgacc

SEQ ID NO: 126292 - RNA, 82 nt, Homo sapiens
gcggcggcggcaagcggagaccccgcgagcggcgcgagcggcagcaggacaccccggacaaccccaagaaggcccccggagg

SEQ ID NO: 126293 - RNA, 79 nt, Homo sapiens
acaagcccacgccgagggcacccagccggaacgcccgcaggaacgcgacaaacaccagggaggcaccaagccaggccgc

SEQ ID NO: 126294 - RNA, 64 nt, Homo sapiens
gaagcgaggacaaagagcaagccggcagagaggagaaaaccgccgacacgagggaccacgcaaa

SEQ ID NO: 126295 - RNA, 82 nt, Homo sapiens
cccaaccacagccgaaagacccaaagaagaaagcgacaacagcgagggccagcgaagacaacagggaagaccaagaggaaaa

SEQ ID NO: 126296 - RNA, 74 nt, Homo sapiens
ggaaccaacccccaaacaggccgccgacggcccgcacagggagggcacagcaagcccacgagcaagcagagacg

SEQ ID NO: 126297 - RNA, 85 nt, Homo sapiens
cgacgcacagcgaccaccaacagaccgaagcgggcgccaggacccccccagagccaagacccccagaagggaccccccccccacc

SEQ ID NO: 126298 - RNA, 86 nt, Homo sapiens
cggccgcagggaaggagcaggcgcgagccgagcgacggcgcggcggagacgccggcgcccccccccccgccgagagaggcaccagg

SEQ ID NO: 126299 - RNA, 76 nt, Homo sapiens
cacccccgggggccacggacccggcgacaacacccggccccgagacagaagccggcggagacgccagcgacgaacc

SEQ ID NO: 126300 - RNA, 38 nt, Homo sapiens
gagacccagccgaagggaggcggaaaagaaggaggcca

SEQ ID NO: 126301 - RNA, 77 nt, Homo sapiens
cagcgcgggggggcccccgagcagcagacaggagcaaggaggcacaggaggaagaccacgcggcaagcaaaaaggag

SEQ ID NO: 126302 - RNA, 76 nt, Homo sapiens
ccaagcccgggagacagcaaaacaagacaggaagaagaccacccccaccaaacacgaaaaacaaagggacacgagc

SEQ ID NO: 126303 - RNA, 76 nt, Homo sapiens
gaccgggacccgagcaggacagccagagcaggcgccacaaaggcgccgagaaagcagccccggcaaaggcaaaaga

SEQ ID NO: 126304 - RNA, 83 nt, Homo sapiens
ggcagccgacccagcgcggcccgagaagcaaacaaccagcccgagcccccaaaccacaggacccccccgcggcggcgaggccc

SEQ ID NO: 126305 - RNA, 94 nt, Homo sapiens
caggggaaacggagccaaacgagaggggccagccaaggacagggaggccccggcggcgcagcccacgagccggggcggaggacaagcccgcaac

SEQ ID NO: 126306 - RNA, 83 nt, Homo sapiens
ccgcaaggccggagaaggccgccgggcccgggcaggggcggggcaacgcggaaggcggagagagcagggacgccaaggaccca

SEQ ID NO: 126307 - RNA, 72 nt, Homo sapiens
gccgaggggaacaccggcgagcccgggcggggccggcagcaccgcggccgcagcgcccgagaccaaggcgca

SEQ ID NO: 126308 - RNA, 77 nt, Homo sapiens
ggccaaaaggaagacccagccagaccagggacaaagagcaaacagacagggccgcaggcccccacgagacagcccag

SEQ ID NO: 126309 - RNA, 84 nt, Homo sapiens
cggcccggcccgacaccgcgggccgccagacgggaagggagggggaagacagagaagaccacacaaccgaaggggccgggcagg

SEQ ID NO: 126310 - RNA, 80 nt, Homo sapiens
gggcaggcccagaggcccccgcagcaggccggccacccagagggcccggccaagagcaaggggaacaaagcggcaaaaga

SEQ ID NO: 126311 - RNA, 69 nt, Homo sapiens
cccgacggaaggaacgaacaagagagcacaagcgaaacgagaaagggcagccaggaacccaagggaaaa

SEQ ID NO: 126312 - RNA, 69 nt, Homo sapiens
caccagcaaccagagggccagagggaaggacagcgcgagaagaagcacccaaggagcagcagaagggcc

SEQ ID NO: 126313 - RNA, 78 nt, Homo sapiens
ccgccagcccaaacaggcggcacagcaggcaacaggaagaagaacccacaggggccaacagaggaaggaacaaaggaa

SEQ ID NO: 126314 - RNA, 74 nt, Homo sapiens
ggggaggagcagacggccagagacacaaggccccggcagcagcaggcgaccgaaacacaagaggaacgaaagag

SEQ ID NO: 126315 - RNA, 54 nt, Homo sapiens
aaagagagaaccggagagcacccaacaggagcacgagaacaggacaaaaagaaa

SEQ ID NO: 126316 - RNA, 76 nt, Homo sapiens
ggaggcccacgcagaaccggggagccaccgaggacacaggggaagaaggaggacaacaggagaagacgacaccggg

SEQ ID NO: 126317 - RNA, 84 nt, Homo sapiens
gcagcgcccgcgccgggcccggaaagcgccgcccagcagccgcagggggccgacgacgagccccgcgaggagcgcagcggagag

SEQ ID NO: 126318 - RNA, 86 nt, Homo sapiens
gagcaagccgccgcccgacccagggcccgcgggccaggagagcgccggcggaccgagcgggaggaaaggacgaccgcaaacagcag

SEQ ID NO: 126319 - RNA, 86 nt, Homo sapiens
gcggcacgacgacggccccagcccagccaccagagcaccaagcagacacgcagagaacacaaggaacgaaaggaagggaagaagca

SEQ ID NO: 126320 - RNA, 73 nt, Homo sapiens
gggaaagagggccggaaaccggaggcaggaaacgcagcaaagccacgggggagaaggggggccagagcacagc

SEQ ID NO: 126321 - RNA, 66 nt, Homo sapiens
aaaaccgaaaaaaagccaaaaagaaacgaccaaagggaccagcccaggaggcacacacgaaggaac

SEQ ID NO: 126322 - RNA, 83 nt, Homo sapiens
aagcaggccggggacgaaaaagcccaacagccgacgggcgagcaaagggaagacaccccgaagagcagacggagaaggagcag

SEQ ID NO: 126323 - RNA, 78 nt, Homo sapiens
gaaaccccccaccccaacgggccccagcgccaaccaaaccgaaagccagaagagcacagcaagagagagagcaaacac

SEQ ID NO: 126324 - RNA, 86 nt, Homo sapiens
aacaggcggcaagcagagagcgagggcacccgggcacggacccgccgcaggcaagcccgccaggcgcccaaacgcaagggggccga

SEQ ID NO: 126325 - RNA, 75 nt, Homo sapiens
gccggccagcacccaccgagaaggccagcaggggaacggcacagggaggggacagaccaaccggcagccaaccgc

SEQ ID NO: 126326 - RNA, 76 nt, Homo sapiens
gccgccaggcagaaggccccccgaacagcaggcgccaccagcccggaggcacagagaggagagcaccgaccggaca

SEQ ID NO: 126327 - RNA, 82 nt, Homo sapiens
gggcggaaaaggccggcagaagggaggcacgagaccgccgggcgaagggggggcagagccgggccccagccaggggggacaa

SEQ ID NO: 126328 - RNA, 77 nt, Homo sapiens
agagccaggagccggccgcccggacaggagagcaccaccgacaccgagaagcagagagggcgcggccccaaagacaa

SEQ ID NO: 126329 - RNA, 57 nt, Homo sapiens
gacagaacagccaccaaaacagaagagaggagccaaagggaagaagcaggaaacaag

SEQ ID NO: 126330 - RNA, 86 nt, Homo sapiens
gaccccaggacaacaaggaggagacagggaaacgaaaaccaccgggcaccacgagcccacgagagaggacagccccaggaaggcag

SEQ ID NO: 126331 - RNA, 50 nt, Homo sapiens
ggagggggagcagacgaaccggaacccgcgggcggcccccggaaaaagcc

SEQ ID NO: 126332 - RNA, 72 nt, Homo sapiens
acagcgagggacgaaggagaccgcgcagacacagcccagaccaggcacaccgagcggagagaggggaaacac

SEQ ID NO: 126333 - RNA, 79 nt, Homo sapiens
accccgcggcgggaggagccgccccgagagccacccagaggacagcaaggggagggacgccagcagggccaacagccaa

SEQ ID NO: 126334 - RNA, 66 nt, Homo sapiens
gaacagaaaaagaccagcaccgagccaaaacagcaggcagagaccgaaacaaggaccccccgggag

SEQ ID NO: 126335 - RNA, 64 nt, Homo sapiens
aggacaaccaaggcgcggccaacaagacaaggaggagcacggcgaaccgcaaacagaagaggga

SEQ ID NO: 126336 - RNA, 53 nt, Homo sapiens
accggagagcacccaacaaacaagagcaaacggcgaaaccggcacagaagcac

SEQ ID NO: 126337 - RNA, 78 nt, Homo sapiens
agcggaggacacgggggccacaaagccccccggagacgcaaccaaggacaccagaggaccagaacccacgagaaacag

SEQ ID NO: 126338 - RNA, 81 nt, Homo sapiens
caggaagaaagccacaagaggcggcggcggggccgaggcgcgaggagcgagaagaagaaaagaagagagcgaggagcggca

SEQ ID NO: 126339 - RNA, 83 nt, Homo sapiens
agaccggaccgagaggcgcagcccagggccaagccagaggcagcggggcagcgggaaggcaggacacgaggagccgcgcgccc

SEQ ID NO: 126340 - RNA, 70 nt, Homo sapiens
cgcccaaaaaaccggaaaagacagaaagggagaaaagggcgggggcggagggcaagacgacgacaggaga

SEQ ID NO: 126341 - RNA, 76 nt, Homo sapiens
acggcagggaacgaccgggaaaccggaccaccaaaaaaaccggagcagggacaaagccaccgcccaaccagaggaa

SEQ ID NO: 126342 - RNA, 77 nt, Homo sapiens
cacaagccagggaagagcgcaagcccaggccaacagcgggacaagaaccacggccagaggaacagagcacaaaccaa

SEQ ID NO: 126343 - RNA, 69 nt, Homo sapiens
gccccggcacagaggcaccgaccgcaccggaggagaaggacgggacggcaaaacagaagcgcagcgaac

SEQ ID NO: 126344 - RNA, 86 nt, Homo sapiens
cacaggaaccaggggcccagccaccagaggacagcaaggcagagacccaggccgcccggaagcaagagccaccgacccagaggagg

SEQ ID NO: 126345 - RNA, 36 nt, Homo sapiens
acaaccagcgaaccgaaaaggacgagaccgaagaga

SEQ ID NO: 126346 - RNA, 85 nt, Homo sapiens
cgccagacgccccaaacaaacagagaagagagcggacccacaccagggaagacaggggagagggggcaccagcgggccacaagca

SEQ ID NO: 126347 - RNA, 58 nt, Homo sapiens
cccgcagcccggacagacccccgccccgagcgaggcaagccggcaggggaagcaacca

SEQ ID NO: 126348 - RNA, 75 nt, Homo sapiens
acacacagaagcgaaagaggcccgggccaacacacgcgcaggaagcgggaggaccggacgaaagccaggagaaaa

SEQ ID NO: 126349 - RNA, 81 nt, Homo sapiens
ggcagcggcgaggggacggagccggacaggagccgccgccgccaacaggccagggaacggcacggagaaagaaccggccaa

SEQ ID NO: 126350 - RNA, 79 nt, Homo sapiens
ggcggacggcgcgcgcccgaggcgaggaggagcgcggcggaccaaaacagggaaggaagaaccaggagggaaaacccca

SEQ ID NO: 126351 - RNA, 81 nt, Homo sapiens
ggcgcggggcggggcgcgcagccagcgagcgacgcgcccacggaggaggcgggggccccacaagaagaccaacaggaaggc

SEQ ID NO: 126352 - RNA, 86 nt, Homo sapiens
aaaggcagcgaggagaagcgcagcgacggcgcgggagagcgcgccagccggccgcgacggcccagcaggagggcggggccgcggca

SEQ ID NO: 126353 - RNA, 60 nt, Homo sapiens
cgcccaccggcccgcgccgcccaggccccgcagaaaggaaggcagaggaagccacggcca

SEQ ID NO: 126354 - RNA, 78 nt, Homo sapiens
caaacacgaagagacgacagaccagaccaagcaacagaacaaccgcaagagacaaacagaacccaccagccacagcac

SEQ ID NO: 126355 - RNA, 77 nt, Homo sapiens
cagcaaaagagcaagacgaggccaagccaccgccccacgggacaccagcaaagagacccgggccccaaaccggacca

SEQ ID NO: 126356 - RNA, 72 nt, Homo sapiens
gaacagaaggagcagcgaaaaacccgaccccccaagcaggaagaagagccgggcaagggcacccaaaaaccg

SEQ ID NO: 126357 - RNA, 58 nt, Homo sapiens
ccgaagaaacgacgcgcacgagcaaccgggacacaggcaaaacggacaaagaccgcaa

SEQ ID NO: 126358 - RNA, 68 nt, Homo sapiens
cgagcacggcccgcgcacgcccggagagagggaccgagcccagaacccggacgggcagacaccaggag

SEQ ID NO: 126359 - RNA, 69 nt, Homo sapiens
ggccgagagccgcccgggccagcggccgcgcacccccggccggaggcaccagcggccgcaagagacacc

SEQ ID NO: 126360 - RNA, 76 nt, Homo sapiens
ccagacagacaccagaagacagcagacagaagaaaagacgaacaagaaaacccagcagcgcgcagacaggacaacc

SEQ ID NO: 126361 - RNA, 88 nt, Homo sapiens
gagaccggcggggacagccaccggagcgcagcgccagggcgcccgcgccggcagaggaggcgagcacccgccagggagaggaaccccc

SEQ ID NO: 126362 - RNA, 61 nt, Homo sapiens
gaccgaaggaggccgggaccacccagccagcggaagaaggacaccaggccgccggccgccg

SEQ ID NO: 126363 - RNA, 72 nt, Homo sapiens
ccacccggaggcaagcccggcccggcccacacgacagcaggaccgccggggggaaacccgcccagggcggga

SEQ ID NO: 126364 - RNA, 65 nt, Homo sapiens
ggcggggacccgccgaacggcagccccaagaacggaaagaacccgccacagcacacgaaaacggc

SEQ ID NO: 126365 - RNA, 86 nt, Homo sapiens
cggcccgcgggaagcaggacgcgccgcgccccaagaacagaaaggccccggagcagcgcgacccccaggaaacacgaggcagacgg

SEQ ID NO: 126366 - RNA, 77 nt, Homo sapiens
gccaggcgccccgggcgcggcaaggacgagccggggcgcgaaggcacacgagcggccacgagcaaccaagaggagaa

SEQ ID NO: 126367 - RNA, 69 nt, Homo sapiens
cacgccccaaacaaggcccacacggagcgcccccaaagcccccacgaagaggcccagccaccacaacac

SEQ ID NO: 126368 - RNA, 59 nt, Homo sapiens
cgccagaggcccggacgacagcccccagaggagaaggcagagcccccccaggcagaagc

SEQ ID NO: 126369 - RNA, 82 nt, Homo sapiens
cacagagagaccggcggcaggaggagacgccgggccccccgggccgagaccagagcaggaagagagaccaaacaccaagcgc

SEQ ID NO: 126370 - RNA, 76 nt, Homo sapiens
ccagaagggccccgcaacacaggaaaacagagaaagaaggaaggagggccgaggggaaccagaagaggccaaccag

SEQ ID NO: 126371 - RNA, 74 nt, Homo sapiens
cgggagaggagcccaccaggacgaccgcgccgcccagcacgccagggagagcccagagacaagcaaagaggcag

SEQ ID NO: 126372 - RNA, 71 nt, Homo sapiens
cagggaaaggcaagagaaagcagacgaggacagccagcacaaaaaaacaaaacgagaacacggaagacacg

SEQ ID NO: 126373 - RNA, 64 nt, Homo sapiens
gcaagccgggccaacggcgagccaaggccaaggaggcaggaaggggcgaggggccgaaaaccac

SEQ ID NO: 126374 - RNA, 79 nt, Homo sapiens
ggaaaaccgacacaacaggcaccgaaggacagaagaggacccagccaacgacaagaagaggaagcccaggagggaccca

SEQ ID NO: 126375 - RNA, 60 nt, Homo sapiens
gcgcccggccccccaccggacacccgcggggcggcaccccaccgcccagccacagccccc

SEQ ID NO: 126376 - RNA, 72 nt, Homo sapiens
gagaaaagagagaaccccaaccggggaggaaaaccgacgaaggcaagggcagacgggggaggaggacgcaaa

SEQ ID NO: 126377 - RNA, 82 nt, Homo sapiens
cgagagaccgcgacacgggggccagaaggaaagcaagacagcccaccgaggaagaccaaaggaccaaccaacaagaagcaca

SEQ ID NO: 126378 - RNA, 87 nt, Homo sapiens
agcaggcacagcggccccagccgggacacccgaccacggagaaacgaggaggaagagaaggaccgaacacagaagaaggaacgcaga

SEQ ID NO: 126379 - RNA, 71 nt, Homo sapiens
ccacgcgggaggggggcaaagaaacagcaacgcggagagagcgccaagcgcgcagggcaaaccccacccca

SEQ ID NO: 126380 - RNA, 62 nt, Homo sapiens
ggggaacccaggcaggaacgcagaaaacgccagggagaagaagagaagacaggagacaaacg

SEQ ID NO: 126381 - RNA, 71 nt, Homo sapiens
aagcaccacggaggacgggacaggcggggaagaaagccggagaaaagcaccggccccagagccgccaaaca

SEQ ID NO: 126382 - RNA, 72 nt, Homo sapiens
caccggagggacggcacagggaggccagccggagaagcgagcagcggaagagaccagaagagcaggaggaaa

SEQ ID NO: 126383 - RNA, 46 nt, Homo sapiens
ccacaccgggaaaagccgcagcgcgagaccgaggcacgggcaggca

SEQ ID NO: 126384 - RNA, 76 nt, Homo sapiens
agcagagcgaaagcaacgcggccaccggaaaagggaggcccccccagcgcccggaaacggacaaagaaaagggaga

SEQ ID NO: 126385 - RNA, 77 nt, Homo sapiens
aagggacgggaaagaccgacccaacaagacagacagacggagccgcccagaagccgcccacagcaagcccagaagcc

SEQ ID NO: 126386 - RNA, 74 nt, Homo sapiens
acccagagaaaaggcagaccgacccgcaaaccccaaggggcccgggaccgacggaagaagcggacggagcgcag

SEQ ID NO: 126387 - RNA, 40 nt, Homo sapiens
ggagacagccgggcgcgcaaggaccaccggccaggcggaa

SEQ ID NO: 126388 - RNA, 67 nt, Homo sapiens
ggggcgcgcaggccgcgacgagggcgcgaggaagcagaggggaaaagcagggaccgcgccgcccagg

SEQ ID NO: 126389 - RNA, 87 nt, Homo sapiens
aagaaggcgagggaaaccagccaggagaagcgccgccaacgagggcaccagagggaacacaagacccccggcggaaggaagaacgga

SEQ ID NO: 126390 - RNA, 74 nt, Homo sapiens
accagagacaagcaacacaccacagcagcgaagcagggggaggacaagcggcccacgcaacaaaggccaggggc

SEQ ID NO: 126391 - RNA, 86 nt, Homo sapiens
aacccgcacgaacagcagaaccacaccgggcaggacgggaccagcagagcggcggcaagcacacgcaagaagccaaagacagagga

SEQ ID NO: 126392 - RNA, 75 nt, Homo sapiens
cgaagagaacagggccggggcacgacgacccaacagcaaggacggcggacaaggcccagaacaagcacaacaaga

SEQ ID NO: 126393 - RNA, 77 nt, Homo sapiens
gcgggaccaaagggcaaccaaaaaccccccccaaaaacccaagcgcgggacccggcccggggaccgcccgcccgcgc

SEQ ID NO: 126394 - RNA, 69 nt, Homo sapiens
gccccaccccccaaggaaaagcacagaagagaaggacacgcaaaccaccaagaacagaagaggcgcccc

SEQ ID NO: 126395 - RNA, 74 nt, Homo sapiens
aaagaaaggccaaagcagcagggccacccccaaccaggaccaaagacgaccaccaaagccagcccccagaacac

SEQ ID NO: 126396 - RNA, 71 nt, Homo sapiens
gaaaagcagcggccgcaaggaaggagagcccggacccacccaccggccaacaaacccaaaggaagaaagga

SEQ ID NO: 126397 - RNA, 69 nt, Homo sapiens
aagcacgacacagaaggggaggggagggaaaggcccaggaaaaagacaccgagggaggagaaaccgaaa

SEQ ID NO: 126398 - RNA, 60 nt, Homo sapiens
gggcaaagaaaaagaagaagcacacacacaggcaggagagggcgaggagccagacaggcg

SEQ ID NO: 126399 - RNA, 81 nt, Homo sapiens
aggaagagaagacaaggcgagggaaaaagcgggaggaggcgggccagaacacgaccggggcacaggcaaggacaagcaagg

SEQ ID NO: 126400 - RNA, 80 nt, Homo sapiens
ccgcgcccgccccccagcaccgggcggacggcagagcgaaggaaaaccagagaaaaaagaagcgcaagaaaaaaacaagc

SEQ ID NO: 126401 - RNA, 75 nt, Homo sapiens
ggagcagagggaaagggaaggagaaggagggacgcaggcgcaggccagacagagaccaggggccacaacggaaac

SEQ ID NO: 126402 - RNA, 53 nt, Homo sapiens
gcaccggagcagggaggcaggaaagaccacagcaagaccacgcccccagccgg

SEQ ID NO: 126403 - RNA, 76 nt, Homo sapiens
ccgagcgaagcccacaaccccgccgggcacaggaaagagccgcacggcgagccacgcgccggagcccgcggcggcc

SEQ ID NO: 126404 - RNA, 85 nt, Homo sapiens
cggcagccgcgcgggcgcgcaccaaggcgcggccaacgacccacccagcaggagaacggacccggaggcaggagacagagagaaa

SEQ ID NO: 126405 - RNA, 68 nt, Homo sapiens
cgccagaagcccgaggcagccagaccacgagcacgggccgaggaggcacacccagaagccacaggaga

SEQ ID NO: 126406 - RNA, 84 nt, Homo sapiens
ggagcacccaggaaggggcccagaagcagaaccaagagccaaccacagcacaaaaaccccaaagaagaagagagaaaagagagc

SEQ ID NO: 126407 - RNA, 71 nt, Homo sapiens
gaggaaaagcgcgccaaaaggacagcggcagaaagaccgcagccgcgaacccccagaaccgaaacgaccac

SEQ ID NO: 126408 - RNA, 79 nt, Homo sapiens
gacagaggggacccccgggcggccgggacaacagaggcagaaaaggggacacggcgggcagagaagaggcgaaagaaga

SEQ ID NO: 126409 - RNA, 81 nt, Homo sapiens
ccgagcacccaggcgacgcccaccaagaagacgaccccgacgcaggccaggagccgcggacagaagccgagcacggccgag

SEQ ID NO: 126410 - RNA, 67 nt, Homo sapiens
aaggaccaagaaccagggcccgagggcaggacagcaggcaccggcgaagcacagagaggcgcgaggc

SEQ ID NO: 126411 - RNA, 85 nt, Homo sapiens
cgcgacacaccgcacccacacgggcgagaagcccacgaggcaacacgcaaggccgccaccaggagggaagcggacacacaggacg

SEQ ID NO: 126412 - RNA, 81 nt, Homo sapiens
ccgcagcgcagcgccagccaggagggcagaagccaacagaaccaacccgcggcaggcgaagggaagaagaaacagaggaag

SEQ ID NO: 126413 - RNA, 69 nt, Homo sapiens
ccacccccacccagcgacagacacagcaccggccccggcagcgggacgcaggacggcagccgggcccag

SEQ ID NO: 126414 - RNA, 54 nt, Homo sapiens
agacaagcagagccggcaccacaggaagccgagcaggccaacaaaggcagcaac

SEQ ID NO: 126415 - RNA, 70 nt, Homo sapiens
cgacagacacagcagggaccagcaaagagagggccaagaacccggaggagggcagccggacacgcacagc

SEQ ID NO: 126416 - RNA, 73 nt, Homo sapiens
cccggcgccgcgccggcggcgacagaagcgaaggggacagggggagaaccgccagggaaacccgggggacaga

SEQ ID NO: 126417 - RNA, 82 nt, Homo sapiens
ggcaaagccacgccaccccgaaccgagccgaggaacacccaccagcccacgcccacgcaaagacgaaaccagcaccgaggcc

SEQ ID NO: 126418 - RNA, 65 nt, Homo sapiens
gccacacccgaaggcgccaccacgacaaacaggccacgagaagcaaaggaggaaggaggcgaacg

SEQ ID NO: 126419 - RNA, 65 nt, Homo sapiens
ccaagccgagaaggccagcaccagaaaaccgggagaaagaaagcccggaagggacaagacggaca

SEQ ID NO: 126420 - RNA, 57 nt, Homo sapiens
gcacggcgaaacccacccagaggcagacacccagcaccacggcagacaacaaccaac

SEQ ID NO: 126421 - RNA, 82 nt, Homo sapiens
agaagcacggaaacacgcgagagaaggcggggcaagagcagacccggaccgggacagaagccgagcgacggccccggaacac

SEQ ID NO: 126422 - RNA, 82 nt, Homo sapiens
gggcgcccccgccaacccccggaccccaagcgagagcaaagaacgaagcagaaccggccaggcacagggcgcgaggggccgg

SEQ ID NO: 126423 - RNA, 82 nt, Homo sapiens
gcgcgcgcgccgcgcgcgcacgaacgccgcagcccccagccgcgcgcgcgcacccccggacaggacgccaagaagcggaaca

SEQ ID NO: 126424 - RNA, 78 nt, Homo sapiens
ggcccccgacagcacacaaacggaacgggggccgaacgcgagaacaacacaacaggcccagacaagcgcaggaaccag

SEQ ID NO: 126425 - RNA, 73 nt, Homo sapiens
ggggccgaggcccggaaggaggccaacaccccagagcaagcgggagggaaaagcaaacgccagcagaccacac

SEQ ID NO: 126426 - RNA, 90 nt, Homo sapiens
cgacaagccgcggcagccgcggaccaccgccgccaggagccgaggaaacccagacccaagaccaaccgaggaggaggaggagggagacgc

SEQ ID NO: 126427 - RNA, 74 nt, Homo sapiens
gaaacggaaggccaaaagacacagggaaccaccaggagacacgaaacgaacgagccggaggagccaccaacaga

SEQ ID NO: 126428 - RNA, 79 nt, Homo sapiens
cccaacaggcaaaaagaagaaaaaacaggcaacagacaaaagagaccgcaacagagcccagaccccacagccagccgag

SEQ ID NO: 126429 - RNA, 55 nt, Homo sapiens
gccccgggcacgcaacccccccccgaacagagagaaacagggagaagaggaagga

SEQ ID NO: 126430 - RNA, 82 nt, Homo sapiens
caaccccaggaagccagcgggggcagccagccgagggccaccgggaaggacagaaggagcagcaaggccccggacaaacaga

SEQ ID NO: 126431 - RNA, 78 nt, Homo sapiens
gcagcgcccgcggcggcagcgcgaccacgaaggccgcacccgaggcgggaacaagcaacaaaggcacagaagcacggc

SEQ ID NO: 126432 - RNA, 72 nt, Homo sapiens
ggaggcggggggcccaagcaaggccggaagaagagcgcagaggaccccaaaggacaagaaagcagagaggca

SEQ ID NO: 126433 - RNA, 75 nt, Homo sapiens
gaacaacagcacgggagaaagcgcccacgcacgaaagcccaggccaaaaagagaccgagaaggaggccagcaggg

SEQ ID NO: 126434 - RNA, 35 nt, Homo sapiens
acggaagaagcaggaagggcggcgcgcacaaggcc

SEQ ID NO: 126435 - RNA, 41 nt, Homo sapiens
ccgcagggcggagagaccaggccgaaccggggcaggaggcg

SEQ ID NO: 126436 - RNA, 88 nt, Homo sapiens
cccggacgggcagcaccaggaccccaggcgggccccagcccaggccaggcgggaggggaggcggaggcggggcgccgcggaaggccgc

SEQ ID NO: 126437 - RNA, 87 nt, Homo sapiens
caccggcggcaccggcggcggcgcgcagcggcaggcggagagacccgccgccagacaagggccgaacaccaacagaggaagaaagga

SEQ ID NO: 126438 - RNA, 78 nt, Homo sapiens
cgggaggagaccggggaaccgcacgcgggcaacggaaggaaccagagaaacggagcgaaaccgaagagccacaaccaa

SEQ ID NO: 126439 - RNA, 39 nt, Homo sapiens
gaaacaaaacccgaaacaagaacgaaggcacagcgaccc

SEQ ID NO: 126440 - RNA, 73 nt, Homo sapiens
agcgcaaaaacaagacggggcgccccacagaggggcgacggcagacgagaccggagaaggaaagacaagccga

SEQ ID NO: 126441 - RNA, 70 nt, Homo sapiens
aaaaggcccaaaggccgccaggccgcagacgcgaaggaacggcaaaggccaacaggaacaagaaaaccag

SEQ ID NO: 126442 - RNA, 78 nt, Homo sapiens
ggcgaagcgcgcgccgcgcccggaccccagccggcacagccacaccgagaagaccggcccaagaaccccaccgcccga

SEQ ID NO: 126443 - RNA, 57 nt, Homo sapiens
cagacagaacagaacccaaaagccgacaaccccagaaacagggcgagcggcagagcg

SEQ ID NO: 126444 - RNA, 66 nt, Homo sapiens
gaagaaacccagggcgagaaagcccaggaggcacacacgaaggaaccaggaagacagaggagcggg

SEQ ID NO: 126445 - RNA, 68 nt, Homo sapiens
gagacgcagcaaaaaagcgaagaggacgagaaagcagggggccgccacaagccaacgaggggaaggac

SEQ ID NO: 126446 - RNA, 77 nt, Homo sapiens
gcaggccacccgggaacggaggagggcgaccaggcacaggaccagggcccgggccacagcgggggggcacggccggc

SEQ ID NO: 126447 - RNA, 59 nt, Homo sapiens
gcagcaggcacagcacgggcagagccagaaaacccgcacgagaccacggcagcgcgggg

SEQ ID NO: 126448 - RNA, 72 nt, Homo sapiens
ccagaggacgggagggggaaggggccggagggcagggggcagggcggcagaggggggaggagacagaagagc

SEQ ID NO: 126449 - RNA, 51 nt, Homo sapiens
ggcagacacacaacccgacccgacgaggacaggagaaacggaaggcaagac

SEQ ID NO: 126450 - RNA, 81 nt, Homo sapiens
gggagaaaacaccagcaagccggagagagaaaccagcaccaggggcggaacgcagagaagaaggggccaacgcaacaagga

SEQ ID NO: 126451 - RNA, 80 nt, Homo sapiens
gagaacagccgcgcggcgagcggcccgcacaaggccggcaggacgacaggccagcccacagggccaccggggcccgggaa

SEQ ID NO: 126452 - RNA, 82 nt, Homo sapiens
ggaaacgacggagacgcagagggacgaaagaagcgcagcggaggaaggcgagggcagggaaccaaccgggacccaggcaaaa

SEQ ID NO: 126453 - RNA, 72 nt, Homo sapiens
gggccagacccaggaccgcgacacgaagaagcgcaaccacaccacaaaccagaccagccagcacgcgcaggg

SEQ ID NO: 126454 - RNA, 71 nt, Homo sapiens
accgacggagcagcacaggaagcacaagccagcagacgacaacaggcgcaggagacacagcaaagacgcaa

SEQ ID NO: 126455 - RNA, 85 nt, Homo sapiens
gaagagcccgccgcccgcgcgaggcaggggaaaggaagggagcagcgaagccagggaggagccgaaacaaaaggaaaggagagaa

SEQ ID NO: 126456 - RNA, 78 nt, Homo sapiens
cccggcagcggagagccgagcccaaggcaagacccaaggcgacgaccgacaggggggaaaggaacagacaagaaaaag

SEQ ID NO: 126457 - RNA, 70 nt, Homo sapiens
aggcagaccaccgcgcccggccgaccgggaaaggagaagcagaacccaaagaagcgaagcagaaaggaca

SEQ ID NO: 126458 - RNA, 72 nt, Homo sapiens
ccggcgaccgcaccacaagggacgagaccaaacggaagagcaaaacaaacggagagaggagggagaaacaaa

SEQ ID NO: 126459 - RNA, 60 nt, Homo sapiens
cgcggcccccagaccccggcgcgggaggagagaagaccgagcggaggagcgcagcagagc

SEQ ID NO: 126460 - RNA, 74 nt, Homo sapiens
agaggagcagggagaagagaaagagacgcagagacagaagagaggggagaagaagcccgggaagggcaaaggga

SEQ ID NO: 126461 - RNA, 56 nt, Homo sapiens
ggaagaaaacgagccaggaacaaagagcaaggcaacgagaagcgggggacagaggg

SEQ ID NO: 126462 - RNA, 64 nt, Homo sapiens
cggaacgcaggagacacaagaagcggaccagcgccagagccggcagggcggggcccaacggaga

SEQ ID NO: 126463 - RNA, 74 nt, Homo sapiens
ccagaggggaacaaagagaaaaagagggaacccgcaggcccccacagaagacagcacgcgagaaggggaggggg

SEQ ID NO: 126464 - RNA, 79 nt, Homo sapiens
cgcggaaaggccggaacagacccggcgaggcccccacacgcagagggggccggcaacaacgggccaagggcacacacgg

SEQ ID NO: 126465 - RNA, 44 nt, Homo sapiens
gcaccgaaagggagaaaggaagggacagaggccagaccggaccg

SEQ ID NO: 126466 - RNA, 77 nt, Homo sapiens
accggcccacccacaagcgcacaggaccgggggaaaaagaaaagggcgaagacccgaagcagcgcaggaacagaaga

SEQ ID NO: 126467 - RNA, 106 nt, Homo sapiens
gagaaagacaagccgaggggaggcgggaccggccgaaaccggagaagcggggcggggggcaaggcacgcagccgggcccgacccgcgggccgcgggcgcagggcca

SEQ ID NO: 126468 - RNA, 73 nt, Homo sapiens
gagaagaaagcgggcacggcgcaggaagggcagccccacccacgcacgggacagcgagaggcgggacgcgagg

SEQ ID NO: 126469 - RNA, 88 nt, Homo sapiens
gaggcagaggccccgagccccgggaccgcggagcggagccggccgacgcgggcgcgagggcagaaccgggcaccacacgaaccgaggc

SEQ ID NO: 126470 - RNA, 71 nt, Homo sapiens
cagccaaaacagcacaacagcgacagacgggaaacgaaagaccggcgagaagcgcaaaaggcggaaacgac

SEQ ID NO: 126471 - RNA, 80 nt, Homo sapiens
caagcacaacggcggcacccacgcagacaccagccgcgccaggcgaaggggagcaagggagaaaagcaaagggaaggacg

SEQ ID NO: 126472 - RNA, 76 nt, Homo sapiens
gcggacaagaagcgaggggggagggggaagcgggaaacccacaggaggcaaccacacagaggccaaagccgacaga

SEQ ID NO: 126473 - RNA, 35 nt, Homo sapiens
ggaaacaaggcagcggggcgcgcccgcggcggcgc

SEQ ID NO: 126474 - RNA, 94 nt, Homo sapiens
ccaggaccccccaccggcaagcagacggacagaccccgcaggacggaaacccacaggcacacccaagggagaaagaagacaaggaaagaacacg

SEQ ID NO: 126475 - RNA, 62 nt, Homo sapiens
gcagccagaccacgggagaggaagcaacagcggggaggaaggcccgccgaaggagaagggca

SEQ ID NO: 126476 - RNA, 68 nt, Homo sapiens
gcccagcccgagagcgggaacagaggggagacaaaccaaagaaaacagaccgccagacggacacgagg

SEQ ID NO: 126477 - RNA, 70 nt, Homo sapiens
gcgcagggagcggaggaaaagggccagagacccggaccacccgacccacgcaggcacaggcgcaacgaca

SEQ ID NO: 126478 - RNA, 97 nt, Homo sapiens
gcaaaagcccaggaacaagccaggagggcaaagaaacccgggagccaaagaacagcaccaagcagccgaagagaaacaagggacagcagacaagccc

SEQ ID NO: 126479 - RNA, 64 nt, Homo sapiens
gggacagggggccgacgcaggaaaggcaaacgcaacacaccgaaaaaagggaagcggagaggag

SEQ ID NO: 126480 - RNA, 81 nt, Homo sapiens
ggccacgggaagcgagaaacgcgcggcacgagggacccccacaagcaagcacaaggcgcagcagcggacaggagaaccaac

SEQ ID NO: 126481 - RNA, 82 nt, Homo sapiens
acgcggcgcaaaggaaagaaggggaagcacagcaacccccacaccccccccagacagccaggagccaccaacaccaggccca

SEQ ID NO: 126482 - RNA, 71 nt, Homo sapiens
acaggacgaggaggcgcgaacgacccaacgggggaaacccgcccagggcgggagaccgccaagaaacacca

SEQ ID NO: 126483 - RNA, 68 nt, Homo sapiens
gcggagccgcaacaagccgggaaagcacaaaggagagaacgacggagagccgaaacaggaagaaagca

SEQ ID NO: 126484 - RNA, 74 nt, Homo sapiens
cggccaaccgacagagacccggggaccgcggagaccgccaccaggcccggcaacagaagccaggcaaggaacgc

SEQ ID NO: 126485 - RNA, 65 nt, Homo sapiens
gcggcacagccacgccaaggcgcaggggacagcgcggaccgacagaccgccaacagccagcgcag

SEQ ID NO: 126486 - RNA, 79 nt, Homo sapiens
gaggccccaggaggagacccccccgccccgaggccagacccacgcgcaggcggccaggccaccagacccccaccaccgc

SEQ ID NO: 126487 - RNA, 71 nt, Homo sapiens
acaccgggacgcccacaggagccaggggcgggggccgaccccggaaccagagcgcaccggcccgagagaaa

SEQ ID NO: 126488 - RNA, 77 nt, Homo sapiens
ccgccccccaacaaggggacaccaaggcggcaccggggcccagagccaacggggccccagcgccacaagaagaaaaa

SEQ ID NO: 126489 - RNA, 59 nt, Homo sapiens
cgagcccggacagaccaaccgcaggcgcaaggaaagcaacggcgcaagcggcggcggcg

SEQ ID NO: 126490 - RNA, 85 nt, Homo sapiens
ggacgcaggagcccccccggcagcaacccccacacccagcaccagggagggggccgcagagccgcgggaaacagagccacagcca

SEQ ID NO: 126491 - RNA, 76 nt, Homo sapiens
cagcacacggaagaaagggaaccggagaagagagagaaagaccaaggacaccaggcagaaagagcccacaagacaa

SEQ ID NO: 126492 - RNA, 87 nt, Homo sapiens
gaagaaagaggagcggcagagccgcggggcggagggggcagggcagaaggaccaggggcgacgaggcccagagcaagagaggcaccc

SEQ ID NO: 126493 - RNA, 77 nt, Homo sapiens
gcgcaggggcggcccagccgagacagcaggggaaaagagaagaacacgaaaagaagaacccaacagccccacacaag

SEQ ID NO: 126494 - RNA, 79 nt, Homo sapiens
gccccaaaaaagacgcaccagaagaaccgggaggagaagaaaccgcagaagcaaaagaagacgggaagccgaagacagc

SEQ ID NO: 126495 - RNA, 58 nt, Homo sapiens
aaacgcaaggccgaagccaaagccagaacggcaacgaaaagagacacgacgcaaaccc

SEQ ID NO: 126496 - RNA, 71 nt, Homo sapiens
ggaacagacagaagaagaccgaaaccagccggcggagaaaccaccacaaacacgaggccagcaacgaccaa

SEQ ID NO: 126497 - RNA, 83 nt, Homo sapiens
gacgcgccacccgccgacgcccagccgcggggcccgcacggaccccaccaaaggagaagaagcaccagccgacgcgaacggaa

SEQ ID NO: 126498 - RNA, 71 nt, Homo sapiens
cgacccaacccacaaccccccagccacgagccaaccccaccaagcgagcaacagcagaaaagagaagagac

SEQ ID NO: 126499 - RNA, 80 nt, Homo sapiens
ccggcgccgcggaccccccgccggcgggagggcgacacgcgggccgcgggccggccaccaccaccacagacagagggaag

SEQ ID NO: 126500 - RNA, 71 nt, Homo sapiens
agaccgacgcccaggaagcgcacgaggaaaagcacagaaagacaaacggaggagagaagagaaagcgaaag

SEQ ID NO: 126501 - RNA, 76 nt, Homo sapiens
ccagacaaccaggcaagcggaagaaccgaacacacaaagggccaaaaccccgccaagaccaaacagccgcgaacca

SEQ ID NO: 126502 - RNA, 63 nt, Homo sapiens
gagacggagaggaggcacacaccaacggaggaggcagcgcccaggaagacgcggcaaacagca

SEQ ID NO: 126503 - RNA, 70 nt, Homo sapiens
cgaaaaaccgagaaaagacccagaagaacacgcaagcaacaagcaccgacgcccaaggaggagagaacgg

SEQ ID NO: 126504 - RNA, 59 nt, Homo sapiens
ccgcacgcccgcaccccagggagcgcgcgccaggggcacagaagggaccacaaacgagg

SEQ ID NO: 126505 - RNA, 39 nt, Homo sapiens
ccagaaggggaggaggagccgagagagacggggcgccag

SEQ ID NO: 126506 - RNA, 60 nt, Homo sapiens
cacgcggccaggcggcgacacgccaaccccgccacaaaagaagacccaaagcaccaacaa

SEQ ID NO: 126507 - RNA, 76 nt, Homo sapiens
cgggagaaacagcaacgcacgacaggccgccgcgcgggggaagcgcccaggcgcagagcgcacgcagcagcacagg

SEQ ID NO: 126508 - RNA, 54 nt, Homo sapiens
gaacacgcaggagggaaaggcaagccaaccggaaggagaggaaaaaggagacac

SEQ ID NO: 126509 - RNA, 77 nt, Homo sapiens
aggaaggaaaggacggaagcaccaaaaacagccccagcacagaggaaagagaaagagccagcaagaggaagcggccg

SEQ ID NO: 126510 - RNA, 53 nt, Homo sapiens
cagcaggccaaggcagaaaagcagaaaaccaaagcgccaaagggcacaccaca

SEQ ID NO: 126511 - RNA, 61 nt, Homo sapiens
ccccagagcggaacacaggacgccagcgagcagcaccaaccaggagccgaagccgaaacga

SEQ ID NO: 126512 - RNA, 59 nt, Homo sapiens
ccagcaagccccagaacaaccacccaaaccgccagggaacaaacagcagccagacgaca

SEQ ID NO: 126513 - RNA, 72 nt, Homo sapiens
ggaggaaagggagagacaagagaggagacccaacagacgccaagagccggccgaggagggccaaccgcaaga

SEQ ID NO: 126514 - RNA, 71 nt, Homo sapiens
gaggagaaccgaaaaaagcagagaaaaggagccaggacgacacagggagaacccagacgacccggagacgc

SEQ ID NO: 126515 - RNA, 65 nt, Homo sapiens
cggggagggcaaagacaacacaaccgagcggcggaaggagacgggcgaacacagggaagaaggac

SEQ ID NO: 126516 - RNA, 76 nt, Homo sapiens
aagggaaaagaaaaccccggagaaagcagaggagggcaccacgccaccgggaagccaccacaccggcccaagccga

SEQ ID NO: 126517 - RNA, 73 nt, Homo sapiens
cagccccacacgcagagaacacggaccagaaaccccaggcgacgggccaaggcgggacccccccaggccacac

SEQ ID NO: 126518 - RNA, 71 nt, Homo sapiens
gaaggaggcgccgacaccaacacgaaccacaaaagaagcacagacgagaaacaaggcaagaaggcagccga

SEQ ID NO: 126519 - RNA, 86 nt, Homo sapiens
acccggagcaccgcggcagcggaggggcggagacaggcgaggaggaggcgcaccacggagaaaccaaccaaagccgcccaggaagc

SEQ ID NO: 126520 - RNA, 99 nt, Homo sapiens
aaccgcgcggagcagcgcccggggacacccggaggacgagcggaggagaagggaaagggaaggacccgaggggccggaccggggcccgagaaaccggcg

SEQ ID NO: 126521 - RNA, 67 nt, Homo sapiens
cccgcgccccgccgcgagccgcgcggagccgcgcagccccggagcacggaaaagggaccagccaccg

SEQ ID NO: 126522 - RNA, 73 nt, Homo sapiens
aagagccagagcgggaggacgacgagagaggagaccaggcccaggaaggaacgaggaagggccagaacggaga

SEQ ID NO: 126523 - RNA, 71 nt, Homo sapiens
aggaaaaccaaacggcaaccaaggaacccggcaccagccgggcaaaaacccaaaccaacagaaccgcaccg

SEQ ID NO: 126524 - RNA, 75 nt, Homo sapiens
gagccgggaggaacggcccggaaacaggaggacccgggccccgaggaccgagacaggagcacccgggccgcacag

SEQ ID NO: 126525 - RNA, 69 nt, Homo sapiens
cgaacgggacgcaaaaaaacaagaagggaggagaaggacaacggcaagcggagaagagcaaggccgaac

SEQ ID NO: 126526 - RNA, 37 nt, Homo sapiens
cagaagaggagccaggaagaaaaggcaagacaacgca

SEQ ID NO: 126527 - RNA, 77 nt, Homo sapiens
gcggccccagccacaccaagcagcacccagcagcgaagagcaaaggacccaccacgagaaacaagaggcagcacagg

SEQ ID NO: 126528 - RNA, 57 nt, Homo sapiens
acaccaagcggaaaagagcagcgcccagccccagcagacagggccaccgcgcccagg

SEQ ID NO: 126529 - RNA, 43 nt, Homo sapiens
agaaaacgggcaaaggccagcaaagggggacacacaggaagac

SEQ ID NO: 126530 - RNA, 34 nt, Homo sapiens
agggcgggaaggcaggggcagcaagcgccagaac

SEQ ID NO: 126531 - RNA, 55 nt, Homo sapiens
ccccaaaggcggaaacagaacagagaacgaggaagaaaaggaaacccaaaaagac

SEQ ID NO: 126532 - RNA, 66 nt, Homo sapiens
acacaggcagccacagggagagagcggcaaacaagaggcccagggcgcacggaagggacgaaaggg

SEQ ID NO: 126533 - RNA, 75 nt, Homo sapiens
acggcccccgacgcagcgcaccagacaggaagagggcccaaccaagacgcccaaagccccgacagcagagaggga

SEQ ID NO: 126534 - RNA, 96 nt, Homo sapiens
ccaggcggcacccacgaaacaacagagaccaccagggggaagcgagaacaagccaaagacagaccgccagcgcagcccacaaaggacaacgaacgg

SEQ ID NO: 126535 - RNA, 64 nt, Homo sapiens
gcacagacccaacaggagacaaaaacaggaagagaaggagggagccccaaggcaggaaccagag

SEQ ID NO: 126536 - RNA, 72 nt, Homo sapiens
gacggggagggcagaccaggcgaacccagcgggcagaccagaaaacagaaccaaagcgacggacggggcaga

SEQ ID NO: 126537 - RNA, 80 nt, Homo sapiens
gccggccgccgcaggagggcagagcggcgggaaaccaccaacaacacccccaaaccaaaacagccggaagcgggcagccc

SEQ ID NO: 126538 - RNA, 85 nt, Homo sapiens
cagccgccgccgccccagccgcccgcggccgggagcggagccccgggcaggaggcaaagggaccccaagaaaccaaagggcaaga

SEQ ID NO: 126539 - RNA, 77 nt, Homo sapiens
cagacccagcccgagagagccaccagacggagcacggcgcaggggcaggaggagcgccagcagggagaccagaggcc

SEQ ID NO: 126540 - RNA, 76 nt, Homo sapiens
gaacacagaggaaaccgcaccgcccggagcggcagcgaaaggagcagaggcgcggcacagaggccaagaggcgcga

SEQ ID NO: 126541 - RNA, 36 nt, Homo sapiens
ccgcccccagcccggacccccgcagagagagcagcg

SEQ ID NO: 126542 - RNA, 75 nt, Homo sapiens
gggccgagagaagaagagacaccaggggcgggagggaccaagaaaggcccagggaccaaagcccggacaaggccc

SEQ ID NO: 126543 - RNA, 78 nt, Homo sapiens
gggagccgccggagcgagaaggggccacagggggggaaggagacgcgcccccggcagcccggaagcgaccaccgccgg

SEQ ID NO: 126544 - RNA, 76 nt, Homo sapiens
agcaaaacaggacgacccgaggaacagagacagagcagaaccccaacagcggggaagagaagacaaaccacgcaca

SEQ ID NO: 126545 - RNA, 82 nt, Homo sapiens
caaggccgcccgggaacgcgacgcgagagaaggacccacggcgcgcgaagacaacaggcacaaagagagaaggaacacccac

SEQ ID NO: 126546 - RNA, 73 nt, Homo sapiens
ccacgcagggaagcccaggggcagagacagagccgcgaagacgagaaacacgagccccgaaaccacaagagga

SEQ ID NO: 126547 - RNA, 57 nt, Homo sapiens
caggccggccagcacccaccgagaaggccagcaggggacccaagggagagagggaac

SEQ ID NO: 126548 - RNA, 72 nt, Homo sapiens
aggggccagagggcagccaggcaggccggaagcgggccggaggacgccggacaccagcacgggaggggccca

SEQ ID NO: 126549 - RNA, 82 nt, Homo sapiens
gcaagaccgcgcacacccggggcacaaccgccaccgcgagcggagaaggaggccgcgcgggccaggaccggcagacagagag

SEQ ID NO: 126550 - RNA, 75 nt, Homo sapiens
gaggcgaaacacaaagggccacaacagcagccagaccccgagccggacaagaccgagacaccggggagagaagaa

SEQ ID NO: 126551 - RNA, 79 nt, Homo sapiens
agaagacccgcccaccgaagcaacacaaggagggaaagaaaggcaaagcgagcaagagggagaccaaccaggcgggaaa

SEQ ID NO: 126552 - RNA, 60 nt, Homo sapiens
gaggagcgggacaccccggaagcgggaaaggcgcacgcagcaaagccacgaggccaacac

SEQ ID NO: 126553 - RNA, 56 nt, Homo sapiens
gcacccccacccccacaacaggaccgaacgagcaccgggggagcaaaagacacagc

SEQ ID NO: 126554 - RNA, 77 nt, Homo sapiens
gagccgcccagacaggaagaggcgagcaggggccaccacgagcagcggcagccccacaccccgacgcgcagcaccgg

SEQ ID NO: 126555 - RNA, 75 nt, Homo sapiens
gccaagggcacagagggagagggacacgacacagggacgggccaagaacccaggaggagggaaagccggacccgg

SEQ ID NO: 126556 - RNA, 73 nt, Homo sapiens
agagggaaacagaaaaaccagaagggaacgaccgcaagcggacaaaccccaggcaaaacaaggcaaaaaaagg

SEQ ID NO: 126557 - RNA, 102 nt, Homo sapiens
aggccccagggaagcgcagaaagcaggcgaacccgcggcgcaaaacgcacggaccgccggcaccggggagacaacgggcaggcagcgagaccgcacgggaaa

SEQ ID NO: 126558 - RNA, 61 nt, Homo sapiens
cagagacacaaaaccggacccggaacaggccaaaagcaaggcgggacgaccccacaacccg

SEQ ID NO: 126559 - RNA, 83 nt, Homo sapiens
aggccaagcgcagccccaccagggccagggccacgagcaccggggccgggcaggggcggagcccggggaccgaccggcggccg

SEQ ID NO: 126560 - RNA, 67 nt, Homo sapiens
ccgccaaggacgaaagaagacagagaagcaaagaagcaggcaccagaagaaagaagagaccaagcgc

SEQ ID NO: 126561 - RNA, 92 nt, Homo sapiens
gccggcggccgccccggccgacagcgcccgggaacacggccgcaggccgggggcaaggggcggccgggcgcggccgcgggaggccaccgccc

SEQ ID NO: 126562 - RNA, 59 nt, Homo sapiens
aagcggagagccaggacacaacaccgcggagcccgcaggcgagaaccccccgccgcgga

SEQ ID NO: 126563 - RNA, 79 nt, Homo sapiens
ggaagcgaccgcaggcgggcccccgaccgggccaccaggagggcggaggaagccaaaaagcagaaagaaagcacaggaa

SEQ ID NO: 126564 - RNA, 81 nt, Homo sapiens
ccggggcccagcagcaaccagccacccgcccccaagaaggaagcacagggccggccggaacaggcgaggcccgggcagcgg

SEQ ID NO: 126565 - RNA, 73 nt, Homo sapiens
ggacgaaacagcacagcgggcagcagaagaggcgcgcagagacgaaccgggagaagggagaggaacacagaaa

SEQ ID NO: 126566 - RNA, 79 nt, Homo sapiens
gcacccccagagaaagccaagggagacaacggccgagccaccgcaaagaagaaaacaccggagcccaagacaccaaaac

SEQ ID NO: 126567 - RNA, 67 nt, Homo sapiens
acagaaccaccccaacaggaggcaggggaagcacaaaagcgcacccgcgccagcgaggaccggaacg

SEQ ID NO: 126568 - RNA, 81 nt, Homo sapiens
ccgccaaacagcccagccgcgccagcgcccggcgccgcgcgccacccccgaaccagcaccagacagcgaaaaagaggaccc

SEQ ID NO: 126569 - RNA, 84 nt, Homo sapiens
ccaccgccaggaccccccaggagagcgccccagggcaagccccgcccggccaacaaaacggcgcggcaggcaccgcccagccca

SEQ ID NO: 126570 - RNA, 78 nt, Homo sapiens
gcgcaaaagcgcacccagcaagcaggcaggcgagaggccagacgaaggcgcggacggggaaagccgcgccgagacaag

SEQ ID NO: 126571 - RNA, 81 nt, Homo sapiens
gaggcaagaggccccggggcgcccccaccaacgaaggaaaggccaggcggccaaccgacaggcagcccgaacacaggagaa

SEQ ID NO: 126572 - RNA, 78 nt, Homo sapiens
ccaaagcagccagggagacccaaaccgaaggcagcacggcacacgccaagggaaggaacaaagcagagaaaccaaaag

SEQ ID NO: 126573 - RNA, 78 nt, Homo sapiens
gcggcagcgcacacggcccaaacacccacaccggcaagagggcccaggacagaaggcgggcaaggagcgccccccgag

SEQ ID NO: 126574 - RNA, 90 nt, Homo sapiens
gcccccgccacgcccaaacgcgaagcagccccgcgaggaccacccggacccgacggagaccgacaggcagccgagagagacgagaccaga

SEQ ID NO: 126575 - RNA, 91 nt, Homo sapiens
aacaaacccaaggccacaacgccgcaacaaaagaaacccgggccgcggaaggcccgaaggacacaggaaagggaagcgcccaacaccacaa

SEQ ID NO: 126576 - RNA, 68 nt, Homo sapiens
ccgagagcagcgcgccggccagaagaagagccaaagcccaggacggggaaacagcagagagcagccag

SEQ ID NO: 126577 - RNA, 86 nt, Homo sapiens
acagcaaggccccggcgagagggcacgccggggggccggccccacaccaagagccagggccaccgagacaccggagaaagaaggca

SEQ ID NO: 126578 - RNA, 77 nt, Homo sapiens
ggaggagccagaggcaacaaggcggacaagagaagccgccaggccggacacacagcagcggacgacgggagcagacg

SEQ ID NO: 126579 - RNA, 59 nt, Homo sapiens
gccgcccacgcgagcggcccgagacccgagagaagggcgcccaaggagacaccagccgc

SEQ ID NO: 126580 - RNA, 52 nt, Homo sapiens
gggcgccgcccaaggaacccgacaggcccacagaagccggcaaaccccgacg

SEQ ID NO: 126581 - RNA, 73 nt, Homo sapiens
aaaaccaccgccggaaaccacggggcggagaccaccccaacacgcaacgggacccacagcgccagcagaaccc

SEQ ID NO: 126582 - RNA, 73 nt, Homo sapiens
ccggaaagaggcccggacagagaaggaggggcagcacacaaacagcgaacgcagacgaaacggagccaaacgg

SEQ ID NO: 126583 - RNA, 75 nt, Homo sapiens
ggccaccgccggcggccgagggcagaaaacccagccccgcaaccaaacaagacccggccagcagcacgggaacac

SEQ ID NO: 126584 - RNA, 96 nt, Homo sapiens
gaacaccaggacacccagagcgggaaagcacggcccggacgcacaccccaggagaagaacccagaaaagacagcaaaaaaccagccccacggaggc

SEQ ID NO: 126585 - RNA, 76 nt, Homo sapiens
cgcacccgggagccgggaccggccagagaacggagaacacgagacccgcacaaaaccccgccccccaggccacaca

SEQ ID NO: 126586 - RNA, 85 nt, Homo sapiens
cgggcccaccgagcccaggagaagccacccagcccgggaccaggagaccggcgcaaggcccgaggcagcagaacgggaggaagca

SEQ ID NO: 126587 - RNA, 38 nt, Homo sapiens
cccaaaggcgggaacggggaaaaagacacagcaaagcc

SEQ ID NO: 126588 - RNA, 56 nt, Homo sapiens
acagagagacaaccccaagaacaggcgaccccaaaagacaaaacagaggagaccag

SEQ ID NO: 126589 - RNA, 85 nt, Homo sapiens
ccgcgcgcgccggggagcggcgcccccgccgcgccgccgcgacccggcgccgccccgcaacgggaggcggaggcaaggcaagacc

SEQ ID NO: 126590 - RNA, 78 nt, Homo sapiens
aacccacaacacgaagaagccaccccagaacccaaaaacgaaaagccccaaaaagagcaagggaacaacggaccggcc

SEQ ID NO: 126591 - RNA, 67 nt, Homo sapiens
caagacgccccagccccccgggaacgcgcccagccgcagcccgcgcggacgacaaagccgaaaggcc

SEQ ID NO: 126592 - RNA, 75 nt, Homo sapiens
accccccgcgcccccgcccccgcaggagcccgccgggcaaggaaccggggccggaagagggacccgccggcacgc

SEQ ID NO: 126593 - RNA, 72 nt, Homo sapiens
ggggaacagaaaggaacggcaccgcggacagagcagacagaacagacaaggggacacgccgggacagaccgg

SEQ ID NO: 126594 - RNA, 81 nt, Homo sapiens
gagcgaggccacgccgcccaggagacccccgcgcaccaccaggcccaggggacacccagcaggccagggaagaggcagccc

SEQ ID NO: 126595 - RNA, 115 nt, Homo sapiens
ggcgacgcgccgaaaccgcggagcgagccccgaaagacggacaagccgacacggaccggacgaaacggaaaagaagaacgacacagcagcaaaggaggcggccaacaggcacggc

SEQ ID NO: 126596 - RNA, 66 nt, Homo sapiens
cacaggccccgagggcgggggacagagagacccggaccgcgaaggagcgcggagggcgagcccgaa

SEQ ID NO: 126597 - RNA, 80 nt, Homo sapiens
cgcgaccccgacgagcgcagcaaagagggccacggaaccaccaggaaaccgccaggcagggacagaccacgcagacacga

SEQ ID NO: 126598 - RNA, 79 nt, Homo sapiens
agcgcgagaagggcgacacacgaggcgcaccagagaccggacccgccaggaggaagagaaggccggccccccaccccgg

SEQ ID NO: 126599 - RNA, 52 nt, Homo sapiens
gaggccggggcacccacaagcgcacgaccaccaaggcgccacaggagccgca

SEQ ID NO: 126600 - RNA, 79 nt, Homo sapiens
ccacccacggccgggcagaccccaagagaaaggagccccccaagaaagcaaaccccacgagaacaaagcacggcagaaa

SEQ ID NO: 126601 - RNA, 76 nt, Homo sapiens
cggcgagccgaaaagcgagcgcgaggaaaaggcggcgggaggaagaaggaggccgaccaggccgacaaagcagacg

SEQ ID NO: 126602 - RNA, 82 nt, Homo sapiens
agagggggccgccgcggcagcaagaacagagagagaggggacagacgagagaacgagacaccgcaccacaaaccggaagaga

SEQ ID NO: 126603 - RNA, 82 nt, Homo sapiens
ccgcacccaccgccgccgccgccgccgccgcgccgcgccgcgccgcaccccgagcgaccgcaagaggagccaggagcacggg

SEQ ID NO: 126604 - RNA, 76 nt, Homo sapiens
gaaaagcacaagagaaagaaggaagcggcgccgaaaaaaaggggaggcaagacggccccaagaagaggggagagca

SEQ ID NO: 126605 - RNA, 77 nt, Homo sapiens
cgccggacggggagaggggagcgccggggcggcccaggcgagcggcccgggcaagcgaacacaaggaccaccaccgg

SEQ ID NO: 126606 - RNA, 72 nt, Homo sapiens
gcagagcacaaagcagaagcacaaagcccgaagcaggcccacggagccagaccacaaaagagcgaggaggga

SEQ ID NO: 126607 - RNA, 78 nt, Homo sapiens
gccgcgcacgagcgccaaccccgaaaggacaggaaaagccagagagcggcagagaagaagggaggcccaaagagcaaa

SEQ ID NO: 126608 - RNA, 73 nt, Homo sapiens
ccgcgcccacgggcagcgagaaaagaacgcccccagcggcccgaggcacgagcaacaacggagaaaagaagac

SEQ ID NO: 126609 - RNA, 34 nt, Homo sapiens
ccgacagccgcagaacgccacagcacaccagaga

SEQ ID NO: 126610 - RNA, 74 nt, Homo sapiens
gaagagaggggaccacgaggacagcggaagaaaaggagagcgcgcgccgcgcgcccgcacaaacgccggggaca

SEQ ID NO: 126611 - RNA, 81 nt, Homo sapiens
cggaccggaggggaccgacgccggcagaacacgcgcgggaccccgggcacggcgcgcgggaggacccaaggccagccagcc

SEQ ID NO: 126612 - RNA, 75 nt, Homo sapiens
accaccggaacggcgaagaggcaccaaaaagaaccgcagacaggcaaccacacaggaaccaacaaccaggaccca

SEQ ID NO: 126613 - RNA, 75 nt, Homo sapiens
ccccggcggcggccggcgggaccaaagggcaaccaaaaaccccccccaaaaaccagaaaacaaggagacaagaaa

SEQ ID NO: 126614 - RNA, 69 nt, Homo sapiens
aaagggaagacgagggcaggcgaagggaggaggcagcgaaaacacaccaacgcaggacgagaaaacaaa

SEQ ID NO: 126615 - RNA, 83 nt, Homo sapiens
aacacagccgacagacgccaccaaaagcaccagacaaggaggagcagcaccagcagcagcgcaggaaccagaaagaagaaccc

SEQ ID NO: 126616 - RNA, 68 nt, Homo sapiens
ggcgccgcgcccgccccggccacccggccagcgagcaacccccagacagagcagaaagcaggcagcgg

SEQ ID NO: 126617 - RNA, 75 nt, Homo sapiens
gcacccccgggaccaggggcccgacagcgcaacaggccagagaaggaaccaacggaaagaagaagccggcaccag

SEQ ID NO: 126618 - RNA, 77 nt, Homo sapiens
cagcccggccccggaagcacgcgccccgaccagacggacccccggggggacgagcgaggccagaagaaacgcaggcc

SEQ ID NO: 126619 - RNA, 61 nt, Homo sapiens
gacagggcgggaagcagcaagccaaaacggacaagccaaggcacgagccaaagaaacaaac

SEQ ID NO: 126620 - RNA, 75 nt, Homo sapiens
aaccagcagcgggaccaacaggaacggccgggcgagcggcacagccacgccaagagacgccaaggccccaaagga

SEQ ID NO: 126621 - RNA, 79 nt, Homo sapiens
acgcagcggagcgagggaccgacaagagaaaaccaggaagccagcagaccgcagaacggccccgggacccacccaccaa

SEQ ID NO: 126622 - RNA, 80 nt, Homo sapiens
gacaggaggaggccaggcgaagaggagccggaaaccaaggaggacagaaaaaggcgagcacaaagacaaagagagagcag

SEQ ID NO: 126623 - RNA, 60 nt, Homo sapiens
ccaacccgagcgcggagaacccgcccagaagccagaccccaggacacaggaacgccacaa

SEQ ID NO: 126624 - RNA, 88 nt, Homo sapiens
agggcccaagaaagcccagcaaggaaacaaagggaggcggaaccagcgagagccggccgaacgggggagcgggcaggcagaagaaggg

SEQ ID NO: 126625 - RNA, 84 nt, Homo sapiens
ccggacgcggggggcgggaagagccggggccgggcgacaggagcagaaagcccaagcgcaaaaaaaaggccccaacaaaacaca

SEQ ID NO: 126626 - RNA, 86 nt, Homo sapiens
gcgggcccgcgcccggccggacccgggcccgagagaaaccaggcggggaacaagccagcagcccaaggagaagccccacagagcaa

SEQ ID NO: 126627 - RNA, 76 nt, Homo sapiens
aagcaacagaccaaaaacaggcccggcgagccccgcagggagcgggaacacaagaaaaagaggccaaaagaagcaa

SEQ ID NO: 126628 - RNA, 69 nt, Homo sapiens
acaaaaggaggccaccagaggagcagaaagccacgcacaaccagcagcagaacaggaacacaaaaggac

SEQ ID NO: 126629 - RNA, 82 nt, Homo sapiens
agccaaagacagccgaaaacaaggcggggagacaaccccccccaagaagcgagggacaagcacgacccacccacacaaggag

SEQ ID NO: 126630 - RNA, 75 nt, Homo sapiens
ggcaccggcggccgcacccccagccccaccccagcagggcagcggaacgcgccgacgccgcaaccagcaccccga

SEQ ID NO: 126631 - RNA, 79 nt, Homo sapiens
cgaaaggacacgggagaaagggagccgagcgagaccacgcaccacgggcggggcgcagagcagagcacagagggccacc

SEQ ID NO: 126632 - RNA, 62 nt, Homo sapiens
gacacacccgagcgcgacgcagaacgggcccacgagaaggaccacagccaggacccgaaaag

SEQ ID NO: 126633 - RNA, 74 nt, Homo sapiens
aaacgacagcgagacgcgagcccacagggaacccagacggggaggggacacccgcggacgggaaggaagcaggg

SEQ ID NO: 126634 - RNA, 83 nt, Homo sapiens
ccccaaagccccaggagcagcagaggccacaacagagcagacgagcagaccgaagcgcaggcaaaacgaagaggcacgcacaa

SEQ ID NO: 126635 - RNA, 37 nt, Homo sapiens
cccgagagcggaaacagagaggcggggcaccggagcc

SEQ ID NO: 126636 - RNA, 75 nt, Homo sapiens
gcgccacggaggggcagccacccccggcggagaagacaacacaggaggcccgcccaaaccgagcccaccagggaa

SEQ ID NO: 126637 - RNA, 45 nt, Homo sapiens
gaaagaacagagaaggacaaaccggcgaccacacacggggacgac

SEQ ID NO: 126638 - RNA, 69 nt, Homo sapiens
gccggaccggcgcccggacaacccgcagaagaagacacaaccaaggcgcacccgggaccgggccgcgcc

SEQ ID NO: 126639 - RNA, 114 nt, Homo sapiens
caaccagacgccagcgggacgaggaccgagaccgcggccgggaccgagggcaaaagcagaccggaaaacccaccggcaagaccacacccgaggggagcccaggacaccacgaaa

SEQ ID NO: 126640 - RNA, 67 nt, Homo sapiens
acgggcaacgcggaggaaggaggagcggagcggccaaaacaacaggcccaggacgagaaaggaacaa

SEQ ID NO: 126641 - RNA, 76 nt, Homo sapiens
aggggacaaaaccagagggagacaaaaggaccggacccagaaaccggacccaaagccagccagccggaccacggag

SEQ ID NO: 126642 - RNA, 76 nt, Homo sapiens
gagaagaagggaaaaacggagcaacgcaaggcaggcaacaagccaggcaaacgcagaaccaaccagcggagaggag

SEQ ID NO: 126643 - RNA, 57 nt, Homo sapiens
ggccgcaaagacgccgcacccaaggccaaacagcagagggcccccaaggaagacagc

SEQ ID NO: 126644 - RNA, 76 nt, Homo sapiens
caagccgggaaagggacaagaagggcaaagccgaaccaccccggccagaccggcaaaaagaagaaacacagacaag

SEQ ID NO: 126645 - RNA, 78 nt, Homo sapiens
cggggagaacgcggacagcccaagagagaggggggggaaaagagcccagccaaccacgaggaaggaccaggaaggaaa

SEQ ID NO: 126646 - RNA, 84 nt, Homo sapiens
gcccccaagccccccggggggcaccgggccccccacaaggcgagcccaaggccccagccccagggggcgagcacggagggagcg

SEQ ID NO: 126647 - RNA, 80 nt, Homo sapiens
gccacacagggcagacagagaagaaggcgcgcaccggaaaagagccccggaaggggcgcaccacgccaaaccccagagcc

SEQ ID NO: 126648 - RNA, 67 nt, Homo sapiens
accgaaacaggccggggcacagcacagcgccggcgcaagccagaacggaagaccaaccagaagacac

SEQ ID NO: 126649 - RNA, 72 nt, Homo sapiens
gaaaaaaaggggcaccaggcgccacaaccaggcagaaccacagggagagaaaaaacaaggacacagcggaaa

SEQ ID NO: 126650 - RNA, 74 nt, Homo sapiens
gcgcgggaagcagcaccaagcacggccaacgccggcacagggggaaaaccagaaccgaaaacccagaccaacca

SEQ ID NO: 126651 - RNA, 85 nt, Homo sapiens
gccgcgcccgcggaaccagaccagggggccaacggccagaggcggagacagacggccccaggaaggccccgcagcgccggaggaa

SEQ ID NO: 126652 - RNA, 73 nt, Homo sapiens
cccccccccaccccccgcccaacccccaacgaggaaggaaggagcagggcaaccggggaaggggaagcaggcc

SEQ ID NO: 126653 - RNA, 80 nt, Homo sapiens
gcggccagaccgaacccagaaacagagggaggaagacagccagcagcaagcacgaggagcggcaggacgagcaggcacac

SEQ ID NO: 126654 - RNA, 77 nt, Homo sapiens
ccaggaaccccggaagccagaaagggcggagaacggaaaagcaccaggaagcagagaggaccgcagaagggaaggag

SEQ ID NO: 126655 - RNA, 78 nt, Homo sapiens
gcagcagaagagccaaggaaaaacagcaagaacccaaaaggaccgacagaacaagcgcaaaaaaagaagagcagaaac

SEQ ID NO: 126656 - RNA, 71 nt, Homo sapiens
aggagcgggaaacgggagggaaccagcaacaagccgggaaagacaaggagccgggccgagaaaccgaacca

SEQ ID NO: 126657 - RNA, 67 nt, Homo sapiens
aggccggaaagaggggaggggcacgcaacaacacaacggcaagcggagaagagcaaggccgaaccga

SEQ ID NO: 126658 - RNA, 38 nt, Homo sapiens
gcgcgacgcagcgggccggagccgggccccaggacccc

SEQ ID NO: 126659 - RNA, 83 nt, Homo sapiens
agcgagccggagcagccagccggaccgaccaaggcaccgggccccgcccaggccccggacaaaggcccagggggcccaccaca

SEQ ID NO: 126660 - RNA, 72 nt, Homo sapiens
gcccaggagcgccacgcgcggaaggcagcgcccagcagcgcagaccccgcgagcaaaggaggaggaccacac

SEQ ID NO: 126661 - RNA, 69 nt, Homo sapiens
ggaccacaagcagaggcgaagggcacgcgccagaaaagccggcagagaagcgaaccgcggaaggaggaa

SEQ ID NO: 126662 - RNA, 56 nt, Homo sapiens
cagcaccagccagacaaaagagaacagaaggagcggcggacacacagacccccacc

SEQ ID NO: 126663 - RNA, 60 nt, Homo sapiens
aggaacaacaaacaacgggaagaaaagaggggaaaaggaaaaggaggaaggaacacacca

SEQ ID NO: 126664 - RNA, 58 nt, Homo sapiens
gcaaagacgaacaggaaagaaagcgaacaggagacagcggagaaagagcccgggaagc

SEQ ID NO: 126665 - RNA, 69 nt, Homo sapiens
aaacaaggagccagggaaaaccaacccagaccgcccacccagaaagcaggcaggaggcagacgaaggag

SEQ ID NO: 126666 - RNA, 80 nt, Homo sapiens
gacgaccaacaggcagcagcgggccccgccaccggcacaccgaagggcaggagacgcaaaacacgggaggaaggaggcag

SEQ ID NO: 126667 - RNA, 54 nt, Homo sapiens
ggagcgggagaaaagaaccgacccacaccaagagaggaacaccgggccaggcgg

SEQ ID NO: 126668 - RNA, 79 nt, Homo sapiens
caagggccccaagagggcacacagcacacaccgacaggccagagagaaggcgcgagggcgccacaccaaagcacgcagc

SEQ ID NO: 126669 - RNA, 65 nt, Homo sapiens
ggaaacccagcagcccgacagcaggacagagggccgcccagcagggcacaaggaggagaaggggc

SEQ ID NO: 126670 - RNA, 81 nt, Homo sapiens
cagaaccacaggaaaccaagaaaacgcagcccagcgaaagcaagaaaccaaagggcccaccagcccagccacaggcaacga

SEQ ID NO: 126671 - RNA, 61 nt, Homo sapiens
gcccggcgggaccagcaccagcaccggcccaggggccaaccaaaggcagacccagaagagc

SEQ ID NO: 126672 - RNA, 53 nt, Homo sapiens
aaagggccaaagaagggagagagggccgaccgaagacagagccgccgcccaag

SEQ ID NO: 126673 - RNA, 41 nt, Homo sapiens
gcacaaggccaggccccaggaagacaccacaggccccacca

SEQ ID NO: 126674 - RNA, 53 nt, Homo sapiens
caagaaccagcacaccggggagagagaccaacaagcaaagaaggccgagggac

SEQ ID NO: 126675 - RNA, 57 nt, Homo sapiens
ccaccggagaaggggaggagccaagcgggcggggggagacggccagcaccgccacac

SEQ ID NO: 126676 - RNA, 55 nt, Homo sapiens
ggagcacagaagagcgaggaggagaaggaagccaacaccggagccagaaagccga

SEQ ID NO: 126677 - RNA, 80 nt, Homo sapiens
acagacagacagcggcaagaggcagccgggggccacagcgccacccccaaaacacaagaggacggagaagcgacgaaaga

SEQ ID NO: 126678 - RNA, 72 nt, Homo sapiens
gggaggaggggcgcccgagaaggggacggcgggcgagggaggggaccgccgcgaaagcagggcgcaggcgaa

SEQ ID NO: 126679 - RNA, 78 nt, Homo sapiens
gccaacagaacgaccagagaagcagaacgcaggaggagaacgacagacaggaacaaaagagaaaggcaagaagagaaa

SEQ ID NO: 126680 - RNA, 66 nt, Homo sapiens
ggaacaccccacgccaaggaccgacccaaacggaccgaaacgaggaccaccaagaaaagaaagaac

SEQ ID NO: 126681 - RNA, 70 nt, Homo sapiens
agagaagaagaggcagcaccaccgaacaccaacaaggagaaagaacgagcacggacaggaagaaagacag

SEQ ID NO: 126682 - RNA, 77 nt, Homo sapiens
ggccggaggcccgccgaggggcagaccaccgagagggagcgccggaccagcgcgagcgccacggcacggccccaccc

SEQ ID NO: 126683 - RNA, 75 nt, Homo sapiens
cacaaaagcacacaaagaccccccccacaggggagacagaggcaggcgacaggcggaacaaacgaagcgcgaccc

SEQ ID NO: 126684 - RNA, 73 nt, Homo sapiens
aacaccacagacaagcaggagccggggaaacgcaggaggggggcgcggcagggacagccgggccagcgggggc

SEQ ID NO: 126685 - RNA, 34 nt, Homo sapiens
aggaccagaaggaaagaagaaaagaagagcccca

SEQ ID NO: 126686 - RNA, 57 nt, Homo sapiens
aaggcgcgagacccagaggccgcgacaagcagaccggaagaccgacggaagaccaca

SEQ ID NO: 126687 - RNA, 52 nt, Homo sapiens
agcaggggccgcgggaaggccacgaacgacgcacggaggccacaacaccaca

SEQ ID NO: 126688 - RNA, 84 nt, Homo sapiens
agaaggggaggggcacgcggcccgccggacccgaagacgagggccggaggaaacagagacacgggacaccggagaggcacaaca

SEQ ID NO: 126689 - RNA, 73 nt, Homo sapiens
agcacgaccagcaggaacggcaccaaccagcggacacacggaaaagggacgggaaaagccgagaaagagaaga

SEQ ID NO: 126690 - RNA, 84 nt, Homo sapiens
cgggacgcaccgcaccgagggcgagcccaggcccgacaacaagccaaaacgcaccaaaggcagaggacagcaaagcagaaccac

SEQ ID NO: 126691 - RNA, 74 nt, Homo sapiens
gacccccgaacccccagcccaaacccggaaacccagcggcccagccggcggggagcagggaggagcccggcccg

SEQ ID NO: 126692 - RNA, 78 nt, Homo sapiens
gaccggccgcgacagcgaacagcgcggccgcaggagccagaggagccccaccgcccagcggcccggaggcgggcacca

SEQ ID NO: 126693 - RNA, 80 nt, Homo sapiens
ggagaggcaggacacgcgagcagaccgcgaccccggaggccggcggacaggccgcacaaaaagcgagggagaccacaaaa

SEQ ID NO: 126694 - RNA, 72 nt, Homo sapiens
ccgcggcgcccaggagcacccagggaagcacggcccaacgccggacagggccagacagccaccgaaggggcc

SEQ ID NO: 126695 - RNA, 63 nt, Homo sapiens
gaagagcagggaaacaccacgaagcagccaagacaggagaacccagcgacgacagaagcagcc

SEQ ID NO: 126696 - RNA, 56 nt, Homo sapiens
caagacaggccggaaagcaggagagccgccgccccagccaccgggccgccagcgag

SEQ ID NO: 126697 - RNA, 73 nt, Homo sapiens
aacagaagggggggaccacacagaacagagccgaccagaaggggcgccccaggcgagcccacaagccgcacca

SEQ ID NO: 126698 - RNA, 58 nt, Homo sapiens
caggccggggggaggcaccgcgccgcacgcgcaggcaccggcccgaccagccacgaca

SEQ ID NO: 126699 - RNA, 76 nt, Homo sapiens
caaagaagagagcaggaagaaggaagaaaaggaccgcaacaagccgagaccaccaggagcagagcggaggcaacca

SEQ ID NO: 126700 - RNA, 82 nt, Homo sapiens
ggcgcgcggaggcgggagcgcggaaacggaaccgggaggcgacgcacacgagcggaggcgaagagagaagaagaaggaggcc

SEQ ID NO: 126701 - RNA, 58 nt, Homo sapiens
acaagggcagcggcggacgcagggcggagaacggaaaagcaccaggaagcagagagga

SEQ ID NO: 126702 - RNA, 77 nt, Homo sapiens
gaggagcaggaaaaacagagaaaaccagaaggcaccgacaggaaaggaaaaggagaaccaggcacccgggggcaagg

SEQ ID NO: 126703 - RNA, 76 nt, Homo sapiens
ggagaggacccggcagacggcaaaaggcggagcccaaacccagccgagcgggcccaacaagagggggagcagaagg

SEQ ID NO: 126704 - RNA, 91 nt, Homo sapiens
cgggacgcgcacccccgcgccgcacggggacgagaagacgaccccgacgcaggccaggagccgcggacagaagccgagcacggccgagaca

SEQ ID NO: 126705 - RNA, 58 nt, Homo sapiens
ggcgcaagggccaccacaccccgagaggcccggggaaggcccggccaacgcaacaggg

SEQ ID NO: 126706 - RNA, 71 nt, Homo sapiens
gaggacggccaggagcagacaagcgagacccgggggcaacggaccaggaggagaagcaaccagagaggaag

SEQ ID NO: 126707 - RNA, 79 nt, Homo sapiens
acagcaacaagacacggagcaaggaggaaaacacacggaacccagccggagagccagagccccagcagcaagagcaacg

SEQ ID NO: 126708 - RNA, 74 nt, Homo sapiens
aagggaagcgcacgagaacaggaccaccaggaaacgcgcaagacgcccaagagaagaggaacacagcacccacc

SEQ ID NO: 126709 - RNA, 82 nt, Homo sapiens
cagccaggccagcagacggcaaacggagaaagcagccagagacgggcgcccgggagaggcaaggaaagcaaaaggcacagag

SEQ ID NO: 126710 - RNA, 76 nt, Homo sapiens
gcaccggaagcaaaaccgagacccgaagaaaagacgaggccgagacgcaccagagccggaccggggacgcgaagca

SEQ ID NO: 126711 - RNA, 68 nt, Homo sapiens
cggaacaagagaaaggcgagcaacacagaggaagaacaccaaccgaagaccgagcgaacagcgcagca

SEQ ID NO: 126712 - RNA, 60 nt, Homo sapiens
cagaccgcaggccacaccagaaaaagcggggaaggggggcaaaaaaaagaagcaagcgaa

SEQ ID NO: 126713 - RNA, 73 nt, Homo sapiens
cacgacaaaagaagcagccaggaggcgaaacgagaagaggaaaaccccaagacaccaagaaggggcgcaagga

SEQ ID NO: 126714 - RNA, 76 nt, Homo sapiens
cagaggaccagcaacaaacccacggacacagaccaaaaacaggaagagaagcacagccaggagaaaggacgcaaca

SEQ ID NO: 126715 - RNA, 74 nt, Homo sapiens
cgacccacaggagcgcccgcggaggagcgcccggaaacacaacgggagaaccacccccaccagccacgaaagga

SEQ ID NO: 126716 - RNA, 74 nt, Homo sapiens
ggagaaaaggagagaaacacggagacagcaccaaacccacagaggcacgaggaaaacccgaacaagagacccgg

SEQ ID NO: 126717 - RNA, 79 nt, Homo sapiens
gaccagacgggaacccggccccccaccccaccaagggcgagcggcagagcgggacaagacaccccggacacgggaggcg

SEQ ID NO: 126718 - RNA, 76 nt, Homo sapiens
aacacgcccccgccagggaaaggccacggaagagcgcggcgagaagaagccaagacgggcgcgcaacaaaccgagg

SEQ ID NO: 126719 - RNA, 76 nt, Homo sapiens
ggcaaaccagaaagacggagcacagaccaggaggaaaaagcagaaaaggaaagagcaagcagcaagaccagaacag

SEQ ID NO: 126720 - RNA, 77 nt, Homo sapiens
gcggacaaaagggcagcaacgcccacggaccgagaaaaggggaaaagcaaggagaacaagcagacccaacagaagcc

SEQ ID NO: 126721 - RNA, 78 nt, Homo sapiens
gaaccggggcgcaaggccagccccagggaggcacagaaacgggcgaaaggcagaaaaccacgcggaaacaaaacagga

SEQ ID NO: 126722 - RNA, 77 nt, Homo sapiens
aacaaagcgaggccagagaaagagaagcggcacccccaggaagcgcggcccccgaggagggaacaagccagaccagg

SEQ ID NO: 126723 - RNA, 56 nt, Homo sapiens
cagcggaggggcaggaggcgggagaaggggacgcacagaaaagacaaaacaaagac

SEQ ID NO: 126724 - RNA, 59 nt, Homo sapiens
ggcccgccggcggccgcggcccgcccagcacggacagccgaaggacagcagcggacggc

SEQ ID NO: 126725 - RNA, 81 nt, Homo sapiens
gggccaggcgaagcacgagcagaccggcccgaccgcccacagacccaaacaaagaccaaaagaaggggagcccagaagcga

SEQ ID NO: 126726 - RNA, 71 nt, Homo sapiens
gagagcagggacgagggcccaggaacagcagaccgagaaggagcagaaggggccagacggcccagagaagc

SEQ ID NO: 126727 - RNA, 52 nt, Homo sapiens
caaggaggccccagcggaccgaacagagcaagcagggaggggcccaggggga

SEQ ID NO: 126728 - RNA, 62 nt, Homo sapiens
gcaagcgaggaaaaacaccaacaggcacagaggagaacgcgacacacaccaagcgaagcccg

SEQ ID NO: 126729 - RNA, 41 nt, Homo sapiens
caggcgcgaaacggaaaaagggaagcagagagcaaccaagc

SEQ ID NO: 126730 - RNA, 112 nt, Homo sapiens
ggggaaaaaagcgagaagcccccagggggagcgcaaaccaccacggagccagaaacagacccggacagaaccggcagccgagcagcagccgccccgaggcgaagccaggggg

SEQ ID NO: 126731 - RNA, 73 nt, Homo sapiens
ccacccaaagccccaaggagaagaacggagacgggaaacccagacgacaaggaaggccaagggacccacgacc

SEQ ID NO: 126732 - RNA, 94 nt, Homo sapiens
ccacgccagggccccagacacggcgacggaacagccaaaccgcacaaacacgcagaggcaagaagagaggcaggagggccgggacgggagaggg

SEQ ID NO: 126733 - RNA, 76 nt, Homo sapiens
gcgagaaaggccaaaagggagaaccagcgaacgagccggacaaggcacgaggcgcggcgaccaccacagcagagcc

SEQ ID NO: 126734 - RNA, 76 nt, Homo sapiens
gggcgggggcgccagcccaccaagaagggccgagcacagcaagcaaagggagaacccagcacaaggcacacaggag

SEQ ID NO: 126735 - RNA, 59 nt, Homo sapiens
gcagaagcagcgccgacgagcccccggaaccacacccagcaccgaaacagaggggccag

SEQ ID NO: 126736 - RNA, 71 nt, Homo sapiens
ccccaaagagacggggacccccgaccggccagagaccagcgcaaaacaggaggcaaaaccaagagggaaga

SEQ ID NO: 126737 - RNA, 77 nt, Homo sapiens
ggggccagggaacagacaaacagaaagccagcagagacgaccagaaaaccccaaagagagggaccaagggaaagaaa

SEQ ID NO: 126738 - RNA, 71 nt, Homo sapiens
cagacaaaaacccaaagcaaggcgcgaacagggcccacccgccacgacacaggggaagaagaccaccgcac

SEQ ID NO: 126739 - RNA, 75 nt, Homo sapiens
cacccgacggggccggcccgccgcccaggcaacagcccccaacaacgaccccgcagacagcaccagccagccgga

SEQ ID NO: 126740 - RNA, 76 nt, Homo sapiens
agagcgcggccaagaacagaggaaggggccggcgccgaccagcaggcaccgaagaggaaaggaagcagggggaagc

SEQ ID NO: 126741 - RNA, 65 nt, Homo sapiens
acaagggagcaacaaaaaaacggaacgaggagggaacagaagaggcacgcacgccccaaaccagg

SEQ ID NO: 126742 - RNA, 82 nt, Homo sapiens
gcgggaagaggaagggcacgagccgccgacggagcagcacagcagagcccgagaaggggaaacgaggcccaaggaaagagac

SEQ ID NO: 126743 - RNA, 73 nt, Homo sapiens
acggacaacagaacccaaaagcgagcggaaggacccagagcgacccaaggcaaggagcgaagacaaggccaag

SEQ ID NO: 126744 - RNA, 88 nt, Homo sapiens
ccccgaggcagccccgcggaggagcagaagcccaggaggcggcccagggaccggaggacgcgcgccaacgggaccccggaggagcgcc

SEQ ID NO: 126745 - RNA, 82 nt, Homo sapiens
ggagcagaccaaaggcacaggaagaagcgcagggcggggaccaggggcgcacccaacaggaagcaggcgggcgacagggggc

SEQ ID NO: 126746 - RNA, 70 nt, Homo sapiens
aagggaaagaccccagaaaaccacacccgaagggcggagaacggaaaagcaccaggaagcagagaggacc

SEQ ID NO: 126747 - RNA, 81 nt, Homo sapiens
gcgcgaagacggaagacgcgcccgcgccggccgaagacgcagagaaacagcaccagacgaggccccacgaaggcgaaggga

SEQ ID NO: 126748 - RNA, 72 nt, Homo sapiens
aacggaagccgcaaagaccacgccccacaaccaggaaaggagaagccccggggaaagaggaggaaaacaaag

SEQ ID NO: 126749 - RNA, 76 nt, Homo sapiens
aacaaaagcccaagcaccggggaccgcaggggggagagagccagacaaagacgaacaggccgaagaagcaggaaag

SEQ ID NO: 126750 - RNA, 85 nt, Homo sapiens
aaaagagcccgcaagaagaacagagacagcagccaaacccccaggggcaacgaggaacaggccaagaaacaacacagccaaggcc

SEQ ID NO: 126751 - RNA, 67 nt, Homo sapiens
gcacaccgcggaggcgcccagccccagcccccaaagcgaccagcggaacgacacgcccgacccgcca

SEQ ID NO: 126752 - RNA, 67 nt, Homo sapiens
gggaaggcccgccccgaccccacaaagggacggaggccagaagcaaggaaagagcagggcagaaaca

SEQ ID NO: 126753 - RNA, 75 nt, Homo sapiens
gcacagagagcccccggggcaggcggagcccggcacgggcaaacagagcaggcagggaaccgccaaggcagagga

SEQ ID NO: 126754 - RNA, 82 nt, Homo sapiens
caacgccggccggagcagcagcccgagggggaaacaggaagagaacagaacggaagaaagcagaagaggacgaagcgcaacc

SEQ ID NO: 126755 - RNA, 78 nt, Homo sapiens
aaacgaaaaagaaccaaagaaaagaaagagaaaaagcagaaagagagaagagagacagaagagcacgcaaccgaacgc

SEQ ID NO: 126756 - RNA, 51 nt, Homo sapiens
gaacgggagaaagcacgggaggagagagagcggacggacaagagaaagaaa

SEQ ID NO: 126757 - RNA, 78 nt, Homo sapiens
ccgacggcgccaaacacaggacaagcagaccggaagaccgacggaagaccacaccccgagggagcccaggacaccacg

SEQ ID NO: 126758 - RNA, 106 nt, Homo sapiens
cggggcacaaagggccccacccaggaccagaagaaagacgagcacccaacgcccgagcagcgaagccagaaggaaaccggcacagcagaagcgggcagcccaccac

SEQ ID NO: 126759 - RNA, 91 nt, Homo sapiens
gacgccggaggagcggccgcgggaggagagccagggacgggcagcaagaagggccagagaggggaagaggaaaccggaacccaaagagaag

SEQ ID NO: 126760 - RNA, 77 nt, Homo sapiens
aggccagagcccaaaccccaggccaagcagccaccagcagcccccagagcgggaccacagacgcggagaaaccaccg

SEQ ID NO: 126761 - RNA, 70 nt, Homo sapiens
caacggggaaggcaggagcgagaggaggcaggaacaaagcccgcaaaaccgcaagggccgcagcgcggac

SEQ ID NO: 126762 - RNA, 38 nt, Homo sapiens
gaggggaccaagggagaggaagaagcagcagcaacagc

SEQ ID NO: 126763 - RNA, 57 nt, Homo sapiens
cacccccagcaccgcccagccgacgggggggaacaaagagcagaggccagcagccac

SEQ ID NO: 126764 - RNA, 89 nt, Homo sapiens
accgaacggccgcaccgcagacaagcacgaccgcgacaagcaaacgaaccaaccccagaggaccccaacaacaggagagagcaagcgag

SEQ ID NO: 126765 - RNA, 101 nt, Homo sapiens
cggagcgggcagccgccgccaccccgcggccgcacccccgccccaggcggccgggcaaagggcagcacccggaagaggacgaccaaggaccccagaacccc

SEQ ID NO: 126766 - RNA, 80 nt, Homo sapiens
cccccggggcaacggccgccaggagacgcgcacggaccggcccccccgagccacagaagggccaggagggggccacaccg

SEQ ID NO: 126767 - RNA, 62 nt, Homo sapiens
acgacccggagcacccgaccccgaggaccagccggccggagcgccgccggccaggccacgca

SEQ ID NO: 126768 - RNA, 81 nt, Homo sapiens
cccgggcgcccaagcgacagcgcagaggggcaggagccgggagccaccgcgaaggacagcccagagcaagcacacggaggc

SEQ ID NO: 126769 - RNA, 70 nt, Homo sapiens
acaccaagcggaaaagagcagcgcccagccccagcagagcaagagaggcagagaagagagacgcccaaga

SEQ ID NO: 126770 - RNA, 62 nt, Homo sapiens
caccggaagggagcccaaaggaacccagaaaaagggacagggcaggcgaaggaacgaggaaa

SEQ ID NO: 126771 - RNA, 63 nt, Homo sapiens
ccccaagccgccgcggacgcagaagcccggcaggcacccagagagcaagcacgcacaccggcc

SEQ ID NO: 126772 - RNA, 83 nt, Homo sapiens
ggacgcacggcccacccgacgggcccgcccaggggggcgaggaaccccacgcgagcagggcacaagacacagaggagaagaaa

SEQ ID NO: 126773 - RNA, 82 nt, Homo sapiens
cggaggggccggggccgaggcacccaccccggagcggagacacccaaccgaccgaaaccaaggcagccgccgcaaagggacg

SEQ ID NO: 126774 - RNA, 64 nt, Homo sapiens
agaggcccccgacggagacaaggacgcaaaccagccggcgggcgccacaacggacgacgaaaac

SEQ ID NO: 126775 - RNA, 75 nt, Homo sapiens
acaacaggcgccaaaaaggagcaagaggcagggggaaagcaaaaccagcaaacgagaagaaagaaggaaagagag

SEQ ID NO: 126776 - RNA, 78 nt, Homo sapiens
gagaccgcgggccagcagaaggccggcagcacaagcggaacacgccccgcaaaggggcaaagagaaccaggagacccc

SEQ ID NO: 126777 - RNA, 95 nt, Homo sapiens
ggaggcccggggggcccagccccgagggagccggggcgccgggcccgggccgggcagaaggccaagagaggccaacagaggaacaaggcccgcag

SEQ ID NO: 126778 - RNA, 61 nt, Homo sapiens
ccgacaccaggggacacccagaagcggcgccgccggcaggcagaagccaagaccggcccga

SEQ ID NO: 126779 - RNA, 79 nt, Homo sapiens
caccgaggaagagcgggagaaaggaacgagaaggaaaagcagaaaaaagaagaccgcgaaaaaaggccaaagaaaaaca

SEQ ID NO: 126780 - RNA, 54 nt, Homo sapiens
cgcccagccccaagagcgggacacaggcaagcaccggcagaccgagcaggagag

SEQ ID NO: 126781 - RNA, 76 nt, Homo sapiens
ggccgagaaacagagagaaaagagacggagcaagagaacgcaagagacgaacaccagaagcagccgaaacgaacca

SEQ ID NO: 126782 - RNA, 70 nt, Homo sapiens
gaagacgggagaggaagagggcacaggaaaaaagagcggaaaaaaaaggaggccccccgggcacagagga

SEQ ID NO: 126783 - RNA, 70 nt, Homo sapiens
gcccagcccacaagagcgggaacagggggagaacagaaaggaagcaccgagagaaaaaaaaaccagaggc

SEQ ID NO: 126784 - RNA, 73 nt, Homo sapiens
caacgagagaacagagcgggagccgcggaggcccacggcggcgaccagcaacacccacccaccggcacccgac

SEQ ID NO: 126785 - RNA, 81 nt, Homo sapiens
cccagcccggggacacaagcccccaaggacaccaaaaccaccaaccgagaaccccaggcgaacagcccaaaccacgaccca

SEQ ID NO: 126786 - RNA, 73 nt, Homo sapiens
agcagaccgagagacccagcgagcaggacagaagaagcaacccccccgaacaagacaggagccaaaaaaccca

SEQ ID NO: 126787 - RNA, 76 nt, Homo sapiens
ccagggccagcgcaacggacgagacccagcaagcccaccaggcaggcgcgcaccacccggagcaagggagcgccca

SEQ ID NO: 126788 - RNA, 44 nt, Homo sapiens
ggcaccaggggcgggcgggggaagccgcagccacagccgccgcg

SEQ ID NO: 126789 - RNA, 49 nt, Homo sapiens
ggagcgagggggcgaaggccgagcccacagagaggaagaacccacaaaa

SEQ ID NO: 126790 - RNA, 53 nt, Homo sapiens
gggaacccggcaccgccccaggcgaacaagaggcgccagcgggcgcgccggaa

SEQ ID NO: 126791 - RNA, 85 nt, Homo sapiens
aaagcacgaacaggaaacaggaagccgggagagaaacacagagccagaagagcaaagaggcggaaaaagagaacaacaaggaacg

SEQ ID NO: 126792 - RNA, 72 nt, Homo sapiens
ccaggcagaagcagaaacgggacacccaagccccagccggaaaccagagcccaccccgggccagacaccagc

SEQ ID NO: 126793 - RNA, 81 nt, Homo sapiens
cgcaagaggagccaggaggagagcccacagggcaaagagagcagacccgaggagcccgcagaaccaggaagacaacaggcc

SEQ ID NO: 126794 - RNA, 76 nt, Homo sapiens
aagccccgagcaccaaaacagacaaaacgaaggaggcccaaccacaaaaggagccgacggaacccagacggagaac

SEQ ID NO: 126795 - RNA, 77 nt, Homo sapiens
cagacccgcccccaggaggcaccagcccagccacagccagcccagacccagaggaagaaaaagcccgaagcccaaac

SEQ ID NO: 126796 - RNA, 69 nt, Homo sapiens
gacagcccaaacgccccacgaccagggaggagcgcggcaagacaaccacgaaaacgaagaggggagaag

SEQ ID NO: 126797 - RNA, 77 nt, Homo sapiens
ccggaacggagccgaggcgcaggggcgcggggggggccccagcccggccgaacgggcgcacgacacaaacacaaccg

SEQ ID NO: 126798 - RNA, 68 nt, Homo sapiens
aggcaggggggacccgcccaaccccgacaggcggggaaagagagcagcggggaccaagccagaacagg

SEQ ID NO: 126799 - RNA, 77 nt, Homo sapiens
aagaaccccgcacggacagcgacccgccccacccgcagcagaacaagcagccgaaccagggagcagcgacaggagcc

SEQ ID NO: 126800 - RNA, 54 nt, Homo sapiens
cagggcgcccccgaccaccgcccacgaagcccgacgaggcccgagagaagagca

SEQ ID NO: 126801 - RNA, 86 nt, Homo sapiens
gcggcggggcggaggggcagggcggaccagaagcgaggagaccggaaagaagggagaccgcggggaaaagagaaaggccaaccaaa

SEQ ID NO: 126802 - RNA, 56 nt, Homo sapiens
cagaccccacggcgacaccgccaagaagcccacacggcacgcgcgcgacacaagga

SEQ ID NO: 126803 - RNA, 56 nt, Homo sapiens
gggccacagggcaccagacagcgacgagaagcaacccccagccacaacgcgaaccg

SEQ ID NO: 126804 - RNA, 70 nt, Homo sapiens
cgggcgcgccgcaccccagcagcacccaagcagaaaccagcaaccaagaagcaaaggccaaggcgccaca

SEQ ID NO: 126805 - RNA, 81 nt, Homo sapiens
gccgagggcaaggcgccagaccaagcaacgccggagggcgacccaggacaggacgcgaaagcccagggccacaccagccaa

SEQ ID NO: 126806 - RNA, 55 nt, Homo sapiens
gcggagaacacaggaaccggccacgggacaaaaccgaccacaggcccgcaggaga

SEQ ID NO: 126807 - RNA, 80 nt, Homo sapiens
cacccggcccagcccgccacacacccgaccgcacgcccaggccccgggagcacacgaggcaccaggcgcagcaagaaggc

SEQ ID NO: 126808 - RNA, 74 nt, Homo sapiens
cgggccgcgccgacggccagcaaaccaagacacaaaagccaggaagacaagagcagaagaaacagaccgaaaga

SEQ ID NO: 126809 - RNA, 120 nt, Homo sapiens
ccgggccagccccccagcgacccacagcgacaaaggcagcagcaggacgcacgggaagaacagcacggcacggccagggccccgcagccgccgaacaacgcagcgaccgccagcgcgaaa

SEQ ID NO: 126810 - RNA, 75 nt, Homo sapiens
ggagaaggaccaagaaccagggaggcacagcgagaagggaaggaagcccaggaggacacgaagaaggaggagcag

SEQ ID NO: 126811 - RNA, 75 nt, Homo sapiens
cgcgggagcagccggcgccggcgcacggcccgagcgggggcagccgcagaggcgcggaagaggaggacgcagcag

SEQ ID NO: 126812 - RNA, 80 nt, Homo sapiens
aagaagagcgaccgggccaggagcgaccgagaaggggccggagcagcaccggaccgggcaaggagggacagcccgaccaa

SEQ ID NO: 126813 - RNA, 73 nt, Homo sapiens
gcagaagaaaccaagacggcagagagagagccaagagcaaggaagacagccagcagaagcgccacagagcccc

SEQ ID NO: 126814 - RNA, 79 nt, Homo sapiens
aggggaagcccaccccccaccggagccggaacacagcacacccagaagcccaaccaggcgaccggcccgaggaccgccg

SEQ ID NO: 126815 - RNA, 73 nt, Homo sapiens
acagcccacccgcacgcaccacaggaaccgacagcaaacccacaaaggacagaaagaaagaagcagccgaagg

SEQ ID NO: 126816 - RNA, 76 nt, Homo sapiens
agcgaccaccgaggagacaagcggagcgagcggggccacgcacaccgagggaaacggaaacagcgagcaaccacca

SEQ ID NO: 126817 - RNA, 79 nt, Homo sapiens
gaagggaaggccagcagcgcgcggagaagaacggggagccaggccagcccgcgggagcgccacacagagcggaagaacc

SEQ ID NO: 126818 - RNA, 45 nt, Homo sapiens
cacaaaaaggaaagagaggcgacccagccaaaagaggagcacagg

SEQ ID NO: 126819 - RNA, 70 nt, Homo sapiens
acaggcgggcacgcgcccaggcagaacaagaagggcaaccaggggggaaggagggagcggagaacgcgaa

SEQ ID NO: 126820 - RNA, 74 nt, Homo sapiens
cccgccagcgccggcgcgggggaggggagcccgcgcccgccgcgggagagagccccaacggggcggcagaagga

SEQ ID NO: 126821 - RNA, 79 nt, Homo sapiens
gaaaaccaaccaaggccccagcacaccagagacagagcagaaaaaccccccaccgacccaccacgccaggccgccgcgc

SEQ ID NO: 126822 - RNA, 79 nt, Homo sapiens
gcgccggccggaggggcgaagaggacgagggggccaaggcccccggggggacaaagccgcgaaaaggaacccacaaaca

SEQ ID NO: 126823 - RNA, 81 nt, Homo sapiens
agaagccgcggcggcgcccggcggccccggcgccggcaaggggacccaggcgcccgcacgcgaggaagcccggggcggcga

SEQ ID NO: 126824 - RNA, 77 nt, Homo sapiens
agaggaagcagagggggggggccagcgacccggggccgagaagacacgggcaaccccgggaacgaaacaaaagccgc

SEQ ID NO: 126825 - RNA, 77 nt, Homo sapiens
ggcgcgacacaagaccggaccacaaacgaaccggaaacaccggagaccaaccaagaagcgaagaaaagagaaagaaa

SEQ ID NO: 126826 - RNA, 76 nt, Homo sapiens
aacgagaaagagagaagaaagacagcgggaagagaccaaacgagaaccagaagaacgaaaaggcagacgacgagag

SEQ ID NO: 126827 - RNA, 69 nt, Homo sapiens
ggagcaagaaagaagagcaaggggaaagacaggaaaaccagccccgaagaaggaagcccccagcacggc

SEQ ID NO: 126828 - RNA, 68 nt, Homo sapiens
caccgagaaaggaaggaaaaccgacgacacagcaacggagaccaccaagaagggcaagacagcagcac

SEQ ID NO: 126829 - RNA, 81 nt, Homo sapiens
ccggcggcgcaggagggggacccaaaggaaagggcgggcggaacgacccagaaccggcgaggagggagccgagcgcgccca

SEQ ID NO: 126830 - RNA, 85 nt, Homo sapiens
gagagaggcccgggccccggaccagggcgcacaaggaggaggagaagaacaagggcaaaggcagcgagggcagacacgcccgagc

SEQ ID NO: 126831 - RNA, 77 nt, Homo sapiens
caagccaacggaacaggagaggcagaaagaccaaagggcgacccaaccccagagcaaccaggcccaggaagaggggc

SEQ ID NO: 126832 - RNA, 78 nt, Homo sapiens
accagaagccgaaacaaggcccccgggagacccgaggaaaacggcagcccagggcagggcgcaagcaggagaaaggcg

SEQ ID NO: 126833 - RNA, 85 nt, Homo sapiens
caaaaaaaaccccaaagaacccgacgagcacaagacccagaaaaaaaggagaaagaagagaagaagaaaacaaccagcaggaaag

SEQ ID NO: 126834 - RNA, 80 nt, Homo sapiens
aggccccagggcgagcacagcacacaaggaccaccaagcaggagacaaaggacaggcagaaaccagaacaggcaaagggc

SEQ ID NO: 126835 - RNA, 82 nt, Homo sapiens
caagcggccaagcacaaagagcgccccacgagagaacggcacacgcgagcggccccccccaaccaagcggcagcggcggagc

SEQ ID NO: 126836 - RNA, 69 nt, Homo sapiens
acagaacagcccagccgaaagggggacacccaaggaggcgcacaccagacccaaagcccgacccccaca

SEQ ID NO: 126837 - RNA, 74 nt, Homo sapiens
aggcacggacgcaacacggaacagacgcaacagaagcgaaggggacagggggagaaccgccagggaaacccggg

SEQ ID NO: 126838 - RNA, 73 nt, Homo sapiens
aaggggccggacagacagcaaggagggaaccaggagccgacaacaacccgacgcaaggcagccacaccaccca

SEQ ID NO: 126839 - RNA, 56 nt, Homo sapiens
cacccgaaacggagcgagggagcagccgggccagagccagaggagagacaaagacc

SEQ ID NO: 126840 - RNA, 110 nt, Homo sapiens
cgacccgccagaggggcccacaaggaggagaggggaccagggaaccacccaaggccgcagcccagcccagaaccgccggaggaggcagagaggagcccagccaggaccac

SEQ ID NO: 126841 - RNA, 54 nt, Homo sapiens
caccagagggaccacaccgaagcaggagaagaggcgggccgaccacaccaagcg

SEQ ID NO: 126842 - RNA, 83 nt, Homo sapiens
ggaagaccaaagaaacaaagaacggacccacaccgaggcacccgaagaagagaccaccaaccaggcccaggagagacgccgca

SEQ ID NO: 126843 - RNA, 49 nt, Homo sapiens
cggggggaagccccgcgccggccgcccggaggggggagcgaaaaggaca

SEQ ID NO: 126844 - RNA, 82 nt, Homo sapiens
cccggcagcagcccgacgcaaaccaaggacggggaccgcacacccaaggaacacgaggacccaaagaacaaacccggagaga

SEQ ID NO: 126845 - RNA, 73 nt, Homo sapiens
aaaaacgaagaccaaagcgcagcccaaacggagagcgcgcgccgcgcgcccgcacaaacgccggggacaacaa

SEQ ID NO: 126846 - RNA, 85 nt, Homo sapiens
caagcacaaagagcgccccacgagagaacggcacacgcgagcgacagaaaccaaccaacagacgagccgagcgggaggagaagcg

SEQ ID NO: 126847 - RNA, 82 nt, Homo sapiens
ccgagcacgcgcagcaaacccacccgcccggaaggccacgccaaaagcgccagcaaacccgcagagccgaagagagaaaccc

SEQ ID NO: 126848 - RNA, 67 nt, Homo sapiens
cccacagcagagcgcaggaaagacaagccgggagcagacaagaggcacgaaagaaacacagaaagcg

SEQ ID NO: 126849 - RNA, 82 nt, Homo sapiens
ggcccgagcagggaccgccgcgcacgggcaaggcgacagcccaaccccccccacgaagccggagacggggcccggaggacag

SEQ ID NO: 126850 - RNA, 86 nt, Homo sapiens
gcggccagacggccagcggcagcaagaacccgggaacccccaaagaaggaaagggagcaagccccccacgcggaagaacaccaaga

SEQ ID NO: 126851 - RNA, 80 nt, Homo sapiens
ccgaacggaggagcgacggcagagaggacacagagcgccaccgcccggagggcaaaacaagggcgaagaccgccacggca

SEQ ID NO: 126852 - RNA, 65 nt, Homo sapiens
gggccccacgccaggacacgagaggagaggcccgagagggcggccgcgcggagccggcccaccgg

SEQ ID NO: 126853 - RNA, 57 nt, Homo sapiens
aacaccagaggaaaggaccaacccggcccaagaaaacccaaggcaaggcaggccgag

SEQ ID NO: 126854 - RNA, 74 nt, Homo sapiens
aaaaaagaacaggaaaccccggagaagaaacacagacagcgccaacgagcacagaccggacaaacaccagacca

SEQ ID NO: 126855 - RNA, 71 nt, Homo sapiens
ccagcgaggcagggaagagacaccaggacccaggcacacacagaacaaaagcacgcagcaacggaggagag

SEQ ID NO: 126856 - RNA, 72 nt, Homo sapiens
cagacagcacagaagagagaaaaggaacagccgaagccaggggcaagcgaaaccacagaagaaaggaggaac

SEQ ID NO: 126857 - RNA, 80 nt, Homo sapiens
cgacgcggccggagcgcagcccgaggcccaggacaagcagaccggaagaccgacggaagaccacaccccgagggagccca

SEQ ID NO: 126858 - RNA, 81 nt, Homo sapiens
aagagggaccgaccggccagcacaggccaaagagcaccaagagaccaccaagaagagagaagaagcgaagaaaagagaaga

SEQ ID NO: 126859 - RNA, 73 nt, Homo sapiens
aagaaaacgaacaagaacaagccagaacagccccagcagacaaaccagacgagaccggagacaaaaagaggcc

SEQ ID NO: 126860 - RNA, 67 nt, Homo sapiens
cgagggacaacacagacccaccagcagagagagacagagccaaacgggaagcccgaagaaaagaacg

SEQ ID NO: 126861 - RNA, 73 nt, Homo sapiens
ccccaccgcacccgagccgcccggccaccccgcacgcggaagcgccccgaggcgcgccagacacgagccagac

SEQ ID NO: 126862 - RNA, 73 nt, Homo sapiens
aaccaacagacaaaaagagacagacagcgcacccaggacgcgccagggggacacagacaggggagcgggcacc

SEQ ID NO: 126863 - RNA, 60 nt, Homo sapiens
ccgacccaaagggaaaacagaaacagaacggcacaaaaccacaacaagccaggacgcaaa

SEQ ID NO: 126864 - RNA, 55 nt, Homo sapiens
gacgccccagcccaaagcagcgggccgcaaggccaggcgcgcagaggcacccaac

SEQ ID NO: 126865 - RNA, 62 nt, Homo sapiens
ggcacgaagaagacacagagagaacgagaaccagagcagcaggaacgcaagcacaggaccag

SEQ ID NO: 126866 - RNA, 95 nt, Homo sapiens
cggccgcgcggcgcggacggagcagaaccccaggacgcgcccccgggagcgggcgcccagaggaaggagggagccccaggaacaggagcccaccg

SEQ ID NO: 126867 - RNA, 76 nt, Homo sapiens
agcaaaaaagacgggacagcagaggcccaacagcaaaacccaggaagaacagggaaccgagaacagccaaggaccc

SEQ ID NO: 126868 - RNA, 72 nt, Homo sapiens
gacgcacagcaaacccacccagcacaccccgcgaaaggaggaggcacagaagagcccgagcccagcacaggc

SEQ ID NO: 126869 - RNA, 83 nt, Homo sapiens
cgggcaggggcggggcaacgcggaagcaccaaggagacagacgagccggcgcagaaaagaaggagcgggcgccaaagaacagg

SEQ ID NO: 126870 - RNA, 83 nt, Homo sapiens
ggaagagccacaaaaacgagccggaagagacagaacgccaagcgaaggagggcgccacaagccacgcagccccagcccggcca

SEQ ID NO: 126871 - RNA, 78 nt, Homo sapiens
aaagaggagaaagaacacggaacagaacaacccagaacggagagccccccagaaaaggcccggaggaggaagcaaacg

SEQ ID NO: 126872 - RNA, 78 nt, Homo sapiens
aggacgcggacagcagcaagcagcagagccgaggaacagaaacaggagaagccccaggaagagagggcagggcagccc

SEQ ID NO: 126873 - RNA, 73 nt, Homo sapiens
cggacaaaggaaagggagagagaagcccgcggaaaggacaggagcgcaggacggcaagagacggaagcagcag

SEQ ID NO: 126874 - RNA, 65 nt, Homo sapiens
aggaagagagaccgacacccaagacaagacagcgcaaggcaggcacggcagacacaccgaccaga

SEQ ID NO: 126875 - RNA, 75 nt, Homo sapiens
gacccgagcaagccgagcagccaacccagggagaacaccaaagcgagcgaggaggaggaggacccgacccggagg

SEQ ID NO: 126876 - RNA, 57 nt, Homo sapiens
cgcgccaggagccaccaagcgcggaaggagagacaggaagggcacagaaacggcgcg

SEQ ID NO: 126877 - RNA, 83 nt, Homo sapiens
gcaagaaccaccccaagcgcgcacgcagcaccggaccagcccgccgagaccgcaaccgcacaaggacaggagcccggcccgga

SEQ ID NO: 126878 - RNA, 69 nt, Homo sapiens
gagccccacccaaaaaaggagcaagacggaaaaccgccacaaaaagagacaagggaccggagaaaccac

SEQ ID NO: 126879 - RNA, 71 nt, Homo sapiens
gggcccaagaaagcccagcaaggaaacaaagggaggcggaaccaggccccagcgcagcggaaccgcccagg

SEQ ID NO: 126880 - RNA, 100 nt, Homo sapiens
cagacaggacccccgcgagccaccagaacgagacagcccccaaagccggaaccaaaaagaagccccagagccggggccaggagccccaagcgccccagca

SEQ ID NO: 126881 - RNA, 69 nt, Homo sapiens
gcacgaggaccccaaacagaccacccccggcgggacaagagaaaaaaagggcgggcgaacaaaaagagc

SEQ ID NO: 126882 - RNA, 59 nt, Homo sapiens
ggcacccgaggacccaccaccaggcgaccgagggcccccgggcaccgggcaccggaacc

SEQ ID NO: 126883 - RNA, 78 nt, Homo sapiens
gggccaggcggagcggagggaaggggaagacggcagcgggccggaggcccaaaagaaacaagaaaccaggggaaggag

SEQ ID NO: 126884 - RNA, 54 nt, Homo sapiens
agagcaagcgggggaccgaacaaggcaaaagggcgcgggccaggcacgacaccg

SEQ ID NO: 126885 - RNA, 75 nt, Homo sapiens
ccagagcacagaaacagagccagaggaacaggagacaggccagccaccgcaggacagaacaggggaccaggaggc

SEQ ID NO: 126886 - RNA, 66 nt, Homo sapiens
caaacccacccagcacaccccgcgaaaggaggaggcacagagacacaggaacgccacaagaaacaa

SEQ ID NO: 126887 - RNA, 78 nt, Homo sapiens
cacgcgccgcaaccaagccgacgagacggagaggaggcacacaccaacggcagaacgcgcgccgggcggacgcgcagg

SEQ ID NO: 126888 - RNA, 69 nt, Homo sapiens
acccacgcaaccccagcaccccagcccccagacgaggaacgagcagacgacaacggaacaaagaagcgg

SEQ ID NO: 126889 - RNA, 38 nt, Homo sapiens
aaccccacagcaagaggacgccagcccgacagagggcc

SEQ ID NO: 126890 - RNA, 47 nt, Homo sapiens
gggcacggacaacgcgacccagcagccagcgaagccccaaggaagcc

SEQ ID NO: 126891 - RNA, 38 nt, Homo sapiens
gacaggacgccaacagcaaggcaggaaaacgccagccc

SEQ ID NO: 126892 - RNA, 64 nt, Homo sapiens
ggaagacgggaacccggcgcaagggcaagaagagaaaggaaggaggggaaaagacaaacaccaa

SEQ ID NO: 126893 - RNA, 84 nt, Homo sapiens
gcaaacgcgggggggcgccggcggcaggagcagcagcaagagaagagcgacgcggcagcgagagagagagccgcagcaaagcag

SEQ ID NO: 126894 - RNA, 73 nt, Homo sapiens
acgggaggacgcacccggggaaccagcaaacaagagggggcacaggcccagacaaacaaaccaggaagaaaag

SEQ ID NO: 126895 - RNA, 76 nt, Homo sapiens
agcggcgagagcccccacggaacaaaaccagccaagcagaggagaaaaagacagcaccccagagccagaaccagag

SEQ ID NO: 126896 - RNA, 50 nt, Homo sapiens
ggcaccgggcccggaccacccgcaacaaaggaggacacaagaacagcaag

SEQ ID NO: 126897 - RNA, 91 nt, Homo sapiens
ggcggggggccgagcaaccagaaccggagcaggaggcgcacaacacccaggaccaacaggggaaccaaaggacagcacagaccgagcaggg

SEQ ID NO: 126898 - RNA, 79 nt, Homo sapiens
cccggagcccccggcggcgccaccagaccgggagccggccccgacccggcaggcaccgcccggagccaacccaccgagc

SEQ ID NO: 126899 - RNA, 76 nt, Homo sapiens
cgaaggcgccggccaaaagaggaagaggagaagaggacagagaacaggggcagcgcccacacgaccaggagcagag

SEQ ID NO: 126900 - RNA, 84 nt, Homo sapiens
gagacgaagcgcccggggggcgagcccgccgcacccgggccgcgccggcacggaaagggagcagcaccggccacacccacagca

SEQ ID NO: 126901 - RNA, 81 nt, Homo sapiens
caagagagcagggagaagaacagccaaccgacaggaacgcaaggcggggaaaaaaaggcagcacacagacgcagcaacggg

SEQ ID NO: 126902 - RNA, 81 nt, Homo sapiens
aaggccaaggggcggcaaaaagcccggccgaggccccccaaccggaccaccaccccaggcaccacggcaacacgacccggg

SEQ ID NO: 126903 - RNA, 69 nt, Homo sapiens
cagacgcgaaggaacggcaaagcaacacgcagaagggagaaaccgacacggaacgacagaggagccgaa

SEQ ID NO: 126904 - RNA, 89 nt, Homo sapiens
cccagggaagcgcagaaagcaggcgaacccgcggcgcaaaacgcccgggcgcgccaggcacagccaagagcggaccggcagcggccagc

SEQ ID NO: 126905 - RNA, 89 nt, Homo sapiens
gaaagaagaggaggaggaggaggacagacgaggaggaggaagagccaggaaggccgagaccgggaggaagcggagaaaagagccccgaa

SEQ ID NO: 126906 - RNA, 62 nt, Homo sapiens
cggacgaagacagcaaggagacccgccaaagccgccgggcaagaggacgcagaacaagcgag

SEQ ID NO: 126907 - RNA, 69 nt, Homo sapiens
aaaaaagccaagagcaggaacaggagagcaaacaaagcgccagcaaagcacggacagagaaggaggaga

SEQ ID NO: 126908 - RNA, 78 nt, Homo sapiens
acggggaggccaaggaccccaagcccgagaagaccggcggccaacacagccacggacagggaagccacagccgcgcgg

SEQ ID NO: 126909 - RNA, 88 nt, Homo sapiens
gagcgaggagcggggcagccgggacggcagcaggcaggccccagaacgacagccccagcgccccaggagaccaacaccccacagccac

SEQ ID NO: 126910 - RNA, 54 nt, Homo sapiens
gcagacccaagggcccccagcggcggagacagacggaagcacaccgacccccaa

SEQ ID NO: 126911 - RNA, 77 nt, Homo sapiens
agcggcccggccccccggacagacgccgacgcccaggcaagaacgccccggcaaggacggaggcaggcaccaccaac

SEQ ID NO: 126912 - RNA, 78 nt, Homo sapiens
aggaggaggaaccggagaccccgaaaacggaagcgcagggagaaggaagaggggaaaaggaagagcagagcgagggaa

SEQ ID NO: 126913 - RNA, 57 nt, Homo sapiens
gccacggaggggcagccacccccggacaaaaaggacccgacagcacacccccaaaaa

SEQ ID NO: 126914 - RNA, 61 nt, Homo sapiens
ccaacgcagggccgaggaagcgccgcccgggcgccccgaggagaaccccagaacccagccc

SEQ ID NO: 126915 - RNA, 57 nt, Homo sapiens
cagaacgaaaagcgccagaaagcaccgaggagcaacacccccagggagcccagaccg

SEQ ID NO: 126916 - RNA, 73 nt, Homo sapiens
caagcacgaacagccaccaaacccacaagaaccacaaggcgagaaaacacacggcaggaccagaagcaaacga

SEQ ID NO: 126917 - RNA, 89 nt, Homo sapiens
ggccgaggcggcgccagacaccaccgcggaccccgccacgcgcccggaccccgccaccaaggagcgagagaccaacgggcaagcaaccg

SEQ ID NO: 126918 - RNA, 70 nt, Homo sapiens
accccaccagcccagacaaagagggggacagccagggaggaggacaggccccgcgaagcccccaagcaag

SEQ ID NO: 126919 - RNA, 76 nt, Homo sapiens
cagcgcccgccgcggcccgggcccccccgccggaaacagggcggaaaacaccccaaaagccaaaagggaaaggaaa

SEQ ID NO: 126920 - RNA, 52 nt, Homo sapiens
ggggaggaagaggaggaggaagaagaagggagggcaaagcagagggggcagg

SEQ ID NO: 126921 - RNA, 71 nt, Homo sapiens
caaaccaaggcccaggaaaagagcacagaggaagaaagggaaaaaagcagcggaggagaaaaaaaagaaga

SEQ ID NO: 126922 - RNA, 59 nt, Homo sapiens
ggaacggagagcaggaagacgcagaggaaacggcagcagaaccgagcacgaaagcaccg

SEQ ID NO: 126923 - RNA, 75 nt, Homo sapiens
cggagccgaaaccaagccggacccgaagaccagcaaggcgccaccggaagaaacgggaggggaggagccgggaaa

SEQ ID NO: 126924 - RNA, 77 nt, Homo sapiens
cgagccgagccaggacggcagccgcacagacagcaccaggggacccccgggagagcgacgagagacggggcgccgga

SEQ ID NO: 126925 - RNA, 88 nt, Homo sapiens
ggacgaggagacgaaccgagaaagacggcgacaagaacaacgacggccgcagaccgacggaagaggacacccacccggaccggcccgg

SEQ ID NO: 126926 - RNA, 43 nt, Homo sapiens
caagaccacagcagcacccaggccccgggaccaaggacacgca

SEQ ID NO: 126927 - RNA, 74 nt, Homo sapiens
acgcacgggaccagagacacaggcacgacagaagcagcagaagcagcagaaagcacggaccgccaggacgaagg

SEQ ID NO: 126928 - RNA, 69 nt, Homo sapiens
caaacgagagaccaaccagggcggaggaaagggcaaggacagacgcagaagaccaagaacacaaggcaa

SEQ ID NO: 126929 - RNA, 88 nt, Homo sapiens
aacgaagaaacagacacaacagagcagaagcacaaccaaggccggcccccgcgcccagggccggacggagggagaggcagggggggcc

SEQ ID NO: 126930 - RNA, 92 nt, Homo sapiens
cgccggcgcacggacgcgggcacgagcacagacacgccggcaagagcgggaaggagggcgcacagcgcaaggggcagcgcgaaggagaagcg

SEQ ID NO: 126931 - RNA, 76 nt, Homo sapiens
gggggcgagcaaaggaagaacaaaagcgcaggaacccccggcgaaggaaagccgcacagcagcacaaagaaacaga

SEQ ID NO: 126932 - RNA, 74 nt, Homo sapiens
cggaggaacgaggaaggaagacccggagggcaagaaggaccgagagccggaggagccaccaacagaagcaggag

SEQ ID NO: 126933 - RNA, 79 nt, Homo sapiens
ggagcccaccggaaacggcggcggagaacggaccccaccgacgaggcacccgagaagcccgcaggagcaacacgcccca

SEQ ID NO: 126934 - RNA, 84 nt, Homo sapiens
gcgcgcgaagaagcaacaacccccccgcccgccacagccggcagcgcgaagcagcaaccagggcgaccagacgaggggagacgg

SEQ ID NO: 126935 - RNA, 72 nt, Homo sapiens
ccgacagccgcgacggcgagcccgggccgcgcccgagaaagcccaagcgcaaaaaaaaggccccaacaaaac

SEQ ID NO: 126936 - RNA, 77 nt, Homo sapiens
acaaaaagcggaggagggacacaaaaaaagacacgagggaggcccacacaccagccagaggaaaaacagaacccaac

SEQ ID NO: 126937 - RNA, 70 nt, Homo sapiens
ggccccggaccccagccaaaccggagcccccagccaagccgggaaacaagaaaaaacaggggcaacaaac

SEQ ID NO: 126938 - RNA, 40 nt, Homo sapiens
gggggacccgcccaaccccggagaaaaccggaagagaaag

SEQ ID NO: 126939 - RNA, 59 nt, Homo sapiens
aagacacaggacaacgaacgaaacggaccgaaaagacgcggccccaaaggaaacacccg

SEQ ID NO: 126940 - RNA, 69 nt, Homo sapiens
ggaacgacaacaaggaccgggagcaggagccaaggagccagacgaaggaggcacagcagccccagcgac

SEQ ID NO: 126941 - RNA, 67 nt, Homo sapiens
accacaagaacacgggcggagcggacggaggaccgggagagacaggaggagcaaaaaacagaagcag

SEQ ID NO: 126942 - RNA, 67 nt, Homo sapiens
cgggacgccgcggcggccgcagagcgcaaaagcagggcagcgagggacaggagcgcagcaggccacc

SEQ ID NO: 126943 - RNA, 72 nt, Homo sapiens
gcagcaggcgagagacaagagacacccccgccgccagaggaaccaggagccgacaacaacccgacgcaaggc

SEQ ID NO: 126944 - RNA, 47 nt, Homo sapiens
ggcagacaaaagggccaaagaagggagagagagcgggggggcacgac

SEQ ID NO: 126945 - RNA, 74 nt, Homo sapiens
cccccgccgggcccccagcaaacggccgcacaacagaaggacgagaagggcggcgcgaaaggacaaaggaaagc

SEQ ID NO: 126946 - RNA, 70 nt, Homo sapiens
gaaacagagaaaaagaaagacacagccgcacaaacacagagcaaacgaggaccccaccacaagaacgcag

SEQ ID NO: 126947 - RNA, 83 nt, Homo sapiens
gaggagaccccagacccccccgcagccagagggcggagccgccagagggcgaaggaagaacaagagagggaaagcagagccca

SEQ ID NO: 126948 - RNA, 78 nt, Homo sapiens
caacccaccgcaccccgaggggcccggcgcgccaccggcacaggaaccggagaggacacagcagaagagaacacgccc

SEQ ID NO: 126949 - RNA, 41 nt, Homo sapiens
acaaggccagagccggaagggggcacaccgagaaggcaggg

SEQ ID NO: 126950 - RNA, 78 nt, Homo sapiens
ggcgccaccgcggccaccgcaggcacaggccgaacaggggccaagcgacagagaagcgacggaacagaaggagggaga

SEQ ID NO: 126951 - RNA, 53 nt, Homo sapiens
gcaaaaggagaccccccgcccccagacgaggaacgagcagacgacaacggaac

SEQ ID NO: 126952 - RNA, 80 nt, Homo sapiens
ccgagaccgcggccgggaccgagggacaggacaacagaaaaacacacacagggggaagaacgagaaaaacaagggaaaga

SEQ ID NO: 126953 - RNA, 80 nt, Homo sapiens
cgcagccgcggcccggagccccggggcggcggacggccgcgggcaggcagcaggacaggaagcagggagccaagcggcag

SEQ ID NO: 126954 - RNA, 71 nt, Homo sapiens
cacacaccgcacacccgaggccaacgaaggccgacggaccgcgagggccgggaaggagggccccggagcag

SEQ ID NO: 126955 - RNA, 73 nt, Homo sapiens
aacccaccaaaaacaacaaacgggaagcgggggagcgccaaaagcaagaggagcaaaaaggaccgagaaaaac

SEQ ID NO: 126956 - RNA, 82 nt, Homo sapiens
gcgcgcgcgcgagccacaaggagagcgaagcaaggcccggcgcaaggccaggaacaggccgagagcagccagaagacaaaga

SEQ ID NO: 126957 - RNA, 69 nt, Homo sapiens
cggacagaccaacgggacaagaagaagaaaagaccagagccaaaaggaaaccagcgacaaaagaagacg

SEQ ID NO: 126958 - RNA, 79 nt, Homo sapiens
gaacgacggcaccggaagacgggggcaagagcagcaagagcgcagcaagaacaggagagggcaccgcaggacggccgga

SEQ ID NO: 126959 - RNA, 79 nt, Homo sapiens
acacagccagaacagcggacgccacacccaagagaagcccggaaggggcccccggcgcagcagaggcgcagagaaacga

SEQ ID NO: 126960 - RNA, 61 nt, Homo sapiens
gaggggcagccacccccgggcacgcagacgcagcaggagggaagcgcgcagacgggcaggc

SEQ ID NO: 126961 - RNA, 72 nt, Homo sapiens
ccggcgcgcccggagcacagagaccgaagggagagcgcgacccccggccaagaagaggagacagaccgacag

SEQ ID NO: 126962 - RNA, 59 nt, Homo sapiens
ccgaggaagcgcagcagccgggcaggccacgagaggaccagggggagccacggaccagg

SEQ ID NO: 126963 - RNA, 88 nt, Homo sapiens
gagggcgagaacgaccccgagacgcaagaccccagaaagcagggggagcagaggagagcaggaaaagaggacgagaggaggaaagaga

SEQ ID NO: 126964 - RNA, 79 nt, Homo sapiens
cggcccgcccggcggcccagccggggggccgccagcggacaacaaacggccgcagcacccgggaaccgacccggccgac

SEQ ID NO: 126965 - RNA, 67 nt, Homo sapiens
cgccagggcccacacccccccccccgacaggcaagaagcagagcgcagaggacccagcagacgcgcg

SEQ ID NO: 126966 - RNA, 60 nt, Homo sapiens
gaaggaccaagaaccagcggaaacgacaaacagcccccgagagccccagcccgcagcccg

SEQ ID NO: 126967 - RNA, 78 nt, Homo sapiens
accacggacagcaaacaggacggccagcagaagcaggcgagccccccgagaaaaagaagaaacgcgggaccacagccg

SEQ ID NO: 126968 - RNA, 79 nt, Homo sapiens
ccacaggcagaccagaacagcggaagaaaggaccagccccgaacccgccaccaccccacggaaggccggccccccgcgg

SEQ ID NO: 126969 - RNA, 72 nt, Homo sapiens
gcccgacccgccaccgccaggccaggcgggaagcggagaaaaccaggacccaagacagcagcaacagcaaag

SEQ ID NO: 126970 - RNA, 80 nt, Homo sapiens
gcgcgccacccacaaccagcggcagagaggcgagacacggaacggcgaagaagcgcacgggcccggcgccaccacccgcc

SEQ ID NO: 126971 - RNA, 83 nt, Homo sapiens
gccgagccgagggcccgagccaagccggcggaggacgagacaggaggaggaacaagaggagggccagaacgaagcacaacagg

SEQ ID NO: 126972 - RNA, 42 nt, Homo sapiens
gccgccgccgaggagaaagggaaccgcggaacggagggcccc

SEQ ID NO: 126973 - RNA, 74 nt, Homo sapiens
gggcgggggcgaggcggcggcggcggccggagccccagccgacggaagagccaacacccagccccaagaacaaa

SEQ ID NO: 126974 - RNA, 77 nt, Homo sapiens
cgcacgacgcaaggacccacagaccgggaacacaggcacagaagcggcaggaaagccccgggcagcccacgagacga

SEQ ID NO: 126975 - RNA, 60 nt, Homo sapiens
aagacacggagcaaggaggaaaacacacgggcgacaggagccaagggaaaacacaccaaa

SEQ ID NO: 126976 - RNA, 77 nt, Homo sapiens
ccgacagcgccaggcccagacgccaacgcaggagcacccagacaagggaggcgaggacggacaaaaggaaacggacg

SEQ ID NO: 126977 - RNA, 50 nt, Homo sapiens
gcgcccagcagagcaaagccaggaacaccaccaccagggaaccagcacgc

SEQ ID NO: 126978 - RNA, 63 nt, Homo sapiens
cgccgcacaacgcaggagaagcaaaaagccacgagggacacaaggccagcagggcccagccag

SEQ ID NO: 126979 - RNA, 62 nt, Homo sapiens
caaaggacgaagaacccacagaggacaaaccggcgaccacacacggggacgacggggaagcc

SEQ ID NO: 126980 - RNA, 57 nt, Homo sapiens
agaaaacaagggcgcaggaccaaccccccggagccagacccgggccagccgccggaa

SEQ ID NO: 126981 - RNA, 81 nt, Homo sapiens
gggaaagccaaacgcgagcggggcagaggccaagaccggcccaagaaggagaaaagaagcgaggcggagcaagggcagaga

SEQ ID NO: 126982 - RNA, 36 nt, Homo sapiens
ccagggacgcggcacgggaagagacagaggccagcg

SEQ ID NO: 126983 - RNA, 70 nt, Homo sapiens
cacaaacaacaccacccgaaccgaccgagaggaaagaagaagcggaccacacgcgcacagcgcgagagac

SEQ ID NO: 126984 - RNA, 64 nt, Homo sapiens
gagggcaagccgggcagccgaagagggaacaaccgaggagccagggcacgcaggagaggacaca

SEQ ID NO: 126985 - RNA, 69 nt, Homo sapiens
ggccacccagaagcacggcaacagccaaacagaccagaacacacaagaaccgggagaacgaacaaacca

SEQ ID NO: 126986 - RNA, 57 nt, Homo sapiens
accagccaggagacgccaaggaaagagggacccccggcccagggggagacaccgccg

SEQ ID NO: 126987 - RNA, 80 nt, Homo sapiens
gcagggcaccgcgcgaagcggccaaagccgcccagacggccaccggcgggaggaacaaaagggcaacgacagaggaagaa

SEQ ID NO: 126988 - RNA, 71 nt, Homo sapiens
cggggcgggcccggcgccgcaccagcagaacggaggaaaagggacggaacggagaagagacaagcgacgaa

SEQ ID NO: 126989 - RNA, 69 nt, Homo sapiens
gcgcggcagaaaaaccagcccggcgcaggaaggaacacacaagagaccaggcgcgaaacccagacccga

SEQ ID NO: 126990 - RNA, 70 nt, Homo sapiens
caacgcgcgaagccagcgcccggagaccacagggcagaccccacaagaaaggaccgaaaaggaacgccca

SEQ ID NO: 126991 - RNA, 74 nt, Homo sapiens
gcaagagcacaggaagcaagcccaaaggcaagcagagaaggaacgaagccacccaggcaccacccacggggaag

SEQ ID NO: 126992 - RNA, 75 nt, Homo sapiens
acgggcgaagcgacgagccgcgaggaggggaacacccagaggaacgcgagaaagaagcgaacagccagacaggga

SEQ ID NO: 126993 - RNA, 85 nt, Homo sapiens
ggaggacgacgggaccgggaccgcgcggacccggccgggagaagcagcagcgcaaggcccgaggacggcgaacacaccaaccgga

SEQ ID NO: 126994 - RNA, 78 nt, Homo sapiens
cccccccaacaggcggcccaggagaaagacagcaaagaaaaggagaagaaaggaaaaaaacaaccccgggcaccccgc

SEQ ID NO: 126995 - RNA, 64 nt, Homo sapiens
ggacccggagcgacaagcgccccgacggagcgccaggacggggagcaggagaagaagaggggag

SEQ ID NO: 126996 - RNA, 72 nt, Homo sapiens
agaacgccggcccagccccagcggcagacggaaacgacagaagcagagagccgaacgaacagaacacaaaca

SEQ ID NO: 126997 - RNA, 57 nt, Homo sapiens
gggaaaaggcaggaagaggaggacggcgaaaccgcaccacgagacccacgaggccgg

SEQ ID NO: 126998 - RNA, 70 nt, Homo sapiens
gacggggcaacaagagacaagaagagaaacacagggaaaaagagggaggaaccgaaaggaaaccgaggac

SEQ ID NO: 126999 - RNA, 79 nt, Homo sapiens
gaccgcacaaccccagaagcgcgcccgggaggcagacgggggagcggcggccaggaacggagagagagagcgcacagaa

SEQ ID NO: 127000 - RNA, 70 nt, Homo sapiens
gggagaaagaagccagccaaaggaaaaggaagagccaacggaaaaaagaagaaaagagcaacaaaggcgc

SEQ ID NO: 127001 - RNA, 87 nt, Homo sapiens
cgcgcagccaagaaggccaggggagcggcaggaaggccaccacagggccaacaagcagcgaggggcacagggaccgaagcccagcaa

SEQ ID NO: 127002 - RNA, 71 nt, Homo sapiens
ccccccccacgccgcccccagacccgcccggcaagaagaaaaacacaccccgccaaagccaaaccccaccc

SEQ ID NO: 127003 - RNA, 78 nt, Homo sapiens
gggcgggcaggagggcggcggcggcggcgcggcgaagaaggggacgccgacaagggacgagcagggaaaaccgaaccg

SEQ ID NO: 127004 - RNA, 62 nt, Homo sapiens
caaaggccccgacagccaccgccggggacccagcaacagcacggaggaacagggcagagacc

SEQ ID NO: 127005 - RNA, 36 nt, Homo sapiens
cggacacggagaggaaggccccgggaacagagagac

SEQ ID NO: 127006 - RNA, 68 nt, Homo sapiens
ccgcccaaggaggcccagcgcaaaccgaaggaacccaaagggcgccggaacccaggaagcgccaaaag

SEQ ID NO: 127007 - RNA, 80 nt, Homo sapiens
ccgcggagaccccgagaaaccgccgaccaagagcgaagcgacggagaagcacaagaagacaagggcccagaaaccacaaa

SEQ ID NO: 127008 - RNA, 63 nt, Homo sapiens
agcacggggacaagcaacagggcaaggaacaaccggggacaaggcccaggaggccaccagcac

SEQ ID NO: 127009 - RNA, 80 nt, Homo sapiens
gaggccccccagccagggaacggccgagacacagcccaccgcaggcggggaagacgcccggcaggaggagcgcacgcccg

SEQ ID NO: 127010 - RNA, 89 nt, Homo sapiens
aacacagaagcaacagccacacagaggcagcaagcccaacaaggaagccaagacaggaacacagagagcaacagaccagaacgaagaaa

SEQ ID NO: 127011 - RNA, 69 nt, Homo sapiens
acgaagaccacgccggccgcgaccaaggaagcagagggcacgccacgcacagcggcagcccaccaaccg

SEQ ID NO: 127012 - RNA, 73 nt, Homo sapiens
acaccgccacccagaggggccggccaccccaacccgagggcccagaccgaagccaaccccgcccacagaagcc

SEQ ID NO: 127013 - RNA, 71 nt, Homo sapiens
gcgcggggcggcggcgcggggcggcgggagagcccggcggcggagcgacaacggcaagcggagaagagcaa

SEQ ID NO: 127014 - RNA, 52 nt, Homo sapiens
gcacaaaacgccgccacaaacaacccccaccacgccaagagaaggagagaga

SEQ ID NO: 127015 - RNA, 73 nt, Homo sapiens
acgcccgccccgcagagagggggaccgaccggaaagcgcggaagagaaagggagcagagggaggcgaccgcag

SEQ ID NO: 127016 - RNA, 60 nt, Homo sapiens
gaacagcaccgacacgaaaacccggacccgcaccgcagcggggcaacacgggcagcgggg

SEQ ID NO: 127017 - RNA, 61 nt, Homo sapiens
cggccgagggcccaccagcaggcaggagaagggcaccggggaggaccgcgcgacgcgccgg

SEQ ID NO: 127018 - RNA, 81 nt, Homo sapiens
cagaagccgacaaggcgcaagcgaaaacagaccgcgagcccagagggggcacccgaggaggaagagggcagggcccacgga

SEQ ID NO: 127019 - RNA, 64 nt, Homo sapiens
ccgacagcggggaggaagaggaggcccagccccaggagagcagcagaggcggccaacaccgcca

SEQ ID NO: 127020 - RNA, 56 nt, Homo sapiens
cgagcacaggcccgccagggcggcgccccgggacccgcaggacccacaaacaccag

SEQ ID NO: 127021 - RNA, 87 nt, Homo sapiens
cgcaacccccaagcagcaccccgcacaccgccaggccaggggaccggagacagcagcagaagcagaaaaaggcaaacgagaagaagg

SEQ ID NO: 127022 - RNA, 53 nt, Homo sapiens
ggaaaaccgacacaacagcagggcagaaaagaacagacccagaagaagcgaaa

SEQ ID NO: 127023 - RNA, 56 nt, Homo sapiens
cgacacacagcagcgcagaggaggaaggaccgagcgcaggaaccaggccagcgccc

SEQ ID NO: 127024 - RNA, 107 nt, Homo sapiens
cccaggggaccccaagaagaccacagagggacccggacaaccagaggcagccagcagggggagggggagcgggccggagagaagagaggggcgcgaggagaaggaaa

SEQ ID NO: 127025 - RNA, 30 nt, Homo sapiens
agggcgcccccgacagccgcccggggaccc

SEQ ID NO: 127026 - RNA, 63 nt, Homo sapiens
gggaaccaccaccaccagcgacccgagagaaaccacaaaggaccagcccaaaagcaaagcagg

SEQ ID NO: 127027 - RNA, 63 nt, Homo sapiens
caagaggcggacaaaacgccaggcggaccagaaggccagcaaaggccagcgcaacggaaacag

SEQ ID NO: 127028 - RNA, 58 nt, Homo sapiens
gaagcgcgggaggcccccagcccccacgagccagggagccgccgggaccggcccggga

SEQ ID NO: 127029 - RNA, 82 nt, Homo sapiens
agggagaccacagcaagacccaggaccccggaagccagaaagaacccaggagaaacgagagggacagcaaggaagacgccag

SEQ ID NO: 127030 - RNA, 79 nt, Homo sapiens
cacccaaaccaacccagagcccgacccggacacaccaaccccaaagccgcacggagaaccacggggaccaagaagcgag

SEQ ID NO: 127031 - RNA, 81 nt, Homo sapiens
ggaaaacacgggcagacacacaacagacagacacacgcccggaggaggaggcacggcccagaagagcagcgggcacggccc

SEQ ID NO: 127032 - RNA, 84 nt, Homo sapiens
cggcgcgcacgcccggccgcggggaacgcccgcggacggcagggcgcgacaagaagcgcccgcccgacgagcggcccgccacca

SEQ ID NO: 127033 - RNA, 77 nt, Homo sapiens
gcgggggcccgcgcagcagcgaccacggccccgagccccggccccaaagacccaaaacagagacaccccccagcccc

SEQ ID NO: 127034 - RNA, 74 nt, Homo sapiens
gagcacgaaaaaggaagggaacaacaaaggaaaaacgaaaacaccaccaggcacccaggcaagaaaagaggaaa

SEQ ID NO: 127035 - RNA, 79 nt, Homo sapiens
agcagcagaagagccaaggaaaaacagcaagaacccaaaagggagaaagagggcacacgaggccccccaaaaggccccc

SEQ ID NO: 127036 - RNA, 55 nt, Homo sapiens
aggaccaagaaccagacaacaaagcacaggggcccaacagcagaaagcagcacgc

SEQ ID NO: 127037 - RNA, 74 nt, Homo sapiens
aggccgcggggccacggagaccgaagcgcacgaacggaccgacgcccaaccccccccacgaagccggagacggg

SEQ ID NO: 127038 - RNA, 79 nt, Homo sapiens
ccggcgcgcgacagggacggacgcagcgaggcagcgagaggaggaggcagaagggaccacagaccagcacgccggcgcc

SEQ ID NO: 127039 - RNA, 71 nt, Homo sapiens
aggcggcggggacacccggacacggcaaggacaaaccggcgaccacacacggggacgacggggaagccgga

SEQ ID NO: 127040 - RNA, 72 nt, Homo sapiens
ccgggcaaacaccgaggagggaccccgagcacaccgaaaaaaaccgggcacaggaccaaagcaaacacagac

SEQ ID NO: 127041 - RNA, 80 nt, Homo sapiens
ggaccgcaggaccgcccagcgccaccacgccgcaccggacccgcgcggcgggacggccggccggagaccggaaggccggc

SEQ ID NO: 127042 - RNA, 66 nt, Homo sapiens
ccggacccagccccagaagagcgcggggcccaggcggaggcccggcggccaaaccgacccaaggac

SEQ ID NO: 127043 - RNA, 75 nt, Homo sapiens
ccacaccggcacacagcgcacacaagccgaagccaacacgcccagaacagcggaacagcggaaccggagacaggc

SEQ ID NO: 127044 - RNA, 72 nt, Homo sapiens
aggacacagggccggccaaaaggacaagaaggggaggacacaaccccagagagcggaacgagcaacaaacag

SEQ ID NO: 127045 - RNA, 74 nt, Homo sapiens
cgcgcaaggaagaaacccccagccgacgcccgcgccccccagcaagggacgcacaccgagacgaacacagaaca

SEQ ID NO: 127046 - RNA, 84 nt, Homo sapiens
ccaggccccaccggcggccgggcccacgggcaaggagggcacggagggccccggaggggagcggagggggagacagacccgcca

SEQ ID NO: 127047 - RNA, 79 nt, Homo sapiens
ggaaaaagaaaaaggggcgccggccggccccaggagagggagagcgaacagagacgacccacgcgaaaggagagagaca

SEQ ID NO: 127048 - RNA, 75 nt, Homo sapiens
acgcggaccagggacccgcgaaagcggggcacaggcgggcacgcgcccagaacaccagaggaagacaaaagaaga

SEQ ID NO: 127049 - RNA, 76 nt, Homo sapiens
agcaacaccccggccaccgacccacaaggccggggggggcacagagccccggaagacagcccccagcgaccagacc

SEQ ID NO: 127050 - RNA, 74 nt, Homo sapiens
acagccgccaggcccaaagaaccagcggaccgagccaagaaagcaccagaagaaaggagagagccgaaagagaa

SEQ ID NO: 127051 - RNA, 72 nt, Homo sapiens
cgagcccagcaccgcgggaagcacccgaaagagaacaaagaacgaagggaagcgcagaaaggaaaacaaagg

SEQ ID NO: 127052 - RNA, 71 nt, Homo sapiens
cggaaaggaaaaagaagcccggacaccgggagagacaaaggggcaagaccaggaagcacaaacaccagccc

SEQ ID NO: 127053 - RNA, 63 nt, Homo sapiens
cgacagaacggagccggaccaggccacagcacagcaaagccacaacacccaggaggcccccgg

SEQ ID NO: 127054 - RNA, 74 nt, Homo sapiens
caggaacagcgggacccaggagccacgcacaccgagaaaaagcgacagagaaagaagcgaacccggaagagacg

SEQ ID NO: 127055 - RNA, 75 nt, Homo sapiens
caaggggccaccaggaggccagggggcgccaggagcgagccaaccaaagaccccgagcgacacagaaccacccca

SEQ ID NO: 127056 - RNA, 79 nt, Homo sapiens
gcacaaggagcgagcagaacacacagagccaccagcgccccagaggagcccggaacacgaacgaggagagaaaagcaga

SEQ ID NO: 127057 - RNA, 73 nt, Homo sapiens
caaaacaaaccagaagacagccgagcaacaggggggcaaaaagcccgaggaagaggcccaggaccggcagagg

SEQ ID NO: 127058 - RNA, 83 nt, Homo sapiens
aaagaccaaaacaagggcgcggccgcgcccaggagcacggacgccagaacgagccggagacgaaaagacggaaccagcaggag

SEQ ID NO: 127059 - RNA, 84 nt, Homo sapiens
ccgcgcccggccggacccgggcccgagagcggcgggaggggaaggagcagccacccgggcagaaaggccgggcgaagggccaag

SEQ ID NO: 127060 - RNA, 73 nt, Homo sapiens
ggcgcccagaaaggggggcccacgcggaggacgcagaacacggcgggcggcccgccaacgacgcaagaggcgc

SEQ ID NO: 127061 - RNA, 78 nt, Homo sapiens
caagaggcggcgcagaggaggagcgcgcagagggcgcccaggaaagccaagcaggcgggacaccaggagcggccgggc

SEQ ID NO: 127062 - RNA, 77 nt, Homo sapiens
cggagccagggaggcggcggcgggaacgagggcgagcagaggacgacaggccgggagcccacaagagagggaaggag

SEQ ID NO: 127063 - RNA, 76 nt, Homo sapiens
caaaagaacagaaggacagacccagaccgaaagaagagccaaagcccaggacggggaaacagcagagagcagccag

SEQ ID NO: 127064 - RNA, 75 nt, Homo sapiens
aggcgccaaagcacagagcaagcggacaaaagaagcaagcggaaaaggaaaccagaaaaacggagccgaaccggg

SEQ ID NO: 127065 - RNA, 77 nt, Homo sapiens
gaaaccgaagagggagaaacaggaccgggagggcgagagaaagggccacgagcacccccggagcaaagcggagagag

SEQ ID NO: 127066 - RNA, 71 nt, Homo sapiens
aaggacccgggccccagagaagcaggcgcaacaacgaaggaaaaagcaaaaagaaccggaaaagcagaagc

SEQ ID NO: 127067 - RNA, 61 nt, Homo sapiens
ccggcccggcccggccccgacacgggagcgaagaggaaagaaagacccccgggacagaaac

SEQ ID NO: 127068 - RNA, 31 nt, Homo sapiens
aaacgcacccgaggagaaaaaagacagggcc

SEQ ID NO: 127069 - RNA, 81 nt, Homo sapiens
agcggcccggcgcagaagagagggaagcgagggcagagggacgaggcaacaagagggagccaggcaggccaagcgcggccc

SEQ ID NO: 127070 - RNA, 86 nt, Homo sapiens
cgggggcgcgcgggggcgggcccgggacgcgcgccgcccaagagagagaagagaggcgcgagggcagggaagaggcggacaagcgc

SEQ ID NO: 127071 - RNA, 83 nt, Homo sapiens
ggccagcacgcggacgcgagacggcccggcgcagcgagcgcggacggagaggaaagcgaccaaaaagagccaagcgagaagag

SEQ ID NO: 127072 - RNA, 81 nt, Homo sapiens
gacggaagcacaggagcagcccgaaagaggcccagaccccaaggaaagggagcagcaccggccacacccacagcacgaccg

SEQ ID NO: 127073 - RNA, 65 nt, Homo sapiens
agagcggcaaaagcagaagacaaaaggggccgagcgagaaaccagaacgcccccaacaaaaggac

SEQ ID NO: 127074 - RNA, 79 nt, Homo sapiens
aggagccagaacacagcggacagaggggaaagagcaggcaacagcggggcggagcggcgaagaaagagcacagacgaag

SEQ ID NO: 127075 - RNA, 63 nt, Homo sapiens
gccccgaggccccgaccgcggcggagcccgacccacccaaggcaaccagggagaggagccgca

SEQ ID NO: 127076 - RNA, 71 nt, Homo sapiens
gggggaagaccgcgcccgcggagagcccaaacaccaccaccaagacgcgccccccgcagcaggcgcccaca

SEQ ID NO: 127077 - RNA, 91 nt, Homo sapiens
ggccagagcgaaaccaggagagcccagagccggcaggagccagaaagccagaggcgaacacagacacggccgaagggacaaaggagcaggc

SEQ ID NO: 127078 - RNA, 83 nt, Homo sapiens
cgagggcgggggacgaaagagaaacccggagggcgccgggccggcacagccacaccgagaagaccggcccaagaaccccaccg

SEQ ID NO: 127079 - RNA, 41 nt, Homo sapiens
gccggagccggaacccagccgcgccagccgaaacagaggca

SEQ ID NO: 127080 - RNA, 85 nt, Homo sapiens
ccaaggggggcaagggcggccggcccccgacagccaggcccgcgagaagagcagaaaagcaggccggcgacagcgggaccgcagg

SEQ ID NO: 127081 - RNA, 77 nt, Homo sapiens
gagagaccgcccgacggggaccgagggcggcacagcacagacaccgcgccgaagggaggaccacaggccacccagaa

SEQ ID NO: 127082 - RNA, 81 nt, Homo sapiens
gggacgcggcaccacggcacgcacaaggcgaggcggaaagagggagcacacgcagacacagaaaagcaacgaagccacaac

SEQ ID NO: 127083 - RNA, 76 nt, Homo sapiens
ccgacaagggcagaacgaacaggaacaaagccagacggcgagaaagaacaaagcggcaaaggggaccagcagaccg

SEQ ID NO: 127084 - RNA, 80 nt, Homo sapiens
ccagcacaggaaccgccccgcagcagccgacccggcacaacaaaaaaaaaagcggggaaggggggcaaaaaaaagaagca

SEQ ID NO: 127085 - RNA, 76 nt, Homo sapiens
aaccaaggaaaagagcaagcaacagagcgcgggacgggcaaaggaaagagacaggggccaggccaggggcagggga

SEQ ID NO: 127086 - RNA, 90 nt, Homo sapiens
cacacaggagagcagcaggagggcaggcgaggggcagagccggagagcagccccggcccccgagcagcccgcggcgccaggccacgcggc

SEQ ID NO: 127087 - RNA, 63 nt, Homo sapiens
agggagccggagggaacagcagggcaaagcaacagccaaaaaacaggagaaagcccgaacgcg

SEQ ID NO: 127088 - RNA, 65 nt, Homo sapiens
gacccgcccgccagaaccgcgcgccacccacaaccagggcccccgccaaggcggaggggaggcac

SEQ ID NO: 127089 - RNA, 65 nt, Homo sapiens
gaggcgaggccggcgggcccaggaggccgagggagaaagagccgagacgaacagcagaaagcagc

SEQ ID NO: 127090 - RNA, 50 nt, Homo sapiens
cgaccaggggggcgcggcagacccaccaaaaggggagcgggagcacagac

SEQ ID NO: 127091 - RNA, 78 nt, Homo sapiens
gcccagcggcagcagaaagagcacaagcacaagcgaggggaagccccacccaaaaccggggagagaaccgagaaagca

SEQ ID NO: 127092 - RNA, 66 nt, Homo sapiens
cggagcggccgcgagccaccgaggcccagaggagaaggagaaacggaggacgcccccacacaagcc

SEQ ID NO: 127093 - RNA, 76 nt, Homo sapiens
gaacaaaacagcggaaaagggcacagaccagcagcaagcagagcccggacaggcccgccaccggggcacgggcgcc

SEQ ID NO: 127094 - RNA, 56 nt, Homo sapiens
gcacacaacccccgaaagcaggaaaggcaagggcagaaaagaggggaaaaggccag

SEQ ID NO: 127095 - RNA, 56 nt, Homo sapiens
gaaagcgagaacaaaaccagcgaggggaggcaagcaggggggcaaaggaaagaagg

SEQ ID NO: 127096 - RNA, 39 nt, Homo sapiens
cgaggaggagccccacccgcgcagcggaaaaccacagca

SEQ ID NO: 127097 - RNA, 58 nt, Homo sapiens
gaagaccaaagcaggcagcgaaccgcagggagaaagaacggcaacagagggaaaagac

SEQ ID NO: 127098 - RNA, 55 nt, Homo sapiens
cgcaaccaccgcccggccacaccagggggaacgaaaaaccggaaacggaaaacgg

SEQ ID NO: 127099 - RNA, 78 nt, Homo sapiens
gacggagccaacagcgcgggcagcgaaccgggggagcgaggcacgggccaggaaaccgacggcgcacaggacgaaaaa

SEQ ID NO: 127100 - RNA, 83 nt, Homo sapiens
cggcccgagaggaaaagggcaagcccccaaaacgccccgacgcaccgaggaggagagaggagaaccaggagcagcacaagacc

SEQ ID NO: 127101 - RNA, 73 nt, Homo sapiens
cccgccacaccccggcgccggaaaggcagccaaagacggaagaaggcccaccagcagagagaacggcccggga

SEQ ID NO: 127102 - RNA, 60 nt, Homo sapiens
gcggaaacacacaggacaagaacccaagaaacaggaaaaaacccaaaacaccaaaaggac

SEQ ID NO: 127103 - RNA, 62 nt, Homo sapiens
gggcgacacgaacaacaagcagaggaccaaagcaccagcacacagggccgacggagacgcac

SEQ ID NO: 127104 - RNA, 83 nt, Homo sapiens
gcgccgcgggcccggcaacagccgcaaccacacggcggagcgcgccagcaggcggccagagcggacggccaaggaggaggagc

SEQ ID NO: 127105 - RNA, 79 nt, Homo sapiens
gggggcccgacgggggcaggcacccggaccgcgaaagagcagagaagggaagaggccagcacgccgggcaggaagagcc

SEQ ID NO: 127106 - RNA, 76 nt, Homo sapiens
gccaagaaggagaagcagcgcggaaaagcagaaggccacagagggagcaagaggaggcgaccgcggcaacacgagc

SEQ ID NO: 127107 - RNA, 77 nt, Homo sapiens
cacccaggagaccccacgccgccaagcaggcagaaccagcaccacaggcggagaccccgaaaaggccaccacggaac

SEQ ID NO: 127108 - RNA, 104 nt, Homo sapiens
ccggcgccggccacagacggacgacacaagcccacgcgcccgcagcaagacgggacgacaacaccggcagagagacaagaaggccgcgggcggcagaggcacgc

SEQ ID NO: 127109 - RNA, 70 nt, Homo sapiens
ccagagcaccgcaaggaacaacgcaccccagcaccgcccagacgcagaccagcccaagagaacgaaagca

SEQ ID NO: 127110 - RNA, 71 nt, Homo sapiens
aggccaccgaaggcacggacagggacagaccagggacacaacgggaaaccggaccggaaggacacggacac

SEQ ID NO: 127111 - RNA, 58 nt, Homo sapiens
aaaccagccagccccaccagaggagagcccagggaagggaccaaaagagcgcccgaca

SEQ ID NO: 127112 - RNA, 68 nt, Homo sapiens
ggagacaccccacccgcggaaaaacgaagcggcccggagaaacaagaaggaaagacgacgggaacaga

SEQ ID NO: 127113 - RNA, 78 nt, Homo sapiens
ggaaaacaagccggaaaggaggaaaaagaagaccagcgacaaaagagaaacccggcaggagcacccagaagcaaacaa

SEQ ID NO: 127114 - RNA, 79 nt, Homo sapiens
gcagaccggaggaggcgggggcgccggcagaggaccaggcaccaccggccccggaagagcgcgacagagggagagcacc

SEQ ID NO: 127115 - RNA, 69 nt, Homo sapiens
aaaaaaaacaagagacaaggggggggaagacaacccggagaacacccaggggacgcccagaccaaacaa

SEQ ID NO: 127116 - RNA, 72 nt, Homo sapiens
gaaacagagaaaaagaaagacacagccgcacaaacacagagcagaccaccccacgaagaccaagcccagaac

SEQ ID NO: 127117 - RNA, 80 nt, Homo sapiens
acggaacaggccggcggccccaccccccaggaacgcaagcacaggaccagaaacgaaaggcagcagaagaggaaagccag

SEQ ID NO: 127118 - RNA, 77 nt, Homo sapiens
cccgcccccccggcgggcagagcccaggacgaaccaagaaacaaaagggaagaccggaacggagacgcacaacaagg

SEQ ID NO: 127119 - RNA, 97 nt, Homo sapiens
ccccaccccgcagcagggggagcagggcgagagggcaccgcggacggggccgcccagacggaaccaaagccgaccccgaaacagggagcacaacaga

SEQ ID NO: 127120 - RNA, 76 nt, Homo sapiens
gaaccagccgccggagcaccgcagcggcgcccgcaggggagaccagggacagaaggggggcaaggcccacagggac

SEQ ID NO: 127121 - RNA, 74 nt, Homo sapiens
cgagggggggcgcgccggaaaccggagcgcgcagcaggccaccgaaagacacagggagggcagccagaacgggc

SEQ ID NO: 127122 - RNA, 69 nt, Homo sapiens
gaaggaccaagaaccaggaggaagaagacagaagagcccgcgaacggaagcggagcggacccagcagag

SEQ ID NO: 127123 - RNA, 73 nt, Homo sapiens
gcgaggggcccgggggcaggaagcggaaaccagaagcccggaaaaagcccgcggaaagacaagggaggagaca

SEQ ID NO: 127124 - RNA, 79 nt, Homo sapiens
agcccacaagccccgccgcgcaagaaggccgggcgaggaggcccaaagcaccgagcgcccaggggaaaagccccagagc

SEQ ID NO: 127125 - RNA, 57 nt, Homo sapiens
cccgcagcagcagaacaaagcagccggaaaggagccaagagggaacaagcagcacaa

SEQ ID NO: 127126 - RNA, 79 nt, Homo sapiens
agaacaagaaacacaacaaaaaagagagggaagcaaagagggaccagaccccacaagaaaacacacaaccacaggccca

SEQ ID NO: 127127 - RNA, 71 nt, Homo sapiens
agaacgcgaaggcggaaaggcaagcagcggcgaggacaacacagacaaaagcgaagcggaaggaaaagaaa

SEQ ID NO: 127128 - RNA, 80 nt, Homo sapiens
cgggcgggccccgagagcagcagcgaagagcgcaggcaaacgacaaaaagcagcaagaaaaaaaacagaaaagcgacccg

SEQ ID NO: 127129 - RNA, 71 nt, Homo sapiens
cccacaaccggaccgcgaccagacaagccagcccaccacagcggagaagagaacccgaccgaagaaggaac

SEQ ID NO: 127130 - RNA, 84 nt, Homo sapiens
cagcaccacgccggggcggcggggacgagcgggcaaaggcgacgcccacccaggggcagagccccagcccaccagagcgcacgc

SEQ ID NO: 127131 - RNA, 68 nt, Homo sapiens
gcacagaaaggagagcacggccacgaggaagcgcaaagaaaggccaagaggggaaagaaaacacacaa

SEQ ID NO: 127132 - RNA, 41 nt, Homo sapiens
ccggagcccagcgccgcgcaggaaacagcagcaacggaccg

SEQ ID NO: 127133 - RNA, 75 nt, Homo sapiens
gagacgggcgccgcaccaggagcgaagagcgccgacaaggagggagaagaccaaagaagagagagcaggaccacc

SEQ ID NO: 127134 - RNA, 70 nt, Homo sapiens
ccgccaggcacaaagaaggaaacagggaagcccagaggcacggggcagaacaccaacagagggccgaccg

SEQ ID NO: 127135 - RNA, 87 nt, Homo sapiens
ccagggcagaaaagcgaccaggcgagagcggaaccagcaaagaagaaaccaagaggaaaggaaagaccgacagcccggacaagccag

SEQ ID NO: 127136 - RNA, 83 nt, Homo sapiens
ggaggccggggccgcgcgagggcgcccagcgaagaaggaaccagcaaagcgccacgaagcacaagcaagaggaccagccaaaa

SEQ ID NO: 127137 - RNA, 79 nt, Homo sapiens
agcggacgggggaggaggcaacgccgcgccagagcacggcgaccgagaccggggagaggaagaagcagaggaagaaggg

SEQ ID NO: 127138 - RNA, 84 nt, Homo sapiens
gagggaagaggaaggaagaggaagggagcgagagggagggccacagccggaccgaagagggcaggaagggggcgcagaaggaag

SEQ ID NO: 127139 - RNA, 106 nt, Homo sapiens
aaaaaaaaaccaagagaacgaagagaccaagaaggagcgagaagaaaagaaaacacaaggcagagaagagagccagccgaggaaccgccaaggccgcaggaaagga

SEQ ID NO: 127140 - RNA, 74 nt, Homo sapiens
aaccccagcgaaacaccaagagggaacaggacacccaaccgcgagaccagcaaggacgggggaccaaccgcgcc

SEQ ID NO: 127141 - RNA, 85 nt, Homo sapiens
ccccagcagcagggcaaccccgggggcagcagcaacgccggacgcccacgcaagcagagaaaaagcgcgacccagcaacacccca

SEQ ID NO: 127142 - RNA, 72 nt, Homo sapiens
ccgagaggaggaaagcgcagaagaagccaggaggcgagaaagaggagggaaaagagacacccccggaggagc

SEQ ID NO: 127143 - RNA, 78 nt, Homo sapiens
ggggcaacgggcccacccggaaggaaggcccagcgccaaacgacaaagcccggcgcagggcagccacgacacaaggga

SEQ ID NO: 127144 - RNA, 75 nt, Homo sapiens
cccccgccagcccagagagccgagaccacaggcaagaacggaagcacgggcggaggaaagcacaagcagagcccc

SEQ ID NO: 127145 - RNA, 78 nt, Homo sapiens
gacaagaagccaagcagagcacaggcaagggcggaccgggaagaaccaaagcgcaaccaccaaaggaagccgccaagc

SEQ ID NO: 127146 - RNA, 56 nt, Homo sapiens
cgagaagcggggaaacgcagacggccagcaccagagccggagagacggagcacaaa

SEQ ID NO: 127147 - RNA, 83 nt, Homo sapiens
ggaagcggcggcagcggcggggcggggcgagcagaggacccggcgggcggcccgcgggcagaccccgccccccgaggcgcagc

SEQ ID NO: 127148 - RNA, 75 nt, Homo sapiens
ggacggacagcgaagaccggacgccgggaagcccaccgaaggcgccccccaggcccgaggacaagggagaccaga

SEQ ID NO: 127149 - RNA, 66 nt, Homo sapiens
ggccacgcgagaacaaaaaggcaccaaggaggccccggccgaaggaccaggcaccacacggccggc

SEQ ID NO: 127150 - RNA, 72 nt, Homo sapiens
gccgagacccagcacacgccgaccaggggggacgcgagcgaagggcgcagggacccccagggagccccagca

SEQ ID NO: 127151 - RNA, 58 nt, Homo sapiens
acggccccagcacacagccagagagccaggaagcaaggagacaacacggggaagagac

SEQ ID NO: 127152 - RNA, 75 nt, Homo sapiens
cgacgggagggcgaccagggaggcagcagaaggaccgggcacggggagcgcgcgagagaaggcgggcggcgagag

SEQ ID NO: 127153 - RNA, 79 nt, Homo sapiens
gcaccgccgcgggagcgccgccaagggagccccgcgcggaccaccagagcccgcgggcggccgcagcgccgcgccagcg

SEQ ID NO: 127154 - RNA, 79 nt, Homo sapiens
cccacgacgacccgccagacgaggcgacgccgcaaggacggccacggcaggccagaggagcagcgagccgcgccaccgc

SEQ ID NO: 127155 - RNA, 70 nt, Homo sapiens
caacaccccggccaccgacccacaagaacacagagccagagaaaaaaaacacagaaaggcccaagaaacc

SEQ ID NO: 127156 - RNA, 80 nt, Homo sapiens
caacagcgccggcggcgcaccccaccgccaacccacggcgagaaagccaccccccccgaccaccaccgcgggcccgccgc

SEQ ID NO: 127157 - RNA, 67 nt, Homo sapiens
cggaacccagggccaccggggaaacaaacacacgcaggcaggccccccaggccgccgagacaacccc

SEQ ID NO: 127158 - RNA, 74 nt, Homo sapiens
ggagacccggggaagaaaacgccagaccaaaaagcgccggacagacaccccgcaccgggaagggggacaacagc

SEQ ID NO: 127159 - RNA, 82 nt, Homo sapiens
cccgaacggggaacggcacaacaaaaaagcggaccaaagacccaggaagacagcccgccgccgccagccccccaacagccac

SEQ ID NO: 127160 - RNA, 70 nt, Homo sapiens
accaacaaaaaacaggcccagccccggcccaggaggcaagagcgagaagagcgcaagacagaaagcgaaa

SEQ ID NO: 127161 - RNA, 81 nt, Homo sapiens
gcagaaccgcacccaggaggcggagcggacaaggcccggccgcgaggaggagaagacaagggcgaagaggcgggccccagg

SEQ ID NO: 127162 - RNA, 80 nt, Homo sapiens
ggaacgggacccggggacggcacccagaggaccaggcggcgcgccgcccaagagagagaagagaggcgcgagggcaggga

SEQ ID NO: 127163 - RNA, 50 nt, Homo sapiens
cccggacaacggggccacaaccaaagcgggccacagacacagccgacccc

SEQ ID NO: 127164 - RNA, 72 nt, Homo sapiens
ccgccggcaagaaccaggcaagccccgaggggaggccacgcacgggcggagacgagacccgaggcggaacgc

SEQ ID NO: 127165 - RNA, 79 nt, Homo sapiens
ccccagaagaagagagagggaaaaaaggagagcgcccagcgacgcagaaaacgcaggacccccgcggacgcgaaggcga

SEQ ID NO: 127166 - RNA, 71 nt, Homo sapiens
gacacaacccgggcgcggcccgggggaacccgcgcgaaggaaagccaagaaccccaaaggacacgaagcac

SEQ ID NO: 127167 - RNA, 75 nt, Homo sapiens
acagcagggaaacacacgcgcaaaggagaaccccacaccagaacccagcccagaaaggcagggagggacaagaag

SEQ ID NO: 127168 - RNA, 83 nt, Homo sapiens
cgcagcagcggggaggagccaaagcccggcgccaccaagccgcagggagaacacccaacgggaggacaaggaaacggggacag

SEQ ID NO: 127169 - RNA, 69 nt, Homo sapiens
gcgagcccacacaggaacccaaggaccgcaaagaaaacccagagaacaccacccgaagagacaccgaga

SEQ ID NO: 127170 - RNA, 73 nt, Homo sapiens
agacacccaccccgagggggcagccacaggacaaagcaaagaacaccagcacccagacaggagcgaacaaaac

SEQ ID NO: 127171 - RNA, 65 nt, Homo sapiens
cacccaaaggaagaaaggcgccaaaagcagggcccgacacgcaaacgccagcgcacggccaggga

SEQ ID NO: 127172 - RNA, 85 nt, Homo sapiens
agaccgaggcaaagaagcaggagcacacaaagaacagcggcagacggaggagaggaaggcgggagagaacacgacggggaaagac

SEQ ID NO: 127173 - RNA, 76 nt, Homo sapiens
ccgaaaagcgagcgcgaggaaaaggcggcgggagaagggagggcaagcagaaagcagaggaaaacgaacaacaccc

SEQ ID NO: 127174 - RNA, 71 nt, Homo sapiens
ggagcaaccacagaaggaaaagcacgacccgaagagagacacaccaacaaaggcagcgcgacagagaaagc

SEQ ID NO: 127175 - RNA, 38 nt, Homo sapiens
cccaacaccaccaaaagacgacccgcacaacaagaaaa

SEQ ID NO: 127176 - RNA, 79 nt, Homo sapiens
cccccaaaggcgggaaacagacagggcccacgcacccaggcggagcacagcggcacaacccgggcacgcagccgacccc

SEQ ID NO: 127177 - RNA, 80 nt, Homo sapiens
cgaaggaaccggacagaagcgcggcggcgcggcgaagagcccggaacgccagagcggaaaggaagagaacgccggaagcg

SEQ ID NO: 127178 - RNA, 85 nt, Homo sapiens
gcgagccgcgagagggccggcaggcccgggaaggcagaaaaagggacagggcaggcgaaggaacgaggaaaaacggaacggcaga

SEQ ID NO: 127179 - RNA, 71 nt, Homo sapiens
acaaaaaaaagcccaagcaacagcacgggaaacgagagcagaagcagacaggcagcaaagaaaggaggaga

SEQ ID NO: 127180 - RNA, 86 nt, Homo sapiens
gacacggcaaggacccaccagcgcaacaccgccaagaagcagcaggagcccgagggcggagccaagccccgacagccagaaacgcc

SEQ ID NO: 127181 - RNA, 74 nt, Homo sapiens
cgcaacacaagggagccggggcccccagcaagaacgggaacaaaaccgggggcccccaaagggaagccaaacac

SEQ ID NO: 127182 - RNA, 83 nt, Homo sapiens
agcccgacgacccccgaacaccccggggcgcgccggaggccgaccgggagcacgcagggaggagaagacaagcagacccaccg

SEQ ID NO: 127183 - RNA, 74 nt, Homo sapiens
cgcggaccgccacaaaggaacccgggcggacagcgcccaaagccaggccccggacagacggagcaccggcccag

SEQ ID NO: 127184 - RNA, 75 nt, Homo sapiens
caagagacaccaaggagacgcccaaggaaccccgccggccaccggcgggcaacgggcagaggaggaggcagcgcc

SEQ ID NO: 127185 - RNA, 71 nt, Homo sapiens
gccacaagaagacggacagcggaaaacggaggaaccggccagggggcagaaacgaagcacaggaacaagaa

SEQ ID NO: 127186 - RNA, 73 nt, Homo sapiens
agccacggccccaccgcaggcaccaccacaaggagaaccacaggcacccaaaaggaccggccaagggaagcag

SEQ ID NO: 127187 - RNA, 75 nt, Homo sapiens
ccaccagcgccaaccccccagaggcacaaaagggcggggccccgagcagacagcaggaaagaagaagccccggac

SEQ ID NO: 127188 - RNA, 61 nt, Homo sapiens
cgccccaggcccaccgccggggcgccaaggccgggagcagggacgcagaaaacgcacagca

SEQ ID NO: 127189 - RNA, 80 nt, Homo sapiens
gcccccggcccggagcaacgagcgcagcgccggccgccaggcacagagaaggcaaacgggagggcgaggacaccaagagc

SEQ ID NO: 127190 - RNA, 85 nt, Homo sapiens
caacggcccgccccccagaccagcagggggcacaccaggagggacgcgcaggcccgcgggcgacgcacgaggcacacaggaagga

SEQ ID NO: 127191 - RNA, 63 nt, Homo sapiens
acagagacacagaaccacacgcccaagggcagcaagaaagggaagggaggaagggaagaacaa

SEQ ID NO: 127192 - RNA, 87 nt, Homo sapiens
ggacggcagaggagaccgccgccggccacaaaggcccgcagacagccgcggggaagcacacccccccgaaggggccaacgagcccgc

SEQ ID NO: 127193 - RNA, 73 nt, Homo sapiens
cccaaggcagacgaccgcaggagggcgagcccaggaaaacaagagagccccgcgacgaggaaccaggcggcca

SEQ ID NO: 127194 - RNA, 83 nt, Homo sapiens
gccggccccggggagaaacggaggaggcccggggaccagaagaggaggggcgaggaacaccggcacaggccgcgagacacccc

SEQ ID NO: 127195 - RNA, 76 nt, Homo sapiens
gagggacgccgccggggacagagagcaaagggcccggccaggccccaccgccacaagcaggggaacaccgccaacc

SEQ ID NO: 127196 - RNA, 80 nt, Homo sapiens
acggcccccaagcggacgcgacccagcacggaaggccaagacaaggggcgcagagcggggggacaggcgcaagaccggag

SEQ ID NO: 127197 - RNA, 53 nt, Homo sapiens
acgcggccaacagaagagaccgccgacaaaggacagggccacagagccgaaca

SEQ ID NO: 127198 - RNA, 78 nt, Homo sapiens
gccccccgcgagcccccagcgcagggggaaccagagaagagacaacagcccaagacacagaaaaacccacccgaacac

SEQ ID NO: 127199 - RNA, 70 nt, Homo sapiens
aacgaggcgcaaggagggcagaccacgccgacccaggggagcccgacaaggagcggcagaccgagacaga

SEQ ID NO: 127200 - RNA, 92 nt, Homo sapiens
cgaacccggccgaagagcggcggcggcagcggcgcccgagcgggaagaagccgcagcaagccgcagcggcgcgcaccgggcggcccaggacc

SEQ ID NO: 127201 - RNA, 80 nt, Homo sapiens
gacgaggaccagcagaggccagcacgagaacccagacgggagacagaccgaaagaaagagggaccaaagaagacacggaa

SEQ ID NO: 127202 - RNA, 71 nt, Homo sapiens
accccccggcgccgcgccggcggcgaacgaaccagaaaaccggagagccccagagcaacacaccacgcacc

SEQ ID NO: 127203 - RNA, 87 nt, Homo sapiens
gaggcaagaccgccccgccgcccagaggacgcccaacaccacccacccaccacgggcgagcaacggcccaaccaacccccggaccgc

SEQ ID NO: 127204 - RNA, 62 nt, Homo sapiens
aacggccaaacaaacccgaccggggagcgccagagagaggggcacaagggggacggagcgag

SEQ ID NO: 127205 - RNA, 68 nt, Homo sapiens
gaggagggacccggaggacacagccagcgaggaacaagaagaacaacaagccaacggaccaaacaaaa

SEQ ID NO: 127206 - RNA, 49 nt, Homo sapiens
gcaggggaaagacaggagaaacaaaagaccaggacaaaagcaggagaag

SEQ ID NO: 127207 - RNA, 67 nt, Homo sapiens
gagccggcgaaaaggacgggcccccaagaaaccaagaaaaagacgcgaaaaagcacgaccacggccg

SEQ ID NO: 127208 - RNA, 71 nt, Homo sapiens
gcaagccggaggagaagcaagaaggcccggacacagcaaaccgggccacaggcgggggagccaagggagag

SEQ ID NO: 127209 - RNA, 50 nt, Homo sapiens
caagaccgcgcagccgcggcgaacaacggcaagcggagaagagcaaggcc

SEQ ID NO: 127210 - RNA, 73 nt, Homo sapiens
aggcacggggaccgcgcccgcagagaaagacgaccgccaaccagggagaacacagagaaaaaccgcaagaaac

SEQ ID NO: 127211 - RNA, 71 nt, Homo sapiens
cgaaaacagacgggggaacaagagggaagccagccggcgggacaaggaaggaagcacacggaaggggcaaa

SEQ ID NO: 127212 - RNA, 76 nt, Homo sapiens
gcgaggccgggaccggagcaccggcagacccggggaccgggaaggcagagaaagcaagagacgcaaccgaacgcag

SEQ ID NO: 127213 - RNA, 66 nt, Homo sapiens
cccgacgcggggaggcgcccgggagcgcggccgcgggccgccgcccggcgaaaagggggcccacgc

SEQ ID NO: 127214 - RNA, 56 nt, Homo sapiens
ggaaaccgacgcagacgagacccaagggccggaccacggagcggccgagaaacgag

SEQ ID NO: 127215 - RNA, 54 nt, Homo sapiens
cagaaccgcgcgccacccacaaccaggaagcccggggcggcgacggagcacgac

SEQ ID NO: 127216 - RNA, 70 nt, Homo sapiens
cggacaggacaagacaggcacaagaacccggaagaaagaaaacagaagcgccgggggccacaagaaagac

SEQ ID NO: 127217 - RNA, 74 nt, Homo sapiens
acacaagccggagggcaagagggcgaaacaggccgacgcaaacgacaacgggagacgcagcaggcgagagacaa

SEQ ID NO: 127218 - RNA, 69 nt, Homo sapiens
gccagaaaaggagcgccggagcagaccaaagccggacacaagagggcaagaaaggcgcgacgggccgaa

SEQ ID NO: 127219 - RNA, 32 nt, Homo sapiens
gggaagagagcacaacaggaaggaacgaaggc

SEQ ID NO: 127220 - RNA, 71 nt, Homo sapiens
ccacggcgggccgcgggaggacaccacccacaggaagagagaaggccacgcccgaccccaagcaacaacgg

SEQ ID NO: 127221 - RNA, 83 nt, Homo sapiens
gagaaccagcaccgggacgcacagagaccggaagaccaagcaggagaaccgaccgccgagacggcccagacgcgcggcacagg

SEQ ID NO: 127222 - RNA, 110 nt, Homo sapiens
ggcggcgcccgcgacgcgcgaccggagagagacgagacccgggccggcagccgcacaggcgcccggacaccagcagcacggggcaaggaccgaggcgccggccgcgcagc

SEQ ID NO: 127223 - RNA, 78 nt, Homo sapiens
ccaggccacaaaggaaacccgagagacagcacccccgggggcgcaccaagggcccaagggggcccaggccggaccacc

SEQ ID NO: 127224 - RNA, 78 nt, Homo sapiens
gcgccgaagcgaggcccccccacaaggcaaaacggaggaggcagggagagagcaccggacacagccagcaggacgacg

SEQ ID NO: 127225 - RNA, 81 nt, Homo sapiens
ccgccaaaaagccaccgcgaaaccccggagcgacgcagcgccggagaagcggggacaagaacccaagaaacaggaaaaaac

SEQ ID NO: 127226 - RNA, 66 nt, Homo sapiens
cgcagacaggacccccgcgagccaccagaacgagacagcccccaaagcccgcggcgccaggccacg

SEQ ID NO: 127227 - RNA, 37 nt, Homo sapiens
gcgcccgcgcgcgcggcggcacgggcacaggccccag

SEQ ID NO: 127228 - RNA, 81 nt, Homo sapiens
aggaggggggcacccggacaggccgccgccggaaaccgacaggagcgaagaagaagcgcaaacgccggcgggggaacggga

SEQ ID NO: 127229 - RNA, 77 nt, Homo sapiens
agaaggcaaaggaccagaccgagccagagggagcgaacgcaggggggaagaccacaagggccggacagacacgaaga

SEQ ID NO: 127230 - RNA, 63 nt, Homo sapiens
aggccccacccagcgcacacaccaccacacacggacacacgcgaagaaacacacacgaagcga

SEQ ID NO: 127231 - RNA, 53 nt, Homo sapiens
cccgaggagccaggccacaccccaggaacagagacagacccgggggcccccaa

SEQ ID NO: 127232 - RNA, 57 nt, Homo sapiens
gaaaaggagcaggaagcccagaaccacccccgaacaacaaacccacaccagagaccc

SEQ ID NO: 127233 - RNA, 64 nt, Homo sapiens
ggaaccggcagaggagaaacagacggccccgagggccggagcgcgaagacgcagggaaagcggc

SEQ ID NO: 127234 - RNA, 85 nt, Homo sapiens
cgaagaagaaaccggcggccaaaaaaaaaaaaggaagcacaccaagagagaagaacgagagccaaaggaccgcagacaggaaagc

SEQ ID NO: 127235 - RNA, 74 nt, Homo sapiens
gcggccaacgcagaaagaaaccgcgaaggagacccccacgggccaaggacccggcgagaaggacgcgcagcaga

SEQ ID NO: 127236 - RNA, 59 nt, Homo sapiens
gggccccggccccgagggggaggaggagcacgcacagccggagcgaagaacaccacagg

SEQ ID NO: 127237 - RNA, 79 nt, Homo sapiens
agaagaagcacccagcaagcgagggaccgggacgccacagccagcggagacggagcggcggcaagcagcgagagacaac

SEQ ID NO: 127238 - RNA, 87 nt, Homo sapiens
cacccccccccggcagacacggcgggcaccgaccccacccggcaggcagacgggaaaaaaacaagagaccaaggagacagaagaaaa

SEQ ID NO: 127239 - RNA, 73 nt, Homo sapiens
ggggcccccagcaagaacgggaacaaaaccgaaaccccacacacgccaaagaagggaacacccaccagacggg

SEQ ID NO: 127240 - RNA, 63 nt, Homo sapiens
gacagccagcacaccccgcgagcaaggccggcaagaagccaacggagaaccaaggccaagacc

SEQ ID NO: 127241 - RNA, 76 nt, Homo sapiens
aagagaagcgaggcgcggcacacaaccccgggacacacagagaccaagccacccggagaacaagaaaaagagaaaa

SEQ ID NO: 127242 - RNA, 74 nt, Homo sapiens
agaagaggaaaaaagaaaaggaacaaacgaaagagagcagcgcaaccagccagaaaaggcccagggccgcccgg

SEQ ID NO: 127243 - RNA, 71 nt, Homo sapiens
caagggacaggcagcgcgcccaagggcggccccgcagcaccacacgaacaccccaccagaccacccagcaa

SEQ ID NO: 127244 - RNA, 76 nt, Homo sapiens
caggacaagccgccacccccagacccggccaaggacacacagccgcacgcgaaccacaagcagcaaggcgccaaga

SEQ ID NO: 127245 - RNA, 55 nt, Homo sapiens
cccggccgccagcaccacgacgacgagaagcacaccagcccgaaacccgacagga

SEQ ID NO: 127246 - RNA, 70 nt, Homo sapiens
cagcagcaccaaggaccagcaacaaaagacaacgaggcaagagagcaaagcgaacaaccagaaacccacc

SEQ ID NO: 127247 - RNA, 75 nt, Homo sapiens
cacagagaccccggccacacacagggagccgcgaaaccggaagaggagccgaaaggcagagccccggcagaagag

SEQ ID NO: 127248 - RNA, 63 nt, Homo sapiens
ggacggcacagcccgccgaacccgaaaggagaccacgaaaacccggaagagcgagaggccaag

SEQ ID NO: 127249 - RNA, 35 nt, Homo sapiens
ccggcgggaggaacaaaaggcaagcggacacaaaa

SEQ ID NO: 127250 - RNA, 77 nt, Homo sapiens
aaacacagccgacagacgccaccaaaagcaccagacaagggaggcgaggacggacaaaaggaaacggacgggaggcc

SEQ ID NO: 127251 - RNA, 88 nt, Homo sapiens
gccgccagagcaggacgaaccgccaacgcaaggcacccgagaaccaggaggaccgcgccaacaggacgaggagaccgaccaggagacc

SEQ ID NO: 127252 - RNA, 77 nt, Homo sapiens
ccggcccggcggccagccccacagcgggcagccaccccccccacgcgcaccaccacgacacagaccaaacaggacag

SEQ ID NO: 127253 - RNA, 78 nt, Homo sapiens
caaagagaacgacagccagacgcaaggcgaggaggaagaacaggaagaagcagcagcaacagccagagacggaggccc

SEQ ID NO: 127254 - RNA, 82 nt, Homo sapiens
ccaccccaggacggcccccgcagcaagccccagccaaaggccccagccccagccaaaccccccacacgaaccagcaagggag

SEQ ID NO: 127255 - RNA, 76 nt, Homo sapiens
caggaaggaggaaccggcgagcgccgggcgcccaggccagggaccggccgcggccccgaggggcccaaacaaaaag

SEQ ID NO: 127256 - RNA, 78 nt, Homo sapiens
cggggagacggccagggggcaagcagccgagggggaagccaggcaccgaggggggacacggggccgggacgcacggga

SEQ ID NO: 127257 - RNA, 74 nt, Homo sapiens
gaaccccgccccgaggcgggggcgcggacgcggccgacacaacccgaggccacgccaccccgcgcccccgggca

SEQ ID NO: 127258 - RNA, 134 nt, Homo sapiens
ccaaacggagcccgcggccaaacgggccgcgggccgagcgaggaggccgaggccgggaggccggcccggaggccggggaaaggcaggggcgcaagcaagcagaggaggggggcaccccaaagcccaggcgccgg

SEQ ID NO: 127259 - RNA, 37 nt, Homo sapiens
cgcgagcaggaaagagccaagccacacccaagcgagc

SEQ ID NO: 127260 - RNA, 77 nt, Homo sapiens
gaaaaagaggccgaaaaacggcacacccaccaagcacccaacagaagaagagaagaaaaagcagcacgaaggcgagg

SEQ ID NO: 127261 - RNA, 83 nt, Homo sapiens
ggcgagcggcggggagcggcgaagccgcgggcgaggggacagagacccaggcaggcccggagcaccgaaaccgagaaggcccg

SEQ ID NO: 127262 - RNA, 79 nt, Homo sapiens
aggggaaaaccagggaaagcagcacaggccagcagaccaggcgacggccaacaaaccaccgaccgcagggaggagggaa

SEQ ID NO: 127263 - RNA, 79 nt, Homo sapiens
caacccccaaagacaggaggaggaccacagaaaacacggacccccggaagcacgaaaaacagaccccggccggccagca

SEQ ID NO: 127264 - RNA, 71 nt, Homo sapiens
gaagaccagagaccaccacaaaaagggcaagacgccaagagaaaaggcgagagcacaaagcaccaagagcc

SEQ ID NO: 127265 - RNA, 78 nt, Homo sapiens
ccccgaggagcgggacacaggcagagaccgggcacaaccagccagcaacccgcccgggccaagcaccgcccacccagc

SEQ ID NO: 127266 - RNA, 52 nt, Homo sapiens
ggaagggccagcaggcagcaaagaaccgcaaagaagccaaaaacaacacaga

SEQ ID NO: 127267 - RNA, 79 nt, Homo sapiens
gcgggggacaggaagggagaagcaagaggacacgaagacacagacgcccaggaggcaagagcgagaagagcgcaagaca

SEQ ID NO: 127268 - RNA, 73 nt, Homo sapiens
caaagcgaacaaagaaagggaagagacacaagacaacgccccgacagagccggcaagacaggcgacgacgaag

SEQ ID NO: 127269 - RNA, 69 nt, Homo sapiens
acgcacaaaacacagagggcgaaccaaagaaggaaggcgacccaaaaccacgaagcacaggcagccgag

SEQ ID NO: 127270 - RNA, 115 nt, Homo sapiens
gagcccagcgcgcagcccggaccagccaagccccaacggcccccgcgccgggcgcagcgaaaagccaggaagggaagagaaaacccagggagacagcaccccagcgacgcggcca

SEQ ID NO: 127271 - RNA, 55 nt, Homo sapiens
ccgggcacggcaacgggaggcccaaggagagaaaagacacaggagaacgggaggc

SEQ ID NO: 127272 - RNA, 80 nt, Homo sapiens
ccgaacagagagaacaagagacgcagccgcacagaggaagagacccagacgaagagcgcacagaaagagggaaaacaaag

SEQ ID NO: 127273 - RNA, 122 nt, Homo sapiens
acacccacggagcaaggaaaaaaacccgacagcagagacagagaggagccaacccccaggccaggagggggccacaccgaacccagccgggaggccaaggccagggagcgagcccaggagga

SEQ ID NO: 127274 - RNA, 61 nt, Homo sapiens
cgcccgcaggggagaggaaacgagcgagagagaagagggcacaggggcgacagaaggacca

SEQ ID NO: 127275 - RNA, 79 nt, Homo sapiens
gacaaggggccgaccgggaaggacgacacgcccccgggccaccaggggagcagcagcccagccaccgcgggcaccaagc

SEQ ID NO: 127276 - RNA, 80 nt, Homo sapiens
ggcgcgcgcgcgcgccccggacccgggcggacgagcacgaacacacgaagcaacccaggcacccccaacaggcacccacc

SEQ ID NO: 127277 - RNA, 56 nt, Homo sapiens
gcgcccagcagcgcaggccacgagggcacagaacgagcggccacgcccgaaccagc

SEQ ID NO: 127278 - RNA, 82 nt, Homo sapiens
ggcaggacgagggcggcgcgggagcagcacccacagccaaggcgggagccacggcaggaaaacagggcgacaccccaacgcg

SEQ ID NO: 127279 - RNA, 32 nt, Homo sapiens
cggggccaccccaaacacagccccagcgcgag

SEQ ID NO: 127280 - RNA, 70 nt, Homo sapiens
accccaaagaacacagaccaccaaggagagcaccggggggaagaagaagggaacaagcggagggacgcac

SEQ ID NO: 127281 - RNA, 65 nt, Homo sapiens
ccgccggcgcgggaaacgggcgaagcgacgagccgcgaggaggccaaaacagaagaggcaaagcc

SEQ ID NO: 127282 - RNA, 75 nt, Homo sapiens
gcgaccacaaggaacgaggggccccaagagcacagaccagcagccgccaaagacaagcaccagcagaagcaaaca

SEQ ID NO: 127283 - RNA, 77 nt, Homo sapiens
cgcgaaggaagcggggacacgcggccccagcgcccggccccccaccggacacccgcggagccaggggagcgcccaga

SEQ ID NO: 127284 - RNA, 58 nt, Homo sapiens
accaacagaaacagacccaaacacgagcccagaaaccccgaaggccaccgccaccacc

SEQ ID NO: 127285 - RNA, 71 nt, Homo sapiens
ccagcacaacaaaccccgcgccccagaagggaaggcaggacaaggagccgccgcaaacgaagcaaaggaga

SEQ ID NO: 127286 - RNA, 37 nt, Homo sapiens
gaaaggcgggccacaagccaagaagaggaaaccagaa

SEQ ID NO: 127287 - RNA, 69 nt, Homo sapiens
aggcggagggaccccaaaaaaaacaagaaccacggcacgaaagggacacaggaacgccacaagaaacaa

SEQ ID NO: 127288 - RNA, 70 nt, Homo sapiens
gggggcggggggacaccgagaccagcccccggccgggcagagagaaagacaacgaagagaggaaagaagc

SEQ ID NO: 127289 - RNA, 73 nt, Homo sapiens
ccccgccgacacgccgcgaaaacaagacagccagagggcgggaggccaggcagcacgcagacaagaagcgcag

SEQ ID NO: 127290 - RNA, 34 nt, Homo sapiens
ggcaaagaaagacccacaacacacacgcacaagc

SEQ ID NO: 127291 - RNA, 64 nt, Homo sapiens
gcgcgggcgggcgcgggggagcgggcgccagaaagcgaggaggccgggcgcaccccggaggcgg

SEQ ID NO: 127292 - RNA, 65 nt, Homo sapiens
gccccgaggccccgaccgcggcggagcccgacccacccaaggcaagaagaaacacacgcgcggcc

SEQ ID NO: 127293 - RNA, 58 nt, Homo sapiens
agagaaccccccgcaggccgcaccagcccagcgcgcgggacaaaggagcagggggcga

SEQ ID NO: 127294 - RNA, 86 nt, Homo sapiens
ggccaccgcccagcgggagaggagcccaccaggacgaccgcgccgcccagcacgccagacccacaaccccaagagcagcggcgaga

SEQ ID NO: 127295 - RNA, 38 nt, Homo sapiens
gggaaacccgccacaaaagcgggaacaagcggagcacc

SEQ ID NO: 127296 - RNA, 81 nt, Homo sapiens
acaccccgcaaccggagaagcggcagaacgcccggccaagacagcagcaccaaggaccagcaacaaggaacaaagagcaga

SEQ ID NO: 127297 - RNA, 78 nt, Homo sapiens
aagcagagcgggcaggacaaccaggggaccagagaggacggcaccagccaggagacgagaaaaggaaccacagaaccc

SEQ ID NO: 127298 - RNA, 75 nt, Homo sapiens
gaaaggaaacaaaacgagcaaacacaggaacccaacgagccaaaggcgacagggggaccgcggcgcgagggacgc

SEQ ID NO: 127299 - RNA, 82 nt, Homo sapiens
ccgcagcccccggggcccacggccgcccgccaccagggccagcaggcgaaagagaagcaaaggaagaagcgaagcaacggag

SEQ ID NO: 127300 - RNA, 77 nt, Homo sapiens
cagaccacaggagaacgaggcacagggacccaccgagacaccaagggcggggcgaggaagagaagcgaggggaccag

SEQ ID NO: 127301 - RNA, 70 nt, Homo sapiens
gggcccgggcaccacgggcggcgccaggccggcccaggacggaaaaggcgcacacgacccggagaacccc

SEQ ID NO: 127302 - RNA, 73 nt, Homo sapiens
acgcagaaagagacacaccgacgaaaaagcgcaaaaggccacgccggagggaacgaaccacagcacgcccaag

SEQ ID NO: 127303 - RNA, 53 nt, Homo sapiens
ccacagaaaggagacgcaacaccaggaagccacagggaaaacaagggcgacag

SEQ ID NO: 127304 - RNA, 83 nt, Homo sapiens
acagaccaaaaacaggcccggcgagccccgcagccagggagggaaaacacaaacaacccgagcccagggccaaccccacggaa

SEQ ID NO: 127305 - RNA, 60 nt, Homo sapiens
caggacagccggcggcggagcggccggccacggaggagggaggagcgggagcacccgagc

SEQ ID NO: 127306 - RNA, 75 nt, Homo sapiens
acggggaagagaaaaccagcgggcgagcacacggaacaaagccccaggagggaaaccggcaagcagcccagccga

SEQ ID NO: 127307 - RNA, 83 nt, Homo sapiens
ccccaaaggcggaacaggaaacggagaggcgggcggaccaagaccccccccaggagcaggccccccccccaacaaccggccac

SEQ ID NO: 127308 - RNA, 72 nt, Homo sapiens
cccggcacacggcggccccacggccggaaccccccgggcgcccggagaccgcggcacccaggaccgggcaac

SEQ ID NO: 127309 - RNA, 74 nt, Homo sapiens
cgccagcagaggcggagcccgcagaccgcagaaggccggagacaccagcagagagggccccgccagagggccaa

SEQ ID NO: 127310 - RNA, 76 nt, Homo sapiens
ccgaaaagcaaggcggcaagccagaagcaccgaggacagaacaacagaacagcggcagcgaaacagaacagaaggc

SEQ ID NO: 127311 - RNA, 80 nt, Homo sapiens
agcgaggcagaaccccacagccacaccagccaaaggaggaaaagcccagaaagcggacaaaacgaagcaacgaagacaga

SEQ ID NO: 127312 - RNA, 64 nt, Homo sapiens
aaagacccaggagaagccgcccaaagaacggccaagacaaggccgagaccgcgggaagaagaag

SEQ ID NO: 127313 - RNA, 80 nt, Homo sapiens
aaaaccggcggcccaagacagggcacaagggcaaccaagaggcgcgaccccagggacaaccccaaccgggaaaccggacg

SEQ ID NO: 127314 - RNA, 78 nt, Homo sapiens
aggacccaaggagagcagcggaggcgacgcgcccagaagagagagggggaaccggggaaggcaccggcaaggggggag

SEQ ID NO: 127315 - RNA, 67 nt, Homo sapiens
cgagcccaggagcgccacgcgcggaaggcagcgcccagcagcgcagaaacgggggagaaggaggaac

SEQ ID NO: 127316 - RNA, 70 nt, Homo sapiens
acccaagggggggaaaaacccagccggccccaagcgaaggagccggaaggggcaccagcagccaaccgcg

SEQ ID NO: 127317 - RNA, 80 nt, Homo sapiens
cacgcagggacccccacacggcagccaagacaagcaaacccaggaacacccggccggcccggcgccccggggcccgaggc

SEQ ID NO: 127318 - RNA, 72 nt, Homo sapiens
cgcggggcagggcaacgggccacgccccagagcaaacagaacaaaaacaagaaaagcgacagaggggagaca

SEQ ID NO: 127319 - RNA, 74 nt, Homo sapiens
acacaaccagacgcagaaaaccaggaagggacaacagagaagcaaaggccagaaacagagaccaccaacgccaa

SEQ ID NO: 127320 - RNA, 71 nt, Homo sapiens
agaagacgcgaggacggagggcgaccagcagaaaggacccaggagcgaaacagaaacaaaaagaagcgggg

SEQ ID NO: 127321 - RNA, 74 nt, Homo sapiens
aaagccaaaacacgacagacggagaaaagaaacgggagacccacaagagcggccaaaagaaaaccacgaggagc

SEQ ID NO: 127322 - RNA, 74 nt, Homo sapiens
cggcccacagcaggacggaagcgagggcacgggcggcagcccgagaccgcagcagggaaagcaacggcgcaagc

SEQ ID NO: 127323 - RNA, 76 nt, Homo sapiens
cggagaggagggagggaaaccgccccaggaggaaaaacccgagaaggcaagaccaggcacacacccaaaaaaacca

SEQ ID NO: 127324 - RNA, 36 nt, Homo sapiens
gcacaagcaccccacaggaaaaggaccggcaaaaaa

SEQ ID NO: 127325 - RNA, 73 nt, Homo sapiens
gaccggcgcgcgggagcgcacggccccaacgaggcggccccaggggggaccaacaagggagaaccaacagaac

SEQ ID NO: 127326 - RNA, 61 nt, Homo sapiens
gcagccgcgagagaggcaagccggggggacccccgccaagagaccggagaccagccacccc

SEQ ID NO: 127327 - RNA, 78 nt, Homo sapiens
ccggaaaccggagcgcgcagcagggagcaaggaccacagaaacgcagaaaaaggggaaagaaaaggcacccagaagca

SEQ ID NO: 127328 - RNA, 74 nt, Homo sapiens
gggcgcggccagacgacacccaaccgggccagaagcaggcggggaaaagaaacaaacaacaagaagaaggacaa

SEQ ID NO: 127329 - RNA, 72 nt, Homo sapiens
gaaagagcgccgggacagggggaggaaagcaccgaggcacaacaggccgcaggagggaagcgcacggaaacc

SEQ ID NO: 127330 - RNA, 77 nt, Homo sapiens
gcgagaacagaaggagacagcgaagcggggggaaggagcgaaagagaaggcgcaacaaagcccagggacaaaagaaa

SEQ ID NO: 127331 - RNA, 72 nt, Homo sapiens
cggaacaaacgagggcccgggaggaccgacgcagccagggcccaaaaaagggaaccgcacagcgagacaccc

SEQ ID NO: 127332 - RNA, 58 nt, Homo sapiens
gggaagaaagaaaaccaaagagccggggacaagggagaaagacagcaaagaaaaggag

SEQ ID NO: 127333 - RNA, 66 nt, Homo sapiens
cgcagggcgcccccggaacacggaagagaaccagccaaaccgaaaacaaagcaggacagaggaaga

SEQ ID NO: 127334 - RNA, 54 nt, Homo sapiens
gagcgccaaggaccggcaagggaaccccgacagcagagacgacgcggcaagcag

SEQ ID NO: 127335 - RNA, 73 nt, Homo sapiens
gaggaaggagcaacccgaaaaccagccagacacaaacaaggaagaggaccccaaagcaacaccagagacagga

SEQ ID NO: 127336 - RNA, 76 nt, Homo sapiens
accaagggaggccccgggaggccgaggcggggggcgaggaagagacaggcgggggagaagaagcagggccaaacgc

SEQ ID NO: 127337 - RNA, 61 nt, Homo sapiens
aagcgacagggcaggcaccgaggaagcggacaacagaaagccgggaaggaccagaagagcg

SEQ ID NO: 127338 - RNA, 56 nt, Homo sapiens
ggcgacagggacaacagaacaaaggaaggggcagcagcacccaagaacggccgacg

SEQ ID NO: 127339 - RNA, 54 nt, Homo sapiens
cggcccacgaggccaggcggcccgcagacggccccaagaccggagcgggaagcc

SEQ ID NO: 127340 - RNA, 76 nt, Homo sapiens
caaaagcaccaccaacagacccacaacaccgcgcacaagcagaccgacggcagaagggcaaggaggcggcgcgaga

SEQ ID NO: 127341 - RNA, 77 nt, Homo sapiens
agggcccaagggaccaccgggggccgaagagagcgggaggagagaccggaggccgaggacagcccagagcaagcaca

SEQ ID NO: 127342 - RNA, 68 nt, Homo sapiens
ggaccggagcacgcgaaggccgcccagccccacacgggagcacaccagcaagaagacacccaccgaag

SEQ ID NO: 127343 - RNA, 70 nt, Homo sapiens
cagaaccccggccaaggaggggcaaaaacccggccaggaggacccccaaaaagggcggaccagcaccacc

SEQ ID NO: 127344 - RNA, 79 nt, Homo sapiens
agacccggcgcggcgccccgggcccagcacgcggggcaggcgacgggagacagaccgaaagaaagagggaccaaagaag

SEQ ID NO: 127345 - RNA, 78 nt, Homo sapiens
agcacagaagagcgaggagggagaagaaggaagaggaaaagaggagggccaaaagagagacggagagggaaggcacaa

SEQ ID NO: 127346 - RNA, 85 nt, Homo sapiens
ggcaaaacagcaaccccgcgcccgccacggcccgccgcccggaaggccaccgcgcggccaggcagagcagcccaccagggagggg

SEQ ID NO: 127347 - RNA, 60 nt, Homo sapiens
ggacaaagaaggacagggaaaaccgacgaccggaagaggccagcaggcgaccgacccaca

SEQ ID NO: 127348 - RNA, 72 nt, Homo sapiens
agccaagagcaagaaacacccaggcaccggccccaagccccaaagcaaccagaacgccgaagaagcggggaa

SEQ ID NO: 127349 - RNA, 64 nt, Homo sapiens
caggagcggccggggcgggaaccaaggggagacacccaggcaggccggacccacgcagggacca

SEQ ID NO: 127350 - RNA, 71 nt, Homo sapiens
aggcagaggcacaccgaaagcaggacaccacggcgaaaacagcgggacgccacgaaacgcggagacaaaga

SEQ ID NO: 127351 - RNA, 96 nt, Homo sapiens
caccaagcaccaaggaaggaggccccgaccggcggcgcaaaggcgcccggagggacccggccgagccaagaacagaggcgccggacccccgccacg

SEQ ID NO: 127352 - RNA, 105 nt, Homo sapiens
ggaagcgcagaaagcaggcgaacccgcggcgcaaaacgggcccacgagacgcgaacaaacgccgcgccgccagaagaacagaccgggagaccagccacgcaccag

SEQ ID NO: 127353 - RNA, 78 nt, Homo sapiens
aggggcgccacgcaggagcggaggccggcagggagcacggagggaggccgccaggccggcaccccggggcgcaagaag

SEQ ID NO: 127354 - RNA, 80 nt, Homo sapiens
gacaggaaccagccgggggccaaccgaggagccacgcagcagaaagaacaggcgggccccggggcgcaaacgcccaacaa

SEQ ID NO: 127355 - RNA, 59 nt, Homo sapiens
accaacagaggcaagaaggacaacaaggagaaggagcagcacgcggagagcacgacggg

SEQ ID NO: 127356 - RNA, 75 nt, Homo sapiens
aggccggcggcagcagcccagagcgcaaagaagacgaggacgcgcacaggaaaggacgcggaacaagcaggcagc

SEQ ID NO: 127357 - RNA, 79 nt, Homo sapiens
ggggcccaaggcgccacaaggacagagcgggagccaccagcgccaaagggaagccaggagcccgggggcacggggagaa

SEQ ID NO: 127358 - RNA, 84 nt, Homo sapiens
aaggggccaaccacagggagagaacaaacacaggggccaccaggacaaggaagaggggagccaaagaccaagcaccagagaaga

SEQ ID NO: 127359 - RNA, 54 nt, Homo sapiens
caccagaagaagggacaaaagaacagcgacgcgggagccggacaccacgccagg

SEQ ID NO: 127360 - RNA, 81 nt, Homo sapiens
cgcagggaccacagcaccgaaaacaccaggaaagacaggagaccaaaaaggcagcgagagcccagagaagggaagaaagcg

SEQ ID NO: 127361 - RNA, 71 nt, Homo sapiens
gaaacaccgaagcaaaaagaagcccggcagaagacaggggaaggcaggaccggcccgcagccacccagacc

SEQ ID NO: 127362 - RNA, 85 nt, Homo sapiens
ggcgggggggccacgcagccggacacgggggcgacccgggggcccgggcagcaggcaacacagagcgaccgaaagaacaagggga

SEQ ID NO: 127363 - RNA, 85 nt, Homo sapiens
cgcccgaggcgaggaggagcgcggcggcaaagaaaggcagaagagaggcaaaaacaaaggaaggaaaggaaaacgaccccgggaa

SEQ ID NO: 127364 - RNA, 75 nt, Homo sapiens
gaaacagcagccaaccaggcccgagacaaaaagaagcgagaacggcaagaaagagagaaggaagaagaggccaga

SEQ ID NO: 127365 - RNA, 78 nt, Homo sapiens
aacaaaaagaaagcgcgacacaggcgagaggcagaggcaaaaacaagcaaaccccagacagccggggaggcccgacag

SEQ ID NO: 127366 - RNA, 84 nt, Homo sapiens
cagacacggaccgcgggccagccgccaaagaccccgccggagcccagcagaagccaccaagaggcaacagacagaggaccagga

SEQ ID NO: 127367 - RNA, 74 nt, Homo sapiens
gaagaaaggccagaggcccaagcccaaaggaggagaaacccagaaaacgccaaaccgaccaggagaaaaacaga

SEQ ID NO: 127368 - RNA, 73 nt, Homo sapiens
caggcaccgccagaacccgaccgccaggaagaaaagacccacccggccaccgaaaccacaggccggggaaggc

SEQ ID NO: 127369 - RNA, 75 nt, Homo sapiens
gcggagggggacacccgggcggggcagagcagcccccagccagccgcgagggaggacagagcccaggaccaagag

SEQ ID NO: 127370 - RNA, 80 nt, Homo sapiens
cggaggaagaggggaggccgcccgagggggcgaagggacgccacaaacgggcacaccaacggcccaggaccggcaggaac

SEQ ID NO: 127371 - RNA, 80 nt, Homo sapiens
aaagaagggccacaggggaggcaacgcacgggccacaggcagccgcagaacaggccggggacggagggggacccagcgaa

SEQ ID NO: 127372 - RNA, 58 nt, Homo sapiens
aggcccaggcaaccaaaagcgcggcaagcaccggcagaccgagcaggagaggaccgca

SEQ ID NO: 127373 - RNA, 73 nt, Homo sapiens
cggcgccaagacccagcacaaacaccgggaaggaaccgggcaaccagcagagaccgccccaaccgagggccag

SEQ ID NO: 127374 - RNA, 76 nt, Homo sapiens
aaaacaagaagccgcacacacaacaacaggcaaccagaaggaccaccagagaggaaacccggcagaaccagaacgg

SEQ ID NO: 127375 - RNA, 67 nt, Homo sapiens
aggccgaacggagcagacaaaggcaccgacagcacagcagaaaggccgccccgccaaccccccaaca

SEQ ID NO: 127376 - RNA, 79 nt, Homo sapiens
cagacaagaacacaacccaaacccgcccggcacgagaggccccagaaacacaaccccaagacacgggcccccacaggac

SEQ ID NO: 127377 - RNA, 65 nt, Homo sapiens
gagccgggcccgggaggcccagcaaaacaccgagcggcggaagaaaagaaaagacccaccaaaag

SEQ ID NO: 127378 - RNA, 65 nt, Homo sapiens
ggcgcaaacgacaccacccgaccggagggaagcacaaaagcaagaggaaaagaaacaaaaaagcc

SEQ ID NO: 127379 - RNA, 71 nt, Homo sapiens
agagagagcaagagaggaagaagaacgacccgcccggggcagcaggaaaacaggcaaaagcacggagaagg

SEQ ID NO: 127380 - RNA, 84 nt, Homo sapiens
agccacaaacacagaggaagaccaccaggcagaggcaacagaggagcaacaaggaggcgcggaggcggaggccacccagacccg

SEQ ID NO: 127381 - RNA, 78 nt, Homo sapiens
gccgcccggccccaggggcgccgaccaggcgagacagagggaaagaaccaccaccaacgagacacaaaaagaaaagag

SEQ ID NO: 127382 - RNA, 39 nt, Homo sapiens
gccgggaggcagaggggcagggcaggggccgcccagcaa

SEQ ID NO: 127383 - RNA, 72 nt, Homo sapiens
gaaacacgacagcacaaaaagagagaaagagcagaaacgaaccagaagaagaacggaacacaggccaggaac

SEQ ID NO: 127384 - RNA, 71 nt, Homo sapiens
accggcagccgagggggcgcagcccgaaccaagcccgcacgacgcgggccggacacccaggccgcaagacc

SEQ ID NO: 127385 - RNA, 47 nt, Homo sapiens
cacgagacaaggcacacaaagggacgggaggcacaagaccgcaccag

SEQ ID NO: 127386 - RNA, 73 nt, Homo sapiens
gggaaccgaccacagccagaccaagccagaggccccagaagacaagaagcgaagaaaggcaaaggaacacacc

SEQ ID NO: 127387 - RNA, 87 nt, Homo sapiens
agccgggaggccggccgggccagcacccggccgagacggcggcagcagcggcacagagcgacaggacgccacggcccgccgaagcga

SEQ ID NO: 127388 - RNA, 78 nt, Homo sapiens
aggaagggaggcagaagcagcaagaacaacagcaggccaagcccgccggaggcccccaccgcacccggcccccgcgga

SEQ ID NO: 127389 - RNA, 63 nt, Homo sapiens
acaacaccaaccagagaacaacacacacgcgcgaccccgggcagcaagaagaccacgcagagc

SEQ ID NO: 127390 - RNA, 83 nt, Homo sapiens
cccacccgcccccgcgggcgccgggccaggacggagcaccggccagaacaagccaaggagccaagacgagagggacacacgga

SEQ ID NO: 127391 - RNA, 55 nt, Homo sapiens
gccggagaggacacagcagggacaacccgccacaacgacaaaggaccccaaagac

SEQ ID NO: 127392 - RNA, 86 nt, Homo sapiens
gggaagagaacaacggcggcaaagccgagaaggagaacaccccgagcgaggccaacccaggaggaggagggaagagcccggagcag

SEQ ID NO: 127393 - RNA, 78 nt, Homo sapiens
ggagaacgcgcgccgcagcgccgccgcccgcggaagggagcccaagcgcagagacaagcagaccggaagaccgacgga

SEQ ID NO: 127394 - RNA, 56 nt, Homo sapiens
agggggcagggcagaggacaggcgacggaaaaccggcagcaggagaggccacgcca

SEQ ID NO: 127395 - RNA, 50 nt, Homo sapiens
cagagcaaaggagcgacagacaagccgagagagacgggggcaccagagcc

SEQ ID NO: 127396 - RNA, 81 nt, Homo sapiens
gagaaagaaggaagaaccaggcgcaggagacacagcgaacacgagaagccaagcaacaagcggcagaaagaagccggcgag

SEQ ID NO: 127397 - RNA, 72 nt, Homo sapiens
caagaagggacgggcagaagccaaccaacacacaccccggaggaccaccgcacagccaaggaggaagcagga

SEQ ID NO: 127398 - RNA, 86 nt, Homo sapiens
ggagaaggaaaagaaccagaagcgagagaaaagcccccaaaagcagcacaggagcggcaggccaccacgagaagcagggacgccgc

SEQ ID NO: 127399 - RNA, 124 nt, Homo sapiens
aaacaagcaaaaacaaccaacgcaagaaaaccgaaaacaaccggaggcaacaacgagagcgaaaacgcggccaagcgaacgggcggcgaagagagaggaagggccagaggaagccgggacggag

SEQ ID NO: 127400 - RNA, 58 nt, Homo sapiens
ccccggcggcccgcgcggccagcgcagcccagccccacaaaccaccacccggaacgcc

SEQ ID NO: 127401 - RNA, 75 nt, Homo sapiens
gccaggagaaacgccgagcggagcaccgggagaccagggaagacagaaccagaagggacaggcaaaggagaaaca

SEQ ID NO: 127402 - RNA, 78 nt, Homo sapiens
ccgccgcaacccagcagagagcagccgcccgcaaccagcacgcccgacgcgccggcaaccgagcgcagacgcgggcgg

SEQ ID NO: 127403 - RNA, 70 nt, Homo sapiens
gggaacaccccacaggcggaagccagaggacccagcaggcgcaaaaacgaacccacaaccgaacgacgga

SEQ ID NO: 127404 - RNA, 75 nt, Homo sapiens
gaagcagccagaccaagaacaaccgcggacacggagaggaagggaagcacagggacacaaacaaagcccccaagc

SEQ ID NO: 127405 - RNA, 70 nt, Homo sapiens
gaggcaagacgacccgggccaaaaccacggcaacaacacaggaaaggacagcaccgcaaaaaggagaaga

SEQ ID NO: 127406 - RNA, 74 nt, Homo sapiens
gcggcccgcgcaaacagggacgacacaaagcaaggggcgaacgccacggggggcccgccgcgcaaagcgggccg

SEQ ID NO: 127407 - RNA, 62 nt, Homo sapiens
gaacaacgcaccccagcaccgcccagacgcagaccgcagggaggggaaccaggggccgaagg

SEQ ID NO: 127408 - RNA, 73 nt, Homo sapiens
aaaaaggaccaccccaacaggaaacaagccaaggacaaaacgacgcgaaaaagaaacaaagacagaccccaaa

SEQ ID NO: 127409 - RNA, 76 nt, Homo sapiens
acccacagcgcgggaaggccccaaaggggaagcacgaacaggcagaaaacccaacgcgggggcaggaggaagagga

SEQ ID NO: 127410 - RNA, 76 nt, Homo sapiens
cggcggcgccgggcccggggggggacagcaggcgagaacacccagaaacagcgaggacagcagccgcacgaaggcc

SEQ ID NO: 127411 - RNA, 63 nt, Homo sapiens
cggaaccggggaccgaagaagagaacaagcgccagccccgagaaccaagaacggaagaccagc

SEQ ID NO: 127412 - RNA, 71 nt, Homo sapiens
ccggcagacgcagaaccagcaaaccaagacgaagacgaagaagagaggcaacgaaaaaagcaacaacagag

SEQ ID NO: 127413 - RNA, 76 nt, Homo sapiens
gcacggaagagacgcccccggcacagggcaacaacacaggcggaggcggcggaaggcagaggagaacacgccccgc

SEQ ID NO: 127414 - RNA, 73 nt, Homo sapiens
cgccacgaagaagagacgccacaaaccccagggaagaggaccaaagcgaacagagaagccgacaaggccagag

SEQ ID NO: 127415 - RNA, 79 nt, Homo sapiens
cggggcggccggcggggaggaccacccgcccaccccggcgggcccggggcggcagagacagcagggaccccggccaggc

SEQ ID NO: 127416 - RNA, 71 nt, Homo sapiens
acggcgaccgcgcagaagaaggagggaccggcagaaacaccagaaaagacaagggcaagcgcgcaggaaga

SEQ ID NO: 127417 - RNA, 76 nt, Homo sapiens
gaagagcccgacgccgccgcccaggcccgaagcgcggacgcggacggaaaacgcaaaaccagaagcgcgccgacac

SEQ ID NO: 127418 - RNA, 91 nt, Homo sapiens
cgagcgcaaggacagcgcgaggccgcgcagcccagcgcagccaaccagggaaccgggcagcagccgcagccgcccccgggacggccggccc

SEQ ID NO: 127419 - RNA, 76 nt, Homo sapiens
ccagggaaagacccgagcagaggagcagggagaagagaaagagacgcaggcccccggaaaaaggacaaggaaaaag

SEQ ID NO: 127420 - RNA, 52 nt, Homo sapiens
aaagagaaaggccgccaaagccccgggggcaggagacaaaaacggaaaagcc

SEQ ID NO: 127421 - RNA, 85 nt, Homo sapiens
acgccaccaaccgcccggaccacccaggaggccccggaggaggggaccgggggccgagccagccgccgcgccaagaaacgcgcgg

SEQ ID NO: 127422 - RNA, 68 nt, Homo sapiens
agagaaagacgggagcggggcgcgcagacccaaggcacagagcacaggaaggagcccggcagcgccgg

SEQ ID NO: 127423 - RNA, 60 nt, Homo sapiens
gcacacccaagacgcggcaacaggacacagacggaagggagggccacccacggcaggccc

SEQ ID NO: 127424 - RNA, 76 nt, Homo sapiens
gggagcagcaaaagccaggcagccccgaggaggcaggcgccaccacagacgagggcccccaaggaagacagcacga

SEQ ID NO: 127425 - RNA, 85 nt, Homo sapiens
gaacaaaaccagcacccaaggcagccggaaacgagacaggcaaagacacggggaccaccagcacggacacaagaggaagcggaaa

SEQ ID NO: 127426 - RNA, 73 nt, Homo sapiens
gccaaccacgggcgaggaggcgccgcgcaggacccaaagacaggaccacgcaccagcagagaaggaaagcaaa

SEQ ID NO: 127427 - RNA, 82 nt, Homo sapiens
gggagcgccgccgccgcagcgggaccgcgcgaccggcgcccgcccgcggagaccggaaaccgagagaaacgaagacgaagaa

SEQ ID NO: 127428 - RNA, 89 nt, Homo sapiens
ccacgccagccgcaccagccgcccaagccgcacagccgcggcggcagcagcaggagagggcggaaaacaccccaaaagccaaaagggaa

SEQ ID NO: 127429 - RNA, 57 nt, Homo sapiens
aagaagagcggaaaacaagggggaccaagaaaggcccagggaccaaagcccggacaa

SEQ ID NO: 127430 - RNA, 79 nt, Homo sapiens
ccccaggcacgcgacccgcgggaagagggagacaagccaaacgcaaggaagaggccaagggacaagaaaggaccagcca

SEQ ID NO: 127431 - RNA, 83 nt, Homo sapiens
gcaccaaggccgaagcacccgggcggggaaaacacacacgccgcgggagcccaaggcggccgaggggcccgaggcaacacccc

SEQ ID NO: 127432 - RNA, 78 nt, Homo sapiens
ccgccaccaagcggaaaggcaagggaagcaggacgcaggggaccagcacagcagaaaaaaggccaggagacaaccaga

SEQ ID NO: 127433 - RNA, 80 nt, Homo sapiens
aaagcccaggaagggaaagcaagaggagccggcgggcgcccgcaaccgcgcgaagccccagaagcgggccccaggccagg

SEQ ID NO: 127434 - RNA, 74 nt, Homo sapiens
gaagaaggcagccaggagaaccagaccaagacgaacaagagaccccgcgagacagccgcccccacccaggaaca

SEQ ID NO: 127435 - RNA, 65 nt, Homo sapiens
aagagggagccagcaaaggaggaaaaccaaaggagcagggagcacgagggcccgccacggacagc

SEQ ID NO: 127436 - RNA, 73 nt, Homo sapiens
gaagcccggggaagaacccggagcagcgcgagggggaacccagaagccggaagcggaaacacgcaagcccgaa

SEQ ID NO: 127437 - RNA, 77 nt, Homo sapiens
gcggggccacgacccagcggacggaaccagcagggaaggagggaacagaaagaacagccaaaagagaaagaccgggc

SEQ ID NO: 127438 - RNA, 77 nt, Homo sapiens
cgacaagccgcggcagccgcggaccaccgccgccaggaagcaagaaaggacagcaaagcgaagaagcaaagaaagac

SEQ ID NO: 127439 - RNA, 77 nt, Homo sapiens
ccaccaaaagcaccaggaaaagcccggaaaagcagccaagcggaagacagagccgcaaagagacacgcagaacaagc

SEQ ID NO: 127440 - RNA, 76 nt, Homo sapiens
agagaggccagccgggaggacacacaagcggaaaccagagaaggaacagccagaagaagacaggcgggaagagcgc

SEQ ID NO: 127441 - RNA, 80 nt, Homo sapiens
cgacccggagacagcccaaaacccggaagagcgccccaggagaaacaagacgaagagcccgggcccgccacagaggggaa

SEQ ID NO: 127442 - RNA, 74 nt, Homo sapiens
cacaccagggaccacaagcaagcgaaggaggccagaagaccagaagcgacaagaaccaggagcggcagaccgcc

SEQ ID NO: 127443 - RNA, 68 nt, Homo sapiens
ggagccaaggacgggacccccggggaggagaaacgagaaaacggcaggagggaaagaaggaaggaaga

SEQ ID NO: 127444 - RNA, 54 nt, Homo sapiens
agggacgagccaagggcgaccagaaacagagaaaaggaagcggcaaacaagacc

SEQ ID NO: 127445 - RNA, 94 nt, Homo sapiens
cggagaaacaggcgccgcgggcccgcgcccggccggacccgggcccgagagaggagcgggaaggccccgcacccggagaccgggggaagacaag

SEQ ID NO: 127446 - RNA, 79 nt, Homo sapiens
aggcccggcggcgggcagagcccaccagacgggcaccacgcgggacagcggaggagccaccggccacgggccaagcccc

SEQ ID NO: 127447 - RNA, 75 nt, Homo sapiens
gcgcccagggggcgaaccgcccgggcacgcccccacacggggaaagggagcagcaccggccacacccacagcacg

SEQ ID NO: 127448 - RNA, 80 nt, Homo sapiens
ggaggccggagaggagcgcaaggaggagcaggccgaggccaaccgagcggggcaaggccacaggccccaagaaccgacga

SEQ ID NO: 127449 - RNA, 63 nt, Homo sapiens
gccccgagcaccgcgacacacaccccgaggagggccgaaaaccccggcaagcagcagaggaaa

SEQ ID NO: 127450 - RNA, 79 nt, Homo sapiens
agccgggaggccggccgggccagcacccggccgagacggcggcagcagcggcacagcaggcagaggagggaacaaaaac

SEQ ID NO: 127451 - RNA, 79 nt, Homo sapiens
aggccggcacagccgcggagcggacccagcaagacgcgaaacacagggcaagggagcggggggaagacccaagcggaca

SEQ ID NO: 127452 - RNA, 71 nt, Homo sapiens
aacaaaaacccggggcagacagagaagaacagacgccgcacccccgcgacacaggccagagggcccaaagc

SEQ ID NO: 127453 - RNA, 47 nt, Homo sapiens
caggccagaccggagcagcggggacagagccaaggaacgaacagggc

SEQ ID NO: 127454 - RNA, 75 nt, Homo sapiens
gaacccgcgacccgggcacccagagcagggaggggggagaggcaccagcaacagaccaaccgcagcaagcacaga

SEQ ID NO: 127455 - RNA, 56 nt, Homo sapiens
cacaggaggacaccgcaggggcgagcgccgcaggccaaacaggcccgaaggaagga

SEQ ID NO: 127456 - RNA, 84 nt, Homo sapiens
aagccggaggaggacaacgacaccaccgcagcgacgagcagaaagaccacacagggaaacgaccagggagagaccaacaggaac

SEQ ID NO: 127457 - RNA, 77 nt, Homo sapiens
ccggcgggcgggccgggcaagcccgcgggcgcaagaaccgcggcagagcgggccaacagacgggccacaggacagcg

SEQ ID NO: 127458 - RNA, 72 nt, Homo sapiens
ccaaggagacgcccaaggaaccccgccggccaccggcgggcgcccacccaagcagaggcagggccgaagcac

SEQ ID NO: 127459 - RNA, 89 nt, Homo sapiens
cgcgagccgagggggaccggcgaccgcgccgaagcagaagaaggggaaggcggagcccccaagacacggacggcacgggaaacacgaga

SEQ ID NO: 127460 - RNA, 71 nt, Homo sapiens
aagaaaggaagcaaaacccagcccccaccaaaacccacccccaaggaaaggcagagcaacagggacacaag

SEQ ID NO: 127461 - RNA, 73 nt, Homo sapiens
agccccgaccccaggccccccacagaaaaggaaaggcagcaaaacggacggaccagaggaaaaaggaagacca

SEQ ID NO: 127462 - RNA, 78 nt, Homo sapiens
ccacccgcccgggccacacgggcggagagcgcgccgcccagcacagggcggagaacggaaaagcaccaggaagcagag

SEQ ID NO: 127463 - RNA, 49 nt, Homo sapiens
ccgagaccgggaccacaggcagcgaaagagagcaggaggagagcggacg

SEQ ID NO: 127464 - RNA, 88 nt, Homo sapiens
ccagcgccaccaccacgccagccgcaccagccgcccaagccgcacagccgcggcggcagcagcaggagaggggccaaggggacccgag

SEQ ID NO: 127465 - RNA, 77 nt, Homo sapiens
ccgccggccgagacacggggagggcgcacggcaagagccccacagcgggaaaggaccccgcagaggggcgcggagga

SEQ ID NO: 127466 - RNA, 68 nt, Homo sapiens
ccggaacagggcggacaaagcagacaggccaggcacacagaaaagccggcggaagaggaccaagaagg

SEQ ID NO: 127467 - RNA, 69 nt, Homo sapiens
acggggaggcgcagcccgaaggccccgggcaaagcggacaccggggcgggggaccaggggacgacaaga

SEQ ID NO: 127468 - RNA, 55 nt, Homo sapiens
ccacgcagaacgcaacaccaaggcacaccaccccagacgcggcgcgcaacgcaag

SEQ ID NO: 127469 - RNA, 80 nt, Homo sapiens
ggcaacacaagcaccaaggcggaggcaggagaaaccggccagaggggacgcgggacaagagacggaaagcggcgccagga

SEQ ID NO: 127470 - RNA, 81 nt, Homo sapiens
gcccagggaaggccccaaagaaaaggaggggcgaacgcggaaacggcacaaggaagccgagcccaaggacggaaggccagc

SEQ ID NO: 127471 - RNA, 76 nt, Homo sapiens
aggaaaagcggcccggcgccaagacccagcacaaacaccgggaagggagccagccagagagggacgggccaaccga

SEQ ID NO: 127472 - RNA, 56 nt, Homo sapiens
ggggcgcggaccgggccaggcgcgaaggcgggcaaaacgccgagcccgagaacgac

SEQ ID NO: 127473 - RNA, 84 nt, Homo sapiens
cccagggccagaggcaacggggccacaggcccacccggacgaagccacccccaccccaccaagcacaccggcagcaccacaaac

SEQ ID NO: 127474 - RNA, 79 nt, Homo sapiens
acggagcaggagaagccccggggggaagagcgccaccggcggcccgcaagaagaccgagaaggccgaggagggaagaag

SEQ ID NO: 127475 - RNA, 63 nt, Homo sapiens
aagcgcaacacccccgcgcaggaccccaagagcgcaggacagcccgagcgcgccggggccggg

SEQ ID NO: 127476 - RNA, 81 nt, Homo sapiens
acccgaaagcaaccaggaggcagaaaccagcgccggacagagaagcccccaaggagcgcaggcaggcaggggcagaaggcg

SEQ ID NO: 127477 - RNA, 78 nt, Homo sapiens
accacgggcccacaggagcaaaacagaccacacgagggaaccggccgcggcaacgggcgagaaggggacaaccaagga

SEQ ID NO: 127478 - RNA, 54 nt, Homo sapiens
acaacccccgacggcccacgccagggagggggagagcacagcaaaggacgaagc

SEQ ID NO: 127479 - RNA, 71 nt, Homo sapiens
aaaacgagcacacgaagaaacaagacgagaagaacccggaagcacccaccaaagccccccagcgggcggcc

SEQ ID NO: 127480 - RNA, 50 nt, Homo sapiens
acagaaggaagaaaaaagacgggaacagggagaccaaagacaaggacagc

SEQ ID NO: 127481 - RNA, 77 nt, Homo sapiens
gcacagggaaccgaggggagccgaccacggacgccagagccgccgcagggcgaaggcgaggacccccagcccccaga

SEQ ID NO: 127482 - RNA, 47 nt, Homo sapiens
gcgagggaggagagagggagagccaaagaagggaaaggccaccaggg

SEQ ID NO: 127483 - RNA, 72 nt, Homo sapiens
gaggaggcgccagcagcccggagaggaaaacgccaggaggaagcgggaggggaaagcaacgacccggccaga

SEQ ID NO: 127484 - RNA, 72 nt, Homo sapiens
ccagccgagacaagaggaaccaggacgaggaaccagggacagaggacccccagcagcggccacagacaggag

SEQ ID NO: 127485 - RNA, 60 nt, Homo sapiens
gagaggaaccagccagggccagcgacagaagcccagggaaaaggccccaaaagagcagca

SEQ ID NO: 127486 - RNA, 52 nt, Homo sapiens
ggaagggccaggacaccaggagaagcagagaaccccagacacagagcgaaag

SEQ ID NO: 127487 - RNA, 79 nt, Homo sapiens
aacggagggagaggggcccaacacagggggaagggagccagccagcccccagaaagcggggccggaaggggccaaacgg

SEQ ID NO: 127488 - RNA, 80 nt, Homo sapiens
ccgcgggcgcgccgacgacggcgggagccagcacggaaggcccaccaacgcggccggccccaagcacccgggcccgccag

SEQ ID NO: 127489 - RNA, 75 nt, Homo sapiens
cgcagcaccaaagagcccgcccgcgcgaagcagaggagagacccgaccagaaaccccagcccaaagaaacggggc

SEQ ID NO: 127490 - RNA, 83 nt, Homo sapiens
ccggggggaagagcgccaccggcggcccgcaagaagaccgagaaggaaggcagcaacaaccacccagggagaaaaacaagagg

SEQ ID NO: 127491 - RNA, 74 nt, Homo sapiens
aacgcagccagacaggcaggcaaaaacaggagaccgcggccgaccagagaacaggaaagaacagagccgaagca

SEQ ID NO: 127492 - RNA, 89 nt, Homo sapiens
cacgaaggacgggccccgaaagcccgggcccggccggacacgggccagccaggacggaacccgcaccaccacacaaccaccacgacgca

SEQ ID NO: 127493 - RNA, 88 nt, Homo sapiens
cagaagagaagggaaaggcaagggagcaccaggagagaaagaagaccgaagaagcagccgaacacggagcagaaacgagcgcgaacgg

SEQ ID NO: 127494 - RNA, 74 nt, Homo sapiens
ggagagcagagggcaaaacccagaacgaagcgccagccgcgaggcaaaaaagcaccggggcgcacaagacccca

SEQ ID NO: 127495 - RNA, 64 nt, Homo sapiens
aaaaaacagaccaggggaacccagaacaaagggcaaaggacacaccgcacaaacggccgcgcac

SEQ ID NO: 127496 - RNA, 76 nt, Homo sapiens
cccggggagcggaggggagccgaagaggcacagccagaacaaacgaggaccaccggcagcaaaacacaagcagaga

SEQ ID NO: 127497 - RNA, 78 nt, Homo sapiens
gcaagaccacacaccagccggacggcggggccgggcccccggccgcaagcaggcacaagggagcgccggaaacccggg

SEQ ID NO: 127498 - RNA, 76 nt, Homo sapiens
gaccggggccccagagggccccacgaaggacggccagcgcggcagggaggagagacagaagccggcccgccggaaa

SEQ ID NO: 127499 - RNA, 69 nt, Homo sapiens
gccggcgcccccgaaagcccaggaacacaaacagggacaacccaaagacggccaccgcgcaggaccagc

SEQ ID NO: 127500 - RNA, 75 nt, Homo sapiens
ccgcggggcaaccgccacgagacaccaagaggcgacccgcggcgagagcccccccagagcgccagggcccgagaa

SEQ ID NO: 127501 - RNA, 75 nt, Homo sapiens
cgggcccggggcaggaggaacacggggagagcccgagcacagacaagcggaagcggagaagaaccagacgaggag

SEQ ID NO: 127502 - RNA, 39 nt, Homo sapiens
agccggagaccgaggggagcagaccaccaaaagggaacg

SEQ ID NO: 127503 - RNA, 58 nt, Homo sapiens
accagacggaggaggagccggacgggccagcagccggcccagcccaccccaggccccc

SEQ ID NO: 127504 - RNA, 76 nt, Homo sapiens
ggaagccacacaaagaacaaagcagggagacccagaggacaggcagacaacacaccacaaggcaaaacagacagaa

SEQ ID NO: 127505 - RNA, 69 nt, Homo sapiens
aaggaccaagaaccaggaagaagaaagcgagacgaaaacagaggcaaagaacccacgggacaagcaaga

SEQ ID NO: 127506 - RNA, 63 nt, Homo sapiens
ggaagcggagcggcgcgcgcgggacaagcagggaagaggaggagggagagggcccggagccag

SEQ ID NO: 127507 - RNA, 83 nt, Homo sapiens
ggccccaccagcagacgcagccgagacaccagcccgaaacaccaccaaggggagcaaaacgcccaccacggaggcaccgagga

SEQ ID NO: 127508 - RNA, 71 nt, Homo sapiens
caaaagcagaggaaaagcaaacagcaggacaaaagggagaaaaccggaagagaaaggccgggaagcaggaa

SEQ ID NO: 127509 - RNA, 39 nt, Homo sapiens
accgaggacccgcgagccccaggggggacaggaggagag

SEQ ID NO: 127510 - RNA, 79 nt, Homo sapiens
ccagcggcaccacccccagcaccaccccagccccgcgcccggcacaaggcacaaagcaggaggcaggaggccaggaaga

SEQ ID NO: 127511 - RNA, 79 nt, Homo sapiens
gacgggcagcgcaggggcgggaaagacccaggagaagccgcccaaagaacggcggagacaacagggggaaaacagcaag

SEQ ID NO: 127512 - RNA, 73 nt, Homo sapiens
gcagaaggcccaaaagcgacaagccaacagagagagaaacacagaaggacgaacacgaaacccaaaaaagcag

SEQ ID NO: 127513 - RNA, 69 nt, Homo sapiens
gcaagacccaaacaaaaagacacgaagaggaggaagcccagcgccaacgaacccgggaacgcgagcaag

SEQ ID NO: 127514 - RNA, 80 nt, Homo sapiens
gcccgcccccgcgccgaggaaccggcgaccgcgcgcgccaccgccgagaaccaccacccgccaggcgcgcggccacaccc

SEQ ID NO: 127515 - RNA, 67 nt, Homo sapiens
cgcaacccgccccccagcaagggcccgcccagcccccgagagcgagaacagcacccgaaagagcgaa

SEQ ID NO: 127516 - RNA, 83 nt, Homo sapiens
ccgaggagcaggcgcggccgcggcgccaagcggccccagcggccgcgaccgagcaggcgagaccacgaaggggccgcccgaaa

SEQ ID NO: 127517 - RNA, 80 nt, Homo sapiens
gagccagaggcaacaaggcggacaagagaagccgccaggcgggagaccagggccagcccggccacaccccaggcggcacc

SEQ ID NO: 127518 - RNA, 67 nt, Homo sapiens
agacgcccagaccaggaagagggaccaacagcccgggaaacaagaagaggaagaaagccaacaaccc

SEQ ID NO: 127519 - RNA, 78 nt, Homo sapiens
ccacggaaaaggaacagagccaaaccagaagaggagggcccagaagaaaaagggcggggaacagaccagggaagggga

SEQ ID NO: 127520 - RNA, 77 nt, Homo sapiens
cggacgaaaaggaagggaaagggaaaaacagaggagacaacacccggagacaggcccaaagcagcgagagagaacgc

SEQ ID NO: 127521 - RNA, 102 nt, Homo sapiens
agaccacgggaccggcacacgcccggcgggcagcggagagcccacaaaaaaggaaaggcaagggcagaaaagaggggaaaaggccagccgcacgcaggcaaa

SEQ ID NO: 127522 - RNA, 74 nt, Homo sapiens
cgggggcggcccacggggacgagaaaggcccggggcgggaagcgacccagcaaaaagccagcccggccacccgc

SEQ ID NO: 127523 - RNA, 73 nt, Homo sapiens
gaggccccgaaagccagggccgaccccgaagccgcggccgaagggaaggaaaacagggcgcagaaccccagga

SEQ ID NO: 127524 - RNA, 64 nt, Homo sapiens
cagaggcagacaacacaaaaggagagacaagagagacaccccaaccgacaaagagcaccagaca

SEQ ID NO: 127525 - RNA, 79 nt, Homo sapiens
aagaggggagcaaaagcgacagagcagccaacaccccgaaaacgacagaaggcaggaccggcccccagggaggaaacgg

SEQ ID NO: 127526 - RNA, 81 nt, Homo sapiens
ggaaaaaccccaagaggaagacaaacaaccagcccaggaacaaagaaggacaaccaccaacaccgagggcaccaaacgcaa

SEQ ID NO: 127527 - RNA, 85 nt, Homo sapiens
agcaccagccaccaccaagccgagggaggaggacaacaagacgcgccgacgcgaggccaaaggaagggaaaaggccgaggcacag

SEQ ID NO: 127528 - RNA, 69 nt, Homo sapiens
ggcccaaaaacgacaccacgaaggacaagaccaaaacccacggggaaaaccaaaagaggccgaacaacg

SEQ ID NO: 127529 - RNA, 81 nt, Homo sapiens
cagcaggagggggccaagggccaggaccccgcacaacaggacccggcaccgccagacaggggcaaggccgaggggaacagc

SEQ ID NO: 127530 - RNA, 70 nt, Homo sapiens
agaccaccgaagacgcacgccaagacaggcgagaagcaggcggagggagcgcaaccaggcaccgcagaca

SEQ ID NO: 127531 - RNA, 49 nt, Homo sapiens
aaaggagccggccggcggcaaagcgcaagccccggggcagagacacagg

SEQ ID NO: 127532 - RNA, 68 nt, Homo sapiens
ggcccaagcaaggccggaagaagagcgcagaggggagcgggacgggcggcgagcggaccgcgaggccc

SEQ ID NO: 127533 - RNA, 67 nt, Homo sapiens
agaaggaccaagaaccaggcaaaaggaagaaacagaagagaagaagacgccgcaaagaacaaagaag

SEQ ID NO: 127534 - RNA, 79 nt, Homo sapiens
gacagcccgggacaccaagaaagaacgccgccaggcacagagaaggcaaacgggagggcgaggacaccaagagcagcgc

SEQ ID NO: 127535 - RNA, 85 nt, Homo sapiens
gcgccggcgcggcccccggagcagccgacagacgcaaacagcagacggaagaccccacggcaaaaccacacccgaggcgagccca

SEQ ID NO: 127536 - RNA, 64 nt, Homo sapiens
cagccggacggcggggccgggcccccggccgcaagcaggcccagcgagagccagccggaggacc

SEQ ID NO: 127537 - RNA, 78 nt, Homo sapiens
aagagacagcgagaaaagggacggaaaaaggcgccagacagcagcggagccagccgagcgcccaggccacacacccag

SEQ ID NO: 127538 - RNA, 82 nt, Homo sapiens
gacaccagccggaggcagggggacagcaccccacacagggcacagcgaccaccgcggcagccaccaggggcgccaggccgca

SEQ ID NO: 127539 - RNA, 62 nt, Homo sapiens
ccagcagacgcagccgagacaccagcccgaaacaccaccaaggcggccgccacccccgcaga

SEQ ID NO: 127540 - RNA, 76 nt, Homo sapiens
gaagacgcgcggagaaagagaccaccgagggaaacacaaagaagacaccagaagggccagcaccacgacaacacgg

SEQ ID NO: 127541 - RNA, 78 nt, Homo sapiens
agcgagcaccccagggcgaggccagagaccccagccgagacggagacaggcgccaagggcaacagggcccgaccagac

SEQ ID NO: 127542 - RNA, 82 nt, Homo sapiens
caccacgcacccagccgggcgacagaccccgaagagccagcccagagccaaccccagccggcccgggcgcgagcacagccag

SEQ ID NO: 127543 - RNA, 74 nt, Homo sapiens
ccggcggaaccggggaccgaagaagagaacaagcgccagagaaaaaccggaagggaaacccgcgacaccgcgag

SEQ ID NO: 127544 - RNA, 101 nt, Homo sapiens
gcagcgagcggccgggaggaggcggccagccgggcaggaggagcgcgcgcccaaagccaacccaaggagaggcacacaggacaggacccccgagaaacgaa

SEQ ID NO: 127545 - RNA, 77 nt, Homo sapiens
gcgaggaaaaggcggcgggagggagccacgccccaggggagccaacgccagcagccgcaccagggccagggaccgcc

SEQ ID NO: 127546 - RNA, 117 nt, Homo sapiens
ggccggcagaggaagaggcggcggcgaaaggaacggcgaaggcccacgggagaaaaccgggcgcaagagcagcggagcccaccaaaaaacacggcgggcgggggcagcccagccagg

SEQ ID NO: 127547 - RNA, 87 nt, Homo sapiens
acagaacccgaggcggggacagcgacaccgagggggaggacacaccggcgccgcggggcgcgaagccgacgagcccgaacagacgca

SEQ ID NO: 127548 - RNA, 68 nt, Homo sapiens
ggaaacacagggcaagggaaccgacgcaaccgaggccgagggcaggaccgaacacgaagagagaaaac

SEQ ID NO: 127549 - RNA, 76 nt, Homo sapiens
cgcgggccgagagccgccccgaacgggggcccccccgccggacaggccccggggcagaagagcggcgccgaggaga

SEQ ID NO: 127550 - RNA, 87 nt, Homo sapiens
gcgaaggccgggacccggccccggcccacaggggggggcaaacccgagagaacggagggaacaggcacgccccacccgccagccgag

SEQ ID NO: 127551 - RNA, 80 nt, Homo sapiens
caggacgcgccgcgccccaaggggggcggggggccaccgaacgcgcacgccggcaggacccagcagccagcgaagcccca

SEQ ID NO: 127552 - RNA, 65 nt, Homo sapiens
agcagccacgcaagagcaggccgagacgcgcgcaggagacggcccaccgaaggaaacaccgacag

SEQ ID NO: 127553 - RNA, 56 nt, Homo sapiens
gaagacagcagccacacagcagggacccaaagacaggaccacgcaccagcagagaa

SEQ ID NO: 127554 - RNA, 63 nt, Homo sapiens
accacaccagcaccaacggcaacagagcggccggagcggcaaaagaagcggaagcagaagagg

SEQ ID NO: 127555 - RNA, 55 nt, Homo sapiens
ccagccagccagcgcccaccggggcgcgagggagaacggcagaaccaagggacca

SEQ ID NO: 127556 - RNA, 76 nt, Homo sapiens
ccgacaaaagcgcagcaagacggccgcgcggcccgcagggcagagggcagaccgacggaacccaggccagccaaaa

SEQ ID NO: 127557 - RNA, 76 nt, Homo sapiens
aagaacccggaagaaagaaaacagaagcggaaccaaccgggagccccccaagagacccaggggaagacccaaaggc

SEQ ID NO: 127558 - RNA, 75 nt, Homo sapiens
ccgaccagccgcagaaaaagacaagccgagaccaccaggagcagagcggaggcaaccagccaaaacaacggaaaa

SEQ ID NO: 127559 - RNA, 82 nt, Homo sapiens
gacgccgggcagccgaacggagggcgacggagggagggcggagaacggaaaagcaccaggaagcagagaggaccgcagaagg

SEQ ID NO: 127560 - RNA, 64 nt, Homo sapiens
ccggagcaggacagacccccagacagaggaggaagaggaagaacacgacagaaagcacacggaa

SEQ ID NO: 127561 - RNA, 76 nt, Homo sapiens
ccagcaaccacagagggcgagcagagggacaaagaagccacaggggagggccccgggacagaggccccccaccaag

SEQ ID NO: 127562 - RNA, 79 nt, Homo sapiens
cacccagggacccccagaaggaacggagacaaaaacggcccggagaggagggcggagaacggaaaagcaccaggaagca

SEQ ID NO: 127563 - RNA, 83 nt, Homo sapiens
gagacgagaccaccggcaacaagggagggggaaggccagggccagacgcagcgccccagagaaggacgggaggacaacccacc

SEQ ID NO: 127564 - RNA, 85 nt, Homo sapiens
agcccacgggggcccagagaggggcccccaccacagagccagcgcgccccagaccaccggcagggaacagccgagcagaccgagg

SEQ ID NO: 127565 - RNA, 71 nt, Homo sapiens
gacgggcaagcaagcagcagacagagaggacacgaaacggacaaggaaaggaggacaaaaggaaaaaaaaa

SEQ ID NO: 127566 - RNA, 65 nt, Homo sapiens
ggcaggccaggacgcaggcccgcccccggggcagaaccaccgggaggaacgggccacaacacccg

SEQ ID NO: 127567 - RNA, 80 nt, Homo sapiens
agcaacggaagcgcagcaacagcaagccccgggcaggggcggcgccccgcccggccgagggggagcagacagcccgcgac

SEQ ID NO: 127568 - RNA, 73 nt, Homo sapiens
gccaccaagacaccccgaccagcacacacgcaaggagacaggacgccaccagcacggccccgaacggaggacg

SEQ ID NO: 127569 - RNA, 61 nt, Homo sapiens
agcacagaaaagggccaacagccgaagagccagaaagccgaggcacggaaggccaggacag

SEQ ID NO: 127570 - RNA, 78 nt, Homo sapiens
ggaccagggggaccagggaagagccggaggcagaggggggaccccggacggaccggcagagagagccggagggcagga

SEQ ID NO: 127571 - RNA, 72 nt, Homo sapiens
agagccacccacaagacgccacaggccggcaacgccaggccgagcggccccgagccgggacacccggcggcg

SEQ ID NO: 127572 - RNA, 69 nt, Homo sapiens
cgccgagccaaacgccggggaccccggcagccacccaccgccgccgcccccaggagcggcagcccacaa

SEQ ID NO: 127573 - RNA, 74 nt, Homo sapiens
cggacggagaaaaagagaagcgccagcaacgagggggcaggacaggcggaccacccaagcacgggacagagcag

SEQ ID NO: 127574 - RNA, 76 nt, Homo sapiens
aaggcggcaggagcgggaacggaaaacacaccaggagcccaaaggcaggcccggcaccgaggccgaaacccaaggg

SEQ ID NO: 127575 - RNA, 76 nt, Homo sapiens
cacaaaaccccggcccgccggagcgggaggacagccgccagagcgaaaagggaagcccccaggccagccggaaccg

SEQ ID NO: 127576 - RNA, 69 nt, Homo sapiens
gacgagacaccccagcaccccaagagcaccccagcagagcaaggggagacaaagaccaccaaaaaagca

SEQ ID NO: 127577 - RNA, 55 nt, Homo sapiens
accggccacccagagagcaaaaggcagcgaaacaaacacgagagaacgcgaaccc

SEQ ID NO: 127578 - RNA, 103 nt, Homo sapiens
agggaacaaggagaagagcaggacacagagaaccaagacagcaccaggggggcaggccggaccgaaggacaggagaagggcagcaccaggagcaccggagcca

SEQ ID NO: 127579 - RNA, 74 nt, Homo sapiens
accgggcgacgaggcacagcgcgcaagaagggagcaacaaggcggcaggagagaaggacggggagcgcccagga

SEQ ID NO: 127580 - RNA, 85 nt, Homo sapiens
gccagacgaccccacccgcgccgcgacccggccacagcacagcaaagccacaacacccaggaggcccccggaaggagaagcacgc

SEQ ID NO: 127581 - RNA, 82 nt, Homo sapiens
cggccggcgcgaggagaacggcggggggacgccacacagcacaacacaacacgccccgaagaacccaagaaggcagaagcca

SEQ ID NO: 127582 - RNA, 64 nt, Homo sapiens
ccagcgaccggaagcgagcagcagcgccgccagaaggaagcaggcggagccaaggggaaggcag

SEQ ID NO: 127583 - RNA, 56 nt, Homo sapiens
gcggagccccccccgcgcaaagggacaaggccccaggcgcaggaaagacacacaga

SEQ ID NO: 127584 - RNA, 57 nt, Homo sapiens
ccgaggcccacagcgaaaaggaaaggagaaaaacccccggaagcgcagaaggacaaa

SEQ ID NO: 127585 - RNA, 77 nt, Homo sapiens
gaggcggacggagcgacaggagaaggaggcgacgaggacacgacagcacaacccccggccggacgcggccggaccgg

SEQ ID NO: 127586 - RNA, 76 nt, Homo sapiens
gaaaaggaagcgaagacgaagaagcggaacaacccgaggcgcagaggagagacgagcgccaaagacagaagcaagc

SEQ ID NO: 127587 - RNA, 68 nt, Homo sapiens
acaaaaccccagccgcccgcgcggacgcgaggccgagaaaggagaagagagagccaacggagccagga

SEQ ID NO: 127588 - RNA, 64 nt, Homo sapiens
gggcagaaaggcaccacaccgcacgagacaacaagaagggagcgagcacaaacgacacacgcaa

SEQ ID NO: 127589 - RNA, 69 nt, Homo sapiens
gagaaaccgaagggccccgaacaacagacgaaaaaccgccagaaccgcgcagacaaggcaggaaccgac

SEQ ID NO: 127590 - RNA, 55 nt, Homo sapiens
ggaaccggagaagagagagaaagaccaagaacagggcaggaaagggaacaacgac

SEQ ID NO: 127591 - RNA, 86 nt, Homo sapiens
ccgaaccggcaccgcacaccggaccaggaaacggaggcgggaggagaaagagaaggaaacccacagacccagcaaagaggagacaa

SEQ ID NO: 127592 - RNA, 85 nt, Homo sapiens
gccgcaggagacgagaggacgggaccaggcgaagcggccgagcaggcgagcgaacgacggcaccgacgagagggcgcaccgcgcc

SEQ ID NO: 127593 - RNA, 74 nt, Homo sapiens
ccaccgcaagacagggaagcgaagaaaaaagacgcgcccgcaagaaaagccacaagggggacggcccacaaacg

SEQ ID NO: 127594 - RNA, 75 nt, Homo sapiens
accgaagaacagaaaacgcaaggagaaacccaagagcagcggcagcgacacagacacaggcacgcgacgcggcgg

SEQ ID NO: 127595 - RNA, 79 nt, Homo sapiens
caggcgagacaacaaagccccaacaacaaaccaagccaggcccgaagagcacccagacagggaccccgcccgccagacc

SEQ ID NO: 127596 - RNA, 74 nt, Homo sapiens
cgccgccgaccgccgcccgccacacccgccgccagggggggaccagaccaggccaggagaagcccccgcagccg

SEQ ID NO: 127597 - RNA, 78 nt, Homo sapiens
cagaggcaccacccggacgacgccaagaaaggagagaagagaaagccggaggaaggccagaccggcccgggccgggcc

SEQ ID NO: 127598 - RNA, 76 nt, Homo sapiens
gcagcgggaggaggggccaggccccgaccgcaccggaggaagccacacccagcgcaagaccagaagacacgacacc

SEQ ID NO: 127599 - RNA, 72 nt, Homo sapiens
cagagcagagccccgccccaaaccgggcccagcagaagaggaacccgaaaaccccagagcccaagagaacga

SEQ ID NO: 127600 - RNA, 73 nt, Homo sapiens
cggaaacggagggggaagaagaaaagacgagccaaaccaggcgaccgagcagccaagcaacgggccccgggcc

SEQ ID NO: 127601 - RNA, 85 nt, Homo sapiens
gaccagccccaacagagcacacccgagaagcaaaaaggaccaagaaaggcccagggaccaaagcccggacaaggcccgagcacca

SEQ ID NO: 127602 - RNA, 77 nt, Homo sapiens
gacgcgcgaaccaaacaagccgacagagggaaaccaacagccaggaagcaacaggaaaagaccaaggagacagaggg

SEQ ID NO: 127603 - RNA, 79 nt, Homo sapiens
caccgacggcggaccgacccgagccggaaagagaaaggagaccacaagaccccgcgccaccaaagggagggcggccaac

SEQ ID NO: 127604 - RNA, 90 nt, Homo sapiens
aagccaaggccgaagccgagcagaggacaaaacaagagggccaggggcccgggcagagggaaagcagaggacggaacaacccgggggacc

SEQ ID NO: 127605 - RNA, 77 nt, Homo sapiens
aaaacacacacgaacagacagagaacaagacgaaggcgccagccagcgcagaaggcgcccaggacccacagccaggg

SEQ ID NO: 127606 - RNA, 75 nt, Homo sapiens
gaaagcgacaagggaggcgccgccagcggccgggaccgaacaggcgacaaagagagaagcggggaagaaagcaaa

SEQ ID NO: 127607 - RNA, 91 nt, Homo sapiens
acgccagccgcaccagccgcccaagccgcacagccgcggcggcagcagcaggagaggcccggccgcagccacgaaaaggaggacaggagaa

SEQ ID NO: 127608 - RNA, 75 nt, Homo sapiens
gaggagaaccgcgaccgcgcaaagccagcggaccacgacgagcgggaaggaacacagggaggggacaggacagca

SEQ ID NO: 127609 - RNA, 72 nt, Homo sapiens
acgagccccagccaggagcccgggccgacccccagagagaacagccgcagaagcagagcaagcaagaaacag

SEQ ID NO: 127610 - RNA, 73 nt, Homo sapiens
caccgcaccggagccgggagacccccaaaaagaaccgaacaaagggagccaaggacaggccacgcagaaaaca

SEQ ID NO: 127611 - RNA, 75 nt, Homo sapiens
gggcccccgcccccgcccgggaaccgccgggaacccgccagcaccaccgcccaaccccagaccagaaaagaaagg

SEQ ID NO: 127612 - RNA, 85 nt, Homo sapiens
ccccaggagccggggccgcagccaccaggacgcaaagagccacaggaagagaaccagagagggccggcggcgaaggccggccggg

SEQ ID NO: 127613 - RNA, 69 nt, Homo sapiens
aaaggcagccaccggcgaagcgcccacgccggcaaaccggaaacagacacaggcgcgcaaggccgacaa

SEQ ID NO: 127614 - RNA, 85 nt, Homo sapiens
gacagccggcggcggagcggccggccacggaggaggggagccgccagcgaccgaggccggcggagccagccccgacgccacaacc

SEQ ID NO: 127615 - RNA, 63 nt, Homo sapiens
aggaacaggagccaaaagagaagacacccaagggacggcagggaaaaaccaaagcccggaagc

SEQ ID NO: 127616 - RNA, 69 nt, Homo sapiens
gcccaaacaccaccaccaaggggcgcgggcaggacaccgccgcccgggacccggcgcaggacggcaagg

SEQ ID NO: 127617 - RNA, 76 nt, Homo sapiens
agggcgcggaaccgggagcaagcaagaaggagcaaacgagacggaagaaaaaaccgacggcccgaaccacagccaa

SEQ ID NO: 127618 - RNA, 70 nt, Homo sapiens
acaacgagcacaaaaagacgccgaaagggacagcaacaggagccgaagaaggcgaaagaggacgaaaccc

SEQ ID NO: 127619 - RNA, 57 nt, Homo sapiens
ggaagcaggacgcgccgcgccccaaggacccaggagcgacaccgaacccacgaccca

SEQ ID NO: 127620 - RNA, 79 nt, Homo sapiens
ccgccaaggcggcgcagcggaacgaagcaggaagggaacgagcggcaaggcgaagaaggagagggaggaaacaggaaag

SEQ ID NO: 127621 - RNA, 70 nt, Homo sapiens
agaccaaagaggcaaggcagaccagcaggacagcacggccaaacagcagcagaagcgccgcaacagaggg

SEQ ID NO: 127622 - RNA, 75 nt, Homo sapiens
ggcgacaccggccgaagggccagcgcggagagaaggagggggcagagcacggcaggcagaaggggccaacccggg

SEQ ID NO: 127623 - RNA, 71 nt, Homo sapiens
caaccaccagcccaacaaagacccgggaagaaaacggggcgcaccagggagcaccagagccaaggcgcacc

SEQ ID NO: 127624 - RNA, 69 nt, Homo sapiens
ccaaaaggagaagcgaacaaaaaaaaccccaaagaacccgacggcggggccggggagccccgggccaga

SEQ ID NO: 127625 - RNA, 86 nt, Homo sapiens
gcgggaaggaaaaccgcgcagagaggaaaccgaggaaggcagggaccggaaagaacaaaggcccaccggaagagcggcgaaaaaga

SEQ ID NO: 127626 - RNA, 36 nt, Homo sapiens
ggcgcgggagccacacccaggacgcacagccaggcc

SEQ ID NO: 127627 - RNA, 76 nt, Homo sapiens
gaaaggagggaagccagaggccaaaggcaggagggaaccaagaccaggacaaagaagacccggagagacaagccgg

SEQ ID NO: 127628 - RNA, 79 nt, Homo sapiens
aaaacccccggggaccgaagaaagacagcccggaaacaacaggaacaccaccaaagccgaagcaggacacaaagaaaag

SEQ ID NO: 127629 - RNA, 83 nt, Homo sapiens
ggagccccgcgcccaaaacccacccagggacaggaccccgccgaagccaccaaaaccaccagagagaaccgagccaccgcaac

SEQ ID NO: 127630 - RNA, 53 nt, Homo sapiens
ccgagaggaggccagagaacaggcgggcgcggacggcaggggcgccggggaac

SEQ ID NO: 127631 - RNA, 59 nt, Homo sapiens
gaaggaccgggcccagcaaaggccacacccccggaccaccaggacggccaagcaccccc

SEQ ID NO: 127632 - RNA, 81 nt, Homo sapiens
ggacaacggaacccgccggagcacccccaccagccggcagcgccgccagggcggggagcggccggagcgccgaggcccccg

SEQ ID NO: 127633 - RNA, 79 nt, Homo sapiens
gcgagacggcgggaaggcgaccgagaaaagccaggacccagagaagcaccagggaaagggcacaaagacacagaaaaga

SEQ ID NO: 127634 - RNA, 71 nt, Homo sapiens
agaaacccgaagcgcggaaaacccagggggcgaacacggaaggccgacaacaaccacccagcgcaaacgac

SEQ ID NO: 127635 - RNA, 82 nt, Homo sapiens
cagcacgcggagcagagggagccgcccccgcggggcgcccggagccggccagcgcaccaaccaggcaggccccccgaaggaa

SEQ ID NO: 127636 - RNA, 72 nt, Homo sapiens
gaagaaagaccagcacgaaagaaaaaggcacaaagcgccaggaaaggaggcccacccgacgcggagcgaccg

SEQ ID NO: 127637 - RNA, 85 nt, Homo sapiens
ggaaaagccgccgggaagggaaagacagaagagaagggaaaggcaagggagcaccaggagagaaagaaaggaagagccaaacagc

SEQ ID NO: 127638 - RNA, 65 nt, Homo sapiens
agggccggaggccaagcccgcaggcaggaggggaagcagaaagcaaacggccccgaaggaggagg

SEQ ID NO: 127639 - RNA, 40 nt, Homo sapiens
ccgggccggaacgagacgcacggagaaagacagcaaagaa

SEQ ID NO: 127640 - RNA, 68 nt, Homo sapiens
agccagcgccaaggcggaaaagcccaagaaacaaacaggggaaagcaggggagaaaagaaaagaaaga

SEQ ID NO: 127641 - RNA, 67 nt, Homo sapiens
cagcggcaagaaaaggccaggacaaaacaacccagaagagaagccaaaaccaggaacgcagcaaaga

SEQ ID NO: 127642 - RNA, 86 nt, Homo sapiens
cggaacacgaccaggcgccagcccgacaacacaggagccaaaaaccgaacacccggaaggggacaagggacggcgaacagaccccg

SEQ ID NO: 127643 - RNA, 111 nt, Homo sapiens
gcaaaccgacccacgagccggagagccgcagggaggcggagggcagggccaggaggaacagagcagacaggacgcggcgccggagccagaacacaccgaagccgccgaacg

SEQ ID NO: 127644 - RNA, 89 nt, Homo sapiens
cgcgaggccaggcggccgcccgggagcgagcggaggagcaggcgccggaggcagaagccccagaggagcccgaaacccccaggcgggca

SEQ ID NO: 127645 - RNA, 75 nt, Homo sapiens
agcgcgcagccgcagccgcagccgccgccggccagaccccgcagaaaggaagggcagcaaaagagacccccagcc

SEQ ID NO: 127646 - RNA, 72 nt, Homo sapiens
aaccgaccagaacgcagcaacaaaggaaaaggcccgaagaacagcaacaggggacacaagccaggcgcgcga

SEQ ID NO: 127647 - RNA, 80 nt, Homo sapiens
aagaaagccggccggcagcgggccaacagcaacagagagagccagggggccacaggacccccccgggccacacccagaaa

SEQ ID NO: 127648 - RNA, 83 nt, Homo sapiens
gacagcccagaaaccgccaaagacggaaccgccacagcaccaagaggcagcacggcaggagacgaggagaggacagcaggaca

SEQ ID NO: 127649 - RNA, 71 nt, Homo sapiens
cacaacacccccagcggccgccggccccccacgaggcacgggcgagagcgggaagagcacgcacaagcaga

SEQ ID NO: 127650 - RNA, 72 nt, Homo sapiens
caccacagaaggaagaagggcggaaagcaggaaggacaaaacgcaagcagaagagggacgaaagcagcagaa

SEQ ID NO: 127651 - RNA, 81 nt, Homo sapiens
gggcgccacacagccccacaacacaccgcaccggcccggcaagcagccccgcaaagggaacaggaagcagccacggagggg

SEQ ID NO: 127652 - RNA, 77 nt, Homo sapiens
cggaacacccgccaaagcagagaaaagagagagagaacccggcgagaggaagagagagagacagaagaggaagagac

SEQ ID NO: 127653 - RNA, 64 nt, Homo sapiens
agagaggcgccagacccaccaccccacccgccacacccccggaccaccaggacggccaagcacc

SEQ ID NO: 127654 - RNA, 71 nt, Homo sapiens
ggccgccgaccccagccccaggcaagacccccgcgcaggagcgggccggcccccgaagccgccgcgccccg

SEQ ID NO: 127655 - RNA, 83 nt, Homo sapiens
aaccaggcaccagagcaagacagcggaagaagacccagggaaacccccagacagcaagaaagcaccagccaagcagaagggag

SEQ ID NO: 127656 - RNA, 75 nt, Homo sapiens
cgaggagaagaaggaaagagaagacgaagagaccgaagagaccgccaggcggacgaaccccccggcgaaggaccc

SEQ ID NO: 127657 - RNA, 78 nt, Homo sapiens
aggacaaggaaacaaacacaaacgggaaaagcggacagaagagagagacaccacaaggccagaagccacgacaaaagc

SEQ ID NO: 127658 - RNA, 60 nt, Homo sapiens
ggagccaggcacaagaaaagcagcggacaaaagcaagagcgcaacagaaaggaacaagag

SEQ ID NO: 127659 - RNA, 63 nt, Homo sapiens
aaaaccacgcgggcgcacccccgccagccgacacaaccagaaaggcgacggggcccggggaga

SEQ ID NO: 127660 - RNA, 76 nt, Homo sapiens
cacggggaacgagaacaaacagcacagaacgaggaaggggagggaaaaaccgaaggacgcccagagaccggcagcg

SEQ ID NO: 127661 - RNA, 80 nt, Homo sapiens
gcaaaacccagagaagagagaagaacaccgaaaccagaaggggcggaggcggcggggaaaccaaccccgcggagcaggcg

SEQ ID NO: 127662 - RNA, 41 nt, Homo sapiens
cacagcaacccgcccccagcaccacggagagggcagggaac

SEQ ID NO: 127663 - RNA, 74 nt, Homo sapiens
agaagggaagacacacaacccaacagagcgcgaggagggaaacgcgagggcaccagaggagccaccgcacccag

SEQ ID NO: 127664 - RNA, 80 nt, Homo sapiens
ggaaaccaaagggccacagcacgaagagaccgacggggagacagaggaaccgggaaaggaagcagacaccaagccaaaaa

SEQ ID NO: 127665 - RNA, 77 nt, Homo sapiens
gaccggaccacagccagcagaacaaccccacgaaacaggcgccaagggacaaacaaagccaagcaagagagccggac

SEQ ID NO: 127666 - RNA, 73 nt, Homo sapiens
gaaaccaccgacaccagccagggcacggaagacaagaagcagagagcggaaccgccaacaggacacgaagaaa

SEQ ID NO: 127667 - RNA, 68 nt, Homo sapiens
aacggaagcgcagcaacagcaagccccgggcagaagcagagccagagccccggagccccccgggcggc

SEQ ID NO: 127668 - RNA, 86 nt, Homo sapiens
ggaaagaaggcacaggagcagaggggggacccagaccccaccaccgacccggggcaagaggagcgagagcgaagggacacagagac

SEQ ID NO: 127669 - RNA, 70 nt, Homo sapiens
gaaagacgcagccgacgcagaacccgacaagaaagagcaaagggacagcaaaggcacaacacagaaagac

SEQ ID NO: 127670 - RNA, 49 nt, Homo sapiens
cccccgagagcggaacaggcgaccggcccgaggaccgccgcacgaccaa

SEQ ID NO: 127671 - RNA, 71 nt, Homo sapiens
aggggggccagaggggagcacagagcgagaccaggaaagaagggggcagaagaggggcaaccagggaccag

SEQ ID NO: 127672 - RNA, 64 nt, Homo sapiens
ggcaaaaaacaacaagaagagaaaaccagccagaggagaagcgagaagaacggaccgaagccaa

SEQ ID NO: 127673 - RNA, 50 nt, Homo sapiens
caaaaccccgaaaaaggcgaaggacacagacaaaagaccaggagagagca

SEQ ID NO: 127674 - RNA, 92 nt, Homo sapiens
gggcgccggcgcgcacaagggcagagggccagagcccagaaaagagaacacacggcggagaaccacccgcacccaaccgggacgggcacacc

SEQ ID NO: 127675 - RNA, 80 nt, Homo sapiens
caggaaagagaaggggaagggccccgggagcaaaaacagggagacgccagaagcagcgaaaaagaacacaaaacggcaga

SEQ ID NO: 127676 - RNA, 78 nt, Homo sapiens
ggagagggaccggaacggcggcgacaaggggcccgaacagaggggcaagcggacgggcgcaaaccagggcggcgggac

SEQ ID NO: 127677 - RNA, 75 nt, Homo sapiens
ccagaacgcagacagaggagcggacccccgcggcgcgcagcccagcagacccagaaacgacagaaacccgagcgg

SEQ ID NO: 127678 - RNA, 82 nt, Homo sapiens
ccagccggccgaggagccgccccggcaccagacaagcgagggcaccggggagcgaggcagagagaacgacaacccgagagcg

SEQ ID NO: 127679 - RNA, 73 nt, Homo sapiens
agggggcaagaggaggagaacaaagagggaaggagagggaggcaagcaggggggcaaaggaaagaaggcagaa

SEQ ID NO: 127680 - RNA, 58 nt, Homo sapiens
gccagccggggaaggccgccggcacgagcggaagaaagaagggggccaggaaagaacc

SEQ ID NO: 127681 - RNA, 74 nt, Homo sapiens
gccgggagcccacggcagaacccggccgagggcacggccagcccgacgccaggcaggagccgggcaccacgaaa

SEQ ID NO: 127682 - RNA, 80 nt, Homo sapiens
caacccaacagaaggaccagaggggaagaccacgagccagcggggacccgggggcacaggaagcgaagcaaagccaggac

SEQ ID NO: 127683 - RNA, 70 nt, Homo sapiens
cgagccgagagcccgacccggccagggaccaggaccgaggagggcggccacgaggcagagggaagagacg

SEQ ID NO: 127684 - RNA, 77 nt, Homo sapiens
gcggggcccacaagcagcacgagcgagagaacgaacaggcccagccacaggcaacgaaaacaacgagccacaaggac

SEQ ID NO: 127685 - RNA, 78 nt, Homo sapiens
aggaacagaaggaaaccagcccagggaagccaaaccccgagggaccccagaacaggcccgaaggcgacggagaacggg

SEQ ID NO: 127686 - RNA, 75 nt, Homo sapiens
ggccgcgggaacgcgcgccgccgacaaggcgcacaacagccagggccccccacgcgagaacccgggccggggccc

SEQ ID NO: 127687 - RNA, 63 nt, Homo sapiens
cccaagagcaaacgcaaaggaaaggaaacggaacgccaagcgaagaagaacgaaacggaagca

SEQ ID NO: 127688 - RNA, 53 nt, Homo sapiens
cagaggacaacgaaggcgaggacgagcaacaaagaacgaacccccaaacggaa

SEQ ID NO: 127689 - RNA, 81 nt, Homo sapiens
gggccggacagcagcgacagggggagacccagccccggggcccccagacaggcaaaggccagcccccggaggaggagaacc

SEQ ID NO: 127690 - RNA, 73 nt, Homo sapiens
ggaggaggacagcgaaaagacagacccaaaccacccagaaacggaagaagcccgacaaggagcggcagaccga

SEQ ID NO: 127691 - RNA, 57 nt, Homo sapiens
accgggaaaacaccggagaggcggagagggaagacgccacacacagaacgacaccac

SEQ ID NO: 127692 - RNA, 83 nt, Homo sapiens
ggcgacaaggggcccgaacagagggggaggcccgcaccccccggccgccgcacagccagagagggccagcagcaggcaagcgg

SEQ ID NO: 127693 - RNA, 65 nt, Homo sapiens
gcagcagcaggcccccgaccagacgaaggggaggaccaggcggcgagaagagaagagagaaggga

SEQ ID NO: 127694 - RNA, 79 nt, Homo sapiens
gcacaagcgccacgagaaggacacagcacccaaagcaccaccccaggagcaggagccggggcagagggagaccacacgg

SEQ ID NO: 127695 - RNA, 76 nt, Homo sapiens
aaaggagggcgacacgccacccgcgggaggcagcgcgagcccagggcccgaaaaaggaaccaaaccgaggacaaag

SEQ ID NO: 127696 - RNA, 56 nt, Homo sapiens
gccgagaaacgcccagagccacacagccggccgcgagaggagacgacgaagaccca

SEQ ID NO: 127697 - RNA, 78 nt, Homo sapiens
cggccaaggccacccaagaacggcccgccaccggagacaacgagaggagacagccccagcgccccaggagaccaacac

SEQ ID NO: 127698 - RNA, 73 nt, Homo sapiens
gagaagagcaaagccgagagaggaaacacagcagaaacaaagaagcagcgcgaaaggccaagccgacgccagc

SEQ ID NO: 127699 - RNA, 81 nt, Homo sapiens
agcgcccagcagaacgcggacaaagagaacaagaccaaagagagagaacaaagagagaggcggagagaagaagagccccca

SEQ ID NO: 127700 - RNA, 53 nt, Homo sapiens
ggccgccccaacaccagggaagagacacacccagacacagagagacccagaga

SEQ ID NO: 127701 - RNA, 77 nt, Homo sapiens
gcggggaccggagcgagaggagcgcgccggaccagcgcgacacggccacacagaccgaacacaaacagccaacagga

SEQ ID NO: 127702 - RNA, 75 nt, Homo sapiens
ggaaccaggaagagagacgacgggcaacagacaggcaaccccagcggccggccccaaaaggagggcgagccggcc

SEQ ID NO: 127703 - RNA, 73 nt, Homo sapiens
gcgaccccaagcaggaaagaagaaacaacagaaggacagagaaggagaagcggcgaggaaggaagccgacgcc

SEQ ID NO: 127704 - RNA, 86 nt, Homo sapiens
ggaggaggaaacaagggcagagccagcaaaggcgagagccacagaaggaggaggggacagcagcaggagcccagcaaagccacagc

SEQ ID NO: 127705 - RNA, 34 nt, Homo sapiens
acgccaccaaaagcaccaggccgaaacagaggag

SEQ ID NO: 127706 - RNA, 70 nt, Homo sapiens
ccagaaggaagagcgcccgggaaagaggaaaacccaaagaccggagagaacagaaaaaaagcggcccggg

SEQ ID NO: 127707 - RNA, 108 nt, Homo sapiens
caccagcccaccacccccagaccagccacccagaagcaggagccacgccaccaggccaaggggggaggacccgggcgcgcacgccagaacgccaccgggagccaaagg

SEQ ID NO: 127708 - RNA, 75 nt, Homo sapiens
aaacgaagaggccagcacccaagacagcaggggggaaagggagcacggcagccagcagcccaggaccacaagcca

SEQ ID NO: 127709 - RNA, 70 nt, Homo sapiens
cacaggagcggaagaaggacccaaagacaggaccacgcaccagcagagaaggaaagcaaaccgaagcagg

SEQ ID NO: 127710 - RNA, 75 nt, Homo sapiens
ccgcagccacggaagagaagaaacaacgaacgagcaaggaagggccaaggcagaccccacaccggagaacgcaac

SEQ ID NO: 127711 - RNA, 116 nt, Homo sapiens
cggagcggcggggccgggccgcgagcggaggagcaccgccgcggaaggagaccggagacgaggaaagaacacaggacagcacagcaaaaccaaagccaggcggacccccaaaccag

SEQ ID NO: 127712 - RNA, 58 nt, Homo sapiens
ggccagggaacccggcaccgccccagaaccggaagagccacccgagaaacccgcagag

SEQ ID NO: 127713 - RNA, 30 nt, Homo sapiens
cccacacccaagaggccggaaaggaaaaac

SEQ ID NO: 127714 - RNA, 76 nt, Homo sapiens
agaacaaaagaccagcggaccacggcagaccgaagggccaaaggcaaagcgggacaagccaaaacagcggacaaag

SEQ ID NO: 127715 - RNA, 75 nt, Homo sapiens
gcaggagagaggccgacggagaccgaggacaggccggacaccgcagcccaaaggagagagggcccggacagcgga

SEQ ID NO: 127716 - RNA, 73 nt, Homo sapiens
cagaagagaaaagccaggaccggcacacggcaggagaaaaggggaacgcccaagaagccaagcgagggagcga

SEQ ID NO: 127717 - RNA, 83 nt, Homo sapiens
gccgaggaggcccggggagcgaaggagcgcagcaccaggaggagagaccgccgggcgcaggcacaggaacaagccaccaccca

SEQ ID NO: 127718 - RNA, 97 nt, Homo sapiens
gaggccccagggaagcgcagaaagcaggcgaacccgcggcgcaaaacgacggcacaggagagggccaaaacgaaggagaagcccagaagagagggga

SEQ ID NO: 127719 - RNA, 42 nt, Homo sapiens
cggcgccagccgcccagagaacagccccagcccagggggaag

SEQ ID NO: 127720 - RNA, 71 nt, Homo sapiens
agaaaaaaagagaacaaagaaaaagaagaaccaaccgacggagcgaggagcaagagaacccagaacgagga

SEQ ID NO: 127721 - RNA, 83 nt, Homo sapiens
ggggcaaacagcaagagccagcaggaggagccacgggggcagggcaacacagccgaggacagcaagcagcaagacaccacaac

SEQ ID NO: 127722 - RNA, 61 nt, Homo sapiens
cagacccaagcaacccgcggggacagggaaaaagggcccagaaggaagaagggcacacagg

SEQ ID NO: 127723 - RNA, 74 nt, Homo sapiens
acccgccacagacccaggccagcacccacccaccgggacaggaccgcaccagcaggggcccgaccaggaggccc

SEQ ID NO: 127724 - RNA, 69 nt, Homo sapiens
gcgagaggggagacgcgacaggcagggaaacaaggcggcagggcacaagaaacccgcccccgaagcaac

SEQ ID NO: 127725 - RNA, 64 nt, Homo sapiens
gaagaagaacgacgaggggccagaaaaagcgagggaaggaacagcggaggcaagaaaccagaca

SEQ ID NO: 127726 - RNA, 56 nt, Homo sapiens
gggaaagacccacaccaagagaaccggagaagcacaagggggccagcccaggagag

SEQ ID NO: 127727 - RNA, 83 nt, Homo sapiens
cgacgaccgacaggggggaaaggcagcagcggacaggagaaccaacgccacacccgcgccccaggccacaagaagaaaccacg

SEQ ID NO: 127728 - RNA, 71 nt, Homo sapiens
aggacaggggcacccagcccaccagccggacacccgaagcagaagcgcggccaaaagaggggaaggcccga

SEQ ID NO: 127729 - RNA, 83 nt, Homo sapiens
gcacacagagacagacaaagcagccgcagcggaggaggagaaagagaggacccccggaccggcccgagggccgcggccgcacc

SEQ ID NO: 127730 - RNA, 85 nt, Homo sapiens
gggaagaggagcgaaaccggccacggaaaacgaaggagaaagacagcaaagaaaaggagaagaaaggaaaaaaacaaccccgggc

SEQ ID NO: 127731 - RNA, 100 nt, Homo sapiens
acgagcggccgcggccaggcgacgccacccaagacacaaacggcgacacagagaaaaacggcagcagccaagcacgcaaccaagagggaaggagacaggg

SEQ ID NO: 127732 - RNA, 57 nt, Homo sapiens
gagagcagccacaagacgacaggggggaccacacgccaaaggcacggggcaagccac

SEQ ID NO: 127733 - RNA, 78 nt, Homo sapiens
aagggcagaagagaagcaggaaggaggcagaggcacaccgaaagcaacagccaaccagaaaaccagaaacaccggcag

SEQ ID NO: 127734 - RNA, 99 nt, Homo sapiens
cgcggacacaaaccccggggccaccgagaaccccacagcgaaggaaaaggcagaacgggaaaaaaaagcacggacagggaaggagaagaagaaagggaa

SEQ ID NO: 127735 - RNA, 73 nt, Homo sapiens
gggcccgaggcggggcgggggaggggcgacggagccaggcggagcggcgccgccgggcccaagaccaccgacg

SEQ ID NO: 127736 - RNA, 65 nt, Homo sapiens
ggaaacgccgaggaacccggcgaggcggcaggcagaaaagagaccccggacggacgcacagcagg

SEQ ID NO: 127737 - RNA, 80 nt, Homo sapiens
gggggcggcgcccacccgggaggacagaacaccccaccagaccacccagcaagcccacaaaaaaggcacaagcagggaca

SEQ ID NO: 127738 - RNA, 37 nt, Homo sapiens
ccggacccgaagaccagagaaagaagccaacacaaac

SEQ ID NO: 127739 - RNA, 103 nt, Homo sapiens
gccacagcagcgaggcgcacaaacgaagaaaacacacagacagacagacaggcccagaagcggacaaccagccgaacaaaacacggcaagggagggccgaccc

SEQ ID NO: 127740 - RNA, 71 nt, Homo sapiens
aacaggccaaagcaagaagggcccaagaagaaacagaagacagccgaaccaagggcgacaaccagagacaa

SEQ ID NO: 127741 - RNA, 81 nt, Homo sapiens
aacaagaaacacaaggaccaaaacgaagcacggagaggcgccagcggagcccaggcccggagacaaagacgaaacgaacgc

SEQ ID NO: 127742 - RNA, 71 nt, Homo sapiens
gggcgaggacccccgagccagggaccggacagaaaagcgaggagaaagcccgggagcgaccgccggacccg

SEQ ID NO: 127743 - RNA, 81 nt, Homo sapiens
ccaaaaaagggaaggaggcagaggaagaaccggggcgaagaagaagagaagagagaacagagcgcgccccagaccaccggc

SEQ ID NO: 127744 - RNA, 34 nt, Homo sapiens
gcagagcgccaagacgagcgcgaagagcagcagg

SEQ ID NO: 127745 - RNA, 82 nt, Homo sapiens
gcggagcggcggggagcgcgggcgccccgcccaggcccggcggccgccccggcccgggggggagagcgggagcggccgggcc

SEQ ID NO: 127746 - RNA, 71 nt, Homo sapiens
ggaacccacgaaaaggagggagccaaagggagaaagcaaaacagagaaacaggaacagcagaagcaagcag

SEQ ID NO: 127747 - RNA, 77 nt, Homo sapiens
cccgggcccggcggacagccgcacccgcgccccagcagggggacccacagccccgaacagccgcagggaaaggaaaa

SEQ ID NO: 127748 - RNA, 68 nt, Homo sapiens
aggaagaggaaaaacacgacaaagacaacaggcacaaagagagaaggaacacccacagggcagacaga

SEQ ID NO: 127749 - RNA, 77 nt, Homo sapiens
ccagcccagagcagagcagggggcaaaggagcagagaacgacaagccacacgaggacagcccgcaacaccaccgaca

SEQ ID NO: 127750 - RNA, 76 nt, Homo sapiens
acccggccaacccagaaccccagcaccgaaagggaccgaaaggagagcaaagggaaaggggggacagggaccccgc

SEQ ID NO: 127751 - RNA, 103 nt, Homo sapiens
aaaggagacaaagaccgggcgacgaggcacagcgcgcaagaagggagacgggcggcagagaagagaagagcacagcgggaggaaagggagagacaagagagga

SEQ ID NO: 127752 - RNA, 59 nt, Homo sapiens
cccgcccaacgcccgacccggcggagaaaccaccacaaacacgaggccagcaacgacca

SEQ ID NO: 127753 - RNA, 80 nt, Homo sapiens
cgccgggaccggagggaggaagcgggacacccgggagcaggaaagaggaagagaaacaccaaggaaccacacaagaaaag

SEQ ID NO: 127754 - RNA, 57 nt, Homo sapiens
aaacgcccgggacacccacaagacaagagaaggcacagaaacccacaagaaaaaacg

SEQ ID NO: 127755 - RNA, 75 nt, Homo sapiens
ccagaggccaggcacgcaccgcaaggcgggccccggaagaaggcagcagacaacaggcacaaagagagaaggaac

SEQ ID NO: 127756 - RNA, 67 nt, Homo sapiens
agagcggaccagggccccagggacgcagggggcagggcagaggacaggcaccgggccgaaccagagg

SEQ ID NO: 127757 - RNA, 83 nt, Homo sapiens
gcggccgaaccccaacccaggcagaaccggccacacccaggaccggaacacccccacagacccgagccaggaggggcggagaa

SEQ ID NO: 127758 - RNA, 74 nt, Homo sapiens
cgacgggcaggcagagggccccggacaggcacccgacggggagaaggaagcgacacagaacggggaggggccac

SEQ ID NO: 127759 - RNA, 82 nt, Homo sapiens
agaagaggaccggcagggcagagcaggaggccccccgagaacacagcccaaaccagagggaccagagaggaggcagaagacg

SEQ ID NO: 127760 - RNA, 80 nt, Homo sapiens
gcgcaaacgacaccacccgaccggggaggagggggccagaaaagcccccagccaaccgacaccccacgacccccaacggg

SEQ ID NO: 127761 - RNA, 79 nt, Homo sapiens
cgggaccggggaaaaggcgcgccgagggacgagacaagggcaacgagacacccagcggcccggccccgccgggagacca

SEQ ID NO: 127762 - RNA, 79 nt, Homo sapiens
ccaaaaccaggccccaaggccggaagaagggagagcagaagccgcgaaaaaggggggccgagagcacgcagccccgaag

SEQ ID NO: 127763 - RNA, 57 nt, Homo sapiens
cccccgccgaagagcacgccagcccagggagaaagcagcggccaggagaaaggaaag

SEQ ID NO: 127764 - RNA, 66 nt, Homo sapiens
caccacaagacccaggccacgccgagccgccaggcagcaggacggacaccgggaaccccaagagga

SEQ ID NO: 127765 - RNA, 72 nt, Homo sapiens
ccgaagaagaaggcccgcccaccggagagaaggcagagggggcgagggaggaaagggggcaaaacgacgaag

SEQ ID NO: 127766 - RNA, 62 nt, Homo sapiens
acggaaagacaaaaacaacgcagacgcacaaaaggccagacagaaaagggagccaggacccc

SEQ ID NO: 127767 - RNA, 87 nt, Homo sapiens
cgggacggaccgagaccggaccgagagcggaccgagagcgcgaaacgcacgagaaggaccccggaggaaaagcggaagcggcagcgg

SEQ ID NO: 127768 - RNA, 69 nt, Homo sapiens
cgccacagccaagcagagggcacccaccggaccgagccaggaaagacaacgcggcagaccagaagcacc

SEQ ID NO: 127769 - RNA, 80 nt, Homo sapiens
cgacacacacaacaaccagacagggcagcacgccgcagacacaagcccccagggcgcaagaacccaagggcagaagggga

SEQ ID NO: 127770 - RNA, 52 nt, Homo sapiens
ccaacacccaccgagaagcaaacaggcggccagcccggaaaaacagacaagg

SEQ ID NO: 127771 - RNA, 83 nt, Homo sapiens
cccgcgaagaggagggggcgcggggccaccgcggcggagcccgagaaccagaggaccggcaacaacccgaggacgaaccaccc

SEQ ID NO: 127772 - RNA, 85 nt, Homo sapiens
ggcgcggcggaaccagggccgacccgggccggaccgaccccaggcggcggacaggaggccagggcacgggaaggcagcacgaggc

SEQ ID NO: 127773 - RNA, 54 nt, Homo sapiens
gaagacgagaaggggccaaaacgggccaccagagaacccaggagccgcagacga

SEQ ID NO: 127774 - RNA, 66 nt, Homo sapiens
ggagcgagcacacgggggagcccagaggagacagcaggccgccagacaacccagccaaacagagaa

SEQ ID NO: 127775 - RNA, 62 nt, Homo sapiens
caaacacaccaggcacaggagagagcaggacggcaggcggcaggaccaccgcacccaggcgg

SEQ ID NO: 127776 - RNA, 75 nt, Homo sapiens
gccagaagggaacaacacccgagaaccagacccaaaagagcaaacaaccgacggagaaggaaaaaagccgagaaa

SEQ ID NO: 127777 - RNA, 72 nt, Homo sapiens
ggaagaacgccaaaggagaccaagcccagccgcccacacaaggaaacaaccccgaaggcgcggcccgacaac

SEQ ID NO: 127778 - RNA, 81 nt, Homo sapiens
aagaagagaacaaagagccgggagacggagcacggcgccgcggcaagagccaggcaagagggagaagacagcgaccaggga

SEQ ID NO: 127779 - RNA, 91 nt, Homo sapiens
gacaacggagaccagaccacgcagccacgcgggcgagcggcggggagcggcgaagccgcgggcgagccgggcccccagagagagcgcaccc

SEQ ID NO: 127780 - RNA, 78 nt, Homo sapiens
cagcgaaaaaagccaacgccaaacaacagagagggaggccggaaaacagaaacccgagaggagcaggagcaaccgaca

SEQ ID NO: 127781 - RNA, 81 nt, Homo sapiens
cagagggaggacccggaacacccggaagccgggaaagggcggagaacggaaaagcaccaggaagcagagaggaccgcagaa

SEQ ID NO: 127782 - RNA, 73 nt, Homo sapiens
cgggcccccgggggacggcaagcgcgacgccaggcgagaccgccaggggcgacgagaggccaggggccggaac

SEQ ID NO: 127783 - RNA, 82 nt, Homo sapiens
cagccccggcgggagcggcggcaagaaaaagccagccagaagaggcgcgcgcgcggcacaccggcgccggcgaaagcaacga

SEQ ID NO: 127784 - RNA, 49 nt, Homo sapiens
caaaagggccaaagaagggagagagggaggaaggcccgccgccaggcag

SEQ ID NO: 127785 - RNA, 35 nt, Homo sapiens
gaaaagcagcaaaaagaagcacgaggaaaaggagc

SEQ ID NO: 127786 - RNA, 78 nt, Homo sapiens
caaccccagggaccggaaagacagacaggaggggaggaggccaggagccgaaagcggcagcccagaaccggaagcgac

SEQ ID NO: 127787 - RNA, 76 nt, Homo sapiens
aaagcaccagacgccaccacgggcacccgcgccgggcaccgaggaccagccaagacaggagagcgcgcgccgcgcg

SEQ ID NO: 127788 - RNA, 74 nt, Homo sapiens
aacagccacggaaagaagaccaggggaaaaccaaaagaggccgaacaacgggcaaccgaagagagggaaaagag

SEQ ID NO: 127789 - RNA, 72 nt, Homo sapiens
caccgcagaccccacgggaggccagccacccgaacccccaggcgcgcgagcaagcaaaccccgaaaccacac

SEQ ID NO: 127790 - RNA, 75 nt, Homo sapiens
cagacagacagggagacaggccacgcaggcgcaacgcaaagaccagccacgagaaaaggagggacccagacaccc

SEQ ID NO: 127791 - RNA, 84 nt, Homo sapiens
ccggaggcgcagggcgacggccccaccccggccacgggacggcggcgcggagaaggcagacaggaagggaaggggcggagacgg

SEQ ID NO: 127792 - RNA, 69 nt, Homo sapiens
aagggccgaaccggccagagggcaagcaaagaccaagagaagagggaggagggacacacgacaggcccg

SEQ ID NO: 127793 - RNA, 73 nt, Homo sapiens
aagagaggccagggagagaaagcacgccaaggggcaaggcgaagaagaaagaagggaagacaagaacaggcga

SEQ ID NO: 127794 - RNA, 84 nt, Homo sapiens
gggcccaggggccggagacccccagaaccggcgacacagcccgggaggaccagggggcccacccagcaccgcgccccggcagcg

SEQ ID NO: 127795 - RNA, 74 nt, Homo sapiens
ccaacgcaagagccaagaaccggacacccccaccgggacacagccagggaacaaaaaccagacaccaaaggaag

SEQ ID NO: 127796 - RNA, 65 nt, Homo sapiens
gaagcccaccacaaaaacgaaggcggcgggaaagcggggcagcaaggcaaggaaaaaacgaagag

SEQ ID NO: 127797 - RNA, 81 nt, Homo sapiens
agcggggacccaggagccggccagcgcgccggagccgccgagagcaagccacaaggcaaggaaaaacccaacggacaagga

SEQ ID NO: 127798 - RNA, 70 nt, Homo sapiens
acggacggagacacacccccaaagagcagccggccagaagagccaaacagggcaaagcacagaaaaacaa

SEQ ID NO: 127799 - RNA, 65 nt, Homo sapiens
ggacccgggcggacgagcacgaacacacggcaaaagcagaccggaaaacccaccggcaagaccac

SEQ ID NO: 127800 - RNA, 52 nt, Homo sapiens
ggcacaacagaaaagcagagaccgggacagacggaagaaaggaaagaagacg

SEQ ID NO: 127801 - RNA, 78 nt, Homo sapiens
ggaggcgcccccggagccgccccggaggagaaggacaaacaacagaccaaggggcggaaaacccgaagccaggaacag

SEQ ID NO: 127802 - RNA, 65 nt, Homo sapiens
aaagcacacagccaagccagcgaaccccaagcccgacggggacccaccccccgacagggaaaaca

SEQ ID NO: 127803 - RNA, 41 nt, Homo sapiens
gacacaggcggcaccaccaccccaggcggaggcggggggac

SEQ ID NO: 127804 - RNA, 63 nt, Homo sapiens
cccacgaaaaggaaaggaccccaaagggcaggcaccagaaggagaagcaaaaagccacgaggg

SEQ ID NO: 127805 - RNA, 107 nt, Homo sapiens
agacgcagagccccagggcggacagcagcccggggcaaccggagccccccaggaggaaaacgaaggaaggaggacccgaggagagagaagacggaaaggaaacacgg

SEQ ID NO: 127806 - RNA, 68 nt, Homo sapiens
cccaaaacccggaagagcgccccaggagaaacaaaaggacagaaaacgggccccagacacaagcccca

SEQ ID NO: 127807 - RNA, 75 nt, Homo sapiens
cgagcgcgcggaggcggaggcggggggagcgcgggccacgccagccccccccgcagcgcgcacagaccggcacaa

SEQ ID NO: 127808 - RNA, 74 nt, Homo sapiens
ggcgcccacgggggcccgcggcgcccggcgcgaaggggaacaacagcaccaccaaccggagacaccgaaaccag

SEQ ID NO: 127809 - RNA, 79 nt, Homo sapiens
cagaccgggggggccacgaagcaccacgccgagacccacgaggggcagaacaccagcaccagacacaccagccaaaggg

SEQ ID NO: 127810 - RNA, 50 nt, Homo sapiens
aaggaccaagaaccaggcccaaagcccagccaaggacccgaaaaacgagc

SEQ ID NO: 127811 - RNA, 81 nt, Homo sapiens
ccaggccagcgcagcggcgcagaccggggcacggggcggccggggaaggagaaggggacggcgcgggcacgggggcgagag

SEQ ID NO: 127812 - RNA, 71 nt, Homo sapiens
gggcgcaaaagggcgcacacagggaaagaaaggcaaagcgagcaagagggagaccaaccaggcgggaaacg

SEQ ID NO: 127813 - RNA, 56 nt, Homo sapiens
agaaacaccaccaacaaaccgacacaacacagaaagcgaggagcgaagaaagagaa

SEQ ID NO: 127814 - RNA, 81 nt, Homo sapiens
gcccagacgccaagaacacaaaaaccaaaaaaggaaaccagacccgcccccaggagcggagaggagaaaaagaaacccaaa

SEQ ID NO: 127815 - RNA, 74 nt, Homo sapiens
gggcagggggccagccggaccagcaccccaccacgacacgggaggacgggaaagacaaggagccgggccgagaa

SEQ ID NO: 127816 - RNA, 51 nt, Homo sapiens
gcaagccgggaagcccaaagcaaggcggggcggcccaggaaagacccaacc

SEQ ID NO: 127817 - RNA, 66 nt, Homo sapiens
ccgcgccgcaggaggccggcgaggagcgccgcgcccgcccgagcgccgcccggcgggcgccgggag

SEQ ID NO: 127818 - RNA, 81 nt, Homo sapiens
acaagaagaagcagaggaggcccacaggcccgcccggacaccgagaggcagcaagaggagaagccagaaaagaagccgcac

SEQ ID NO: 127819 - RNA, 57 nt, Homo sapiens
gcgcacgacagcaaaagacgggcccagaaaacacacaggaggaccagaaaaggaagg

SEQ ID NO: 127820 - RNA, 64 nt, Homo sapiens
cagaacgaagggcaccacccccccagggcggggcaggccacaagagggaagaagaaccgaagcg

SEQ ID NO: 127821 - RNA, 74 nt, Homo sapiens
ggggccccgggcaagaacagcagcacaagcgccccagagacaagagaaaccacagacaacgggcaacgcgggca

SEQ ID NO: 127822 - RNA, 70 nt, Homo sapiens
gagaaggaccaagaaccaggggaagagggaaaggaagggagggcaggaaggccaggcgaaaaccaaaggg

SEQ ID NO: 127823 - RNA, 86 nt, Homo sapiens
cgagggggaagagggcgcgggagaaagaggagaacgcccaagcggcccggaagcccagggagggagagggcaaacgccagcggggg

SEQ ID NO: 127824 - RNA, 74 nt, Homo sapiens
gcggagagcccgccaccaaccccgacaggagggccgaagggcaagagggcacagaagacggcgccccacacacg

SEQ ID NO: 127825 - RNA, 78 nt, Homo sapiens
agaggaaaccaagaacagaagaggaacaggacagagaagacccaagacaagaagagaggcccaagacccagaggagcc

SEQ ID NO: 127826 - RNA, 81 nt, Homo sapiens
caacgaccggagaggggaacagacgcagggcagggccccgcccggcggggaagagcgccagcgcacgccccacggaacacc

SEQ ID NO: 127827 - RNA, 62 nt, Homo sapiens
gggaaacgggcgaagcgacgagccgcgaggaggagcaccgcgggcagcccagcaagcccggg

SEQ ID NO: 127828 - RNA, 62 nt, Homo sapiens
ccaaggaaaggacggacccaggagccggaagagggaagaaggaagcagaaaggaaagaggaa

SEQ ID NO: 127829 - RNA, 59 nt, Homo sapiens
aaaacgccaccaggccaccggggcccgggcccagcccaggaacccgaacccgagggaac

SEQ ID NO: 127830 - RNA, 80 nt, Homo sapiens
ccgcgcagcagcagcgccgggccgcgcgcaggcacccgccggcccaccaccccagaggagaaaagccacagagccaggga

SEQ ID NO: 127831 - RNA, 76 nt, Homo sapiens
ccgcgcgccgagggcgaggcggacgcgcggcgcgcagccacaaaggcacaggccaccaccaaaaaaagccgcaaca

SEQ ID NO: 127832 - RNA, 68 nt, Homo sapiens
gggccaaagaagggagagaggaaacacaaaaggcaaacagaagcaccgaacagggaaagaagacaaaa

SEQ ID NO: 127833 - RNA, 74 nt, Homo sapiens
cgaacccaagaacaagcaaagaggaacgaggcgcgacacaccagcggagcgggggaacccccccgggcagccac

SEQ ID NO: 127834 - RNA, 124 nt, Homo sapiens
caaagcaaaaccacaacacgcacacaaacggggacggcagcccaccggcaccaagggaccagaagggcagcaagcccgccagggccacccgcagccaagggccagagaccaggaaaggaagaaa

SEQ ID NO: 127835 - RNA, 74 nt, Homo sapiens
gcccccagagaccgccagcaggcaggcccgagcacgcgcgggagcagcagagaccaccccgaccggcgccacac

SEQ ID NO: 127836 - RNA, 35 nt, Homo sapiens
cacacacgggcggacaggggaaacaaagcccagcc

SEQ ID NO: 127837 - RNA, 74 nt, Homo sapiens
gaagcggaggcacgggcggcccgcaggaccggaccgggggagggccgcaagagacaccacaaaaggacacccga

SEQ ID NO: 127838 - RNA, 94 nt, Homo sapiens
gagccggagcgcggagcccggccccgcaccaggaggaggacgacagcacgacaccacggaaagaggcgaaaagacagaggcagcacaaaggaac

SEQ ID NO: 127839 - RNA, 65 nt, Homo sapiens
gaacgacagagaggagggagaacaagcaacggcggggagaagagagaagagacccacaacgcgcg

SEQ ID NO: 127840 - RNA, 67 nt, Homo sapiens
gcccgggagcccgccggccgcagcagagcacgaaggaagaggcccggaaaggaaggggggaaaggcc

SEQ ID NO: 127841 - RNA, 89 nt, Homo sapiens
aggaggacagcgcacacagcaagcacgaggaaggagggccccggagcagccacaccaccgaggccccacccagcacgagcacagcccca

SEQ ID NO: 127842 - RNA, 69 nt, Homo sapiens
acagcgccgaaagcgccccggaagaccgcgccgccagccgaggccagggaaggacacaccgcggaaaga

SEQ ID NO: 127843 - RNA, 68 nt, Homo sapiens
ccgacagccacagaaaaagacccacaggcgcaagccaccggagagaagacagggacgcaagggcagcc

SEQ ID NO: 127844 - RNA, 100 nt, Homo sapiens
gccccgagacaggcacgccgggggcaggccccgagcgccgaacagagcaggagggcggcggaggagccaagagcgcagaaagcccaaacacccgggaaaa

SEQ ID NO: 127845 - RNA, 68 nt, Homo sapiens
ggagagaggaccacccagaggagcaacgaaaccaggaagaagacagagacccccgcgagccaaaagcc

SEQ ID NO: 127846 - RNA, 55 nt, Homo sapiens
cccaccgacccaccaacaacacagggaaagacaaggagccgggccgagaaaccga

SEQ ID NO: 127847 - RNA, 75 nt, Homo sapiens
ccccggccgggccgaccggcagcagggggcaaaagcagggcaacggcccggccaaaggaagaggcggccccagca

SEQ ID NO: 127848 - RNA, 56 nt, Homo sapiens
agcgaaaggaaaacaaggcaccaggaccaaagggaccagccggccggagcgccgcc

SEQ ID NO: 127849 - RNA, 68 nt, Homo sapiens
aaaaagcaacaaccggaacagcgagacccgaagcagcgccaggaaaaccggaaacacagaagcacccc

SEQ ID NO: 127850 - RNA, 54 nt, Homo sapiens
aagggccgcaaggaacgcccgcgcagcgaaaccacgcccccgagagccgccaac

SEQ ID NO: 127851 - RNA, 34 nt, Homo sapiens
ggcgcccgcccagccagaacgaaaccagaacaga

SEQ ID NO: 127852 - RNA, 71 nt, Homo sapiens
gccagcagacccaagaaaggagaggagcaaccggaagggacaaaagaacaaaaaaggagaccgccagaaaa

SEQ ID NO: 127853 - RNA, 79 nt, Homo sapiens
caggacccagacccagacgggagcaagcagcaagcggaaaaccacggagcgccccgcacggagcagaagaaaagaccaa

SEQ ID NO: 127854 - RNA, 94 nt, Homo sapiens
gcgaggacaaggacaaagaaggcaaaccccgcgaaggcagagaaaggcaagccagggcaagcagccaagaggcagcggaggaggcagaggagga

SEQ ID NO: 127855 - RNA, 69 nt, Homo sapiens
caacccgaggacgaaccaccccgcgccagcagcacagcacgcagagccaaggggaacagagacgggaag

SEQ ID NO: 127856 - RNA, 70 nt, Homo sapiens
cgcggggcgcgcggcgccggcggcgcgcgacccccgcgcagcagaaaagagacacacaaaggaagcaaag

SEQ ID NO: 127857 - RNA, 83 nt, Homo sapiens
cgacaagacaccacggacgagagacaaacgccgaagaaaaagcggggaaggggggcaaaaaaaagaagcaagcgaagcaccga

SEQ ID NO: 127858 - RNA, 81 nt, Homo sapiens
ccgggggcgagcacaaacggggcggggccggggaacacacaggggcggcaagaaaacaggaacaggaagcggggaaaggag

SEQ ID NO: 127859 - RNA, 45 nt, Homo sapiens
cgagcggcggccacaaaccagaggaggacgacgaggcccaaccaa

SEQ ID NO: 127860 - RNA, 83 nt, Homo sapiens
gacgacaggaagaaaagacgcaggaagaaccacaacaagaaagcagaaacgaaagaaagcaagagcgaaaacaccaagaagca

SEQ ID NO: 127861 - RNA, 79 nt, Homo sapiens
gagaagaagccaccaaggagcaggaaaacggggacccaccggaaccgaggaagggaaacaggcgagcagggacgacgag

SEQ ID NO: 127862 - RNA, 62 nt, Homo sapiens
gcaccacacggcaacaagaccacccaacagacacggccaaaagaagacccagacaagaaaga

SEQ ID NO: 127863 - RNA, 78 nt, Homo sapiens
agcgacaacaggaggccggaagacccaaagcgagggcggagaacggaaaagcaccaggaagcagagaggaccgcagaa

SEQ ID NO: 127864 - RNA, 67 nt, Homo sapiens
ccagaaacaaaccccaaccaaaggaccagccaggaagcacgagcaggccacaacaccgaaaaaagcc

SEQ ID NO: 127865 - RNA, 78 nt, Homo sapiens
acggcagaaacaaagaggcggaggacaagaagggcagagaagccagaacggagaaacaacgaagaccaacacgaaggc

SEQ ID NO: 127866 - RNA, 77 nt, Homo sapiens
ggagagaggccgaaacagcagaccccgggaggcaccggacacggcgggcaggccggaagaaacgcggaccgcggagg

SEQ ID NO: 127867 - RNA, 81 nt, Homo sapiens
gcggagacaaagacaccaagcaaagccacagagacccaggcgaagacaaggacaagcaagagaagcaaaaggaaaagcaaa

SEQ ID NO: 127868 - RNA, 73 nt, Homo sapiens
agaggaagaagaacgacccgcccggggcagcagcaccccaagcccgaaccgacccccaagcccgaagaggaaa

SEQ ID NO: 127869 - RNA, 77 nt, Homo sapiens
ccacacacaggaggggacccagggcacccacgcacagagagacgagaaagacgaccgccaaccagggagaacacaga

SEQ ID NO: 127870 - RNA, 58 nt, Homo sapiens
cagagacgaaaaaccgaggcgagacccaaaggccccgggggcgccgagggcacaaggg

SEQ ID NO: 127871 - RNA, 71 nt, Homo sapiens
aggacacacagagaggaaccccaaacccaccagaaaagccccagcgagcggcacccccacgggaacccaaa

SEQ ID NO: 127872 - RNA, 83 nt, Homo sapiens
gagaaggcacacgccaagaacacaagagacggccgacagacagagcgggagccaccagcgccaaagggaagccaggagcccgg

SEQ ID NO: 127873 - RNA, 73 nt, Homo sapiens
aggacgcacccacagaagacagccaagaagcagagccgccgacaaagggcacaaaccccagaagccgaaaagc

SEQ ID NO: 127874 - RNA, 67 nt, Homo sapiens
ggaaagaagaaacaccgcaaagccagaccaggagaagagcagggggccgaaagcgcgggggcgcgga

SEQ ID NO: 127875 - RNA, 70 nt, Homo sapiens
aacggaaagacccgccaagagagaaaccaacaagcgggagaggagccaagcccaacgggacgggaaaacg

SEQ ID NO: 127876 - RNA, 71 nt, Homo sapiens
ccgcaggcaggccacgccacgggggagccacccggcggagccagcggagagcacggagagcaagagagagc

SEQ ID NO: 127877 - RNA, 72 nt, Homo sapiens
ggagaaggaccaagaaccagagccagccaggagcccgcccaacagccgacacggagagacaagcgaaaggag

SEQ ID NO: 127878 - RNA, 67 nt, Homo sapiens
ggcaaccgcccaccaccagaccccgggacccgcaagaccgcgccccaccagcgcaaagaaccggagc

SEQ ID NO: 127879 - RNA, 63 nt, Homo sapiens
ggccccgagccaggggagaaggaggaaaggcccggcagcgcgagcggaagcgagggcaccaac

SEQ ID NO: 127880 - RNA, 68 nt, Homo sapiens
gaaacagagcaaaaaccggaaagacagcgcgaagcaccaccggaaccggaggagccgcacaaccaagg

SEQ ID NO: 127881 - RNA, 79 nt, Homo sapiens
aacaaccaccgcagccggccaaggacagaccacacgcggacaccaaggcgccaggcgaggggaccaccgcagaccacaa

SEQ ID NO: 127882 - RNA, 34 nt, Homo sapiens
ggccggcggggcgacagggaagcggccgcggccg

SEQ ID NO: 127883 - RNA, 91 nt, Homo sapiens
ggccgggggccagagaccaaggcgcgcccggcgggccggaccaagggccgccagcagacagccggcacacaggcacaagggcggagcccag

SEQ ID NO: 127884 - RNA, 74 nt, Homo sapiens
aagcaaaggaagcggagaaccacaaacagagacaagagagacaccccaaccgacaaagagcaccagacagccgg

SEQ ID NO: 127885 - RNA, 64 nt, Homo sapiens
cgaaggcacggggcaggaaacagaagagagcagcccgacggccaggaggcgaagagacgaggaa

SEQ ID NO: 127886 - RNA, 72 nt, Homo sapiens
aaaccaaacacagcacgaccagaaccaggaggaaccacagcaaggacccagaagaagaagggcaagaagaca

SEQ ID NO: 127887 - RNA, 80 nt, Homo sapiens
agggaaggacaaggaaacaaacacaaacgggcagagcgaagggagaccagcgaaaagggcggcggccacgaccaccggca

SEQ ID NO: 127888 - RNA, 61 nt, Homo sapiens
gcccaggcggcaccaggagcggagaagccaggaagcaaaggaagggcaacaaccccagcag

SEQ ID NO: 127889 - RNA, 80 nt, Homo sapiens
caaagaccaggcaagggccccagaaaacgggacaaaccaggggaaggggaggcaagcaggggggcaaaggaaagaaggca

SEQ ID NO: 127890 - RNA, 81 nt, Homo sapiens
ggaagaggagagaaaagggccagggagagccggggacgacacacacacggagacaaggacgaggcccaaggaaacggcggc

SEQ ID NO: 127891 - RNA, 50 nt, Homo sapiens
ggcgacagcccagacgggacccagaccacaagacaggaggaccgccccgg

SEQ ID NO: 127892 - RNA, 71 nt, Homo sapiens
aaggggaaacagaaacaagggcgacaacccggaaaccacaaaaggaaggaccaaagaaagaccagcggagg

SEQ ID NO: 127893 - RNA, 75 nt, Homo sapiens
ccccagggccaagaaaagagaaccaaacaccccaaaggcagaagcaacacggaaagacaccgagcagacaaacca

SEQ ID NO: 127894 - RNA, 73 nt, Homo sapiens
gacgaaggaagaaaaggggacaggaccggcccaacagggcagccgggccccccgcgccgcgggggccaagccc

SEQ ID NO: 127895 - RNA, 71 nt, Homo sapiens
gcggcgaggaaagacgcccgggcaggcggacccagaacgccggaggacccggccaaaccacaggcacaacc

SEQ ID NO: 127896 - RNA, 89 nt, Homo sapiens
caaggagcaaagcagcggcgcagcccggggaacccaagacagaccaggagaggagcagccggaaagcaacgagacgaacaaccccccga

SEQ ID NO: 127897 - RNA, 78 nt, Homo sapiens
ggccagcagcggaggaggacacagggaaacgaagccagaccggagcaacgcaccggcgcgcaggggcacggagccacg

SEQ ID NO: 127898 - RNA, 89 nt, Homo sapiens
gaggagcaggagaaggagaccccgggagaaaaaaaaccagaggaggagaagagccgcagggcccagcgggggcgagggcaggagccaga

SEQ ID NO: 127899 - RNA, 64 nt, Homo sapiens
gcggcggcggcgcggcccaaaagagacgggcaagccgacacccacgaggagacccagccgggcg

SEQ ID NO: 127900 - RNA, 64 nt, Homo sapiens
cgcacaggacggagaacgccccgaaccccgcacacgaggaagagcagcacaccgcgcccacagg

SEQ ID NO: 127901 - RNA, 74 nt, Homo sapiens
gacggcgggcaccggccgacgcggcggagaaaccaccacaaacacgaggccagcaacgaccaacaagacagacc

SEQ ID NO: 127902 - RNA, 70 nt, Homo sapiens
cacgagcaaaaggaagcaacccagaagagcgaaggacccagcgaggaggggagcgaagaggaaagaaaga

SEQ ID NO: 127903 - RNA, 80 nt, Homo sapiens
cgaacgagcaaaggcacgggcagccggaaggacaccaagagcggaccgggccccgcaagaaaagccaggcccgagccgga

SEQ ID NO: 127904 - RNA, 72 nt, Homo sapiens
caggcaacggccagacacagggaaagcggaggggggccccaggacccggacagacccaaaagggaaaaagga

SEQ ID NO: 127905 - RNA, 77 nt, Homo sapiens
agaaagaaaaacaccaggaacaaagcacgccagagaaccggacgacccccgaccaggagcgggccggcgcggagccc

SEQ ID NO: 127906 - RNA, 86 nt, Homo sapiens
cgacaagccgcggcagccgcggaccaccgccgccaggagaccgcggccaggagccaagaagaccagaccgcgggaggagccgacag

SEQ ID NO: 127907 - RNA, 74 nt, Homo sapiens
gcagaacgaacaggaacaaagccagacgcgggagagaggaaggaggccgaagggcggccgcgagaagcagacac

SEQ ID NO: 127908 - RNA, 56 nt, Homo sapiens
cggccggaggagcccccaggccgaagcgagagaaaagaagaaggcacaaaggaagc

SEQ ID NO: 127909 - RNA, 37 nt, Homo sapiens
ccacggcaccacaccgcgcggggagcagcccgcacac

SEQ ID NO: 127910 - RNA, 71 nt, Homo sapiens
cgagagaggacgccaccagcacagagggcaccgggaaaccaccaagcaggggcgcggagccccagccagga

SEQ ID NO: 127911 - RNA, 75 nt, Homo sapiens
cgcgcggccgggcggcgaggaagaggaaggaaggagcgcagcgcagaaaacacagagaaaacacggagaaacagc

SEQ ID NO: 127912 - RNA, 61 nt, Homo sapiens
cgcggggccgaaaacaacgacaacgagcacagcgcaccacgacaaagaagagaaaacgcgg

SEQ ID NO: 127913 - RNA, 80 nt, Homo sapiens
ccggggcaagagcacccgcggccccacgcacaaccacccacccccgagacagaagaaagggggcccacgagaagagcagg

SEQ ID NO: 127914 - RNA, 67 nt, Homo sapiens
accgcgacgacccaacaaaaaggagcccacagaagccagaaaaggaaggcagcacccgggcgcagcg

SEQ ID NO: 127915 - RNA, 77 nt, Homo sapiens
ggcggcagggcggcccaagaccacgcaggagagaagcgcgggcggacccaccaagccaacggcccacaccagcccgg

SEQ ID NO: 127916 - RNA, 74 nt, Homo sapiens
ccggcagcaaagagggaacagcacccgagggacccgaggagcccaccaagccgaccgcaggcaagggccggggg

SEQ ID NO: 127917 - RNA, 57 nt, Homo sapiens
gccccggggagagaaccgggaagaggccacgagaaccggagagagcacccaccacgg

SEQ ID NO: 127918 - RNA, 79 nt, Homo sapiens
ggcggaagacacaggcccggagaggcgggggagcgggaggagccagagcacaccgcaccacggccacaggcgcccgaag

SEQ ID NO: 127919 - RNA, 78 nt, Homo sapiens
gaggaaagcacaaaggaagacgaaccggagaagagccccccagacggacaaccgcacacagacagagccggcacaacc

SEQ ID NO: 127920 - RNA, 68 nt, Homo sapiens
gcggaccccgaccccgaggcgagacggaaaggcgcgcacagagcacaccccgggagcccacccccaac

SEQ ID NO: 127921 - RNA, 79 nt, Homo sapiens
gcaccaccggcgcccacgcgaacaccaccagaagacacagacacggaggggagaagggggagaaagccaccacacaacc

SEQ ID NO: 127922 - RNA, 81 nt, Homo sapiens
gaaaggacacgggaacacagcgcgcgcccagggcaccagaccggcccaagaaccgaagcaggacacaaagaaaagacgaag

SEQ ID NO: 127923 - RNA, 80 nt, Homo sapiens
acacccccggggccccaggaaccaaaggaagggagccaaaaaccgaacacccggaaggggacaagggacggcgaacagac

SEQ ID NO: 127924 - RNA, 75 nt, Homo sapiens
caggaccgaccggcaaagagaagaagccacaagacaacaaccagccgaaaacccacagcacgggagccgaacgga

SEQ ID NO: 127925 - RNA, 68 nt, Homo sapiens
cgccaaacgcccgaaagaagcggacggaggacaaggcacgaggcgcggcgaccaccacagcagagccc

SEQ ID NO: 127926 - RNA, 74 nt, Homo sapiens
gacaagcgcccaaggaaccccgaagcacaggaccaaggagccaacgggggacccacaggaccgcgaacaaggag

SEQ ID NO: 127927 - RNA, 69 nt, Homo sapiens
agccgccagagaaacacaaagaaccagcagcaacggagaacggccaacagcccagcacaagacgcccag

SEQ ID NO: 127928 - RNA, 82 nt, Homo sapiens
cagagggggaccagagagcccaacgccgggccaagaccccgagcaaccaagcacccaaccgaaccccggaagccaggaggaa

SEQ ID NO: 127929 - RNA, 75 nt, Homo sapiens
ccgacagccgcgacggcgagcccgggccgcgcccgagagagacacagacaaagcccagaagaaaaaccacaccaa

SEQ ID NO: 127930 - RNA, 85 nt, Homo sapiens
ggaagccgaaaagacagcagacgaagccaaggccagcaaggcccaaaagccaggacgcaaacagccagcagagagaagcggccgc

SEQ ID NO: 127931 - RNA, 63 nt, Homo sapiens
agggagcccgagaaccaccaggggacccaggccaccaccgcccagcaacacggaaggaaaaca

SEQ ID NO: 127932 - RNA, 76 nt, Homo sapiens
cccaaacagcggcgggggcaggcgcgccgggacgcaaggaaacacaaagcggccagaagaaaagagaggggccccc

SEQ ID NO: 127933 - RNA, 73 nt, Homo sapiens
aaaccccaggccaagcagccaccagcagcccccagagcgggaccacaggaagccgccgaagcccagaagagag

SEQ ID NO: 127934 - RNA, 86 nt, Homo sapiens
aagagaagaagaaaacaggaccgaagcggacacaagccagggacagcagaccacagcccggcaggcccaaaaacccaaagggacag

SEQ ID NO: 127935 - RNA, 59 nt, Homo sapiens
aaggggaaagagaaaagagcaccagacaagaacggcagaacaacggggaacgcacgcgg

SEQ ID NO: 127936 - RNA, 71 nt, Homo sapiens
aaaccgagcccaaagaagagcacgaaacgagcaggaaaccagggccgggaagcacacaggaggcgccacgg

SEQ ID NO: 127937 - RNA, 73 nt, Homo sapiens
caaacggcacggcacgaaggaaacccaccagagaaggcgcggccacccaggacccgggggaggcagcgaagaa

SEQ ID NO: 127938 - RNA, 58 nt, Homo sapiens
gcagaacagagaagaggagggcgcaagaagaacggacagaccacgggccggcagggag

SEQ ID NO: 127939 - RNA, 83 nt, Homo sapiens
gagaagcaagaaggcccggacacagcaaaccgggccacagcacacagcaaccagacgcagcaggcggaaaggcgaccagggca

SEQ ID NO: 127940 - RNA, 71 nt, Homo sapiens
aggccgcgggggcaacggagaaaacccggaaccgcgacggcggcagacaacggcaagcggagaagagcaag

SEQ ID NO: 127941 - RNA, 71 nt, Homo sapiens
acgaacaaacagcaagaaagaccacaagaccacagaacgcgggaccgaaggacgaacagagaaacccccag

SEQ ID NO: 127942 - RNA, 53 nt, Homo sapiens
gcacagcaggagaagccggaaagaacaagaccagaacccccagagcacccaag

SEQ ID NO: 127943 - RNA, 47 nt, Homo sapiens
acccggccaagcacacacaccaccggcgggcaagaagcaagcaacca

SEQ ID NO: 127944 - RNA, 80 nt, Homo sapiens
gacaagcgagcgccgcacaaaaagcagagagagcccgaaaggccgcgcgagcccgagagagggagggagggacgcgacgc

SEQ ID NO: 127945 - RNA, 79 nt, Homo sapiens
ccaaaagcaagaaacacaacgaaaggaaaaggggaaaagaaacaaacaacaagaagaaggacaaggaacgaaggcaagg

SEQ ID NO: 127946 - RNA, 83 nt, Homo sapiens
aggagccgaggaagagggcggcgacgggggggacgagcggagcccgggacaggagggaacgaagaaggacagaacggacaagg

SEQ ID NO: 127947 - RNA, 69 nt, Homo sapiens
cgaccgcacggaaacgaagcgacacgcgaagagaaaagcagagagaaaaaaaaaaaacaggagaacaaa

SEQ ID NO: 127948 - RNA, 93 nt, Homo sapiens
ccgccgccgccgccgcgggcgccagaaggaagaggcggacggaggagcaggcgagaagagaaggacacggcgcggagagacgagccagacaga

SEQ ID NO: 127949 - RNA, 74 nt, Homo sapiens
cagaagaccgcaggggaaaaccaaagaccgacaagaccccagagagcgcagaagacaggacaaaaagcccacac

SEQ ID NO: 127950 - RNA, 84 nt, Homo sapiens
caagcccacccgaaaccacaaggccgagggcggccacgggggaaggcgaacaccccccacacagcaggcccacagggcagccca

SEQ ID NO: 127951 - RNA, 50 nt, Homo sapiens
cgcccagcccggcgcacggcccaggaccgccagcagcagccgaaaacgca

SEQ ID NO: 127952 - RNA, 82 nt, Homo sapiens
acccagagcagaagaaaagcaaagacaccgagacccgggcgcagcacccgacccacggcagggcaaccccaccgcggaaggc

SEQ ID NO: 127953 - RNA, 85 nt, Homo sapiens
gagagagaaacaggggagcaagggcaagagccacaaagggaccgagaagcgaagacaaggaaccgcgaacgcgcagagaaaggac

SEQ ID NO: 127954 - RNA, 76 nt, Homo sapiens
acgccaccaaaagcaccaggccagaaaagcagcaacgaggcgcggacccagaggagcggaaggaggcagacacaca

SEQ ID NO: 127955 - RNA, 57 nt, Homo sapiens
cgagaagggagacgacgcgcgggccgcgagcggggcgacccgagcacccgaaagagc

SEQ ID NO: 127956 - RNA, 68 nt, Homo sapiens
ccagcaacgcccaggagcaagacaggggagcacacaaaagagggacaacacaagccacagcgcccagg

SEQ ID NO: 127957 - RNA, 59 nt, Homo sapiens
ccggccccacacgaccgaaaaaggagcccaagccccaccaccagcacacccccccacgc

SEQ ID NO: 127958 - RNA, 90 nt, Homo sapiens
gcagcaacagcaaaacccccaccggacgaaccggagaggacacagcagaagagaacacgcccgaaggagcccagagagcggcgggaacgg

SEQ ID NO: 127959 - RNA, 43 nt, Homo sapiens
ggcaggcgccaccacagacgggagcgcgacccagcgaccagcc

SEQ ID NO: 127960 - RNA, 37 nt, Homo sapiens
ggaagccaggaccgggacacagcaggggccagacaac

SEQ ID NO: 127961 - RNA, 76 nt, Homo sapiens
cgccgagccccggaaggggagggcgcggcacgccggcccgcaggaaaccagccagcaaccaccacccaacagcaca

SEQ ID NO: 127962 - RNA, 84 nt, Homo sapiens
aggaccagagcacaccaagacaaaaccggagcgagaacggaaaaaaggaaaggaggccccgagcgcgccgccccggcccgcagg

SEQ ID NO: 127963 - RNA, 64 nt, Homo sapiens
acagcgaccacgacggagaagcagggccaaggaaggaagggaacacggacgacgagacacgacc

SEQ ID NO: 127964 - RNA, 74 nt, Homo sapiens
gaaaaccagagacggacaagagacaaaggcagaagaccaaacaaagccagccggaaaaccaggcagagaacaag

SEQ ID NO: 127965 - RNA, 71 nt, Homo sapiens
agcacacagagaccccacagcggacaggccacacgcaccaggcagcaaaaaccgagaagcggcccacggga

SEQ ID NO: 127966 - RNA, 88 nt, Homo sapiens
gccgcgccccgcgcaaggaggagaccgacaacagcacccgcgcccaagaccgcgcaacccgagagcacagcagacgaaccgaaaaaaa

SEQ ID NO: 127967 - RNA, 73 nt, Homo sapiens
aaagacccggaagcaagaagacaaacgaggggagaaagaaggggaaggacgcgcggggggagagagacaacag

SEQ ID NO: 127968 - RNA, 68 nt, Homo sapiens
caacagaacaccagccagaccacacggaaaagagcgaggaaaacgccacgacagacacaaccaagcac

SEQ ID NO: 127969 - RNA, 82 nt, Homo sapiens
cgggcggcgcaaaggcggaggcggaaggggaaagccggagccggccaacggggagcaggccccgcaccagcccagcgccccg

SEQ ID NO: 127970 - RNA, 54 nt, Homo sapiens
gaggaaccagaacgaaaagcgccagaaagacaacgaagagaggaaagaagcgga

SEQ ID NO: 127971 - RNA, 69 nt, Homo sapiens
ggggccgcccgcccacccagggccggaaaagccaacgccggcgaagcaccagaacacgccccccagagg

SEQ ID NO: 127972 - RNA, 60 nt, Homo sapiens
accccgcaggaccagccccgcccgaggcagacgcgccacaacaggaccagaacagagaag

SEQ ID NO: 127973 - RNA, 71 nt, Homo sapiens
aggccggaacacgggcggccacgaggagagaaagggaagcgagaagagcagaagaggcagacacaagaaga

SEQ ID NO: 127974 - RNA, 54 nt, Homo sapiens
ccagacaaacaggcccaacagggaacagacccgggaaggcgaagaagaaaaacc

SEQ ID NO: 127975 - RNA, 68 nt, Homo sapiens
ccacaggccgaaggggcgggagaacagcgggagggaggcacgcaggaggggcaacgagggagaccaaa

SEQ ID NO: 127976 - RNA, 66 nt, Homo sapiens
aggccccagcggaccgaacagagagacaacaacaggaccggcgggaaccgccggccgcccccaaca

SEQ ID NO: 127977 - RNA, 61 nt, Homo sapiens
cgcccacgcaccgggggagcgggagcgcggaaagccgccgggggaagacagcccgaagcgc

SEQ ID NO: 127978 - RNA, 76 nt, Homo sapiens
gcggggaggccccagcgcagcagagcgccaagacggacaacagagagcagcagcgcccggacgcccagaaagggcg

SEQ ID NO: 127979 - RNA, 86 nt, Homo sapiens
cgcagcccagcgggcccgggcggaaccacggaaggagggggcgacacacaagcaggggggaccgacgagcaggcgagaaggaagac

SEQ ID NO: 127980 - RNA, 74 nt, Homo sapiens
aaggagcaccggccaggcccagaaacggacgaggacagcaacgaacaaaagaaccggcaaaggaagagccgaaa

SEQ ID NO: 127981 - RNA, 76 nt, Homo sapiens
ccccgagaaccgcgccaccagagacgagaccgcggccaggagccaagaagaccagaccgcgggaggagccgacagc

SEQ ID NO: 127982 - RNA, 56 nt, Homo sapiens
aacggacccagagggcgaaggccgaggccaagaggcgggcgcagagcagggccggg

SEQ ID NO: 127983 - RNA, 75 nt, Homo sapiens
aacaaacgcacggaggccacccccaaccaggaccaaagacgaccaccaaagccagcccccagaacacgccgacag

SEQ ID NO: 127984 - RNA, 82 nt, Homo sapiens
caacgccgaccagcgacacgcggccgcggagaccaccgcggcgcggcagcgcgcccgagacggcagccggcccgggcgcccc

SEQ ID NO: 127985 - RNA, 88 nt, Homo sapiens
ccggggcaagagcaggagcccggcaccccccgccgacaaggaggacaagcagaccggaagaccgacggaagaccacaccccgagggag

SEQ ID NO: 127986 - RNA, 77 nt, Homo sapiens
caagggccaggggagcccagcggcgcgccggcagcagaaccaaaggcaagaaccggagcaggagaaaagccggaaag

SEQ ID NO: 127987 - RNA, 79 nt, Homo sapiens
cagaacagacacgcccgaagacacaaaaaccacggccagagcaaggaaaaaagggggcggaaacacccggaacagaaac

SEQ ID NO: 127988 - RNA, 81 nt, Homo sapiens
ggacggcgggaccacaagacaacgcggagcggcgaagagcaaccaggcaaaagcagaccggaaaacccaccggcaagacca

SEQ ID NO: 127989 - RNA, 60 nt, Homo sapiens
gaaaaaagggcaagaagccagaagaaagcaccgggaggaaagagagccacacgaagaaca

SEQ ID NO: 127990 - RNA, 83 nt, Homo sapiens
ccgccaccacccacccggacacagcacgagccagggagccgccgggaccggcccgggagacgacaacccaaaccgaaaaggca

SEQ ID NO: 127991 - RNA, 80 nt, Homo sapiens
gaggagcggggcgggaaacgcaggggcgggacggcggagggaagagaccccaaggggagcgaacacgcggcggcaggcac

SEQ ID NO: 127992 - RNA, 71 nt, Homo sapiens
aaaaccagagacccccgaagacggcagcgggagagaggagagcagagagcagaaacaccgaccacccaacc

SEQ ID NO: 127993 - RNA, 81 nt, Homo sapiens
ggacaagcgcgacgcccggcgcgagccaagcgcgcgccgggaccaccacacgaaaccaaggaaaaaccgggaacagcagag

SEQ ID NO: 127994 - RNA, 79 nt, Homo sapiens
gagggaacagaaccaaacaagacaacgagcgaaagcgaaaaacagcgaccagaggggcacccgaggaggaagagggcag

SEQ ID NO: 127995 - RNA, 74 nt, Homo sapiens
cgcggggcgcgcggcgccggcggcgcgcgacccccgcgcagagccggaggagccaccaacagaagcaggagcca

SEQ ID NO: 127996 - RNA, 76 nt, Homo sapiens
accgaagggcgaccaccacaacgccgcggacgaccgcacgggcagaggcagagaacgagggacaagagccggacag

SEQ ID NO: 127997 - RNA, 65 nt, Homo sapiens
ggccccgcggggcgccaacacgcagccagacccacgaaaagccagcggcaacccaggagggcacg

SEQ ID NO: 127998 - RNA, 40 nt, Homo sapiens
ggaaaggaaccgcggacaggacgagagcacagcccccagg

SEQ ID NO: 127999 - RNA, 68 nt, Homo sapiens
ggccaagcaggacaacgcacaaccaccgcgaacaccacaccgcaggaaggacacccacgacacacagg

SEQ ID NO: 128000 - RNA, 72 nt, Homo sapiens
gacaaccaaaccaggggaaggggggacagggagaaaaacaaggacacgccaccacaccgacccacgacaaga

SEQ ID NO: 128001 - RNA, 61 nt, Homo sapiens
cgccaccgccgggggcgggacagcccagagcaagcacacggaggcccgggagccagaccgg

SEQ ID NO: 128002 - RNA, 71 nt, Homo sapiens
cagcagagagaaggcaaaccaagcgcaggcacccggaaacaagccacgaaggagagaaaaccagcagcagc

SEQ ID NO: 128003 - RNA, 84 nt, Homo sapiens
agcaccacgagggaccgcgagcccggccaggacacaggcaggccgggcggcagagccccacggcccgcagcgggcccaacgaaa

SEQ ID NO: 128004 - RNA, 71 nt, Homo sapiens
ccaaaacagcccagaggcggggagggcaaagacaacacaaccgagcggcggaagaaaacggacgagaacaa

SEQ ID NO: 128005 - RNA, 52 nt, Homo sapiens
gggaggaaaaccgacgaaggcaaagcgaaaaagaccgcagggaaggccgcca

SEQ ID NO: 128006 - RNA, 67 nt, Homo sapiens
cagccaacccgccaaaaaagacaagaaaccgcacaagaccgggagggccagagacgcgcacgaaacg

SEQ ID NO: 128007 - RNA, 75 nt, Homo sapiens
agaacgaaccaaccccacaacaccgccggagacagccaaggaagggaggcgggacccacgaggcgaacaagcacg

SEQ ID NO: 128008 - RNA, 60 nt, Homo sapiens
acaggagaccgcggccgaccagagaacagccagaggcgagaagggggaggagaaaaagaa

SEQ ID NO: 128009 - RNA, 77 nt, Homo sapiens
agagccacaaacaaagaagaaacaccaaagcggccaaggcagccggcacccgcacaacccagggggccgaacccaga

SEQ ID NO: 128010 - RNA, 60 nt, Homo sapiens
gagcggaggacaggagaccgaacagccccagggaaaggaccgaggcaggaaagaggccag

SEQ ID NO: 128011 - RNA, 76 nt, Homo sapiens
gccgggcagggcacaggaacgaagggacaggcaccaccaaaggaaaagacaggcagggaggcagcggcaagcggac

SEQ ID NO: 128012 - RNA, 71 nt, Homo sapiens
cagaaagaacggaccagaggagacgagcccagacaaaagagagacgaagcacaggccaggcgggcaaaccc

SEQ ID NO: 128013 - RNA, 35 nt, Homo sapiens
ggcaaaaacacccccaacgagaaggaaaagcagaa

SEQ ID NO: 128014 - RNA, 83 nt, Homo sapiens
gagaaccaccaggcggcagccgggcaggggaaaagaagggagccgagaacagagggcacaaagcagaagcggcaaagcccccc

SEQ ID NO: 128015 - RNA, 63 nt, Homo sapiens
cgacaagggaggcgccgccagcggccgggaccgaacaggcgagcacaagcggcgcgaggaagg

SEQ ID NO: 128016 - RNA, 53 nt, Homo sapiens
aaaaggcccccaacacagacgagcgacagacacagggcagccagaaacagcaa

SEQ ID NO: 128017 - RNA, 81 nt, Homo sapiens
cccacaaagcaaccaaaccaagggagggccgcccagccaaaccagccgcacagcccgacggccaggaggcgaagagacgag

SEQ ID NO: 128018 - RNA, 74 nt, Homo sapiens
caaggggggccagaggggagcacagagcgagaccaggaaagaagggggcagaagagggccgggggaagaccaga

SEQ ID NO: 128019 - RNA, 80 nt, Homo sapiens
cccggccgacccggcggcgcgggccagcggccgcgaggccgcagccccgcggcggagaaaccaccacaaacacgaggcca

SEQ ID NO: 128020 - RNA, 83 nt, Homo sapiens
cacggacggacgccagccccacaacagacagggaacaaaggcagagaaacgcaccccagagcaggacacaagacaaaacccgc

SEQ ID NO: 128021 - RNA, 61 nt, Homo sapiens
aaaaggcaacaccgcacaggccagccggcaaaaacggcggagaacggaaaagcaccaggaa

SEQ ID NO: 128022 - RNA, 41 nt, Homo sapiens
cacagggaaggcacacagcagcggagaccagaaggccaaaa

SEQ ID NO: 128023 - RNA, 63 nt, Homo sapiens
gaaacgggggccacgcaccaacgaggaaaggaaaggaaggagggaagacggccggagacaagg

SEQ ID NO: 128024 - RNA, 82 nt, Homo sapiens
caagaggcggccccgggcagcggggcggggccacgggaccagcaagcagacagggcccagccagacagagccagcaaagaac

SEQ ID NO: 128025 - RNA, 89 nt, Homo sapiens
cggcacccaccgccgggaggaggaggaggagccgagaggagcgagcgagcgcggaagacaagggaggcgaggacggacaaaaggaaacg

SEQ ID NO: 128026 - RNA, 78 nt, Homo sapiens
gacaggccaaggcaggggccagaagacaaagcaaccacccgaaaaacagcgaagaagaagaggacccaaggggagacg

SEQ ID NO: 128027 - RNA, 78 nt, Homo sapiens
ggccaggaagccacccgccacgcgcccccgaagccccagaccggaggccagcccccaccgagggcaaagggaaaagac

SEQ ID NO: 128028 - RNA, 71 nt, Homo sapiens
caaaggaagcgcgaacagcagcgcaggccccagcaggaggacccgccggaccagccacgaaaagccagaga

SEQ ID NO: 128029 - RNA, 80 nt, Homo sapiens
acagaacagcacgaccagaggggaagccaagcaaacgcagaaggacgcccacgagcaaccaagacccccaagaacaagag

SEQ ID NO: 128030 - RNA, 82 nt, Homo sapiens
cccggcgggaccgggcggcacgcacgcgggcagggaacaggcggagcggaaggcaccggcacggaccaccccaacaccgggg

SEQ ID NO: 128031 - RNA, 75 nt, Homo sapiens
agacagggagacccggggcggagaagccaccgcaggaagggaggccagccgcgaggacaacggaggccgcaacaa

SEQ ID NO: 128032 - RNA, 74 nt, Homo sapiens
cgcagggcgcccccgaagaaaggaccaggcgggcccgagacaagcggccgcacaccaaggcagcaagcacaccg

SEQ ID NO: 128033 - RNA, 82 nt, Homo sapiens
agaaccaccaaaagccaagaaacgacacgaagcagaggagccagacccaaagcccagacacaagacacggagccccaagaaa

SEQ ID NO: 128034 - RNA, 57 nt, Homo sapiens
caggagccaggggaggcgaagcgaaacccagaaagccaagggaagacagaaggaagc

SEQ ID NO: 128035 - RNA, 78 nt, Homo sapiens
aaccccggacgggagagcgccggcggagaaaaaggcaaaagcagaccggaaaacccaccggcaagaccacacccgagg

SEQ ID NO: 128036 - RNA, 78 nt, Homo sapiens
agagagcgcgcagggcgcaccgggaagcagacccagagaaaggccacgcgagccaggcagggagccccagagagacaa

SEQ ID NO: 128037 - RNA, 73 nt, Homo sapiens
ggccccggaggacgagaggggacgccaggcgaaaagccaggagcaaaagacgagcgcgacgccaccagcaacg

SEQ ID NO: 128038 - RNA, 96 nt, Homo sapiens
gccagggccggcgagcacacgccgaggcccaccagacgaccacgacgaggccggggcacgccagcgagagaggagcaccggccaggagaagcgcag

SEQ ID NO: 128039 - RNA, 52 nt, Homo sapiens
cgaccagcaggaacgggggccaaagggcgagggcacaaaaaaccacaccccc

SEQ ID NO: 128040 - RNA, 69 nt, Homo sapiens
gagcggagaaacggccaagagaaaccagggaaaaaagagcgggagccaagcgggaagcaaggagacaag

SEQ ID NO: 128041 - RNA, 67 nt, Homo sapiens
caacaggccgggccaccgaagccaacgccaaaagcacaggccgccgacggcccgcacagggagggca

SEQ ID NO: 128042 - RNA, 79 nt, Homo sapiens
ccacccaccgcccgcagagcaccagggcccacgcacgggaggaagacaagaacggaaacagccggaacagaagaacaaa

SEQ ID NO: 128043 - RNA, 83 nt, Homo sapiens
cacaaagagccgcagagcgccaccaagccaagagaacagcccagagcggcagaacgaaagaacaagcgagcaaaaggccgaag

SEQ ID NO: 128044 - RNA, 91 nt, Homo sapiens
cgaagggaacaccaaaaacagacagagagagggacgggcagcaggccccccagagaccaacgcaagcagggagaagacggacgaaccaccc

SEQ ID NO: 128045 - RNA, 75 nt, Homo sapiens
aggcgagggaggggagcgcgaggcgggccggacccaccgaccagcagcgcgaagccggcaaacagcggaggaggc

SEQ ID NO: 128046 - RNA, 72 nt, Homo sapiens
cggggagccgccaccgccgcagaggagcgccagcccggcgccaaggagaccgggagagagacgaaggacgcg

SEQ ID NO: 128047 - RNA, 68 nt, Homo sapiens
gacccaccaaaaaaaaacagcccaaagaaaggcgacaagagaaaaagaaagaaaccccaaaaacaaac

SEQ ID NO: 128048 - RNA, 72 nt, Homo sapiens
gagcagaacacaacaacccccagaccaccagaaggcagaggggaaccagccaaaacccaaggcaaacacgag

SEQ ID NO: 128049 - RNA, 107 nt, Homo sapiens
ccgcgcccaggccagcgccccaggccaagagggacccacccggcggcgccggaccgaaggcgcgaccacgacgagaagcgggggccgcagcggggcaccaacgcagg

SEQ ID NO: 128050 - RNA, 77 nt, Homo sapiens
cgcgccgcgccgcgccgcaccccgagcgaccgggacacaggacaaggagccaccggagaggaagcggcagacagcga

SEQ ID NO: 128051 - RNA, 80 nt, Homo sapiens
agaccgcgcgccaagccgcacgcaaccaccgcccggccacaccaggagaaggagggggcagagcacggcaggcagaaggg

SEQ ID NO: 128052 - RNA, 75 nt, Homo sapiens
caggacaaaaccgaccgaggcagagcgcagccacgggcgcgcagccccaagggaggaagaaaccgaagagggaaa

SEQ ID NO: 128053 - RNA, 80 nt, Homo sapiens
cgccgggcccgcggggaaaggaaagacaaggagccgggccgagaaaccgaaccagagaccagagaagaaacgcaaagccg

SEQ ID NO: 128054 - RNA, 65 nt, Homo sapiens
gcggaggaaaggacggaggggccggcgagaacgccgggagggaagaaagcaaaggagaaagagga

SEQ ID NO: 128055 - RNA, 81 nt, Homo sapiens
cccacacccaccaacaacaccacaaaaccacagccaaggagaagagggcaagaacaaagagaaggaaagcaaggagagaaa

SEQ ID NO: 128056 - RNA, 74 nt, Homo sapiens
gacgacaccagagcaggcccagaggagagccaacccgacgggacgaaagcggagaaccaacgaaggagccccag

SEQ ID NO: 128057 - RNA, 64 nt, Homo sapiens
gcaaggccacgacccacgagacaggggcccaagaaaaagcaccggacgacaagcaggccacgcc

SEQ ID NO: 128058 - RNA, 80 nt, Homo sapiens
gggaaaacgcaccaccaccacccccgaaccaacacaagggcaaaccccacaggagaaggagccaaagagggcgaaaaaaa

SEQ ID NO: 128059 - RNA, 79 nt, Homo sapiens
caaagccagccggcaacgaagacgcaggggagcccacagaaccaaagcagccaagggaggaggaggggaagccgccaag

SEQ ID NO: 128060 - RNA, 81 nt, Homo sapiens
cacccaggagacaagcaaggcgccaggggagaggaggcagaaggagaccgcgggacagaaccgcgggcaaaaggggggaaa

SEQ ID NO: 128061 - RNA, 79 nt, Homo sapiens
ggagacaaacgaacggaagaggcagacgaacgggggcaggaggacggcaagcaaaccagacgcacaggaacccaacagg

SEQ ID NO: 128062 - RNA, 73 nt, Homo sapiens
agccgagaccccgaaaaaggccgaaggaaccagcaaagagaaccggggagaccacgacgcgccccgggcgcca

SEQ ID NO: 128063 - RNA, 87 nt, Homo sapiens
acgagccagagcaaaaccagcccagagaacaagaggaagaccgcaggaaagcaggaaggcaagaaagccaaggacgaaacccacacg

SEQ ID NO: 128064 - RNA, 81 nt, Homo sapiens
gggcccggggacggcgagagggcaagcccaggaacgggcgccacaccggacacaggccaggccacaggcagaaggaaccgc

SEQ ID NO: 128065 - RNA, 80 nt, Homo sapiens
ggaggagccagagcgcagaaagacaagggaggcgaggacggacaaaaggaaacggacgggaggccagccagcagaaggag

SEQ ID NO: 128066 - RNA, 86 nt, Homo sapiens
gaccggaggccaacggcagaagccaccacaaaagcgaaagggcacaccacagggggcgccccaacccagcagcacccccacgcccg

SEQ ID NO: 128067 - RNA, 75 nt, Homo sapiens
cacacaggggcgcaagacagggccgaccaccaagagaaggcccaggaggaagaagagaaaaagagcgggacaggc

SEQ ID NO: 128068 - RNA, 69 nt, Homo sapiens
cgagaggcgcggagccggggacgcgacagggggacagcagcaccagaaccaaaaagccacaacagggag

SEQ ID NO: 128069 - RNA, 75 nt, Homo sapiens
ggaaaagaaaggaacagagaaggaagcaaaggccacaagaagcacaccgacccccaacgggccccaggggaagca

SEQ ID NO: 128070 - RNA, 69 nt, Homo sapiens
ccgaaagaacccgacgacccgaggagccagggcggacaacaagcggggacgagagccccggcacaaacg

SEQ ID NO: 128071 - RNA, 46 nt, Homo sapiens
ggagggcagggccaggaggaacagaggcggaggcaaggcggaccag

SEQ ID NO: 128072 - RNA, 38 nt, Homo sapiens
cagccggggaacaccaaagaacccacaaacaaagcacc

SEQ ID NO: 128073 - RNA, 72 nt, Homo sapiens
cgaggcggaggagcgcgcccgccgagaaggagcccccgcaggaccgcacaggcgcaggcgcaaggggccagg

SEQ ID NO: 128074 - RNA, 53 nt, Homo sapiens
agaaggccgaagaggccgccaccacaacagagccaccaaagaacaacaagagc

SEQ ID NO: 128075 - RNA, 74 nt, Homo sapiens
gacgaggaccaggggaggaggagcagaggacacagagaaaggggcaacaggcggggccggaagagagagggggc

SEQ ID NO: 128076 - RNA, 75 nt, Homo sapiens
caggcgacgcgagaaggaacaccagcaggaaaaaagagcggcagaaggccaaacggccgagcaggcgagcgaaga

SEQ ID NO: 128077 - RNA, 76 nt, Homo sapiens
aagaggcggggcacgcgggagccaaggaggggaaggggagagcccagggaaggcgacgaggcaccaaaaaggccca

SEQ ID NO: 128078 - RNA, 63 nt, Homo sapiens
acgggagggccgaacacgggaacgcgccaggccacgggccagagaacaggaaggagagcggag

SEQ ID NO: 128079 - RNA, 109 nt, Homo sapiens
gggagggagggaggaagggggcagcaccgaccacgggacagagacggaagaacccccacccacagccagcacagaacacccagacccgaaggggccccaagaaagaccc

SEQ ID NO: 128080 - RNA, 75 nt, Homo sapiens
gggccgcgccgcgccgccgcccacaagcggcgccgcgccccggccgcacggcaagaacggcagaaggggaaaaga

SEQ ID NO: 128081 - RNA, 71 nt, Homo sapiens
agaaaaaacagaggggcacaaccgacaggaaaaaaagcggaagagcgccagcacggaaaaaccagacacac

SEQ ID NO: 128082 - RNA, 83 nt, Homo sapiens
gcgcccggaccggccgagaggaagacgagccgggaggaacggcccggaaacaggaggacggagcaccgcggacgccccagggc

SEQ ID NO: 128083 - RNA, 80 nt, Homo sapiens
caggaggggacacggacaaagcaaagcggacagaaggaacacccccacaaaccggaggacacccccagacgcagaagggc

SEQ ID NO: 128084 - RNA, 104 nt, Homo sapiens
acacacgaccagacggcacccccaagacaaccaaagggcagaaagcaccgacaagcgagagcgcgacgccacaccacacaacgggggaaccgggcagccagacc

SEQ ID NO: 128085 - RNA, 69 nt, Homo sapiens
agaagacaccaaaaagcaaacggaccagaccgaccaccaaaacgccacgggacagccaacaccagaccg

SEQ ID NO: 128086 - RNA, 78 nt, Homo sapiens
gaagggaggaaaagggcagggacagcgcaggcagcagaagaaccggaagcccagccagggacaagcacccacagagac

SEQ ID NO: 128087 - RNA, 78 nt, Homo sapiens
acacggcagcgacaccaacgcccagcggcagcaggagaggcggaggcaagcgcccggcccgcggggggccccggagag

SEQ ID NO: 128088 - RNA, 76 nt, Homo sapiens
gaccagcagcaaggccacgcagaccacacacagaggagcgggagccaaaaagcccgaccaccggaacaaaacagga

SEQ ID NO: 128089 - RNA, 57 nt, Homo sapiens
acaggagcccagacaaggcccaggccgaccggccccgacccgccgacaagaacaaag

SEQ ID NO: 128090 - RNA, 78 nt, Homo sapiens
agacgcggcgccgacgggccccgaggccgcgggcggagcccacgagaaaaggaagaccggcggcagcagaggagcccg

SEQ ID NO: 128091 - RNA, 69 nt, Homo sapiens
cagggcccgcccccgcccggccggccgggaccgcagggcgcgagagcagcagaaggagacccaacaccc

SEQ ID NO: 128092 - RNA, 36 nt, Homo sapiens
acagagagcccggacaacagacaggaaggcaagaac

SEQ ID NO: 128093 - RNA, 77 nt, Homo sapiens
cgcagacgacccccccaagccggaagaaaaagaagcaccgcgggcacccagcagcggagcccaccaaaaaacacggc

SEQ ID NO: 128094 - RNA, 71 nt, Homo sapiens
agagaaaaaccggacgagcgagcaaggcagcggcaaggccccacgggcggaggggaacaccacgaccaccc

SEQ ID NO: 128095 - RNA, 75 nt, Homo sapiens
cacagcacagccgggaaggggagccaccagccccccggcgcaggcgccgcaacgggccaagccgcagagacaccg

SEQ ID NO: 128096 - RNA, 83 nt, Homo sapiens
cgcagccagggcagccaggcagagcgcacccgcgccccagccaaaggaagacgggacagacagagaagcacgggagcaggcac

SEQ ID NO: 128097 - RNA, 68 nt, Homo sapiens
gaagccgagacaaacggcaccaagaggcgcgagccggcacgaaacaaaggagcgagacagaagagaac

SEQ ID NO: 128098 - RNA, 78 nt, Homo sapiens
aaccaccacgggccacccgcagagccagcgagagcgggccggggacccggacggccggcgaggcccgcagcgcaggca

SEQ ID NO: 128099 - RNA, 88 nt, Homo sapiens
cacaccccgaaaacaaagaaagaaccaagagggagacaagggaaaaggaagacaaaaaacacaaggaaagaacccagaaaggaagaag

SEQ ID NO: 128100 - RNA, 76 nt, Homo sapiens
ccagagagggaggcaacggccaaccggcaagaccagacgggaacgggagacaagcgcagcgagcaacgcacccgcc

SEQ ID NO: 128101 - RNA, 88 nt, Homo sapiens
agaccccgcgcaccacggaggccacagccgccggggaggaggaggaggaggaagaggaggagaagaggcagcaggggacacgaggaga

SEQ ID NO: 128102 - RNA, 67 nt, Homo sapiens
ccaccccccgacgcagcacgcccacccgaccaccaccggaggacgagcaacaaagaacgaaccccca

SEQ ID NO: 128103 - RNA, 73 nt, Homo sapiens
agaaagaaacaagcggcaagagaggcaccccgaagaggcgaggagcaacccagcgaagagacgaggaaggaga

SEQ ID NO: 128104 - RNA, 70 nt, Homo sapiens
gagaaacacaaagcaggaacagacagagaaagcagacggcccaaccagagaaaggaaaacccagcgaagc

SEQ ID NO: 128105 - RNA, 65 nt, Homo sapiens
cagcagaggccagcacgagaacccaggccaaacgaccaagaaagcgggacgcggaaaacgggacc

SEQ ID NO: 128106 - RNA, 39 nt, Homo sapiens
gccccgacgccacagaacggggggaaggaggagacgaga

SEQ ID NO: 128107 - RNA, 68 nt, Homo sapiens
agggacgaccacacgaaagccgggcccaaccaggacgagacaaacaggcggccgcacagcgccacgcc

SEQ ID NO: 128108 - RNA, 69 nt, Homo sapiens
aaaagcccaaaggaaaaaacggaccacaccaccagaaccaaccaaggacgcacagaccagaacacacaa

SEQ ID NO: 128109 - RNA, 57 nt, Homo sapiens
ccccaagagagggaacagagaccgagaaccggcccaggcgccccaaaaagaagaccc

SEQ ID NO: 128110 - RNA, 71 nt, Homo sapiens
cagcggaaggacaccagaaggagaagagacaaacggagcagggcaacaacgaacacaggaagagacgggca

SEQ ID NO: 128111 - RNA, 74 nt, Homo sapiens
gccaaccgcacgacaggaccagggaagggcaacgggcagaggaggaggcagcgccgggaggacagacaaacaga

SEQ ID NO: 128112 - RNA, 86 nt, Homo sapiens
gcacggcgccgaccagcaccaggggaagcgggacaacgggggccggcgcggaagaggccggcggcgggacggccccacgggacccg

SEQ ID NO: 128113 - RNA, 81 nt, Homo sapiens
cacagcggaccaaggcaccagggcggaccccggggccaggccggaagcagaccccagcagcaggggaaaacaaagcgggga

SEQ ID NO: 128114 - RNA, 82 nt, Homo sapiens
ccccgccccagcggccgcgacggggaggaggcgcgggccgaggaggggagaaaacgcaggccacaaagacaggaccaagagg

SEQ ID NO: 128115 - RNA, 78 nt, Homo sapiens
aggcccaggccccccaccaccagaggcaagacagccggcagagcgccaggaaagccaagccaggccagagcagagagg

SEQ ID NO: 128116 - RNA, 76 nt, Homo sapiens
caagcaggaggggccgaacagcaagcaacggggcggcacacaaggagcgaagggcagggagaacgccaggcacagc

SEQ ID NO: 128117 - RNA, 81 nt, Homo sapiens
cgagagcggaccgagagcgcgaaacgcacgagaaggggaccaaagcaggcggaagaggaaaaggaaagagcggaagcgcgg

SEQ ID NO: 128118 - RNA, 32 nt, Homo sapiens
ccgggcccaaagaaaggaagaccaggagacgc

SEQ ID NO: 128119 - RNA, 89 nt, Homo sapiens
gacaccgcacgcgcacggacggcacagcccgccgaacccgaaaggagggcagacacccagaaagcagacacccaaagacaaaagccaga

SEQ ID NO: 128120 - RNA, 97 nt, Homo sapiens
ggcagaagggaccgcggacccagcccgcagccaggaagaaggaggccgaccaggccgacaaagcagacgcccgcaaacgaccggggaaagcacccag

SEQ ID NO: 128121 - RNA, 73 nt, Homo sapiens
aagaagacaaaggaccaggccccaagaagggcagcggggaagaagaaaaggaaccgaggccccccggcgacac

SEQ ID NO: 128122 - RNA, 65 nt, Homo sapiens
ccaggaaagggcaacccaagcggccccccaccacaagaggggaaccgaaagaggcgacgcaaggc

SEQ ID NO: 128123 - RNA, 92 nt, Homo sapiens
gcgacccggccgccagccccccgccaggcgcgaccgcggcgccgagagcccagcaagaccacgacacgagagcgccgccagccggaaggaga

SEQ ID NO: 128124 - RNA, 79 nt, Homo sapiens
gaaagaaagcacaccaaaagaaacaacccaagaggaggaacaaaacgggggaaagacacccgcaccagcgccaaccgga

SEQ ID NO: 128125 - RNA, 73 nt, Homo sapiens
cacaaccagacggcagaaggcacaaacacacgaagaacaaacaaggcaaacgccggaagcaacggacggcaaa

SEQ ID NO: 128126 - RNA, 49 nt, Homo sapiens
gcaaaggaacacagacagagcagaaagaacggccgagcgaccaggagag

SEQ ID NO: 128127 - RNA, 74 nt, Homo sapiens
gggacagcgaacagggaggagagacggcggcggaaaaccccaaaaggacaaagccaaagaccacgggggccaaa

SEQ ID NO: 128128 - RNA, 68 nt, Homo sapiens
gaggacacacggcacacccaaaaccaacagcccggaccagagccaggaaacagcagcacaggcccgac

SEQ ID NO: 128129 - RNA, 50 nt, Homo sapiens
agcacggacacagcaagggcagcaggagcgacgcccccaggaacgaaagc

SEQ ID NO: 128130 - RNA, 79 nt, Homo sapiens
gcccggggcacccgcacgggaagcaggcccgccacagcgggcaccccagcaccccggccaccaacaccacgagccaaac

SEQ ID NO: 128131 - RNA, 71 nt, Homo sapiens
accagaacccacggaccaccacccccacacaacgaagaaccaagcgcgccccaggagccaggggagcccca

SEQ ID NO: 128132 - RNA, 70 nt, Homo sapiens
cacaccgagcaagacgaacccgggaagaggcccgcgcagccccaccaggggagggggagggggggaagcg

SEQ ID NO: 128133 - RNA, 83 nt, Homo sapiens
cacagaggcaggacgcagagacagcccccagaacaggaagaaacagagcaacggccggggcccgcgccgcgccagcaccgcgg

SEQ ID NO: 128134 - RNA, 76 nt, Homo sapiens
cgcgccaccaaagacagccacgagccaagaccaccacgaggggggacgagacacaaggaccagaacagagaagaaa

SEQ ID NO: 128135 - RNA, 84 nt, Homo sapiens
acacgcacgggccccggcgccaccggagagaggccgcgccgggcagagacagacaaggagaagccgagaagaacgagccaccag

SEQ ID NO: 128136 - RNA, 78 nt, Homo sapiens
gacaccgacagcacagacagaacccgcaccagggcaggacgggaggacagcgcgggccagaacagccaaacaccaccg

SEQ ID NO: 128137 - RNA, 68 nt, Homo sapiens
ccaaagcaagaagggcccaagaaggaggccaagaggccagggagagccgagacgcagggggaaccgaa

SEQ ID NO: 128138 - RNA, 62 nt, Homo sapiens
cgacgagaagccccaacagcacggcgggccccagcccggggggacccgcgaaggccacagcg

SEQ ID NO: 128139 - RNA, 75 nt, Homo sapiens
caccccgaccacgcggccgagagggagaacggcagaaccaagggaccaaagcgggacggcaggccacgaccaccg

SEQ ID NO: 128140 - RNA, 84 nt, Homo sapiens
gcaggcgccgcgaagggaggcggcagaagaagacgaagaagcagaagcgcgccagggcagcaggagagaggcgccggcgaaagc

SEQ ID NO: 128141 - RNA, 85 nt, Homo sapiens
ccggaacccgggcccagacacagaccccccagcccccgggcgcgccggacaggccgccgcggcgggacagcggccccaaggaccg

SEQ ID NO: 128142 - RNA, 85 nt, Homo sapiens
ccgccggcgcgggaaacgggcgaagcgacgagccgcgaggagggaagaagcccagcggaggcgaacggcccccgccaacacgagg

SEQ ID NO: 128143 - RNA, 77 nt, Homo sapiens
agccggagcggaggagacgggccgcacccgccccccgcgcccgccaccggccgccgcccggcaaaagcagaccggaa

SEQ ID NO: 128144 - RNA, 58 nt, Homo sapiens
ccaaggaacaccgggcaacagaaaggcaaggcgaccgaaacaaggccgacgcgcacga

SEQ ID NO: 128145 - RNA, 32 nt, Homo sapiens
agacgccccacccgggccagcaggcgaaagag

SEQ ID NO: 128146 - RNA, 82 nt, Homo sapiens
acacgacacccccgggaccgcggagagaagcagcggacagcagaggccaggagcgcccaggaaacaaggccgacggcgagac

SEQ ID NO: 128147 - RNA, 56 nt, Homo sapiens
cggggcggggggaacggcgccaaacgagggaccacggcggggcagaggaacacaag

SEQ ID NO: 128148 - RNA, 38 nt, Homo sapiens
cgggcagcgagacgaaaaacacgggacagagcgagaga

SEQ ID NO: 128149 - RNA, 75 nt, Homo sapiens
agaagaccgggcccaaaagcgcccccaaaacacaagaggacggagaagcgacgaaagaagccgggacaaggacca

SEQ ID NO: 128150 - RNA, 76 nt, Homo sapiens
gagcgagggggggcgcgccggaaaccggagcgcgcagcagcacccaggccacagaggaggaaagagaggggaaaga

SEQ ID NO: 128151 - RNA, 80 nt, Homo sapiens
agaacggagcacgacagaaacacagccgcaggggaaaggaggagcaggaggacgaggacaaggaggaccccggacaccca

SEQ ID NO: 128152 - RNA, 79 nt, Homo sapiens
gagagcggcgacgcagccggagggaggcggaaccgagggcaacccaacaacagccaccgggacacccgcaggccggggc

SEQ ID NO: 128153 - RNA, 77 nt, Homo sapiens
caagaccggggggaccgggcggcgagacccaccgcaggacccacagaggacagcccaaggcggaaaagcgaaggaag

SEQ ID NO: 128154 - RNA, 73 nt, Homo sapiens
gaccaggaccaccccagaaggacccgcgccgaacgccaagccacacgaccaagcaacagggagaaaaaggacc

SEQ ID NO: 128155 - RNA, 72 nt, Homo sapiens
gggccagcggccgcgcacccccggccggaggcaccagcaacaggacaggcccagacggacagcaaccagagg

SEQ ID NO: 128156 - RNA, 77 nt, Homo sapiens
gcgagagcaaaggcagccgagcccgaagaacaacagaagaagaaagcgaaggggccaagacaagcagcagagaggag

SEQ ID NO: 128157 - RNA, 80 nt, Homo sapiens
aaaaccagaccagaaacggaggagcccgccgaagcaggagagcacaacaaggcaggaaccaaagggacaagggaccagac

SEQ ID NO: 128158 - RNA, 87 nt, Homo sapiens
gaaggaccggccggacagaccgggacaaaggacagccacgcggaagacccgaagacccgcgggaccaagggagaaagcacggccggg

SEQ ID NO: 128159 - RNA, 82 nt, Homo sapiens
cccagagggcgcacggaggacgcccgcgcgggagaggcagcagcgccccgagccccggcggcaacaccccccaacgagggag

SEQ ID NO: 128160 - RNA, 74 nt, Homo sapiens
gcgccggagcggagcgcgggcgccggggagccaggagggcacggagcggggagccccgcgcacacaggacgcgc

SEQ ID NO: 128161 - RNA, 68 nt, Homo sapiens
cacagcgaccaccaacagaccgaaggaggcacccagccaacaccggacagaggaaagagaaaccgggg

SEQ ID NO: 128162 - RNA, 75 nt, Homo sapiens
gcgggcaaaaaggccgggcgaccggagagggggcacgcaccagaacagacagccaggagcagggccgagccccaa

SEQ ID NO: 128163 - RNA, 74 nt, Homo sapiens
ccgacacggggcgacacagcggccgagagacgaaggaagggaacacggacgacgagacacgaccaacacaggcg

SEQ ID NO: 128164 - RNA, 70 nt, Homo sapiens
caaccgcgcgcaggaggagcacagggagagcgggaaggagcgccacaggagggccagaaggccccccagg

SEQ ID NO: 128165 - RNA, 74 nt, Homo sapiens
gaaaagaagggaaaacgaaggagaagccaacacgcaaaaaaggaagaacagcaaagaagcgaagcaccaagaaa

SEQ ID NO: 128166 - RNA, 75 nt, Homo sapiens
caaggagacggggcgacgccgagcacgccggacaaggagaggagaggccgggaagaaggagggacacagcagcgc

SEQ ID NO: 128167 - RNA, 85 nt, Homo sapiens
cggcagcagcggggcggggcgaagaagcagcacaaggcgagccagaaaagcaaggcagaggaagagcccggcaccagcaggagca

SEQ ID NO: 128168 - RNA, 83 nt, Homo sapiens
aacaccccaccagggcgcgagccccgccgccccagggcggggcccagaagcgcccagccgagagcgccaggaccaggcagagc

SEQ ID NO: 128169 - RNA, 53 nt, Homo sapiens
ccaccaagccaacccgcgaacacggcgggacagcaggcgcaaaaacgaaccca

SEQ ID NO: 128170 - RNA, 82 nt, Homo sapiens
acaccaggcggcaggggcaaccagacgggccaagaaaacaggggcacagacgacagaagccaagagggcgcaaagaggaaaa

SEQ ID NO: 128171 - RNA, 86 nt, Homo sapiens
gggagagccgacgcgccggcaggagcgccgaccgcagggcccacgggaaccaacagaggcaaaacccgacgcaaacgacccagaag

SEQ ID NO: 128172 - RNA, 61 nt, Homo sapiens
cgaccaccggagagccccgggagggaagacaggggagacgaaaccagacagagggcaagac

SEQ ID NO: 128173 - RNA, 85 nt, Homo sapiens
gaggcggccaccagcaggagcaccggagaaggagcgcagaagcgccggaggggcggcgcagccccgacggagagcccgcgagccc

SEQ ID NO: 128174 - RNA, 41 nt, Homo sapiens
agaaaaaacacacgcacgccaaggagaagaggggagccggc

SEQ ID NO: 128175 - RNA, 68 nt, Homo sapiens
gacgaagcagaggaggccagaggacccaccaaagggaaaggaagaacaaagacacgcccgagcggcag

SEQ ID NO: 128176 - RNA, 76 nt, Homo sapiens
agcccagcggcgcgaagcgaaaccggggccaagccagcccagaacaaagcaggccacggaaggagcacacaaaaca

SEQ ID NO: 128177 - RNA, 76 nt, Homo sapiens
gaggacgccagacgcacggaaagcagcgcaggagccaagaccacagcagcacccaggacgggaaaagccagccggc

SEQ ID NO: 128178 - RNA, 65 nt, Homo sapiens
aggaggaaccacaagagccagaagagccgggggccccacccgccaagggccccgccgaaagccca

SEQ ID NO: 128179 - RNA, 86 nt, Homo sapiens
aagcgcgggggggccgggggagggaaggggacagaagaggccaagaagagaaagccccccagcacaaggagcgaaaccaaggagaa

SEQ ID NO: 128180 - RNA, 73 nt, Homo sapiens
acgccgcaccggccacccggcccgacaccagccgcaggcggggcaccaggcccagacggcgaacccgagcaag

SEQ ID NO: 128181 - RNA, 69 nt, Homo sapiens
gaagagcggcaaaaacgagcggcacagaaaagaaaaagaagagccaggcccaggggcggaaggcaagca

SEQ ID NO: 128182 - RNA, 71 nt, Homo sapiens
gccccaggagcaaagcagcaaccgcagagggaaaagaggacgaggcgcgaaaaggcaaaggcaagaaagag

SEQ ID NO: 128183 - RNA, 77 nt, Homo sapiens
cccacccccgcgcgcggcgcgacagccgcagagacgcccgagccagcggcacgaaaccccccaggacacacccccag

SEQ ID NO: 128184 - RNA, 78 nt, Homo sapiens
gaacacaacccaacgcagaggagcagggcacacaccccaggagggggaggggggagggggaaacaaacagaagaaacg

SEQ ID NO: 128185 - RNA, 61 nt, Homo sapiens
acgagccgggaggaacggcccggaaacaggaggacgaagcccggggcggcgacggagcacg

SEQ ID NO: 128186 - RNA, 77 nt, Homo sapiens
ccaacgcacgcaacaggagagaaacgaaagggaagcagaaccaacacaaggggcacgaagagagagacccagagacc

SEQ ID NO: 128187 - RNA, 56 nt, Homo sapiens
ggcacgaggaagagacaacaccagagggccccagacggccaggaaggaacaccagc

SEQ ID NO: 128188 - RNA, 86 nt, Homo sapiens
agggggagaggaccaggaaacgcagcagggagcacaagagacgcagggacagggaggcgcaccaaggcagcaaccaccggagggcg

SEQ ID NO: 128189 - RNA, 74 nt, Homo sapiens
cgcgcgccgccgccgaggagaaaggccgacgcccgccgcggccggggaacaggccacagccaggagcgcacaca

SEQ ID NO: 128190 - RNA, 80 nt, Homo sapiens
cgcgacgcccagagccgcggccggggcgcgggagggcggagaacggaaaagcaccaggaagcagagaggaccgcagaagg

SEQ ID NO: 128191 - RNA, 77 nt, Homo sapiens
aggaccgcggagcgcgaacagaggaggagacagaagcaagcaaggccccggggcacaaacagcagaaggaagaggaa

SEQ ID NO: 128192 - RNA, 70 nt, Homo sapiens
accaagcaacacagaagaaacgacaccagagaagcgccagaaccagacagccagaaggcaagaggaacca

SEQ ID NO: 128193 - RNA, 84 nt, Homo sapiens
cagaagaccgaagcgcgacggaaggacggcacagcccggacagcacaccgacgggcagagcacggcacgggcccaccgggaccg

SEQ ID NO: 128194 - RNA, 53 nt, Homo sapiens
aagcaggacacgaaggaagaagacagcggagagaagaaggaaaacccagcaac

SEQ ID NO: 128195 - RNA, 62 nt, Homo sapiens
cggccgagaaggcagaggcgcccagggaagagaacggaccgcagcagcaaacagaaggccga

SEQ ID NO: 128196 - RNA, 122 nt, Homo sapiens
cacggcaacaccccccagagcgcagcagccgcggcgaggacaacggcgcgccgccagaagacaagcagaccggaagaccgacggaagaccacaccccgagggagcccaggacaccacgagaa

SEQ ID NO: 128197 - RNA, 78 nt, Homo sapiens
agaagggcgcggcaaacaggcgacccgacacagagggaacgaagacgccagcagcccggacgccaccaagccgagcca

SEQ ID NO: 128198 - RNA, 76 nt, Homo sapiens
cacggaggaagcacacccgccagggacgggcacgggaagggcacagaccgacgcaggagagccaaccacacaacgc

SEQ ID NO: 128199 - RNA, 67 nt, Homo sapiens
agacgacaggcaggcgggcaagaagcccaagaggagagagccacaggggacaccaaaagcacacaag

SEQ ID NO: 128200 - RNA, 88 nt, Homo sapiens
gcggccggaggaggagagggcggggaagaggcggcagccgaggccgcgaacgcacaggaggagcagcgaacgcccggcgccaccccac

SEQ ID NO: 128201 - RNA, 71 nt, Homo sapiens
agaaggcggggaccaagacgccacaggagaggcgaccaggcgagaaaaggggaccccacaccacaaaccga

SEQ ID NO: 128202 - RNA, 85 nt, Homo sapiens
ccccagccaccccacacgcaaccagccaagaagacacaagcgcaagcacacccaccgaaacaagacagcacccagaaggaaccga

SEQ ID NO: 128203 - RNA, 75 nt, Homo sapiens
cgggccccaacaccagccgccgccccgcagccccccgcagcacccagccggccacgggacagagagccgaaagcc

SEQ ID NO: 128204 - RNA, 57 nt, Homo sapiens
ggccggagcagcagcccgagccggcacagccacaccgagaagaccggcccaagaacc

SEQ ID NO: 128205 - RNA, 79 nt, Homo sapiens
cccgagcagcagacaggagcaagcaccgccccggagccacagcaaagccacccaaggcaggcacagcaccagaccaggg

SEQ ID NO: 128206 - RNA, 74 nt, Homo sapiens
aagagagaagaggagagcggaaccaacgggaagacagccgccaccaggcgcccccccagcaaccacccacagac

SEQ ID NO: 128207 - RNA, 77 nt, Homo sapiens
gacgggcggagcgccacagccaggagacacggagcgaacaaccgccggcgcagagacacacgggcggacgcgcgacg

SEQ ID NO: 128208 - RNA, 42 nt, Homo sapiens
cacgcgccagcaggcaagaagggacggccgggggagcaagac

SEQ ID NO: 128209 - RNA, 69 nt, Homo sapiens
agccacggacaagaagaggaaaggggaagaaccacagaaaagcaggaaaccgcaagaagcaagcgaaca

SEQ ID NO: 128210 - RNA, 57 nt, Homo sapiens
aaggagcaaacccaagaccacaggaagaaaggaacaggagccccggcacaaaggaag

SEQ ID NO: 128211 - RNA, 86 nt, Homo sapiens
agccgcacaccaggggaggccaaagaagcagcaaccgaaaggcgagggaaaaagacggaaacccaggacgagaaaaaacagagcgg

SEQ ID NO: 128212 - RNA, 113 nt, Homo sapiens
cagagcaagcccagcagcaagaggagagccaaccagcaagagacagagcagacacagcaaggaaccggagcaaacgacccgaccagcgcgcggcggccccggggagagcagca

SEQ ID NO: 128213 - RNA, 70 nt, Homo sapiens
cacgacagcaacaagaaaagccgacacaagccccgaaggccagggcaaagcgaaagcaaagcaaggggga

SEQ ID NO: 128214 - RNA, 56 nt, Homo sapiens
agccccccaccccaagacagccagacaccggggaacccgaccgcgacagagaaaga

SEQ ID NO: 128215 - RNA, 71 nt, Homo sapiens
aaacagacgagaaaggaggggacagagaggggacgccaggcgggcgggccaagcaccgggaaccccaagag

SEQ ID NO: 128216 - RNA, 73 nt, Homo sapiens
gaagaggaagacggggcggaagaccaagacacgagagcgaaacaggacagcaagaacgcggacggaacaaaga

SEQ ID NO: 128217 - RNA, 55 nt, Homo sapiens
caaggaagcacaaccccgagcacgcgcggcccgagccccaggagagccgaggacc

SEQ ID NO: 128218 - RNA, 56 nt, Homo sapiens
ccaaggccaaaaacacagcaacccagcacgaacaagacaaccagaaacacaccaaa

SEQ ID NO: 128219 - RNA, 81 nt, Homo sapiens
gacgggcggagccaggccagcggaagacgcagcaaagggaccccaggggaagaaaaggagggggagcgcgggaggggaccc

SEQ ID NO: 128220 - RNA, 58 nt, Homo sapiens
gcggagaaccagacacacgagcaggccgggagcagagcccaaaaggcagagcgaggag

SEQ ID NO: 128221 - RNA, 64 nt, Homo sapiens
aagaaaacgaggggcggaacacccgccaaagcagagaaaaggacaggcagccaagaggaaacag

SEQ ID NO: 128222 - RNA, 86 nt, Homo sapiens
ggcggagcccgcagaccgcagaaggccggagacaccagcaggagaaggcaaccaaaggcaggacacaaaaacaaccgaaagaggcg

SEQ ID NO: 128223 - RNA, 78 nt, Homo sapiens
aggcgccaagcggcgccgccgagacgcaccagagccggaccggggacgcgaagcaggcccgggagacgaccgaccgca

SEQ ID NO: 128224 - RNA, 63 nt, Homo sapiens
cacaggccggcgcgcccaaaggcccgcgccgacgccgcaggggaaaaaacacagaggcagaca

SEQ ID NO: 128225 - RNA, 86 nt, Homo sapiens
cagccccgcgccgccgaccccccggcgccgcgccggcggcgcgccagccgcagccggcggacgcacccaccagcaagggacaagac

SEQ ID NO: 128226 - RNA, 106 nt, Homo sapiens
ggcaccgaagcacggcgagggaggccagggaccagccgagcccaaggccaacgcagccaggacagaaaggagcgaaaaagaccaaaggcgagggcccacgcccagg

SEQ ID NO: 128227 - RNA, 79 nt, Homo sapiens
aggggagcggacccgagccgcaagcagcgcggccaagccacgccaacggaggcacaaagagagacggaacgcagaaaga

SEQ ID NO: 128228 - RNA, 93 nt, Homo sapiens
agagcaaaggaacagaacaagaagaagaggagaggaaaaaggaagagagcacgcagccaggaaaccacgagcgggagaacagagacccaccaa

SEQ ID NO: 128229 - RNA, 77 nt, Homo sapiens
cacaaagaacacggacgacgggggacaggcgacaggagccagaagggaacaacacccgaggacacagacggaaggga

SEQ ID NO: 128230 - RNA, 83 nt, Homo sapiens
cacgagcccagccaacagcgccccggacgcaccagagccaggcgggcgacaagaagagcgaggaaacaggccacaaaggacca

SEQ ID NO: 128231 - RNA, 75 nt, Homo sapiens
cgaagacagggcaagacgccagccacaggacggaaagaaagccaggaaaggcgacagcgaccgaagaacagagcg

SEQ ID NO: 128232 - RNA, 77 nt, Homo sapiens
agcggcgccgggcacaggagggaagagcaaggaagaagacggcacgggacccccagcacaggcagcaggccgggaga

SEQ ID NO: 128233 - RNA, 78 nt, Homo sapiens
gagcagcacgggccccgaggaaaccaccccacccaacccccgacacagaagaggagaaaacggaacaacaggagggca

SEQ ID NO: 128234 - RNA, 77 nt, Homo sapiens
cgagcagggagcagcgcagcgcgcgcagagcgcgccagcgaggggcacagaggcaggcacaaaaccacaagcgacaa

SEQ ID NO: 128235 - RNA, 83 nt, Homo sapiens
aaagacaaggaaaaggacaaggggaaaggaaggggccccagggcgcagacaaggcagggcggaggacccacaggagaggcaca

SEQ ID NO: 128236 - RNA, 54 nt, Homo sapiens
cggggcacggccgaccgcgccgagcaggcaccgggacgagaacacaaagcagcg

SEQ ID NO: 128237 - RNA, 49 nt, Homo sapiens
gcgcgcaaaggaccaggaaagcgaccgaaagggccaagggcagggagaa

SEQ ID NO: 128238 - RNA, 58 nt, Homo sapiens
ggaaccagaaaaagggagcacaaggaagagaacgggcgcaccacgccaccccgccacg

SEQ ID NO: 128239 - RNA, 77 nt, Homo sapiens
acagaaggagcagcgaaaaacccgaccccccaagcagaggacagccagcacgccgaggacccccggaaaagacgccg

SEQ ID NO: 128240 - RNA, 79 nt, Homo sapiens
gaagcaagaaggcccggacacagcaaaccgggccacagaaaacgaaggaaggaggacccgaggagagagaagacggaaa

SEQ ID NO: 128241 - RNA, 77 nt, Homo sapiens
cacccaaggccaagaaggcggacgacagccgaggagcacagcacagcaacagacccggaacagcccagggaaacagc

SEQ ID NO: 128242 - RNA, 67 nt, Homo sapiens
ggcgcaccaaggaacacgaccgacaggcgccacccgacaaaagacaaacgggacagagggccgcgcc

SEQ ID NO: 128243 - RNA, 87 nt, Homo sapiens
gcgggggggagagccacgacgccgggaccgggaccgccgccgccgccgccaccagggcggaaaacaccccaaaagccaaaagggaaa

SEQ ID NO: 128244 - RNA, 73 nt, Homo sapiens
ccagagaagggcgccaaagaggcacagggcggccccagggaaaggaccgaggcaggaaagaggccagacgcag

SEQ ID NO: 128245 - RNA, 63 nt, Homo sapiens
gacaggaacacaaggccggccaccagcagccagacagacacagcacagcagccacgaagagca

SEQ ID NO: 128246 - RNA, 73 nt, Homo sapiens
aggcggacaagacgggcccacaaacgacaggcagccagcggcagaggacgcacggcaggccacggggagcagg

SEQ ID NO: 128247 - RNA, 64 nt, Homo sapiens
aggaagcaggaaaaacaaagaagacccaggacccacgcccaccacaagcagaaacgaaggcaca

SEQ ID NO: 128248 - RNA, 80 nt, Homo sapiens
gagcaggcggagccaggggccgggggcaagagggcagcaggaggggggaagcaggaggcacggaggggaccccagaaccc

SEQ ID NO: 128249 - RNA, 74 nt, Homo sapiens
gcccgggagcgcgagggagcgccaagggcacgggaagaccggaggggacgaagaacgggagaggagccaagccc

SEQ ID NO: 128250 - RNA, 59 nt, Homo sapiens
agaccgcgccgcagagggcagccccgcaaagggaacaggaagcagccacggaggggacg

SEQ ID NO: 128251 - RNA, 55 nt, Homo sapiens
acccaagcgcaccaccgcccgaacccgcgccgcacgggagacgcagccccgcgaa

SEQ ID NO: 128252 - RNA, 74 nt, Homo sapiens
cgccgacagccccgaccgaggacgagggaccgccgccgaagggccacaacacggacaccagccgaaagccggaa

SEQ ID NO: 128253 - RNA, 91 nt, Homo sapiens
gagaccggggaggcgacagacagcgagccggaggaccgccaggcagacacagaagaccacacacaaacccacccacagcgacacgaaaccc

SEQ ID NO: 128254 - RNA, 85 nt, Homo sapiens
gaccgcagccggccgggcccgagccccggggcgccggcacgagcaaaaagcggaaccacaagaagaaagcaacgacaagaaccca

SEQ ID NO: 128255 - RNA, 62 nt, Homo sapiens
gaaccaaaaggagacgaaccaagaaacagaaagaaagacgcgagagcgacagaaagggaaga

SEQ ID NO: 128256 - RNA, 81 nt, Homo sapiens
caggagaagaaaggaaggaaccgggaggggagggaagggacaagaagaacgcccgaaaagcgaaccagacggacgacaaga

SEQ ID NO: 128257 - RNA, 55 nt, Homo sapiens
gggagcgggggcgacagcgcccggcacaagcccaggaaagaagaggacaaaggcc

SEQ ID NO: 128258 - RNA, 79 nt, Homo sapiens
caccagcaccaagcaaaccccccaccacgagcagcgcccgggagccccacgagcccgggaaaaaccacgcggagaaggg

SEQ ID NO: 128259 - RNA, 67 nt, Homo sapiens
gacccagaggagcaagagagccaccccaaccccccgaacccccagacccacacagcgacaggaagaa

SEQ ID NO: 128260 - RNA, 71 nt, Homo sapiens
caacgagcaggaaacaaccagaaggcgaggaggaagagaagcccagacacgaagaagagagccagagcaca

SEQ ID NO: 128261 - RNA, 68 nt, Homo sapiens
gacaaaaccacacaggaaaggacccagaaaaaggaaagacccagaggccagagagagcgaagcaccgc

SEQ ID NO: 128262 - RNA, 74 nt, Homo sapiens
cgagggaggaacacccgaggaagcccaacccagagcccccggcagagccaacgggagaccgaaaaccaaagcag

SEQ ID NO: 128263 - RNA, 74 nt, Homo sapiens
ggaaaccggagcgcgcagcagagacgaagaggagcagaaccagaagggacacacaggacggcaggaaggccagc

SEQ ID NO: 128264 - RNA, 73 nt, Homo sapiens
ccggcaccggagcaaccacagaacgcggacaagaaaccgcacccaagacgcaaagccgaccacagaaagaccg

SEQ ID NO: 128265 - RNA, 85 nt, Homo sapiens
ggagaaaacggcgcaccggagagacgcagaggggcggcggggggaaggaacaccagccagccgggaacccagggcaacagagacg

SEQ ID NO: 128266 - RNA, 82 nt, Homo sapiens
ggccaacacacgcggaggcccgcgcgagcccgcgggggccggccgcccacgccagccacaggccacccaccccaccagagcc

SEQ ID NO: 128267 - RNA, 82 nt, Homo sapiens
cgacgaggacgaccaacaggcagcagcgggccccgccaccggcacaccgaagggggcaaaggaaaggggcaggcacccccaa

SEQ ID NO: 128268 - RNA, 74 nt, Homo sapiens
gggcccgggacagacacagaggaagagaaacaccaaggaaccacacaagaaaagaaagcaaaaggaccagacac

SEQ ID NO: 128269 - RNA, 71 nt, Homo sapiens
accaacccccaccacgaagaaaagcccacccacaagaccagacaaggaggaacaccgcaaaaccaacacaa

SEQ ID NO: 128270 - RNA, 77 nt, Homo sapiens
cacagggcgcaacaagagcgacaaacgcagggacaaggcacagccccaccggcccggcacccccggcccgaagccac

SEQ ID NO: 128271 - RNA, 78 nt, Homo sapiens
agaggacagcaggcaacagagaagaaaaacgaccgcagagcgggagacaaagaggacacgaagcaggaaagagaagaa

SEQ ID NO: 128272 - RNA, 55 nt, Homo sapiens
gcccgcagcgcccccccgcaggaacagacgcccaaagagggagacggcacacaac

SEQ ID NO: 128273 - RNA, 77 nt, Homo sapiens
gagaggagccaacccccaggagaaagacagcaaagaaaaggagaagaaaggaaaaaaacaaccccgggcaccccgcc

SEQ ID NO: 128274 - RNA, 58 nt, Homo sapiens
cggcaggcccccccaccgcaccgaagaccagcgaggaccgaggcaagaggaagaaaca

SEQ ID NO: 128275 - RNA, 57 nt, Homo sapiens
cagggaaacaccacgaagcagccaagacagaggcacaaaaggagaaagcagaagaaa

SEQ ID NO: 128276 - RNA, 74 nt, Homo sapiens
agaacacgccggaagagacacccaagcaggagagaagcacaaaggagcacccgaagaagacaagacaggggaaa

SEQ ID NO: 128277 - RNA, 73 nt, Homo sapiens
cagacgcagggcgcccccgggcgcaagggaacacaaccccaccgagcccagggccagaagagcgcaaccaaga

SEQ ID NO: 128278 - RNA, 68 nt, Homo sapiens
accaaaagagaaaagcacaacccggacacgccagggacacccaaagcgaggcaggggaagcacaaaag

SEQ ID NO: 128279 - RNA, 74 nt, Homo sapiens
cgaagcaaaacacaacacacgcaaaacagcgagggggacagccccagaggcggagaagaacccaaccaaaacca

SEQ ID NO: 128280 - RNA, 70 nt, Homo sapiens
gccacagagcgacacaacacaggaaggaaccaaacagccccaccaaggcaacaggaagggccaccaccaa

SEQ ID NO: 128281 - RNA, 70 nt, Homo sapiens
gaacagacagaaagcaccacagaaaggggaacggagaaaagcaggaaaagcgccagccaacgcgacacca

SEQ ID NO: 128282 - RNA, 79 nt, Homo sapiens
aacacgacagagagaaggcaagagccgacccacgacagcaacggcgcaaagaccccgcgaggcaagacaagaccaggca

SEQ ID NO: 128283 - RNA, 74 nt, Homo sapiens
aagggagcccagccacaccgcaaaagagcggaccaggcccaagcaaaaggacccacaaagcggccgggggagcc

SEQ ID NO: 128284 - RNA, 80 nt, Homo sapiens
caaacccccagagccaggcacaaggagaacacgccgaagagaacaagacgggaagaccagagagacacagcaggcgaacc

SEQ ID NO: 128285 - RNA, 63 nt, Homo sapiens
cgccccagcacgcgagaaaacaccgggaaaggcccaaaccggcgaaaacccccgggacagcaa

SEQ ID NO: 128286 - RNA, 68 nt, Homo sapiens
agcccggagcacaaacaggaacccaagccagaccgcccgagaaagacaggaagaccgaggcacccccg

SEQ ID NO: 128287 - RNA, 74 nt, Homo sapiens
gcggccgggcccaggcccccccgggacccgggagacacaccaaccgcggccgacggcacgaccgcggacaagga

SEQ ID NO: 128288 - RNA, 84 nt, Homo sapiens
agaggcgcgcggaggcgggagcgcggaaacggaaccgggaggcgacgcacacgagcggaggcgaagaacgccaaaagacgaaca

SEQ ID NO: 128289 - RNA, 69 nt, Homo sapiens
caaagaggcgcccagaaagcagaacaggccaccgggccaacgaaacaacggggcggcacacaaggagcg

SEQ ID NO: 128290 - RNA, 82 nt, Homo sapiens
cacccagccacgacacaagaagccagcgagaagaccgagaggccgcgacccaacaccgcaacgcgccgcagggaccacagca

SEQ ID NO: 128291 - RNA, 65 nt, Homo sapiens
aggaaagggaaaaccagggggcagggcaaacagaacccgggaacagggagaacaaccgcaacgaa

SEQ ID NO: 128292 - RNA, 77 nt, Homo sapiens
agggcaaaccccgcaccgcggggagaagccccggggaaagaggaggaaaacaaaggcagcgaacaaaccacaaagca

SEQ ID NO: 128293 - RNA, 75 nt, Homo sapiens
acagccagggaagagaccgggcaacagaagaacaacagcaaaacgaggacagagcgggagccaccagcgccaaag

SEQ ID NO: 128294 - RNA, 55 nt, Homo sapiens
agagaaagggagaggaaggccgaagcagagaacacaaacacccgaaagaacagga

SEQ ID NO: 128295 - RNA, 73 nt, Homo sapiens
agccacagagagagaagaggcagggagcagcaagacaacacgcagagaaccagggccagacagccaccgaagg

SEQ ID NO: 128296 - RNA, 70 nt, Homo sapiens
cccaaagaaaaggcccagaccccagaaagccaggcagaccccaggggccagagaaaaccggcaggaagca

SEQ ID NO: 128297 - RNA, 76 nt, Homo sapiens
agaaaggagcagaagcacaaagaaaagacccaaccgagagagagaaaaagcaaccccaaagcaaaggccaagaagg

SEQ ID NO: 128298 - RNA, 73 nt, Homo sapiens
ggggaaaaaccagagacccccgaagacggcaacaaaaacacacagggcccagcgacaaaaaccaaaggacaga

SEQ ID NO: 128299 - RNA, 69 nt, Homo sapiens
ggccgccccgcccccaccgccgcagacccccaagcagcaggcagacgcagccgccggagggcgcggagc

SEQ ID NO: 128300 - RNA, 93 nt, Homo sapiens
cccccaagacgccggcccagcgcgccggcgcaggaggccgcccaggaagcggagaagccgagagaaggagcgaagaaggaagccaagcggaag

SEQ ID NO: 128301 - RNA, 62 nt, Homo sapiens
gaagcacgacagggcagggcagaaagcagaggccgaagcgcagccgaggccaccaagaaagg

SEQ ID NO: 128302 - RNA, 75 nt, Homo sapiens
cccgcgcgggccgagagccgccccgaacgggggcccccccgccggacaggaaacgcagcagaggcagaacggaag

SEQ ID NO: 128303 - RNA, 70 nt, Homo sapiens
caaccaaaaagacaccacacaacaaggaaagccgacaggcaggcagaagaacagagacagcgccgcgcaa

SEQ ID NO: 128304 - RNA, 83 nt, Homo sapiens
gcagcgacaggacgggaacggcacccacccggagccaggccacgcccccacacaccgagggccccgaaacgaggacacgggcc

SEQ ID NO: 128305 - RNA, 62 nt, Homo sapiens
ccagcccgcccggcggaccaaagggggagcggcgacaaggagcccacacagacaaaagaggc

SEQ ID NO: 128306 - RNA, 94 nt, Homo sapiens
aggaaaacaaaacaaaaagggagacaaagagacgcggagacgaccgaaggagcgcagagagggcacggcagacacaccgaccagaggaaggcga

SEQ ID NO: 128307 - RNA, 71 nt, Homo sapiens
ggccaggcagagccgaagcgggagaagagcaggcaggccaaaggaggaccccccaaggacagcagcacacc

SEQ ID NO: 128308 - RNA, 79 nt, Homo sapiens
cgcaccgcgccgggcaccaacaagggggccagccgaggccgcccagcgccgccaaggcaaccccgcccccaccacccgg

SEQ ID NO: 128309 - RNA, 76 nt, Homo sapiens
ccaagagagccgcagccgccagggacgggggccaccggacagggagagaggcgaccccagaagagggagggagcga

SEQ ID NO: 128310 - RNA, 39 nt, Homo sapiens
cgcacaccaacacaccccaggcaaagaaccaaggaagaa

SEQ ID NO: 128311 - RNA, 71 nt, Homo sapiens
acccaggggcaaagccaaagcgaggccaggaacgacacaaggggaagcgaaaccggagaaggacaccggga

SEQ ID NO: 128312 - RNA, 54 nt, Homo sapiens
ccagggccagcacgcgcggccccccaaggggaaagaaccagacgacaggaaggc

SEQ ID NO: 128313 - RNA, 78 nt, Homo sapiens
gagaaacgagaagcgcagaaccaacgaggggccgaaccccaggaacaaggaaagccgcagcggggagaagcccacgcg

SEQ ID NO: 128314 - RNA, 74 nt, Homo sapiens
gaaaacccccgggaccaggaaggcggccgggaggcgacacggacaagaacccagagcaagagccccagcgccag

SEQ ID NO: 128315 - RNA, 76 nt, Homo sapiens
ccgcccccacggccccggcggccaaacaccggcaccgcaagggcggcgacacaaaaaggcacagaaagggggccca

SEQ ID NO: 128316 - RNA, 64 nt, Homo sapiens
cagggccaccaaccccacccagacgaagccgaagaaaagaaggcaagaaggccagccaaaggaa

SEQ ID NO: 128317 - RNA, 53 nt, Homo sapiens
caagagaccccagcaaaacaaaggagaaaacacgaaccccggaaggaagagca

SEQ ID NO: 128318 - RNA, 72 nt, Homo sapiens
aggcgcaaaaggcaggcgccgcccggggagccaagcagcccggaggagacgacggcccgggacccgaaggca

SEQ ID NO: 128319 - RNA, 84 nt, Homo sapiens
aagcgaccaacggcacggggcggcggagcgcggaccagccgggcaaccccagcgcacggccgagccaagaacagaggcgccgga

SEQ ID NO: 128320 - RNA, 56 nt, Homo sapiens
ggcagagacacaaccaccagccaaacaagcccgacaacaagccaaaacgcaccaaa

SEQ ID NO: 128321 - RNA, 109 nt, Homo sapiens
caacagcagcccagcccaccggggcccggagccaccaacccccgcccgccggaaagaaacccgaagacaacacacagagacacccgccaaaacgagaggagacagggac

SEQ ID NO: 128322 - RNA, 55 nt, Homo sapiens
gcgccggggcgcgccgccccagccaggaaacacccaaggaaccaaagcaggccag

SEQ ID NO: 128323 - RNA, 83 nt, Homo sapiens
ccaagagaaacaaccgacacaaggcacgaggacgaagaggaaaggggccacgaggaagacgggagggagcccggccggcgaag

SEQ ID NO: 128324 - RNA, 74 nt, Homo sapiens
cgagcaggaaccccaggaaacggccagggaccaagcgccagaacgaccaacgaccacaacgacgggagagccaa

SEQ ID NO: 128325 - RNA, 77 nt, Homo sapiens
acaccgcgcacaggcagaagaagaaacaggcaaacgaggaccggaaggaagggaacacggacgacgagacacgacca

SEQ ID NO: 128326 - RNA, 76 nt, Homo sapiens
aaaaggagagagccagagcaagagcggaccgccgacgcccccgggccaaacggcagcaaaaacagacagaaaggga

SEQ ID NO: 128327 - RNA, 71 nt, Homo sapiens
aggaaccccggacgaggcagagaccaagaacggggaggcaagcaggggggcaaaggaaagaaggcagaaag

SEQ ID NO: 128328 - RNA, 89 nt, Homo sapiens
gggccgcgccgcgccgccacggccagcccccgggccccaggcagagagcccacggccaccaggccacaaggggacccaaggaccggccc

SEQ ID NO: 128329 - RNA, 53 nt, Homo sapiens
cgacgacagcgcggaaccaaaacggagggaggcagcacagacaggaggacgaa

SEQ ID NO: 128330 - RNA, 84 nt, Homo sapiens
cgccccgccgccgccgaggaggcgagcagccgggagacaccgccaccgccagaagaaggacccagcccagccgcaggacaggcc

SEQ ID NO: 128331 - RNA, 70 nt, Homo sapiens
cccaccaggagcaccgaaggaccagccgacacccccacaaacgcagcaagggccggcgcaacggcaaaga

SEQ ID NO: 128332 - RNA, 77 nt, Homo sapiens
cagacagaacagacaaggggacacgggaacgaagaaggacagaacggacaaggcagagcaaggaaaagacggccacc

SEQ ID NO: 128333 - RNA, 70 nt, Homo sapiens
ccgcaagacgaaacacgcagggggcacccaagccaagccagaaccaggcgggaacagagcgcgcgacggc

SEQ ID NO: 128334 - RNA, 45 nt, Homo sapiens
gacagccagcagaacccgaaagaaaaagcaaaagggcccaaggcc

SEQ ID NO: 128335 - RNA, 76 nt, Homo sapiens
ccggcaagaagccaacggagaaccaaggccaagaccagaaccagcccgggaaagacaaaacagaggagaccagacc

SEQ ID NO: 128336 - RNA, 86 nt, Homo sapiens
aaagagccaggcgggcgcggcggcgagaaggcggacccagacagcgaccccagagaagaccgcaccacgacagcgaccacaccgac

SEQ ID NO: 128337 - RNA, 92 nt, Homo sapiens
aaaaccgcagagaaacagaacccaagccaggcacccaaaaaaacgcaggaccggaaggaacaacaccaaacccaagagggcagcggcagcac

SEQ ID NO: 128338 - RNA, 62 nt, Homo sapiens
gaggccgggaaccagcgaggacaaaggacaccaccagggaacggagaggacaagaaaggcgg

SEQ ID NO: 128339 - RNA, 87 nt, Homo sapiens
cgagagcgggaacaggcacgcgccaccaccccaggggccccaaggaccaaaagggcagaaagggagccagcacgccaaagaggagcg

SEQ ID NO: 128340 - RNA, 83 nt, Homo sapiens
gagacagggaggagaagcacgcaagacagaagcccgaggaggagaggaggagaaggagaagagacaaaagaacacgaggacca

SEQ ID NO: 128341 - RNA, 79 nt, Homo sapiens
gccaagggggacagccaacaaagagaagagaaaccaagcccggccagccagggcagcagcaaggagaacaccagagcca

SEQ ID NO: 128342 - RNA, 91 nt, Homo sapiens
accagacaagcaaagaaccaggacaaaaaggaaggcgaagaagagggccagcgcccaccgagagagcgcacacagagcaggagccagcggg

SEQ ID NO: 128343 - RNA, 83 nt, Homo sapiens
gaccgagcagggaaaccaccagcccagcaaaccggcacgagccaggcaccagaaccagaacaccaccaggagcgcgcagaacg

SEQ ID NO: 128344 - RNA, 72 nt, Homo sapiens
cggccgcgccggggccgcgcggccccgcggagccaggcacacagagaaaaaaagggaacaaaacacagcaag

SEQ ID NO: 128345 - RNA, 71 nt, Homo sapiens
aggaacagccggggaacgcacaacggcaaaaggggaaacggaaaaccacccaggcagccccggcaggacca

SEQ ID NO: 128346 - RNA, 73 nt, Homo sapiens
agaggccggcccacgccccgcaccgcgcgagaacgcggacaagcaaacaaagaggaaaaagagggcaacagcg

SEQ ID NO: 128347 - RNA, 78 nt, Homo sapiens
cggccgaggcaaggagaaagaacaaaccccgaagacgcgaagccgacgagcccgaacagacgcaccagcgggaggaag

SEQ ID NO: 128348 - RNA, 71 nt, Homo sapiens
gaaagccacccacaaacaaacacccacggaaccagagacgagacagacccagcacggaccccccccccagc

SEQ ID NO: 128349 - RNA, 81 nt, Homo sapiens
gagggccgggagcgcgcagccaggcacccgccggcgccccccggcacaacccgcgggcaccagccccggacgacaccgcgg

SEQ ID NO: 128350 - RNA, 76 nt, Homo sapiens
aacaccagagggccccaggagcacccacaggcacaagagacgaccgcaagacagcagaggccaacaggagggcaag

SEQ ID NO: 128351 - RNA, 73 nt, Homo sapiens
cccaacccagaacggacaacgcagggaaaacagaaccagaggcagggccaggacaccggaggaggggacccca

SEQ ID NO: 128352 - RNA, 76 nt, Homo sapiens
ccgggggaaccgccgccccggccggacccgacccgagccaccaggacacggcacgggccacagagacgagacccca

SEQ ID NO: 128353 - RNA, 37 nt, Homo sapiens
gagaccagcgcgcgaggcagggagcacgcgggcaggc

SEQ ID NO: 128354 - RNA, 55 nt, Homo sapiens
gccaagcgaaaccgcaaacagaagcagcacaggcaagggcggaggacgaaaagga

SEQ ID NO: 128355 - RNA, 63 nt, Homo sapiens
cggaggcgacgccggagagaacgaagcccggcgggagcgggcccaggaggccagcgcgagaag

SEQ ID NO: 128356 - RNA, 77 nt, Homo sapiens
aacagaagacggacaaggaagaaaacaacggcgaaagaacagccggccacacacggcacaagggaagagaaaagaca

SEQ ID NO: 128357 - RNA, 76 nt, Homo sapiens
ggcggcggcgggaggccccggcgggggcgcgggcggcgggcagcccgcgggcgcccaggaagagagcgacaggaca

SEQ ID NO: 128358 - RNA, 66 nt, Homo sapiens
gaacgcccaccccccgaacccagccgcaccggccccggggcagaagagcggcgccgaggagaagga

SEQ ID NO: 128359 - RNA, 71 nt, Homo sapiens
acagagagccccggagaggccgaccaccgccgggagaagcgcaagccgccaaaagcagagaaagcaagaga

SEQ ID NO: 128360 - RNA, 74 nt, Homo sapiens
cccaaccggggcggcccaccccccacgcaccgcacaacaagaggccggcggggcgacagggagcaagaacgaga

SEQ ID NO: 128361 - RNA, 45 nt, Homo sapiens
agagggacagagcacacccacgagaagcagggcccgagcggaaga

SEQ ID NO: 128362 - RNA, 72 nt, Homo sapiens
gagccgccacaccaggcaacaggaaacgagggaaagagcacggaccgcggaagcaagaagcagccaggggcg

SEQ ID NO: 128363 - RNA, 75 nt, Homo sapiens
agcaagaccgacgggaagacacaaggccccgaagggagaagcagggcggaggaagagggcgccccccccgaccgg

SEQ ID NO: 128364 - RNA, 76 nt, Homo sapiens
gaacgaagacccccaccaggcaccgggcaaccccccacaaacggccggcaccgcagcgggggagaccacccgggaa

SEQ ID NO: 128365 - RNA, 84 nt, Homo sapiens
ggaggaggaggaggacgacgacgaggggaacggcaaggacggggacacaagaccagccagcccagccacagagacaggccgccc

SEQ ID NO: 128366 - RNA, 68 nt, Homo sapiens
ggccgagggcaaggcgccagaccaagcagaaaagagacacacaaaggaagcaaagccggaaccaagac

SEQ ID NO: 128367 - RNA, 76 nt, Homo sapiens
aggagggaggaaaacaaccgagggcagagagagggcgaacccccccacggcaagcaacccagacaaccacgagccg

SEQ ID NO: 128368 - RNA, 84 nt, Homo sapiens
ccaccccaagagagccgcgagggaggaacgaggaggacacgcagcacaaagcgcagcgcggggaagagaacggaggggaaagga

SEQ ID NO: 128369 - RNA, 81 nt, Homo sapiens
acccggccccggcccacaggggggggcaaacccgagagaacgggccgcggggggcagacaaccacgcgcggcaagccaccc

SEQ ID NO: 128370 - RNA, 65 nt, Homo sapiens
gaaggccaaagcaggaaccaggacacagaaagcaaggcacacacgaaacgggcaaccggggccag

SEQ ID NO: 128371 - RNA, 82 nt, Homo sapiens
cggaccgagagcgcgaaacgcacgagaagagaaacagacacacgaaggaggaaccaaagaaaccagaggagaaaccagaaac

SEQ ID NO: 128372 - RNA, 74 nt, Homo sapiens
gagccgcgcggcgcaagcgccggcgccggcgcggcgcggccaaggcacgaagagagaaaggcagggcaccccac

SEQ ID NO: 128373 - RNA, 92 nt, Homo sapiens
cacagaacaccggggcgcgggaacagccgcgacggcccacaacccacggggaaaaccgggccagccaggacagaaaaaagaggaaggccaag

SEQ ID NO: 128374 - RNA, 85 nt, Homo sapiens
ggagaggcagagccgcggaagaggggaccggcgcggacccagagaggagcgggaaggccccgcacccggagaccgggggaagaca

SEQ ID NO: 128375 - RNA, 78 nt, Homo sapiens
ggaaaccgcacaggagaccagaagacaagaagaccgacgccacacgcccacggcccccagggacaggcaagacacacc

SEQ ID NO: 128376 - RNA, 28 nt, Homo sapiens
gcggagacaagagggggagccagacgac

SEQ ID NO: 128377 - RNA, 81 nt, Homo sapiens
cgggcccagaggcccagggaggcaggggcagaaacagagaaggaacagcgccacgcagagccccgccaggaagacacgccg

SEQ ID NO: 128378 - RNA, 53 nt, Homo sapiens
gacaaggaagccgggcgcagcaggcacagcagacaaggcggaggcggggggac

SEQ ID NO: 128379 - RNA, 65 nt, Homo sapiens
gcaacagaaagagcaacagcagggcaacaggaaacagacaccaggcagacgaggagaaagagccc

SEQ ID NO: 128380 - RNA, 79 nt, Homo sapiens
ggacccggcacagacgcggcggggcgcaaaccgagacaagcaccccgaagcgccggacccaagaagaacagaaggaaga

SEQ ID NO: 128381 - RNA, 77 nt, Homo sapiens
ccgccaggcacacgcggccgcccggccgggaaccaaggccggcaggggacgagccgggggcggggcacagcgccgag

SEQ ID NO: 128382 - RNA, 82 nt, Homo sapiens
ccagcggagcgaacccgagagcgggagcgggcgggccaggaaacccaccagagaaggcgcggccacccaggacccgggggag

SEQ ID NO: 128383 - RNA, 76 nt, Homo sapiens
gcagaagaaagggcaacagcccggcggaggccggaccaaccgcgaaaaacgcagaaaacagacacacagcggagac

SEQ ID NO: 128384 - RNA, 79 nt, Homo sapiens
ggacaccggaagccgagaaagaggccgggaagaaggagggacacagcagcgcggagagcggcccgggacgagagagaaa

SEQ ID NO: 128385 - RNA, 78 nt, Homo sapiens
aagccacaggagccagaaaagaaaccagggcgaaggacgaggaccgaaaaagggcagaggacgaccagagcggggaaa

SEQ ID NO: 128386 - RNA, 112 nt, Homo sapiens
gaagaccccaaacagacgcacaggccaacaccagcaaaagggaggcggaaacaggagaagaaaggaagagacgacagccagcaggcaggagcccgcccagaacaccccaacc

SEQ ID NO: 128387 - RNA, 76 nt, Homo sapiens
cgaccaaagccgccggacggcgccacgaggacgggcgggggagccagaccgggggcaggggacgcaaacaaccccc

SEQ ID NO: 128388 - RNA, 58 nt, Homo sapiens
ggaccaggaccaggaagaacagaggaggacgcagcaggcgcaaaaacgaacccacaac

SEQ ID NO: 128389 - RNA, 84 nt, Homo sapiens
gaagcgaacaaaaagcagcaaaccggaccaccccgaagaaagcacagcgcggcacgaagacccgaagaaacacacgggcaggcg

SEQ ID NO: 128390 - RNA, 69 nt, Homo sapiens
acgcccgccggaacaccgcagagaaaaagggacggcagcgaagaaaagacgaggacccagagaaaccgc

SEQ ID NO: 128391 - RNA, 77 nt, Homo sapiens
ccagaagggacagggccagccccagagagaaaagggaggacgcccgaccccacccagcccgcaccgggcagccaggc

SEQ ID NO: 128392 - RNA, 83 nt, Homo sapiens
gaggcgcagcgccaagagaaggggcagggcccagccccgaaccagacaagggacccccaaggagccacagcaggagaaaagag

SEQ ID NO: 128393 - RNA, 94 nt, Homo sapiens
gggaggggcggcggcgaaaagaccaggagcgccccaaaagaaacaaagccaaccaggcaacagaagaaagagcaaaaggcaccccccagaaccg

SEQ ID NO: 128394 - RNA, 72 nt, Homo sapiens
gcccaaaggcaaacaagcgaccgcagaaagcgcacagccgcaagagaagggcccaaaggaccaagaaacagc

SEQ ID NO: 128395 - RNA, 70 nt, Homo sapiens
ccggccaaaaagacacagcggaagaagaagaagagcagacggcagccaccaaggcagagccgcgcaagac

SEQ ID NO: 128396 - RNA, 75 nt, Homo sapiens
cacggaagagcacaccaaaacgcaaagaaacgaaggacacgcagaaaaggagcgccggaccagcgcgagcgccac

SEQ ID NO: 128397 - RNA, 83 nt, Homo sapiens
gaaagagaaaccaaggaccaagaaccacggacaagaccgagacacccaccacagcagcagggaacccgagcgcagaggggaag

SEQ ID NO: 128398 - RNA, 79 nt, Homo sapiens
ccggaagagggagaaacgaacgcaaagagaccagcccccaaagccaaaagccgccacgacagcccgaagacgagcagcg

SEQ ID NO: 128399 - RNA, 54 nt, Homo sapiens
aagggccagaaacgggaagagaaagcggagcagaccaccgcccagcaaaaagcg

SEQ ID NO: 128400 - RNA, 73 nt, Homo sapiens
acacggaggggacgaagacaaaaaccagaaagagaagagagcggagagaccagggccacggcccgagggacgg

SEQ ID NO: 128401 - RNA, 78 nt, Homo sapiens
cccacggcggcgcccgggacggcggcggaccgcgcgagcagggcgcgccccgcagcaggcaagaacggaagcacgggc

SEQ ID NO: 128402 - RNA, 76 nt, Homo sapiens
cccaggaagcagaagaagcgaggagaagaagaggaaacaagaaaaccaaaaggaaggcaccagaaaaccccagaaa

SEQ ID NO: 128403 - RNA, 75 nt, Homo sapiens
cggaaaaagacaccaccaacggaaaacaacacaggaggaccagcacagcgcaggaacgggaaaagcgcaggacca

SEQ ID NO: 128404 - RNA, 78 nt, Homo sapiens
cgcagggcgccaaagcgagagagggaagcgcccggccgacccggaggagcacccgaagcaaccacaaagccaggaaca

SEQ ID NO: 128405 - RNA, 83 nt, Homo sapiens
ccggaggggagacgggaggcaggccagcggcggggcagccgagggcaggagcaagaaggcgccccccggccgggccccgccca

SEQ ID NO: 128406 - RNA, 57 nt, Homo sapiens
cagagcacgcgcgcagcgaagcccagggaggccaccagaagcgagacagggacggag

SEQ ID NO: 128407 - RNA, 70 nt, Homo sapiens
aaccaaagaagcaaaacacgaggccaaggaaaaggaacagagagagcagaaccgaaacggggaaagaccg

SEQ ID NO: 128408 - RNA, 69 nt, Homo sapiens
cccaaaaccgccaagagaagaccaagcaaaaaggggcagaaaaccagaagagagaaaagacacagacgg

SEQ ID NO: 128409 - RNA, 81 nt, Homo sapiens
gagaaggagcccaaacagagcggggcgagcccggggcaagcgcgagcaaggaaccccgggccccgccacccacgcgaccag

SEQ ID NO: 128410 - RNA, 71 nt, Homo sapiens
ggggcccgcccgcggcccccgcgcggaggacaccaggagcggaaacccaggagcgaaaaagacaacacgag

SEQ ID NO: 128411 - RNA, 61 nt, Homo sapiens
caccaaccaggacagaaacaacagccaccaggcagcaggagaaacgagaagaaacagacgc

SEQ ID NO: 128412 - RNA, 79 nt, Homo sapiens
gcgggcgccagaaggaagaggcggacggaggagcaggcgagaagagaaggaaccgaagggccgagaagccgcgggggcc

SEQ ID NO: 128413 - RNA, 79 nt, Homo sapiens
ggagagcccgcacgcgccacccacggagccaaccagaccaaggcagaagagagaagaagaaggaggccgcggccagaaa

SEQ ID NO: 128414 - RNA, 78 nt, Homo sapiens
gccagacgaggggccgccgggaagcgcacaagccaaagcgagaggcaggacaagccagaaaaacaagaaaaaaaacga

SEQ ID NO: 128415 - RNA, 91 nt, Homo sapiens
caaccagaccccaaagaagccacagaacaggggaggcagccagggccgcagcgagcgggcccgccggacaccaaccaagcccccaacggac

SEQ ID NO: 128416 - RNA, 61 nt, Homo sapiens
gacccaagcaacccgcggggacagggaaaaaggaggaagacaaggaacgcccccacgcagc

SEQ ID NO: 128417 - RNA, 76 nt, Homo sapiens
ggcgacaccagggccgcagagcgggacaccggaagaaagcagccaccagacacagaacacgaccagggagcggacc

SEQ ID NO: 128418 - RNA, 66 nt, Homo sapiens
ccacgcggaaaggagccccgggaacgcaagaaggaagaaggccccagacgaaggagcggacggaaa

SEQ ID NO: 128419 - RNA, 43 nt, Homo sapiens
aggcagcccccaaacccggcccagggcacgaagaacacaaagc

SEQ ID NO: 128420 - RNA, 85 nt, Homo sapiens
gagaggcggacggagcgacaggagaaggaggcgacgaggacacgacagcacaacccccggccgaggcccaggaagaaaagcgcca

SEQ ID NO: 128421 - RNA, 92 nt, Homo sapiens
ccgaagggagagcggcagggcaccgcgcgaagcggccaaagccgcccagacggccaccggcgggaggaacaaaaggcgggaaaacggcacaa

SEQ ID NO: 128422 - RNA, 86 nt, Homo sapiens
cgccccccccccacccccgaccgggcggcgcggcggccagaggaaccccgaggaaggaagacccacaagagaccacgcagagacag

SEQ ID NO: 128423 - RNA, 73 nt, Homo sapiens
cccgacaaagcgaaagcacaccaaggaacggcgcgaagacccggggacagaggccccccccggacacgacggg

SEQ ID NO: 128424 - RNA, 64 nt, Homo sapiens
acaaaagcaacaaagagggcggagggcgaacgaacgcccgccagaagccccgaggggccgggca

SEQ ID NO: 128425 - RNA, 55 nt, Homo sapiens
ggggcaccagcccccgcggcccagaagaacccgagccggaagcggaagagaggac

SEQ ID NO: 128426 - RNA, 70 nt, Homo sapiens
cgccccggcgcagccgcgaggaccggcgggagagagagcgcccagaaagccaggaagcacacacacccgc

SEQ ID NO: 128427 - RNA, 72 nt, Homo sapiens
caaaggggaaagaagaccacaccacgaggagaaaaacggagagcagccgaaagggcgcgcaaacgaaggaaa

SEQ ID NO: 128428 - RNA, 56 nt, Homo sapiens
gagaccgccagacaacgacccaaccgccgagggccacgaccaccgcacccaggcgg

SEQ ID NO: 128429 - RNA, 66 nt, Homo sapiens
ggagaaggaaagcgaaggggaaggcgccgaagaggacgaagggaaaggccccccgggcaagccagc

SEQ ID NO: 128430 - RNA, 66 nt, Homo sapiens
agcaagcaggccacaacagagccaagcccacccgaaggaaaagccaacacgggcaaggggggccgc

SEQ ID NO: 128431 - RNA, 65 nt, Homo sapiens
aaagaggaggaaaaacgagccaaaccggaaagaggcacgcagccagaggggccagaagagagagg

SEQ ID NO: 128432 - RNA, 90 nt, Homo sapiens
cggagaggagcagcccccggagacagcggcacagagggccgccaggcagaagccccagaggagcccgaaacccccaggcgggcaggaagg

SEQ ID NO: 128433 - RNA, 86 nt, Homo sapiens
cacccccgcaccccagcggaaaaacgacaccggcagccgagaaggagcgcagggccaggaaccacggaaggagggggcgacacaca

SEQ ID NO: 128434 - RNA, 79 nt, Homo sapiens
gccacgccgcgccgccgcccccacgccaggcacacacaacgaccaagccaaggaccagccaaagaaagcagacccgccg

SEQ ID NO: 128435 - RNA, 69 nt, Homo sapiens
agagagaagagagacagaagagcaggaagcccagaggcacggggcagaacaccaacagagggccgaccg

SEQ ID NO: 128436 - RNA, 74 nt, Homo sapiens
ccacgccgcgcccccagcacagagcccgacagcacagacagagccccaggaaaacacgccaaaaagacgaacga

SEQ ID NO: 128437 - RNA, 78 nt, Homo sapiens
gagaacaccacgcaagagagaagaaaggaacccaccagcaaacccagggccccagcggggcaaagagcagagccaaag

SEQ ID NO: 128438 - RNA, 76 nt, Homo sapiens
agcaagacgcgcagagcggggcccgaggccccgaccagcgcggaccggaaacaacgggacgaagccccaaacaccc

SEQ ID NO: 128439 - RNA, 77 nt, Homo sapiens
gagcagaacggccggaggaaccagagggacaacaggcaggagaaagggagcgcaccccaggacacacaccagaggga

SEQ ID NO: 128440 - RNA, 78 nt, Homo sapiens
ccacaacgccgcaacaaaagaaacccgggccgcggaaggcccgaagcccggacaagacgacggacaagcaggcgacag

SEQ ID NO: 128441 - RNA, 80 nt, Homo sapiens
gaggaccggcagccggggggaagacaaggaggaaggacaggagaaacaggggccaaaaaaccaaaggagaagaaaaccac

SEQ ID NO: 128442 - RNA, 71 nt, Homo sapiens
acagcaaggggcaaagggggaggcacccaaaacggccaaagaccacagccaaaagaagaagcaaacgaaag

SEQ ID NO: 128443 - RNA, 67 nt, Homo sapiens
ccagcaaagggcgacacaaacggccgggggggacgcagaagaggagagggggcccacgcggaggacg

SEQ ID NO: 128444 - RNA, 84 nt, Homo sapiens
cgaggccggagaaacaggcgccgcgggcccgcgcccggccggacccgggcccgaggaaacgccaagagcgagcggacgaggagc

SEQ ID NO: 128445 - RNA, 77 nt, Homo sapiens
cggacggacgccagccccacaacaaccagaaaagacgagaaagcacaggggaggagagagaggaccaccaggcaacc

SEQ ID NO: 128446 - RNA, 68 nt, Homo sapiens
cacgcccaaaagagaaaagcgagacggaagggcgaaggacaaaccagaacagccaagaacaggaaaac

SEQ ID NO: 128447 - RNA, 41 nt, Homo sapiens
cccgagagcgggacgcaggacaacagcagcccccagcccag

SEQ ID NO: 128448 - RNA, 84 nt, Homo sapiens
gggagcgccgcggcggagcggaaaaacaaccaccagcgagcaaaaaggcaaagaccaagaccaccaagaagcgccccagcggca

SEQ ID NO: 128449 - RNA, 78 nt, Homo sapiens
gacaaacaacagaacccgaaacccacagcggcccccaaagacaaaccaagggagacacagcagcgagaagaaggggga

SEQ ID NO: 128450 - RNA, 68 nt, Homo sapiens
cccgcggaaaaacacgaaagacagcccaaggcggaaaagcgaaggaagccacaagcacagcccacaca

SEQ ID NO: 128451 - RNA, 100 nt, Homo sapiens
gacaccccggagacccgaaggccgcggcccggggccaggcgggcaccacggcaggggcgagcaccccaggaagggagaggaccgaccggacacgacccgg

SEQ ID NO: 128452 - RNA, 70 nt, Homo sapiens
acccggacggaacaggcaaaagaacggagcaaagagacaggggcagaaaacaaggcccagccaggaccaa

SEQ ID NO: 128453 - RNA, 71 nt, Homo sapiens
gggccgacaaaagcgcagcaagacggccgcgcggcccgcaggcacacacagccccggcgcgaagaacccca

SEQ ID NO: 128454 - RNA, 77 nt, Homo sapiens
aaccacggaaacaggcacggccacagaagcaacaaaggaccgcccccagagagagagaggaagacgaggaagcagaa

SEQ ID NO: 128455 - RNA, 75 nt, Homo sapiens
agacgcagacggagggagggagagcccacgacagaacgaaaagaaaggaccccagaaaggggagcaagaagaaag

SEQ ID NO: 128456 - RNA, 86 nt, Homo sapiens
gacccggaggggggaccccgaggcaaccacgagaaaacggaaccgaaagcaagaggacaagaagaggggaaaacaagaaaagggaa

SEQ ID NO: 128457 - RNA, 68 nt, Homo sapiens
gcagagagaccgcaccacccgggaagacgagggagaccggaagcagaagaccccccggagcgagggaa

SEQ ID NO: 128458 - RNA, 66 nt, Homo sapiens
gggccagcggccgcgcacccccggccggaggcaccagcggacagagaagaggacggagcgaggagg

SEQ ID NO: 128459 - RNA, 78 nt, Homo sapiens
ggcgggagggccgccggaggaaacgcgcacgggaaacgaaacaacgaacgagcaaggaagggccaaggcagaccccac

SEQ ID NO: 128460 - RNA, 73 nt, Homo sapiens
gcaacagcggcgggcggggcaccccaggccccgggggcgccgagggcacaagggcaacgacagaagggcgaag

SEQ ID NO: 128461 - RNA, 77 nt, Homo sapiens
gggcggcgccgggccgcgccgagacgccagggccgaccaaacaaagaaggagcacagaacaccccacacacgggaaa

SEQ ID NO: 128462 - RNA, 71 nt, Homo sapiens
gcggcagaacagccaagagcgcggaacgcgggcaggacccgaggcgccagcagcagcaagaccgggggacc

SEQ ID NO: 128463 - RNA, 84 nt, Homo sapiens
ccagggggcccggagccgcgggggcgggccagcggccagccacggacacagccaggaccgagcccagaacccggacgggcagac

SEQ ID NO: 128464 - RNA, 75 nt, Homo sapiens
agcgaacaaggagaaagccacaacagggcggcaacaggggcgagaaaggcccaaacacaaaaacaaaggcacgac

SEQ ID NO: 128465 - RNA, 83 nt, Homo sapiens
gacaacacaccgacgcaggaagccaccgagacggcgaccgggcgccgagacaccagagccacaaggaagcccggggcggcgac

SEQ ID NO: 128466 - RNA, 40 nt, Homo sapiens
gacacaccacacaaaaagggaggggccacagcagcccggg

SEQ ID NO: 128467 - RNA, 41 nt, Homo sapiens
gggagacacgccaaagccccaagagggaaaagaggacgagg

SEQ ID NO: 128468 - RNA, 83 nt, Homo sapiens
gcccgccgccgggccacgccgaaccgagaccacgccaccaccgaaccgcccccgaaggcaggcccacgggagccgagaccccc

SEQ ID NO: 128469 - RNA, 74 nt, Homo sapiens
cggaaagcagcgcaggagccaagaccacagcagcacccagggggcccagagagggccgaaccggaggacaagcc

SEQ ID NO: 128470 - RNA, 55 nt, Homo sapiens
cacaggggagagagccggcaaccagcagaaaagcggcagggccacccgaacccag

SEQ ID NO: 128471 - RNA, 87 nt, Homo sapiens
agaaacgaaggagaagaagcggccccacaccacccgcagggccggcacggccaaggagagggcggagaacggaaaagcaccaggaag

SEQ ID NO: 128472 - RNA, 89 nt, Homo sapiens
ccgggcggaggagcccccccgcaaccgaaggaggcacccagccacaccgccaggcgaaccagccgaaaaaggagaaaccaaaaggaaaa

SEQ ID NO: 128473 - RNA, 54 nt, Homo sapiens
gcagagaagggaagaaaagcaggcaaggaggggcagcagcaggacagggaaccc

SEQ ID NO: 128474 - RNA, 73 nt, Homo sapiens
cacgagaacaaaaaccaggcgaaaggcgaggcagaggggcacgagacgacgggaccgaaggaccccgccagag

SEQ ID NO: 128475 - RNA, 46 nt, Homo sapiens
gaaagacacggaagcacacgaaaagagaagaccaagaacaagggac

SEQ ID NO: 128476 - RNA, 77 nt, Homo sapiens
gccgagcaagcggaggaccacgccggccgggaacggacacagggaggaccaagaacccggaggaggggagcgaaccc

SEQ ID NO: 128477 - RNA, 77 nt, Homo sapiens
cgcccgcaccaggacacaggggacagcacggaaaagagccgccccgcgccacaagaaagagagacaaaaacccccga

SEQ ID NO: 128478 - RNA, 74 nt, Homo sapiens
cgggccaggccgccgccgagccgagggcggagaacggaaaagcaccaggaagcagagaggaccgcagaagggaa

SEQ ID NO: 128479 - RNA, 71 nt, Homo sapiens
aacaaccgagccgaccacgagggggagagcagcaaagccgggccccaccagaaccagacgacagaaaagaa

SEQ ID NO: 128480 - RNA, 78 nt, Homo sapiens
gaagaccaagacaggccggaacccgaaagggggcaagacgccaagagaaaaggcgagagcacaaagcaccaagagccg

SEQ ID NO: 128481 - RNA, 81 nt, Homo sapiens
ggcagccaagccccccaacacgcaggagcggaccagggggggcagcaggacgcccaccccaacgcacgcgccaccggcgcg

SEQ ID NO: 128482 - RNA, 77 nt, Homo sapiens
gaagagaggagggagaacacagaaaccggccccagggcaggaggacgcaacagaggaggggggacgaagaggaagaa

SEQ ID NO: 128483 - RNA, 56 nt, Homo sapiens
gcggaagggaacagacacaccaaacaggagcacagaaagcacgagagggccaccaa

SEQ ID NO: 128484 - RNA, 66 nt, Homo sapiens
aaaaaacacgcaaagaccaccagggaaagacaaggagccgggccgagaaaccgaaccagagaccag

SEQ ID NO: 128485 - RNA, 80 nt, Homo sapiens
ccaggagcagaagagcgaaaaccagagacagcaggccaaggggagaaaaaacagaggggaggcggaccaggacacaccag

SEQ ID NO: 128486 - RNA, 74 nt, Homo sapiens
ggcaagccggaaaggaaggggacagagaacgcaaacaacgacccaagaaaagaggaggaggagagggaaccaga

SEQ ID NO: 128487 - RNA, 74 nt, Homo sapiens
ccggagccccagacaacccggacggccggccaaaggggagggaagaaccggaaggccccagaacaaagcaaaaa

SEQ ID NO: 128488 - RNA, 82 nt, Homo sapiens
gggcacaccaacaccgacaacccccggagacaacaaccgcgggcacccacggaaaaggccggcgcggcacccacaaagcacg

SEQ ID NO: 128489 - RNA, 77 nt, Homo sapiens
agccagagaccgaacagggaccagccggccggagcgccgccggccaggccacgcagcccagggagacaaaggaccag

SEQ ID NO: 128490 - RNA, 72 nt, Homo sapiens
agacaaagcagggggcagacagaaacaccaagccgcagggaaacccagacgacaaggaaggccaagggaccc

SEQ ID NO: 128491 - RNA, 74 nt, Homo sapiens
gaaaacaggaacgcccccaagcacgagaccagacgaggaaaaaccaagaggacaggaagaacggagaaagagag

SEQ ID NO: 128492 - RNA, 64 nt, Homo sapiens
gaaagcgagcagagcccgcgaacaagacaaggacgccgccagccaccggcgcgaagccagacca

SEQ ID NO: 128493 - RNA, 75 nt, Homo sapiens
aaaggcccacccagaacagcagcgacaggacagaaacagaagcggggaacaagaaggaaagacaaccccgaggag

SEQ ID NO: 128494 - RNA, 64 nt, Homo sapiens
gccccgcgccagcgacagcaaggaacaagacaacacacacgcaccagggcagaaaaagggagaa

SEQ ID NO: 128495 - RNA, 82 nt, Homo sapiens
aaaagacccaccaaggaagcagcggccacgccagcccgggaccgggagcccgggaccgggagccggggggccaccccgaccg

SEQ ID NO: 128496 - RNA, 66 nt, Homo sapiens
cacggccagggaacagcaaagcaggagagacaaacccgagagcaaaacaaccagccggaaccggac

SEQ ID NO: 128497 - RNA, 88 nt, Homo sapiens
ggggcaagggcgagaccggagagccgcaggacggcgcggcagagccccgacgccacagaacgccacacccaccgcccgggcaggccac

SEQ ID NO: 128498 - RNA, 112 nt, Homo sapiens
acagcgggcacaaggacggaccaggccccgcaaaccaaggcacacggaagcggcccacggaaggagcaagacgagaacaacgacaaaagaaggggcggggcaggaggcgggg

SEQ ID NO: 128499 - RNA, 72 nt, Homo sapiens
caaaccggaggaagaagcgaacagggcgacaacaccccgggaacgccgcagaaagaagaaggggcaagaaca

SEQ ID NO: 128500 - RNA, 54 nt, Homo sapiens
gaccgggccgaaggggacggacgcccccacgaccaagaagcaacggggcggcac

SEQ ID NO: 128501 - RNA, 79 nt, Homo sapiens
cggcggcggcgcgggcgagcggcgagccgaaaagcgagcgcgaggaaaaggcggcgggaggccaaacaagaagaggcag

SEQ ID NO: 128502 - RNA, 72 nt, Homo sapiens
gacccccagacacacacacccaacccaaaccaagaaacgcaaaaggccaagcgagaagagaccggaacgccg

SEQ ID NO: 128503 - RNA, 55 nt, Homo sapiens
gagaaggaagaggggaaaagagccggaggagccaccaacagaagcaggagccagg

SEQ ID NO: 128504 - RNA, 74 nt, Homo sapiens
gccgccccgcgggggacggggaaaccgaaacaaccaaggggaggggaacccgaagaacgaggggacaacggcgc

SEQ ID NO: 128505 - RNA, 74 nt, Homo sapiens
gcaccccccccaccacccggcagaaccggaaggccagacgaaacgcacgcagagcacgaaggaacccggccaac

SEQ ID NO: 128506 - RNA, 72 nt, Homo sapiens
caggagcccgaccgggagaggacaagaccacgagccagagagcgcccagaacaccagcgaagacgcggaacc

SEQ ID NO: 128507 - RNA, 83 nt, Homo sapiens
cggggccggaaagacacggagcggagaccgagagagaaccaaacgagaccaagagcgcgcgggcaaagaggaaaggaagacag

SEQ ID NO: 128508 - RNA, 52 nt, Homo sapiens
accgggcccgcgggccgccccaccccacaggggcaggagggggcaacggagc

SEQ ID NO: 128509 - RNA, 77 nt, Homo sapiens
acccaccagacccagccacaaggggcccgcaggagcacagcaagcgggagcaggcagaccaaaggaacagaagccag

SEQ ID NO: 128510 - RNA, 78 nt, Homo sapiens
acaccaggcacccgggcccagccgggaacccccacgcggccagcgaaaacgcccaggaccaaagacgaccaccaaagc

SEQ ID NO: 128511 - RNA, 37 nt, Homo sapiens
agcgaccccagcagcgcgcccacagcgaaccccaggc

SEQ ID NO: 128512 - RNA, 78 nt, Homo sapiens
cggggcaggggcggaggcggaggcagaggggaggcgcgaaagaccgaaacaaggaccccccgggagaagaaaagcggg

SEQ ID NO: 128513 - RNA, 77 nt, Homo sapiens
caaagaacaggagcccacagaaggcagaggcagaaccacagggaagcagagccccgggccgggaaggggaaacggcc

SEQ ID NO: 128514 - RNA, 81 nt, Homo sapiens
gaggccggccaggcagggccggcggcggaaccgccaggccgagccggccgggggacacgcaagaaacgcccccgagagaga

SEQ ID NO: 128515 - RNA, 79 nt, Homo sapiens
gacagccaaggggagaccacaccaagcgggagacacaccacgccaaggccgggaagaaggagcgcagaaggaacggaga

SEQ ID NO: 128516 - RNA, 69 nt, Homo sapiens
aaaggagagaggaccacccagaggagcaacgaggagagaaagaacccacgcaggacgacagaagaggcc

SEQ ID NO: 128517 - RNA, 40 nt, Homo sapiens
agcaagcaggagcggacaggacaccccaggcccgcgcacc

SEQ ID NO: 128518 - RNA, 81 nt, Homo sapiens
ccgggaggacagggcaccacaacaacaagccacagggccggagaggggaaccagcagaaggacccagcagccagcgaagcc

SEQ ID NO: 128519 - RNA, 59 nt, Homo sapiens
ccaacagcaaaggaagcaggaagagagaaggccacgcccgaccccaagcaacaacgggg

SEQ ID NO: 128520 - RNA, 72 nt, Homo sapiens
caaacccaggacacaagagccgagacccaagagccaccgagaagggagagggggaggacgaagccagcgggg

SEQ ID NO: 128521 - RNA, 60 nt, Homo sapiens
gcaggcccccccgccgccgacgacccgcccgggcagcaacaccggaggcaaaagaaagag

SEQ ID NO: 128522 - RNA, 81 nt, Homo sapiens
acgcgcacgggaaccgaagagagccgggcagcgccccccacaacacagcggcggagacaaggggcaaaggagaccgaaagc

SEQ ID NO: 128523 - RNA, 81 nt, Homo sapiens
gccagccaaccgccggcaaccccgggcggccgcaccgccagggggccgagacaacaagaaggggaggaacaaaagcgcaaa

SEQ ID NO: 128524 - RNA, 93 nt, Homo sapiens
gcaggcggcgccggccggggacccggcccgggaccggcggcgcgcggcggccgaggccagccaagcgaaagacagaggcccagccgaaagagg

SEQ ID NO: 128525 - RNA, 80 nt, Homo sapiens
ggaccgccacccgcccggaaacggcgacccgcaccccagacacgagacccagaggcgggccggcaggcccagaaccaaca

SEQ ID NO: 128526 - RNA, 73 nt, Homo sapiens
gccagcagaagaaacggcacaagcagaaaaccaggcccagcacagaaacacaccagaggagaacgaaccccca

SEQ ID NO: 128527 - RNA, 75 nt, Homo sapiens
ggagcggccgcaacagccccaaggcgcccgaaacgacaagaccccggcagccgccgcaaagggacgacgaaggga

SEQ ID NO: 128528 - RNA, 74 nt, Homo sapiens
cggccgcggccgcccgaagaaccccgagacgagggggaaagggaagaagacagcggcaccgaacaagacaaggc

SEQ ID NO: 128529 - RNA, 89 nt, Homo sapiens
gcaaggccacgccggccgcgcgcgccagcaagaagaccgcgcccgagcccaggggggagaggaagaagcggagccgccagcggggcggg

SEQ ID NO: 128530 - RNA, 83 nt, Homo sapiens
gaggagacacggcccgcaggcgccgaagaagggaggcgagagccacagaaggaggaggggacagcagcaggagcccagcaaag

SEQ ID NO: 128531 - RNA, 72 nt, Homo sapiens
agccagcccagagaggaagggggacacagccagggcgcaggcagcgcccaacaacacgggaaagaagaacag

SEQ ID NO: 128532 - RNA, 54 nt, Homo sapiens
gcgcccccaaacgagaccggccagccacagagcagagaaagccggaccagcagg

SEQ ID NO: 128533 - RNA, 79 nt, Homo sapiens
agcaccagaggccccgagcgcgccagccccaagaaggagaccccaccagcgagcccccggcggaggcaaggcgcgaccg

SEQ ID NO: 128534 - RNA, 77 nt, Homo sapiens
aagcaggaaaagagagagaaaaaaagcgaacgcaaggggccaagaagagcagagcccgagcaagaagaggacgaaaa

SEQ ID NO: 128535 - RNA, 71 nt, Homo sapiens
aacccagagggagcaaaagaccagacgcagagacggcgagcaaagcccgggaaaaagacacacaagcgaac

SEQ ID NO: 128536 - RNA, 87 nt, Homo sapiens
aggagcagcagcagcccagcaggcgcggcccgccagcggggggggagcggcagcggcagagagcaacgcccagacggcggagacccc

SEQ ID NO: 128537 - RNA, 86 nt, Homo sapiens
cccaaccggaacagcccccagcggcccaggcccaggcgggacgaccccacaacccgagcgcccaagccccccgcgcagagggagaa

SEQ ID NO: 128538 - RNA, 100 nt, Homo sapiens
ggaacaggcgccggggcccccgcggcgccgggaggaggccggggccgcgcgagggcgcccagcggaaaagcccggaaaagcagccaagcggaagacagag

SEQ ID NO: 128539 - RNA, 117 nt, Homo sapiens
cgcaccgccggccacgacgggaccacggcagaagaggacgaggccgacagcacgccgagaaggggaaggcgcgagccccgcgcgggcagagcgccacagaccgaccagcgcgagcga

SEQ ID NO: 128540 - RNA, 80 nt, Homo sapiens
caagaagaagcagaggaggcccacaggcccgcccggacaccgaggcccgcaggccccgaggcgagaacggcgcccggcca

SEQ ID NO: 128541 - RNA, 73 nt, Homo sapiens
gcccacccaaccaaaccggcaccgggagcccaaggccgccaagagagaggcgaccaccgaggcgcacccaggc

SEQ ID NO: 128542 - RNA, 75 nt, Homo sapiens
aaccggaagggcggaggaggagagccggcagacagcgcacgaaacacacaaagaaccaccaccgggaggaagcca

SEQ ID NO: 128543 - RNA, 80 nt, Homo sapiens
ccgggcccccacccccagacggcccagaaagggaaaccagaagaaaggaaagcccggacagaacccaggcccacagcagc

SEQ ID NO: 128544 - RNA, 72 nt, Homo sapiens
gaggacggccccaaacaccgggcaaagcacgaagcgagacgacgggaccgaaggaccccgccagagacaacc

SEQ ID NO: 128545 - RNA, 72 nt, Homo sapiens
aggaacggcacagacccaggccagccaacagcacacacccaggggcaaaggggcagagggcaggagcaaaac

SEQ ID NO: 128546 - RNA, 79 nt, Homo sapiens
gggccccgggaagaccaccaaaacggaaccccccgaagcgagggaagggcggacacaccgaaccacagacagcgacccc

SEQ ID NO: 128547 - RNA, 72 nt, Homo sapiens
ggcccgagcgggccgcgagggaccccgggagggcccagcaaccggccagcgaaccggagacaaacaggcagg

SEQ ID NO: 128548 - RNA, 74 nt, Homo sapiens
ggacggcccccgagccgcccaagcccgggccagggccaccccggcgaggaaaacgaaaaacgggcagggacaag

SEQ ID NO: 128549 - RNA, 38 nt, Homo sapiens
gaaacacaaggacgaagagaggaccggccaggaccgac

SEQ ID NO: 128550 - RNA, 78 nt, Homo sapiens
gcaaacgacaccacccgaccggggacaccagccaggagagaaccagaccgggcggagacaagccagccggacgacagc

SEQ ID NO: 128551 - RNA, 72 nt, Homo sapiens
gccacggcacaacgccagcagggcggaaggcccacccaccaccagagcaagacgacaccagagccggggaac

SEQ ID NO: 128552 - RNA, 55 nt, Homo sapiens
ccggcggggcaagcacggaacagaaaacgaggcagaaaggaaacaggcagaaccg

SEQ ID NO: 128553 - RNA, 77 nt, Homo sapiens
gcaaggggcaggcacagcgacccgaacgcagcggggcccacacgagacaagggaggcgaggacggacaaaaggaaac

SEQ ID NO: 128554 - RNA, 61 nt, Homo sapiens
ggacaagcaaaaaaaaccgccccgccagcagaaggagaagagcgcaggcaaacgacaaaaa

SEQ ID NO: 128555 - RNA, 84 nt, Homo sapiens
ggcacacccaccgaaggaggcaaggggacaggcgaggaagccgaagcgcaccacaccccagccggcagcgccgggccaggggag

SEQ ID NO: 128556 - RNA, 68 nt, Homo sapiens
gacacaaaagagcgcagcaaggagaaacagggggaagcgggccaaaaaggagcaaaagaccaaacagc

SEQ ID NO: 128557 - RNA, 83 nt, Homo sapiens
ccagaccgggagcacgcacgccacgaagaaccccccacggaaaggacgaaagaaagaagcagccccagaaagaaggacgccgc

SEQ ID NO: 128558 - RNA, 77 nt, Homo sapiens
accagaccgcaaaacaaggacaggcagacgcacacaggcccgaacaagcgacaaaaacgagaaaagcagaaaagaag

SEQ ID NO: 128559 - RNA, 84 nt, Homo sapiens
gggcagggccgggagagcgggacccaaggccagccagccccaggcaccagcggacaggacagggaggacgaaggccccccccgg

SEQ ID NO: 128560 - RNA, 76 nt, Homo sapiens
ggagccggggggggcggagggggagacggccgggagggcccgccagccgcgcccgaaaaacacgcgcgccgagcca

SEQ ID NO: 128561 - RNA, 54 nt, Homo sapiens
ccgaaacaggagccgaggcaaggcaccgaacaggaagaagagagggcgaaggag

SEQ ID NO: 128562 - RNA, 77 nt, Homo sapiens
agggaacccaccacacagaaaccagaggagacgcagagaagcaggcgcgcagaagcgaagcagcaccagaccaggga

SEQ ID NO: 128563 - RNA, 51 nt, Homo sapiens
ggcaccacaggaagccgagcaggcgcgagccggcacgaaacaaaggagcga

SEQ ID NO: 128564 - RNA, 85 nt, Homo sapiens
cacgaaagaaccggcagccagccacaagagaagcccagacacaggaacacacggacaggagccgcaggagcgcaggcacccggag

SEQ ID NO: 128565 - RNA, 74 nt, Homo sapiens
gaccagcaagccgagaaagggaggcggaacaggccagagagaaaagaaaagggagagggagccccaacgggaaa

SEQ ID NO: 128566 - RNA, 71 nt, Homo sapiens
ccgacggggacaggaaaagcagaaacaacagggagaacaaaagccaaccgaacagaaacagaacgacagcc

SEQ ID NO: 128567 - RNA, 89 nt, Homo sapiens
gcagaaggagcgggaggacgaggagcgaacaaccccagaagaccaggccagagagcacgcagacacgaccgcccagcacggaacgcaag

SEQ ID NO: 128568 - RNA, 72 nt, Homo sapiens
cgacggggacgaagccaagcacccagccaccaccaacaccaggcagaggaaacacccacagaacccgaagaa

SEQ ID NO: 128569 - RNA, 77 nt, Homo sapiens
cgccacggcgccccgcaaggcgaacccaggcacccagagacggagcggaaaccaaggaagaaaagccacccaggccc

SEQ ID NO: 128570 - RNA, 72 nt, Homo sapiens
ggaggaaggcacgcgccaggagaagacagaggagccagaccaagagacagcacaggcgagcgagcagagaca

SEQ ID NO: 128571 - RNA, 70 nt, Homo sapiens
agcgagcgagggggggcgcgccggaaaccggagcgcgcagcagaacgcaagaaccacccggcaccaccac

SEQ ID NO: 128572 - RNA, 61 nt, Homo sapiens
agacccacccgccagaagccccccgcaggaggaaaaggacaaagaaagaagggaaggaaca

SEQ ID NO: 128573 - RNA, 71 nt, Homo sapiens
cgaagcgagggaagggcggacacaccgagaaacacaacggaacaagcagaaaaagacagcacaaagacgaa

SEQ ID NO: 128574 - RNA, 82 nt, Homo sapiens
gcagcgggggcagcagcagcggcccgagggcgcggcggacgcagacaccaagggaacccaaggggaagcgagcgggcccacc

SEQ ID NO: 128575 - RNA, 74 nt, Homo sapiens
aacaagcgccaccaaagcaaggagcccgaaacaaggcaaaagggaaagcaaggggaagggcccaagaagacacc

SEQ ID NO: 128576 - RNA, 80 nt, Homo sapiens
cgggacccaccacccaggccccgacgccccgaggaaaccccccaggcaagaggcgcaggaccgggaagaccaacaaacgc

SEQ ID NO: 128577 - RNA, 58 nt, Homo sapiens
cggaaagacaacagcgaaaggaagacacaccacacgaagcggagagcacaaccacaca

SEQ ID NO: 128578 - RNA, 78 nt, Homo sapiens
ggaccgaaacaggccggggcacagcacagcgccggcgcaagacaacaggcacaaagagagaaggaacacccacagggc

SEQ ID NO: 128579 - RNA, 86 nt, Homo sapiens
acaagcgaagaccgaacagggaccagcgggagccggcccgaaagagcgggaccgcgcggggcggcccggcgcacggccgccaccgc

SEQ ID NO: 128580 - RNA, 69 nt, Homo sapiens
cccagacaaaccgaaggcgacagagacagggcaacaacacggcaccacacaagcgaagaagccgagaaa

SEQ ID NO: 128581 - RNA, 63 nt, Homo sapiens
ccaccgcaaaaggcagaggcaggacgggaaggagaaacaaagaaggcacacgaaaaccccccc

SEQ ID NO: 128582 - RNA, 55 nt, Homo sapiens
aacacaccgaccacgggagcaggacggcacgaggcagcacggcaggagacgagga

SEQ ID NO: 128583 - RNA, 79 nt, Homo sapiens
cggcccgcccacaccacagggcagcgcaagaccccgcacggaagcagcaagcacaggcagcgcagagccagagaccaca

SEQ ID NO: 128584 - RNA, 63 nt, Homo sapiens
gaccgaagaagccccgccccaaagcccccacgcaacaaaaccggacccaggcacagcgaagac

SEQ ID NO: 128585 - RNA, 82 nt, Homo sapiens
cgcagcgggggggcgcgggagcaacgggaggccggacccagcgagcgggcggcacgcacgcagcaaagggcacaagcccccg

SEQ ID NO: 128586 - RNA, 70 nt, Homo sapiens
ggcccgcgcccgcccccgggagcccgcacgggacagggacaagcgcacagcggagaaagcagcgcggcca

SEQ ID NO: 128587 - RNA, 65 nt, Homo sapiens
ggacacggcgccacaggcccggagacgaggaacagggaagccaccagccacgaccggagggcgaa

SEQ ID NO: 128588 - RNA, 71 nt, Homo sapiens
cggggggcgaaggcaaggcacaaagcccgacagggcaacacccgacaaagggaccgaggaaaccagacgag

SEQ ID NO: 128589 - RNA, 52 nt, Homo sapiens
acccacaaacaaacacccacggaaccagagacaacaagagaagcagggagag

SEQ ID NO: 128590 - RNA, 51 nt, Homo sapiens
aaagggccaaagaagggagagccccagcccgaggaggaccaaggccgccag

SEQ ID NO: 128591 - RNA, 68 nt, Homo sapiens
cagacagaaccgacccaccacaccacgggcggccccagaagggagaaaagaagcagcccacgaacccc

SEQ ID NO: 128592 - RNA, 73 nt, Homo sapiens
agcccaagagcagcgaagcggaagccagagcgccgcaagggagccgacccaccccagaagagcgagccgaccg

SEQ ID NO: 128593 - RNA, 85 nt, Homo sapiens
accaagaagccccggacgcaggccggaggagaacgagaggaaagaagcccacacgaagccagcgagaagaccgagaggccgcgac

SEQ ID NO: 128594 - RNA, 74 nt, Homo sapiens
agccgggaaacgaggaacaacacagacaccgccaggggacagaaccacgagggacggcaacgagggcccccagc

SEQ ID NO: 128595 - RNA, 113 nt, Homo sapiens
agagccacaagagagccagagcaacgcacaagaacgaaaccggaaccagacagaaggcggagccaccgcacccaggcggagcacaaggcagacccagccaccacaacccgccc

SEQ ID NO: 128596 - RNA, 72 nt, Homo sapiens
gagaaacccgagaaaaggagggaaagcggacacagggcacgaggaaccagaagacacaaaaagacaaggaaa

SEQ ID NO: 128597 - RNA, 85 nt, Homo sapiens
gggcgcggacacccccgcgagagccgccgccaggaccggaaaacagcggcgaccagcaggggaagcgaagggaagcacgaacccc

SEQ ID NO: 128598 - RNA, 69 nt, Homo sapiens
ggaggggaaggccggaacacgaagcaagggaaacagaagacagccggaggcgaggaagcaggcgcacac

SEQ ID NO: 128599 - RNA, 96 nt, Homo sapiens
ggaaacaagacaaaggaaaagcggagcggagaccagagacaagggcccgagcgcccagcggaaccaacagccaggagcccggagagccagccgaag

SEQ ID NO: 128600 - RNA, 77 nt, Homo sapiens
aaaggcagaacgccgaacaggagcaacagacagaagcgaaggggacagggggagaaccgccagggaaacccggggga

SEQ ID NO: 128601 - RNA, 75 nt, Homo sapiens
acaccaagaggggaaagccaaggagagcgaggaacgaccaagcaaaaaccagcacccaggaggggagagaacaaa

SEQ ID NO: 128602 - RNA, 70 nt, Homo sapiens
caggcagaagaacagacgaaagaaaggaacgggcacaagaaggaagacacgacccgggacccacacccaa

SEQ ID NO: 128603 - RNA, 114 nt, Homo sapiens
cgccggaggcccggccacccgagaagggagacgacgcgcgggccgcgagcggggcgacccgagcagcacaaggaaaacgagagaaacgaaggcgagagaaacagcaaggcccga

SEQ ID NO: 128604 - RNA, 77 nt, Homo sapiens
gggcccgacgggcagccaagaagagagaccgggggaggcgacgcaaggcgacgggcgacagggccacccagggaaac

SEQ ID NO: 128605 - RNA, 86 nt, Homo sapiens
aggagccagaggcgccagccgcgaaggggcggcgcgcgccgggcgccggagggaaccgagcaagggggcgagaggggaacgccacc

SEQ ID NO: 128606 - RNA, 69 nt, Homo sapiens
caggaaagaggaacaaagaaccgaacaagacagaaagcgggacgcgcaaccccaggccagaccccaccc

SEQ ID NO: 128607 - RNA, 87 nt, Homo sapiens
ggacgcggaggcaacagcaagaggcggcccacaccggcagaacacagcagggcggaggaaaggcaggcgccccaaccaacaccaaca

SEQ ID NO: 128608 - RNA, 72 nt, Homo sapiens
aacgcacggagaaacaggaggaagaccgcaggaaagcaggaaggcaagaaagccaaggacgaaacccacacg

SEQ ID NO: 128609 - RNA, 81 nt, Homo sapiens
gagaagcacaaaacagcagacccaagagcagcggaaaagaccagcacaggaaggagaagagcagccagcaagcggaggaca

SEQ ID NO: 128610 - RNA, 87 nt, Homo sapiens
aggggcgccaggagacgcaggcggaagggcccaggacccccagaagccccacgagaagaagaagaagaggcggcccggcgcggacca

SEQ ID NO: 128611 - RNA, 70 nt, Homo sapiens
gcgaggcacaagccaagaaaagggagagaacagcacacagaggcgcaaggggaagagaaaagacagaagc

SEQ ID NO: 128612 - RNA, 58 nt, Homo sapiens
cgcagaggcaaggggccaccaggaggccagggggcgccaggacggaccagcgggggag

SEQ ID NO: 128613 - RNA, 84 nt, Homo sapiens
gccacacccacagcgcggcaccgcgacacggaaccccacccaacaagagccacccaggaccccaggaccagaaggcaaccaaca

SEQ ID NO: 128614 - RNA, 71 nt, Homo sapiens
aacaggacgaaaaaagggcaagaagccagaagacagagagagcaaaacgacgaaggagccaagaggaccgg

SEQ ID NO: 128615 - RNA, 69 nt, Homo sapiens
acacaacacagcaacagacagaaacaccagacagcgacagagacaacagaggaagaggcgccagacgga

SEQ ID NO: 128616 - RNA, 73 nt, Homo sapiens
cgaggaaacgcagacgggagccgcagagcaggccaagggaacacgcacagaggcaggacagaacaaaggagac

SEQ ID NO: 128617 - RNA, 62 nt, Homo sapiens
gcccaggcgccagcagggccaaccgcagaggccgacgggaagggacaaaggaaaaagaggag

SEQ ID NO: 128618 - RNA, 86 nt, Homo sapiens
agccccgccccccggacccacggcgcgcgcccacaccccaggcgaccgggagggagccaggagcgcgggagcgaaggccagccaca

SEQ ID NO: 128619 - RNA, 55 nt, Homo sapiens
ggaggacaagaaggacgacccagaaagcccccagggaaaaaaccagaagccgcca

SEQ ID NO: 128620 - RNA, 76 nt, Homo sapiens
caggggcacgagagacggcaggaggacgagggacacgaccgagaacccccaaaccgagacaggaaccagaacgcgc

SEQ ID NO: 128621 - RNA, 66 nt, Homo sapiens
gccggacgcacccggggggcccaggccacccccaccgccgccgggcccggcgcgggggccgaccgg

SEQ ID NO: 128622 - RNA, 55 nt, Homo sapiens
gggaacaccggggcagccgggcaccaccgcccggccccccgggcagacgcccgaa

SEQ ID NO: 128623 - RNA, 34 nt, Homo sapiens
gaagaccgaaggacaagggacggaaaaggcgcac

SEQ ID NO: 128624 - RNA, 67 nt, Homo sapiens
acagcccacgggaacaagaggggacagaaagcgaggggcccggccgcggggcacagcagagggagcg

SEQ ID NO: 128625 - RNA, 84 nt, Homo sapiens
ccgccacggggagcaaaaccaacgccggccggagcagcagcccgaggacccaaggccagccagccccaggcaccagcggacagg

SEQ ID NO: 128626 - RNA, 89 nt, Homo sapiens
cgcagcaggagcgcccgcccgagccagcccgccagcagccccagccaaaggcgccaggaacccgagagccggcgcccagaaagaagagc

SEQ ID NO: 128627 - RNA, 83 nt, Homo sapiens
agaccaaacagagggaacacaacagaggggaagcccaacagagggaacacaaccaggggagccacaaagaaacccccaagaag

SEQ ID NO: 128628 - RNA, 61 nt, Homo sapiens
agaagaccgcgcccgggggagcagaaggcaagcagaagaggaacagaagaagcagagcaga

SEQ ID NO: 128629 - RNA, 76 nt, Homo sapiens
ggaggcaggaagaccaccgcaaccccgcccccggacaccagaggacgcccggcagaagggagcgagcagcacgggc

SEQ ID NO: 128630 - RNA, 83 nt, Homo sapiens
cgcaaggacacgaggagcaccgcagggcgacaaacagcccacaaccaaaggcggaccacggccaccaacgacggaccgggcgg

SEQ ID NO: 128631 - RNA, 67 nt, Homo sapiens
cggcccgaagccccacgccagagcggccaccccaaacccccagacccaaccaaaaggaaccccaggc

SEQ ID NO: 128632 - RNA, 74 nt, Homo sapiens
caagacggaaaaagcgacggagcccccccccgggcaagaggcgcagagccagagaccggagacaccaagacggg

SEQ ID NO: 128633 - RNA, 76 nt, Homo sapiens
ggggcgcacaccaccggacaaccgacaaaagcgaacagaagacaagacgaaaacgcaacgcgacgagcgcgaggaa

SEQ ID NO: 128634 - RNA, 44 nt, Homo sapiens
agcccacccgcgcggagccccaggaacccaagacagaccaggag

SEQ ID NO: 128635 - RNA, 90 nt, Homo sapiens
acgacccacaggagccccaggagcccagacaccagccccccaccaggaaggagaacgaccgccagaagagaagaggaaggagaaaaacaa

SEQ ID NO: 128636 - RNA, 70 nt, Homo sapiens
gcccagagaaagccacaaaggcccaaccacccgacaggaaaaggccaaagcggaagccggcagacccggg

SEQ ID NO: 128637 - RNA, 61 nt, Homo sapiens
caaaaagcagcggacgaaggaccaccaaccaaaggagcgggaacgccgagagaaggagaga

SEQ ID NO: 128638 - RNA, 81 nt, Homo sapiens
gagcagccggaacggcggaccgggacgcacgccagcgaggaggacccccaaagcagccaagaagagggaaagaagacagga

SEQ ID NO: 128639 - RNA, 56 nt, Homo sapiens
cgccggcccgagaaagcccgccagcaggaaaagcggagaaacaaaaaaagcgagac

SEQ ID NO: 128640 - RNA, 57 nt, Homo sapiens
caccaccagaaggcgcggacagagacaccccccaggcacagccacaccccagcggcc

SEQ ID NO: 128641 - RNA, 81 nt, Homo sapiens
ccgcagacgggggacgcagggaggagcgggacaccccggaagcgggaaagggcccgaagccagcagagagcggaggcgcaa

SEQ ID NO: 128642 - RNA, 103 nt, Homo sapiens
gggaaaacacaccggagacggggggaaacaggcgaggcggcggcgcccggagggcagcgagcaagccaggcggcagacaaacggaaccaaccaaagcaaaaca

SEQ ID NO: 128643 - RNA, 90 nt, Homo sapiens
aagggaaacgggccccccggcgagagacgcagccccgcacagaacgacaagccgccgccgggggcaccccgcggcaggccggcgccggcc

SEQ ID NO: 128644 - RNA, 76 nt, Homo sapiens
gagagagagcgcgagagaggagagggcagacggacaagagcgcggaacaggacgccccgaggccagcggaccaaag

SEQ ID NO: 128645 - RNA, 61 nt, Homo sapiens
cggaccgcccccccagggcccacagcaggcaagcacagaccaagccaagagaaagaagaga

SEQ ID NO: 128646 - RNA, 79 nt, Homo sapiens
ggacaagaacgcagccgccggccgaccaccggaacggacagcccccccagccaacacacgcgcaggaagcgggaggacc

SEQ ID NO: 128647 - RNA, 57 nt, Homo sapiens
ccaagcaggaccacccaccagccaccaggaacagagccgacaggcacgaagaaaagg

SEQ ID NO: 128648 - RNA, 87 nt, Homo sapiens
cggcacagccggcggcgaaggcagcgccgacggcagccggcaccgacggcggaccgacccgagccgcgagcgacgcgcccacggagg

SEQ ID NO: 128649 - RNA, 81 nt, Homo sapiens
accagacgaggaagacccggaaacaggggccacggagccacggccacggccgcaaggaacccggaagagagcgaagaggaa

SEQ ID NO: 128650 - RNA, 79 nt, Homo sapiens
cggagcagacgccaggagaggacgaggcccagcgaacaaggagaacggacggggaagaccgcgaggagggccggcccag

SEQ ID NO: 128651 - RNA, 87 nt, Homo sapiens
ccaccagcgcccagcccccaggcgaggagaagacgaagccgcggcaaggccgccagagaagcccccagcggcacccgcagcccccag

SEQ ID NO: 128652 - RNA, 70 nt, Homo sapiens
gcagaaaccggaaccacacacaccacaggaagccagagacacaacaagccccaagggagaagcagaaggc

SEQ ID NO: 128653 - RNA, 80 nt, Homo sapiens
ggcgaggcgaggggaaggacccgaaccagccgccggagcaccgcagcggcgcccgcaggggacccacccagggaaccccc

SEQ ID NO: 128654 - RNA, 75 nt, Homo sapiens
ccccgagagcggaacagcaggaagcaggaaaccggcaggccagcgagagaagggaaagcggggacgaagggcgcc

SEQ ID NO: 128655 - RNA, 54 nt, Homo sapiens
accaccagcgccacccaggccgccgacggcccgcacagggagggcacagcaagc

SEQ ID NO: 128656 - RNA, 83 nt, Homo sapiens
cggagcccggcccgacggcagccggcaggcagggcccggccaacgcaacagggagcccacgcaagaggggccggggaccgccc

SEQ ID NO: 128657 - RNA, 67 nt, Homo sapiens
ggagaggcagaaccagagacgaccccgaggaccagaaaaggggacagggagcaccaggccaagaacc

SEQ ID NO: 128658 - RNA, 73 nt, Homo sapiens
aacaaggcgcgcgaccaccacggccaggaacgcaagaaaaccccagaaacccccagcggaacgccaacagacc

SEQ ID NO: 128659 - RNA, 69 nt, Homo sapiens
acgccaaggggcaaggcgaagaagaaagaaggacacaccgcccaagccacaaaacgcgacaacgcccga

SEQ ID NO: 128660 - RNA, 77 nt, Homo sapiens
cacaccaggacagaagacccaaggccggaagaggaagagaagaaaggaggaggggacgcgccacagacgggggaacc

SEQ ID NO: 128661 - RNA, 67 nt, Homo sapiens
ggcgaggcaccccaacagcagagaaacaaggggggacccaaagacaggaccacgcaccagcagagaa

SEQ ID NO: 128662 - RNA, 74 nt, Homo sapiens
gagaaggagcggcagcaacagacaagacagcaacagccacagaggaagaacaaaagaaagaaaaaagcacaaga

SEQ ID NO: 128663 - RNA, 75 nt, Homo sapiens
gcagacccggcgggagaggccaagcgggaccgccagaacaagaagacgaccccgacgcaggccaggagccgcgga

SEQ ID NO: 128664 - RNA, 69 nt, Homo sapiens
agaccccccgaagagggaagcaccacagacaagggggcacgaggggacgccagacgggacacgcacagg

SEQ ID NO: 128665 - RNA, 80 nt, Homo sapiens
cgcgggagaaacaaggagacagccaggccacaggccggcacccgggaagagacaagaagaaagaagaaagaggaagacca

SEQ ID NO: 128666 - RNA, 78 nt, Homo sapiens
agccaaagagggaaacaaagcagccaaaagagaaacgaggaggcgggggcagcaggggaagcggacgcagaccggaag

SEQ ID NO: 128667 - RNA, 77 nt, Homo sapiens
aggaaggagagaaaaggcgccacggggcggagaacggaaaagcaccaggaagcagagaggaccgcagaagggaagga

SEQ ID NO: 128668 - RNA, 77 nt, Homo sapiens
acggaacagacccgggaagccagggagaagaggagacgcggccggagcccccccagacacacgagggggacaccgcc

SEQ ID NO: 128669 - RNA, 65 nt, Homo sapiens
ggaaccgagaagagcagagcggagggagccccagacacgagaccaagcgaccaagcaagcagcgc

SEQ ID NO: 128670 - RNA, 54 nt, Homo sapiens
cagggcagggccccgcccggcggggaaggacagcccaaggcggaaaagcgaagg

SEQ ID NO: 128671 - RNA, 125 nt, Homo sapiens
ggccgaaagcagaagaaaagggacgcaagaaacccaggacgagaacagcaacagcaacaaaggagagagcgggaagcagaaggcagcaggaacggaacagcgaaggagagaacaagaagaaaaga

SEQ ID NO: 128672 - RNA, 80 nt, Homo sapiens
ccggacacgaaagccgggaaagaagacgaccccgacgcaggccaggagccgcggacagaagccgagcacggccgagacaa

SEQ ID NO: 128673 - RNA, 82 nt, Homo sapiens
cgcagcaacaacagagagcacgggccgcaggagggaagcgcacggaaaccgccccgggaggcacagagcaggagacgccacc

SEQ ID NO: 128674 - RNA, 81 nt, Homo sapiens
agcagagcgcccacgccccagcagcggcggagaaaccaccacaaacacgaggccagcaacgaccaacaagacagacccgcc

SEQ ID NO: 128675 - RNA, 81 nt, Homo sapiens
aagccgggcagcagcccagcggcagcagaaagagcaggggccagcacagacacagccagccaaacacaccaacaaaaagac

SEQ ID NO: 128676 - RNA, 85 nt, Homo sapiens
ccggagaaagaaaaagaaggagaaaaaccccacaccgacacagagcccagagccaggccccggggccccagcggcaccagcggag

SEQ ID NO: 128677 - RNA, 83 nt, Homo sapiens
cagacgggacagcccagaaaccgccaaagacggaaccgccacagcaccaagcaaaagcagaccggaaaacccaccggcaagac

SEQ ID NO: 128678 - RNA, 83 nt, Homo sapiens
ccccccgggcgcggcgcgcaaaagccagcagcggcagcgggagcgccggaggccggcgcgaggaagcccggggcggcgacgga

SEQ ID NO: 128679 - RNA, 66 nt, Homo sapiens
aaacccgaacggggagacggaacggcgccaccgagcacagaagagcgcaggcacaaccggcacaaa

SEQ ID NO: 128680 - RNA, 64 nt, Homo sapiens
ggccgcaggccaccgacacgagacaaccgggagccgggacagagccagaggaccccggacaaac

SEQ ID NO: 128681 - RNA, 86 nt, Homo sapiens
gcggagaaaaggaaccggccccggggaaagacaaggagccgggccgagaaaccgaaccagagaccagagaagaaacgcaaagccgg

SEQ ID NO: 128682 - RNA, 81 nt, Homo sapiens
cccaacagaaaagaagaagaagagggaaccccagcgccaaagaaaacgcacaaagacgcccaccgaaaaggcgagaacaag

SEQ ID NO: 128683 - RNA, 76 nt, Homo sapiens
cgacacaggggagcaggcggaggcaagggcacgacgacggagagaggaagaagacggggcggcaccacgcgacagc

SEQ ID NO: 128684 - RNA, 80 nt, Homo sapiens
accgccagacggagcacacggacaggcagcgggggcagagacggggaacagggccacccacacggacgccaacgcggggg

SEQ ID NO: 128685 - RNA, 55 nt, Homo sapiens
aaaaggcaagaaggaacggaaggcacaacaggacgggagcggaccgccaagcagg

SEQ ID NO: 128686 - RNA, 74 nt, Homo sapiens
cggagccgccacccagagcgcacggcgacgccccaggggaaaacccccgggaccaggaaaaaagccaggggcca

SEQ ID NO: 128687 - RNA, 52 nt, Homo sapiens
cgcgaggaggaaaggaggacgaggcgggcgcggacggcaggggcgccgggga

SEQ ID NO: 128688 - RNA, 65 nt, Homo sapiens
aggggaagccgaagaccagcccgcagggccagcagcagagagacagggaagaagggcaccaggag

SEQ ID NO: 128689 - RNA, 56 nt, Homo sapiens
gaggaagcacggggccacgccgggaccagacaagcaaacaacggaaaggaggggga

SEQ ID NO: 128690 - RNA, 77 nt, Homo sapiens
agggcgcgccccccaccagacggagccccgaggagcaggaaaccacccacagggaaccggggaccacacgagacaag

SEQ ID NO: 128691 - RNA, 64 nt, Homo sapiens
cacacccccaccccccagaaacacgacagaagcccccaagacaaacagacgcacgccgaaaaaa

SEQ ID NO: 128692 - RNA, 80 nt, Homo sapiens
gcagcccacggcgcaggcccacggagcgcagccgccgaggagcggagcagaggcagcacaggaggacacacaggaggacg

SEQ ID NO: 128693 - RNA, 67 nt, Homo sapiens
gcccagagcagggaacaaacccagaaggccaaagacacacgggggaagacagcaaagacgggagagg

SEQ ID NO: 128694 - RNA, 69 nt, Homo sapiens
aaaccccgacacggaaaggcaacagcgaacagagcgccgccaaggacgaaagaagacagagaagcaaag

SEQ ID NO: 128695 - RNA, 77 nt, Homo sapiens
acacagacggcaacaagaagaggaccggcacgcaccaaagagggccccacacacgagcccccacagaaagggagcga

SEQ ID NO: 128696 - RNA, 77 nt, Homo sapiens
ggagggggcgcacaaacgagagaaggagggggcagagcacggcaggcagaaggggccaacccgggggaacgcaccgg

SEQ ID NO: 128697 - RNA, 75 nt, Homo sapiens
aggcccagacgccaacgcaggagcacccaggggagcgaaggaggcccaggcgcggaggaggaaggacggccggga

SEQ ID NO: 128698 - RNA, 72 nt, Homo sapiens
aaggagccaaaggcaggagcccaggaccaaagagggcgccaaaagggaagcacccaaaccccgagcgggcgc

SEQ ID NO: 128699 - RNA, 79 nt, Homo sapiens
ccacacggcgcgccagcggcagaccagggcccacgaagacgaaaccacgaccagcacgggacggacgagacgacggaga

SEQ ID NO: 128700 - RNA, 74 nt, Homo sapiens
agcaggcgcaaacaagaccaccggagagaaaaccgcacacacaaaggggaaacaaaagcgcagaagagaagcca

SEQ ID NO: 128701 - RNA, 57 nt, Homo sapiens
acggacgcccacagaaggaagcacaaaaagggacagcggacacagagcgggacaaaa

SEQ ID NO: 128702 - RNA, 64 nt, Homo sapiens
cagaaacagagaaggaacagggccagcgcagaagcagaaaacccagagcccaagcacacgccca

SEQ ID NO: 128703 - RNA, 73 nt, Homo sapiens
agcagccgcgcgccgagaagcacccgcgacccagaaggaacagagacgcaggcaagagcgcggaggagagagc

SEQ ID NO: 128704 - RNA, 67 nt, Homo sapiens
ggaggaaggacgggagcagcgggcagccacggcgcgaggacgcgcaagacgggagacgagagcaggg

SEQ ID NO: 128705 - RNA, 52 nt, Homo sapiens
cgcccccccgccggcccaacgagggccgcaaccacccgaaagacagggcccc

SEQ ID NO: 128706 - RNA, 74 nt, Homo sapiens
cccacacgaggccacccagcccaccaaacacgccggaaaccccgcccacagcacgaggcaccggcacggaccac

SEQ ID NO: 128707 - RNA, 72 nt, Homo sapiens
ggaagaagagcgagcaaaaaaaccacgggagaagaacaacagcacaaaggaaacgaaaagagacagcagggc

SEQ ID NO: 128708 - RNA, 73 nt, Homo sapiens
gacgcagggcgcccccggccgagacgcaccagagccggaccggggacgcgaagcaggcccgggagacgaccga

SEQ ID NO: 128709 - RNA, 80 nt, Homo sapiens
acacccaaaaggcgaaaggagaacaggacgcaaacccagaaagagcacagcagggcaaggcagcaggagggagaaaccgc

SEQ ID NO: 128710 - RNA, 71 nt, Homo sapiens
aacaccacaagccgacaaggggcggaggaagggaggagacccgaccccagaagcaccgagacaaccaagca

SEQ ID NO: 128711 - RNA, 63 nt, Homo sapiens
gaaggaccaagaaccaggacaggaagggaaacgaaaaaggccaggcgacagaaaaagaaagag

SEQ ID NO: 128712 - RNA, 76 nt, Homo sapiens
acaccgcggaacaagaaaaagagccggacagaaagagacaaggaggggccgaacccccagggacggacaagggagg

SEQ ID NO: 128713 - RNA, 80 nt, Homo sapiens
gggggcgaggagacaaaaaagcccaaggcaccgcggaaccgagcagcaggagcggacggacggaagaagccagccaaggg

SEQ ID NO: 128714 - RNA, 88 nt, Homo sapiens
agacggcaaaggcggaccgacaccacgacgacgggccacagcagccggcggcggcagaggagaagagacgccaacagaccggggagaa

SEQ ID NO: 128715 - RNA, 71 nt, Homo sapiens
cggaaagaccgcgagaaaaggccagggcccacgcaaggggagaaagaacccaagggccgggcgcgggccac

SEQ ID NO: 128716 - RNA, 71 nt, Homo sapiens
ggggcacgacgacccaacagcaagcagagccccgagaggggcgcgcagaaacgggaagaaacacgacagga

SEQ ID NO: 128717 - RNA, 69 nt, Homo sapiens
ggccgccggccaccgcgcacccacgaacgcccaccccccgaacccagccgcaccgcacccgaaagagcg

SEQ ID NO: 128718 - RNA, 75 nt, Homo sapiens
agaggggccgaaaaacaagagcgagaagagaagcccagcacaggaggacgacaaacagaaacaaaggaaacaaaa

SEQ ID NO: 128719 - RNA, 85 nt, Homo sapiens
gaggggagaggcgccacgagaaacagcccgccaggcgggagaagaaccccccgaaaggaccccccagggggaggaacacgaccgg

SEQ ID NO: 128720 - RNA, 74 nt, Homo sapiens
acagcacccacacacggcgcggagaggagccgagggggccaccgcgcccgcaaaacgccgccgcggcccccagc

SEQ ID NO: 128721 - RNA, 76 nt, Homo sapiens
aggcgggggcaggcggagaaggagacaccggaggacgaagagggggaggcacagaacacaccagaggcggaccaag

SEQ ID NO: 128722 - RNA, 70 nt, Homo sapiens
aggacccgcaggccagaccccgggagcccagccaccacagacaggccccgggggcccgggaaggccaccg

SEQ ID NO: 128723 - RNA, 76 nt, Homo sapiens
gccgcccggacgagcgagaccgcaccagagggccgacaagaccggggggaccgggcggcgagacccaccgcaggac

SEQ ID NO: 128724 - RNA, 71 nt, Homo sapiens
aggggagagggcaggaaccaccgcccaaaggccgcagaaggaacggcagccacacagcccggcaacaccag

SEQ ID NO: 128725 - RNA, 70 nt, Homo sapiens
agcgacaggacgggaacgggaggccaaaggaagaccaggaaagaacagccagcagaaccaaggaagacac

SEQ ID NO: 128726 - RNA, 76 nt, Homo sapiens
caggcggcgcggacggggcgggccgggaacggcagacgcagcagagagaccaccagcgagcgcaggccgggaacca

SEQ ID NO: 128727 - RNA, 57 nt, Homo sapiens
accaaggacgagaccaaccccaaggaagcacgagggaaaaccagagaaagagaggca

SEQ ID NO: 128728 - RNA, 63 nt, Homo sapiens
agaagagaagcacaaacaagaaagggaaaaccgaaacagaggaaccaagaccaggacaaagaa

SEQ ID NO: 128729 - RNA, 76 nt, Homo sapiens
ccgggagacccaggcgggacagagggagccaggcagagggaaagacaaggagccgggccgagaaaccgaaccagag

SEQ ID NO: 128730 - RNA, 75 nt, Homo sapiens
ggggagcggcgcggaggagcggagaagacccaggaaggccgcaggaggcgccgggaaaccacccgagcaagcgaa

SEQ ID NO: 128731 - RNA, 68 nt, Homo sapiens
accgcggacagagcagacagaacagacaaggggacacgggaacaaagagcagaggccagcagccaccg

SEQ ID NO: 128732 - RNA, 60 nt, Homo sapiens
ccaggggcacccacccagcacgggcgagggccgacccgcaccggagccacccgcaggaga

SEQ ID NO: 128733 - RNA, 64 nt, Homo sapiens
gccgcaaggcgagagcgcaaagaaggagcggcaaacagcccgacgccccagagggccaaagcgg

SEQ ID NO: 128734 - RNA, 78 nt, Homo sapiens
aggagcagcgcagcgcccgaggaagccggggccgaggagaggagccaagcccaacgggacgggaaaacggccacagcc

SEQ ID NO: 128735 - RNA, 81 nt, Homo sapiens
acagaaccgcccaaaaaggcaaagaaaccacgagaacacccgcagccagaagaagcgccaacaagcgacccccgggcagcc

SEQ ID NO: 128736 - RNA, 60 nt, Homo sapiens
gcgcgagaggagcgcgcgcaggaaaacaggaaaagccaaccgggagaggacacagagcga

SEQ ID NO: 128737 - RNA, 61 nt, Homo sapiens
agcagagaaagcccgggagaaaaccaagcaaaagcacaggaccaccgaagaaaggagcaga

SEQ ID NO: 128738 - RNA, 80 nt, Homo sapiens
aagcacggaacacggggaagaaaaaacgggacggcaaagagcgagcagcggaaaaaaccaagaagaaaagacccggaaaa

SEQ ID NO: 128739 - RNA, 73 nt, Homo sapiens
gagaaccagaacaccaacagaagaggcaagaaagacacaaagacgagcgaggaaacccaaaaagcagcaaaga

SEQ ID NO: 128740 - RNA, 80 nt, Homo sapiens
cgccaagcggccccagcggccgcgaccgagcaggcgagaccacgggcacagcgcgagcgccgcgccgggaagcaggacag

SEQ ID NO: 128741 - RNA, 83 nt, Homo sapiens
acagagcagcagcagagcagccacgagagacagcaggccgagcccgagcgcgggaagaaagcgcagcccgaggaccagcagca

SEQ ID NO: 128742 - RNA, 47 nt, Homo sapiens
cggggaccgaccgcagaaaggaaggagaagcagaaaacaccacagga

SEQ ID NO: 128743 - RNA, 114 nt, Homo sapiens
caggcccggacccaaccagagaaagacaaccaaccccaccgaggaggacagagacgcaaaacagacaacccagcaacagacggaacagcgcgaggcaagaacagcaagcaaagc

SEQ ID NO: 128744 - RNA, 88 nt, Homo sapiens
ggcggcggcagcagcggcagcggcaagcaccgggagagacaccagagagggagaaggcccgccaggcggaaggcaaggaggagccccc

SEQ ID NO: 128745 - RNA, 78 nt, Homo sapiens
acagcgcccggcacggcccacaagaccagcccgcaagagaaggaagccagccaacgggccacgccggcgaaagagacg

SEQ ID NO: 128746 - RNA, 81 nt, Homo sapiens
gggagcaggggccaaggagcacggacggacccagcacgaggaggcgcgaggagaggaacagggcgagacgaacaacgcgcg

SEQ ID NO: 128747 - RNA, 82 nt, Homo sapiens
ggaccccccaggagagcgccccagggcaagccccgcccggccaacaagacccaaagacaggaccacgcaccagcagagaagg

SEQ ID NO: 128748 - RNA, 62 nt, Homo sapiens
aagaaacaaaaccaaggccaagcaacaggcgcacgcggaggagggcgacgaggacgacccag

SEQ ID NO: 128749 - RNA, 74 nt, Homo sapiens
gagagacgacacaaagccagcaaccacagagggcgagcagagagcacaaagacaggggcggaaagcagggaaaa

SEQ ID NO: 128750 - RNA, 85 nt, Homo sapiens
cgcaggccagggcggcgggaaggccggcgggacgaaaggcaaggcaacggccccagagaagaaaaagcagcacgaaggcgaggaa

SEQ ID NO: 128751 - RNA, 58 nt, Homo sapiens
cacaccggaacaaagaaaaccaaaacgcaacagaaacaacagcccccgaagaaaaaaa

SEQ ID NO: 128752 - RNA, 72 nt, Homo sapiens
gagaaacaagagggacagcgccaaaaaagaacagggaaacgacacacaagcgacagggacgagcaacgcggc

SEQ ID NO: 128753 - RNA, 77 nt, Homo sapiens
ggcggaggaggagaacacagaaccaccaggagagcaagccgcccgacaccggacggccaccgcccgagaagaccccg

SEQ ID NO: 128754 - RNA, 79 nt, Homo sapiens
aggaaacacagcagaaacaaagaagcagcgcgaaagggccaaggaagagcgcccggggccgccagaccgagacgccccc

SEQ ID NO: 128755 - RNA, 50 nt, Homo sapiens
gaccaagaaccaggacgggaggcacgaacaagaagaagaggggaaaaaac

SEQ ID NO: 128756 - RNA, 68 nt, Homo sapiens
ccaacggggaaccccagcggcggaccgacaagacggaaaccgggagggggaaaagcgagaaaaagacc

SEQ ID NO: 128757 - RNA, 79 nt, Homo sapiens
cacggcccagacaccgccacgaggcacagcacgccaagaggaaaccagccagaggcaggaagaagaagacgagacaggg

SEQ ID NO: 128758 - RNA, 65 nt, Homo sapiens
agaggaacagaaaccgaagagaaaggccaacgagaacaagcacagggccgaagcacgaggacaaa

SEQ ID NO: 128759 - RNA, 78 nt, Homo sapiens
cggaccagggaagaacgaagagccaaagaccgaccaagagcacagaggaggggaggagagcccgcgcgaagagcagcc

SEQ ID NO: 128760 - RNA, 83 nt, Homo sapiens
cggcgccggccccggggagaaacgccagggccccccacgcgagaacccgggccggggcccgggggcccgagcccccacccacc

SEQ ID NO: 128761 - RNA, 53 nt, Homo sapiens
aggagccccagcgccaccgccgaccgaagccgcaaaaaccagagaccagagcc

SEQ ID NO: 128762 - RNA, 94 nt, Homo sapiens
caagccgcagaacgcagcaaaaacccagccacgaaggcaacaggacaacgcgggcaccaccgagcaggccagcggcagaaagccgggagcagag

SEQ ID NO: 128763 - RNA, 83 nt, Homo sapiens
cacaccgcggggccgaaaacaacgacaacgagcacagaagccacagggggcagcgcggagagggacaccaaaaagccacaacg

SEQ ID NO: 128764 - RNA, 79 nt, Homo sapiens
ggcgcccgcggccagccgcaagacccgccacaagcaacgcgggaagagaaggcagaaaaaaccagcaggccaggaacac

SEQ ID NO: 128765 - RNA, 74 nt, Homo sapiens
cgaccagagaaaaggcggaagaccgccaaaaaggacacggagccaggcgcgaagcaaggaaaagaacagaacca

SEQ ID NO: 128766 - RNA, 76 nt, Homo sapiens
gaccgagagacccaggcacccagggaaacgagaggggagaagagaaagcagggaaggcaaccacagaaccagagac

SEQ ID NO: 128767 - RNA, 62 nt, Homo sapiens
gcacaccaccccaccccgcccacaagcaaggcggaaagaaggcggcacaagaaaagagacca

SEQ ID NO: 128768 - RNA, 120 nt, Homo sapiens
aagagggaagagaaaaggaacaaggcccccgcccccccgggcaggaagacaaaaacagaaaagcggaggaagagaaccaaaaaacaagaaaggcaccggaaagacaaccaaaaaaacagg

SEQ ID NO: 128769 - RNA, 76 nt, Homo sapiens
gacaagggaaagaaacggcggaaaaacagcggggagaaaacggggaaacaaaggaaacccaggccgaaaaagaaca

SEQ ID NO: 128770 - RNA, 110 nt, Homo sapiens
gggaggagccgacagcggaggggggaagaccggacccaaaccgaccaggggggcccaggaggcagaacccgagcccgcgcacaggcgcaaggcgcccgggcggaaaaaac

SEQ ID NO: 128771 - RNA, 82 nt, Homo sapiens
gcagcgcccgcacaccggcagcaaaagaggcggcgccgggaccgcccccagcccggcccccgcccgccccacccacccccgg

SEQ ID NO: 128772 - RNA, 99 nt, Homo sapiens
ccccaacacaaacaagaccacaccaggaccccagggcccggacaacagggcacccgcgagcccacgggcggagccccgggaccaacacagcgccacagc

SEQ ID NO: 128773 - RNA, 77 nt, Homo sapiens
gcggagaccaccgcggcgcggcagcgcgcccgagaacaaggacggcacacaggccacaaggcagcgaagcgggcgcc

SEQ ID NO: 128774 - RNA, 80 nt, Homo sapiens
cgcggggacagcgcggggcccggcggccgcccccgccgccggccgcgagcgacccggggcggccggcggcggaggggggc

SEQ ID NO: 128775 - RNA, 76 nt, Homo sapiens
cagggagaagaaaagaaacgcaccgggaacgaagacacagaaaaaacaccagcagcccagcaaccaaaaagaagac

SEQ ID NO: 128776 - RNA, 78 nt, Homo sapiens
gcaagagaaaagcggcaggaaaaaggacacgggccggagacgaccgggagagggagagcagggaaacggagaagccca

SEQ ID NO: 128777 - RNA, 89 nt, Homo sapiens
ccggacccggaggcccccagcccagagcccgaaaaaaggcagcggaaagaagaaaagaaacggcccacaagacccagccccacacgaag

SEQ ID NO: 128778 - RNA, 73 nt, Homo sapiens
caacccgccgcgcaccgacccgacgcgccggcccacgcgcggccaagccggaaccaaaaagaagccccagagc

SEQ ID NO: 128779 - RNA, 74 nt, Homo sapiens
ccaggaggcaggggcggccccacagaaggagagccacggggcaccaccgggacccagcagacgggaaccagaca

SEQ ID NO: 128780 - RNA, 44 nt, Homo sapiens
cccgggccgggccccaccggacgaccccaccaccacacaggcaa

SEQ ID NO: 128781 - RNA, 71 nt, Homo sapiens
gagacggagaggaggacagagaagggaaagggaaggacccgaggggccggaccggggcccgagaaaccggc

SEQ ID NO: 128782 - RNA, 69 nt, Homo sapiens
cacacacaccaccggcgggaagggggagcaacagacaagcccgaaaggaacagcagcaggaacgaaacc

SEQ ID NO: 128783 - RNA, 72 nt, Homo sapiens
caagaaaagaccaaggaaggaaacagagggggcacccgaggaggaagagggcagggcccacggaaagaaggg

SEQ ID NO: 128784 - RNA, 85 nt, Homo sapiens
gccggcaacccacacaagcgaaggcgcgcaccggaagcaccagcgaggaaggaaaacggagagcgaagagggagcacacgagacg

SEQ ID NO: 128785 - RNA, 80 nt, Homo sapiens
aagcccacaaaccggaaaaaaaagccacacagaacccagcacacagaaagcaggaagacaacgggcagaggcagaggagc

SEQ ID NO: 128786 - RNA, 66 nt, Homo sapiens
cagacagcaacaggccacagaaggagaggagaagagacgcgacccaaaaaaacgagccaggaagaa

SEQ ID NO: 128787 - RNA, 70 nt, Homo sapiens
ccgggcgccccgcaggccagcaacagaagaaagcaagcaccggggaaagcggcccgaaacaagcagaagg

SEQ ID NO: 128788 - RNA, 57 nt, Homo sapiens
agaaaacggccgcaaaagaaggaggacaaaggaaggggcggggcaggaggcggggca

SEQ ID NO: 128789 - RNA, 83 nt, Homo sapiens
gcgccgggcgggacgggggggcggcccggccccgcaggagaacgaaccgggcagcaaagacaccacagagcccgaacaaagcc

SEQ ID NO: 128790 - RNA, 75 nt, Homo sapiens
cggacgcggaggaccggacgaaggacgccaacgacgaagaagagacacagcaccaggacaaaagaagggcagcac

SEQ ID NO: 128791 - RNA, 75 nt, Homo sapiens
aaaacaaaaacggaaaagagacaggaccccacaaaggaggcaaggaggccacggggccgaagacaccaaccgggc

SEQ ID NO: 128792 - RNA, 71 nt, Homo sapiens
ggaaagaagggagccgcgacgaaaccagaggaagcacccgcgagaaagaagggcacagcgaaacagcccgg

SEQ ID NO: 128793 - RNA, 72 nt, Homo sapiens
cggagccggacacgaaacggaggaaacccgcagacaaggaaaaacccaaaaagaggggggacagcagcagca

SEQ ID NO: 128794 - RNA, 83 nt, Homo sapiens
ggcaggaagagccggcgggacagcggagacaggggggacgccccgcaagcccaagaggagggagggaaggacaccagcagaag

SEQ ID NO: 128795 - RNA, 53 nt, Homo sapiens
ggaaaaccagagaaacaagaggaggaggggggccgcaaggccaggcgcgcaga

SEQ ID NO: 128796 - RNA, 53 nt, Homo sapiens
gagcgacccaggaaggagagaggcggccgcgcgccgggccccgaagagaggcg

SEQ ID NO: 128797 - RNA, 80 nt, Homo sapiens
gacccgccccaagcgaacagagcaaggaaaggggcccgccagagcccagcggcgagcaccgcgccggagccaccaagaga

SEQ ID NO: 128798 - RNA, 71 nt, Homo sapiens
gagcggagaacgccacagccgcgcaaagagaacgcgccgcaggggcggaccagaaaccggggccccccggg

SEQ ID NO: 128799 - RNA, 76 nt, Homo sapiens
agaaagaccccaaggacacagagcacaagcccgccgagggacagagaaaaacacgacagagggaagcagcggaaag

SEQ ID NO: 128800 - RNA, 50 nt, Homo sapiens
agagaagagggccggaacagcagcgagacgacgggaccgaaggaccccgc

SEQ ID NO: 128801 - RNA, 66 nt, Homo sapiens
ggcgccagagcacagcaggccggaaaagccggcacgcggaccacccacccaaagagcaccgacacc

SEQ ID NO: 128802 - RNA, 77 nt, Homo sapiens
gaagcggcaggcgccgagggggccacggacggggccgagcacaaccacccaccggacgggaccggaccccagggaga

SEQ ID NO: 128803 - RNA, 77 nt, Homo sapiens
aagcgcaggagcagccaggcaaaggcacaccgagccccacccagaccggaaccaggacccagcagccagcgaagccc

SEQ ID NO: 128804 - RNA, 82 nt, Homo sapiens
ccggagcgcggaggaggagcccagaaggaacacccacaaaagcagaagcagaaacgcagagcccccgcagcccccaccgcca

SEQ ID NO: 128805 - RNA, 75 nt, Homo sapiens
ggaagaggaagcaaagccaaggcgggccgcccacgaacgggacccgaaaagggggagcacggcaaaaagcacgcc

SEQ ID NO: 128806 - RNA, 78 nt, Homo sapiens
cacggaacaaagaggccaacggcagcacccccagccgcagaagcagccaccagccagccaaggcccaaaaaagcggag

SEQ ID NO: 128807 - RNA, 72 nt, Homo sapiens
cgcgcccaagagcccagccgagccggccgagacaacggcaagcggagaagagcaaggccgaaccgagaggaa

SEQ ID NO: 128808 - RNA, 76 nt, Homo sapiens
ggacggccagccaaccgccggcaaccccgggcggccgcaccgccaggacaacgccgagacaagagagggcagaggg

SEQ ID NO: 128809 - RNA, 76 nt, Homo sapiens
gaacccacggaggggagagacagagaacaagggcacagagcagggagggcgcgccagaggacaccagacccaaggc

SEQ ID NO: 128810 - RNA, 82 nt, Homo sapiens
ggaaaagagggggaaaaagcagggaggagaggcaaaaagaagggcggcgacggcggcgcgaggaccgaccgggcccgcggac

SEQ ID NO: 128811 - RNA, 77 nt, Homo sapiens
cccgcaaggccgaggcgcagcgaccccaaaggcacgcccccggggcaaagggcgaaaaaacgagaaagaaagcagga

SEQ ID NO: 128812 - RNA, 75 nt, Homo sapiens
agaaagcaaaaggccaaaaaacaacggaaaccagaaaccaagaaagcagaggagcagacaaccggagcccccaca

SEQ ID NO: 128813 - RNA, 77 nt, Homo sapiens
gaaggagacgggcgcccccacagggacaggcccgacccggccccccggggagccccgagcgggaagagaaggaaacc

SEQ ID NO: 128814 - RNA, 61 nt, Homo sapiens
ccgaacaagacaggaaggaaagagggcaaccgaagaccaacaaggccacacggggccaaag

SEQ ID NO: 128815 - RNA, 78 nt, Homo sapiens
ccaaggagccccacgagagcagagaccacacgaccgccaacacagacaaccacgaagaaagccaaaaggcaaaacaca

SEQ ID NO: 128816 - RNA, 80 nt, Homo sapiens
ccggcagcgggggcagcagagcggagccaagagcgaagggccaaaagaagcaagggaaagaccaggagccagaaaccaac

SEQ ID NO: 128817 - RNA, 74 nt, Homo sapiens
caggaaaaagacagcccgcagcacgaccagcaggaacgcaaaagaggcggcaaggcagcccaggcaaagaagaa

SEQ ID NO: 128818 - RNA, 63 nt, Homo sapiens
aaacaggaacagagcgagggaggagagagggagagccaaagaagagaaggaggggaggccagc

SEQ ID NO: 128819 - RNA, 78 nt, Homo sapiens
ggccgcgaagagaccaggaagaagccgcgccaggcccagacacgcagaggagacccgaaccggcaacagcaccggagg

SEQ ID NO: 128820 - RNA, 86 nt, Homo sapiens
agcacccgaggagcccagagcagggaaccaggggcccaggcaccccgaaaccaaaaacacccggggaccaagacaccgacaacaga

SEQ ID NO: 128821 - RNA, 67 nt, Homo sapiens
caggccccgcgggaggagagaaccgcccgaccaggcccaccccgacacccaaggacaaaccagccgg

SEQ ID NO: 128822 - RNA, 83 nt, Homo sapiens
cgggacgccgagaaggaggcccagcagcccaggggaaaggaacacccccagcggccagggcggaaacggcgagcaacagaggc

SEQ ID NO: 128823 - RNA, 65 nt, Homo sapiens
ggcaggggagcgcgcggaccagaccccaggcgggaaacacaaagaagacaccagaagggccagca

SEQ ID NO: 128824 - RNA, 76 nt, Homo sapiens
gaaaggaagcgagaagaaaagccacccccacgaaggggaaaggcacccagaggacggggacgggccccaggacgag

SEQ ID NO: 128825 - RNA, 53 nt, Homo sapiens
cgggacccgccagaccggaccaggggacccgggagacacaccaaccgcggccg

SEQ ID NO: 128826 - RNA, 72 nt, Homo sapiens
acgcaagaaacccaggacgagaacagcaacagcccagccacaggcaacgaaaacaacgagccacaaggacag

SEQ ID NO: 128827 - RNA, 73 nt, Homo sapiens
aacaccaaaaacaaaacgaaccaggacggcaagccggaacgccacagcaagggaacagcacagggaggaaacc

SEQ ID NO: 128828 - RNA, 75 nt, Homo sapiens
ggcggggcccagggagaaaggcccaccggccgggagggcccagggcggggcccgaggagggggggcgagcaccca

SEQ ID NO: 128829 - RNA, 77 nt, Homo sapiens
ccaccccggcccacggccgacagacggcagacagcaccgaaggacaggccaagagaacgaagcagcccagaaggaca

SEQ ID NO: 128830 - RNA, 57 nt, Homo sapiens
gaggagggccccccacacaccaaccagagaaaccgccccacggagggcccgacacag

SEQ ID NO: 128831 - RNA, 88 nt, Homo sapiens
caagaagaaaccaagacccagccgaccccagccaggccacggggacaacaggcagcagcgcagcgcacagaggagaaaaagcaaagca

SEQ ID NO: 128832 - RNA, 82 nt, Homo sapiens
aaacggcaagaaaaaccgagagaaacacaaggaaaacgcagcagaccggagaaaagcccaaggcacacaacaaagaagaaaa

SEQ ID NO: 128833 - RNA, 71 nt, Homo sapiens
agggcgagcaaagagacaggaaagcgagacacgagagccaagaaggacaagaaggggagaagaaaagaaac

SEQ ID NO: 128834 - RNA, 66 nt, Homo sapiens
agcagccccgggcgcccccggagaagacagcacggggagcccacaggccaccacccggcagaggag

SEQ ID NO: 128835 - RNA, 78 nt, Homo sapiens
agggaaagcgacaacaaaaaccccgaacagcgaaacgcagcagagcgaagcgagaaaggggagcaagaagaaagagca

SEQ ID NO: 128836 - RNA, 57 nt, Homo sapiens
ccaacgcagcgcgaagcaacgaaaccacaagagacaggaaaaacgggaaagagcgca

SEQ ID NO: 128837 - RNA, 86 nt, Homo sapiens
gccccccccagcagaccgcacgggagaaaacaagccaaggagaacccagcccgacgggccgacggccagaaggagaaaaaagagcc

SEQ ID NO: 128838 - RNA, 79 nt, Homo sapiens
gccacgcgggggagggccggccgcagacaagcagaccggaagaccgacggaagaccacaccccgagggagcccaggaca

SEQ ID NO: 128839 - RNA, 67 nt, Homo sapiens
gcgaaccaagccgcgcggcggaaccaccccggcacaggacccagaccagccaaagagaagaagaaag

SEQ ID NO: 128840 - RNA, 72 nt, Homo sapiens
aacaagccaaggagaacccagcccgacggaaccgacaccgggaaggcaccaacgaaaaaaacaacccagcac

SEQ ID NO: 128841 - RNA, 76 nt, Homo sapiens
agcgcgagagaaagagagagcgggaaagaaagcagaggccgagacaggagaacaccaacaccagcagcagaggccc

SEQ ID NO: 128842 - RNA, 69 nt, Homo sapiens
ggagagcccaaacaccaccaccaaggaaaaaccggacaaccagccacccgcacaaacaagccgcagaaa

SEQ ID NO: 128843 - RNA, 57 nt, Homo sapiens
cccagcaggccccacgccaagcccgagagaggccgggcgcagcgggagcacccgggc

SEQ ID NO: 128844 - RNA, 32 nt, Homo sapiens
agggaggccagcggggaccaacacacgaaaaa

SEQ ID NO: 128845 - RNA, 49 nt, Homo sapiens
gaaccacgcaaacacacagaccccggggagagggcacggaaagaccaag

SEQ ID NO: 128846 - RNA, 68 nt, Homo sapiens
aacaggaacagagcgagggaggagagagggagagccaaagaagaggacaccccaaggcaccggcgggc

SEQ ID NO: 128847 - RNA, 90 nt, Homo sapiens
gcgaccgggcaccagcaggacccgaggccaggagccaggggcccagaaggacgggcaggacgagggccggacagggcccagaccccagcc

SEQ ID NO: 128848 - RNA, 69 nt, Homo sapiens
gaagaaaacggaacacgcaggcgccgcgggcggcagcaggcgaaggcagacagaaaaagcacagaaacg

SEQ ID NO: 128849 - RNA, 83 nt, Homo sapiens
gggccacgcacggggacacgggcccaggcccgagggggccggaccgggagggcaggcacccgccggcgccccccggcacaacc

SEQ ID NO: 128850 - RNA, 85 nt, Homo sapiens
gcggcgaggccgggaccgggcagggccgcgggaggcagcggcggacgccgagcaagcaacgcaaacagcagacggaagaccccac

SEQ ID NO: 128851 - RNA, 71 nt, Homo sapiens
caacccacaaacaaggaaccagcacaacgcaagaaacggagaacccagaacgccccggaacccaaaccgaa

SEQ ID NO: 128852 - RNA, 71 nt, Homo sapiens
ccagacaggcaggcaaaaacaggagaccgcggccgaccagagaacaggggaagaaccagaaaaacccaacg

SEQ ID NO: 128853 - RNA, 70 nt, Homo sapiens
gaaggcagcgcccagcagcgcaggggcgggcacaagggaagacagcgcccgggacccaacggaagaggcc

SEQ ID NO: 128854 - RNA, 88 nt, Homo sapiens
gagcagaggcacccgagcagcgccagcggccgagcgggcggcccggccgggcgcccggggcggcggagcccgggcgcgccaggcacag

SEQ ID NO: 128855 - RNA, 79 nt, Homo sapiens
aagcgccggagccgcggccggcgggccagcccgggcccccagcggcaaaggggacacggaaaacgacagaacgaagcag

SEQ ID NO: 128856 - RNA, 60 nt, Homo sapiens
caccgcagccgcgagagaggcaagccgggggaaacaggaacacgaaagaggaaaaacgca

SEQ ID NO: 128857 - RNA, 76 nt, Homo sapiens
agaggccggcggcagcagcccagagcgcaaagagcacagccgcgcgaggccccggccagccacagagcgggagagc

SEQ ID NO: 128858 - RNA, 78 nt, Homo sapiens
caggggaccccaagaagaccacagagggacccggacaaccagaggcagccagcagggggaggcgggaccccagagaca

SEQ ID NO: 128859 - RNA, 78 nt, Homo sapiens
gccccgagggcccccagagacggacagcgaaggcagagagcaggagaaacaggcgccaaacgacagagaccccaccac

SEQ ID NO: 128860 - RNA, 74 nt, Homo sapiens
ggagacaacgaggcaacgcacccggaccgggccagggcgggcgccccgccaagccgccaacaagccccgcggag

SEQ ID NO: 128861 - RNA, 77 nt, Homo sapiens
gcggcggcacagcaccagaaaaaagacacagggaccgaaggggacaacgcgacggcgggacccagggacgccccgca

SEQ ID NO: 128862 - RNA, 70 nt, Homo sapiens
gccccccgcagcgcacgcgggcggggcgagcgggaaagccgaagaaaggagggcgagagcacggagcagg

SEQ ID NO: 128863 - RNA, 65 nt, Homo sapiens
gcggacgcgccgaacaggcccagaccaagccccaccaacagaagagccccacacacagcccggac

SEQ ID NO: 128864 - RNA, 78 nt, Homo sapiens
ccacggcaccagcagacaggcaaccccggaaaaccccagaacgaaggaccggacagaccaacagcagaacccggagcc

SEQ ID NO: 128865 - RNA, 63 nt, Homo sapiens
gcgcgggaacggcgcggaagagcgaagaagcaggggagaggccgagcgaagaaccagcggcca

SEQ ID NO: 128866 - RNA, 63 nt, Homo sapiens
acgagaccaggcggcgggagaagagcgcagaagagacccgggggcagagccagccgaggaacc

SEQ ID NO: 128867 - RNA, 64 nt, Homo sapiens
gacccaaagcacaggaaccaccgaaagcggcgcaacgaggaaacgagaagaacgaaagagaaac

SEQ ID NO: 128868 - RNA, 82 nt, Homo sapiens
aagcgcaagccccagaagcccagagcacgccgaagccaccagacagcccaggagcagacaccaccaccggagcaccagccgg

SEQ ID NO: 128869 - RNA, 54 nt, Homo sapiens
gaccaagcaaaacggcaaccaaagagaggaccagccaaaggagcgcacgagacg

SEQ ID NO: 128870 - RNA, 74 nt, Homo sapiens
gagccagaaccagaacgggcggggcgccggggccagacaaggagagccacccgcacgaggcccgcgcccacgcc

SEQ ID NO: 128871 - RNA, 66 nt, Homo sapiens
gaccgcaagcagaccaaaggaccccaccgagcccaagacaaggagcgaggggcgaacccgccaagc

SEQ ID NO: 128872 - RNA, 76 nt, Homo sapiens
aggaggagaggcagacaacaacgaggaaaaccaacagcgggcagcagcaggcaagccagcacccaggccacggacc

SEQ ID NO: 128873 - RNA, 77 nt, Homo sapiens
gaaacggaacaccaagaaccccaaaagggagacaaaagaccggaggggggcgccccgccagaggagacgggacccag

SEQ ID NO: 128874 - RNA, 79 nt, Homo sapiens
accagagagcggccaacaaaagcaccaccaagacccgcccagcggcccacgaggggaggcagcggcagaaggaggcgga

SEQ ID NO: 128875 - RNA, 78 nt, Homo sapiens
cagaccgccaaaccagagaaagaaacacccgaacagcgaagagaaccccacccaagagacaaagaccaacgagccacc

SEQ ID NO: 128876 - RNA, 76 nt, Homo sapiens
acagaaggcgccaggcgggaaaccggcccagcggcgacaagaaaccacagagccgagaacagaaagggagccagac

SEQ ID NO: 128877 - RNA, 74 nt, Homo sapiens
cccaggccggaggccaggccagaaacacagggacaagcacggagggcacccaacacaccgaagggaccaagcgg

SEQ ID NO: 128878 - RNA, 79 nt, Homo sapiens
accaagccaaaacacaccagggagaaccgcagacagaaaacagccagagacgcgcacgaaacgacgaagaggcccgagg

SEQ ID NO: 128879 - RNA, 69 nt, Homo sapiens
gagccgggggcccgccgggacgaaccaccgcggacaaaccgggaagccgcccgaacacgaagaagaggg

SEQ ID NO: 128880 - RNA, 57 nt, Homo sapiens
cagaaaaaacacagacagaccaaacagagacgaaggcaaggaaaccgaagagagaag

SEQ ID NO: 128881 - RNA, 75 nt, Homo sapiens
accggcacccggacaggaggagccagggcccggcccgaaaggagagccgcgagggcacaagcccgaggaagaagc

SEQ ID NO: 128882 - RNA, 66 nt, Homo sapiens
cagggacgaaggggaacgggaaaggaacaacgggcaagaaagggaaggaggaaacaaaaaagaggg

SEQ ID NO: 128883 - RNA, 88 nt, Homo sapiens
gagaggaagacgagccgggaggaacggcccggaaacaggaggacggccggcggcagagaccacgcccagcaggagcggcgcaggccac

SEQ ID NO: 128884 - RNA, 85 nt, Homo sapiens
cgccaacagccaggaggacccggacggggacagagagcgagaagcgcaggagaggaggaaaacacagacccagaggggaacacga

SEQ ID NO: 128885 - RNA, 82 nt, Homo sapiens
gcgcgcgcggcggcggcaggcggcggaggaggaggaggggaccgccgacaccggagagagaacgaaaacaaacggaagagag

SEQ ID NO: 128886 - RNA, 73 nt, Homo sapiens
ccaccggagacacaggaacaaacgagcacgcaaggcacccacagccagcaggcaggaaaggcaccaaaccggg

SEQ ID NO: 128887 - RNA, 56 nt, Homo sapiens
ccagcccccaggcgaggagaaggaacgcacgagagagaaagggcacacagagaacc

SEQ ID NO: 128888 - RNA, 76 nt, Homo sapiens
agaccagcccgcaagagaaggaagccagccaacggaaccacgccaacggaagcagggcgcaggagagaccgcagcc

SEQ ID NO: 128889 - RNA, 85 nt, Homo sapiens
cgcagccgccggccgaccaccggaacggacagcccccccagggcggagaacggaaaagcaccaggaagcagagaggaccgcagaa

SEQ ID NO: 128890 - RNA, 92 nt, Homo sapiens
cgggacggccaacgccaagaggggagcgcccccagcgcaggcgaccggaacgcacaccaccgagggaacagagagcagacagacacacaaga

SEQ ID NO: 128891 - RNA, 74 nt, Homo sapiens
aacccccccacgccacacagggaaggcacacagcaggaccaaagaacagaaaacaccaacacacaggaccgaaa

SEQ ID NO: 128892 - RNA, 58 nt, Homo sapiens
ggccccgcacacaaggcgccggcgccgcagcgacaccaggccaagccaggaagccccc

SEQ ID NO: 128893 - RNA, 80 nt, Homo sapiens
aagaggccccagcccggaaaaggagacgggaacaaaggagaaagggcacgaagagagaggagacaacaaaaagaaacaca

SEQ ID NO: 128894 - RNA, 57 nt, Homo sapiens
caagagaagaggaaagaggggagcaaccaggagaagggcagcgagagggcagagacc

SEQ ID NO: 128895 - RNA, 86 nt, Homo sapiens
gagaaaccgagccccgacacagggagggaggccgaagcggcgggaacagcacggccaggcggggcaccacaacccagggcacacgg

SEQ ID NO: 128896 - RNA, 75 nt, Homo sapiens
ggacccgcagggcgccaaagcgagagagggaagcgcccggccccccaaaagcacgcacgaaaccggcaagccagc

SEQ ID NO: 128897 - RNA, 70 nt, Homo sapiens
aacggccaagaacaagaacaaaggccgcgacggaggaaggggaggagcacagaacgccaggaccaaaaca

SEQ ID NO: 128898 - RNA, 48 nt, Homo sapiens
gcgaaggagaggcccagaaccggaggacgagccgcacagagaaaagac

SEQ ID NO: 128899 - RNA, 69 nt, Homo sapiens
gaagagcaccgggagcggcgaagaggcaccggaggaggggaacacccacccggagaccggaccgaaggc

SEQ ID NO: 128900 - RNA, 72 nt, Homo sapiens
gacaggccgcgacggccggaaggaaaagggcaccgaaaggccggcccccaacccccacgcccgcggcaaacc

SEQ ID NO: 128901 - RNA, 80 nt, Homo sapiens
aaggacggggcgaaagccaagaaccacggcaggaggaaaggacgaccagcggacacgaacaggccgggcccaagaagcac

SEQ ID NO: 128902 - RNA, 77 nt, Homo sapiens
caagaacggggacaacaggagagaaaaaacacagaacccagaacaaggaaaggaggaggcccccaaaccaagaagaa

SEQ ID NO: 128903 - RNA, 65 nt, Homo sapiens
caaggggacgagcaaaggaagcgcgaacagcagcgcaggacaacgagccagcccgcaccacacgc

SEQ ID NO: 128904 - RNA, 60 nt, Homo sapiens
aaggagaggcggcccgggcccgggcccagcccgccgacacagccaccaagaaggcacaag

SEQ ID NO: 128905 - RNA, 80 nt, Homo sapiens
gcgagaccaacgcaacccaagggcccaaagcacaagcgaccgccgaaggagcccccgaacggcaacgccccccccccacc

SEQ ID NO: 128906 - RNA, 77 nt, Homo sapiens
cgaagcagccgggagccggagcgggcgcggacgccgaggcaccgaggcaccagaggaggcacaggaagagggcggca

SEQ ID NO: 128907 - RNA, 50 nt, Homo sapiens
agcaaacagaaaagggaggggggccaggaaaaaaaccaagccaggcccaa

SEQ ID NO: 128908 - RNA, 65 nt, Homo sapiens
gccggcgcgccccacgggccaggagggaacaccccgaagcaagaaagaacggaaaaaagaacacc

SEQ ID NO: 128909 - RNA, 76 nt, Homo sapiens
gggggcgagcagacccaggcagccgcgcaaggaaaaagaccagaaggccacccccacacaccaaaggcaaggaaag

SEQ ID NO: 128910 - RNA, 42 nt, Homo sapiens
gcagaccgaaacagaagaggcagggggccacaacaacaaacg

SEQ ID NO: 128911 - RNA, 79 nt, Homo sapiens
ccggcagagggcacccaaccagccggagcggacacggcagccgagaggggcaagaaggagagacacagcgccggaaccg

SEQ ID NO: 128912 - RNA, 59 nt, Homo sapiens
accaagcaccgcagacccaaccccaggacacacaagcagagcacaaacccaccagaagg

SEQ ID NO: 128913 - RNA, 83 nt, Homo sapiens
agaaaaccaaccagcccaggagaagcacgccagaaacagggagggcgaggaaaaaaaaaaaagagaaacgaagaccaaaaaca

SEQ ID NO: 128914 - RNA, 83 nt, Homo sapiens
cccggcggcagcaacagcgacacgagggaggcggcggcgcagcaggaacgcaacacccagaggcccagaaaggaagcgccaac

SEQ ID NO: 128915 - RNA, 62 nt, Homo sapiens
acaccggaagcgggaaagggcgcacaaaagagcacaaaagcaccaaggcgcacaacagcgac

SEQ ID NO: 128916 - RNA, 75 nt, Homo sapiens
gaaacaacgagagagccgaggagccagagcaaggggaacgccacggacgggcaaggccaagacaggggacagccg

SEQ ID NO: 128917 - RNA, 70 nt, Homo sapiens
ggaaagaagaacacacccaacgaccacccgagaccaacagagaggacgagaggcggagcagcgaagacag

SEQ ID NO: 128918 - RNA, 69 nt, Homo sapiens
aacagagcaaaaaccggaaagggagccaggaagaccggagcagacacacaaaggaccacggcagcggaa

SEQ ID NO: 128919 - RNA, 68 nt, Homo sapiens
ggagacccacgagcacacaggaaaacaggaccacaaagcaaaaggaagagaaggaaagaaaccaaccg

SEQ ID NO: 128920 - RNA, 85 nt, Homo sapiens
ccgggacggccacagacccacagaggcaccccagacacaagccagcacgagccgccgccacgccgccccaccgcgcgagcccagg

SEQ ID NO: 128921 - RNA, 81 nt, Homo sapiens
cccaagaccaggaccccagaagagaggcgaagggccccacgagcagcgcggggagacagccagagaagagacgaagcgcac

SEQ ID NO: 128922 - RNA, 83 nt, Homo sapiens
ccagcagacagccgaggggagcgcggggcccggcagaaagagccaggacaaaaccaggcagaaccaacacgaacccaagcaca

SEQ ID NO: 128923 - RNA, 83 nt, Homo sapiens
gggcggaagacaggccacccagcggggagcacggcgagcagccaggccaggagagcagagcagccagagaagaagcggccaac

SEQ ID NO: 128924 - RNA, 66 nt, Homo sapiens
ccagaaccacagccccgaggagccccaaacaaggagaaacaccaaccagggccagggacaaaaaca

SEQ ID NO: 128925 - RNA, 73 nt, Homo sapiens
ccccagccacccacgcggcccgcaggaggacaagagcaaaccgcagccaccgagcgccggggggcggcgcggc

SEQ ID NO: 128926 - RNA, 74 nt, Homo sapiens
acgccggagaggcaccggaccgaaagccccacgaagagagaagcgcggaccaaagcagaaagggagaacagaag

SEQ ID NO: 128927 - RNA, 93 nt, Homo sapiens
accagcagccgggccagggccagagcaaaggaggcgaaccgcgagcccagaaggcgagggacgaggaagcccaaggcgcgcccggaacaagag

SEQ ID NO: 128928 - RNA, 62 nt, Homo sapiens
ccggaacagcgcaaccgaaggcacggggcaggaaacagaagaggcacggaagacaagcggag

SEQ ID NO: 128929 - RNA, 75 nt, Homo sapiens
gcaggcccgccccaaggacgaacagcagagaacaaaggaccgcaaacgaagacggcagcacagcaggcacaggcg

SEQ ID NO: 128930 - RNA, 71 nt, Homo sapiens
ccggggccaaggacccaccagcccccagagcgagacacagccaacacaaccaggacaagccgaggaaagga

SEQ ID NO: 128931 - RNA, 70 nt, Homo sapiens
ccggaagggcagaggacaaaaggacacccccggcaccgaggaaaacaagcccaaggaggaaagcgaacgc

SEQ ID NO: 128932 - RNA, 74 nt, Homo sapiens
ccagacccgggacaccgagacgagaggcacagcaagccaggaaaagaaggcgagcaggagaagcaacaggacag

SEQ ID NO: 128933 - RNA, 70 nt, Homo sapiens
ggggcggacacagaaagggaaacagccaaacaggagcgaggagcaagagaacccagaacgaggagccaac

SEQ ID NO: 128934 - RNA, 64 nt, Homo sapiens
cacggagacaacgagccgcagagagccggacaaaccagacacgggagcagggaaccaagacccg

SEQ ID NO: 128935 - RNA, 78 nt, Homo sapiens
cgaaccaaccccacaacaccgccggagacagccaaggggcggggccccgagcagacagcaggaaagaagaagccccgg

SEQ ID NO: 128936 - RNA, 76 nt, Homo sapiens
cccaacgcacgcagacccgccgggcagagcaccgcgaccagaaggccaaaaaggcggaacaacaaggagaacagca

SEQ ID NO: 128937 - RNA, 78 nt, Homo sapiens
gccccccgccacaacggccgcagggccgaggagacaggagaaggaggaaagaacccagggaccaagcgaaacgcaaac

SEQ ID NO: 128938 - RNA, 81 nt, Homo sapiens
cacgggacccccaggagggacccgcaggcaagcaaagacagaagcccgggggcaaaacacgggagaaaaggaaaaagggca

SEQ ID NO: 128939 - RNA, 75 nt, Homo sapiens
gaaacacagaggaagcggagagaaggcccgagggcaggacagcaggcaccggcgaagcacagagaggcgcgaggc

SEQ ID NO: 128940 - RNA, 59 nt, Homo sapiens
cccgagagcgagaacaggagggcccgacccggccacagcccaaccgccacgcgacacgg

SEQ ID NO: 128941 - RNA, 66 nt, Homo sapiens
gacaaaaacaaagcgcgcagaaagggcgaccaccaaaaaaacggagcaccacgaagaaacgcccag

SEQ ID NO: 128942 - RNA, 84 nt, Homo sapiens
caaggggacccgggacgacgagacgacaccacaaagggaccaacgaagcggacaacaacggcggcgcccacgcgcaagaccaag

SEQ ID NO: 128943 - RNA, 77 nt, Homo sapiens
aaaaggagcaagaacagacagaaaaaccaccaagaagcccaacggacgcgcgagcaaaggcggaggcaaggcggacc

SEQ ID NO: 128944 - RNA, 78 nt, Homo sapiens
gggccgccgcggcgcagaggaagccaccaccgcccgaacgcgcggacgcgggccgcgcaggccgcacagcagcgcacc

SEQ ID NO: 128945 - RNA, 76 nt, Homo sapiens
cgggacgcggaacgggacccggggacggcacccagaggaccaggcggcgcaagccccagccaagacccaccaggca

SEQ ID NO: 128946 - RNA, 79 nt, Homo sapiens
aagaggccgccggccaccgcgcacccacgaacgcccaccccccgaacccagccgcaccgaccaggaggaggagaggagg

SEQ ID NO: 128947 - RNA, 58 nt, Homo sapiens
gaaggcaagaagaacgccccgagcccacagcccgggccccccgagcggacggaccgga

SEQ ID NO: 128948 - RNA, 80 nt, Homo sapiens
cggcggaggagacaggggggagccccgaggggaggcggaacgacagaaccgcccggggaggagcaggagcgggccgcacc

SEQ ID NO: 128949 - RNA, 59 nt, Homo sapiens
cacaaaccaacacagccaccccacgcaacaggcagcaaggacacgcacccggcaaagaa

SEQ ID NO: 128950 - RNA, 76 nt, Homo sapiens
agcggacccagccagaaccaacccacaccagaaaggacacacagcgagcggcacccccacgggaacccaaaaagac

SEQ ID NO: 128951 - RNA, 70 nt, Homo sapiens
cacgacacccgccacacccgacccgccaagaagccgcgagcaccacaggggcgggcagagccaggggcca

SEQ ID NO: 128952 - RNA, 83 nt, Homo sapiens
cgaagaaggcgagcaggggcgggagagccccgcagaagacgccgacgaggagacggaggcaagcaaaaacaagccgacaagga

SEQ ID NO: 128953 - RNA, 60 nt, Homo sapiens
acgccgagccgccagagacggcaggcccggccaaaggaaacaaccacggaacaacagaca

SEQ ID NO: 128954 - RNA, 78 nt, Homo sapiens
caacaaaaggccacaaaccaaggggcaaaaaggcagaaaagaaagggccagccaaagaagaaaaccagagcacagagc

SEQ ID NO: 128955 - RNA, 62 nt, Homo sapiens
gcaccagcacgccggcaaaagccagacagccgaaacaacaccagccgggagccgcccgcccc

SEQ ID NO: 128956 - RNA, 79 nt, Homo sapiens
cccccaacggcaggaaaaggagcaccagcagcaacagagggcggacagacccaccacgccacccaggccccaggcccac

SEQ ID NO: 128957 - RNA, 79 nt, Homo sapiens
gcgggcaagacagacaggcccggagagaaagcgcccaaccacgggcgggaccagaagggaggaggacccccagccaaac

SEQ ID NO: 128958 - RNA, 76 nt, Homo sapiens
acgaagccgaggagcgaaagccacccacaaacaaacacccacggaaccagagacaacccagaaagcggaccagaaa

SEQ ID NO: 128959 - RNA, 80 nt, Homo sapiens
ggcagaccggaagagacacgcggggccagggcgggagccgagccggcggagagagagagcaccgcgagagcagcgcagag

SEQ ID NO: 128960 - RNA, 73 nt, Homo sapiens
acaaagggggcgcggaagccccccccaccgaagcccccgcgggacaggaaaacaggaccagaaagaagagaag

SEQ ID NO: 128961 - RNA, 76 nt, Homo sapiens
aggccaaaagcgcacagacaccgcgcggaccagaaaacagggccagacgggaagaaacgagaagggaccaggggcg

SEQ ID NO: 128962 - RNA, 86 nt, Homo sapiens
aagaaaaaggaaagaggaaagagagagagcagaaaagaagaaacgggcaacaaaacccaaggagagaacccggacccagaggaaag

SEQ ID NO: 128963 - RNA, 73 nt, Homo sapiens
ggacggagccgggcgcggcgcacgccgcccgcccaggaagaccgcaggaaagcaggaaggcaagaaagccaag

SEQ ID NO: 128964 - RNA, 63 nt, Homo sapiens
ccggcagcacagcgcaaggcgccccccaggggcccagaaagaggcaacggggaagacagaaac

SEQ ID NO: 128965 - RNA, 82 nt, Homo sapiens
cgggagcgaggcccgcggagcgccgccgcgcggcgcaaggaagaagagacgccgcgcggcagacaaggcccggcaggcaaag

SEQ ID NO: 128966 - RNA, 60 nt, Homo sapiens
gcggaagggaggcacggaagagaggaagggggccccaaacccccgagacggaaaagaacc

SEQ ID NO: 128967 - RNA, 79 nt, Homo sapiens
gacgccaggaccccccgggaggggggcggagagcccccaggggaccaggcgggagaccagcccagcccagacccccagc

SEQ ID NO: 128968 - RNA, 83 nt, Homo sapiens
acgccccgcgcgcgggcccgccagacacgccgccgccgcagcagcccccgcgacgagcccccaacgagccaccaacaggaaca

SEQ ID NO: 128969 - RNA, 72 nt, Homo sapiens
agcccaggccacagacccacacgccggcggccaagggaagagcgagacaagagccaaggacagggcccgcca

SEQ ID NO: 128970 - RNA, 75 nt, Homo sapiens
caagaggcaaccccggcggcggcaacccccggaaggagaggacagccgcagacaggagccgaaagccaccacacc

SEQ ID NO: 128971 - RNA, 71 nt, Homo sapiens
gagagaaaacccgaggcaaagcgaggcgaagagccaccagccaaggacagagggcaagagagacccagcca

SEQ ID NO: 128972 - RNA, 80 nt, Homo sapiens
cggccccaaggaacaaggggaacgccgcaccggacacaagacagccagcaggagaaaaagcccggaaaccgcgcaaagaa

SEQ ID NO: 128973 - RNA, 76 nt, Homo sapiens
caacacacagaggggggcaggaagacaggaccacagggggagccccccagacccgaaaggagacaagaggacagcc

SEQ ID NO: 128974 - RNA, 71 nt, Homo sapiens
acggcccagaacaggcgagcgccgccggcaaaggaccccacccggaaggccgacagaaggacagagaagaa

SEQ ID NO: 128975 - RNA, 36 nt, Homo sapiens
ggcgccaccagcccggaggacgaaggagacgcagga

SEQ ID NO: 128976 - RNA, 77 nt, Homo sapiens
cccagaaccggaagagaaggggagaggcgacagggacaacagaacaaaggaaggggggagacagggggacagagggc

SEQ ID NO: 128977 - RNA, 81 nt, Homo sapiens
aggccccgaccggcggcgcaaaggcgcccggagggacccggggaagccaagaaccgagggaggccaccgaggcgaaggggc

SEQ ID NO: 128978 - RNA, 51 nt, Homo sapiens
aaagacaagaacaagagccgaaaagaaaagcaggcagcaggggaaccgcgc

SEQ ID NO: 128979 - RNA, 80 nt, Homo sapiens
gagaaagcgaagaaccgcaagcccacgaaagaaagccacgagcccgccgacacagccaccaagaaggcacaagcagaacg

SEQ ID NO: 128980 - RNA, 88 nt, Homo sapiens
cagcccgagcgagcgagcggcgcccagcccagcgcccggccgaaccccccgcagcaggcacgcagcacgggggcaggggccgacccag

SEQ ID NO: 128981 - RNA, 73 nt, Homo sapiens
cgcggccacacgcgacgggggagccgcggaccagaagcagcaaggcagcaaccaaaacaccaccacgcgggcg

SEQ ID NO: 128982 - RNA, 55 nt, Homo sapiens
caaaacaccagaaccaaccggcaacgagaagcgggggacagagggcacaaacaga

SEQ ID NO: 128983 - RNA, 73 nt, Homo sapiens
ccccacacagacagggggcggaccagacccaggaggaaaagacacggcaaaacaagcagacgcccggcaggca

SEQ ID NO: 128984 - RNA, 62 nt, Homo sapiens
agaggagccacacccccagaagagcaagaccaggccaggacaaacgcaggaacggaacagag

SEQ ID NO: 128985 - RNA, 75 nt, Homo sapiens
accgcaaggacagccaaagccacaacaacggcagccaaggacaaggacacggaaaagccaacaccaggagcaaag

SEQ ID NO: 128986 - RNA, 74 nt, Homo sapiens
aaacagacaaacaggcccaaagaaaaacgaggggaaagaaccaacgacccagaggggagcaggaaacaaggaca

SEQ ID NO: 128987 - RNA, 72 nt, Homo sapiens
cccggcgagcgggccggaggaaaagaaaggaaaagggaggaagcaccgaggagaggcacgcaggcaaccggg

SEQ ID NO: 128988 - RNA, 77 nt, Homo sapiens
gcgaaagagggaagcggcaaaccaaaagagcaacggcagggcaagaacccgccacacaaggcgaacagagggcagca

SEQ ID NO: 128989 - RNA, 74 nt, Homo sapiens
gaaccagaacaccgggaagaacacagaggaaccagaaaagaacgaggccaggagagggacaaacacacaggggg

SEQ ID NO: 128990 - RNA, 38 nt, Homo sapiens
acccgccggcaccggcccgcagggcaagcgagcccaac

SEQ ID NO: 128991 - RNA, 68 nt, Homo sapiens
cacgcacacccgggaggacgggaagagggggaagcaagaagcacagcacaccggacgggaaacagcca

SEQ ID NO: 128992 - RNA, 68 nt, Homo sapiens
ccgccgagcggaccccaagaggaaaggcaagggcagaaaagaggggaaaaggccagccgcacgcaggc

SEQ ID NO: 128993 - RNA, 80 nt, Homo sapiens
gcccaacaccgccaagcaacaccgccccaccgggccccgcaggaccccaccaccagcgggcgaagcccagcgggcagagc

SEQ ID NO: 128994 - RNA, 76 nt, Homo sapiens
gggaacgcaggacccaaagcccccccgcgccccaccagccgggacacgacgaaaggaagacaccaaaccaacggcc

SEQ ID NO: 128995 - RNA, 70 nt, Homo sapiens
ccgcccccagcccgcacacaaaagagggacaacacaagccacagcgcccaggcccagagacaccaagccc

SEQ ID NO: 128996 - RNA, 58 nt, Homo sapiens
gaaccagacagggcagagacagcggacgacggccacagggcgagaggacagccgacgg

SEQ ID NO: 128997 - RNA, 73 nt, Homo sapiens
agggaggagaacaaggggacagcaaccgacaagcaagggcggcagggcacaagaaacccgcccccgaagcaac

SEQ ID NO: 128998 - RNA, 79 nt, Homo sapiens
ggcgacaaagacgcaacaggagaagccaagcacgcgacgaggcggagagcaagcacgcaacagaaaagaagacggccca

SEQ ID NO: 128999 - RNA, 75 nt, Homo sapiens
caaagccgccgggagcagaaccaagggccccggggccggcgaagcccaccagccggacacccgaagcagaagcgc

SEQ ID NO: 129000 - RNA, 67 nt, Homo sapiens
gggcagcccggcggggcgggaggccgaaggaccagcgaaggagaaaccagaggcaagcgacgggaag

SEQ ID NO: 129001 - RNA, 76 nt, Homo sapiens
aggaggagccccacccgcgcagggaaggccagacacagccagaaggacccaaacccaggaaggaaacagcccccaa

SEQ ID NO: 129002 - RNA, 63 nt, Homo sapiens
acgaacaacaacagaagagggccaagaaagagccgcaggccagaaggcccagaagccggcccc

SEQ ID NO: 129003 - RNA, 87 nt, Homo sapiens
acagcgaagccacccagcgccgagggaaggcgccgcgccaggccgggcgggcgggcggagaacggaaaagcaccaggaagcagagag

SEQ ID NO: 129004 - RNA, 71 nt, Homo sapiens
aaaaaaaggagggcaaggagaaacgaaggccccaaccacggagccaggggaaccgcccaccaccaccacca

SEQ ID NO: 129005 - RNA, 68 nt, Homo sapiens
ccaacaacaacacaacgagcaggcgacccaaaagagcgaaggaaaaccagcaacaaaaccgaaacaaa

SEQ ID NO: 129006 - RNA, 89 nt, Homo sapiens
accgcaaccagacgccagcgggacgaggaccgagaccgcggccgggaccgaggaggaaggaaggggaaggaagaagaaaaagggagaag

SEQ ID NO: 129007 - RNA, 108 nt, Homo sapiens
cgccccagccccggcgcagacaggacccccgcgagccaccagaacgagacagcccccaaagggggggccccagcccggccgaacgggcgcacgacacaaacacaaccg

SEQ ID NO: 129008 - RNA, 64 nt, Homo sapiens
gaagaagagccaccgacccccgggcaacccagggggcaggacgaccagcgggaggccagaggaa

SEQ ID NO: 129009 - RNA, 79 nt, Homo sapiens
caccgcagcgggccacacaagaccagcaagaaggaagagcaagcacaacaaaaggagcagaacaaaaggagcagaggaa

SEQ ID NO: 129010 - RNA, 77 nt, Homo sapiens
gcgaaaagaaacagaaaggaaaggggcccagaggcggagggcgagaccagcagacaaggcggaagaccaccgcaggg

SEQ ID NO: 129011 - RNA, 74 nt, Homo sapiens
acagacagaacaaaacacaaaacccgagcacagaaaagaaaaggaccggagaaaagccgagaccacagcgagag

SEQ ID NO: 129012 - RNA, 61 nt, Homo sapiens
ccggccagaagaaaagcacagcgccgcggagaagcaggagagcgaaccagcagagccccca

SEQ ID NO: 129013 - RNA, 68 nt, Homo sapiens
aaccaggaaccgacacaaaagaggcgcaagaacgccaggagagggccggcggaccaagcggaggcagg

SEQ ID NO: 129014 - RNA, 69 nt, Homo sapiens
agcaaaaggaacggcggaaaaagagcccaaaagcaaagcagggcagcaaagaacacaaaggcacgggag

SEQ ID NO: 129015 - RNA, 86 nt, Homo sapiens
gcgcgacggcggcccgaagccagcgccccaccggggcaagcagaaagcaccgcagacaccgggaagagggccggagccgcaccagg

SEQ ID NO: 129016 - RNA, 61 nt, Homo sapiens
gggaccgcacccgccacaccaccaaaccggcccggcgcaggcgaaggggagcaagggagaa

SEQ ID NO: 129017 - RNA, 59 nt, Homo sapiens
cggagaagacacaaccaccacacaggcaccccagaccgcagcccgaaaggcaagcgggg

SEQ ID NO: 129018 - RNA, 71 nt, Homo sapiens
agcgaagaaccacaggggggagccgaagggaaccccgaggaagcagcgcgcggccagagaaacggcagacg

SEQ ID NO: 129019 - RNA, 58 nt, Homo sapiens
agccaaagaagaggcagacgacaagaaagacggaaggagaagagaaggaagaaacaga

SEQ ID NO: 129020 - RNA, 82 nt, Homo sapiens
ggcagacccgaaagcaaccaggaggcagaaaccagcgccggacagagaagcccccaaggagcgcagggaccaaaccacagca

SEQ ID NO: 129021 - RNA, 73 nt, Homo sapiens
aaaggacccaggacaaacaggccccccggaagcccaggaaaccagaaaggaaacgcggacaagggcaaagacc

SEQ ID NO: 129022 - RNA, 86 nt, Homo sapiens
ggaggaacccacagggggaggagcccagggcaccccggaagaggagcccagccaaggacagaaacccagcaccagcacaaaaaaaa

SEQ ID NO: 129023 - RNA, 76 nt, Homo sapiens
cacggcgacgccccaggggaaaacccccgggaccagaaaaccgagacacccccgacacaccgggaggcgccagcca

SEQ ID NO: 129024 - RNA, 36 nt, Homo sapiens
gcaagaaagggaaggccaaagcggacgccggccacc

SEQ ID NO: 129025 - RNA, 92 nt, Homo sapiens
ggaaaagcagacccaagcggagggcgacacgagaacaaaagccaacccagaggaccgcaaagggcggaaagaagaggaaagaaaaagaaaaa

SEQ ID NO: 129026 - RNA, 40 nt, Homo sapiens
gcacaagcgcacccgcacagaacggacgaagccacaggag

SEQ ID NO: 129027 - RNA, 73 nt, Homo sapiens
ggaggagcacagaacgccaggaccaaaacagggagaaacacagccagaagacaggacccagaccagccaaaga

SEQ ID NO: 129028 - RNA, 79 nt, Homo sapiens
agggagcagaggaacgacaagaaacgcggaaaaccacagaccagacgaaaaggggcaaccaagagagcagaccagcgag

SEQ ID NO: 129029 - RNA, 72 nt, Homo sapiens
caagaaaaagcaaggagaggaggagcacaacggagacaaaggccggacaaacccccccgggcgcaaaaagag

SEQ ID NO: 129030 - RNA, 82 nt, Homo sapiens
cccagccgaaaaggcacagaaccggaggccagaaaaggaaacgaccccggccgagcgaggagagagaagaagaaggaggccg

SEQ ID NO: 129031 - RNA, 71 nt, Homo sapiens
gcaccagcacccgcagcccggaaccacgcaccagacaacacaggacgagcaagaagacaaacaagggaagg

SEQ ID NO: 129032 - RNA, 70 nt, Homo sapiens
gcccaaaaccggaagcagaacaaagggcaaaggacacaccgcacaaacggccgcgcaccacacaacacca

SEQ ID NO: 129033 - RNA, 71 nt, Homo sapiens
gagcggcagcaacacaaggagccgagggacacacgaagagaagagcccggaaaaggagaagaaaaaagaca

SEQ ID NO: 129034 - RNA, 106 nt, Homo sapiens
agggagggcggaaagggggggaaggaccaaagagaaagggaaagacaaaagagagaaccagaagcaagcggaaaacaagcgcaacagggaggacaagagaagaaga

SEQ ID NO: 129035 - RNA, 73 nt, Homo sapiens
ccgggcggaaccgcccagcacagagcaggggagcagcaagccgggaaacagcgcgcccagaaagccgaaccca

SEQ ID NO: 129036 - RNA, 74 nt, Homo sapiens
gcccgcagggggcaccggccagggcaaggcgcaacgggggccgaccccaaagccaagcggacagcaagggcagg

SEQ ID NO: 129037 - RNA, 79 nt, Homo sapiens
ccccggccaggaacacagacgggggcgagcggacccgcagccccaaagagaaggccccaggcaaggcacgcacgaccga

SEQ ID NO: 129038 - RNA, 70 nt, Homo sapiens
ccagccaggaaaccggcacaccaaggagacggcaaagacagcgcaagcccgggaagacaagaaacaacgg

SEQ ID NO: 129039 - RNA, 53 nt, Homo sapiens
gacacaccaagaagagcccaagcgccaagacgggacgccccgagggaacaaaa

SEQ ID NO: 129040 - RNA, 52 nt, Homo sapiens
cgagacccggaggaggcgaagcgagaggacaggacggcaaagccgcaccggg

SEQ ID NO: 129041 - RNA, 80 nt, Homo sapiens
ccaggcggcgcggacggggcggaacggccgagcgaccaggagaggagcccccgcccgaagaccggggagggccccccagc

SEQ ID NO: 129042 - RNA, 75 nt, Homo sapiens
gaacagggcccagagaccagagcagcacaagggcccccccgacggagccccgggaacccccgaagaaccgagcga

SEQ ID NO: 129043 - RNA, 76 nt, Homo sapiens
cccgacgcaaaccaaggacggggaccgcacacccaaggcagccaacagccgaccgagcacgagccaccgagaaccg

SEQ ID NO: 129044 - RNA, 76 nt, Homo sapiens
caaacggggggcgcggagggaccagcgagcgggacccaaagacaggaccacgcaccagcagagaaggaaagcaaac

SEQ ID NO: 129045 - RNA, 56 nt, Homo sapiens
gccaaaggaaacgccacacccgcgcagagccgaccggggaggcccgccccaccaca

SEQ ID NO: 129046 - RNA, 39 nt, Homo sapiens
agccgagccgccacccggccaagggaacagaccccggca

SEQ ID NO: 129047 - RNA, 86 nt, Homo sapiens
ccagccggccgcccacccacaccagcggacggcgagggccccccgccggcccccacggccccaggagaaagcgcgggcgaccggcc

SEQ ID NO: 129048 - RNA, 71 nt, Homo sapiens
accggcgggccagcaggcaggccgaaccagggggagccaccccgcgggaccacaaaccagcgccgacggag

SEQ ID NO: 129049 - RNA, 80 nt, Homo sapiens
cgaggagggagaggacacggcccacccgggaaaccccccggagccccaaagccaggacagcccagccggagccaacagcc

SEQ ID NO: 129050 - RNA, 57 nt, Homo sapiens
gcacaggaacccgaggccggagggacagagcagaagggcgaaagaccgggccgcaga

SEQ ID NO: 129051 - RNA, 52 nt, Homo sapiens
cagggcgcccccgggggcccacgagaagagcaggcgacgggggagagggaga

SEQ ID NO: 129052 - RNA, 47 nt, Homo sapiens
caggaaaggagcagcaccaggaggcagcagacgacaggacggcagag

SEQ ID NO: 129053 - RNA, 75 nt, Homo sapiens
cacggggccacagcaaggccagcgggccgaacacagcacaaggcaggaggccggagacgaacagaaaagacgaac

SEQ ID NO: 129054 - RNA, 62 nt, Homo sapiens
ccagcgggacgaggaccgagaccgcggccgggaccgagggacgcgcagacaagacaaaacgc

SEQ ID NO: 129055 - RNA, 76 nt, Homo sapiens
caaggcggcgcgggagcccggcgcggcaagggccccagcccccgcagaaacccgcaaagaagcgagccagcaaaga

SEQ ID NO: 129056 - RNA, 77 nt, Homo sapiens
aacacaggcgaaaagcagacgaccaaacaggcacgagaaagagccgaagacacaaagcgcaagaggcagcagaccgg

SEQ ID NO: 129057 - RNA, 92 nt, Homo sapiens
acaggaggaagcccaacggaaggcaaacccgaaaccaacacggcgcagcagcaggaaaacccagagccacaggagagaaaaaaagggagcca

SEQ ID NO: 129058 - RNA, 85 nt, Homo sapiens
cccagagggagcaagagcagagcgacggcggggccccgggccgcaccccccaccgcaacccgccgggaagcagccgccaaaaacc

SEQ ID NO: 129059 - RNA, 77 nt, Homo sapiens
caaggccaagcaaggaaaccaaggagaccagagcagccacgacgagaaagaaaagggccaacaacgccggaacaaac

SEQ ID NO: 129060 - RNA, 81 nt, Homo sapiens
gagcgcggcagaagggcacgaagaaggccagcgggccaggaagcgcaccaggagggcgaaaaaacgagaaagaaagcagga

SEQ ID NO: 129061 - RNA, 48 nt, Homo sapiens
cggaagaagggccgcgaaccccaggaaccagaggcccccgccggcccc

SEQ ID NO: 129062 - RNA, 71 nt, Homo sapiens
gggcgcagcggggacgcggacgcacggcgaccccgcacacacacccaccagccacggcagcccagcgggga

SEQ ID NO: 129063 - RNA, 65 nt, Homo sapiens
gcccgccgacccgaaggaaacacaagcaagcagcagacggacccaacaacccagcagccagggaa

SEQ ID NO: 129064 - RNA, 60 nt, Homo sapiens
gccaagaggagcagagcacaacaagggcggagaacggaaaagcaccaggaagcagagagg

SEQ ID NO: 129065 - RNA, 84 nt, Homo sapiens
gagcggggcggcggacaccgggagccggacggccggagaggaggcaggagcgcccaggacaacgggcggagaaggaagcaacca

SEQ ID NO: 129066 - RNA, 79 nt, Homo sapiens
cccagcacgggaggccgagaaggaaaccaagggagagagcaaaaacagacgagccgaagccaaacagagcaaacaggac

SEQ ID NO: 129067 - RNA, 52 nt, Homo sapiens
gccgggccagggccgcggcgccagccggaggaccccagcagacaggcgaagg

SEQ ID NO: 129068 - RNA, 80 nt, Homo sapiens
ccaagagaaaaccccgcccgcagcgacacaccaagcggaggggacgccacgcaacgccggcagacgcagccgccggaggg

SEQ ID NO: 129069 - RNA, 79 nt, Homo sapiens
gcgccccacccccggcggcggcacgagcccgaccaggaggcaaaagcagaccggaaaacccaccggcaagaccacaccc

SEQ ID NO: 129070 - RNA, 70 nt, Homo sapiens
ccggcgccggccgagaaggcagaggcgcaaacgaaaccggcagcagccggaggggaaggggaaaacacga

SEQ ID NO: 129071 - RNA, 72 nt, Homo sapiens
ccaccaaaccagcaaggcaggacaacacaggggggggggggagcagggcaagagggcgcgcagcagcagcac

SEQ ID NO: 129072 - RNA, 72 nt, Homo sapiens
acaacagacgcccaacgagggcaagaccagagagccgcggggaaaggagggcaagcaagaaaaacccaacac

SEQ ID NO: 129073 - RNA, 80 nt, Homo sapiens
ggaggcagaggcacagcgcagaaaggagccaagcaaacaccagaaccagcacacccaccacccgacacaaacaacagaaa

SEQ ID NO: 129074 - RNA, 59 nt, Homo sapiens
cggacacccgcggaaccggaggaggggagcggggaagcagaagaaggaagcaagagaag

SEQ ID NO: 129075 - RNA, 47 nt, Homo sapiens
ccagaaaagggacaggacagaggaagggccagaaacagagaggcaga

SEQ ID NO: 129076 - RNA, 73 nt, Homo sapiens
cggaggcggcggagcgcgagagccgagcggaccagggaccaggcagacgaccaaggagcaggcggggcaggcc

SEQ ID NO: 129077 - RNA, 75 nt, Homo sapiens
cgccccgccccggggaacccgcagaggacagaagaggccaccaaacccgagggcaagaaaagagcagagccgaga

SEQ ID NO: 129078 - RNA, 76 nt, Homo sapiens
aaggaaagggggcacgaccgagacagcaagaagaacccagaccgaaaccgagcagcaaaacagcagcagaaccaca

SEQ ID NO: 129079 - RNA, 68 nt, Homo sapiens
agacgcgacacgggaaaggcccggggcagaaacagcagacaagacaacaggccgacagagacagcgac

SEQ ID NO: 129080 - RNA, 105 nt, Homo sapiens
cgaaggagccgacgagaaaaacaaggagcggacacgagccgagggaggggaaaggcgcaggaagacgaccccgacgcaggccaggagccgcggacagaagccgag

SEQ ID NO: 129081 - RNA, 80 nt, Homo sapiens
cagcaaagcaacggagagaaacgaagacgcaaagggacaggaggagaacggccgagcgaccaggagaggagcccccgccc

SEQ ID NO: 129082 - RNA, 60 nt, Homo sapiens
ccaggaacgcggaacagaaccaaaggcaggacagccagcaggggcaagcgggccccaagg

SEQ ID NO: 129083 - RNA, 84 nt, Homo sapiens
cgccgccgccgcgagcgccccggacagcccagagcaagcacacggaggcccgggagccagaccgggagcccgccccagccaggc

SEQ ID NO: 129084 - RNA, 105 nt, Homo sapiens
gaggacagaggccagaccccaggcccgaacgcggacggcacgcagacgccagaccaagacacccaggagaaagacagcggggaaaagaaaaaggagggggcaaaa

SEQ ID NO: 129085 - RNA, 74 nt, Homo sapiens
ggaaggacccggaagccacaaagcaaaacggcacgggagagagaaggagacgccgagagcagaaacccggacga

SEQ ID NO: 129086 - RNA, 61 nt, Homo sapiens
cgacagcagggaagccaccagcgccgcgacagaggagcagcaagccaccggggaccgcaag

SEQ ID NO: 129087 - RNA, 81 nt, Homo sapiens
gcaaccccccaggacgggcggaggcggggggaccggcgggcggaaaacccgcagaggaaagagcgaaaacggcaagagaga

SEQ ID NO: 129088 - RNA, 76 nt, Homo sapiens
gcgggaccccccgccggaccccacagcaacaaggccggcccggccacccccgggcccgcgccccaggcgagagccc

SEQ ID NO: 129089 - RNA, 70 nt, Homo sapiens
gagcaaccgaaagggccagcggccgaccccaccaacaacgaacgcggcaggcgcacaaggaaggaagggg

SEQ ID NO: 129090 - RNA, 79 nt, Homo sapiens
agcgggcacaggagaagcggagggagaaggcccccagccaggcccgcccgcccgggcccagacggccagagcccccaac

SEQ ID NO: 129091 - RNA, 70 nt, Homo sapiens
ccgggccagcaagggcgggcaacccggcggaacggaagcaggaaaaaagaacaagaacgcaaggacaaca

SEQ ID NO: 129092 - RNA, 74 nt, Homo sapiens
cggacaccaagcgccacccagaagaaggaagacccccgcgggcgggacaacacaagggaaccaaggagggcgcc

SEQ ID NO: 129093 - RNA, 56 nt, Homo sapiens
gacggccggaaaaacgaacagacgcacaccacaggagaaggcagagcccccccagg

SEQ ID NO: 129094 - RNA, 68 nt, Homo sapiens
gaaaggcagcaggcggaggccacagagacaccagccccagccgaaaagcaagaacaccgggagccgaa

SEQ ID NO: 129095 - RNA, 65 nt, Homo sapiens
aagcggaagaagggagccaacaaaaagcaccggacggcaagcacaacccagccagcaggcaacag

SEQ ID NO: 129096 - RNA, 70 nt, Homo sapiens
ggggacgcggacgcacgggcaacgacagaggaagaaccaagacgcccaaccaagaaaacagcagccacag

SEQ ID NO: 129097 - RNA, 70 nt, Homo sapiens
accaagaaccagggcagagccagaaggagagccaagcgccagagaacaggaggaggcaggcgcgggaagc

SEQ ID NO: 129098 - RNA, 63 nt, Homo sapiens
ccacgggagccaggccgcagaggcgcacaggggcaaacaggaggcacaacagcaagaaagcag

SEQ ID NO: 129099 - RNA, 69 nt, Homo sapiens
agccagagcgaggacgccggcaggaggcgcagcccccaagacgggcccccccacggcaaggaggcgggg

SEQ ID NO: 129100 - RNA, 85 nt, Homo sapiens
acgagagaaaaaggaaacccaagagcacgaggacagaaagaacccgagaaaggcacacccagaagccacaggagaagcaagaggc

SEQ ID NO: 129101 - RNA, 82 nt, Homo sapiens
ggacgaggagcacgaagcccagggacaacccgccacaacgacaaaggaccccaaagaccccggaaggcggaccaggcacaag

SEQ ID NO: 129102 - RNA, 70 nt, Homo sapiens
gaggacacgagccagggaggaaggcgcaggagcccggccaccacacccagcggggggcggagcgagggaa

SEQ ID NO: 129103 - RNA, 52 nt, Homo sapiens
ccgagaccgagaagcccagacaacgaagagaggaaagaagcggaaaggaggg

SEQ ID NO: 129104 - RNA, 72 nt, Homo sapiens
cagcaacgcaacccacagccgccccaagaaacgcacgggaggagaaaaaagccgccacacccagacaaaacc

SEQ ID NO: 129105 - RNA, 79 nt, Homo sapiens
cccggccgcggcgggacccgaggccaaagccacccccaaaggcagaggaagaacgagcagggaaccaagacaaaagcga

SEQ ID NO: 129106 - RNA, 51 nt, Homo sapiens
gcccaggcggacagaggacgaagcagaaggccaggcaaaagggcagaggcg

SEQ ID NO: 129107 - RNA, 70 nt, Homo sapiens
gccggggcagaacaagaacacgggggcagaagcccacaggacaaaaacacaaaaggccaccccagccaac

SEQ ID NO: 129108 - RNA, 71 nt, Homo sapiens
ggcagaggaaaccaagaacgaaaagccaagaacaagcacaaggaaacgaccagaggaacgaaggagagcgg

SEQ ID NO: 129109 - RNA, 79 nt, Homo sapiens
aggaaacagcaagcgaagccgaaaaagcgcccgagacgggcccgccgaaagccggaaagcacaagaaacagagagcagg

SEQ ID NO: 129110 - RNA, 68 nt, Homo sapiens
gggcacggcgagaagaacagccaccgggagcccccaggacaggcacacccgggaaaaccgaacaccca

SEQ ID NO: 129111 - RNA, 84 nt, Homo sapiens
ggcggcggcgcgcggacccaggcgcggaggcgaggccagcagggaggccaacagacccaacccagaaggcaccaaacggagggg

SEQ ID NO: 129112 - RNA, 71 nt, Homo sapiens
gagagcagcgaaaaggacaaacacggcggcgaaagagaagggaaggagaaaagcagcgagagcacaggcag

SEQ ID NO: 129113 - RNA, 79 nt, Homo sapiens
cgccgccagcaccgcccagcaccaaaccgggacacgagggcggaagaggcaggaacgaagagaaagggccagaaggaag

SEQ ID NO: 129114 - RNA, 65 nt, Homo sapiens
aacagcagcacagacagacaagaggcagccaggcagaccacaggaaacgaaaagagacagcaggg

SEQ ID NO: 129115 - RNA, 41 nt, Homo sapiens
agggcaccgagcgagccggacaggcggaggcaaggcgagac

SEQ ID NO: 129116 - RNA, 70 nt, Homo sapiens
agcagaggccagaagaggaaagagagaaggagaaggggaagacagaaggaaaaagccgaaaaaagcaaag

SEQ ID NO: 129117 - RNA, 84 nt, Homo sapiens
gggcccgcgccggcaggccggcccggggcgagccccagagagaaccgagccaccgcaacggaggcgaaccggcaggagaaagga

SEQ ID NO: 129118 - RNA, 76 nt, Homo sapiens
gcccaccaaggaccgcgccaacgagacccccgagccccgacaagggaccggcccccagcccggccccaggccggaa

SEQ ID NO: 129119 - RNA, 79 nt, Homo sapiens
cgagacaaggcgcagccccagggaaagcaccacaagaaaaccgccggccacccggacgcaccgccgcagcacacggggc

SEQ ID NO: 129120 - RNA, 71 nt, Homo sapiens
acacgcggaaaaacccaacagccaaggacagaggaccaaagcggaccagagacagcagcacaagaaggacc

SEQ ID NO: 129121 - RNA, 80 nt, Homo sapiens
caaccccaaaagagccaaaccagccgcccggccggcgaagacagcacaggacagaacaccagaaacaacagcgaagaaga

SEQ ID NO: 129122 - RNA, 66 nt, Homo sapiens
ggagacagccacaaaaaaggacgacagcaccagcaagacagggcgcagggcaaccgcagggacgaa

SEQ ID NO: 129123 - RNA, 82 nt, Homo sapiens
cagaagagggccggaccaagagcggaacgccagccccggcacgcacccgacccaaagcagaccaccgcccacgaagcccgac

SEQ ID NO: 129124 - RNA, 71 nt, Homo sapiens
aggcgcaacaaaaggccacaaaccaaggggcaaaaaggcagaaagaaagaccacagcaagaccacgccccc

SEQ ID NO: 129125 - RNA, 90 nt, Homo sapiens
cacaccggagacggggggaaacaggcgaggcggcggcgcccggagggcagcgagcaacggggcggcacacaaggagcgaagggcagggag

SEQ ID NO: 129126 - RNA, 77 nt, Homo sapiens
gggcgggcaacacaacaacagaaacagcaccgcacccaccgccaacgcggggaaggcgagaagagaaggaagccaaa

SEQ ID NO: 129127 - RNA, 77 nt, Homo sapiens
aaaaaaacagacgcgacaagaggaacagaaaccaggacggaggcacaagcccacaagcgcagcaagcccgggaaagg

SEQ ID NO: 129128 - RNA, 71 nt, Homo sapiens
cccagggccggcccccccaggacaacccagaggcaacaaaggcgaggcgaaaccgggagaccgaggaaccc

SEQ ID NO: 129129 - RNA, 71 nt, Homo sapiens
aggagaccaaaagaggaccggacagaaagccaaaaaggagaaaggccgaaaaggaaaaccaagaagggagg

SEQ ID NO: 129130 - RNA, 79 nt, Homo sapiens
cggggccaggcccagggggcaagaccaaccagccggcacaccaggaaacgaaggaggcccaaccacaaaaggagccgac

SEQ ID NO: 129131 - RNA, 74 nt, Homo sapiens
gcagcaaacagccagaagaaccgaaacaggacaagaaacaaaggcgcaggcccgggaagcaagccacggggcag

SEQ ID NO: 129132 - RNA, 77 nt, Homo sapiens
acggcccccgagccgcccaagcccgggccagggccaccccggcgagagaaagacaagagcaccacagcaaaacccaa

SEQ ID NO: 129133 - RNA, 70 nt, Homo sapiens
acaccgccccgccgagacaccgcccgcccgagaacaccaggagacacaaggagaagaagcaggcacagac

SEQ ID NO: 129134 - RNA, 77 nt, Homo sapiens
ggacgcaggccggagagacgcacagcaagagcaggacaccggaagcgggaaagggacaaaccggcgaccacacacgg

SEQ ID NO: 129135 - RNA, 75 nt, Homo sapiens
gcagaagccagggaaggcggcccagcagcgagacacagaacggcacaggggcaggacgaaagacgagggcgccgg

SEQ ID NO: 129136 - RNA, 86 nt, Homo sapiens
ccccggcccccccacccgcgggccgcggcgcccggggaaagccgggccccgagggcggaccgaggcccaggagaaaaaggaagaag

SEQ ID NO: 129137 - RNA, 78 nt, Homo sapiens
aaacgaaaccgaaagggggaaagaaacccagccagaaagcaacaggaccagccgcggagaaccgaaccaacagccagc

SEQ ID NO: 129138 - RNA, 76 nt, Homo sapiens
cagagcagagacgagcgaggcggagggagaagccaggacacggccaaggccggcgagaacgcccgcggcagcgagg

SEQ ID NO: 129139 - RNA, 83 nt, Homo sapiens
ccggaggaggacggcgcaaccgcgcccgccggcccccccccgcgcccgcgaccgccgcggcgaagagaacgaaaacaaacgga

SEQ ID NO: 129140 - RNA, 78 nt, Homo sapiens
ggggaccgaccgcaacagaacggacccggagcacggccgggacgggaaagagcaagggaaaaagaagggagcggccga

SEQ ID NO: 129141 - RNA, 85 nt, Homo sapiens
cgggcggcgccgagaaggagggaggggaaacacaaagccggcacgcgcgcgaggaaaccacacggagaccaggaccaccccagaa

SEQ ID NO: 129142 - RNA, 76 nt, Homo sapiens
ccggcagagggcagaggggcacaccccaggaaggaagacccccagaaacagcccaggcacgggagacgcaaccacc

SEQ ID NO: 129143 - RNA, 71 nt, Homo sapiens
aagccccggccgggccggccagcgccggaaaccaacaaggcaccaggcgcaccggacccacaaggacaaaa

SEQ ID NO: 129144 - RNA, 73 nt, Homo sapiens
cgccaggcgcaaagaaccagcagacacaagaagcagaaaggagacagggaagggcggagaacggaaaagcacc

SEQ ID NO: 129145 - RNA, 90 nt, Homo sapiens
aggacaagaagccggacacaaggcgccacggcagcgaccccaagaagaagcggaagaggagccgcggaaccaagacacaaggaacagaag

SEQ ID NO: 129146 - RNA, 83 nt, Homo sapiens
caagaacgcggcggagcacaggaggaacgcaggagcaagggcgcgggacagaacagcagggccggcacgaggggaagaggaga

SEQ ID NO: 129147 - RNA, 82 nt, Homo sapiens
gcagggcaccgcgcgaagcggccaaagccgcccagacggccaccggcgggaggaacaaaagcacccgagggacccgaggagc

SEQ ID NO: 129148 - RNA, 69 nt, Homo sapiens
agacggccacacacggggacacgcgggggcggcacccggcaaaggaaggggcggggaggagagagaccc

SEQ ID NO: 129149 - RNA, 53 nt, Homo sapiens
gcgggcgcacaccacgccgccggacagggacggcggcgggcacccaccccgag

SEQ ID NO: 129150 - RNA, 64 nt, Homo sapiens
cgccgccaacgcgcagggcagcggcccccgcccgcagggacggcgcacacgggccgccggcccc

SEQ ID NO: 129151 - RNA, 74 nt, Homo sapiens
cgacaccgcagacaacccacggcaagacaaacccgaggcgagaaccaagacaacaggcgaagaagggaaacgag

SEQ ID NO: 129152 - RNA, 123 nt, Homo sapiens
cgacccaaggccgcggccccgccgcccacccggacgccgacgaaagccagcgagccccagcccagcccagccaacaggcaaggccccggggcaccagccgagggacaacgggcgccggaggag

SEQ ID NO: 129153 - RNA, 70 nt, Homo sapiens
gcgaccaaacaggcacggcacgcggacgcccgggcaacacccccgggaacgagagagccccccgcaagag

SEQ ID NO: 129154 - RNA, 79 nt, Homo sapiens
gacgggaccacgaggcaacgccccaggacgcggcagagcgcaagccgacacgaggcgggccacagccacgagcagagag

SEQ ID NO: 129155 - RNA, 75 nt, Homo sapiens
gcgcgcggaacccgcggggaggccccaaccaggggcgagccgcgcgggagaagccaggacacggcaaagagaccc

SEQ ID NO: 129156 - RNA, 70 nt, Homo sapiens
aaacccagggagagaggcaagacaagcgacgccgccgagaaacaaggagaaaaccggaagagaaaggccg

SEQ ID NO: 129157 - RNA, 79 nt, Homo sapiens
aggagggcagacaaaggaggcaaaagggaaaaaacaggagcacaggccgaaacagacagcagcggcaaccgagaaggag

SEQ ID NO: 129158 - RNA, 84 nt, Homo sapiens
agagaaagaaacacccgaacagcgaggccagacaacagaagacacccaggagcagagcaaacaagcaaccagagacagccgccg

SEQ ID NO: 129159 - RNA, 67 nt, Homo sapiens
acagccaggcccacgggaaaaggagcaaagaagaacgaggcagcacaacaaaaacaaagaaaacgaa

SEQ ID NO: 129160 - RNA, 82 nt, Homo sapiens
aggaaaacaaccaaaagggacaaagcagcaaacagaaacacagcacagcaggacaaaaaagaacagcaaaacagagcaagac

SEQ ID NO: 129161 - RNA, 47 nt, Homo sapiens
agagcggaggacagccgagaggagacccagccgagcccaaccgggcg

SEQ ID NO: 129162 - RNA, 75 nt, Homo sapiens
cgcgccgccgaccccccggcgccgcgccggcggcggccgcagccaagccggaacaggagcggcgagcccaaacgc

SEQ ID NO: 129163 - RNA, 52 nt, Homo sapiens
aaagggggaacagacgaaagggagggaagagacgaagggaaaacgagagggg

SEQ ID NO: 129164 - RNA, 82 nt, Homo sapiens
aaaacgagaccaagagaaggcagccgagcaccgagccagcccaggaaaaggagaggagcaggaggagaagaaaccccaagac

SEQ ID NO: 129165 - RNA, 83 nt, Homo sapiens
aacagcggaggacgaagagcgggacccgagcccgagcaccagccgcgaaacgcaccagcgccagcccaggccagcagacgagc

SEQ ID NO: 129166 - RNA, 77 nt, Homo sapiens
gagccgaaaaccaggaaagaagccaacagacaaaaaaaggcgcaaaggaaaacaaggacccaacaggcgcccagaac

SEQ ID NO: 129167 - RNA, 79 nt, Homo sapiens
caaaggaagccagaggaaaagggaacccgacacagcaaagaggccccagggcagacagcaggaggaggagcgcgaagaa

SEQ ID NO: 129168 - RNA, 72 nt, Homo sapiens
acccggggaaccagcaaacaagggcgaaaaaacgagaaagaaagcaggagaccaagaaggaaaaaggcaacc

SEQ ID NO: 129169 - RNA, 34 nt, Homo sapiens
cagaggcagccggagagcagacagggcgcccgcc

SEQ ID NO: 129170 - RNA, 85 nt, Homo sapiens
cggccgacgcggcccgccggccccagggcccccggccgcgccccaccacacgccggcgaccccgcacacacacccaccagccacg

SEQ ID NO: 129171 - RNA, 53 nt, Homo sapiens
cagaacagacaacaaagaaacaccacccacagaacggccgagcgaccaggaga

SEQ ID NO: 129172 - RNA, 74 nt, Homo sapiens
ggaccagaagcaaacacaacccaacaccggcaacgacggagcggagaaccacagagccggaggagccaccaaca

SEQ ID NO: 129173 - RNA, 67 nt, Homo sapiens
cggcaccggccagcccagcccccgccgcgggacaagagaaaaaaagggcgggcgaacaaaaagagca

SEQ ID NO: 129174 - RNA, 78 nt, Homo sapiens
accagagggcaagaaggcacagaaaggaagaccagcagaaggaaagaacccggaaaccacaaggccagcaccgccggg

SEQ ID NO: 129175 - RNA, 78 nt, Homo sapiens
gaccggcagaccgccgggggacggaggcccagaaacggagcacggaagcccgcacgcaggcccgccaaacccagccgc

SEQ ID NO: 129176 - RNA, 73 nt, Homo sapiens
cacaggccaaaggagcggaagcagccaggggaagacaacgaggggcacgcgcccacccaggcgcagacgaccg

SEQ ID NO: 129177 - RNA, 57 nt, Homo sapiens
ccacagcacaccaagcagccaggcagggcccagcgcccaaccccgccggacagcaca

SEQ ID NO: 129178 - RNA, 80 nt, Homo sapiens
gggcagggacagagcggaggaccacagaaggccggaggcaggacgagcccgacgccgccgcaggaagagggaagcggagg

SEQ ID NO: 129179 - RNA, 83 nt, Homo sapiens
cagcggcagaggggcggagcggcgacagaccccaaaacacgagacgcgcagaacgcggagggaaacaaagcccagagagaaag

SEQ ID NO: 129180 - RNA, 81 nt, Homo sapiens
agcgaaggaaagcggaacgacgacaccgagcagcaacagaagccaggcaaggaacgcggagaaacaaaaggcaggaaaggc

SEQ ID NO: 129181 - RNA, 60 nt, Homo sapiens
ccgagacaaagaacaaggaccccaggcgggcggagcccacaggacccagaagccaagaac

SEQ ID NO: 129182 - RNA, 81 nt, Homo sapiens
gcaccgcggagacccgccagccgccggccgcgcgacaaccaaagggaaagaccagcagaagaacagaagaagaagaaaaca

SEQ ID NO: 129183 - RNA, 39 nt, Homo sapiens
cggggccgggcgacaggagcagagaacgggccagcgggg

SEQ ID NO: 129184 - RNA, 86 nt, Homo sapiens
ccaggccagacccgaaggccaggagacccgaccccaagcccggagcagaaggaggcacgggagcgccacacgcccgagggccaccc

SEQ ID NO: 129185 - RNA, 59 nt, Homo sapiens
ccacgaccggacccacagaacaaccggagccaggcggaggcagggacacacgcggcagg

SEQ ID NO: 129186 - RNA, 81 nt, Homo sapiens
gcaagccaaagcgccacaggggccgggagaggaaagcggccgagaggaaaacagaagaaagagccaaaagacacagcaaaa

SEQ ID NO: 129187 - RNA, 77 nt, Homo sapiens
caacggggaccccggagcccagaagacagagggcgagaccggcacaccgaagaggcaaggcagcgagggaccagacc

SEQ ID NO: 129188 - RNA, 68 nt, Homo sapiens
gcgaggaacagaagaagaagaaccggaagaaacgccgagaagcccaaaaaggccgggacagcagaaaa

SEQ ID NO: 129189 - RNA, 54 nt, Homo sapiens
ggaccggcccgcccgcagcagagcccgcaccagaggaaaaccgccagaacagcc

SEQ ID NO: 129190 - RNA, 59 nt, Homo sapiens
cgcccgacggaagaggaagacaaggagaggaccccacagggaccgcgcggccccccagg

SEQ ID NO: 129191 - RNA, 76 nt, Homo sapiens
gccacccaagaacggcccgccaccggagacaacgagaggagggaccggagggccggaagcgggccgggacaacggg

SEQ ID NO: 129192 - RNA, 75 nt, Homo sapiens
gaaaggacagaacaggaccggaaaggggacaagaccccccccagggaagaccaaagcaagggaggagaagccagc

SEQ ID NO: 129193 - RNA, 81 nt, Homo sapiens
cagaggcaacagcaccccgcggaacagagcagaggccaggaggggcccagcccggccaggaggcggcggaaaaaggacaga

SEQ ID NO: 129194 - RNA, 78 nt, Homo sapiens
ggaccagggcagcagcggcggggcggcagcaagaggacagacgggggaagccccgacaaaaaaaaagagaggagcaag

SEQ ID NO: 129195 - RNA, 76 nt, Homo sapiens
cggggccaggaagcaacggaagcgcagcaacagcaagccccgggcaggggagaagcagaccgcaccaggcgggacc

SEQ ID NO: 129196 - RNA, 70 nt, Homo sapiens
gagaagaagcaaaaagcaaggccaccaacaagagcaacccagcacaagggcagcagccggcaacagccac

SEQ ID NO: 129197 - RNA, 52 nt, Homo sapiens
gggccaaagcccaagaacgagcagaaggagacgcacgaagcagaacaaaaaa

SEQ ID NO: 129198 - RNA, 74 nt, Homo sapiens
caggcgcagaggggagccccccgggaaagcacgcccggcgggcaggcaacccaggcggcaagcggaggcgggcc

SEQ ID NO: 129199 - RNA, 91 nt, Homo sapiens
ggacagggaccacaacaagaggaagaagaggggaaagagaggaacagaagagaaggaagaacaggagagaaggaagaaaaaggagaggaag

SEQ ID NO: 129200 - RNA, 55 nt, Homo sapiens
cccacagcggaacacacaacacacaggggcacggcagcagagcgggagcgacagg

SEQ ID NO: 129201 - RNA, 57 nt, Homo sapiens
ggacaagaaagagaagaggaccaagaaggacagaccagcccaggcccacaggggccc

SEQ ID NO: 129202 - RNA, 68 nt, Homo sapiens
aaggggaacaccacggcagacagcacaggcaaaaagaagggacaaagaaacaagcgacggaggaccca

SEQ ID NO: 129203 - RNA, 77 nt, Homo sapiens
cagcagaagccgcaacaggaaagcagcccgaaaaagacgcgagaagccacacggacaggaacagaggaccagggggc

SEQ ID NO: 129204 - RNA, 56 nt, Homo sapiens
gaaagcgaccccaccggacgacgggaccggacgggagaaagaacagacaagccgca

SEQ ID NO: 129205 - RNA, 66 nt, Homo sapiens
gaacgcaggaaggagaaacacaggagcagggacacaaacggaagagacccaacaaccggggaaaag

SEQ ID NO: 129206 - RNA, 85 nt, Homo sapiens
ccagcgagaccgggccggaacgaaagcaggacggaggagcgaccaccggacaagaaaagcgaaccccagcacgccgcagcaccgg

SEQ ID NO: 129207 - RNA, 73 nt, Homo sapiens
ggaaaaccgcagaccgggcagacaccgggaccaaggacaggcaccagcgagaacgcgaccagcaagaagaacg

SEQ ID NO: 129208 - RNA, 86 nt, Homo sapiens
gacgagaccagaggccgaaccgggcgacaagaggccgggcgccccgcaggacacaaggcggacaaaggccaaaggaccccccgaca

SEQ ID NO: 129209 - RNA, 82 nt, Homo sapiens
cgaagaaagacagaccggcacccggcaaccagaaacacaggccaaggagcgccaaaaaagagggggcgaagggaaaagcccc

SEQ ID NO: 129210 - RNA, 74 nt, Homo sapiens
acaccgcggagcaaggaaaaaaacccgaccggaagagacagagagagccaaacccccaggcgggggcgaaaaag

SEQ ID NO: 129211 - RNA, 79 nt, Homo sapiens
gccaccgagagcacaccacagaagccaccaggggaaaccgacgaacaagggcgggcagagaaggacaaaaaggacccga

SEQ ID NO: 129212 - RNA, 118 nt, Homo sapiens
ccgcgccgggggggggccacgccgcaccgcgcaacccgccgggccaggcagccgcaccgaggaagggagaggcggcggcgagcgcgacccccgcccaggcacccacaccccacccacc

SEQ ID NO: 129213 - RNA, 80 nt, Homo sapiens
caccgaaggggaagagcaagagcagcagggagacaagggaggcgaggacggacaaaaggaaacggacgggaggccagcca

SEQ ID NO: 129214 - RNA, 59 nt, Homo sapiens
gcaggccgaggcaggccgggcagggaggcaccgccccaacccccccccgcccggagaac

SEQ ID NO: 129215 - RNA, 68 nt, Homo sapiens
cagaacacagcagaaaggggggaccaacagaagcaaaaaggaaaggacagaggaggagaaacgacaaa

SEQ ID NO: 129216 - RNA, 77 nt, Homo sapiens
aaacaggaagagggggaggcaaagccgaaagggagaggcaacggaacagaccggccccccaaacacccgagcccagc

SEQ ID NO: 129217 - RNA, 55 nt, Homo sapiens
gcccacgacccaaggacacaacccggccgcagagcccagggggacagcgccgcgc

SEQ ID NO: 129218 - RNA, 67 nt, Homo sapiens
ccagaaggggagaaggcaggcaccacaaaaaggacaggaagcccaccggaaggacaccccgaacaca

SEQ ID NO: 129219 - RNA, 68 nt, Homo sapiens
aaaaaaacccaggcggcccaggccaaccaggagcaaagaaaaaggaagaaacaaacccagagaacacc

SEQ ID NO: 129220 - RNA, 79 nt, Homo sapiens
cgggacccacagcaccccgaggcccgacccaggggaaaaccaaaagaggccgaacaacgggcaaccgaagagagggaaa

SEQ ID NO: 129221 - RNA, 77 nt, Homo sapiens
caggcaacgggaagagcgacagccccaggcccgggggggcgccggagcgggcagggcacacaaccgggcagcggaca

SEQ ID NO: 129222 - RNA, 74 nt, Homo sapiens
ccaaagacagaaacagagcacgagcacaaacagcaggaacccacagccacgacagcgccacccacagaccgccc

SEQ ID NO: 129223 - RNA, 59 nt, Homo sapiens
acggcacacgcgagcgagagggggcaccccagacaggagaacgggacagggcagacggg

SEQ ID NO: 129224 - RNA, 63 nt, Homo sapiens
gggaacagggaccagaacgcaacgaaacaaggaagagaaacagggaagggcgcacggaaaagg

SEQ ID NO: 129225 - RNA, 59 nt, Homo sapiens
aagccgacaaccccagaaacagggagggagcggcgggaccgggcgcagacggcgagacc

SEQ ID NO: 129226 - RNA, 71 nt, Homo sapiens
agccgcggacgccgcgccagcgacaaacaaagagcagcaccagcagaagagggcccgaccacggcaaccca

SEQ ID NO: 129227 - RNA, 82 nt, Homo sapiens
cggccgccgacacgccgcccggcgccagggagaggaaacagcagggacggaaaggccacagcagaagggggaacaaacaaaa

SEQ ID NO: 129228 - RNA, 73 nt, Homo sapiens
gggcccgcccaccggggaggagaggaaggaagagggcacaccaagccagaaggcgaggcgcacggcagaaagc

SEQ ID NO: 129229 - RNA, 69 nt, Homo sapiens
aggagccccggaggcagagcggcgccagacaaggccgacgcgcacgaacacgggggcaaagacagggag

SEQ ID NO: 129230 - RNA, 88 nt, Homo sapiens
cggaccgggccgcgcacgccgcccagagccaggacaaaaccaggcagaaccaacacgaacccaagcacaaacaagaaaacgagcaggc

SEQ ID NO: 129231 - RNA, 59 nt, Homo sapiens
ggggagccaccccgcggaggcggcgaaggccgccaggggcggggaacggaccagccagg

SEQ ID NO: 129232 - RNA, 89 nt, Homo sapiens
cggcccggccgccggcgccccgcgcccgccacggaccccgagacccggaacccagccccaaaagcacgcacgaaaccggcaagccagcg

SEQ ID NO: 129233 - RNA, 79 nt, Homo sapiens
gcgcccgagaagggaacccacagaaaggagacgcaacaccagggcgggccagaaaaagggaaaaccaaaagaaaggagg

SEQ ID NO: 129234 - RNA, 65 nt, Homo sapiens
agaaggccccccacccgaccaacgaggccgacgcaaacagaagagcacgagacagacagcccgcc

SEQ ID NO: 129235 - RNA, 78 nt, Homo sapiens
ggaagcgcgggcggacgacagaggagccgaaccacccagaacagaggggaagacccaaggaggagacgacaacaaaac

SEQ ID NO: 129236 - RNA, 39 nt, Homo sapiens
gcccgacaacgaagacccccaggcccgccgccagaggga

SEQ ID NO: 129237 - RNA, 71 nt, Homo sapiens
cagccccgccaccccacagacgagggggacagagcccggaccgccagaaagcccggccagggacagccaag

SEQ ID NO: 129238 - RNA, 82 nt, Homo sapiens
cgccagggcccccaggcccagagaagcgccgggcccgcggaaggggaccacggaccaagcgaggaggcagcacggcaggaga

SEQ ID NO: 129239 - RNA, 52 nt, Homo sapiens
aagacgccaggaccggaagcagagaaagcgagcaggagcacgaaggggagaa

SEQ ID NO: 129240 - RNA, 68 nt, Homo sapiens
aaaaaaagcaacccccggacaagggggagagcaacagaaaccgccgaggcacagaaaaagggacaaga

SEQ ID NO: 129241 - RNA, 111 nt, Homo sapiens
aggaacgggccgaaccgggagcgaggaaccagaacgaaaagcgccagaaagggaccaagaaaggcccagggaccaaagcccggacaaggcccgagcaccaggaccgcagaa

SEQ ID NO: 129242 - RNA, 79 nt, Homo sapiens
agcaggacagcccagcgcggccggagggaaaaacagccgcagggaagagaaagacgggacgaacgagaaacagccagga

SEQ ID NO: 129243 - RNA, 85 nt, Homo sapiens
cccggcgccgccggcccgcgggaccgacagccgggcagagggaaggcgaggagcggaaggcgagcggagcggcggaggaggaaaa

SEQ ID NO: 129244 - RNA, 90 nt, Homo sapiens
gagaagccgcccggaggaaacggagcgcgcccgcagcccgagcccacaagggacggacaggcaccccacgccacagcggacccgcagggc

SEQ ID NO: 129245 - RNA, 76 nt, Homo sapiens
ggaagcaaggacaccaaccagagagaagaggggccccggagaagagcaccgggggcgcccccgccgacaccgggaa

SEQ ID NO: 129246 - RNA, 80 nt, Homo sapiens
gccacacgccggcgggcagaagccgcccgccccggggaggagagggagaacaaaaaagccgcaaaccaagaaagagaacg

SEQ ID NO: 129247 - RNA, 77 nt, Homo sapiens
cgccacagccacaggggccgaaaaccagcagaagcccccggggagagacagacagagggacacagagaggaagaaag

SEQ ID NO: 129248 - RNA, 75 nt, Homo sapiens
aaaccgacgcccacaagcggccgcgagggaggcaaagcgaaggaagcaaagccccaaggacgccccccaaggaca

SEQ ID NO: 129249 - RNA, 72 nt, Homo sapiens
gcgccgcgggaggagcgccagcccgcggcgaacaagcaacagacaaggccacacaccgcagacacagcagca

SEQ ID NO: 129250 - RNA, 61 nt, Homo sapiens
gaacgaagaaaagaaaggccaagaccaggaaaggaaggccgggaagcaacggacgggggcc

SEQ ID NO: 129251 - RNA, 76 nt, Homo sapiens
aggaacgcagaagaccgcaggggaaaaccaaagaccgacaagaccccggcaaccggcacgcaccagagcagcccac

SEQ ID NO: 129252 - RNA, 62 nt, Homo sapiens
cacggacaccggcaaccgcccagcacaaggccaagggagacggaggagaagccaccccacca

SEQ ID NO: 129253 - RNA, 69 nt, Homo sapiens
aagcacacggaccagcagaacagaaacaagccaacacaaccaggacaagccgaggaaaggagagaaaag

SEQ ID NO: 129254 - RNA, 72 nt, Homo sapiens
gggaggggaaccagcaccgcagcaaccacccagaaacccccccagggaacccaggcgggcccgcggggaagg

SEQ ID NO: 129255 - RNA, 77 nt, Homo sapiens
ggaacgggagaaacaggacagaacaagcacccacgaggacagcaaacaaggagcgcacccggacccacagcggccag

SEQ ID NO: 129256 - RNA, 38 nt, Homo sapiens
cccgccccggaggagcgcgcaccgagaagaaaaggcag

SEQ ID NO: 129257 - RNA, 83 nt, Homo sapiens
gccagaccgggaaaggcagaaaggcagagaaacccagcccagagacggccagaaagaagagagagcaggagcggagaggacgc

SEQ ID NO: 129258 - RNA, 82 nt, Homo sapiens
agaaaacaaaaacgagaccaagagaaggcagccgagcaccgagccagcccaggaaaaggagagggccgagaacaacgagcga

SEQ ID NO: 129259 - RNA, 75 nt, Homo sapiens
aggggcgaaccacggaaaggaggaagaagacaccggggacagacagggaccgcgcagaaacggccgaaagaacgc

SEQ ID NO: 129260 - RNA, 53 nt, Homo sapiens
cggacgcacccggggggcccaggcagaaaacacaggaaccaggaacacaagcc

SEQ ID NO: 129261 - RNA, 69 nt, Homo sapiens
gaggcgccccgcgggagaaggacccccgcgccggcgaaggagcacgcaagcagggaaaagggcaggaaa

SEQ ID NO: 129262 - RNA, 74 nt, Homo sapiens
acccagcggggggcgccgacaggagagaacaacccccaggaacagggggagccgccaccaaaagcagacggaaa

SEQ ID NO: 129263 - RNA, 82 nt, Homo sapiens
ggcgaggaggggccccagcagcccccgaaggcccacaggacaggagagaaagacgggaccgacacaagaagcagccagaaca

SEQ ID NO: 129264 - RNA, 69 nt, Homo sapiens
ccaacagaaaaagagaggagggagaacacagaaacccgccccgggaaccggccgaaccagaccggagca

SEQ ID NO: 129265 - RNA, 70 nt, Homo sapiens
ccggaccccggcagaaagaagcggcaccccggaccgcgaacagacaaagggagccaaaggaaaaaagacc

SEQ ID NO: 129266 - RNA, 69 nt, Homo sapiens
gaaaacaggagaaacgaaaaagagaaccaaagggaagcaagaaccgccggccagaacacacagaaaagg

SEQ ID NO: 129267 - RNA, 76 nt, Homo sapiens
aaacgccgccgcccccaacgcgcgggggacccgcggacacaccgccccgaggccaacggaccacaccaaaagccac

SEQ ID NO: 129268 - RNA, 45 nt, Homo sapiens
gcggaggcagcggagcccgggccacgcgccccagagcacacagca

SEQ ID NO: 129269 - RNA, 54 nt, Homo sapiens
aaaaggccaagaaggcaggcgcgagaaacccaggccgcgcacaagaaccggcag

SEQ ID NO: 129270 - RNA, 46 nt, Homo sapiens
agccaccccacgaggccaaaaggggccgcaaggccaggcgcgcaga

SEQ ID NO: 129271 - RNA, 90 nt, Homo sapiens
cagcacagcaaacccgccgggacaaaggaccagcggcagcaggggagacaacagccacacaaagcagcaacaggagcagggaagaaaagg

SEQ ID NO: 129272 - RNA, 72 nt, Homo sapiens
caaccaagaagccagagaaacggagggccccaaggcggcagccccgaccgacggggcaacgcgaagaaacac

SEQ ID NO: 129273 - RNA, 102 nt, Homo sapiens
acgggacagagaaacgaaaaaccgaggaaggacagacggccagccagcacaaacgacagcagaccacagcccggcaggcccaaaaacccaaagggacagaag

SEQ ID NO: 129274 - RNA, 77 nt, Homo sapiens
cagaaggcaggagggagggccaggaaaccgcaccgaaaacgagcacagcagaaagcaccgggaggaaagagagccac

SEQ ID NO: 129275 - RNA, 77 nt, Homo sapiens
gggacccccgcagcaggcccggacccccgaccgccggccggccccagcccagggggagcgggccggagagaagagag

SEQ ID NO: 129276 - RNA, 71 nt, Homo sapiens
gcgcagaagcccgaagaaaacagcgggaagagacagccaaggcacagccacagccgcaagccaagagcagc

SEQ ID NO: 129277 - RNA, 84 nt, Homo sapiens
cacagccacgccgccgcgccgcggagcggcgccgacaagcggggagacaaccccccccaagaagcgagggacaagcacgaccca

SEQ ID NO: 129278 - RNA, 91 nt, Homo sapiens
agcagggagaagagccagggcccgaccgcagggagcagaggggacagaggcaccaaggaccccaagacaggcgcagggaacggccaggcaa

SEQ ID NO: 129279 - RNA, 76 nt, Homo sapiens
cgcccgccacgagcgccccccgagcggggggacgcgccaggcacagcagcagacaagcagaccggaagaccgacgg

SEQ ID NO: 129280 - RNA, 60 nt, Homo sapiens
gccgcccgcggaagggagcccaagcgcagagcgggaggccaccgccccaccagcaggcaa

SEQ ID NO: 129281 - RNA, 69 nt, Homo sapiens
gagcgcccgggaaccccaggcccgggggcacaaggggcagccgcccgacaccggacggccaccgcccga

SEQ ID NO: 129282 - RNA, 69 nt, Homo sapiens
cagaccgcacgccagcaagggccagccggaaggaaagaccagcgcgccagaccaggagacccacccacg

SEQ ID NO: 129283 - RNA, 57 nt, Homo sapiens
gcggcaaccggaggcaagggagaaaagggggaccggagccgggcccggcgcagaggg

SEQ ID NO: 129284 - RNA, 83 nt, Homo sapiens
ccgcggaaaacagagaggccagaaaggcgcaggccaagcgcccacgccggaccgggcagggacaaagaagccacaggggaggg

SEQ ID NO: 129285 - RNA, 77 nt, Homo sapiens
acgccgccgaccacagccccacgacagcacagcaggagccaaggggaggaacggagaaagcagcccagaaaccgcgc

SEQ ID NO: 129286 - RNA, 75 nt, Homo sapiens
cgaggaagcccaacccagagcccccggcaggagccggggcgaccgacacaaacggaccgcccgaaagggaccgaa

SEQ ID NO: 129287 - RNA, 64 nt, Homo sapiens
accgacaccccggcagagaagaaaggagaaagaagcggagagagaccaagcgagacggccggcc

SEQ ID NO: 129288 - RNA, 66 nt, Homo sapiens
aagcggaagacacaaacagcagggagaagagacaacaagacaggcgacgaagcaaccacacgaaag

SEQ ID NO: 129289 - RNA, 75 nt, Homo sapiens
gcgcagcgaagcccagggaggccaccagggcggcgggcagacaaccgcgcagcgccgggcggacgacgaggcagg

SEQ ID NO: 129290 - RNA, 78 nt, Homo sapiens
gcggaggcacggcgcacacgcagacccaccgacgaggagaggcggcgagccaagcaggcggaacggcgcggcaggcac

SEQ ID NO: 129291 - RNA, 74 nt, Homo sapiens
gcggaagcagcagcggaccagccaggggccccccggcacggagcagcgcggggggggcaacacacggggaagca

SEQ ID NO: 129292 - RNA, 73 nt, Homo sapiens
gccggaggaccagacccaggaggggagcgaagcagggcacagaccccagggggaacaggcgaagaagaggggc

SEQ ID NO: 129293 - RNA, 69 nt, Homo sapiens
aagaaagaacagacccacccgcaagaacccagggcagaaaggaggcccagcaggcgcagcagcaagagg

SEQ ID NO: 129294 - RNA, 81 nt, Homo sapiens
cgcgaggaggaaaggaggacgagcacaggaagaaacgccaggaacacaagaaaagacagcagacgagaaggcagagaaagc

SEQ ID NO: 129295 - RNA, 80 nt, Homo sapiens
cccgcgcggaccagccgaccaaaggaggcgagaaggaagccaggacaccggaacccgggaacggcacaggaagagggcgg

SEQ ID NO: 129296 - RNA, 67 nt, Homo sapiens
gccagacagacacccccacaaggccacgaaaggagaggaagaggcagccgcggcgagccgcacaggg

SEQ ID NO: 129297 - RNA, 73 nt, Homo sapiens
cccccacaagaagagagcacagacgcccagaggaaaccaacagaagggccgaaacggagcaggaaccgaagga

SEQ ID NO: 129298 - RNA, 72 nt, Homo sapiens
gaacgggacaacaaaagagccacccaagggccaagaaggagaaaaagaggcccgaaaaccaacaacggggaa

SEQ ID NO: 129299 - RNA, 61 nt, Homo sapiens
ggcgcggcggcaaggaggagggaaggccgggcccaggggaacgcacggggggggaacacgc

SEQ ID NO: 129300 - RNA, 82 nt, Homo sapiens
ggaagcaaagcaaaggagaaggcagcgggacggacaggcagggaagcaacgcagagacccaacagaggaagccgcaagaaac

SEQ ID NO: 129301 - RNA, 65 nt, Homo sapiens
ccaacacgggacggagaaagcaggacaagcagccgcgaaaccaagcagccaccacgaaggacggc

SEQ ID NO: 129302 - RNA, 68 nt, Homo sapiens
gacacgcaacccccagcacaggcaccgaccgcacgagcaacccggaagagcccgcacaaacaccgaag

SEQ ID NO: 129303 - RNA, 73 nt, Homo sapiens
gaaaaccagcagaagcgccgacaagacccccaacaaggcaaacacaagagaagggggccacacccaagcgaca

SEQ ID NO: 129304 - RNA, 66 nt, Homo sapiens
gccaggggccgccccacgaccagggcgcagcaacaagccagaggccaaaaggccaacccgaccaca

SEQ ID NO: 129305 - RNA, 74 nt, Homo sapiens
cgacgcggaccgcggacagcgaacccggagggaggagagcagaaggccaggaaggggcaaggggcgggacccgg

SEQ ID NO: 129306 - RNA, 58 nt, Homo sapiens
ggcggaggagccccaagaacagaggcccccacagagagcacacaaacaaagcgaaacc

SEQ ID NO: 129307 - RNA, 56 nt, Homo sapiens
ggaagacaagcgaaacccaagcggaagcgagaaggaccacgagaggagaagagcag

SEQ ID NO: 129308 - RNA, 39 nt, Homo sapiens
aaccaagggcgggggggcacaagaccagagccacgcaca

SEQ ID NO: 129309 - RNA, 48 nt, Homo sapiens
caccgagcaacaacagccacaggacagggcccaaaaaggcaacaaacg

SEQ ID NO: 129310 - RNA, 54 nt, Homo sapiens
aaaagcaacaaagaggacaccagacgaaacaacgacccagggaaaacagcagca

SEQ ID NO: 129311 - RNA, 75 nt, Homo sapiens
ccccaagaagaccacagagggacccggacaaccagaggcagccagcagggggagggggacacccacggccaacca

SEQ ID NO: 129312 - RNA, 78 nt, Homo sapiens
cagcgccgcgacgggaggagcgccggaacgccgaggcccaggaaacggcgcccacagaggaaagcgccaagaggaaga

SEQ ID NO: 129313 - RNA, 86 nt, Homo sapiens
aaagggaggggggacagaaaaggagaaacaaccagcccagcaggaagaagagagccaggcgaacgccgaggaacagggaccggcaa

SEQ ID NO: 129314 - RNA, 88 nt, Homo sapiens
ggcaggcgagggagcccgcgcggcgagagcccacaggcccccacagggccccagggcagccaaccccgcggcaggcacggccaccgga

SEQ ID NO: 129315 - RNA, 79 nt, Homo sapiens
agccaccccgcgggaacgcccagcgcggcacacgagcggccacgagcaaccaagaggagaaggaagcgcacaaaaccca

SEQ ID NO: 129316 - RNA, 79 nt, Homo sapiens
caaggcgccaaccccgaacggggggagacgccacggaacgcagacaaccagaagacgacagcacagccgccaaagcgac

SEQ ID NO: 129317 - RNA, 70 nt, Homo sapiens
gacagaggaagagaagaggaggacagggacgaaaggcaaaacacagaaaaggaagcaggcgaagaaaagc

SEQ ID NO: 129318 - RNA, 60 nt, Homo sapiens
ggacagaaaagacaggcgccaggagcacagaagagcgaggaggacaaacacgcagcgaag

SEQ ID NO: 129319 - RNA, 79 nt, Homo sapiens
gccccccgccaaggcgacccccaccgagacgaagcgggcggcgaagccggccagaaggaggacaggaaaaagccgagcg

SEQ ID NO: 129320 - RNA, 56 nt, Homo sapiens
ccggccagggaacaaccgcacaagcccacccgaacggcaaaggacagcagacaggg

SEQ ID NO: 129321 - RNA, 74 nt, Homo sapiens
gaagcgcacgagaacaggaccaccaggaaacgcgcaagacgcccaagagaagaggaacacaaaggcgcgacggg

SEQ ID NO: 129322 - RNA, 76 nt, Homo sapiens
aacaccaaaaacaaaacgaaccaggacggcaaccacgagaaaccaggaagacagaggcccacaaagccccacgaac

SEQ ID NO: 129323 - RNA, 50 nt, Homo sapiens
gagcagacaagcgagacccgggggcaacgggggaggccaacgccgagggg

SEQ ID NO: 129324 - RNA, 71 nt, Homo sapiens
agagcaaggaagagaccaagcaccaagaaaacgccaaggaacgccaccccgaccaacccgcagccaggcac

SEQ ID NO: 129325 - RNA, 74 nt, Homo sapiens
ccggaaagagagaaaccaggaacaggacacgcacggagcaaaaaaagcacgaaacacaaagcaaaacggagaag

SEQ ID NO: 129326 - RNA, 71 nt, Homo sapiens
cccaaccaggggcgagccgcgcgggagaagccagaaacaagacagacgaagaaggaaaagcgaacagaacc

SEQ ID NO: 129327 - RNA, 69 nt, Homo sapiens
agccgcccagacacccgaggaaaacacacgaggagcgcaaggaggccacccgaaggagagaaccaggag

SEQ ID NO: 129328 - RNA, 54 nt, Homo sapiens
gcggcaaccgaaagccagcagcggccgagcggccagagagccagagcaccagca

SEQ ID NO: 129329 - RNA, 70 nt, Homo sapiens
gggaccacacaaagggaggccacagaaggaacacagcgacagggcagcccgcagaggaccgcacgaacgc

SEQ ID NO: 129330 - RNA, 80 nt, Homo sapiens
cgcccaagagcgacagccccagaagcaagagaggaaaacagaagcgggccgggaaagagacagcgaagggggcggaggag

SEQ ID NO: 129331 - RNA, 87 nt, Homo sapiens
acggccgagaagaagacagagggaccacaaaccggaaagagacccgggaagccccgagcgcgccgccccggcccgcaggggaaggag

SEQ ID NO: 129332 - RNA, 81 nt, Homo sapiens
agagacaagccgagagaaagcaagcaaagaaacgaaggaggcccaaccacaaaaggagccgacggaacccagacggagaac

SEQ ID NO: 129333 - RNA, 78 nt, Homo sapiens
acagacgcggcggggcgcaaaccgagacaagcaccccgaagcgccgggcggaccagggacgagcgcccccggagaggg

SEQ ID NO: 129334 - RNA, 79 nt, Homo sapiens
aaaccgaagaagcaaacgaaggcgcacgagaagaaccgcagcaacaggacaaaaaaagaacaacggaggcagccaaaaa

SEQ ID NO: 129335 - RNA, 79 nt, Homo sapiens
ggagccaggccagcggaagacgcagcaaaggggcccgccaacggggaacacgccacccagcaccacgccaagccaacac

SEQ ID NO: 129336 - RNA, 84 nt, Homo sapiens
agcagggccgcgcccgggacccaggaaaccacaggacaaggacgggcgaaccagcgcacccgcaagcggccccaccggcccacg

SEQ ID NO: 129337 - RNA, 84 nt, Homo sapiens
aggcgccgccagcggccgggaccgaacaggcgcgccagccacgcagagaccggaagaagacaccacgacacagcccacggacgg

SEQ ID NO: 129338 - RNA, 78 nt, Homo sapiens
caacagaccggagcgaaccaccccaaacagagcagcccgacggccaggaggcgaagagacgaggaagcccaggagccc

SEQ ID NO: 129339 - RNA, 74 nt, Homo sapiens
gcagggccaaagaagagaccggacaagcaggaagaagccaagaggagaaagaagcgacacccacacgaaggccc

SEQ ID NO: 129340 - RNA, 75 nt, Homo sapiens
ggaccccccccggccaggacaacaccgcaggacggaaaggcaaaagcaacaaccagcaaggagaggcaaccagac

SEQ ID NO: 129341 - RNA, 79 nt, Homo sapiens
aaaaacacgagagcgaccaagcacagacacgagagcacaggagcagcggccgagagggcccgcggaagcagcgcaaggc

SEQ ID NO: 129342 - RNA, 72 nt, Homo sapiens
gccacagggggggcggcggggcgggaggaacgggggagcccacaggagccaggcaagaacggaagcacgggc

SEQ ID NO: 129343 - RNA, 61 nt, Homo sapiens
agaaaaaccaaaaccacaaggaggcagaaacgccacagcgaaaccaccgaggaaagcgcca

SEQ ID NO: 129344 - RNA, 85 nt, Homo sapiens
cggccacaaggccgcccagccgcacgcgacgacagggaacccgagcgcagaggggaagcagaggacccaggcgaacagcaaggag

SEQ ID NO: 129345 - RNA, 77 nt, Homo sapiens
cgacgagcgcagggggcaccgagcggggaggcaggaaaaagacacaagacagcaggaccgggaccagcccgaagacc

SEQ ID NO: 129346 - RNA, 70 nt, Homo sapiens
agaacacccaagaaggcaaagcgcgaaaacgaagcggggaaagccagggagaagacaagagaaccgagga

SEQ ID NO: 129347 - RNA, 79 nt, Homo sapiens
cccccccgagcgggagcacgcccccccagggcccccgcaccaggagccaggggcggcggggacagggggcgggagcagg

SEQ ID NO: 129348 - RNA, 80 nt, Homo sapiens
cgagcgcccggggcacgcccgcggccgccggacggccgggcgcggaggccgcagaggggacgaacggggcgacgcggcgg

SEQ ID NO: 129349 - RNA, 76 nt, Homo sapiens
gcccgccagccgcgcccgggacagagcgaagaaccccccaagaagacgaaacccccgggccacaagaaggggggcc

SEQ ID NO: 129350 - RNA, 73 nt, Homo sapiens
aacgagaaaacaggaccaagaagaagaaccagcaaaagggggacacagcgagccacgcgccaggaagcccggc

SEQ ID NO: 129351 - RNA, 40 nt, Homo sapiens
agagaaagaggccacacgcaggcacagagaaggcccagac

SEQ ID NO: 129352 - RNA, 73 nt, Homo sapiens
cccgaagaaagagagggaagaagcagggcagaggaccaggacgcgggacccgagaggggcggggagagggcgg

SEQ ID NO: 129353 - RNA, 86 nt, Homo sapiens
ggggcgggcggagggggcggcggcagcgacggcagcggcggcggcggacaaacaggcaccgcagcccggaccaagagacgaggaaa

SEQ ID NO: 129354 - RNA, 65 nt, Homo sapiens
caccagggaccggcaaagaccagaacaccccagaagcagggacgcagagcgcaacccagcacccc

SEQ ID NO: 129355 - RNA, 78 nt, Homo sapiens
gggccaaagggccccccaggggcccgcccagcaggacaagccagggagacacgaccaccgcccgagcgaagcaggccg

SEQ ID NO: 129356 - RNA, 78 nt, Homo sapiens
cgacaagagcacaaccccgaacacagaagaccggccgcccccacgagccgccaccaagcaggcaggggacggcccacc

SEQ ID NO: 129357 - RNA, 76 nt, Homo sapiens
cgaccggaccgcagacagggaaagggaaaaccaggaacagcccaaggaggaagcggagcccacgaggggaggggcc

SEQ ID NO: 129358 - RNA, 75 nt, Homo sapiens
caccagagaagcaaacgaacgacagcccggcccgggagcacgggagaagacagcagacaagagcgaggagaagga

SEQ ID NO: 129359 - RNA, 83 nt, Homo sapiens
agccccccggcgggagccccgcgacgcgcccggcccggagcccccagcgcagcggccgcgacaaaggggagccgcggccgggg

SEQ ID NO: 129360 - RNA, 57 nt, Homo sapiens
gcagagccacgaggacggagcgcaaaagcagagaagagaaacccgcgccagagagcc

SEQ ID NO: 129361 - RNA, 56 nt, Homo sapiens
acgaggaaagacagacccaccaaaccagccgaaaggaacgaaaacaaacggaagag

SEQ ID NO: 129362 - RNA, 76 nt, Homo sapiens
gggaacccagaaaaacggcgaggaaagagaggagccccggaaagaaaaggacagacccggccagaaaggaagacgg

SEQ ID NO: 129363 - RNA, 83 nt, Homo sapiens
aaaaggcaagcaagcacaaaaagacgcaaggcgcgcaaggaagagagaagggcacagaccaagacaacgaaccccggccagga

SEQ ID NO: 129364 - RNA, 74 nt, Homo sapiens
aagcccgaagaaaacagcgggaagagacagccaaggagaacaaccgcaacgaacaaacaggagacagagagcaa

SEQ ID NO: 129365 - RNA, 61 nt, Homo sapiens
agcagaggaaaacgcgagaagaaaccaaagacaccagaccagagcacgggcagcagcgcca

SEQ ID NO: 129366 - RNA, 75 nt, Homo sapiens
gcagaggcgcggagcgggcagccgccgccaccccgcggccgcacccccgccccaggggcagaaaacaaaagcagc

SEQ ID NO: 129367 - RNA, 81 nt, Homo sapiens
aggagccccagcgagaacgagggccacccccagcaggggagaaaggcacgcagcagcccagccgcgaagcgcgggaaaaag

SEQ ID NO: 129368 - RNA, 74 nt, Homo sapiens
cacacgaggcgcaccagagaccggacccgccaggcagcgcagacagaccccgcccagaacacacggggagacag

SEQ ID NO: 129369 - RNA, 78 nt, Homo sapiens
agcgccgaagcagccgggagccggagcgggcgcggacgccgaggcaccgaggcaccagaggagggcggaacacccgac

SEQ ID NO: 129370 - RNA, 71 nt, Homo sapiens
gcacacagcccagacaggaggagacaggccgagaccgagggccccgcaccccggagaagagccccgccgaa

SEQ ID NO: 129371 - RNA, 76 nt, Homo sapiens
gacccgaagagaagggggacaaagggaagaaagagggccacggacagaggcgcagcagaggaaccgcagaagaacg

SEQ ID NO: 129372 - RNA, 70 nt, Homo sapiens
ggcagccagggaaacgcaacccaaggaccagaggaaggcggggaggcggaagaccaggagaaagcacgac

SEQ ID NO: 129373 - RNA, 43 nt, Homo sapiens
cgcagcgccgaacgacgggccacagaagccccaggccaccccc

SEQ ID NO: 129374 - RNA, 83 nt, Homo sapiens
ggcgggcacgaggaccagcgggccggagccccgagaagccccagccaacccgaaaaccccccagcggccacagagagcacaaa

SEQ ID NO: 129375 - RNA, 60 nt, Homo sapiens
caccagacagggaccggcggcaaccggaaggaacggagccggccagaacacacagaaaag

SEQ ID NO: 129376 - RNA, 53 nt, Homo sapiens
gacacggaccagaaagggccaaggaggcaaaggaaaggaagccgaagacagaa

SEQ ID NO: 129377 - RNA, 75 nt, Homo sapiens
acagaggaaaaacagagccaagaaaggaagaaaagccagaggaagaggggcggagccaaaaggccaagaagagca

SEQ ID NO: 129378 - RNA, 83 nt, Homo sapiens
gggacaccggggccgcgccgcggaggacagggagacgcgcgcagcccgggacaccgaggcaaaaccgcccgcccgcaggccag

SEQ ID NO: 129379 - RNA, 68 nt, Homo sapiens
ccaacacaccgccaccgaagacgggccccaacacccagagacgaaagggagagaacagcacacagagg

SEQ ID NO: 129380 - RNA, 75 nt, Homo sapiens
gacgcacggaccaaaaacccgcaacagcccccgcccaagaacacagcacccacccacacccacacccgcgacggg

SEQ ID NO: 129381 - RNA, 37 nt, Homo sapiens
accgcgccccacgccgggcacacagggaccaagaagc

SEQ ID NO: 129382 - RNA, 73 nt, Homo sapiens
ccggcggcagcagcccagagcgcaaagaacaccacaagcgcgggccccggggcggccgccaccgccgcgcgcc

SEQ ID NO: 129383 - RNA, 82 nt, Homo sapiens
gagcacagagaaagagaagagaagagaaaggcccggagacgaccaaagagacacacacaaacagacaacaaacaaaaggaag

SEQ ID NO: 129384 - RNA, 80 nt, Homo sapiens
ggacggaggacgagcccagaaccacgccacaaaccaccccccgacccgaagaacggggggcacaaggaccacgcagcaga

SEQ ID NO: 129385 - RNA, 59 nt, Homo sapiens
ccagaaaggcaccacgcccagacggaaagggccacgggcggagaacggaaaagcaccag

SEQ ID NO: 129386 - RNA, 79 nt, Homo sapiens
cccgggccagcccaggaccccaggggaacaagaggccacgcagagccacgccggcacccggaaaggcagcggacagaaa

SEQ ID NO: 129387 - RNA, 65 nt, Homo sapiens
accgacgcgcggaggagaagagacccggggaggcagaagcgccaaaacgggcaaaagggccaaaa

SEQ ID NO: 129388 - RNA, 71 nt, Homo sapiens
aaaacgcaacagaaacaacaggaagacagaccgcgaggccacacccaagaccgagcccaagcccggggaaa

SEQ ID NO: 129389 - RNA, 57 nt, Homo sapiens
cgcagcagaaggcagcacccggccgacacacggacagaccaaagagaggcacaacac

SEQ ID NO: 129390 - RNA, 83 nt, Homo sapiens
cagcccaggacagccggaagcaggacaggcaaaaagacagccgaaaaagggcggaaaagcagaagccccgggaaggaggagac

SEQ ID NO: 129391 - RNA, 39 nt, Homo sapiens
agcccggacccgggggagcagggcggagaacggaaaagc

SEQ ID NO: 129392 - RNA, 80 nt, Homo sapiens
agaagggagaaaccccacagaggccagagaccaacgacacaccaggaccgggcaccaaggaggacaagccacaagaaaag

SEQ ID NO: 129393 - RNA, 72 nt, Homo sapiens
gcgcccaggggcaggcggaaaacaacccgaacaggaaacgggcacaaaaggccccagaaccaaagaacaaaa

SEQ ID NO: 129394 - RNA, 69 nt, Homo sapiens
agaagagagggaacaagcgcaaggggagaacaggacggacacgcgccaaccaacgggggaggacaccca

SEQ ID NO: 129395 - RNA, 71 nt, Homo sapiens
cccagcacaggaggcgagaacaagagcaaacggcgaaaccggcacagaagcacgggacggagaaggaaagg

SEQ ID NO: 129396 - RNA, 75 nt, Homo sapiens
gaacagccacgggcaacagagcaggaccagggcggaacgcacccagggcggaggccgcgacggaagaccgcacag

SEQ ID NO: 129397 - RNA, 57 nt, Homo sapiens
aggagcggaaggcgcgaggcaacaaaggagccggacgaagcagaggaagaaaccgcc

SEQ ID NO: 129398 - RNA, 82 nt, Homo sapiens
cgggcccgcgcaaacaccgcaggaagagccgacaggcaggccgacgcagacacagccaccgaggccggacaacccccagacc

SEQ ID NO: 129399 - RNA, 87 nt, Homo sapiens
cccggggaggcaccgacgaggaggaccaggccccccccaccgccagcagcagaaagcagcagaggccgaccgcaggagaagccccca

SEQ ID NO: 129400 - RNA, 67 nt, Homo sapiens
ggagacgagaagccgaaaagcgcagcgagcggagccgccggaggcacagggaaggacccagaacaga

SEQ ID NO: 129401 - RNA, 71 nt, Homo sapiens
gggaaccgagcggcaaagccccgcggcccgagggcaggacagcaggcaccggcgaagcacagagaggcgcg

SEQ ID NO: 129402 - RNA, 65 nt, Homo sapiens
cggccccgagacagaagccggcccggcgggagaagcgaaggaagaagacgcagaagcaggacgac

SEQ ID NO: 129403 - RNA, 73 nt, Homo sapiens
ggggcaagacccaggcaccgaagcaaaacaaacggagagaggagggagaaacaaaggccaaagacgcaggagg

SEQ ID NO: 129404 - RNA, 81 nt, Homo sapiens
ccaccagagcaggacaagaagacacggacggcaccaggccgacgacggccccgcggccgggaggggccacgcccgcgggag

SEQ ID NO: 129405 - RNA, 77 nt, Homo sapiens
gacagggaaaggagcggggagccccgcgccacagggcggagaacggaaaagcaccaggaagcagagaggaccgcaga

SEQ ID NO: 129406 - RNA, 78 nt, Homo sapiens
gaagggagcggccgaaggagccaccaggccgggaagcccacggaagagcgcaggcaaacgacaaaaagcagcaagaaa

SEQ ID NO: 129407 - RNA, 73 nt, Homo sapiens
cacgagacgggaaaggagccaccgccaggaaagaagccaggccagccagacgaaggcccaccaccacgagcgc

SEQ ID NO: 129408 - RNA, 76 nt, Homo sapiens
ccgccaccccgaggcaggaacagcacccggacggacacgagaccagcacccaagagccaacagcgaaccaacagca

SEQ ID NO: 129409 - RNA, 58 nt, Homo sapiens
gaacacgggccccagcgccacagagccgggaaaccgaagaaggcagagaaggcaaaca

SEQ ID NO: 129410 - RNA, 91 nt, Homo sapiens
cgggcagaggaccggaggccgggaagccaacgaccacacgcaaccccaagaagaagcggaagaggagccgcggaaccaagacacaaggaac

SEQ ID NO: 129411 - RNA, 74 nt, Homo sapiens
cccaaaagcagagcagaaaagacaagaagcagagaaagaggagggagggagggcaggccgcagcccgagcccgc

SEQ ID NO: 129412 - RNA, 75 nt, Homo sapiens
gaaacagaggacaaggcagcaaagaagagaagaagccgagaagagagcacagaagagaggcaccaggacgagagg

SEQ ID NO: 129413 - RNA, 75 nt, Homo sapiens
agggcaacaccaaaggaaggggagacaacaacaagccgaagaggcgaggagccagcacaggggaacacagcaacg

SEQ ID NO: 129414 - RNA, 72 nt, Homo sapiens
cacacaagaccagcacgaagaagccacagccgcacggacccccagaaagcaccgggaggaaagagagccaca

SEQ ID NO: 129415 - RNA, 81 nt, Homo sapiens
gggggagggggcggccgggcggagagaaccagcgaggacgaggacccaaagacaggaccacgcaccagcagagaaggaaag

SEQ ID NO: 129416 - RNA, 86 nt, Homo sapiens
cagaaacccgacgagaagggagcgacccccagggagggcggaccgcccaaaccgccaagggagccaccaacagagagcagcaagaa

SEQ ID NO: 129417 - RNA, 75 nt, Homo sapiens
cgaagacggccaacgcagacaccagaagggcgggaggcagcggcccccacaggcaaggacggggacacaagacca

SEQ ID NO: 129418 - RNA, 60 nt, Homo sapiens
agccaaaggcccgacaaggagacccggaaagggacccgaagaagagagcaaaaacggggg

SEQ ID NO: 129419 - RNA, 76 nt, Homo sapiens
ccaccaccgacgagcgaagagcaagcacaaccgaagagccaagcccccccagcccacccacgagcgcagcaaggag

SEQ ID NO: 129420 - RNA, 57 nt, Homo sapiens
gaaaaggccaagaaggcagggaaaacacacacaacaggcaaccaagaaaacacccaa

SEQ ID NO: 129421 - RNA, 66 nt, Homo sapiens
ccacacccggagaccccaaggcgaaagggcgggggcgccgaggaagaaccgggggggacagccacc

SEQ ID NO: 129422 - RNA, 73 nt, Homo sapiens
agcgggggcccgagaagccgacgggcagccaacagccgaccgagcacgagccaccgagaaccgccagccggaa

SEQ ID NO: 129423 - RNA, 37 nt, Homo sapiens
gcccgaggcaccacccaagcgagagccccagcccaaa

SEQ ID NO: 129424 - RNA, 55 nt, Homo sapiens
aaagaaaaagaagccagcgaagaccgaacaggaacacaaggcccgaggagaggag

SEQ ID NO: 129425 - RNA, 63 nt, Homo sapiens
aggaagcccgacaacgaaggggcccagaagacaccgcgaggggccgccaccgagcccacgaac

SEQ ID NO: 129426 - RNA, 72 nt, Homo sapiens
cggggcgacgcagcaacgggaaccgaagccacgcaacaggggcaaacgcccaggagcgccaaaaaagagggg

SEQ ID NO: 129427 - RNA, 54 nt, Homo sapiens
ggagagaaagaaagaaaagagcagagacggccggcaacaagcgaggggggaggc

SEQ ID NO: 129428 - RNA, 69 nt, Homo sapiens
aaacgggaagaaaagaaaacacagcaagaggcacgcccagagcaagaagggggaaaagcccaaaggaac

SEQ ID NO: 129429 - RNA, 79 nt, Homo sapiens
gcggcgcgccgggagaccgcggaggccgacaggacgggcgccgccccgcgcggcaggggcgaaccgaccaagaacaaca

SEQ ID NO: 129430 - RNA, 83 nt, Homo sapiens
cggggcccgggaccacaggccccggcccagagcacaccgacaaacgaagcggggccaggggaggacccgcccccagccgggcc

SEQ ID NO: 129431 - RNA, 75 nt, Homo sapiens
gaaggcgaggcggaagaaaaccaacacgacagcaaccaacggcgcggaaggcagccaccggcaggggagcgcagc

SEQ ID NO: 129432 - RNA, 74 nt, Homo sapiens
gccgaccagccggcgccaaaggccagaccaagaagaacagccccagaaaggaagaagcgaaaagcaaaaaacgg

SEQ ID NO: 129433 - RNA, 67 nt, Homo sapiens
gaggcagccaggcaagaggcgcgcagccccgagacacaccgcaacacagcacgagaccaagaaggcc

SEQ ID NO: 129434 - RNA, 76 nt, Homo sapiens
cggcacagcgacacagccggacccccaccgcggccagccacgggacaggaaacacaagagagaaaaagaccgcgag

SEQ ID NO: 129435 - RNA, 82 nt, Homo sapiens
acagcggcccggccccccggacagacgccgacgcccaggaccagcccaaaaccaggcccaaggaacgagagaggaagcaaag

SEQ ID NO: 129436 - RNA, 79 nt, Homo sapiens
ccgggacgacgacggaaaggcgccacaagggacaccaagccccacccaaggagaccaagcgaccaagcaagcagcgccg

SEQ ID NO: 129437 - RNA, 73 nt, Homo sapiens
ggaaaaaagccgcacaggaaagggaaagcccgaaaaggaccagcgaagcaagcacagggaggaaacaggccaa

SEQ ID NO: 129438 - RNA, 66 nt, Homo sapiens
gaaagaaagcacgagacaacgaggggaaccagaagaggccaaccagcacgaacgccagcagcacgg

SEQ ID NO: 129439 - RNA, 58 nt, Homo sapiens
aaggcgccccaaggccagacaaaacgggccggccgcgcgaagacgcggaccacggcca

SEQ ID NO: 129440 - RNA, 56 nt, Homo sapiens
agcggacgcgggacggaagcacacgcggcggagaccaaagaccggacggaggaaga

SEQ ID NO: 129441 - RNA, 70 nt, Homo sapiens
accgagggacaggcgccgcggcggcggagaaaccaccacaaacacgaggccagcaacgaccaacaagaca

SEQ ID NO: 129442 - RNA, 75 nt, Homo sapiens
agcacgaggcacccccggaccagaacggcacggccacgggcgggcaggcaagaacgggaaaagaacggcaaaccc

SEQ ID NO: 129443 - RNA, 76 nt, Homo sapiens
gacaagcggaacaggagccgacgacccggaccaagaaggggaggcccgcggcaggaccgaggaaaccagacgagcg

SEQ ID NO: 129444 - RNA, 76 nt, Homo sapiens
acggagagaaaccacaaggggaccgcagcgaagcacagcagaaggggccacaagacagcacaaaaagaccgcagag

SEQ ID NO: 129445 - RNA, 89 nt, Homo sapiens
ggcgcagcggcgccgcgcccaggagggagggacacagccccaaacaggacgaaggcggcgaaggcaaacccagaaaagcaagccggggc

SEQ ID NO: 129446 - RNA, 54 nt, Homo sapiens
ccggcccccaacgacaaaagggccggagcgagggagagcaggaacacagagagg

SEQ ID NO: 129447 - RNA, 82 nt, Homo sapiens
gcgaaggccgggacccggccccggcccacaggggggggcaaacccgagagaacgggaggagaagagcacgcagcacagaaga

SEQ ID NO: 129448 - RNA, 64 nt, Homo sapiens
gaggggacagaagcagcggaaccggacacagggagggaggccgaagcggcgggaacagcacggc

SEQ ID NO: 129449 - RNA, 64 nt, Homo sapiens
acggacaagagcccgcacagcccaaggagacgcccagccaccgccccaggaggaaggagaaccc

SEQ ID NO: 129450 - RNA, 78 nt, Homo sapiens
gaggagcgggacaccccggaagcgggaaaggaacagagacgcaggcaagagcgcggaggagagagccaaaagaagggg

SEQ ID NO: 129451 - RNA, 78 nt, Homo sapiens
ccgcgcaccgcagcgccggggcacgacacaaaaacaggaccaaagacagagacaagcggggaagaacggcggagcaca

SEQ ID NO: 129452 - RNA, 58 nt, Homo sapiens
ccagaacgggggcaccgccgcagcacacccagaacaacgccagaaagaaagccaccag

SEQ ID NO: 129453 - RNA, 79 nt, Homo sapiens
gcaccaaccgaggcaacggcacaggaccagcaacggagcgaggagcggccgaacagggggaggagacacggagcagcca

SEQ ID NO: 129454 - RNA, 75 nt, Homo sapiens
acagcaccgggcgaaaaggaggaaaagaagccagaccgaggggcgggaggaacagagcgacaggcaaacacccag

SEQ ID NO: 129455 - RNA, 78 nt, Homo sapiens
gcacgggacgccggcacgcgaagggccgcaccgcaagagagacggggcaccagagccaggaggccaacccgacccgga

SEQ ID NO: 129456 - RNA, 83 nt, Homo sapiens
caaggcaagaccgaacagaaggaacgacgcggaccagaagccagagcgaggacgccggcaggaacgaacacagagaggagccc

SEQ ID NO: 129457 - RNA, 77 nt, Homo sapiens
gcaaggaagaaggagcgacagaagccggcgcaaggcagccgcgcgagaacaccgagcaaagccaccaacaagcgaca

SEQ ID NO: 129458 - RNA, 56 nt, Homo sapiens
accaggagcccgagagagaaggggcagacggacacaaaaccagaaggacagaaaca

SEQ ID NO: 129459 - RNA, 69 nt, Homo sapiens
aaagccacaagcagggaccaggccaagcccacccgaaggaaaagccaacacgggcaaggggggccgcaa

SEQ ID NO: 129460 - RNA, 70 nt, Homo sapiens
acgcccgaccaaggccacccacggaaacacgggcaaccgggggccgaagcccagaacacacaacaccagg

SEQ ID NO: 129461 - RNA, 62 nt, Homo sapiens
ccccaccgcgagcgcggaagggaaaaggccgaggcacagcgggaagaccgcaaagacgaccc

SEQ ID NO: 129462 - RNA, 80 nt, Homo sapiens
ggaagcccagaaggccaaaggcaagggggagacgaaccggcaaggaacagacgaagagcagagccaggcgacccagcagc

SEQ ID NO: 129463 - RNA, 64 nt, Homo sapiens
gcacgagagcacgagcaggaggcacacccagaagccacaggagaagcaagaggcggcccccgca

SEQ ID NO: 129464 - RNA, 42 nt, Homo sapiens
ccaggggccaggacccacaggagaagagagcggacccacacc

SEQ ID NO: 129465 - RNA, 72 nt, Homo sapiens
ccacgccacccccgaaggaaccgcgaccacagaccacccaagaagaccaaggcccaaaaggacccaagagag

SEQ ID NO: 129466 - RNA, 83 nt, Homo sapiens
acggaccgagaccggaccgagagcggaccgagagcgcgaaacgcacgagaagggcccccagcagaaggcagaacagaaccgag

SEQ ID NO: 129467 - RNA, 73 nt, Homo sapiens
aaaccagaaggggaaacaacgcagcggagcgagggaccgacaagagaaaaccagccccaagagacgacagaaa

SEQ ID NO: 129468 - RNA, 53 nt, Homo sapiens
gcgaggaagagcaggggcggccgccgggggaccagccgagcaacgcccgcagg

SEQ ID NO: 129469 - RNA, 49 nt, Homo sapiens
gccagagacaaaggacccccgggcaacaccgggcgcgcacagaagggac

SEQ ID NO: 129470 - RNA, 53 nt, Homo sapiens
agggaaaacaagaaaacaagggaaaggcgcccggcagcaggagaaacgagaag

SEQ ID NO: 129471 - RNA, 59 nt, Homo sapiens
aggggccacaaaggaccccggaacgggcgggcggcccccggagggccccaaggaccgag

SEQ ID NO: 129472 - RNA, 77 nt, Homo sapiens
accgagagcgcgaaacgcacgagaagaaacaggccccggcgcagccaggacgagggagacccccgaaaaaacccaga

SEQ ID NO: 129473 - RNA, 41 nt, Homo sapiens
gaccaggcaacacagagaacaggagcgagcagcagaaggga

SEQ ID NO: 129474 - RNA, 78 nt, Homo sapiens
aagaggagaggagcggcgccgccgggccacggcaggggcaggcagggcccagcaggacgcggaaacaccccggaggcg

SEQ ID NO: 129475 - RNA, 48 nt, Homo sapiens
ggacgcgccgcgccccaagcaacggggcggcacacaaggagcgaaggg

SEQ ID NO: 129476 - RNA, 61 nt, Homo sapiens
cagaccaaccgcaggcgcaaagacgaggacgcgcacaggaaaggacgcggaacaagcaggc

SEQ ID NO: 129477 - RNA, 84 nt, Homo sapiens
accgagccgggcccaccccccaccaaggaagggccagggagcagaagacccaaaagaaacccacaaaaaaccacgcgcccagag

SEQ ID NO: 129478 - RNA, 80 nt, Homo sapiens
gcgggaggcgacgacccgcgcagacacggaccgcgggccagccgccaaagaccccgccggagccaccaggagagaacgcc

SEQ ID NO: 129479 - RNA, 80 nt, Homo sapiens
gaacgggcgagcgcggcgcggggcggcgggccggccgaaggaacaagacccccgaaaggaaccgggaagcaaaggggagg

SEQ ID NO: 129480 - RNA, 68 nt, Homo sapiens
cgcccagacggagcaacgacacagaaaggaggagagaaagaacccacgcaggacgacagaagaggccg

SEQ ID NO: 129481 - RNA, 56 nt, Homo sapiens
ggagaaggagaggacggcacaaacaagcaacgagaaagaacgaggaaggaaaaacc

SEQ ID NO: 129482 - RNA, 71 nt, Homo sapiens
gcagcccccagagcagaagagggcacggcaaaacgcgccgggacagggcccacaaaccaacaacgaaaaaa

SEQ ID NO: 129483 - RNA, 91 nt, Homo sapiens
cagccgagcaggacaaccacaggcccaagggaacccagcagcagaccgccaaagacgcagccaccgcccacaagcagcacaaccacacggg

SEQ ID NO: 129484 - RNA, 81 nt, Homo sapiens
cgagaccaaggagaccaagaccagaagggaaaagggaaaacacccaaaggcagagaccaacagaccagcaacaggccggca

SEQ ID NO: 129485 - RNA, 70 nt, Homo sapiens
aggccaaggggcggcaaaaaggccagcacaacacgcgccaaagacacaccgagggggccagcccaagaac

SEQ ID NO: 129486 - RNA, 51 nt, Homo sapiens
gcggggacagaaccccaggcccaggagacggagagaacagagaaaaggagg

SEQ ID NO: 129487 - RNA, 55 nt, Homo sapiens
gcgagcgggacgcgggcagcagcaggccggggaagcgaccacaaaaacagagagg

SEQ ID NO: 129488 - RNA, 94 nt, Homo sapiens
gggaggggcccaggaaagcgaccccggggccaccgagccaaaaggacgaacaagcacaagcccggcggagcccaccaccacggcaagcacagag

SEQ ID NO: 129489 - RNA, 72 nt, Homo sapiens
accccccaccagacaggacaaaggcgccgaccagggccccgggcgcgggagccagccgaagaaaggaaaaga

SEQ ID NO: 129490 - RNA, 82 nt, Homo sapiens
cggacccgccagagggacgacgggagaagggagaacaagaacgggcacggagaggcaagcaaccccggggaagaggccaggc

SEQ ID NO: 129491 - RNA, 72 nt, Homo sapiens
agacgcagggcgcccccgcggcggagaaaccaccacaaacacgaggccagcaacgaccaacaagacagaccc

SEQ ID NO: 129492 - RNA, 77 nt, Homo sapiens
cccagccgcacacaccacgccgcaaggaccggcacaaggacgccaagggggcgagaggaaccccgagcccccggggc

SEQ ID NO: 129493 - RNA, 76 nt, Homo sapiens
agagagaggggccagagaacagaaacggcaaagggccggggacaccaggggcagaaagagaagacagaaaggaggg

SEQ ID NO: 129494 - RNA, 82 nt, Homo sapiens
cagggagacccgagaacaggcaaagaaacaccaccggaaacaacagacgggaagagaggggggagcagggaagaaaagaacc

SEQ ID NO: 129495 - RNA, 82 nt, Homo sapiens
gaggacaaggccacagaagaggacacagccagcagagaccccccacccagcaaagacccaagacggagggcccggaaaccag

SEQ ID NO: 129496 - RNA, 78 nt, Homo sapiens
acgagagggggcgcccgcgccgcccccggcgcacccccgccccgccaccagccccgcgcccgagcagccacccacgca

SEQ ID NO: 129497 - RNA, 77 nt, Homo sapiens
caaaacgacgcagaacagcacgaaagaacggaggaagcacaagggagagaaaacccaaccgaggaaaagaagagaga

SEQ ID NO: 129498 - RNA, 108 nt, Homo sapiens
gccacacagaaaggagagagaagaagagaagaaggaaagcaacacgaaacaagaacccaggggggggaacagaccggagcaggaaaccagaagaaaagggggaagaga

SEQ ID NO: 129499 - RNA, 64 nt, Homo sapiens
acccgccgcgcaccgacccgacgcgccggcccacgcgcggccaagaacggccgagcgaccagga

SEQ ID NO: 129500 - RNA, 90 nt, Homo sapiens
agaggaggagccggagacgccgcggaggagaccggaccgaagacggaccggccgggaagagaaacgaagggcaaaggcaaagggcagcga

SEQ ID NO: 129501 - RNA, 70 nt, Homo sapiens
cacaggagaaacaaacgcagggcggagagcggagagaagaaggaaaacccagcaaccagagaagagccca

SEQ ID NO: 129502 - RNA, 98 nt, Homo sapiens
gggaagccgggaacccagcccccgaggagaggagaaaggagcgagggaaaagcaggcccagcacgacaaacaggacaaacgggacagcggaggaccgc

SEQ ID NO: 129503 - RNA, 59 nt, Homo sapiens
ggagaagagaaagagacgcaggcaagagcaacgaaccaaagcaaaggaggccgggggaa

SEQ ID NO: 129504 - RNA, 38 nt, Homo sapiens
gggacagagagagccacggcagcgccccaaccccagaa

SEQ ID NO: 129505 - RNA, 66 nt, Homo sapiens
aagacccccagcaaaccccccccgaccaaagccaccagcccagacaggaagaaagagggccacgga

SEQ ID NO: 129506 - RNA, 84 nt, Homo sapiens
aaacagaccggagaccgcgcagaagacacgcccggaagaccagccaacagggacacccgagaaagcggacggggcgccacccgg

SEQ ID NO: 129507 - RNA, 74 nt, Homo sapiens
caaccgccacgagacaccaagcacagccagaagaaccacaggccacaacgagccagcccaaaccgaagggaaag

SEQ ID NO: 129508 - RNA, 61 nt, Homo sapiens
gaaagaaaccagaagccagagcaccgcacccacaaagccaagagacaagcgacccgcaggg

SEQ ID NO: 129509 - RNA, 60 nt, Homo sapiens
gaagaaggaagggaagcgacagggcaggcaccgaggaagcggaccagaacagagaagaaa

SEQ ID NO: 129510 - RNA, 88 nt, Homo sapiens
ccaccacagaaacaaaagcaacaaagagggacagagcgggagccaccagcgccaaagggaagccaggagcccgggggcacggggagaa

SEQ ID NO: 129511 - RNA, 77 nt, Homo sapiens
cagcaaacaagcccaagcaacgagagacagcacgaaaaggagaaaagcgcagccggccggaaaagaagagggagcac

SEQ ID NO: 129512 - RNA, 79 nt, Homo sapiens
ggaacaggcggcgcgcgcggcgcgggacgcgcgcgggcacccacggagccccggggcggccagacgccccgcgccggag

SEQ ID NO: 129513 - RNA, 90 nt, Homo sapiens
aacacgagcaggcaaggccagccccccgcgccaccaccgcagcgcaagcccgggaccgggagcccgggaccgggagccggggggccaccc

SEQ ID NO: 129514 - RNA, 74 nt, Homo sapiens
cgacccgaagacccacgcggaggaggacgaggacacggccgcgggcagaccagccaagggcgagcgccagcagc

SEQ ID NO: 129515 - RNA, 86 nt, Homo sapiens
ccaggcccagggccggcccccccaggacaacccagaggcaacaaaggcgagagagcagcaccagcagaagagggcccgaccacggc

SEQ ID NO: 129516 - RNA, 76 nt, Homo sapiens
gcgcccggggcacgcccgcggccgccggacggccgggcgcggagggggacgaccaccagccaggccggggacaaac

SEQ ID NO: 129517 - RNA, 56 nt, Homo sapiens
caagaagaacagagacagcagccaaacccccaggcacgggccacagagacgagacc

SEQ ID NO: 129518 - RNA, 82 nt, Homo sapiens
ccgcagccggggacgcagacgaagggaaccggagcgcaggaaaccaggggaaaggggagaaaagggagaccagggaacgggc

SEQ ID NO: 129519 - RNA, 59 nt, Homo sapiens
cagagagaaaccaacagaggcaagaaggacaacaaggagaagggaagaacaggaagagc

SEQ ID NO: 129520 - RNA, 57 nt, Homo sapiens
cccaagacaagacagcgcaaggcagaagaagccacacacagaagacccaaagagaac

SEQ ID NO: 129521 - RNA, 88 nt, Homo sapiens
ccaacgcgcgggggacccgcggacacaccgccccgagaaggagaagcaggaccaaaggagacccagccaaaaaacagagccacagcaa

SEQ ID NO: 129522 - RNA, 72 nt, Homo sapiens
gaagacgagaccagccgcgaacaacaccggcagagagagagacacaccagacgagaaagcgacggagcggac

SEQ ID NO: 129523 - RNA, 63 nt, Homo sapiens
gggacaaaacaggcaggcggccacaggaaccaagaggagggccccaaggacgaaaaaaggagc

SEQ ID NO: 129524 - RNA, 78 nt, Homo sapiens
caaccgggcgcgaaaaaaaaccggggaaaaaagagaaagcgaaacggggaggcaagcaggggggcaaaggaaagaagg

SEQ ID NO: 129525 - RNA, 76 nt, Homo sapiens
gcaccggcagaaaggaggaggaaaacacccccaggcggagaacggaaaagcaccaggaagcagagaggaccgcaga

SEQ ID NO: 129526 - RNA, 46 nt, Homo sapiens
cccgcccacccacagagggggaaccagcccgggagcaaacacccgg

SEQ ID NO: 129527 - RNA, 71 nt, Homo sapiens
gccgcgccgcaccccgagcgaccgaaaagggaacaaccccaaaaaaccgacacccgggagaagaaaaaaag

SEQ ID NO: 129528 - RNA, 45 nt, Homo sapiens
cgaacacgggcaccaaggcccgggaagggacacccggagaagcgc

SEQ ID NO: 129529 - RNA, 62 nt, Homo sapiens
ccagcaccggcgaagccgggccaaaggacgaagaacccacagagaaagcgagagcaaaagag

SEQ ID NO: 129530 - RNA, 72 nt, Homo sapiens
ccacgcgcaggcgcgcgggaggcggcagcagcaggcagaggggcgggcaaaggagaggcacaggaagcagag

SEQ ID NO: 129531 - RNA, 66 nt, Homo sapiens
agacaggaaaagcacaaccagccaagggccacagccacaaaggaccagcaggaacaaagaaagacc

SEQ ID NO: 129532 - RNA, 74 nt, Homo sapiens
gaacgcgcaaggcaaagcaccgaggcgcgaacagggcccacccgccacgacacaggggaagaagaccaccgcac

SEQ ID NO: 129533 - RNA, 60 nt, Homo sapiens
acaccacgggccaaaggagccacgggcaccggggagaaaaagccaacagcaggcaggggc

SEQ ID NO: 129534 - RNA, 72 nt, Homo sapiens
gaaggaccaaaaaaggcagaacgacggacagcaaggcggcaaggcgggagaccagagagacccagcggggga

SEQ ID NO: 129535 - RNA, 84 nt, Homo sapiens
gacgaagacaacgacagcgacggcacgccgaagcaccgccggggggaagccccgcgccggccgcccgggggaagaaggaccggg

SEQ ID NO: 129536 - RNA, 79 nt, Homo sapiens
acccaggacagaaagaacggaggagcaagggcgaaaagccaggagcaaaagacgagcgcgacgccaccagcaacgaacc

SEQ ID NO: 129537 - RNA, 80 nt, Homo sapiens
gccgggggcgagccggagcgaccccggcaggcgaggaaaaccaccacacaggggaaacacccagacaacacacacaacag

SEQ ID NO: 129538 - RNA, 67 nt, Homo sapiens
gacagagaggagggagaacaagcaacggcggggcaaggccagagaaggcgggagaaagacacgaacc

SEQ ID NO: 129539 - RNA, 72 nt, Homo sapiens
ggacaggagccgaaggacacaggcacaagcagcaaagcgggccagacacgaagaggccggcgaaggaagaag

SEQ ID NO: 129540 - RNA, 75 nt, Homo sapiens
ggagcagggagaagagaaagagacgcaggcccggaggcggagccgcacgagccccgaaagacccgagaccccagc

SEQ ID NO: 129541 - RNA, 78 nt, Homo sapiens
cgcccccgaaaagcaaggcggcaagccagaagcaccgaggacagaacaacaggcaggcaggggcagaaggcgacccag

SEQ ID NO: 129542 - RNA, 99 nt, Homo sapiens
caacgaccggagaggggaacagacgcagggcagggccccgcccggcggggaaggcccgggcccgccggccacaccacacgcccccgccgcccacaacgc

SEQ ID NO: 129543 - RNA, 72 nt, Homo sapiens
aacgaaacagcgcagccaggaacaggacgaagaccagcgccagggaaagaaggcgcgcggaccggcagcgcg

SEQ ID NO: 129544 - RNA, 35 nt, Homo sapiens
gagcccacagccaccaccagcggaggcagggggac

SEQ ID NO: 129545 - RNA, 61 nt, Homo sapiens
cagcaacgaggcagcggcaggccagggcagccgcggacccaaagacaggaccacgcaccag

SEQ ID NO: 129546 - RNA, 69 nt, Homo sapiens
cccccccccccccaagaagaggcggccacccacgagccgacggcaaacgccagggagccaccaagggca

SEQ ID NO: 129547 - RNA, 87 nt, Homo sapiens
cgcggacgccgaggcaccgaggcaccagaggagccagagacccagagcagcagcgaagagaaggcccagcccccccgccacccccca

SEQ ID NO: 129548 - RNA, 75 nt, Homo sapiens
cgcccgggccagcggccgcgcacccccggccggaggcaccagcccgagaggggaccccgggcaaggacggcacgg

SEQ ID NO: 129549 - RNA, 90 nt, Homo sapiens
agaagcgcccagcccggagggagcagagccccaggacaaacaaggcagcgcggaggagggaagggcacgagcacgaaaagcacgcccaag

SEQ ID NO: 129550 - RNA, 78 nt, Homo sapiens
gcgagaggaggccgccagcagaggcggagcccgcagaccgcagaaggccggagacaccagcagaaggagcacaacagg

SEQ ID NO: 129551 - RNA, 56 nt, Homo sapiens
aggcccgcgccgggcgcgggcccaggccggggggggcacagagccccggaagacag

SEQ ID NO: 129552 - RNA, 78 nt, Homo sapiens
cggaagaaggaccgaggaaacgcggaaacagagaagaagagaagaaagcacaaaccggccagggaagaaagcacggga

SEQ ID NO: 129553 - RNA, 72 nt, Homo sapiens
gaaagcggggacggccgacaacagacaaacgaaggaaacgcgaggggggaagccaggcagagaaaaggcaca

SEQ ID NO: 129554 - RNA, 88 nt, Homo sapiens
cccgggccaacccggacccaagaagcagagaccaaaggcccaaccaaccaaggacacgccaccacaccgacccacgacaagaacggag

SEQ ID NO: 129555 - RNA, 83 nt, Homo sapiens
ggagccagaaacgcaaagagccacacccagcaggaggcccaggcacccagggggacaaggaggaaagcagggacccaggccag

SEQ ID NO: 129556 - RNA, 107 nt, Homo sapiens
ggccaaagccggcaggcgccgcagggacccaagccgagcagagaagacccaggaagaagggcacgaccgcgcaagcaggcgcgcagagggacaacagaggcacgccg

SEQ ID NO: 129557 - RNA, 67 nt, Homo sapiens
caaccaaaggaacggagagaaccgggaccccccgcggggacccggaacggacggaaggcgaccacac

SEQ ID NO: 129558 - RNA, 60 nt, Homo sapiens
ccccacaccccccgccgcagcagcaccggcgacagagcggaaccagcaaagaagaaacca

SEQ ID NO: 129559 - RNA, 52 nt, Homo sapiens
ccggagaaaaggccaagaaggcagcggcagggaaacgccccccaagagacag

SEQ ID NO: 129560 - RNA, 74 nt, Homo sapiens
gagacagccccagacgggcaggccgccccggaccccacagagcgagggggaacggacacgaaaacaggaagcgg

SEQ ID NO: 129561 - RNA, 51 nt, Homo sapiens
aacaagcaacggcgggggagaagaccaagccccccgaggagccccagaccg

SEQ ID NO: 129562 - RNA, 74 nt, Homo sapiens
aggagcacccaaccccgcgcgggaggccaccgccccaccagcaggcaacgccacagaccgccagcgccaggaca

SEQ ID NO: 129563 - RNA, 77 nt, Homo sapiens
gggaggcgaccaggccgacgcgggcgccggacacagaagggggcgggaaggcgcaaaagaagccggccccggggacc

SEQ ID NO: 129564 - RNA, 65 nt, Homo sapiens
gaacaaaccagaggaagcccacacacgccagcagaccaccccgggagggacaaaacaaggcgcgg

SEQ ID NO: 129565 - RNA, 79 nt, Homo sapiens
gccggagcgcggcggcacgaggagggaccgagaggagagcgcggccgacgcccgcgcgcgcgggccgcggaggccacca

SEQ ID NO: 129566 - RNA, 74 nt, Homo sapiens
cgggagaggccgcggcggccaggccccagacacagacgagcaggggaagacagggggcagcaccggcagaagca

SEQ ID NO: 129567 - RNA, 81 nt, Homo sapiens
gcagcacaggggcagccaagagcagccaagcgccgggaagcccgcggcgggaagccccggggagcagggcacaggcggcgg

SEQ ID NO: 129568 - RNA, 92 nt, Homo sapiens
gccagaagaaaacggcgagaggggcgagaacgccacgcgggccggcgaaagcgcagccccgcaaagggaacaggaagcagccacggagggga

SEQ ID NO: 129569 - RNA, 78 nt, Homo sapiens
aacggcaaaggcagaccaacaagaggacccaggagaaacgccccaaagagcagcgacgcaaaagggcacaggcgaaga

SEQ ID NO: 129570 - RNA, 69 nt, Homo sapiens
aaacccacagaacgcagggggaaagccgaagagacccccagaagccagcagcccgcagagcgcagcaga

SEQ ID NO: 129571 - RNA, 71 nt, Homo sapiens
ccggaagaccgcgccgccagccggcacacgagcggccacgagcaaccaagaggagaaggaagcgcacaaaa

SEQ ID NO: 129572 - RNA, 70 nt, Homo sapiens
gcacacagggccaaccccagggggggagacgacggcagaccagcgcaaaggagaaggaccaagaaccagg

SEQ ID NO: 129573 - RNA, 37 nt, Homo sapiens
gcggcgaaacggcacagaaaccaggcaagcagccacc

SEQ ID NO: 129574 - RNA, 67 nt, Homo sapiens
gccggcccgcgggggagccccgggagccgcacgcaacggcggcacaagaaaggagagcaagaccccc

SEQ ID NO: 129575 - RNA, 77 nt, Homo sapiens
gagggcaccacagacaagaaagcccccacggaaggccacgagggcggaccccgggagaagaaaaagcagaaaggaac

SEQ ID NO: 129576 - RNA, 76 nt, Homo sapiens
cagggcggaaggacaacagcccgacaaccagagaaaagaggacccaccgacaccccacccccaagaaagcaccagc

SEQ ID NO: 129577 - RNA, 91 nt, Homo sapiens
gggaggcgacaggcgcgacggcagccacaggggcagcgggggggcgaagacaacgaagagaggaaagaagcggaaaggagggagcacacaa

SEQ ID NO: 129578 - RNA, 75 nt, Homo sapiens
gaagaccaaagaaacaaagaacggacccacaccgaggcacccgaagaagagaccaccaaccagggacaccgaaag

SEQ ID NO: 129579 - RNA, 83 nt, Homo sapiens
agcccggccgggcaggggaccccgacccaggacggaccggaaggcccagaaccaagaaggccagggagaccgccacgacgagc

SEQ ID NO: 129580 - RNA, 71 nt, Homo sapiens
aaacccaagaacagggagaagagacgacaggccacgagcagggaaggggggagacgagaaaacagaagcag

SEQ ID NO: 129581 - RNA, 62 nt, Homo sapiens
caaaaaggaagaaagaagaaggaagcagaaaagcacagagagagacacagccgaaagcggac

SEQ ID NO: 129582 - RNA, 79 nt, Homo sapiens
aggccgggagcgcgagcaggagcgcgcaagcggcgggggccggacaccacccgacagcgaccaggggaacgcccgcgga

SEQ ID NO: 129583 - RNA, 58 nt, Homo sapiens
cgagggacaaagaccgaaacgaccccagagacccaccacgcccggcagcggcagcaga

SEQ ID NO: 129584 - RNA, 76 nt, Homo sapiens
gcgcccggccccaggacgcccggcggccggggagccggcccaagcgggggaagagggaacagaaacgcccccgacg

SEQ ID NO: 129585 - RNA, 35 nt, Homo sapiens
ggggaaagcggaaggaagcgcggagccgcgcaaga

SEQ ID NO: 129586 - RNA, 58 nt, Homo sapiens
aacccggcaccgccccaggaccaccagaagacaagaggggcaggaacacccagacagg

SEQ ID NO: 129587 - RNA, 77 nt, Homo sapiens
caggagaacgggaggcgcagaaagagaccgacagaacaagcgcaaaaaaagaagagcagaaacgccaacaaaaagac

SEQ ID NO: 129588 - RNA, 85 nt, Homo sapiens
cgcacggcccggggggagacagccacgggaaggcaggaaaaagcagcggccccgaggccaccccaaccccaaggccagaggcggc

SEQ ID NO: 129589 - RNA, 64 nt, Homo sapiens
ggaaaggcaaaacggaggcggagacagcacgaaacagagcggaaaccagcaccacaaccccagc

SEQ ID NO: 129590 - RNA, 73 nt, Homo sapiens
gcgagggaggagccccccgacccaggcgccgcgccgaacccaggaccagcggcgggagaacacagggaccaaa

SEQ ID NO: 129591 - RNA, 58 nt, Homo sapiens
ccggcgaaggagcgcaacccaggaaggagcagccaacacgaacgggcaggaacacaac

SEQ ID NO: 129592 - RNA, 86 nt, Homo sapiens
ccaagcgcccggaggcccacagcagggggcagggggggcagcccccggggccagagaagcgggcgcgccaagccgcgaacagccgc

SEQ ID NO: 129593 - RNA, 84 nt, Homo sapiens
ggaggagcgcgccggagaacgacaccaagaccaggagagaagacgaaaaagaagaagcagcgaacagcgaaaagcccaaacggg

SEQ ID NO: 129594 - RNA, 75 nt, Homo sapiens
ccgcaggccaagccagcaagacccaacaaaaaagaaacagcaaacaagaggaaggggacgaccaccagccaggcc

SEQ ID NO: 129595 - RNA, 41 nt, Homo sapiens
cgccggcccaccaaacagaaacgagaaggcagagggggcga

SEQ ID NO: 129596 - RNA, 79 nt, Homo sapiens
gcacaccggcacgaaaagaaaaagccagcggagcccgaggggcgggagggggacccggcacggaggcgaagccccggca

SEQ ID NO: 129597 - RNA, 80 nt, Homo sapiens
ggcaccacggggaagaaaggggcagggggccacacaaaagacagggggagagccacccagcagggaggggaaggggagcc

SEQ ID NO: 129598 - RNA, 49 nt, Homo sapiens
cgacaaggagagaagcgcggagccccaaggcaccggagagcgaagcacc

SEQ ID NO: 129599 - RNA, 73 nt, Homo sapiens
cgggcccgcggcggcgggcacccggaggcgcccgagcgagccgagcccacccgaccagggcccggcacccagc

SEQ ID NO: 129600 - RNA, 79 nt, Homo sapiens
ccaaacacgccggaaaccccgcccacagcacgagacgagaacggcacgacacacgcccccgagggccaaccacaagccc

SEQ ID NO: 129601 - RNA, 65 nt, Homo sapiens
aagggcacacagcccaaaccgccaagaggggcaacgaaaaggaagacgggaagccaagcaggaca

SEQ ID NO: 129602 - RNA, 75 nt, Homo sapiens
agaaaaagaaagcgacccaaaccgccgccggacgggcgacaaaaccagacccccgacgccgggcagggcgaaggg

SEQ ID NO: 129603 - RNA, 68 nt, Homo sapiens
cccgacagcagcacacccgcgaagcaagagcagggaacggaaccggaagagcaaaagcacgaacagca

SEQ ID NO: 129604 - RNA, 65 nt, Homo sapiens
caacaccgcgccccagggcagggggcacacgacagggccgggccccgggcccgcgcggcagcgcg

SEQ ID NO: 129605 - RNA, 63 nt, Homo sapiens
cccgcgagcccaccgggcccagggccagcagaggaggggacacaaaggaagaggcagccagac

SEQ ID NO: 129606 - RNA, 85 nt, Homo sapiens
gggacggcggcggcgcagccggaacccgccagggccagggccaggccagcgcccggcggcccagggagaacacccagcagaggcg

SEQ ID NO: 129607 - RNA, 90 nt, Homo sapiens
gacagacagccgcacgaaccggaccaggaggacgcccaaggagaggacgcccccacaaaagaaaccggaccccaagcgcggcccacggaa

SEQ ID NO: 129608 - RNA, 70 nt, Homo sapiens
gaaaaagaccgaccgaaccgaaccgaggcaaaagaaaggaccgacagcacgaggaggagagaagaaaagc

SEQ ID NO: 129609 - RNA, 79 nt, Homo sapiens
caggcggagccgaccgggccaggaacacaaggaagaagcgaaagacgaggacagcagacaacaagggaacacgaccgac

SEQ ID NO: 129610 - RNA, 79 nt, Homo sapiens
accaggaagggagaaggagccaggaaggcccaccagacaggcgccagagccccaaacgagagcccagacagagaaagca

SEQ ID NO: 129611 - RNA, 75 nt, Homo sapiens
caggaggaagacccgcagcgggacaagcgggcaagacaaagggcccacgagcagcgagcgcccccggcccccggc

SEQ ID NO: 129612 - RNA, 88 nt, Homo sapiens
gggccgccgccggagcggcgccggagccggagccggaacccagccgcgccagaaaagccaccaaccccaaccgccaggaggacgggaa

SEQ ID NO: 129613 - RNA, 79 nt, Homo sapiens
caagcaaacgcagaaggacgcccacgagcaaccaagacgcggacaccgaagcccgaggccacaggacacgccaagggag

SEQ ID NO: 129614 - RNA, 72 nt, Homo sapiens
cccaccacaccacgccgaacccccacccagagaccccaacgggaaggccgccccggacgaagcgcagacccg

SEQ ID NO: 129615 - RNA, 45 nt, Homo sapiens
gcgcggcgcgccacgagcagaccccaagaagaagcggaagaggag

SEQ ID NO: 129616 - RNA, 74 nt, Homo sapiens
cccacgggcaccggagacccaggcgacacaccaaagaaaaaacacaccaagcagaaacggagccaaggggcagg

SEQ ID NO: 129617 - RNA, 91 nt, Homo sapiens
cggaggaggacaacgacaccaccgcagcgacgagcagcagcacggcagaagagcgacgggaccgagagaacgaagcccggcgccggaggag

SEQ ID NO: 129618 - RNA, 45 nt, Homo sapiens
aggagaacgcagaagaggcaggcgcagaccagcgcggggcgcggg

SEQ ID NO: 129619 - RNA, 79 nt, Homo sapiens
ggcggcagcccgagaccgcagcagggcgaggccggagccggcgggcggcaaggagagccggggcgcccgggggggcgag

SEQ ID NO: 129620 - RNA, 68 nt, Homo sapiens
aagaccacagaaccgggaaaggaggcaggggaagcacaaaagcgcacccgcgccagcgaggaccggaa

SEQ ID NO: 129621 - RNA, 61 nt, Homo sapiens
cgagcacccaggcgacgcccaccaagagaaccacgagcaacccaaaaggcggggagaaggc

SEQ ID NO: 129622 - RNA, 78 nt, Homo sapiens
cgaggagcgaagcaggaagccccaccgccaggaacggggggccgacaaccggggccgggagaggaaggccccaagcag

SEQ ID NO: 129623 - RNA, 71 nt, Homo sapiens
cgcggaaggcacagcgcggaacggagcagacaagggaggacaggaaagcagacccaaccggaaccacaagc

SEQ ID NO: 129624 - RNA, 71 nt, Homo sapiens
agaccaccggcccggcccccaaaggcgggaaaggcggagccaccggccggcgaagcagaggaaagagcacg

SEQ ID NO: 129625 - RNA, 79 nt, Homo sapiens
agaccgcacgagggcacccacaccacgacaccgaaaacccaccgagcccgccaaaggacgaaggacaggcgggcgggac

SEQ ID NO: 129626 - RNA, 69 nt, Homo sapiens
cacgcaaagaacaaaccaaaccacgaaggccaagagaggaaaaagccagaagcgacagagcgcccgagg

SEQ ID NO: 129627 - RNA, 77 nt, Homo sapiens
caggagcaagggaaagaacccggcggggaaaagggaaggaaaagagacgcagggcggggagcaaagagaagaaacac

SEQ ID NO: 129628 - RNA, 68 nt, Homo sapiens
gcgccgaaacggaacccgcaccaaggccagggcgaccgggcaaggaacgggagacgcaggaaaccaaa

SEQ ID NO: 129629 - RNA, 78 nt, Homo sapiens
gggacgcagccacccgcgggagcagcgcagagacggccgaaaaacgaggggacagaagcgaaggcgagacccggaagg

SEQ ID NO: 129630 - RNA, 85 nt, Homo sapiens
cgcgccgccgggccggacccaggccgacccgcgaacccccgggaccccgccgccgcacaacccgaggaagggaccacagaccagc

SEQ ID NO: 129631 - RNA, 67 nt, Homo sapiens
ggagaaggaccaagaaccaggcgaacacgcagcaaagaaaaaaagcccaggaaagaaccaggaaaca

SEQ ID NO: 129632 - RNA, 61 nt, Homo sapiens
ggaacaagggagggggacagaccaaagagggccaaacgaccaagaaagcgggacgcggaaa

SEQ ID NO: 129633 - RNA, 77 nt, Homo sapiens
ccagggcggacaaagaagggaggaacaggaaaagccccggaacgcggagagcggcaagaacaagcaaagaaagccag

SEQ ID NO: 129634 - RNA, 70 nt, Homo sapiens
acgcaggcgacaaaagaaaacgacggaccagaggcccacgaaaggggcccagagagggccgaaccggagg

SEQ ID NO: 129635 - RNA, 84 nt, Homo sapiens
cgcccgccgccccagccgccagggacagcaacccggaggccgaggaacgggccgcgaaggcgccgacagggggcacccgaggag

SEQ ID NO: 129636 - RNA, 113 nt, Homo sapiens
cccacggcaccgcgcagaggcccccgccgagaggagccccgagacgaggggaaaggcgcagaggaccggaaggggaagggaacaagaagcagggaaggaacgaaagcggagag

SEQ ID NO: 129637 - RNA, 86 nt, Homo sapiens
cgcgcggagcggagaacgaccggcccgccaagaccagagaaggaggagggaccacgcgcgaggccgaaccaagaacaaccccagac

SEQ ID NO: 129638 - RNA, 79 nt, Homo sapiens
cggcggcaagccagaacccaacaaggaggccagggcggccaggggacgccggaaagaccagaaaagcacccaagcaaag

SEQ ID NO: 129639 - RNA, 74 nt, Homo sapiens
aaaaaaagaccaggaaaacacggagagcagaagcccccacgaaaagcccgaggcaacaaaccaccaggcagggg

SEQ ID NO: 129640 - RNA, 69 nt, Homo sapiens
cacccaaggcagccggaaacgaggagcacccacgggagaccggggggcaagaaaaggaagaagaagcac

SEQ ID NO: 129641 - RNA, 71 nt, Homo sapiens
ggaaagagccgacggacggccggcgagggcacggggagcggaggcagcagaggccgcaggaagcgggagcc

SEQ ID NO: 129642 - RNA, 71 nt, Homo sapiens
gaggcaacgaaaaacagaagggaacgagaaaaggaagagcgaagggagccacacccgacagagcgccggcc

SEQ ID NO: 129643 - RNA, 112 nt, Homo sapiens
gccccccccgcgaccggggaccagagagggaagagacagccagcacaccccgcgagcaagggaaaaggaaaccagaagagggacgaagaaaacagcgcagcgcccagacccg

SEQ ID NO: 129644 - RNA, 82 nt, Homo sapiens
cacccggagcggcgcacggcgaccccgagcccacggcacccgaaaagaagaggaccggaacagcgcaagagaaaaaccggga

SEQ ID NO: 129645 - RNA, 73 nt, Homo sapiens
gcccgaccacaagacaccaccgccacacgcagacccggggaaggaggcgaaacacggagccaaagagaaccac

SEQ ID NO: 129646 - RNA, 77 nt, Homo sapiens
agcacccacagccaaggcgggagccacggggccgaaaagccccaaggagagccaaaaccaccgacgagagcaaggaa

SEQ ID NO: 129647 - RNA, 86 nt, Homo sapiens
gacaggcggcgccaccgaacagacccggaaggacggcgaggggcggaaaacaccccaaaagccaaaagggaaaggaaaagaccaac

SEQ ID NO: 129648 - RNA, 83 nt, Homo sapiens
gaccagaaaaccgacaacccccagaaagccaagccgggacggacagcgcaggagaagagggccacaagcgaaggcaaaaccaa

SEQ ID NO: 129649 - RNA, 72 nt, Homo sapiens
gacccaaggaaccaggcgaaggcgcaaggaagaaccaacaccaaagaaacagcccgcacaggacaaagacca

SEQ ID NO: 129650 - RNA, 75 nt, Homo sapiens
ggggagccccgcgccacaggacgcaaaacagaacccccccaggacagcaagaagaccagaagaagagaaccaccc

SEQ ID NO: 129651 - RNA, 74 nt, Homo sapiens
gcagaaaagggcacaaggacacagaaaagcgaaagccagaaggagaaacccgagcagccccacgcaccagcgcg

SEQ ID NO: 129652 - RNA, 81 nt, Homo sapiens
gaaaacccgggacccaccacccaggccccgacgccccgagaggggggcgggccgagcacccgcaggccccgcagaggcgcc

SEQ ID NO: 129653 - RNA, 94 nt, Homo sapiens
agccgcccgagggaggcgacgggggcgaagagcgcgccgcccccgcccacccaggcgaacacgcagcaaagaaaaaaagcccaggaaagaacca

SEQ ID NO: 129654 - RNA, 79 nt, Homo sapiens
gagccgcgccgggcgaggcggcggagagcgaggccggacgagcagggggaggaacaaagcgaggaagggaagggaaggc

SEQ ID NO: 129655 - RNA, 66 nt, Homo sapiens
gccacagcggaaccccaccaaccagaaacagaagcacagcaagacgacaacagagagcacggcagg

SEQ ID NO: 129656 - RNA, 74 nt, Homo sapiens
ccgacggagcgccaggacgacaagcaaagggacagcaaaggcgcagcaccagcacccaaccaagaacgacccaa

SEQ ID NO: 129657 - RNA, 84 nt, Homo sapiens
acagccgcggcggcagcagcaggagaggaaccacacggcggaggcaccgacaaaccagcgaaggagcacccacccaggaacccg

SEQ ID NO: 129658 - RNA, 51 nt, Homo sapiens
ccaagcgcaacaccagcaggggaaaaaagcagcggaggagaaaaaaaagaa

SEQ ID NO: 129659 - RNA, 77 nt, Homo sapiens
cgcgcacaggcagaagaagaaacaggcaaacgaggaccggacacaccggaacaaagaaaaccaaaacgcaacagaaa

SEQ ID NO: 129660 - RNA, 74 nt, Homo sapiens
ccagggcggggcccgagaccgggagaagagccagagcccgaggcgagcgcggcggggccgggcggagcagaaca

SEQ ID NO: 129661 - RNA, 83 nt, Homo sapiens
gccaggaagaaagaacaggagaagagcagaggacagaaggaagcaaggcaccaagaccggagagaaacagaaacaagagaaaa

SEQ ID NO: 129662 - RNA, 74 nt, Homo sapiens
aacacaaggcccccagacggggaagagacacgacaggccgcagccaagccggaacaggagcggcgagcccaaac

SEQ ID NO: 129663 - RNA, 78 nt, Homo sapiens
gcacgagagaacaaaaaaacaacaccgcgaaagacagagagagcaaaacgacgaaggagccaagaggaccgggaccca

SEQ ID NO: 129664 - RNA, 37 nt, Homo sapiens
caaagccagcagcaacaaaggcaaacaccgcagaggg

SEQ ID NO: 129665 - RNA, 78 nt, Homo sapiens
gcacaacccaagaaaccgaaggcagacacgagggaggcaaccggccaaaagaagaagacagcgcagaggacccggaac

SEQ ID NO: 129666 - RNA, 53 nt, Homo sapiens
cgagcagaccgcagccaagaggcggcagggcacccccaagcaggcaggcagcc

SEQ ID NO: 129667 - RNA, 73 nt, Homo sapiens
gagagggggaccccgcagccgcagaggaggagcgcagcccggcccggacaaagacggcaggggaacacaagac

SEQ ID NO: 129668 - RNA, 72 nt, Homo sapiens
cgacccgaacccaaaggaggaaacagcggcaagccacagacgccaaggacccccggaagcaagagaagacgc

SEQ ID NO: 129669 - RNA, 73 nt, Homo sapiens
aacaacgacgggagagcaggaggaaaacaaccaaaaggggcaaaggcaggacaaagcggaggcgccagcacac

SEQ ID NO: 129670 - RNA, 84 nt, Homo sapiens
ccgaggaaagggaccgcccaccagcgaagagagagacaaaagacggcggccaaacagagcagacccagaagaaccacgcgcagg

SEQ ID NO: 129671 - RNA, 73 nt, Homo sapiens
cggaggccaaagaaaagcggagcaggaaagaggcgaacacaaagaaaggcagaaggcagaaaaaaaaggagaa

SEQ ID NO: 129672 - RNA, 96 nt, Homo sapiens
acaagcgaaacggcccaccaaaaccagccaaaggaggaagacaggcaggagaaacagccaaaacgggaccaaaggccaagcagcccgcaaagggac

SEQ ID NO: 129673 - RNA, 89 nt, Homo sapiens
ccggagccagccccgcagcggaccgcagcaggagggagccaggagccaagggccgcgggcccgcagcccaccagaaccggaaccgccca

SEQ ID NO: 129674 - RNA, 56 nt, Homo sapiens
cgggcgcgggggcggcggcagggggcggagcggaaggggagaacgagggcacagcc

SEQ ID NO: 129675 - RNA, 78 nt, Homo sapiens
cggaccgacgggcacaagccaggaggagcccggaagaaaggaagccaaaggcagcaacggaggcggagcacccccgaa

SEQ ID NO: 129676 - RNA, 75 nt, Homo sapiens
cccggacagacccccgccccgagggcggagaacggaaaagcaccaggaagcagagaggaccgcagaagggaagga

SEQ ID NO: 129677 - RNA, 81 nt, Homo sapiens
gcgaccggggcccggggaaggcccgccgcccgccccaggccggggggggcacagagccccggaagacagcccccagcgacc

SEQ ID NO: 129678 - RNA, 64 nt, Homo sapiens
ccaaagacacagcgaggaaagcccacaccagagcgagcccaggcagccgccagcaagaaaccaa

SEQ ID NO: 129679 - RNA, 49 nt, Homo sapiens
acagaagcacggagcccaaggcagggagcacggagacagacccaccacc

SEQ ID NO: 129680 - RNA, 72 nt, Homo sapiens
gcgagaaaagcagaggcaacaagacggaaagagcaaggagaccacggggcgggaacaggaacgggcagccac

SEQ ID NO: 129681 - RNA, 86 nt, Homo sapiens
ggccgaaggccagcacagagcgcgcaagcaaagcagccagaccagcagggagaagaggagagagcagccaggccccggccgagccc

SEQ ID NO: 129682 - RNA, 69 nt, Homo sapiens
caccagcagcgccagaggcaccggccgaggcaaaacccaggacccggccccgccgccggggcgccacgg

SEQ ID NO: 129683 - RNA, 66 nt, Homo sapiens
agaaggaacaagccagagaaggcccgaggagagaacagggcacgccagccaaaacggccgcggaaa

SEQ ID NO: 129684 - RNA, 78 nt, Homo sapiens
cgggacgccgagaaggaggcccagcagcccaggggaaaggaacacccccagcggccaggcaaccccgcacaaacccag

SEQ ID NO: 129685 - RNA, 85 nt, Homo sapiens
cacagagcaacaaccgggccacaagagaaagagcacggaacgccgcagaaagaagaaggggcaagaacagccacagcagagacaa

SEQ ID NO: 129686 - RNA, 72 nt, Homo sapiens
cacgcgaccacaaggaacgaggggccccaagagcacagaccagcagccgccaaaggaccgaaggaaaaaaga

SEQ ID NO: 129687 - RNA, 75 nt, Homo sapiens
agccgcaaccccccacgacccggcgagcagcaccagggcccagcaggaaaagcccaggcggggcaggcccagcac

SEQ ID NO: 129688 - RNA, 88 nt, Homo sapiens
gggaccccagccccgccaagcgcggccgccgcccccgcccagaggagaaggcagagcccccccaggcagaagcccgagcgggaaccag

SEQ ID NO: 129689 - RNA, 72 nt, Homo sapiens
aaacggcccagaggaagcagaacgcgaaagcgagcagcaggacgcacggcgcaacaaacccccgcgccccag

SEQ ID NO: 129690 - RNA, 65 nt, Homo sapiens
gcccgccaggcgggccgcggcggcccggacaggggccccagaggggccccgcggggcaagaagag

SEQ ID NO: 129691 - RNA, 103 nt, Homo sapiens
cgcggagaccggagcccggagcggggggccaaggccgaggcaccccccacccgccgagagaccagagcccaacgggggggccgagggaagaaaccccggggcc

SEQ ID NO: 129692 - RNA, 84 nt, Homo sapiens
ccacaccgcgagaagacaaggaccacagggcgcaaggcagacggacagacggggagaaggccaaagaagaacggcggaaggagg

SEQ ID NO: 129693 - RNA, 76 nt, Homo sapiens
cggcccccgccgcgggcaggagccccggccgcgcgcccaaggccccggcgcagcaagcacgagaaaagacaaacca

SEQ ID NO: 129694 - RNA, 66 nt, Homo sapiens
cggcaaggcaagaggaccccccgaaccagggaaaagcacagggccaggaagcagagggacagccag

SEQ ID NO: 129695 - RNA, 77 nt, Homo sapiens
ccagggccagcccgggaccacggaccaaaggccgggcgcagaacccccagaccacaagagcacaccccaaagcccac

SEQ ID NO: 129696 - RNA, 80 nt, Homo sapiens
agaagaacagacccaggccagagggaaaagcaagagcccaaagacagagcagccaggccacgagccagaaccgagacaca

SEQ ID NO: 129697 - RNA, 83 nt, Homo sapiens
ccacgacagccggagaccccccgggagccaacagacagacagcgacccaaaaaacgcaaaacgagcaagagaaacgcaagaac

SEQ ID NO: 129698 - RNA, 79 nt, Homo sapiens
gaaaaccaccagacaacagcaaccgaggagcaaggccaaaaaaggacaagcaaacgggccccgcccggccgcgccgcga

SEQ ID NO: 129699 - RNA, 41 nt, Homo sapiens
gcaagaccggcccagccggaggagaaagacagcaaagaaaa

SEQ ID NO: 129700 - RNA, 74 nt, Homo sapiens
caagaccacagcagcacccagccggccaagaacaagaaccccgccaccgcggagaagcggcccaagcggagcga

SEQ ID NO: 129701 - RNA, 74 nt, Homo sapiens
acggccggcgggcgggggccccgcgccgcggccgagcagcgggaccaggcaccgacacgacggcagcgagccgg

SEQ ID NO: 129702 - RNA, 74 nt, Homo sapiens
cgacaggacaccagacgaaaacagacacagccagccagccacacggcagaaaaagaggaaaagcacagggccag

SEQ ID NO: 129703 - RNA, 76 nt, Homo sapiens
ggaagcgccagaggagccaccagggggggaaagaaaagaaagcagagcagaccacgaaaaaacaaccaaagagaga

SEQ ID NO: 129704 - RNA, 78 nt, Homo sapiens
aagcacgaacagcaggccaaagaccagaggaagaaaacacgaagaaacgcaggagcccaccgcgagcccccaggaggc

SEQ ID NO: 129705 - RNA, 81 nt, Homo sapiens
gaccagaaacggaggagcccgccgaagcagcacagaagaaaagcggccaggcgagaagacagaaggagccacagagaaccc

SEQ ID NO: 129706 - RNA, 57 nt, Homo sapiens
cacgccccaccagaaccagagcccaaaaccagcccccaacaaccacaaagaaaaaga

SEQ ID NO: 129707 - RNA, 54 nt, Homo sapiens
gacccagcccaaacccagcaagagaagacaggcaaggagccaggccaaggagca

SEQ ID NO: 129708 - RNA, 92 nt, Homo sapiens
agcaggcgaacccgcggcgcaaaacgcccgggaccgggagcccgggaccgggagccggggggccaccccgaccggaggagcggcgcaggccg

SEQ ID NO: 129709 - RNA, 77 nt, Homo sapiens
gaaacggcccggagcagcgaggggcgcgacgcagcgggccggagcacagaaaacaacaccagcacggacgagaagcg

SEQ ID NO: 129710 - RNA, 79 nt, Homo sapiens
gggggcaccacagccgccacagagaagggggcaacagcgggacgagccggagggaaggaggagaagcgaaccgcaggag

SEQ ID NO: 129711 - RNA, 80 nt, Homo sapiens
cagcaagcaggaaacgaagagcagcgaaagaaaagccagcgagggcgagacaggcgacaggcgcaaaggggaacaggacc

SEQ ID NO: 129712 - RNA, 96 nt, Homo sapiens
cgcgcgggcaagaacggggacgggacggcggccagaggcgcggggcgccgccgcgcagcgccgcgcgcccccgaaacaaagagacgcacggcggac

SEQ ID NO: 129713 - RNA, 58 nt, Homo sapiens
cccacccgcccccgcgggcgccgggccaggacggggggggccccagcccggccgaacg

SEQ ID NO: 129714 - RNA, 54 nt, Homo sapiens
acaggcacaccccacacaagcacgccaaggccggagcccaacagaaagcccagc

SEQ ID NO: 129715 - RNA, 73 nt, Homo sapiens
gccaaaagaaaggcagacgaagggaaagcccagaacaaacaacaagccaccccccgccagcgcagcagagacg

SEQ ID NO: 129716 - RNA, 52 nt, Homo sapiens
gagacccgccggccgaagacggccggacgggaaccaaacccaggacgcaaag

SEQ ID NO: 129717 - RNA, 71 nt, Homo sapiens
ccaaaggagcaaggagaagagccaggaacagagggagaaaccaacgacccaccagcggggacgagagcccc

SEQ ID NO: 129718 - RNA, 59 nt, Homo sapiens
ccccccagccagggaagaaccagaggagggaccgaacaggacgccacggggaaccagaa

SEQ ID NO: 129719 - RNA, 77 nt, Homo sapiens
cggccacgcacccccgaagccgaagaggcaggaacgaaccaacgcaggaccaggaaaccaagcgacagacagcggcc

SEQ ID NO: 129720 - RNA, 113 nt, Homo sapiens
cagggagcccagaccagccgcacggccaacagaaggcgagacaaggggaacacagcggcagagaggaggaggagcacgagcaccccgcccgaaaccccagagcaagccgaaac

SEQ ID NO: 129721 - RNA, 81 nt, Homo sapiens
gccacagccgccgcagacccagcagccaagagggaagcagacgagagcaagggaagaggggcacgggcgacgaaaagcaag

SEQ ID NO: 129722 - RNA, 80 nt, Homo sapiens
aaggcgccccaaggccagacaaaacgcccggggacagagacaggccagcagacagggggcggacacagggggaggagccc

SEQ ID NO: 129723 - RNA, 82 nt, Homo sapiens
cagacacccccccagcccagggcaggccacgcacgcgcagcacacaccaccgagaccagccgcgcgcaacggcgcggacaac

SEQ ID NO: 129724 - RNA, 76 nt, Homo sapiens
gcgagggaaccaggcgaggagccgccgggggccggcaaggaaacccaaccccagcaacagggccccacggccggaa

SEQ ID NO: 129725 - RNA, 54 nt, Homo sapiens
gcgaggggaagaggaagcaaagccaagcagaaaagcagaccaggcagccacagc

SEQ ID NO: 129726 - RNA, 76 nt, Homo sapiens
ggccccgcccccggccgagcgacgaacccgagacgcggcggggcgggaaagaggcggccccacacccgaagacaag

SEQ ID NO: 129727 - RNA, 33 nt, Homo sapiens
gcgaaagcggaacgagaaaccccaccacgcggc

SEQ ID NO: 129728 - RNA, 49 nt, Homo sapiens
gagaccagccgaacaacaacccagcacggcccccaaacgcaggagaaag

SEQ ID NO: 129729 - RNA, 83 nt, Homo sapiens
ggcggcgcaggggaccgcaagcgagcgagcgcagagcccggggacggcgaggccccagaccacacggagcacccacggcgagg

SEQ ID NO: 129730 - RNA, 85 nt, Homo sapiens
cagcccccgagggcgggacacagccgagagaaaaggggacgccacggacaccgggaccgaggcccgggcagcggggagagaggcc

SEQ ID NO: 129731 - RNA, 80 nt, Homo sapiens
gcagcgacagggccgggcgccggcgagagccgcaccgccaacccccgagcaagacgggggcaacggagacagaaaccagg

SEQ ID NO: 129732 - RNA, 45 nt, Homo sapiens
aacgcgaccaagagcaaaccggaaacagcacgcgcaggcagcaag

SEQ ID NO: 129733 - RNA, 74 nt, Homo sapiens
cgagaagggaaggaaacagcaagcgaagccgaaaaagcgcccgagacgggcccgccgaaagggagaaacgggca

SEQ ID NO: 129734 - RNA, 83 nt, Homo sapiens
ggggaagaaaagcccagagaaaaagaacgacacacagagagccccgaaaaaacccaccagccgggacaggcgcagcaccgccg

SEQ ID NO: 129735 - RNA, 58 nt, Homo sapiens
ggaggagcggggcggcgcaggcgagagcgaaccaggggagcggagacaccacgggcag

SEQ ID NO: 129736 - RNA, 72 nt, Homo sapiens
caggaaacggaaaccgaaaggacagacaagaaaaaagcacgagagaacggccaaccagggaaaggaaggaga

SEQ ID NO: 129737 - RNA, 72 nt, Homo sapiens
acaccaaggacagcccgcaaggaaggcagcaagaaacagaccgaagagcaagaaacacgagaacagcaccca

SEQ ID NO: 129738 - RNA, 65 nt, Homo sapiens
aacgagccaggggaacacaccagaaggagagaagagagaaggccacgcccgaccccaagcaacaa

SEQ ID NO: 129739 - RNA, 76 nt, Homo sapiens
agcggccgcagggggaagggcggagggacggggaggcccgcaggacagagcgggagccaccagcgccaaagggaag

SEQ ID NO: 129740 - RNA, 92 nt, Homo sapiens
ccaggcccagcgggccggacagggacggaagagaggacgcggcgagagagaggagcgggaaggccccgcacccggagaccgggggaagacaa

SEQ ID NO: 129741 - RNA, 59 nt, Homo sapiens
gagagagacgcaagcaaagagccgcgaagcagccacggaccccagcacgaaaagacggg

SEQ ID NO: 129742 - RNA, 83 nt, Homo sapiens
cgggccgcgggacccggagcaccgggccggcggacaggagggcgcgcaacccacaggcgcaccgaggagaccacaaaccagga

SEQ ID NO: 129743 - RNA, 88 nt, Homo sapiens
caaaacacagaggaaaagggaaagaggaacccaagaaggaggccagcagggaaccaagggcagccaggagaagaaccagcaggccggg

SEQ ID NO: 129744 - RNA, 54 nt, Homo sapiens
caaaacaagggggccaccacagagcaaggaagaagacggcacgggacccccagc

SEQ ID NO: 129745 - RNA, 73 nt, Homo sapiens
ccacaccaccaaaacgaaacaaaggaccaaccaagggcagcgaaccagaccggaacaagaccgaaacaaggca

SEQ ID NO: 129746 - RNA, 58 nt, Homo sapiens
gcgacaagacgggccgagcccgaggggacaagcagaccggaagaccgacggaagacca

SEQ ID NO: 129747 - RNA, 78 nt, Homo sapiens
ggggcccgggcagcccagcccaggcacgggcacaagcggggggcagcccccgccggcaccagagacggaccgccgggc

SEQ ID NO: 129748 - RNA, 68 nt, Homo sapiens
cgcaggccggggaccaagaggggagacgcccgcaggcgaaagaaaggcggagcgggcaggacagcaag

SEQ ID NO: 129749 - RNA, 63 nt, Homo sapiens
gccgaagaggacgagccacgaaggagcccgcaggaaggaggcccacccgggggcagcagggga

SEQ ID NO: 129750 - RNA, 82 nt, Homo sapiens
gagcggcggggagcggcgaagccgcgggcgaggcgggccgaccccaggaggagcaccgggaccagagagagaccggaggccc

SEQ ID NO: 129751 - RNA, 83 nt, Homo sapiens
cagcccccagcagagagcggccccacaacaaaagaggccagcccccagagggaggccaccggccccgggaccaaggacacgca

SEQ ID NO: 129752 - RNA, 70 nt, Homo sapiens
cagcaacaaggcccagggggggaacaccaaagagggagaaaaaggcggaacacgggaagaaaccaacaaa

SEQ ID NO: 129753 - RNA, 61 nt, Homo sapiens
agaagaagaagcaggagaacgaaacggagccagagaaggcagaagcacagggaacaccaga

SEQ ID NO: 129754 - RNA, 77 nt, Homo sapiens
cggcaggcggcgacagggcggcgggagcgcgggagcgcggcagcgcggcccgggacgcaaggaccaaaaaacaaagg

SEQ ID NO: 129755 - RNA, 79 nt, Homo sapiens
ccgacccaaagggaaaacagaaacaggaggagacacccgcagggcgagaaggcccaaggagccagggacgcagcacagc

SEQ ID NO: 129756 - RNA, 53 nt, Homo sapiens
gccagggaacccggcaccgccccagaacgaggagagggacagcggcagaaggc

SEQ ID NO: 129757 - RNA, 62 nt, Homo sapiens
ccgccagaacagcggggcagcagagaacggagaaacgaggccggagaaagggcagagaagac

SEQ ID NO: 129758 - RNA, 69 nt, Homo sapiens
agagaaaccacaagcggcacgggcaaaagacagaccagaagaagccaccagcgcaagggcaaccggggg

SEQ ID NO: 129759 - RNA, 79 nt, Homo sapiens
cagcccccccgcgaacgcccaagaacaccccaccagaccacccagcaagcccacaaaaaaggcacaagcagggacagcc

SEQ ID NO: 129760 - RNA, 61 nt, Homo sapiens
gaagaacccaagccaaagcccagcgaagaaaagggacggccagagcccgaagaagaaccag

SEQ ID NO: 129761 - RNA, 54 nt, Homo sapiens
aagaaacaccaagccagacaggagcgcgaaaggggaacccacagggggcagcgg

SEQ ID NO: 129762 - RNA, 80 nt, Homo sapiens
ggccacaaagaaccccaccgcgacacacgagcacaggaggacgaggaaagccccaggaagaagaagaagccgacaaaccc

SEQ ID NO: 129763 - RNA, 84 nt, Homo sapiens
aagccagacccgcccaacagaaaaagagaggagggagaacacagaaacccgccccgggagagaagagacccacgcgagaaccag

SEQ ID NO: 129764 - RNA, 79 nt, Homo sapiens
acaagcccaaaacgggccagcgaacagggacccacggcagagaaacagaaaacagccaaaaggacagggacagcaaaaa

SEQ ID NO: 129765 - RNA, 77 nt, Homo sapiens
ccggagaagagggggcccggggggaggaggggcaggcccggcgagaggggcgaaaacgcggaagcggagacacaggc

SEQ ID NO: 129766 - RNA, 76 nt, Homo sapiens
ccaccagaccccggccgccgaccgcggccccgccggccgccggccgcgcggggggaggggaggacaaaaccaacaa

SEQ ID NO: 129767 - RNA, 62 nt, Homo sapiens
aaacaaggcaacagaaagagcaacagcagggcaacagccaaacggcaagacgcagcaagaac

SEQ ID NO: 129768 - RNA, 87 nt, Homo sapiens
gcgacacagcgcaagaacagagaaaaccgaagaaggggaagaggagccgaaggagacgcgcagcgaaaccacgggagcaaaagggac

SEQ ID NO: 129769 - RNA, 84 nt, Homo sapiens
gcagagaagcagagccgccggcaggcaggccgcgaagcgaccggaagagaacaaagggcccacgcgggaccagccagaagccaa

SEQ ID NO: 129770 - RNA, 68 nt, Homo sapiens
gggaaggcgaggacgaggacgaggacgcaaggaggaacaagcagcagaaaaaagaggaggaagaagca

SEQ ID NO: 129771 - RNA, 79 nt, Homo sapiens
gggcccccggggaggccgacccaccaggggacgccggaaagaccagaaaagcacccaagcaaagcccaaaccaaggccc

SEQ ID NO: 129772 - RNA, 79 nt, Homo sapiens
gacgggggggcggcccggccccgcagacaggccgacggcgcaaggccacggcaagcaccgggagcagcagcgaagccag

SEQ ID NO: 129773 - RNA, 73 nt, Homo sapiens
ggaaacaggcgaggcggcggcgcccggagggcagcgaggcgagcagaacaaggagaaagaccaagcacacgcc

SEQ ID NO: 129774 - RNA, 79 nt, Homo sapiens
gcgcccggagacgcggcggcagcgggagcaaaagcgaaagccggacacaccaaacgcagcccagcaaggcggaaggcga

SEQ ID NO: 129775 - RNA, 76 nt, Homo sapiens
acggcccccgagccgcccaagcccgggccagggccaccccggcgaggagcagcccgggcccccgcggcgggccccc

SEQ ID NO: 129776 - RNA, 79 nt, Homo sapiens
gaacagacaccgagccagcaagcccccaacgacaacaggcggcccgggcggagggacacggaggggccggaagagacaa

SEQ ID NO: 129777 - RNA, 74 nt, Homo sapiens
gaggacaaacagaagacggacaaggaagaaaacaacggcgaaagaacaggcgcggggaggcccagcccgccgca

SEQ ID NO: 129778 - RNA, 82 nt, Homo sapiens
gaaaacggacaaaacaaacacaaaaagaaacccgaaaacccagggagaagagcagaagaagcggaaagaggagcaggccggg

SEQ ID NO: 129779 - RNA, 90 nt, Homo sapiens
gagagcaaggacgcgggggagcagagggagcggcaccggaggcggaggggaccccgagcccgggacggaggaagagcaagcaggcccgag

SEQ ID NO: 129780 - RNA, 72 nt, Homo sapiens
ggagcggaggagacgggccgcacccgccccccgcgcccgccaccggccgccgcccgggcgcgccagaggaca

SEQ ID NO: 129781 - RNA, 62 nt, Homo sapiens
gcggccagcggaaggcccgcgccaagccaaggacaagaaaaccccaggacacagagcgggga

SEQ ID NO: 129782 - RNA, 93 nt, Homo sapiens
ccggggacggggccggcacggggcgcggagccgccacaagaacaggccacgagagcagcccgccccccggagaaagcgggcgggagacagacc

SEQ ID NO: 129783 - RNA, 77 nt, Homo sapiens
gcggcgcgagacgcggggcccggcggggcggccggggcggcgcgacggcgggcgcagcaaaagggagaccacaacag

SEQ ID NO: 129784 - RNA, 77 nt, Homo sapiens
cacaccagaaccggaggaggaccgcggagggaacaccggacagccaaacaaccaggggccccgaccaacgccaaccg

SEQ ID NO: 129785 - RNA, 81 nt, Homo sapiens
gagcaggagcgaccgcgccaaacagcagccgaggaagaagaaggcagcagaaaagagaagagcacgggaggagacgggcgc

SEQ ID NO: 129786 - RNA, 40 nt, Homo sapiens
cccgagggcgggacacaggaggcaggggggccggccccca

SEQ ID NO: 129787 - RNA, 73 nt, Homo sapiens
gcccccagccgcagccacaacaccggcaggaaccaccaggacagaaggccacacagcaggacccggagccccc

SEQ ID NO: 129788 - RNA, 72 nt, Homo sapiens
ccccgcccagccgcccagcggacgaaggaggcgaagaggcgcgcaggaaccggccgaaccagaccggagcag

SEQ ID NO: 129789 - RNA, 71 nt, Homo sapiens
aagaaagcgagaacgcacagcaaaccgcagaacgagaaaggccggaaaaaccagcacgccaacgaaaagga

SEQ ID NO: 129790 - RNA, 80 nt, Homo sapiens
gagcaccagacacaaggaccaccgagcgcggagcagagaaggagcagcaccagggacccccgaaccacaggccccagcag

SEQ ID NO: 129791 - RNA, 80 nt, Homo sapiens
ggaagacacggcacggcgccaggaccgaaaacggaaaaggacagcgggccacgaggacaccaccagcggacggcccgccg

SEQ ID NO: 129792 - RNA, 72 nt, Homo sapiens
agggggaggaagcaggggaaagcccgggccaagcgggaggcgccaggacgggcgccgaccgaaggacgcgca

SEQ ID NO: 129793 - RNA, 81 nt, Homo sapiens
ggccacgccagccgccaggcggcgcaggagagagagaagaagaggacgcagccaacagagggagcaggcaagaaggcaacc

SEQ ID NO: 129794 - RNA, 70 nt, Homo sapiens
cgccggcccagccccagcggcagacggaaacgacagaagcagagaaaaccggaacagaacggcaagcgaa

SEQ ID NO: 129795 - RNA, 69 nt, Homo sapiens
agagggaacaggcagcaggaagcacggcgggcgaaacaggagacgacaacgagggagccgcggaagaag

SEQ ID NO: 129796 - RNA, 76 nt, Homo sapiens
gaccgagaccggaccgagagcggaccgagagcgcgaaacgcacgagaagaggcagcgacggaagcccgcgcccaag

SEQ ID NO: 129797 - RNA, 70 nt, Homo sapiens
agaacccgggagaggagaccagaacgaacccccccccccgaaggaacacagccccgacagaggaaaaaac

SEQ ID NO: 129798 - RNA, 81 nt, Homo sapiens
ggggcagccggccccgggcccccggagcggaccgacggacagacaaggagaagccgagaagaacgagccaccaggaagcca

SEQ ID NO: 129799 - RNA, 73 nt, Homo sapiens
ccaaaccagccgggcaggggcccagaccaacaccaagaagccggcccagagccagccgccgcgccaagaaacg

SEQ ID NO: 129800 - RNA, 74 nt, Homo sapiens
agaaagggacgccggaaaaaagggaacgaaagcaagagagaacgagggccaaagccaacgaagaaaagaggagc

SEQ ID NO: 129801 - RNA, 57 nt, Homo sapiens
gaaggaccaagaaccagaaggggaccaacagggcggaacagccacagcgcaagccgg

SEQ ID NO: 129802 - RNA, 68 nt, Homo sapiens
ggagagggaccacacagaaacgagcccccgaggaaagcacgcacaacgaggaaaagagaaaaagaggg

SEQ ID NO: 129803 - RNA, 72 nt, Homo sapiens
accaccaccaaaaagccgggaacggccaaaacagaagaggcaaagcccagccacagcagcagcccagcagca

SEQ ID NO: 129804 - RNA, 74 nt, Homo sapiens
gcccagcaaacaaaggcaggaagagaaaaggaagagaccgagaccaggaaccaggcaggggaacggagcgaacc

SEQ ID NO: 129805 - RNA, 84 nt, Homo sapiens
cgggggaaccgacagggcgggcggacgaccccacagacggcggccaacagggccagcagacaacccccacacgacggaccagcc

SEQ ID NO: 129806 - RNA, 58 nt, Homo sapiens
gcgccggggcgaggacaccacgagacgagagcaccgccagaggagcagccaagaagcc

SEQ ID NO: 129807 - RNA, 93 nt, Homo sapiens
aggaggaagaaacccagacagacgccggggaggcagcgcgggacccagcccaggcggcgcggacggggcgggagaggcagagcgaaccagaac

SEQ ID NO: 129808 - RNA, 79 nt, Homo sapiens
aggcacccgcgagcgcaacccaagagaaccaggagcggcagaccgccgccaggaggaggcacgcagcccgagaaggagc

SEQ ID NO: 129809 - RNA, 59 nt, Homo sapiens
acgggcacagccccacgcggccacggccagggaacaagggcggagaacggaaaagcacc

SEQ ID NO: 129810 - RNA, 70 nt, Homo sapiens
aaaccacaccaagggaaggaaggaccagagaaacgaaagcgaagaaacacaaacggaaaagcgaccagac

SEQ ID NO: 129811 - RNA, 80 nt, Homo sapiens
gccgccaccagcccaagagaaaggccccgggggcgccgagggcacaagggcaacgacagaagggcgaagccaacgccaga

SEQ ID NO: 129812 - RNA, 67 nt, Homo sapiens
ggcacacaagggaggaggcaaagccagacgagccacagaccacccaaggccccccagccaacccgac

SEQ ID NO: 129813 - RNA, 74 nt, Homo sapiens
gaagacaccgacacgaaaacagcaaggaccagaaggacccaaggacgaaggcaggggaaaggaccccagcccag

SEQ ID NO: 129814 - RNA, 99 nt, Homo sapiens
aggggaacccgagagaacggacggagaaggcaggagggaaagcgcagcaggaccaacaggaggaaccagcagaaggaacaacacgacagcggggacagg

SEQ ID NO: 129815 - RNA, 83 nt, Homo sapiens
cacagaggggcgacggcacggcgcaacacgagcgcacgcgcccacaccagcaccagcgacggcacggccagacaccagggcag

SEQ ID NO: 129816 - RNA, 80 nt, Homo sapiens
ccgcacgagcggcaaccgaaagccagcagcggcccccgcgaacagcacgcggagggagagacacgagggcggagcagggg

SEQ ID NO: 129817 - RNA, 51 nt, Homo sapiens
acggagacaaaacagccacgcggagccagcgcccggcaaggagcgagcggg

SEQ ID NO: 129818 - RNA, 69 nt, Homo sapiens
gggacaaacagagagacggcgaagagcagacgcgcccccccccaacacacgcgacacgaagaagagagg

SEQ ID NO: 129819 - RNA, 97 nt, Homo sapiens
ggaggccccagggaagcgcagaaagcaggcgaacccgcggcgcaaaacggaggcagcacggcaggagacgaggagaggacagcaggacacccggacc

SEQ ID NO: 129820 - RNA, 70 nt, Homo sapiens
caccagccaacgagaaaggcagccggaccccgcaccacacacccccagaaggagaaacgcagacaccgga

SEQ ID NO: 129821 - RNA, 93 nt, Homo sapiens
caacaccccagaggacaagacacgaccacgacagccggagaccccccagaagaacgccaccaggcaaaccccggcgagagccggagaccgaac

SEQ ID NO: 129822 - RNA, 62 nt, Homo sapiens
ggcgcgaccacagaccaacccccggcagggagaaggaggagagggacaaagcccagaagagc

SEQ ID NO: 129823 - RNA, 77 nt, Homo sapiens
agccaccaccgaaacgccaaaaagggagacagagaaccacgcacagaaaggagaaaaacaagggcgcaaggaaaagc

SEQ ID NO: 129824 - RNA, 79 nt, Homo sapiens
ccagaacaccccaaccgcaccgggacgcgccggcaaccccaggaaccacagagggaccgcaccccccggggaaagacac

SEQ ID NO: 129825 - RNA, 84 nt, Homo sapiens
gcggcgccgagaggccggcgggacgcgggcgccaggaccggccgaacgcagagccggaaggggcgaccggaccgggagaagaag

SEQ ID NO: 129826 - RNA, 74 nt, Homo sapiens
gccccgccgagcgcgccggaccggcgcccggacaacccgggccacacccccggagaccaagagaagaaacagcg

SEQ ID NO: 129827 - RNA, 74 nt, Homo sapiens
cagcagccccgaggagggacgccgcccgccaggcccgaaggcaggcaccagaacgaaaccccaacaagaggacc

SEQ ID NO: 129828 - RNA, 79 nt, Homo sapiens
gaaaagagcccggaacgaagagacagagaggagacaaaaccccagggggcccccaaagggaagccaaacacaaaggaag

SEQ ID NO: 129829 - RNA, 71 nt, Homo sapiens
gcaacggaaaggcgcaggcagaggacaagaccaccccaggacacggcgggcacaggaagaggaaagcaggg

SEQ ID NO: 129830 - RNA, 70 nt, Homo sapiens
acaaagacccccagacacacacacccaacccaaaccaagggagaggacaccgcacccggacagcgacgag

SEQ ID NO: 129831 - RNA, 78 nt, Homo sapiens
ccaggccagcagacggcaaacggagaaagcagccagagacgggcgcccgggagagcacgaaacaaagcaggacaaggc

SEQ ID NO: 129832 - RNA, 74 nt, Homo sapiens
ggcggccgcgcgagccggcggcccggagggggcggcgggcacacagagaaaaaaagggaacaaaacacagcaag

SEQ ID NO: 129833 - RNA, 86 nt, Homo sapiens
aaccgacccaaaaagaaaacaccgaaggacccagcgggaggaagaagaggccgccagcagcagagcagccaaggggcccaacccca

SEQ ID NO: 129834 - RNA, 75 nt, Homo sapiens
aagagaaaggaccaagcaagaagaagacaaaaacaacagaaaacccgaccagaacaagcgcccaaaagggacacg

SEQ ID NO: 129835 - RNA, 79 nt, Homo sapiens
ggaggaccgacgcagccaggacgaaaagagagacgagacggaaccccgcaaagcagcaggggggcccagccggccaccg

SEQ ID NO: 129836 - RNA, 38 nt, Homo sapiens
aaccagacagaccaggggacaagagccaacggcaagca

SEQ ID NO: 129837 - RNA, 79 nt, Homo sapiens
aacaagaccgccgggacggaagacgggagcgggcccggagaacaccggaaggggccgcccgaaagaagcccggagggga

SEQ ID NO: 129838 - RNA, 81 nt, Homo sapiens
cgcgacaggggggccggccgcgcagccgaaagagccgcagacgcacagcaaccaccggacccgaaggccaccacccagagg

SEQ ID NO: 129839 - RNA, 46 nt, Homo sapiens
ggaggggaacacccagccccagaaacagccgccgccggcccccaaa

SEQ ID NO: 129840 - RNA, 74 nt, Homo sapiens
aacagaaggaacgacgcggaccagaagccagagcgaggacgccggcaggacaaacaacagaccaaggggcggaa

SEQ ID NO: 129841 - RNA, 69 nt, Homo sapiens
ggcacagggagacggaaaacgagaggaacaagccaagcagacagcgcgagcaaagaagcagaccgagaa

SEQ ID NO: 129842 - RNA, 76 nt, Homo sapiens
cggggaccaaacagcaggggacaaggccccagaaggcagaaccagcaaaacccgagaacagaacacgagcgagaaa

SEQ ID NO: 129843 - RNA, 72 nt, Homo sapiens
accgagacggagaaggagcggacaggcagaacagaggccaaaagaagaagagaaaaaaccccggacggggcg

SEQ ID NO: 129844 - RNA, 75 nt, Homo sapiens
agagcaggcaccgagccccaggcccgacaacccggccggcccggaggacacaggccccgaagacaaccggccccc

SEQ ID NO: 129845 - RNA, 77 nt, Homo sapiens
gcgggcggaagacaggccacccagcggggagcacggcgagcagccaggccaggagagaagacaggaagaacaagagg

SEQ ID NO: 129846 - RNA, 83 nt, Homo sapiens
caccccacaccacccaccacggccgggacgggccggaagcggccagccccagggcagcacacagagacaccaggaacacagcc

SEQ ID NO: 129847 - RNA, 35 nt, Homo sapiens
ccgggcccggaggagggccagcagcagcccgccac

SEQ ID NO: 129848 - RNA, 73 nt, Homo sapiens
ccaagccaaccagccagcaggccgggcgggggaaggaagacccacaagagaccacgcagagacagcacccaac

SEQ ID NO: 129849 - RNA, 79 nt, Homo sapiens
cagggaaaagaccgaaaaaggccgaaggacacaacacagccggacggcaaagaacccaggaagagccagaagggagacg

SEQ ID NO: 129850 - RNA, 72 nt, Homo sapiens
gaagcgagcagacaaggagaggccgcgacagccaccaaagcagcgcggacaagaaaagacagaaaggaaaag

SEQ ID NO: 129851 - RNA, 70 nt, Homo sapiens
agaaaccccggacaaggcacgccagacgggcacaccaagccagaaggcgaggcgcacggcagaaagccaa

SEQ ID NO: 129852 - RNA, 71 nt, Homo sapiens
ccccaggcccaggccccccaccaccagaggcaagacagccggcaggcaaacaggaagcacaccacaacgcg

SEQ ID NO: 129853 - RNA, 78 nt, Homo sapiens
gccggcagcaccgcggccgcaggaaacaaacagaagcgcacgagaacccaggccgcaaggaacgaaacccaacagagc

SEQ ID NO: 129854 - RNA, 82 nt, Homo sapiens
aagaccacggcgagcagaagccaccgacaagaagccgccgccgcccacgcaccccaaggccagcgccaccccaccaccgagc

SEQ ID NO: 129855 - RNA, 52 nt, Homo sapiens
ccccaccgccgacgcccccagccaccaggggccgggagaggaaagcggccga

SEQ ID NO: 129856 - RNA, 72 nt, Homo sapiens
ccaggacacagaaccgagggagggcgagcccaggaaaacaagagagccccgcgacgaggaaccaggcggcca

SEQ ID NO: 129857 - RNA, 60 nt, Homo sapiens
gcggagcagggcggagagggcgaccggacccaaagacaggaccacgcaccagcagagaag

SEQ ID NO: 129858 - RNA, 72 nt, Homo sapiens
ggggaaaaggcggccacgaggcaaccagcaagcgaaggaggaccagacaagaagcgcagaggacggagaccg

SEQ ID NO: 129859 - RNA, 80 nt, Homo sapiens
caagaagaaacccaccgcaaagaggacacacggcagccaggaccgggagcggcccggggggcgaaggacagaggaggcgg

SEQ ID NO: 129860 - RNA, 82 nt, Homo sapiens
aaagcagaagccgagaacaccagcaaacgaacacgcgcagcgcagaggcccggcagccccaaggaacgcggccccgacagaa

SEQ ID NO: 129861 - RNA, 77 nt, Homo sapiens
ggcaacgccaggacaaaaacaaagcgcgcagaaagggcgaccaccaaaaaaacggcaagggcagcaggaaagacgag

SEQ ID NO: 129862 - RNA, 62 nt, Homo sapiens
ccggaaccggacaaagccgcgaaaccaagggacacagagaggaaagcagaggaacaagggaa

SEQ ID NO: 129863 - RNA, 71 nt, Homo sapiens
gagggcaccaaacaaaaggaaaccacaccaaccaagaagagccagaagcaagaaaggacagcaaagcgaag

SEQ ID NO: 129864 - RNA, 78 nt, Homo sapiens
cgggacggaccgagaccggaccgagagcggaccgagagcgcgaaacgcacgagaaggcacaggaagagggcggcacgc

SEQ ID NO: 129865 - RNA, 81 nt, Homo sapiens
gccgccgcgcccagcccgaggaaagaacaagcaccggagagagagcaccagcggcaagcgcccacccagcacaaggaacac

SEQ ID NO: 129866 - RNA, 76 nt, Homo sapiens
aagaagaaaagaaaggaaccgaaagacccaccagaggcgccgggccagccagggccccaggccccggggcaaccag

SEQ ID NO: 129867 - RNA, 75 nt, Homo sapiens
ggcacaggaccagaccaagacacacaaccaaacaggagaaaaaggcggcaaaacaagccaagagacgaagaacaa

SEQ ID NO: 129868 - RNA, 70 nt, Homo sapiens
acggacccacccacagcacacccaggacaacgaaaggccagcaccaggggaagaaagcacgggaaaaggc

SEQ ID NO: 129869 - RNA, 74 nt, Homo sapiens
caagagggccccaaagaggagagagaaaaggagacgaagagcaccagggaaaagccaccgaccacacgccacaa

SEQ ID NO: 129870 - RNA, 59 nt, Homo sapiens
acccaaccccaaggcaccagcaagggagcgcagccaggcgaccaggagcagggcaccag

SEQ ID NO: 129871 - RNA, 81 nt, Homo sapiens
aagcggccgaggagcagcaaaagcagacaagggcaccggacccgggaaggagccaggcacagcagggaccagaaacgggaa

SEQ ID NO: 129872 - RNA, 86 nt, Homo sapiens
cagagcccgccgccgaccgccgcccgccacacccgccgccagccagggccccccacgcgagaacccgggccggggcccgggggccc

SEQ ID NO: 129873 - RNA, 76 nt, Homo sapiens
aggacacgcggcagagagaccgcgcgcgccaccgccgagaaccaccacccgccaggcgcgcggccacaccccggcg

SEQ ID NO: 129874 - RNA, 76 nt, Homo sapiens
ggccgccccaacaccagggaagagacacacccagggcgccaacccccaacccacgcgggcagccagaacccgaccc

SEQ ID NO: 129875 - RNA, 69 nt, Homo sapiens
agcgggaagggacaaaacagaggcaacaagggcgaccgaaccccggcccacggcaaggaaggcgggacc

SEQ ID NO: 129876 - RNA, 60 nt, Homo sapiens
cgggggcaagggggggggcaagaccaccgcagccgccgccggccccagcacccacccccc

SEQ ID NO: 129877 - RNA, 84 nt, Homo sapiens
ccggagcgcgaaggccgggacccggccccggcccacaggggggggcaaacccgagagaacgggccgcgccggaccagccagccc

SEQ ID NO: 129878 - RNA, 79 nt, Homo sapiens
gggaaaaaggagcagcccgggcaccacagaaaagacgaaaccagcaccgaggccgcccccaccgagaggacaccagagc

SEQ ID NO: 129879 - RNA, 71 nt, Homo sapiens
aagaagcaagccgacgcagaaagcaggagacagacccagcacggaccccccccccagccgggcgaggcccc

SEQ ID NO: 129880 - RNA, 58 nt, Homo sapiens
gcggaaccggagacaggcagagacgaggacgcgcacaggaaaggacgcggaacaagca

SEQ ID NO: 129881 - RNA, 72 nt, Homo sapiens
aagaacgcggagaaacaggacccacagcgcaggagaagggcccagagaccgccagacaaggcacagggagaa

SEQ ID NO: 129882 - RNA, 82 nt, Homo sapiens
aaaggggccgaggccccggagcagaccggggccgaacgcaccggacgaaggacggggagagacaaaggcagcgcgccccggg

SEQ ID NO: 129883 - RNA, 52 nt, Homo sapiens
agaaagagccccaggaaaaaaacagggggaagagagaaagacacaaggcaga

SEQ ID NO: 129884 - RNA, 86 nt, Homo sapiens
gagaaggcgacaggaaccagccgggggccaaccgaggagccacgcagcaggagccaaggggaaaggagaaaacacagaggaaagga

SEQ ID NO: 129885 - RNA, 56 nt, Homo sapiens
aacggaaacagaagaaaggcgcaagagagcccacaggaacacggccaaagccccag

SEQ ID NO: 129886 - RNA, 108 nt, Homo sapiens
aaggcgaaaagaacggacagaagaagagagcacacacaagcaggcgcagagaggcaggagggagaaacagagagaggcagagaggccaaagaaagacgagaagaaaga

SEQ ID NO: 129887 - RNA, 84 nt, Homo sapiens
ccggaggcgagccggcgcggaggcgaagaggggcagcgcgagcgggaccagcgccggaggcgccgcagacgaggcgaggaacca

SEQ ID NO: 129888 - RNA, 74 nt, Homo sapiens
gaacgggagccgggccggacgggcgggcgcggacccgcgcccgagggcagaaaggacaggaagccaaacaggcc

SEQ ID NO: 129889 - RNA, 79 nt, Homo sapiens
ccggggaacggagccgcagcggagaaggccgcccaaagaccaacagggcagcagacccccccagccccacacgaggaag

SEQ ID NO: 129890 - RNA, 87 nt, Homo sapiens
caggaccaggaagaacagaggaggacgcgggacgacccgggacagcccacggggcagaccagcgaccaccggcacagccgcagagaa

SEQ ID NO: 129891 - RNA, 71 nt, Homo sapiens
gccaacgagggccggagccagggggacacaggagagacagccagaaaacggcccaaagccgcccgacacac

SEQ ID NO: 129892 - RNA, 73 nt, Homo sapiens
gaaaggaccacccgcagagaccgggaggcagcaacccagaggccaccgccaagcaaaacaaaaccccaagcgg

SEQ ID NO: 129893 - RNA, 49 nt, Homo sapiens
ggaaaaggggaggaggagggaggcaaccagaaagggccgcaaagcagac

SEQ ID NO: 129894 - RNA, 46 nt, Homo sapiens
aacacgggacacccacacagcgcaaaaaacgcccagaagagcacaa

SEQ ID NO: 129895 - RNA, 81 nt, Homo sapiens
cgacagagacggcggagaccccgaaggcgcaaacgacaccacccgaccggggaggccgaagacagcaccacaccagcggcg

SEQ ID NO: 129896 - RNA, 61 nt, Homo sapiens
gcaaaggacagagccaacgcgaagcggccggagaaccacagaacggagcacagaaaccaga

SEQ ID NO: 129897 - RNA, 78 nt, Homo sapiens
aaaaacccccacccgaagggaagcacagggccgaacaagaacacaaccggaccgcggagggagccagggcaagcacga

SEQ ID NO: 129898 - RNA, 83 nt, Homo sapiens
gagccgccgccccgccccggcccaaagggagcaccgcggacgccccagggcacaccgcgcaccagcgagaggaggagaaccgg

SEQ ID NO: 129899 - RNA, 86 nt, Homo sapiens
gcggcccgagcgcgccccaagcccgggcgccaccgcgccaccccgcgagggcccggccaggccccaccgccacaagcaggggaaca

SEQ ID NO: 129900 - RNA, 73 nt, Homo sapiens
aaaaagacggacagcccacgggaacaagaggggacagaaaggggagcgcagagagagaacgcaaacccgagaa

SEQ ID NO: 129901 - RNA, 73 nt, Homo sapiens
gcccaagccgaaccgggagaagaccccggcgcgggaacgcagaagggacaggaaaaaagcagcagccggcaaa

SEQ ID NO: 129902 - RNA, 56 nt, Homo sapiens
gacgcagagcaggcggccgggcgcccggccgggcccgggaggagcaggggcagagg

SEQ ID NO: 129903 - RNA, 83 nt, Homo sapiens
cggacgggccccgcggccgcccgagcaggaggacgaacaggagcggaggcagggcgccccgcgggaaaaaaaggaacgagccc

SEQ ID NO: 129904 - RNA, 78 nt, Homo sapiens
ccggcaggcagcacaagcagcagaaccgggacagccgaggaagcaagcagcaaccagggaaagggaagaaaaacgacc

SEQ ID NO: 129905 - RNA, 50 nt, Homo sapiens
acagacaccagagccgaaagccaacacccagccacccaccagcgacaagg

SEQ ID NO: 129906 - RNA, 69 nt, Homo sapiens
gaaaaaccccccgggcacaagacccacaggaccgcgaacaaggaggccacaaaacacccggacccacca

SEQ ID NO: 129907 - RNA, 59 nt, Homo sapiens
gccgccccaccggacccgcaggaaacccagcggcggcagaaccagccggcacaaagccg

SEQ ID NO: 129908 - RNA, 75 nt, Homo sapiens
gccgggaggagggggaacggggcgcccccaaagaaggccagcgccaaggaacaaaaaaggcgagaaagaaggcgg

SEQ ID NO: 129909 - RNA, 78 nt, Homo sapiens
gccccaaccacgcggcgcgagccccgcccccgccgccgcgcacaaccgcacggcagaaaagacccgcaaccgcgcccg

SEQ ID NO: 129910 - RNA, 68 nt, Homo sapiens
ccgacgccaggcagcgcccccaaacgaacgaaaacaaacggaagagagggcagcaagaaagaacaaga

SEQ ID NO: 129911 - RNA, 71 nt, Homo sapiens
cgggagaaagcccacaagcacaaagaaaccccagccaccagaaacaggcaagcagaagaggaacagaagaa

SEQ ID NO: 129912 - RNA, 81 nt, Homo sapiens
cgccggcgcggcccgcggggcggcccccgggagcggagcaaggccccgacaagggaccgggcgggccccgcaggaaacccc

SEQ ID NO: 129913 - RNA, 72 nt, Homo sapiens
acagggacaccagcacagaaacgcccagaggacaaggcggaaaaggggaacacgaacgcagagaaagacacg

SEQ ID NO: 129914 - RNA, 61 nt, Homo sapiens
gagaccggaccgagagcggaccgagagcgcgaaacgcacgagaagagcggcacaccacaca

SEQ ID NO: 129915 - RNA, 53 nt, Homo sapiens
acgccaaccacgacgaagcggaaggcagaaggagggaaggccaggacagggga

SEQ ID NO: 129916 - RNA, 61 nt, Homo sapiens
gccgaaccgggcgacaagaggccgggcgccccgcaggacacaaggcacgggccacagagac

SEQ ID NO: 129917 - RNA, 81 nt, Homo sapiens
aaaagaccaagaaaaccagaagagaagcaagagagcacagcaaagaggacagcaggacgaccgggcagcccgacacaagaa

SEQ ID NO: 129918 - RNA, 74 nt, Homo sapiens
ccccgggccgccggacagaaggagaccggagccgccccgccagaaagccaggggcaccaccacagaaggcccac

SEQ ID NO: 129919 - RNA, 71 nt, Homo sapiens
cgggagaggccgcggcggccaggccccagacacagacgagcaggggaaggacagcagaccacagcccggca

SEQ ID NO: 129920 - RNA, 58 nt, Homo sapiens
accggccgcgacagcgaacagcgcggccgcaggcggcgcccagcggccacacgcccca

SEQ ID NO: 129921 - RNA, 77 nt, Homo sapiens
gccacggcgccggcaacagaccacccccggagggggccggggaagacgggaagcggcgcggacccacagacaacgcc

SEQ ID NO: 129922 - RNA, 72 nt, Homo sapiens
cagacagcgggcacaccgcacccacaaagccaagagacaagcgacccgcagggaggacagcgcaccgggaac

SEQ ID NO: 129923 - RNA, 65 nt, Homo sapiens
agaagcacacaaaaaggaaacgggaagaaggaagccccgcgccccgcagaacccgaagccggcac

SEQ ID NO: 129924 - RNA, 54 nt, Homo sapiens
agaagagcaggacagacgggcggggaaacgaaaacggcgacagcagcgagaccg

SEQ ID NO: 129925 - RNA, 85 nt, Homo sapiens
gacccagagcaccagagacaaggagagccaggaggagcgggccccaacccaccaaaagcacagcacaaaagaccccacagcgaga

SEQ ID NO: 129926 - RNA, 76 nt, Homo sapiens
gagaaggcgcagagaaaggaagccacaacaagcaaggggacaccaaagcagaagcgggcacagagagaaagagaga

SEQ ID NO: 129927 - RNA, 76 nt, Homo sapiens
ggagcccagcgcccaccagaccacagggaccagccgagccaagggacaaggacagaaacccaaagaaccaaagccg

SEQ ID NO: 129928 - RNA, 74 nt, Homo sapiens
caggacccgggaggaccaggagcgccccaagcacacaggagcgcacccagaaaaccagaaaagagcgccgccag

SEQ ID NO: 129929 - RNA, 80 nt, Homo sapiens
agaggcagagccaagagaacaggcaacacagggacgcccagaaggaacgcagcagcaggcgagaggcagaacccggaaag

SEQ ID NO: 129930 - RNA, 81 nt, Homo sapiens
ccccaccccggaacccgcggggcggaccggagaagccccgagcaccccacagacacaaaagccaggaagacaagagcagaa

SEQ ID NO: 129931 - RNA, 73 nt, Homo sapiens
gaccaggaggcgagcaacaggaaacgaaagagcccagacacccaagagggccaagccagaaaacagaaacgaa

SEQ ID NO: 129932 - RNA, 76 nt, Homo sapiens
aagacccacccgacgccccgaaaaacggagcagccgaaagccagaggacaggagcagggcacaccgagcccagaag

SEQ ID NO: 129933 - RNA, 74 nt, Homo sapiens
gcaaaaggcaacaaaagcagcagaacagagcacggccgggggagggaaagaccgacagggccgccccgggggcc

SEQ ID NO: 129934 - RNA, 82 nt, Homo sapiens
ccgccacgccccaaaccaccgcaagcggagaacggccccggaggacagacgaagccggaaaggaaaccgagcagagagaaac

SEQ ID NO: 129935 - RNA, 76 nt, Homo sapiens
ggaggaaggaagagagggagagaggccgaacaaagcggagagaaagaggccagccggccgaccgcacagacgacca

SEQ ID NO: 129936 - RNA, 79 nt, Homo sapiens
gaggaccaagcggaaagaacagaaaggaaaggaacccagcaacaagagagcagaaaccaagaagccaagggaaccgcaa

SEQ ID NO: 129937 - RNA, 39 nt, Homo sapiens
ccagccgacgaaccacggaggacccgcacgacccgagga

SEQ ID NO: 129938 - RNA, 78 nt, Homo sapiens
agccagcgagaacacccaaccgaaaggcaaggaccgaaggacggaacaagcgagcggagaagaagagaaggcgccaac

SEQ ID NO: 129939 - RNA, 108 nt, Homo sapiens
gaccgagccgggccgcccacagggggaagaggcgccgcccgggggacggcagcagcagggaagagcacgcaagcaaacacccacccacagagcgcaccacccaaccca

SEQ ID NO: 129940 - RNA, 81 nt, Homo sapiens
ggcggcccagcccaaacagggacagaaagacagggcaccgcgcgccgcgcccccccaccagccccgccgggcgggggcggc

SEQ ID NO: 129941 - RNA, 48 nt, Homo sapiens
agagggcaagcaaagaccaagagaagagacagcgaacccacccaacac

SEQ ID NO: 129942 - RNA, 81 nt, Homo sapiens
accgcgagagggagggccccgcggaccaccgccggggacaccaccagggacgggagcagcggaaggcccagaccgagcggc

SEQ ID NO: 129943 - RNA, 80 nt, Homo sapiens
aaagacagagcacgaaaggcaacgcggcagcaaaaccccagaagaggcgaaccgcaggaaaccagagcaagaaacgagcg

SEQ ID NO: 129944 - RNA, 61 nt, Homo sapiens
gaccgggaacaagccaacagggcacaagcaccaacaagaaggcgaacacgcagccccaaga

SEQ ID NO: 129945 - RNA, 38 nt, Homo sapiens
agcgagaagagagaaaagaaccagacacaaagaggaag

SEQ ID NO: 129946 - RNA, 75 nt, Homo sapiens
gacaccgagcaacaagaaaaaaaaagcaccaacacaaaaagggcggagaacggaaaagcaccaggaagcagagag

SEQ ID NO: 129947 - RNA, 76 nt, Homo sapiens
cgagccgcccccagaacagaggaacggggagagccgcaggcgcccaagcaacagaggcagccccggaagagacaca

SEQ ID NO: 129948 - RNA, 75 nt, Homo sapiens
gacagcaacaggccacagaagggagcaaggcagaggggaccccagaaaggcagcacgaaaaaggagaaacagcag

SEQ ID NO: 129949 - RNA, 56 nt, Homo sapiens
gacgagcgagcgcagcgaacacacaggggagcaccgcaaagcaaggcgaacagcca

SEQ ID NO: 129950 - RNA, 71 nt, Homo sapiens
caaagcaaggcacagaaggaacgaaaagccagacagaaaccccaccagcccagcccaagaaggagaaggcc

SEQ ID NO: 129951 - RNA, 64 nt, Homo sapiens
cagaagcacagaccccaaacgaccgcacggaggacagcggacaacacacagaccggaacgggca

SEQ ID NO: 129952 - RNA, 70 nt, Homo sapiens
gcgccagcacaccccagcacgacccgagagcacagggcaagacggacgagacgcgcgggcagaggcagaa

SEQ ID NO: 129953 - RNA, 78 nt, Homo sapiens
gagagaacccaccagacgagcaaaacacaaagacaaagaggagagaaggagaaaaggaaggcacacggaagacaagac

SEQ ID NO: 129954 - RNA, 61 nt, Homo sapiens
gaagaacgcccaccggaggcaggaccagcgcagcgcagagacgggggcaccggaaccagga

SEQ ID NO: 129955 - RNA, 47 nt, Homo sapiens
agaccacgcaacaagccacaaggaagaccgcgagacgacacaacggg

SEQ ID NO: 129956 - RNA, 59 nt, Homo sapiens
caggagcagcccgcggcgaccaagacaggaaccgcccgggcgaagcgggagcggaaacc

SEQ ID NO: 129957 - RNA, 82 nt, Homo sapiens
gggcgcgcccgccgacccgcgcccgccccccagcaccgggcggacgggaagccaaaaaccccccacccggggccgagcaaga

SEQ ID NO: 129958 - RNA, 111 nt, Homo sapiens
cacaggacccagccgggaggccccagaggggccccagacgccacacggggccgcagacccaaaggaggagaaggggcccgacgccggagggcaaggcaaagaaaagggacc

SEQ ID NO: 129959 - RNA, 83 nt, Homo sapiens
gcccacggcgaggaagcagccaagaaaaaaagacgaaagaagaagaagagcaaagggcccgcaggcaccggggccgagaagcc

SEQ ID NO: 129960 - RNA, 74 nt, Homo sapiens
ccacagaggccaaggcaagccagagaacacccgccgcgcaaaaggagacagacccagcacggacccccccccca

SEQ ID NO: 129961 - RNA, 78 nt, Homo sapiens
ggacacagggccgccaccaacccagggaaagacaaggagccgggccgagaaaccgaaccagagaccagagaagaaacg

SEQ ID NO: 129962 - RNA, 60 nt, Homo sapiens
aacacgcagcgaaccaccaacgcgcgcacaaggaggagagaagagaggaagcgagcagca

SEQ ID NO: 129963 - RNA, 76 nt, Homo sapiens
gcgcaaacgacagccgaagccccggaagcccaagacgcggagaggccgcgacagccaccaaagcagcgcggacaag

SEQ ID NO: 129964 - RNA, 83 nt, Homo sapiens
cccgcgccgcccgcccgcggcggccaggaacccgaccgcccccgcccaggggaacagagcaaagaaggagagccgagcacagc

SEQ ID NO: 129965 - RNA, 70 nt, Homo sapiens
gagcggcccgcacaaggccggcagccacggggaaaaagcgggaccgcagccagcacaacaaacagcgcga

SEQ ID NO: 129966 - RNA, 81 nt, Homo sapiens
ccaggcgcgcggagccacacaaagcaccccgccccacccccacaaaccggccggacacccacggagcggcaccccacagcc

SEQ ID NO: 129967 - RNA, 67 nt, Homo sapiens
gagagcacggagcacggggcagggccagacccaacagggagcccaacaggacacacgaacaagccag

SEQ ID NO: 129968 - RNA, 71 nt, Homo sapiens
cccaggaaaacaaccgaacaggaccgaaagagaagaccggagaagcagggcaggcgggaaaaaggaaaggg

SEQ ID NO: 129969 - RNA, 82 nt, Homo sapiens
gccgggaggcagaggggcagggacacggaaccagaggcagcagcccaaccccgaggacagcccaggccacgcacccacccgg

SEQ ID NO: 129970 - RNA, 71 nt, Homo sapiens
gcggaccacacaaccggacgaccagccaagaagcggcaagccgaacaaagaccaacaagagccgccccaag

SEQ ID NO: 129971 - RNA, 88 nt, Homo sapiens
caggagcacacccggagaagcaggagcccaccggcagggggagggccgagaagcgagaggggacagcacggggcccccgccccgcgca

SEQ ID NO: 129972 - RNA, 75 nt, Homo sapiens
aaggaggaaaggcccggcagcgcggcaaaggcaaaccaacagcgaccacgagggcgaaccacccacagaccagcc

SEQ ID NO: 129973 - RNA, 73 nt, Homo sapiens
gccgcgcacccccggccggaggcaccagccaccgaggagcaacacccccagggagcccagaccgacaggacgc

SEQ ID NO: 129974 - RNA, 73 nt, Homo sapiens
ccgcacccggggacaagcgcgggaacggcgcggaagagccacggcgggaagaagcaaacgaagggcaagaaca

SEQ ID NO: 129975 - RNA, 79 nt, Homo sapiens
caccccagacaggagcagcagcagagcgggacagcagcaccgagcaaggaaaccagaaccgggcaaggaaaggagccaa

SEQ ID NO: 129976 - RNA, 60 nt, Homo sapiens
ggaccaagacacccgcgagagagccaagagccaaagccggcggacagcagacgaacgaaa

SEQ ID NO: 129977 - RNA, 76 nt, Homo sapiens
gcaaagaccccagcaccacagaaaaaagagaagacggcccagcagagcacccaaccagcgggaacacagcgccgcc

SEQ ID NO: 129978 - RNA, 62 nt, Homo sapiens
cagcagcggccccaacacccccgaaggccgaaccggggcagcgcgcaaggaggagcagcgag

SEQ ID NO: 129979 - RNA, 73 nt, Homo sapiens
gaggaagaccagaggaagcgacagagagaggcagccaaggacaaaagagagaggcccgcagaggaggagacca

SEQ ID NO: 129980 - RNA, 56 nt, Homo sapiens
cccgggcggaagggagcgcggacgcagacacaccgggaccgggaggccgagcgccc

SEQ ID NO: 129981 - RNA, 56 nt, Homo sapiens
aggagaagacaccacagaaacggaaaaaaccagcagacagggaggacagcagacca

SEQ ID NO: 129982 - RNA, 76 nt, Homo sapiens
aacaagaaggaggagaagcgaagcaacaaacagagcagggagaccagaggccagaccgccgggggagaagcacggg

SEQ ID NO: 129983 - RNA, 71 nt, Homo sapiens
ccaacccgccgagccagggggacaccacgccacaacaggccgggcgccccccaagaccgaagaggagcaac

SEQ ID NO: 129984 - RNA, 73 nt, Homo sapiens
cggagccagggagcacggcgaaagccccgggaagggacacacaggaccccaggaccaccacgggcgggccgaa

SEQ ID NO: 129985 - RNA, 58 nt, Homo sapiens
gagacccaggcgggacagagggagccaggcagaggaagcccggggcggcgacggagca

SEQ ID NO: 129986 - RNA, 69 nt, Homo sapiens
cgccggcgccccaaccgcacacccgagcaacacagaggaagaacaccaaccgaagaccgagcgaacagc

SEQ ID NO: 129987 - RNA, 75 nt, Homo sapiens
gaaagaggaaagggaacacggggggcgaaaaacagcaaacagaagcacccgccacaagaaagcagaaacgacggg

SEQ ID NO: 129988 - RNA, 72 nt, Homo sapiens
ggggaaggaacagaaggaccacaggggccgcaagccagggaaagacaaggagccgggccgagaaaccgaacc

SEQ ID NO: 129989 - RNA, 76 nt, Homo sapiens
acgggcgggccggcgccggagacgagccgcacaccgacagagaacccaggccaacacacagacagaggcagccacc

SEQ ID NO: 129990 - RNA, 80 nt, Homo sapiens
aaggaccaagaaccagagaaagcgcgggggagcaaaaacagacaagccagaagcgaaccgggaagcaaccccacccccga

SEQ ID NO: 129991 - RNA, 60 nt, Homo sapiens
ggaccaaaaacccgcaacagcccccgcccaagcaccagagaagacaaagaaagcaagcaa

SEQ ID NO: 129992 - RNA, 78 nt, Homo sapiens
agaagaagaagagggaaaggagaacagagcaggacagcggagcacacagagaacagcccgcagcaaagaagaacacac

SEQ ID NO: 129993 - RNA, 74 nt, Homo sapiens
aaggaccaagaaccaggcgaacagacaagcagagggagccaaggcccagacagaggccagccagcagaaggcgg

SEQ ID NO: 129994 - RNA, 62 nt, Homo sapiens
gagcggaaacacaaaaaagggaaagaacggagaaagggcagggggcggagaacggaaaagca

SEQ ID NO: 129995 - RNA, 38 nt, Homo sapiens
cagcccgagaccgcagcaggccccagccccagccaaac

SEQ ID NO: 129996 - RNA, 77 nt, Homo sapiens
ccgagaagggagacgacgcgcgggccgcgagcggggcgacccgagagcaaacaggaccagaagccaaagaggcgagg

SEQ ID NO: 129997 - RNA, 67 nt, Homo sapiens
gacgcacagcgccgcaccccagagcccacacccgcagagcgaggaccggaagacacgagggagagag

SEQ ID NO: 129998 - RNA, 102 nt, Homo sapiens
gaggacggacgccaacgcacccccgacaaacaccacgagaaccgcagcccacacgggaggccaacagacccaacccagaaggcaccaaacggagggggaaca

SEQ ID NO: 129999 - RNA, 70 nt, Homo sapiens
agacaacagccagacacggcagcaacaaaaggggcgaccaggacgggaaggaggacaggaccacaaccga

SEQ ID NO: 130000 - RNA, 60 nt, Homo sapiens
gcgggaagcaaaaaaagcccagggaggaaagagcagaccaggagaagaacgggacccgaa

SEQ ID NO: 130001 - RNA, 68 nt, Homo sapiens
caccagagccgagggcacgaacgcacgagaaaagggcgccgcagagaaagagaacgagaacaagaaaa

SEQ ID NO: 130002 - RNA, 87 nt, Homo sapiens
gcgggcgccgcggagcagcccccccgcgcccccgcccgcccgggacccgcggccccgccgcgcaagaccccagcgagacagcccgga

SEQ ID NO: 130003 - RNA, 82 nt, Homo sapiens
cgcggccggaggagcccccaggccgcaaaagcagaccggaaaacccaccggcaagaccacacccgaggggagcccaggacac

SEQ ID NO: 130004 - RNA, 81 nt, Homo sapiens
ggaggaggggagcagcgcgcaagccccacagagaccaccacacacgcggaggagggcgggggagacgcacggcgaggcgcc

SEQ ID NO: 130005 - RNA, 56 nt, Homo sapiens
ccggccccggaaagaagggaggcacacccgggacccaggacgcccgaggggggagg

SEQ ID NO: 130006 - RNA, 76 nt, Homo sapiens
cgacgacaacgccacacgagaaccacgggcagccacacacagcaccgaagaaggagagccaaggaggaaaggaaaa

SEQ ID NO: 130007 - RNA, 54 nt, Homo sapiens
ggcgaggagcaccccccgccggaaaggggaaaagaaacaaacaacaagaagaag

SEQ ID NO: 130008 - RNA, 73 nt, Homo sapiens
cagcccaaccggggaagaaggaagccccggaggcacaaagacagccaaaacaagagcgcccgcccaaaaagca

SEQ ID NO: 130009 - RNA, 65 nt, Homo sapiens
agaaggaccaagaaccagaaaaggggacaagccacaagagaagagacaacaggaaggacaaaacg

SEQ ID NO: 130010 - RNA, 77 nt, Homo sapiens
agaaaccgaagcgaaaagggccgggccaagcaggacaacgcacaaccaccgcgaacacaagcaagagcaccaagcag

SEQ ID NO: 130011 - RNA, 81 nt, Homo sapiens
gcgcacacagaagaagcccagagagcaccccagcgaggcccacagaaaagccacaacccagcgcaaaggaaaagccaagga

SEQ ID NO: 130012 - RNA, 60 nt, Homo sapiens
acggggccggaccagccccgaaacacggggacggggggaaacaaagagccgaaaagccgg

SEQ ID NO: 130013 - RNA, 61 nt, Homo sapiens
cccggcccgggagcccccgcccggaacacccaagaacgaggccccgcagcaggcagaaagg

SEQ ID NO: 130014 - RNA, 78 nt, Homo sapiens
acagcaagaaaggcaaggaaccgaaaggaacggcagacaaaaagcagagaaaacgaggcggagcgcaaggcgcgacgg

SEQ ID NO: 130015 - RNA, 78 nt, Homo sapiens
cgggacccacaaccaagcagcagaggagcacgaggacggggagcaagaagacccaggccaagccaccaagcgacagaa

SEQ ID NO: 130016 - RNA, 78 nt, Homo sapiens
aaagaaaccaggcgaaaggacgacacgagggaaacgaaggaggcccaaccacaaaaggagccgacggaacccagacgg

SEQ ID NO: 130017 - RNA, 74 nt, Homo sapiens
accccgacccaaaacaggacaaaccgcccagcgaaaacaggggaggaacgaacacagcacggaaggccaagcgg

SEQ ID NO: 130018 - RNA, 90 nt, Homo sapiens
ggagcgcgacgcgcaagggcgcggagccgcgggccggcgagcgcgcgccaccaggaccgaaggagaagaaggagaaggggaggagaaggc

SEQ ID NO: 130019 - RNA, 80 nt, Homo sapiens
ggaaaacaaccgagggcagaacggcggaaaacccgaagcagaagcccgacacaggcacaagaccgagcaggcacagagca

SEQ ID NO: 130020 - RNA, 80 nt, Homo sapiens
ccgaagcaggacccgaagccaaaccaggagggccaagacaacgacaagagaacaaaggaggggaccccggcaaaaaaaac

SEQ ID NO: 130021 - RNA, 87 nt, Homo sapiens
acaggccggagagagccgaggcaggaccccgggacacccggaagccaggaaagggaccagaccgcaaggggacaccgggcccgcgcc

SEQ ID NO: 130022 - RNA, 77 nt, Homo sapiens
cacggacggaagacaaaagaggccagaacggaagaccaaccagaagacacacaaagcaggggaagagacagagcagc

SEQ ID NO: 130023 - RNA, 88 nt, Homo sapiens
cacccgcgccgggcaccgaggaccagccaagacagaacaccagcaggaaaaaagagcggcagaaggccaaacggccgagcaggcgagc

SEQ ID NO: 130024 - RNA, 82 nt, Homo sapiens
gggccagcccgggaccacggaccaaaggccgggcgcagaacccccagaccacagagcagcccgggcccccgcggcgggcccc

SEQ ID NO: 130025 - RNA, 75 nt, Homo sapiens
caccgcggcgaggcgcggagagggcggcccagggggccacgcggcgacaggcagggaaacgcagaacagccaagg

SEQ ID NO: 130026 - RNA, 72 nt, Homo sapiens
ggcaccgacagcaacccccccacgccacacagggaaggcacacagcagggcggagaacggaaaagcaccagg

SEQ ID NO: 130027 - RNA, 74 nt, Homo sapiens
cggccgagccaaggccgggccgaggccacgggcaagcccgggagggaaagccagaccgccaaccggaagaggaa

SEQ ID NO: 130028 - RNA, 85 nt, Homo sapiens
cggcgccgccaggccgacgaaaagcccaaggagagccgggcgggacggccacgaccgaggagcaaaaccagaggagaaacggggc

SEQ ID NO: 130029 - RNA, 76 nt, Homo sapiens
cacagcgagaccgcgccggcgaccagaggcgcacgggaggccacgcagccgcacgccacccccacccgggggggag

SEQ ID NO: 130030 - RNA, 66 nt, Homo sapiens
gagcgacaagcacacaacgaagcacgagcaaaaaaagacaaacgaacgcgggaaaacggagaaaca

SEQ ID NO: 130031 - RNA, 79 nt, Homo sapiens
cagagaccgaacagagagaacaagagacgcagccgcacagagcaaaccagaggagacgccaggccccagccaacccaga

SEQ ID NO: 130032 - RNA, 75 nt, Homo sapiens
aagaaagaggaggccaagaaaaccagaaggcaccgacaggaaaggaaaaggagaaccaggcacccgggggcaagg

SEQ ID NO: 130033 - RNA, 60 nt, Homo sapiens
caacgaacaccacgcaccgcagccgcgagagaggcaagccgggggacaaaccggcgacca

SEQ ID NO: 130034 - RNA, 79 nt, Homo sapiens
gaggaccccccacagccaggccacagaaccagggaacaacggagagaagcaaaagccccaccacaacccaaccccacaa

SEQ ID NO: 130035 - RNA, 76 nt, Homo sapiens
cacggagccggcacacccaccaggcggcgccagcagaagccgaaaggagaagagagaccccaggacccagccaacc

SEQ ID NO: 130036 - RNA, 75 nt, Homo sapiens
ccggagcggggacccaggagccggccagcgcgccggagccgccgaggccccaggcgggcaacgcagcaacgccac

SEQ ID NO: 130037 - RNA, 79 nt, Homo sapiens
ggggcgccgccgggcggccgggcgcggcgagcccaggcacacagagaaaaaaagggaacaaaacacagcaagcagacaa

SEQ ID NO: 130038 - RNA, 69 nt, Homo sapiens
acgaggccccacccagcgcacacaccaccacacacggaccgaaggagaagggacaacagacgcagagaa

SEQ ID NO: 130039 - RNA, 67 nt, Homo sapiens
caaaaaaaagaagccacgccaaaagacgaaagggggcgaccacaggaccaggcccggagacgcgacg

SEQ ID NO: 130040 - RNA, 63 nt, Homo sapiens
ccggaaaccaacaaaagcccagaggcccaccccacgggaggaaggcgaggccaagaccccgga

SEQ ID NO: 130041 - RNA, 43 nt, Homo sapiens
gccccggaggaccaccgggcggggagagaagacgcgggcaagg

SEQ ID NO: 130042 - RNA, 86 nt, Homo sapiens
ggcggggcgcccccgccacgcagccggccaccgccgagacccagcacacgccgaccaggagagaacaaggagcaggccaacggcca

SEQ ID NO: 130043 - RNA, 66 nt, Homo sapiens
gcacgcgcaaggacgggcccaagacaaaaggccaaggaaaaggaacagagagagcagaaccgaaac

SEQ ID NO: 130044 - RNA, 78 nt, Homo sapiens
gcccgggcgggcgcgcaccgggccacccggggccggcgcggaggcagcgggcacggcagggccgccgcacccagacgg

SEQ ID NO: 130045 - RNA, 64 nt, Homo sapiens
agaggaagcagaaacaagggcacgcagaggagagaaccaaaggccgagcccacagagaggaaga

SEQ ID NO: 130046 - RNA, 74 nt, Homo sapiens
cccgaccgcccaccccgccggacacgaacgaacagaagagaacaacaaaaaccaaaaaaccaaggcaagaggaa

SEQ ID NO: 130047 - RNA, 80 nt, Homo sapiens
agagagagagcgcgcaagagagaaaaaagggacgccaacccgagggcgagcaaacgacgccccagggaaggaaaccgaca

SEQ ID NO: 130048 - RNA, 76 nt, Homo sapiens
cggcgcccgaggcgagcagcagcgcgccgggacacggcccggcccagccagcagagccacgccagagcaccgggga

SEQ ID NO: 130049 - RNA, 59 nt, Homo sapiens
gaacaaggggagccaaccgaagcacggacaccagggacagccgcagaaagaagaagggg

SEQ ID NO: 130050 - RNA, 73 nt, Homo sapiens
ggaccaaggaagaacccgaagcaccgcgcggccgccggagccgccgcgcgcgacggccgggccggccgcgcgc

SEQ ID NO: 130051 - RNA, 75 nt, Homo sapiens
aacgcaggaggcacaaacaggagccagcccacaccaggcagaaggagacgacaaaggacgcccccgggccaaacg

SEQ ID NO: 130052 - RNA, 82 nt, Homo sapiens
gggaaaccgccaggggacggggaaccaagcgcgaacagaccaagagcccccacgcgcgcaggcgcgcagaaaggaagacgag

SEQ ID NO: 130053 - RNA, 40 nt, Homo sapiens
acagacggaggcggccacaggaaccaggacagaaacccac

SEQ ID NO: 130054 - RNA, 78 nt, Homo sapiens
gaaagacgaaggcgaacaggaacaaagagagagaaggcagaaaacaccaagacagaagcagacagaacaaagcggacc

SEQ ID NO: 130055 - RNA, 68 nt, Homo sapiens
ccccgacaaacaccacgagaaccgcagcccacacgagagaagaaagacgggacaagggcacacggcac

SEQ ID NO: 130056 - RNA, 96 nt, Homo sapiens
cgaaacagcgcagccaggaacaggacgaagaccagcgccagggaaagaaggggaggcaagcaggggggcaaaggaaagaaggcagaaagggaggcc

SEQ ID NO: 130057 - RNA, 71 nt, Homo sapiens
aacagcccgaagccaccaaacccccgaaggcacacagaacgccccaggggaaaaaaagaaaaagccaccga

SEQ ID NO: 130058 - RNA, 81 nt, Homo sapiens
gcgcccagccacacgccgccgcagcggggccgacagccccgggacgccgggaggaccggcggacaggaaccgggccccgac

SEQ ID NO: 130059 - RNA, 81 nt, Homo sapiens
ccccccgcggcgccgagggaccaggccgacccgcggagacagacaagacaagaccggcggggaagcgaacggagaaacccg

SEQ ID NO: 130060 - RNA, 82 nt, Homo sapiens
ccagccgccggagcaccgcggccgacgcgccgagcgcacgcccgaacgcgaggccaacagccccggagacgccgcacccagg

SEQ ID NO: 130061 - RNA, 66 nt, Homo sapiens
caggaagggccgcccaaaaaagagcaggaaacgaaggcacccacccgcgagacccccaagagacaa

SEQ ID NO: 130062 - RNA, 117 nt, Homo sapiens
agaaggggggcgccggacgcggccgccaccagggcccgcccccgcgaggccggccaggagcaggagggacaggcaagaaggaagaaggcagaggcgcagccagggggaccgcggagg

SEQ ID NO: 130063 - RNA, 77 nt, Homo sapiens
aaacaccagagggccaggccagaagagccgaccacaaggggaggacaaccgcccgggaccagagacgaagaggagca

SEQ ID NO: 130064 - RNA, 79 nt, Homo sapiens
gagaggcaggcggagccgaccgggccaggcgaccggcccgaggaccgccgcacgaccaaacgcagaacccacaccccaa

SEQ ID NO: 130065 - RNA, 83 nt, Homo sapiens
cagcaccacgcccgcgccgcgccgccgccaccagcccaagagaaaggcgagaacgggaagcgcacaaggaaacccacaccacc

SEQ ID NO: 130066 - RNA, 85 nt, Homo sapiens
cgcgcaccgaggccagggggccggccgcgcgccgaggagcgcgagagaaggagggggcagagcacggcaggcagaaggggccaac

SEQ ID NO: 130067 - RNA, 79 nt, Homo sapiens
caaaaacaagacggggcgccccacagaggggcgacgaacaaacaccgcgcagaacagaaccagagacaaaaaagaagac

SEQ ID NO: 130068 - RNA, 71 nt, Homo sapiens
ggaacagccggccccaggacacacaacacagccaaccaggagaaccgcaccaggccacaaaagaaagagga

SEQ ID NO: 130069 - RNA, 75 nt, Homo sapiens
agagcaggagcaggaaggaccgaagaccccagaggcccccgcaaacgcggacacgcccggggaaccccagggcgc

SEQ ID NO: 130070 - RNA, 54 nt, Homo sapiens
cccccgccggaaacaggcccaagaaaagcccaaagaacgccaaagagacggcaa

SEQ ID NO: 130071 - RNA, 85 nt, Homo sapiens
gaagaccaaccaaggcggcaaagaagagggaccaggcacgcacgaggagcggaggaggagcggaggccgagcgcaccgccagggc

SEQ ID NO: 130072 - RNA, 72 nt, Homo sapiens
aaaggagcgaccccccaagcccgaggaaaaaacaaaaagaaaaacccagccccaaaaggaacgaaagagaac

SEQ ID NO: 130073 - RNA, 75 nt, Homo sapiens
ccaacaacgccaagacaggacggacccaaagcacgcggcgagaaaacacacaagacaacaggcacaaagagagaa

SEQ ID NO: 130074 - RNA, 48 nt, Homo sapiens
agcaaagcagcagaagggccagcaggccccccaccgcagaacgccagg

SEQ ID NO: 130075 - RNA, 86 nt, Homo sapiens
caaccacaggagggaaaccacgcaggcaaacgagaaaaagccgagaaggccagacgccggggaaccaggaggagaggggaggaggg

SEQ ID NO: 130076 - RNA, 78 nt, Homo sapiens
cgcgcggaggaaacacccaggacacggccacaacaccaagagcgcgccgccgcaacaggggcaagagaggccgaccga

SEQ ID NO: 130077 - RNA, 87 nt, Homo sapiens
cgagaccggagagccgcaggacggcgcggcagagccccgacgccacagaacgggccgacaagaccggggggaccgggcggcgagacc

SEQ ID NO: 130078 - RNA, 51 nt, Homo sapiens
acaacgcccaggaggaacccacacaagcaggaggagagccagagagaggaa

SEQ ID NO: 130079 - RNA, 75 nt, Homo sapiens
aggggccggagagggccggaccgagcggccgggacagggcagaccgccagcagcacagcaagccacagagagggc

SEQ ID NO: 130080 - RNA, 111 nt, Homo sapiens
accagacccgcgcggagcgggaggagacgggcagggaggcagcgacagcacgcaggggaacccacacccgcccccagggccaccgcaggacgccgacaccacccccagcag

SEQ ID NO: 130081 - RNA, 78 nt, Homo sapiens
ggacgaagcccaaaccacaagccacaaaagggaaagggagcagcaccggccacacccacagcacgaccggaacccagc

SEQ ID NO: 130082 - RNA, 64 nt, Homo sapiens
gcgaccccaccggacgacgggaccggccgcgagggcccggaacaggggcacgcacgaggcggaa

SEQ ID NO: 130083 - RNA, 62 nt, Homo sapiens
cgccaggggagggaaaggcaccgggacagacgagggaggaccagccccaccacgaccacaac

SEQ ID NO: 130084 - RNA, 56 nt, Homo sapiens
cagcaacgacgggacacgggcccacagggggggaagaaagaaggagaaggcggagg

SEQ ID NO: 130085 - RNA, 66 nt, Homo sapiens
accgaacccaggagcccgcacggcaagcgcgcggcaggacccagaccggaagggaggcaggagagc

SEQ ID NO: 130086 - RNA, 64 nt, Homo sapiens
gcagccgagcggggccggccacaggagccagggcagaaacccccaccaggcgggcgccacacgg

SEQ ID NO: 130087 - RNA, 82 nt, Homo sapiens
caccacagaaacaaaagcaacaaagaggcccgccccccaaagcgaagccaaagcgaaggcaaaggccaagaaggcagggaaa

SEQ ID NO: 130088 - RNA, 80 nt, Homo sapiens
ggcggcgaccggcggcgccgaggagcaccaagggcccaccaacaggacccagggaaaggggaggcaagcccgaagcccca

SEQ ID NO: 130089 - RNA, 112 nt, Homo sapiens
agcacagaagagaagacaagccaaagcaacagaccaaaaacaggcccggcgagccccgcagcgagacgacgggaccgaaggaccccgccagagacaaccgagcgccaggaga

SEQ ID NO: 130090 - RNA, 79 nt, Homo sapiens
ggaccgggaggaagagggggacgccccggcaacccaggggcggccacgaccaccaggcgccagcaacccgacgaagacg

SEQ ID NO: 130091 - RNA, 78 nt, Homo sapiens
ccggcccagcccccgaaagcgggaacagacccgcccaagagccaagggaaacgcacggacagagaacagaccagggga

SEQ ID NO: 130092 - RNA, 70 nt, Homo sapiens
accggaacaaagaaaaccaaaacgcaacagaaacaacaggggaaaaccagaaccgaaaacccagaccaac

SEQ ID NO: 130093 - RNA, 58 nt, Homo sapiens
ggcacaccggacggcgcgcgccgcgcagggacagcagcgcccaaggacaagccaagcg

SEQ ID NO: 130094 - RNA, 75 nt, Homo sapiens
ggcaagaacaccgaggggccgggaacggcgccggaggaccagacccaggaggagacagagggagcacaggggagg

SEQ ID NO: 130095 - RNA, 74 nt, Homo sapiens
aagcgaacaaaaagcagcaaaccggaccaccccgaagaaagcacagagccaggacaaaaccaggcagaaccaac

SEQ ID NO: 130096 - RNA, 77 nt, Homo sapiens
aagaccacaacaagcaagcagcagcacgcgaaagaccgagaggagaagccgacgaccccgccagacgccaggcccac

SEQ ID NO: 130097 - RNA, 65 nt, Homo sapiens
ccagagaggcccagaaaaaccagcaagcaggcgaccgacccacagcgaagcacgccaggcggacg

SEQ ID NO: 130098 - RNA, 52 nt, Homo sapiens
gaccacccagaggagcaaccggaacacgggcaacgggggaagacggccagaa

SEQ ID NO: 130099 - RNA, 64 nt, Homo sapiens
aaagcaagaggcaaaaaggaggggaagaaggagaaagggccaaccccgaagaagcaaacagaaa

SEQ ID NO: 130100 - RNA, 75 nt, Homo sapiens
aggaacccaagcagggcgaagggaacgcaaggcccccgaccacacgcccgcgcgaggaaggaaaagagagggcag

SEQ ID NO: 130101 - RNA, 76 nt, Homo sapiens
cggcccaccaaacagaaacgaggaagcgggcaccaacagacaaccagggcaagcagaggcaaaggcaagggcggaa

SEQ ID NO: 130102 - RNA, 57 nt, Homo sapiens
cgcgagacacaaccacagggaaagccggggccccggggacccgcggcacggacaggc

SEQ ID NO: 130103 - RNA, 74 nt, Homo sapiens
ggaccggaagcagagaaagggaagggaaaagaaaggccacgggaggagggcaacgaggaagcccaggaagaccc

SEQ ID NO: 130104 - RNA, 77 nt, Homo sapiens
ggccgggcggccccggggcgccagagcagcaggggaggcgaccaggcggggccaccaacaaaagagaagcagaaaga

SEQ ID NO: 130105 - RNA, 67 nt, Homo sapiens
ccgcggggcagcgcccaaagcccgccaccgaggccgagaagcagcaaaggcaaacaaagcggccaga

SEQ ID NO: 130106 - RNA, 78 nt, Homo sapiens
caagcaaagccaccacgaggaacgggaacagcaccccagccaagccaggaccgaagcggcgggcgacacggaaggaga

SEQ ID NO: 130107 - RNA, 39 nt, Homo sapiens
ccccaagagcgggagcaggaccgacggaccccaccaccc

SEQ ID NO: 130108 - RNA, 64 nt, Homo sapiens
cggaagcaccagcgaggaagaaacggcgaggaaagagaggagccccggaaagaaaaggacagac

SEQ ID NO: 130109 - RNA, 68 nt, Homo sapiens
agcgagggggcgcgaccaaaggaaaagcagaaaacacagacaggccaaggagacgccccgaaagaaaa

SEQ ID NO: 130110 - RNA, 76 nt, Homo sapiens
aggggcccgaagaagccgccacacagaaggcgaacccccagaagagcaacggagaagaagcagaacaccaacgccg

SEQ ID NO: 130111 - RNA, 72 nt, Homo sapiens
ccagaaggagcgaacgaagaggcacacaagcaaaagggcagaaaagcagggcaagcagggaaaagagaaaga

SEQ ID NO: 130112 - RNA, 76 nt, Homo sapiens
cagaagcgcaagaaccccccccgcagagaagagcgccagcggcagcaggagggcgggaggcagcagcaggcaccag

SEQ ID NO: 130113 - RNA, 66 nt, Homo sapiens
acaggggcgcaagacaggagccagcagcccaagcaagcagcgaaacaagcaaaggacaagaaacag

SEQ ID NO: 130114 - RNA, 88 nt, Homo sapiens
cgaaacgcccgaaaacagggccggccgcagagcccaccggaaggagaaggaagaggagcgcgaaagggcccccacacggccgaccaaa

SEQ ID NO: 130115 - RNA, 59 nt, Homo sapiens
gggacgccaccggagaagggaggaaaaccaacaagcaggcacgggcgcggaggggaacc

SEQ ID NO: 130116 - RNA, 78 nt, Homo sapiens
cacaaagccagcaaccacagagggcgagcagagagaaagccagagaaccagacagccacccgcgggcggcagggagcg

SEQ ID NO: 130117 - RNA, 74 nt, Homo sapiens
cagaacaccaggccagcaccaccggcagcggagggaaggaagcaagaaacagggaggacagaaacacgggaggg

SEQ ID NO: 130118 - RNA, 68 nt, Homo sapiens
gcagcgagaaaggagccggggaccccccaaagacaagcggaggagcaccggaacacagaagcagagaa

SEQ ID NO: 130119 - RNA, 44 nt, Homo sapiens
accacccgggcacagcaggcacggagagcgagccaaggcagcaa

SEQ ID NO: 130120 - RNA, 83 nt, Homo sapiens
cgacagacagcagcacagcagcgcgagacagggcgagaaggaaacccaccagagaaggcgcggccacccaggacccgggggag

SEQ ID NO: 130121 - RNA, 77 nt, Homo sapiens
cccagccagaccagggacaaagagcaaacagacagggccgcaggaggcacggacaaaacgcagggccagcaaacccg

SEQ ID NO: 130122 - RNA, 57 nt, Homo sapiens
ggggaaacgaccgccccaaaacgccgggacagaccggagcggggaggagcgccggcc

SEQ ID NO: 130123 - RNA, 52 nt, Homo sapiens
agggccccacggacacaaggcagaccgaccaaacagggagcagcggacagga

SEQ ID NO: 130124 - RNA, 81 nt, Homo sapiens
cgcgcgcccgcgcccgcgccggcgggcccgccgcgcgccgcgcggcacccaccccgaagaacagaaaaagcagggcacaag

SEQ ID NO: 130125 - RNA, 52 nt, Homo sapiens
caagagcacaggcagaaggcacaagggccacagaacaccgccggccacaccg

SEQ ID NO: 130126 - RNA, 71 nt, Homo sapiens
aacagcgcgacaaggccggaagagcagcaccggaccagcggagcggccggcgaacccaggcacccagagac

SEQ ID NO: 130127 - RNA, 53 nt, Homo sapiens
cgacaagccaaagcaagacccccacccagagaccccaggaggggacggaaaaa

SEQ ID NO: 130128 - RNA, 87 nt, Homo sapiens
gaaggaagaaaacacaggagccggagcagaagcaaagagaggggaaagaaccagacgacaggaaggcacagaacgaagccgcagaag

SEQ ID NO: 130129 - RNA, 64 nt, Homo sapiens
ggaccaagaaccagggacaaggggcagcagaccaggcaagcggaaagacccccgaaagaagaga

SEQ ID NO: 130130 - RNA, 75 nt, Homo sapiens
ccacccacgaagggaggaaaagggcagggacagcgcaggcagcaggacacaggaacgccacaagaaacaacagca

SEQ ID NO: 130131 - RNA, 71 nt, Homo sapiens
acacaggcacaccgcacaaggccaaacagcagccggaggaggacaaggagagcccggagaaaacaaaccca

SEQ ID NO: 130132 - RNA, 83 nt, Homo sapiens
gaggcccaaagagcccaggagaagcggagcggcagagaaaaaggccaccgagccggaaagcaaagacagccaaaaacaacaag

SEQ ID NO: 130133 - RNA, 75 nt, Homo sapiens
cagaaacagaacgaaacaacggaaacgggagacgaccccgaggcaaagaaaaagccagccgaggacgggaaccag

SEQ ID NO: 130134 - RNA, 77 nt, Homo sapiens
gagccggcgccgcggccgccgcaaggaaacacaacgagaaggcccccccaagccggcacgacaaaccgccagaccaa

SEQ ID NO: 130135 - RNA, 62 nt, Homo sapiens
aggcagccacggagacgcagccgacaggaggaacccgacacagccagcccccacccccgccg

SEQ ID NO: 130136 - RNA, 81 nt, Homo sapiens
gacgggagcgcaaggcgccccaaggccagacaaaacgcagccagaaagcggggggaggacccgcggaaccgacgcacgccc

SEQ ID NO: 130137 - RNA, 58 nt, Homo sapiens
accgcccacccgacaggagagcgccggcgcggaaggcgggcccccgcgcaaggcccgc

SEQ ID NO: 130138 - RNA, 62 nt, Homo sapiens
aaccaccagcccgggggcagcagaaaaaggagcagcacgccaaacaagaggaacaagaagag

SEQ ID NO: 130139 - RNA, 84 nt, Homo sapiens
gccgagcgcagagcgcagccgccgagccggacggccgcgaagaggcgggccgggacaagaagaggcaaacgcacccgcccgaga

SEQ ID NO: 130140 - RNA, 74 nt, Homo sapiens
cgggagcggcgcggccccaaggcgcgcccgcgcaggacaccgaaaacgagaaacgaaagagacacgggggcaca

SEQ ID NO: 130141 - RNA, 58 nt, Homo sapiens
acgcgcggaaggcagcgcccagcagcgcaggccaaccacaaggacagagccaccacag

SEQ ID NO: 130142 - RNA, 39 nt, Homo sapiens
cacaaaggggaacgggcagagacacgggcacggcacaaa

SEQ ID NO: 130143 - RNA, 96 nt, Homo sapiens
caagaaccggcagcgaacaaggagaaagccacaacagggcggcaacaggggcgagaaaggacaggaagggaaggggcggagacgggcggaacgcag

SEQ ID NO: 130144 - RNA, 69 nt, Homo sapiens
caggcgccaggagcacagaagagcgaggaggcagagcaaaaaggagccgggcaaaaacaggacggaacc

SEQ ID NO: 130145 - RNA, 33 nt, Homo sapiens
gacacggaccccgaggcccacccccagagagac

SEQ ID NO: 130146 - RNA, 66 nt, Homo sapiens
cgccgccgaggaggcgagcagccgggagacaccgccaccgccagcggaggggagcaggggaccgga

SEQ ID NO: 130147 - RNA, 75 nt, Homo sapiens
gacagaaaacgcaagacaacaggagaggaaagcggaaagccaaggaaccgggaccaaagaagagaacagcaggaa

SEQ ID NO: 130148 - RNA, 74 nt, Homo sapiens
ccgcgcggggacccgacgcccgcacgcagacagagacccaccaaggggggaaaaggacagcgacacagggagga

SEQ ID NO: 130149 - RNA, 79 nt, Homo sapiens
gggcgggacccccccaccggcggcacgaccgcaggcgggacaagaaaagaaaaagcaacagaaaaacaaccggaagccg

SEQ ID NO: 130150 - RNA, 59 nt, Homo sapiens
agaaaccacaagaaaacaggggagggggaagacaaccaggggaaagcccagcggccagc

SEQ ID NO: 130151 - RNA, 74 nt, Homo sapiens
gaacaccgcggcgccagacaccaagagcggacaccagcaccagacgcagcaggagacagaacccaccagacaac

SEQ ID NO: 130152 - RNA, 61 nt, Homo sapiens
gcaacgagcggcagaaacacaagaaccacaaggaaacagacagaacacagagccagagaaa

SEQ ID NO: 130153 - RNA, 71 nt, Homo sapiens
gaggagaaacaggaaacaaggagaaaaccggaagagaaaggccgggaagcaggaaagaaaaaaacaacaga

SEQ ID NO: 130154 - RNA, 76 nt, Homo sapiens
caagaacagaaagggaacacagcagagggggaaaaaaacaggcaacggggaccccggagcccagaagacagagggc

SEQ ID NO: 130155 - RNA, 78 nt, Homo sapiens
caaggagcgcccagaggccggcgggagcccaggcaccccccccccagggaaacccagacgacaaggaaggccaaggga

SEQ ID NO: 130156 - RNA, 78 nt, Homo sapiens
cccgggcggcccggcgagcacggcaggcggagacaagcagaccggaagaccgacggaagaccacaccccgagggagcc

SEQ ID NO: 130157 - RNA, 65 nt, Homo sapiens
cggagagccccggaggagcggagagcgagcggcaacccggaggagaggaacagggcgcaccacag

SEQ ID NO: 130158 - RNA, 77 nt, Homo sapiens
accacaacggaggagagaaaccgaaggccaagacaacaaaaaagggagaaccacccacgaagagcagaccgagcagc

SEQ ID NO: 130159 - RNA, 77 nt, Homo sapiens
gcgaggacgccgagagcgagaaacaaagccacccagccaagaaggggggggaagacaacccggagaacacccagggg

SEQ ID NO: 130160 - RNA, 75 nt, Homo sapiens
ggagcaacagccaagccaaacgcaagccccggggcagagacacaggacacccacccgccggggacagacgcggac

SEQ ID NO: 130161 - RNA, 41 nt, Homo sapiens
caaccaggaaagcccgcggcacggcggcgaggcgaaggccc

SEQ ID NO: 130162 - RNA, 58 nt, Homo sapiens
ccgcaccagccacacaccaggagcagaaaagcgaggcaagggcggcaggggggggcgc

SEQ ID NO: 130163 - RNA, 52 nt, Homo sapiens
cggaggcagaggggaggcgcgaaaggccccccacccggcgccccgggccagc

SEQ ID NO: 130164 - RNA, 39 nt, Homo sapiens
gcggacgccaaggcgaagaaagcacagcgagacaagcaa

SEQ ID NO: 130165 - RNA, 75 nt, Homo sapiens
gacaacagggcgagggggaaaaaaaggggcccccaaagggaagccaaacacaaaggaagaagcccggagacgacc

SEQ ID NO: 130166 - RNA, 73 nt, Homo sapiens
gaaaccgcccgccaggccaaaagaagagaagcaacggggcagaagccaggagcagcaacaccaaggaaagaaa

SEQ ID NO: 130167 - RNA, 79 nt, Homo sapiens
gggacggccgcccagccggcacccccaggcacaggaacagaaagcggagaagcagcacccgccaggcaaggagcgcgca

SEQ ID NO: 130168 - RNA, 74 nt, Homo sapiens
cccggaccccaccggccccgaggccgcgaaggcgcacgggccccgcggaccaaaccgcacaaacaaagccaagg

SEQ ID NO: 130169 - RNA, 76 nt, Homo sapiens
acaccaggaaggaacagacagaggacaggaggaaaaccagcgccgggagcgccgccaggacaggcccgacgaccca

SEQ ID NO: 130170 - RNA, 34 nt, Homo sapiens
ccagaccgaccaccaaaagggcccggcgaacagc

SEQ ID NO: 130171 - RNA, 72 nt, Homo sapiens
ccaagcaggaccacccaccagccaccaggaaaagcgccaccacaaggaacaacaacccaccaaacagagaag

SEQ ID NO: 130172 - RNA, 79 nt, Homo sapiens
ggaagaccacacaccccacaggaaggcacacagcagcaagagcccaaacgcacacagggaaaggaggcgcaccgaggaa

SEQ ID NO: 130173 - RNA, 80 nt, Homo sapiens
cacagacacgaccgacacagccccaaagcccagagaagaccagagaggggggcagaaaccgaacagggcggagaagccag

SEQ ID NO: 130174 - RNA, 94 nt, Homo sapiens
agcgcccaccaccgggccccccagccacgccccgaggcagagcgcacgcggccccggcaggccggcccgcagcccccaggagggagccggcagc

SEQ ID NO: 130175 - RNA, 81 nt, Homo sapiens
cacccgcccccgcggcaaagcagggaggcggaggacggagagagggagccccagaaaggcacccaggaagacaaacccacg

SEQ ID NO: 130176 - RNA, 84 nt, Homo sapiens
acgagcacacgaaggcccggcagcccacacggccaaccaggacggcagggcaccgagccgccaaggcagcccagcagagcaccc

SEQ ID NO: 130177 - RNA, 68 nt, Homo sapiens
gccgggcccaggcgacaacaccaggcaacgagggccaaccgccgcagcagccaggcgaacacacacaa

SEQ ID NO: 130178 - RNA, 78 nt, Homo sapiens
gggacaagccaagggacaggggggccgggggaacgaggaagcgcccaaggagagagcgaagcaccgcgcagaccgaaa

SEQ ID NO: 130179 - RNA, 75 nt, Homo sapiens
agagaggaggcgcgacgacgggaggacaaccaacgacagcccagcagcacagacacaagcgggacggaagaggcc

SEQ ID NO: 130180 - RNA, 70 nt, Homo sapiens
cagggccggggaagcaccaaaggccggaggcaccacaacacggacaaccacccccaaggaggacacccca

SEQ ID NO: 130181 - RNA, 82 nt, Homo sapiens
cgcccaacacgacccagcagccagagagccagccaggccccgaccagcagccaccgccgcggccgccaccgaggggcgcacc

SEQ ID NO: 130182 - RNA, 79 nt, Homo sapiens
gagagacgcgggaaccgccagcaaaccacacagccacccaggcccaggaccgagcccgacgcccacagacaggcgaacg

SEQ ID NO: 130183 - RNA, 77 nt, Homo sapiens
cgccgcggcgacccggaggaaccggcccgcgcccgcccccgggagcccgcacggaagcggcccacgacacacagaaa

SEQ ID NO: 130184 - RNA, 59 nt, Homo sapiens
aacaaagggagcagcggggaagcgaagaaggggggcagaaagaagaggaggacaacaag

SEQ ID NO: 130185 - RNA, 66 nt, Homo sapiens
gcgagagcgcaacgcaacccagaggagcccaagccaggaacacacagccgccagccggggcgggcc

SEQ ID NO: 130186 - RNA, 51 nt, Homo sapiens
cacacgaaccacagcgaaacagcgacgccgccacccgggaccacacgcaca

SEQ ID NO: 130187 - RNA, 71 nt, Homo sapiens
agggaacccaccggggcaggaggcgccggggacggggcccggcggcagaagccccgagacacaagcagcga

SEQ ID NO: 130188 - RNA, 62 nt, Homo sapiens
cagaaggaacgacaaacaggaccgccaaacccaaaccggcacacagcggcaggaaaagagca

SEQ ID NO: 130189 - RNA, 79 nt, Homo sapiens
ggacgaaagcaaggaggggaaaaaccgcgaagcaggggccgcgggaagaaggacagaaaacgggccccagacacaagcc

SEQ ID NO: 130190 - RNA, 69 nt, Homo sapiens
ggcgccccaacaaaggggcacacacgaaacgggcaaccggggccagggccagcaccagagagcagcaag

SEQ ID NO: 130191 - RNA, 71 nt, Homo sapiens
gaccgcgggagagcggggaagggggaaaggcaccaggacaagcaaaggaaagcagagccaaagaagaacag

SEQ ID NO: 130192 - RNA, 69 nt, Homo sapiens
cacacacaccacaggaagccagcagagcccccgccaggcccccaaaccaaccgcggcccaccgcaaacc

SEQ ID NO: 130193 - RNA, 65 nt, Homo sapiens
gacacaccagaaggcccgcacgcagcacaggcccgacccgaaaagcgcagccaaccagacgcgcg

SEQ ID NO: 130194 - RNA, 75 nt, Homo sapiens
gcagcaacgcgaggggagcaccaggaccgggccggaacgagacgcacgcaccgagaaggcagggaacagggcagc

SEQ ID NO: 130195 - RNA, 81 nt, Homo sapiens
agagaaagagaacaccggagggaaaagaacggagcccaccgcaggacaccggcaagaggggaaacaacagaagaagcaagg

SEQ ID NO: 130196 - RNA, 61 nt, Homo sapiens
cacaggcccagagagcccagcggaccaggcccgcgcaggcccagagaacagcggggagcgc

SEQ ID NO: 130197 - RNA, 76 nt, Homo sapiens
agaacgcccccaccaccgcaaacagcacaacaacaaccaaaaaacaagcagccaacaaacaaggaaggaacagcag

SEQ ID NO: 130198 - RNA, 79 nt, Homo sapiens
ggagcagaccgcaccggcggcagagagacagcacggccaagacaacagcgggggagagcccggacaaagacgcccaggc

SEQ ID NO: 130199 - RNA, 71 nt, Homo sapiens
ggacagaggaagaagagcaggagcccacaagccagaccgacaccgcggagcaaggaaaagagcccggaaaa

SEQ ID NO: 130200 - RNA, 80 nt, Homo sapiens
gccggggccgggcgacaggagcagccgcaggaaagagagcagaagacagcagccacagcccgggggcagccaggcacgca

SEQ ID NO: 130201 - RNA, 72 nt, Homo sapiens
caacccaaacccgcccgggcgagcagcaaccgaaggcccccagggcacaggacgcagccgggagagaaggga

SEQ ID NO: 130202 - RNA, 73 nt, Homo sapiens
gggcccggcagccgcgcgccaaggccggacccggagaacacgccccagaccacggaaaaccagcccacaacgg

SEQ ID NO: 130203 - RNA, 79 nt, Homo sapiens
cggaacaggaacaagagcaggagcagggaggacacaaaggagcaaggccagcagagcccaagggcgccagccaccaccc

SEQ ID NO: 130204 - RNA, 62 nt, Homo sapiens
gggaccaccagagggaaagcggggcggaaacagaacgacagcccgcaccgacgccggcggcc

SEQ ID NO: 130205 - RNA, 71 nt, Homo sapiens
cacagaccccaacgcagggggagggcgaagcaaaccaacaccccccgggaacaagaaggcagcacaccccc

SEQ ID NO: 130206 - RNA, 79 nt, Homo sapiens
agaacagcagagacgggacacagagcagccgaaggagagcgaacgcacgcaaaggccaacaaacaggaaacaaaggaag

SEQ ID NO: 130207 - RNA, 61 nt, Homo sapiens
ccagacggccaccggcgggaggaacaaaagggagaagagccccgcaagaccagagaagagg

SEQ ID NO: 130208 - RNA, 54 nt, Homo sapiens
acagcaagccccgggacagggccgggaggcgccccacacggcgcaaaaaccaga

SEQ ID NO: 130209 - RNA, 49 nt, Homo sapiens
aagaaaacagccaagcaccagaaggagagaagcgaaaacgcgagcggcc

SEQ ID NO: 130210 - RNA, 69 nt, Homo sapiens
agggcagacggacaagagcgcggaacaggacgccccgaaacacaacacacacagccgggccgcaaccag

SEQ ID NO: 130211 - RNA, 68 nt, Homo sapiens
cagaggagcagcccgcagaggcccaggagacgacaaagccccgccaagggacagcagacacccaaaag

SEQ ID NO: 130212 - RNA, 70 nt, Homo sapiens
gggcagccagaagaaggaccggaagcacacaacaggaaaacaaaagaggagaaagcagaagcagcacaca

SEQ ID NO: 130213 - RNA, 71 nt, Homo sapiens
ccagccgaacagcacaagcaccagaaaggagcaggcaggaagacagaacggcagcacggaaagaggaaacc

SEQ ID NO: 130214 - RNA, 55 nt, Homo sapiens
gcccagaagaccagcgcgggcagacccagcaaaaggggcagagccggccgcgacc

SEQ ID NO: 130215 - RNA, 62 nt, Homo sapiens
ggaacccacagaaaggagacgcaacaccagggggggcggacgaagcaggacacaccgaacac

SEQ ID NO: 130216 - RNA, 82 nt, Homo sapiens
gcggggccggcgcgcagcccggcgggacagcggggcggcggcgccgggggccggggagcgccagcccgcccaaaagcgcaac

SEQ ID NO: 130217 - RNA, 77 nt, Homo sapiens
ggcccccccaccaccagcccagccccccccaaacaagcgcagggggcagaggaccccgccgccggagacccaccgcc

SEQ ID NO: 130218 - RNA, 50 nt, Homo sapiens
gcaagccagcacgcgggggccgccaggcagcggaagggagagaccgggga

SEQ ID NO: 130219 - RNA, 72 nt, Homo sapiens
cggacacagacaccaagggaggccacagagacaagagagaggggcaagcaccggaagcagaaaacaacaaga

SEQ ID NO: 130220 - RNA, 46 nt, Homo sapiens
agcgcacgggacagacgagagcgagaacacacggcagcagcaggag

SEQ ID NO: 130221 - RNA, 74 nt, Homo sapiens
cccccgagcccagcaccgcgggaaggaaaccccccaggcaagaggcgcaggaccgggaagaccaacaaacgcac

SEQ ID NO: 130222 - RNA, 73 nt, Homo sapiens
gcgagcggacccgcagccccaaagcggacaaacccgaaagggggcaaccagaaagccaggagccacgcaggag

SEQ ID NO: 130223 - RNA, 80 nt, Homo sapiens
caccaggcagagacagccaacaaaaacaggcgagacagccgccaggaagcaacgcagcgcggaaaggcacaaccaaggac

SEQ ID NO: 130224 - RNA, 89 nt, Homo sapiens
cacccggaggagcagcccgccccgccgggggagacgacccccgccaggggacggcaaaacagaacagaaaggcggagaaaaaagagggg

SEQ ID NO: 130225 - RNA, 81 nt, Homo sapiens
gaccccgcccggcggcccgacccaagccccccaagagaacccagggggagccacgccggagcgggcaccggcgcggaccca

SEQ ID NO: 130226 - RNA, 75 nt, Homo sapiens
aaaccaagacagcccaaacgccccacgaccagacaggacccagaccagccaaagagaagaagaaaggaagcaaaa

SEQ ID NO: 130227 - RNA, 53 nt, Homo sapiens
gaaaaccagcaggacaaaaggcaagggcggaaaggcagacaacagagcaaaga

SEQ ID NO: 130228 - RNA, 85 nt, Homo sapiens
ggccaccagcgcgcagccaggcgcggagccacaggcaccccggaggaggaagaacgccagcgccggacccaggaggcccaaggag

SEQ ID NO: 130229 - RNA, 81 nt, Homo sapiens
ggaccacaaaccgcgccagaaaaggcagagcggcgggaaaccaccaacaacacccccaaaccaaaacagccggaagcgggc

SEQ ID NO: 130230 - RNA, 83 nt, Homo sapiens
acgggacgcagccgcacaagcggcccgacgagacagccagacggcccagaggagagcggcgccacaccaccacaacccacccc

SEQ ID NO: 130231 - RNA, 75 nt, Homo sapiens
gcaccaccggcccggcaaggcaacgggacccccgaccggcgggggcccacaaccggggccgaaccaacccacagc

SEQ ID NO: 130232 - RNA, 53 nt, Homo sapiens
accagacggcgccccaagaccacagcacagcagaccgcgaagacgccaagaag

SEQ ID NO: 130233 - RNA, 81 nt, Homo sapiens
acccgaggcacgaacgagggagaagccaccgcaccaccgaaaagagcgcacaagcgcacccccggacacccccagaacgga

SEQ ID NO: 130234 - RNA, 75 nt, Homo sapiens
gaacggaaaaaacaaagcgaaacagcggggccacccagaacaaaaagggccaggaagaggaggacgcagcagaga

SEQ ID NO: 130235 - RNA, 52 nt, Homo sapiens
agacgcagggcgcccccggaaggcggaccccggcagcaagcaacagagcgcc

SEQ ID NO: 130236 - RNA, 88 nt, Homo sapiens
gcccaggagcaacaagaaacacaaggaccaaaacgaagcacggagaggcgccagcggagcccaggcccgcagagggcagccaaaggaa

SEQ ID NO: 130237 - RNA, 70 nt, Homo sapiens
agcacgaaccaaccgaaaacagaaacaaacacaccagggggggaccagagcgggccaccaccaaggaaac

SEQ ID NO: 130238 - RNA, 100 nt, Homo sapiens
aacagaacgcgggccgcggcgacggcaggacgcgggcagagagcggacccgcgacgcggcaaacccagccaaccccggaagaaccggggaaagagacgca

SEQ ID NO: 130239 - RNA, 84 nt, Homo sapiens
ccacccaggccccgacgccccgagaccagggaaccgggcagcagccgcagccgcccccgggacggccggcccccccggaagcgg

SEQ ID NO: 130240 - RNA, 73 nt, Homo sapiens
gcagcagcagcagagagaaacagcagaaacgaacggacgaagcgagccacgggccgaccgagagaacggaccc

SEQ ID NO: 130241 - RNA, 61 nt, Homo sapiens
aagaaaccgaaggaccagaggaacacaggaggggcaacaaacaaccacccgcccagcagac

SEQ ID NO: 130242 - RNA, 77 nt, Homo sapiens
caacaggggccagccacaggaggaaaggccagaccacagaagggagaccaagcaacacagcaacagacacagggccc

SEQ ID NO: 130243 - RNA, 70 nt, Homo sapiens
agcacgagaaaaaagaaagaacacagagaaggaaacgacggaaggagcagaccccccagggccacagcaa

SEQ ID NO: 130244 - RNA, 66 nt, Homo sapiens
ggggcggccaccagccgccaggcggccagaaaggaggcccacagccgaccgagcggggcaggacac

SEQ ID NO: 130245 - RNA, 64 nt, Homo sapiens
cgcggagacaagagaccacagagaagcaggcgaccaggcgcgcgggcaagaaagcagacgcgac

SEQ ID NO: 130246 - RNA, 77 nt, Homo sapiens
cgcggacgaagaggcgaccgccagacggagcacacggacaggaaagacaaggagccgggccgagaaaccgaaccaga

SEQ ID NO: 130247 - RNA, 78 nt, Homo sapiens
gcacccacagacggcgaaggcagccacagcgcccagagagcgggacgacccgggacagcccacggggcagaccagcga

SEQ ID NO: 130248 - RNA, 69 nt, Homo sapiens
aaccgaaagagggaagaagaagacaagccaacgccagaaaggagagaagaggacagaaggaagacgcca

SEQ ID NO: 130249 - RNA, 81 nt, Homo sapiens
gacaccacacgaacagagccagaagaacggagagcaagccaaaaccgaaagaccccaaaacgaaaaagaaaagacccgcga

SEQ ID NO: 130250 - RNA, 117 nt, Homo sapiens
agagagccacggcaagccagaagggcaggacgccggggaaacaggaggagacaacaaaagggaccagaagggcagcaagcccgccagggccacccgcagccaagggccagagaccag

SEQ ID NO: 130251 - RNA, 62 nt, Homo sapiens
aggcacaacacacaccagcggagagcagggcccacaagaagaggcggaggcaaggcgcgacc

SEQ ID NO: 130252 - RNA, 91 nt, Homo sapiens
cgagaccacagagcccaagcagacaacaaaaacacaaaacggcgaccaaaaacagggaaggcaggcgaacgaaggagggcgagggagcaag

SEQ ID NO: 130253 - RNA, 76 nt, Homo sapiens
acgaagaccgggcgccagggccgccgccccgcccggacaagcagaccggaagaccgacggaagaccacaccccgag

SEQ ID NO: 130254 - RNA, 37 nt, Homo sapiens
agagggaagccaaagaagaaacgaaacgagggcgaga

SEQ ID NO: 130255 - RNA, 39 nt, Homo sapiens
acgcaaaacccaaggaagggacacaggcaaggggagacc

SEQ ID NO: 130256 - RNA, 58 nt, Homo sapiens
ccaaccgaaaacggaccagaacccagacagggcagaccgccagcagcacagcaagcca

SEQ ID NO: 130257 - RNA, 81 nt, Homo sapiens
gagcgagcgagggggggcgcgccggaaaccggagcgcgcagcagaccagcaggcagacggagagggaagcccaagggcaga

SEQ ID NO: 130258 - RNA, 81 nt, Homo sapiens
caacaaaaagacgagaagcagcgcagaaggacaagcaggcaccgggccacgcaccgccgcgcgcggcggagcggaggcaga

SEQ ID NO: 130259 - RNA, 82 nt, Homo sapiens
cagcagcgcggcagagcagggggacgagagaggagcgcgggccgagagcggagagcgggacgcaaggaggaggacggacagc

SEQ ID NO: 130260 - RNA, 76 nt, Homo sapiens
cgcccccccggaacggcaccacaaggggaggacgaacggacagccagaagggacggcaaagccgagggcacagcga

SEQ ID NO: 130261 - RNA, 79 nt, Homo sapiens
gcgcgagggagcgccaagggcacgggaagaccggaggggacgaagaacggacccccagaggaagaagcaaacgagccaa

SEQ ID NO: 130262 - RNA, 53 nt, Homo sapiens
gcccgcccccgggagcccgcacgggagagcgcgcgccgcgcgcccgcacaaac

SEQ ID NO: 130263 - RNA, 76 nt, Homo sapiens
gcgcccaggccccaacccggagacagggaaacgaaaaccaccgggcaccacgagcccacgagagaggacagcccca

SEQ ID NO: 130264 - RNA, 78 nt, Homo sapiens
ggacagccggaagagagccaagaggacagagacagggcaagcacggcgaggaccagcaaggagcagagacaagaaaag

SEQ ID NO: 130265 - RNA, 79 nt, Homo sapiens
cagagggccccccccaggacgagaagcgaaggaggcgcgcacaccaccgggacgcagacccacgagcaaaagccaggag

SEQ ID NO: 130266 - RNA, 76 nt, Homo sapiens
aagcagcagacagccaaaaggggaaagagaaaacgggcaccggacaagagcagagaaagagacgaggaggggaccc

SEQ ID NO: 130267 - RNA, 82 nt, Homo sapiens
ggaagccgaaaagacagcagacgaagccaaggccagcaagggcaagaaggaacagacaaaaacggccggaaggaaacacagg

SEQ ID NO: 130268 - RNA, 77 nt, Homo sapiens
gcggagagccgggagcgcggggcgggggcgcccgccgcgccgccacgggagaaaccgaaacgaacccagccagaaac

SEQ ID NO: 130269 - RNA, 88 nt, Homo sapiens
cggcagcaggcgccggacgcgagcgaggcggagaagggacacggcaggcgccaggacaaggaagaggggagccaaagaccaagcacca

SEQ ID NO: 130270 - RNA, 81 nt, Homo sapiens
ccaccaaggcccgccaagcagcccccaccccccccaaaccagccacagaaaagcaacccgcagagaagaagaagggaggga

SEQ ID NO: 130271 - RNA, 72 nt, Homo sapiens
gacagaacgaagaaccaccgagaaagaggaggagaccggaaacgagagaaacgaagacgaagaaacagccgc

SEQ ID NO: 130272 - RNA, 85 nt, Homo sapiens
ggacaagagacgacacgcaagcaggcaaccgaaacaggaaacgagaagaagagacagcgaggggaagagggagagagaagggaga

SEQ ID NO: 130273 - RNA, 103 nt, Homo sapiens
cgagcacaagagcagacaagcgggggaggcaggccgccccccagcgggcgcgggcagagaacacacagaagagaaaaaccgaacacaggacacacgacggcca

SEQ ID NO: 130274 - RNA, 74 nt, Homo sapiens
gggcgccaggcacgcgaggcccccaggacaccaggagaaacgggcaaccaaggagacggaaggcagcccaaaga

SEQ ID NO: 130275 - RNA, 81 nt, Homo sapiens
cggccaggcggacaacgagaaacggacaaccaacggccaagaacaagaacaaaggccgcgacggagagcagcagaaaacag

SEQ ID NO: 130276 - RNA, 78 nt, Homo sapiens
gcaggacggggaggacagaacccccaccaaacaagagcaagaacccccaagaagaaaacagaaacgacaggccggcga

SEQ ID NO: 130277 - RNA, 78 nt, Homo sapiens
agagaaaaagcagccggagacaggcgagaggaagacgacgaggaagagcccgccgaagacaggcaaagaagaacaacc

SEQ ID NO: 130278 - RNA, 54 nt, Homo sapiens
gacccagaacaaagcagccagaaaacgaagcaggaccacaccgcccacgcacag

SEQ ID NO: 130279 - RNA, 79 nt, Homo sapiens
gggaaaccaagagaagcaagggaaacacagcaccccaaaacaggaaagggaggacaaaacgagaggaaaaacagaagga

SEQ ID NO: 130280 - RNA, 75 nt, Homo sapiens
aagagacgagccgagcagaggaaccaacaaagaaggagcggaaaaccaggaacggccagggcacgagaggaagcc

SEQ ID NO: 130281 - RNA, 62 nt, Homo sapiens
caaaacgaaaaagccagaggaacaaccgcggagaagagggggaccggccaggcggcaaaccc

SEQ ID NO: 130282 - RNA, 83 nt, Homo sapiens
cgagagacgagagcacgacacggccgcacgggcccacgccagaggcacgaaccggagaccgaaacagggcccgggacaaacga

SEQ ID NO: 130283 - RNA, 70 nt, Homo sapiens
aggcgccaagcgcgagccagggaaaaaaagaaacaagagaggagaaaagcaggcagggacgacaacgagc

SEQ ID NO: 130284 - RNA, 68 nt, Homo sapiens
gagacagaaaggacccggccccccacgacagacaacgaagagaggaaagaagcggaaaggagggagca

SEQ ID NO: 130285 - RNA, 55 nt, Homo sapiens
cgcagggcgcccccgccacggagagaaccagaccaggaggcgggcgagcaggagc

SEQ ID NO: 130286 - RNA, 75 nt, Homo sapiens
gccaccgaagagccaagcccagcgcaaggcacaaccgcagacggaagacgcgaggagggagcccaagacgccgcc

SEQ ID NO: 130287 - RNA, 71 nt, Homo sapiens
gaaaagcccacagaaccaggcagaaggacgagacagaggcccggagacggcagaacccagaaagagcccaa

SEQ ID NO: 130288 - RNA, 74 nt, Homo sapiens
agaacaaccgacaagaggaagcgacaagcgaaacagaaagcaagacaggcagcaccaggcagggagacgggcaa

SEQ ID NO: 130289 - RNA, 80 nt, Homo sapiens
acaccaacaaccggacagcagcggaccaggaacagcaagccgggcagagaaacgggacaagacagccaaggcggccggaa

SEQ ID NO: 130290 - RNA, 62 nt, Homo sapiens
gccccaggccccccacaggagcacgagacagcgccggccccaacgagggagacaccaagcgg

SEQ ID NO: 130291 - RNA, 80 nt, Homo sapiens
ggaaaaaccgaggggacaaaacaaccaacgaagacaccgagcgaaagagaaagaggcagaggaacgaggacgccgaagga

SEQ ID NO: 130292 - RNA, 67 nt, Homo sapiens
cggccacgcgcaccagagcagggcccccgagaaacaccggggccagggaaaccgccggagaaggacc

SEQ ID NO: 130293 - RNA, 84 nt, Homo sapiens
acccccccccccgagcccgagggcgacgcgcaaaaaaaggaaacgccagcagcccggacgccaccaagccgagccacgggcagc

SEQ ID NO: 130294 - RNA, 87 nt, Homo sapiens
acagggagccaccccgggcgcagaggccacacccacagagaacccagacaacaggacgccgccaagacgacaagaagccaaagacgg

SEQ ID NO: 130295 - RNA, 75 nt, Homo sapiens
ccacccgacagcaagcaccggagggagaagacagggaggcacccaagacagaggaaggaaaggaggacaaaacac

SEQ ID NO: 130296 - RNA, 77 nt, Homo sapiens
gaagacgaacgcaccccagagccgacccccaccgcaagcaacaaaggcacagaagcacggcaaaaggaaagcagaac

SEQ ID NO: 130297 - RNA, 78 nt, Homo sapiens
gaagaccagcgacccagagaaaagccccgcaaccgacgggaagaaccgaagaaggccagaaaggagaggagaggcaca

SEQ ID NO: 130298 - RNA, 75 nt, Homo sapiens
aggagcgggaagaggaagaggggggaagaggcgcccaggaaagcacggacaccccccaaggaaaagacgaaaaga

SEQ ID NO: 130299 - RNA, 72 nt, Homo sapiens
gaccaccacccgcgaccagaggagacggagaaccgagccaaaaagaccagaaacagaagccaacaaaaaacg

SEQ ID NO: 130300 - RNA, 82 nt, Homo sapiens
gaccgaccgaaccgaaccgaggcaaaagaaaggaccgaaggagaagaaggagaaggggaggagaaggcaagccggaaagagc

SEQ ID NO: 130301 - RNA, 56 nt, Homo sapiens
ccgcgccgaaagaagaaagcccgagaaccagcagcccaaaggagagcggaaaaaac

SEQ ID NO: 130302 - RNA, 54 nt, Homo sapiens
gagcaccaagagaaaagggaagggaccaaagagaggaagcacgccaacgaaaaa

SEQ ID NO: 130303 - RNA, 77 nt, Homo sapiens
gccgccacaaccgccagacaaccggagccacgccccacgaccgccaggggcggggcagagggcggaccccagaccag

SEQ ID NO: 130304 - RNA, 58 nt, Homo sapiens
cggcgaagaggcaccggaggagagggagcacagcgcggaagccccgaggcagccccgc

SEQ ID NO: 130305 - RNA, 78 nt, Homo sapiens
gcgcaccggaagcaccagcgaggaagaaggacagaaaccgaagggagaagagccacaaccaggagaaccccgacaaac

SEQ ID NO: 130306 - RNA, 75 nt, Homo sapiens
gccagccacaggacagccagcacacgaccgggaaacaggggagaggcccagcaagaggaaacagcgccaaaagag

SEQ ID NO: 130307 - RNA, 80 nt, Homo sapiens
aggcgacggagcaaccgcagcgaagcgagagagggaccggagggccgggcaacaccacccaggacaccagcccgggcccc

SEQ ID NO: 130308 - RNA, 36 nt, Homo sapiens
accagaaacgcccaaagggcggagacaaggcgcgac

SEQ ID NO: 130309 - RNA, 81 nt, Homo sapiens
cagcgacccaggcaagcccagaccggccccaacaggaggaagccagcccgagcaggcccaggggaggaggggcaaccacag

SEQ ID NO: 130310 - RNA, 62 nt, Homo sapiens
acgcgacggaaaggcacgaaagccagcgcgccccagaccaccggcagggaacagccgagcag

SEQ ID NO: 130311 - RNA, 60 nt, Homo sapiens
cagaaggggcgagggccaagggaacggggggaagaggacggggcagacccgcagagacca

SEQ ID NO: 130312 - RNA, 70 nt, Homo sapiens
gagacagaacaggaaaaaggcgcgaaaagagaagcagaagacacaggccgagagccacaacagaagcaac

SEQ ID NO: 130313 - RNA, 73 nt, Homo sapiens
gaccgcgaccagacaggcggcgccaccgaacagacccggaaggacggcgaggggcaagaaaaggcccccagaa

SEQ ID NO: 130314 - RNA, 67 nt, Homo sapiens
caggcagccccgcacgagcggcaaccgaaagccagcagcggaccgcgcgagcacgcccaagaaacca

SEQ ID NO: 130315 - RNA, 95 nt, Homo sapiens
agccagcccgccagaccccaagacacgcggagacacaggcagaaggaaggcagagcccacaaacccaagcagcaaagaaagagccaagcaaaaag

SEQ ID NO: 130316 - RNA, 65 nt, Homo sapiens
gccagaagacaccgcaggggacagaacggcgcaacacgagcccgcacgagccccggggcccgcgc

SEQ ID NO: 130317 - RNA, 72 nt, Homo sapiens
cccgaagagcaacggaaccagcgccgagccacaacagcagccagaccccgagccggacaagaccgagacacc

SEQ ID NO: 130318 - RNA, 54 nt, Homo sapiens
gccaggaacagacaaagcaggccggacccagcagggcccccggaacaaacccgg

SEQ ID NO: 130319 - RNA, 81 nt, Homo sapiens
cggggaggaacaagaaaaccggcccgaggggacgggggaacccggggccagagagagacggcaggaccacaggaagcagcg

SEQ ID NO: 130320 - RNA, 55 nt, Homo sapiens
ccgcggcgccgacggaagccggacagaagcgaaggggacagggggagaaccgcca

SEQ ID NO: 130321 - RNA, 57 nt, Homo sapiens
ggagggaaagacacagccaacagcaggcagccagaaaggaggagcaaggaagcccag

SEQ ID NO: 130322 - RNA, 63 nt, Homo sapiens
cacgaaaccgaggaagaaaggacagacgaaggagggaaacacaaagaagacaccagaagggcc

SEQ ID NO: 130323 - RNA, 74 nt, Homo sapiens
gcaaaaggccccaggagcaaggcacaacgagccagggcagggaggccaccagggcggaggcacccgccaaagga

SEQ ID NO: 130324 - RNA, 77 nt, Homo sapiens
ccacggacaagaccaaaagcggcccgaaggacccgcaacaggcacgcagcagcacacgagaagccaaggcacagcag

SEQ ID NO: 130325 - RNA, 87 nt, Homo sapiens
cgaaggaccccaacggggaggccaacggaagaagggaagacagagggggccaccagcgcgccagcgaggcagccgcgcccccgccac

SEQ ID NO: 130326 - RNA, 63 nt, Homo sapiens
gaggaacgggacccaagcaacccaagggaaccgggcccaggaggggcacagggccagagcaga

SEQ ID NO: 130327 - RNA, 86 nt, Homo sapiens
cagaggcgcggagcgggcagccgccgccaccccgcggccgcacccccgccccagcggaaagagaaagcagagggagcacacaaagg

SEQ ID NO: 130328 - RNA, 81 nt, Homo sapiens
agagcaaggcagaacgccaagccccgcgagcgcacgccaacgacgaggaccgacgcagggcggagaacggaaaagcaccag

SEQ ID NO: 130329 - RNA, 78 nt, Homo sapiens
gaaggcccgaacaggcacgaaaaaacccagcgaagaccacagaaaccaaaacagccggcccagcccaccccaggcccc

SEQ ID NO: 130330 - RNA, 79 nt, Homo sapiens
gaccgaggcggggggaacgggccacggcggggcgggggggggcagcggcggagccgcccggacgaaaaacacgcgcgcc

SEQ ID NO: 130331 - RNA, 75 nt, Homo sapiens
cggcccggccccccggacagacgccgacgcccagaaccagcaacacacaagaaacccagccaccaagggaaaaga

SEQ ID NO: 130332 - RNA, 86 nt, Homo sapiens
gcaggacccaaaggagcgccaagccaaaacggaccacgaggagggagaaggccacaggggaccggaccccgggcacccggggagca

SEQ ID NO: 130333 - RNA, 67 nt, Homo sapiens
gagccgcgcacgcacagacaagagcacgaacccaggagccgggcagccgcgacacagcagcaggggc

SEQ ID NO: 130334 - RNA, 72 nt, Homo sapiens
accccgcacgaaaggccggaaagaggggaggggcacgcaacaacgaccaagaacgcccagcccgcgggcacc

SEQ ID NO: 130335 - RNA, 81 nt, Homo sapiens
cgggcccgaggcggacgcaggaccgcgccgggcacggaggagggccggacaggcagccagggacgccaccaggcagccgca

SEQ ID NO: 130336 - RNA, 78 nt, Homo sapiens
agcacacccggagaagcaggagcccaccggcagggcggagaacggaaaagcaccaggaagcagagaggaccgcagaag

SEQ ID NO: 130337 - RNA, 75 nt, Homo sapiens
ggcaccgggcaggggaccacagcagggagaccaagcccgacaaaagcgagagacacgaagacaaagccacagaaa

SEQ ID NO: 130338 - RNA, 80 nt, Homo sapiens
ccaagccgccccccaccgcccgggcccgaggaggcagccaagccgagccgccacccggcacaacaggcacaaagagagaa

SEQ ID NO: 130339 - RNA, 56 nt, Homo sapiens
gcggcggcccccaggccccgccagaggcaaacggcggagaagacaagaaccaaagg

SEQ ID NO: 130340 - RNA, 73 nt, Homo sapiens
acaagggggggaaacccaccgggaaaaggcacgaaggggcggggaacagaccagggaaggggaggagaagagc

SEQ ID NO: 130341 - RNA, 75 nt, Homo sapiens
ccaacaccccacgaaggcggcaccaagagaaaccacaaccccagaacgaacaaagacaacagccggaacgcccca

SEQ ID NO: 130342 - RNA, 78 nt, Homo sapiens
gacagccgagccccccaaccacaggacagcgacggaagcccggacgaagaaaaaccagaaacacaagaaaggaaaaaa

SEQ ID NO: 130343 - RNA, 79 nt, Homo sapiens
gaaaccccaagccaaagggagaccagaaagcgggcaacaccaaccgagacgcgagagcacaaaacacaacaaaccgcgg

SEQ ID NO: 130344 - RNA, 82 nt, Homo sapiens
caccaacaccaaaaaggcagcagagcgggagcgacagggagaagaagcgaaggaggggggacaaacaacgcgacgagaccgc

SEQ ID NO: 130345 - RNA, 76 nt, Homo sapiens
gcaaaaaggggcagaaaaccagaaggccccgagccccggccccaaagacccaaaacagagacaccccccagccccc

SEQ ID NO: 130346 - RNA, 80 nt, Homo sapiens
agaacccacaagagccccagaaaagagcagagcgacagacagaacgccggaggcgagggaggacgggcaggccccgcaga

SEQ ID NO: 130347 - RNA, 79 nt, Homo sapiens
accaacccgccaccgggagcagacggcaaggcccgccaagcgcccccgggcacgagagcggacgagccaaggccgggag

SEQ ID NO: 130348 - RNA, 57 nt, Homo sapiens
gaggagccagagcaaggggaacgccacggacgggcaacgcaaaacagcgccggccgg

SEQ ID NO: 130349 - RNA, 81 nt, Homo sapiens
accgaccgcaacagaacggacccggcccgaaaaagcccaagacagcagaagcagacaccccaggaacagcaaagaaaagca

SEQ ID NO: 130350 - RNA, 77 nt, Homo sapiens
gaggacccacaggagaggcacaggaccagaccaagacacacaaccaaacaggagaaaaaggggcaaagaaaaaggag

SEQ ID NO: 130351 - RNA, 71 nt, Homo sapiens
acacgcccccacgaacaccgagaagcgagagaaagagccccgcaccacaacgagacgacgggaccgaagga

SEQ ID NO: 130352 - RNA, 67 nt, Homo sapiens
acaagaggcagcaggcccaacgacaccagaaggaagcagaacaacaaacaggcagagagagagacaa

SEQ ID NO: 130353 - RNA, 85 nt, Homo sapiens
gccggcggcgggacgaagagggacgggcccgcggcgagcgagcccgagggacaaaggccagaagcaggagagcacagacacaaag

SEQ ID NO: 130354 - RNA, 58 nt, Homo sapiens
caggagcccgcgccccccaccaggggacggaaagagagccgcagcgcagaacaaggga

SEQ ID NO: 130355 - RNA, 74 nt, Homo sapiens
cccggccagccggagacgaaagccgacccccccaagggaggaaggcgagccacagaaggcagagggggcgaggg

SEQ ID NO: 130356 - RNA, 69 nt, Homo sapiens
ccccgacccccacaccgggcccccagcgagaccgagccgcacccgcaccccccaaccaggcacaaggcc

SEQ ID NO: 130357 - RNA, 86 nt, Homo sapiens
gggggggaggacacgacaccaggcgaaccggccacgcacccccgaagccggaccagaggagcgagagcagcaagaaccacacccag

SEQ ID NO: 130358 - RNA, 73 nt, Homo sapiens
gaagaaacaaaaaaaagaagaagcggcaagaacagacgacaccaggaaccaacgcagagccccagaacaaaag

SEQ ID NO: 130359 - RNA, 84 nt, Homo sapiens
cccaaaggaaaaagggcggaaaagcggggaaagggggagcaccggggaccacggaagcgaccgaggcccgccagaccaagccca

SEQ ID NO: 130360 - RNA, 77 nt, Homo sapiens
gcaagcagaaaaagccccaaaagcacccccccaccggccaggaacagggacaaaacacggggagggccaagacccca

SEQ ID NO: 130361 - RNA, 72 nt, Homo sapiens
ccagacgccggcaacaaagaacacacggaaggagggcgcccacgggccgcgggcccgccaccagccaaggac

SEQ ID NO: 130362 - RNA, 81 nt, Homo sapiens
agcacagggcaagaagccggaggcgggcccagaggcggagcgcgagagggcggccgaacccaggcgaagcagggcagaggg

SEQ ID NO: 130363 - RNA, 71 nt, Homo sapiens
gcagccaagcaggaccacccaccagccaccaggcaccaagcccacagaagggggaaggcggcaggacaaaa

SEQ ID NO: 130364 - RNA, 83 nt, Homo sapiens
cccagccaagccgccccgcagggccccaggcgaggaggaggccgagaccagccaggggagacccaggggggaggcgcacaacc

SEQ ID NO: 130365 - RNA, 75 nt, Homo sapiens
gggggccggagcgagaccgggcggccacagccgcagggagaacccgaggcggagaagaaggaagagacgggcccc

SEQ ID NO: 130366 - RNA, 69 nt, Homo sapiens
gacaagagaaggaggaaaggcaaggaggaaaacaagacggaaggagcgccaaaaggaaaagcccagagg

SEQ ID NO: 130367 - RNA, 67 nt, Homo sapiens
gagccgccagcgcggccagagggaaggaacaccccacgacaagcgcagagagaaagcccgagggaca

SEQ ID NO: 130368 - RNA, 57 nt, Homo sapiens
gacgacagcagccagaaaacaccggaaacgccaggccacaagggagcaaacgaaaag

SEQ ID NO: 130369 - RNA, 83 nt, Homo sapiens
agggcccgccgcgcagcggggccgcgagcgacgccgagaaccagagagcacagagaaagcgggaaacggccaaacagaacacc

SEQ ID NO: 130370 - RNA, 76 nt, Homo sapiens
gggaggggcgccgcggcggcgggcgcccccaggaacaagcgggaaacggagccaccaacaagcgggagaaagacag

SEQ ID NO: 130371 - RNA, 65 nt, Homo sapiens
acggacagcccacgggaacaagaggggacagaaaggcacgcggccaaagggacgcaagaggcgaa

SEQ ID NO: 130372 - RNA, 73 nt, Homo sapiens
acagcagcgcaggcaaaaaacagggagaggagacgaagaagcgaagacaggcgagggccagcggaggcccaca

SEQ ID NO: 130373 - RNA, 69 nt, Homo sapiens
aagagagccgcgacggcccagaccaggcgaggcgcagaaggggacagaacaagagacaaccagccaccc

SEQ ID NO: 130374 - RNA, 79 nt, Homo sapiens
ggcgccgcgcgccgccgccgcccgggcgggagccaggagcgacgcaccgccaggcaggcacaaagacaaggaaagacgg

SEQ ID NO: 130375 - RNA, 65 nt, Homo sapiens
gggaggcaccgcggggccgccccacaggaaccccacccaggccacccggagaaaggccacggccc

SEQ ID NO: 130376 - RNA, 70 nt, Homo sapiens
caacccccaaaggaaccgagaagcacaaagggggcagagaagacacagccgaaagaggaccgcacagcgg

SEQ ID NO: 130377 - RNA, 45 nt, Homo sapiens
gaaaaggaagagagcgggagagaagaccaagaggcggagaagagg

SEQ ID NO: 130378 - RNA, 75 nt, Homo sapiens
gcacaccagggccgggacacacgagaccccaaacgcagagcacagcaagcacacagcccagggaaacaaggaaca

SEQ ID NO: 130379 - RNA, 81 nt, Homo sapiens
agcaacagcccgccaagacccacaaaagggacaagcaaggggccaaggagccaaggaggaaacccacaacagaggacagaa

SEQ ID NO: 130380 - RNA, 79 nt, Homo sapiens
gggaccggccggggcaaggagaaaaccggacggaccccaggggcagagacgccacagggaccagccacgggccagggcg

SEQ ID NO: 130381 - RNA, 95 nt, Homo sapiens
gcccgccccgccgggaggaccgcgaggaaggaagacccacaagagaccacgcagagacagcacccaaccggcagcagcagggagccacaccaagc

SEQ ID NO: 130382 - RNA, 57 nt, Homo sapiens
cggaagggcagcgccaacaggaaacagacgcggagcaccccaggcggaaacaagaac

SEQ ID NO: 130383 - RNA, 76 nt, Homo sapiens
gaagggcaaggaaagcagcaagagaagagaagccgccgagaaaaaaaggggaagaaggccaaccgggggccaaggg

SEQ ID NO: 130384 - RNA, 64 nt, Homo sapiens
agagccaagcaagcacggccaaaaccagggaaaccagaaggcacgacggccgaacagacacaga

SEQ ID NO: 130385 - RNA, 71 nt, Homo sapiens
ccccccccccaagggggagccccccagacccgaaaggagacaagaggacagccgcacggaacacaaaaaca

SEQ ID NO: 130386 - RNA, 53 nt, Homo sapiens
acggcagcgacaccaggcgaagcagcaaaacacacagccccccggagaaaaga

SEQ ID NO: 130387 - RNA, 76 nt, Homo sapiens
agaaagcagcccagaccaaaaagagccaagcgagaagagagaaccacaaagggcagagcaaagacccagaacacca

SEQ ID NO: 130388 - RNA, 55 nt, Homo sapiens
ccgcagcgggagggcgccaccacaggcgccacgccggggcagccggacgagcgag

SEQ ID NO: 130389 - RNA, 75 nt, Homo sapiens
aagaggcagaccaggaaagggacaaaagagccgcaagaccggggccaaccacccaagacaagcagcgggaggcaa

SEQ ID NO: 130390 - RNA, 80 nt, Homo sapiens
aggcaaggcacgcaggaggagaaccgcgaccgcgcaaagccagcggaccacgcaccgagcacccgaggggcggcgggaaa

SEQ ID NO: 130391 - RNA, 76 nt, Homo sapiens
ggaagaccccagacgaaagcccagccacccagggcagaaagaacgagaaagcaaagaggcaggggaagcacaaaag

SEQ ID NO: 130392 - RNA, 68 nt, Homo sapiens
ggggcccgccgggccaaccgaaaggcccagggcgacagccacccgagggaccaaggaccagagagcag

SEQ ID NO: 130393 - RNA, 74 nt, Homo sapiens
ggagccacgcggcgggccagaccgggcaagaccacccgcaacggacgcggccgcacccgcacccggagccccag

SEQ ID NO: 130394 - RNA, 77 nt, Homo sapiens
agaagaagcagccacaagagccaaaccagaggaaagcccagaggccccagccccacgaggccacccgaaggagccca

SEQ ID NO: 130395 - RNA, 72 nt, Homo sapiens
ggagaacaccccacagggaagaggcgggaaaaagccaaagcaggccgccacaacgaaaagccaaaaaggagg

SEQ ID NO: 130396 - RNA, 74 nt, Homo sapiens
cgcaacccggcagcagaagacaagaagaggagcagcccgcacagcggacgcaaagaaaaagacggcaaaagaaa

SEQ ID NO: 130397 - RNA, 88 nt, Homo sapiens
ccgcgggcgcccgaggggccgagcgaggcagcaccgggaccggaggcccagagcgacggacggagaaccaggcccgcagcagcagcca

SEQ ID NO: 130398 - RNA, 80 nt, Homo sapiens
cagccccgagagcggcaacagagggccacccgcaagggcaggagaaagcaacacaccgcaacgaaggcccagcgccccag

SEQ ID NO: 130399 - RNA, 53 nt, Homo sapiens
ccgccccccagcaccgggcggacggacagggacaagcgcacagcggagaaagc

SEQ ID NO: 130400 - RNA, 72 nt, Homo sapiens
caggaccagagaaccagaagagaagacaggccccagccaacgaagacggaccacaaaacccaacgcggaccc

SEQ ID NO: 130401 - RNA, 79 nt, Homo sapiens
ccggcagcgccgagaccgagcccagccacagccaaggcagagaccgggcacaaccagccagcaacccgcccgggccaag

SEQ ID NO: 130402 - RNA, 74 nt, Homo sapiens
cggggaggaggacgcggggaagggagaacaggcgagacaaagcaaggggaaaaggccacccggacaacaggaca

SEQ ID NO: 130403 - RNA, 80 nt, Homo sapiens
ggagcggcgcagaccgagacccggacagggcaggaaacaggggacccaagggagagagggaacggcgaaagggcagcccg

SEQ ID NO: 130404 - RNA, 85 nt, Homo sapiens
ccaggaggggcgagagggagccgcagcgagcagcaaaagcggcaggcgacagaggcggcccaggacggacccggcacgaccggcg

SEQ ID NO: 130405 - RNA, 80 nt, Homo sapiens
gggcccggggcccgcgcaggggggcaaggaccaacagcccccacaccccgggcgagaaagagaccaagacgaaaaagcga

SEQ ID NO: 130406 - RNA, 76 nt, Homo sapiens
ggcgcaccaagggcgaaggagccggcccaagggggcgccacagggaaggaccaagacgcagcgaaaggcggggggg

SEQ ID NO: 130407 - RNA, 108 nt, Homo sapiens
acagagggcgagagaagacgagacgcaccccaacacgacacggccagccccgcggcggcacagagcagccaagaccaagacgagagccgagggcggggcggggccgga

SEQ ID NO: 130408 - RNA, 56 nt, Homo sapiens
cgaccagaagaccccgcaggaaacgacgccagaagcagcgaaaaagaacacaaaac

SEQ ID NO: 130409 - RNA, 67 nt, Homo sapiens
gaggcgggacagaccaaagacaaccgcaaagaagccaaaaacaacacagacgacgacaaaaaagagc

SEQ ID NO: 130410 - RNA, 74 nt, Homo sapiens
agaaacgagcagaagaggaacaagggggggaaacccaccgggaaaaggcacgaaggcaccgaccacgacacccc

SEQ ID NO: 130411 - RNA, 75 nt, Homo sapiens
gagcggcacagccagaagaccgaagcgcgacggaagacggcccgccacgggccccgcagccgcgcccgagcgccc

SEQ ID NO: 130412 - RNA, 78 nt, Homo sapiens
gggagaccgcgcagcgccaggcccccaggcccaaagcggcggagagagcgcggaggcggaggccacccagacccggcc

SEQ ID NO: 130413 - RNA, 68 nt, Homo sapiens
agcgggcccggccccccccaggagcagaagacagagggaggagggccacggacaaacacgggcccggc

SEQ ID NO: 130414 - RNA, 64 nt, Homo sapiens
cccgcaaggccacagcacgggaaacaccggacacagcgacgcacgagccagcgccgaccacagc

SEQ ID NO: 130415 - RNA, 73 nt, Homo sapiens
aggggaggagcgaccaggaagaccacgacacgagaccccagcaggcaccaccaccagccaagacacgaggccc

SEQ ID NO: 130416 - RNA, 123 nt, Homo sapiens
gaggcaccgggacggaccgagaccggaccgagagcggaccgagagcgcgaaacgcacgagaagggcgcccccaagcccacagcgaagaagggccacccccgacgcccgggcccgagccagcag

SEQ ID NO: 130417 - RNA, 81 nt, Homo sapiens
gaacggacgccgcacccacccgaacagcaaccgccgaagaaaagggaagggcaaaggagaagaagaagcgagaagggcgga

SEQ ID NO: 130418 - RNA, 81 nt, Homo sapiens
acccccaggagcacgaggaaaaccagacgagagacagaagacgaaagggcaagaaagagagcacggacaagaggagcagag

SEQ ID NO: 130419 - RNA, 48 nt, Homo sapiens
aaagcaaaggaagcggagaaccacaaacggggcagggcccagggaccg

SEQ ID NO: 130420 - RNA, 78 nt, Homo sapiens
gaaaccccgcgcccgccgccaccaccagcacagccagcccagcgggaacacacagaaaccaaagagccaggcgacccc

SEQ ID NO: 130421 - RNA, 72 nt, Homo sapiens
aggcccagcgagccagaagcccccccagcagggcccgcacccagaccggagcgaggcccagacgaggaaggg

SEQ ID NO: 130422 - RNA, 86 nt, Homo sapiens
ccagaccagcaagaggaggggcccggagagggggaagggcccaaagccagaaggaacggaaaacagccccaaagcagcagaccgaa

SEQ ID NO: 130423 - RNA, 72 nt, Homo sapiens
ccaggaggcgcacggggggaacaaggacgacagagcagcgaaacacgacgaacaacggaagaagccccaagg

SEQ ID NO: 130424 - RNA, 82 nt, Homo sapiens
gaccacgccgcaccccacaagggggcccacgagaagagcaggcgacgggggagagggagacagcggcgcaaagaagggacgg

SEQ ID NO: 130425 - RNA, 59 nt, Homo sapiens
agcagcccagagggaccacagaaaggaccccacaaaaagaccgacaccgcaagaccagg

SEQ ID NO: 130426 - RNA, 90 nt, Homo sapiens
acaagaggaaagcggaccaccaacgccgaggcacaagcgcgagaacagcccagacccgcggagggccgccgaagacacaccagggggagc

SEQ ID NO: 130427 - RNA, 78 nt, Homo sapiens
agaggacagcagggaggcgggacgcggcaacaagggaaaccagccaaccaggggcaccagaccaaggagaacgagggc

SEQ ID NO: 130428 - RNA, 70 nt, Homo sapiens
cgcaaaacagagaaaaggaggaacgcgggaagccagcaagccaagacggggaaggaaggagaaagacaaa

SEQ ID NO: 130429 - RNA, 79 nt, Homo sapiens
aggaacggccaagacaagcaaaaagcccacagaagccaacggacaagccacaagcagcgcgcccggcggaggaccaggg

SEQ ID NO: 130430 - RNA, 56 nt, Homo sapiens
gcccgcacagcggaggccagcgggccgggagaaggaaagagcaggaggccaagcca

SEQ ID NO: 130431 - RNA, 73 nt, Homo sapiens
ggcagggagcgcgggggcccgcgcagcagcgaccacgggcagaaagaaagcaggaccagggggagggaccaag

SEQ ID NO: 130432 - RNA, 75 nt, Homo sapiens
cgcgcagcaggcccaggcacagccgaagagacaaaaccaaaggaggaaggccagcggaagacacacccgcaaaac

SEQ ID NO: 130433 - RNA, 80 nt, Homo sapiens
ggaaaccacgggcaaaacagaagcagacgagaacggcagccaaggaaaccgccagaaaccgagacaaaaacgagagaccg

SEQ ID NO: 130434 - RNA, 76 nt, Homo sapiens
gccagcaaaccccaaaccgacaggcaccaggaggaaaaccaagaagcggaggaagccacgagaaccaggaaggggg

SEQ ID NO: 130435 - RNA, 73 nt, Homo sapiens
gcgcagccgcagccggggaagggagcgcccaccagaggagcgaaagagagagaccgcccccacgacgagcaac

SEQ ID NO: 130436 - RNA, 75 nt, Homo sapiens
acgccaggaggccagggcagcaccgggcagcgagacgaaaaaccaggcaacaggaagaagaacccacaggggcca

SEQ ID NO: 130437 - RNA, 83 nt, Homo sapiens
cggcgggcagcagccggccgacccagaggcgcggggaggcccagcccgccgcagggccaccccgcggcccaccgccgccgccc

SEQ ID NO: 130438 - RNA, 76 nt, Homo sapiens
ggcagccaaagccgacgcccaggaaccacaaggaacagaaccaccaaagggaacccaggaacgcaaggcggggaaa

SEQ ID NO: 130439 - RNA, 70 nt, Homo sapiens
caaaaaaaccagagcaaaacacacgaacgcgagaaagcaaacccaggaccaggcacagacaccacgaaca

SEQ ID NO: 130440 - RNA, 82 nt, Homo sapiens
ccagagcaaaccacagggacccagacaccgggcagagcaggaaggaaccgcggaaacacgaagagaccgcgcgaaacgccca

SEQ ID NO: 130441 - RNA, 79 nt, Homo sapiens
gaagaagaggcccaacccccaccccgcccaaggaggcccagcggccagaagcggacccagaagaggggagcagcaagga

SEQ ID NO: 130442 - RNA, 86 nt, Homo sapiens
gcgcaggaggggccaaagacccaccaggcacaaggcccggaagaagcgcaagaaccggagaagagaaagcaagagcgcgcggcaaa

SEQ ID NO: 130443 - RNA, 83 nt, Homo sapiens
gcccaccccagcgcgacgcggcgagcccaaaaagcccgcaggggcgagggaggcacccaagagccgagcaaaacaacaccaaa

SEQ ID NO: 130444 - RNA, 82 nt, Homo sapiens
cccgaaggagccagcgcccgcagaagacgccggggcagaaacaaccaggccaggaacgaaggccagcagaagaggaccagac

SEQ ID NO: 130445 - RNA, 57 nt, Homo sapiens
agcaccgcgcaggaggcagcccgcgggggccgggagaggaaggccccaagcagccag

SEQ ID NO: 130446 - RNA, 115 nt, Homo sapiens
agaacaggcaaacacaaaaacaccgacacagaggccccagcaaaggaaagggcccaaagaaaaacccggaccaccaagcaggccaagcagcccaagacagcccccgaagagaccc

SEQ ID NO: 130447 - RNA, 70 nt, Homo sapiens
gaaggagcaggagcgagaccaacgggagccccaaggcccgaagcgccagagccggggcccccaacagcac

SEQ ID NO: 130448 - RNA, 70 nt, Homo sapiens
cagaggggagcacagagcgagaccaggaaagaagggggcagaagagggggacgcaacccaccacgaagcg

SEQ ID NO: 130449 - RNA, 80 nt, Homo sapiens
ggagggcgaccacaagcaaacaggcacgacaggccgccgcgcgggggaagcgcccaggcgcagagcgcacgcagcagcac

SEQ ID NO: 130450 - RNA, 76 nt, Homo sapiens
gaagacggagagagagggcagggcggacgaccggaaaggccgcggggggcagacaaccacgcgcggcaagccaccc

SEQ ID NO: 130451 - RNA, 87 nt, Homo sapiens
gaggacccccggggcggagcggggcggggcccgagagcagcacgcaggggcaagacccccgcacgccacaggagacaaggagaccga

SEQ ID NO: 130452 - RNA, 69 nt, Homo sapiens
cggagaaccagccaagccccaggccagaagaggacgggaagaagcaagaagaacgcgggaaaaagcaca

SEQ ID NO: 130453 - RNA, 58 nt, Homo sapiens
ccgcccccggagcgcggcacgaggcgggccgggagcccacccagaggcagggggcgac

SEQ ID NO: 130454 - RNA, 77 nt, Homo sapiens
gcagaagcaaacggcagaacagcacccggcccacaaacgggaccccgaaggaagggaggaacaagccaccgcacgag

SEQ ID NO: 130455 - RNA, 83 nt, Homo sapiens
cccgcccccacacaccggcccagcccgcaccgagccggagacacaggccccacccccaaggggacaccagggagcggcccagg

SEQ ID NO: 130456 - RNA, 68 nt, Homo sapiens
agaaccgacaaggaggagaacccaaggggaaaaagacaccaagccaggcgcaagaaagcaccgcaagg

SEQ ID NO: 130457 - RNA, 72 nt, Homo sapiens
cccaagggcggaaacagaaggacagaaaggacaccagccaccacgggacaccagcacagaaagcagcccggg

SEQ ID NO: 130458 - RNA, 73 nt, Homo sapiens
ccaaccaggaacaaacaccgccgcaaaaggagaaagaaggcggaaggagggccaaaagaaaagcaagggaaac

SEQ ID NO: 130459 - RNA, 81 nt, Homo sapiens
cggggggcccggaaagagagagcaggcgaagaggaacgaaccgagcacagaccagcagacaggacagaaaaccagaagcac

SEQ ID NO: 130460 - RNA, 73 nt, Homo sapiens
agcgagcggccagcgggcaggccgcagacagcaccggaggggaagacggagacagacccagcacggacccccc

SEQ ID NO: 130461 - RNA, 74 nt, Homo sapiens
aaaaccgccgcgcgcgaccaaaggaaagaccacagcaagaccacgcccccagccgggggaccaggccgaacgac

SEQ ID NO: 130462 - RNA, 70 nt, Homo sapiens
ccccgaggccaagccaccccggcggaaccgcccccaggcaccaacggacaaccaggcacgggacaaccag

SEQ ID NO: 130463 - RNA, 77 nt, Homo sapiens
acggcggccgcagggcgccggagccccccagacagaacagcagccacggggacagagggagagcccaagaacggaaa

SEQ ID NO: 130464 - RNA, 85 nt, Homo sapiens
cgaaccaaagcgaacaaggcaacgcaaccaggagaaaagacagcaaggaccgagggggcacccgaggaggaagagggcagggccc

SEQ ID NO: 130465 - RNA, 83 nt, Homo sapiens
gccccccggcccggcggggccgacgagccggaggggcgccgcgggagcggcggagaaaccaccacaaacacgaggccagcaac

SEQ ID NO: 130466 - RNA, 89 nt, Homo sapiens
gcagaaacacaggaccccccccaacgaggggaaaaagaaaagggcgaagacccgaagcagcgcaggaacagaagagaagaccagaagac

SEQ ID NO: 130467 - RNA, 49 nt, Homo sapiens
cacgcaaacccaaagaccccgccggagacgagaggaccgcacaggcgca

SEQ ID NO: 130468 - RNA, 74 nt, Homo sapiens
gccacagccgacaggaagggagaacaacggagcgacacagagaaaaggggagccagcgccccagaacagcacgg

SEQ ID NO: 130469 - RNA, 82 nt, Homo sapiens
ccgcgccagcaccacgcccgcgccgcgccgccgccaccagcccaagagaaagacaaaacagaggagaccagaccagaagccc

SEQ ID NO: 130470 - RNA, 76 nt, Homo sapiens
accgccaaagcccgggcgcggaagaagccaagaggccgggagcagagacagaaggcggcaggcagcgccaaagccc

SEQ ID NO: 130471 - RNA, 56 nt, Homo sapiens
agcaccccagcgcgcagggccgccaggggcgccgggaagaaagcacgggaaaaggc

SEQ ID NO: 130472 - RNA, 84 nt, Homo sapiens
gagaaaacagcaggcacccaagcgggcggcagccccagaagaaacgaccccccagccaggacccgcaccaccaaaggcgccaca

SEQ ID NO: 130473 - RNA, 78 nt, Homo sapiens
ccgcggcggacaagcgaggaagcaagaacgccaaaaaccccgccacaacggggagcgaggagacccaagaaggcgagg

SEQ ID NO: 130474 - RNA, 66 nt, Homo sapiens
ccgcgagcagccaggcggcgggccagacaacggcaagcggagaagagcaaggccgaaccgagagga

SEQ ID NO: 130475 - RNA, 70 nt, Homo sapiens
gggggacgggacccagaggaaggcacaggccggaaaaacagggagagccacagagggggaaagccaagga

SEQ ID NO: 130476 - RNA, 69 nt, Homo sapiens
ccgagcaacaacagccacagcaaagggagggagaacaaggggccagcccagacaaagacaaaggcccgg

SEQ ID NO: 130477 - RNA, 81 nt, Homo sapiens
acacagagccaaggggcccagacagccccagcaggagccaagccagcagaagagacagaaagagaccagaaacgacagacg

SEQ ID NO: 130478 - RNA, 52 nt, Homo sapiens
gaggggcgcaagcagaaagcgagaaagccaagaacccaaagcaaggcgagac

SEQ ID NO: 130479 - RNA, 86 nt, Homo sapiens
gaaacaaagaccacaccagcagcaagcagagcccggacaggcccgccaccggggcacgggcgccccccggaagcggaccaccagcc

SEQ ID NO: 130480 - RNA, 77 nt, Homo sapiens
ggcgggaccagcaccagcaccggcccaggggccgccggcaagaagccaacggagaaccaaggccaagaccagaacca

SEQ ID NO: 130481 - RNA, 78 nt, Homo sapiens
caaggggacagcaaccgacaagcaaggacagaacagagaaggggaagacgaccgcgccacaaggaccgagcagagaaa

SEQ ID NO: 130482 - RNA, 78 nt, Homo sapiens
caacaggacgccgccaaggcaaaagcgacaacccagcggccgcgcccacagcggccccagaccgaagaaagccggcca

SEQ ID NO: 130483 - RNA, 60 nt, Homo sapiens
cgaccagcccaccgaaaggagagaagcaggaagaaggagaaagacaaagccccgagaaag

SEQ ID NO: 130484 - RNA, 52 nt, Homo sapiens
aacaccgacggagccagacagcgggaggcacggcagaaacggaaaaaccaaa

SEQ ID NO: 130485 - RNA, 82 nt, Homo sapiens
cagcgagaaacgagaagcgcagaaccaacgaggggccgaaccccaggaacaagaagccagcgaagagagggggaaaacccca

SEQ ID NO: 130486 - RNA, 68 nt, Homo sapiens
gcacagaccccggaaacacccaccaccgaaccagggacagagagccgaaagccgggcaaggggaaaga

SEQ ID NO: 130487 - RNA, 67 nt, Homo sapiens
gaccggcggaaaaaagccagggaagaaccacaaggagccgcaaaacacaccagggaccacaagcaag

SEQ ID NO: 130488 - RNA, 75 nt, Homo sapiens
ggggacgcacggaccaaaaacccgcaacagcccccgcccaagaaacagaagacagccgaaccaagggcgacaacc

SEQ ID NO: 130489 - RNA, 77 nt, Homo sapiens
cacaggcccccggccaccggccccggccccccggccgggggaacgcccccagcgcaggcagagagaaacaaccggag

SEQ ID NO: 130490 - RNA, 60 nt, Homo sapiens
agcgagaaaggagccggggaccccccaaagacaagcaacccccagccacaacgcgaaccg

SEQ ID NO: 130491 - RNA, 104 nt, Homo sapiens
cccaccccgacgaccggaccgaggaggcagcgcggggcagcgcgagccgggaaggaggggccacggggccggggagccaccaggagacagcccagacaagcagg

SEQ ID NO: 130492 - RNA, 38 nt, Homo sapiens
gccggagcgccgcggggcccggaagaagagccgaaacg

SEQ ID NO: 130493 - RNA, 61 nt, Homo sapiens
ggaacccgaagaagaaaggacgacagccagagaggggaaccgcccaaaagcccgccagaag

SEQ ID NO: 130494 - RNA, 71 nt, Homo sapiens
gacacgaaacacagggcaggaccaacgagaaacaagagaggccggcgcagggaaacaagcgggcaaaaagg

SEQ ID NO: 130495 - RNA, 68 nt, Homo sapiens
cgaagcagggcacaaaaccaaggccaagcaagggcagggagaaacaccaacagcaggcccaccagacc

SEQ ID NO: 130496 - RNA, 77 nt, Homo sapiens
gaaggacaggcacaggcagcacaaaggaacaggagaggccggggaggcgacgccgcagggaagcgcacaacagccca

SEQ ID NO: 130497 - RNA, 85 nt, Homo sapiens
cgacgacaagggcgacccaaggaaacgcggcgacccgaggaggaaggcccgcgggcccaaggaccgcgagaaaccccgaaccaaa

SEQ ID NO: 130498 - RNA, 34 nt, Homo sapiens
acggcaaggaacacagaggcaaaccgacaccagc

SEQ ID NO: 130499 - RNA, 74 nt, Homo sapiens
gggaagaagcaaacgaagggcaagaacaaaaagcccagcaggccaaggccccaagggcacaggacaagaaggcg

SEQ ID NO: 130500 - RNA, 64 nt, Homo sapiens
ggccgaggaggagccggaggagacccccgggggccagggccggagcgagggagagcaggaacac

SEQ ID NO: 130501 - RNA, 70 nt, Homo sapiens
gacccgcgcgggccgagagccgccccgaacgggggcccccccgccggacaggcagaaaaccgcgcgggag

SEQ ID NO: 130502 - RNA, 50 nt, Homo sapiens
aaagggaaacacgcaaagggccagaaacgaaacggcacggacaaaagccg

SEQ ID NO: 130503 - RNA, 77 nt, Homo sapiens
cggcgacgagaagagcagccagagaccacagcgccgggacgagagcagacgggagccagcccagcgcacaaccaagc

SEQ ID NO: 130504 - RNA, 81 nt, Homo sapiens
gaaagacaaaacaggcaagcaccgggcacaggcggggacaccaaaaggagcacgcaaccccaccaccggagggcaggcccc

SEQ ID NO: 130505 - RNA, 81 nt, Homo sapiens
acacgagggcacgcgggcaagggcaaccgcggggaagcggggcggcaccggacaccaagacggagacaagcagaccggaag

SEQ ID NO: 130506 - RNA, 68 nt, Homo sapiens
acgcccgaagagcgaccggcgcaggaagaccgcaggaaagcaggaaggcaagaaagccaaggacgaaa

SEQ ID NO: 130507 - RNA, 75 nt, Homo sapiens
caaacagggccagaagcggagagagcggagcagaagagcgcccccgcgcagaaccggccgaaaagcacaaacagc

SEQ ID NO: 130508 - RNA, 81 nt, Homo sapiens
acggaagcccgggacggcaggaagaacaacacagccagccccccgagggagggacaaggcccgggcgaaccgccgcgccag

SEQ ID NO: 130509 - RNA, 57 nt, Homo sapiens
ccaagaaacaccaccaacaaacgagaaacccagaaaacgccaaaccgaccaggagaa

SEQ ID NO: 130510 - RNA, 67 nt, Homo sapiens
cgacgggagacagaggaagccccagaggccacaaggcaggagcgaggggcaggcgggagcgaccccg

SEQ ID NO: 130511 - RNA, 54 nt, Homo sapiens
ggaaccgcccagccccgaggaaaggcaagggcagaaaagaggggaaaaggccag

SEQ ID NO: 130512 - RNA, 77 nt, Homo sapiens
aacggagaggagccagagccccacgggaaggagagcagccagcagaaacagggaggcaggacagggaagaagggaag

SEQ ID NO: 130513 - RNA, 77 nt, Homo sapiens
acccagaagaggcagcagcggaaggcagcgggagccgaaaacggaagaagcgggaccggggcgggacgaggagaggc

SEQ ID NO: 130514 - RNA, 78 nt, Homo sapiens
cgaaacagaaggcggaggcagaacgaaagagcggcggagaaaccaccacaaacacgaggccagcaacgaccaacaaga

SEQ ID NO: 130515 - RNA, 71 nt, Homo sapiens
cgagccccagacggcaagcgggcagagcccccgccaggcccccaaaccaaccgcggcccaccgcaaaccag

SEQ ID NO: 130516 - RNA, 80 nt, Homo sapiens
caacggagcccgcgcaggggcggcccagccgagacagcaggcggagacagcagccaacgcacgcaagggggccgcaacca

SEQ ID NO: 130517 - RNA, 121 nt, Homo sapiens
ggcggcggcgggcgggaaccgagcggcccagggcccccgggcccggcagcgcgcggagcgggccaccccaagccagccgcccgccgcaccaccggccgggcacggacaggaaaagaagggc

SEQ ID NO: 130518 - RNA, 92 nt, Homo sapiens
aggcgccaaacgagcacccaaacagccaggccagaaaagaagccacagcgggaaccccaccacagcagcacagaggcaaccaccacagagga

SEQ ID NO: 130519 - RNA, 81 nt, Homo sapiens
ccggcgagccgccaagaggcggcgcagccaccccgcgggaacgcccagcgcggggaggcaagcccagagcgggcagccacc

SEQ ID NO: 130520 - RNA, 77 nt, Homo sapiens
cacccaccacacaccagagagcaggcagaagccgagggaacgagagaagcacaagaacaaggagaaacgaggaaaaa

SEQ ID NO: 130521 - RNA, 74 nt, Homo sapiens
ggaaaacacccgacagaaccggaagggagaacagagggcagaacacaccaccccgaagagcccccaccagaggc

SEQ ID NO: 130522 - RNA, 73 nt, Homo sapiens
caaagcagagcagacgagaagcaccaaaaaccacccaggaggccagagaggagcccacccccaacagaagaga

SEQ ID NO: 130523 - RNA, 75 nt, Homo sapiens
cggaacggacccgaacgcacaggggaaaggaaggaaaaacgggaaaagaaccggagcagaagaccgcgaaacacc

SEQ ID NO: 130524 - RNA, 72 nt, Homo sapiens
acacccagaagacgacggcacagcgcacaagaaacccaagcgcgaggaagaagacggcacgggacccccagc

SEQ ID NO: 130525 - RNA, 83 nt, Homo sapiens
ggcgcgcgcgcggccgcccccggccccggagcccccggcggcgccaccagaccgggagccggccccgaaaaacggaacagaca

SEQ ID NO: 130526 - RNA, 74 nt, Homo sapiens
caaacagacacaaaccagaggccgaaaggagcgaaggcaaaccagaggaagagggagagaagacaaggagaagg

SEQ ID NO: 130527 - RNA, 103 nt, Homo sapiens
gggaaagggagccaaccgaacgggcgcggaacacgcaccgggacaggcccagcacggggaggggaggccccgggaccagcccccccgagccgccagacgcggg

SEQ ID NO: 130528 - RNA, 65 nt, Homo sapiens
aggcagcccccaaggcaacagggagggacacacccaagcacggaccaaaagagacggggcgccgg

SEQ ID NO: 130529 - RNA, 59 nt, Homo sapiens
ccaggggaccagagaggacggcaccagccaggagaaagaaccaagagggagacaaggga

SEQ ID NO: 130530 - RNA, 80 nt, Homo sapiens
cacggaagcaccagccggagagacgcacccgcaggggcaagccacgccaggaaaaccagagacccagacacgcgaaggaa

SEQ ID NO: 130531 - RNA, 62 nt, Homo sapiens
ccgagagcgcgaaacgcacgagaagggaaagcacaaggcagggaggagaaccccaagagcac

SEQ ID NO: 130532 - RNA, 88 nt, Homo sapiens
ggcggaggccccagggaagcgcagaaagcaggcgaacccgcggcgcaaaacgagggagcccaggcggcaggagagcaaggggcaacga

SEQ ID NO: 130533 - RNA, 79 nt, Homo sapiens
cgacggcggaacccggggccgggacgcagcccggcggcagcagacagcgaacgggcacgacggccagcgaaacagagaa

SEQ ID NO: 130534 - RNA, 62 nt, Homo sapiens
gcccaagccgcacagccgcggcggcagcagcaggagagcacggggcaccgggcccagaggag

SEQ ID NO: 130535 - RNA, 76 nt, Homo sapiens
cggagggcccgcaccccaggaaaccacacagcggccgaccccggagaccaccacccgacggcgccaaccaccaagg

SEQ ID NO: 130536 - RNA, 79 nt, Homo sapiens
aacacagccagccccccgagggagggacaaggcagaaaggaaacccacgccacaacaaagaccaacagcaccgagggca

SEQ ID NO: 130537 - RNA, 91 nt, Homo sapiens
gcgccagcaagaaacgaagcaaaagacagcgaggagcagcagcagcccagcaggcgcggcccgccagccccccaggcgccaaagcggcacc

SEQ ID NO: 130538 - RNA, 75 nt, Homo sapiens
agagggcaacaggccagggaacaaaggaggacggaagcaaccccaaaaagacgcaacaaaacggggaggacagaa

SEQ ID NO: 130539 - RNA, 95 nt, Homo sapiens
gcgaccgaggggacgccgcccgccgcccgccgcaggccacccgggaacggaggagggaagagaagcgaaggacgacagccaggggaggacaccac

SEQ ID NO: 130540 - RNA, 83 nt, Homo sapiens
agacaaaagcacaggaggaccccaacgcagacacgaaggaagacacacgcaaaaagggacaccccccaaggaaagcgaaagaa

SEQ ID NO: 130541 - RNA, 81 nt, Homo sapiens
aggcaccaccggccccggaaggccgaccccgggacacacccagcccgggacccagacaccgggaggggagaccgaacccga

SEQ ID NO: 130542 - RNA, 70 nt, Homo sapiens
acggagacgcccagggggcaccagcccccgcggcccgcacacagacccgggcccaacggaccgaaaacgc

SEQ ID NO: 130543 - RNA, 76 nt, Homo sapiens
cccccgcagaaggggcaccagaccccccgacccaaagacaggaccacgcaccagcagagaaggaaagcaaaccgaa

SEQ ID NO: 130544 - RNA, 71 nt, Homo sapiens
cacgaagccggcccgaagccgacccccgcaaggaagcgcaggcgagggccaccagggcggaccacaagaaa

SEQ ID NO: 130545 - RNA, 53 nt, Homo sapiens
aagaccagagaccaccacaaaaaaagaaaaccaaccggacaaggcagagccag

SEQ ID NO: 130546 - RNA, 68 nt, Homo sapiens
cacaaagcagcgaaagcacccaaggaaccacggcaaagaaaaggaggggcaaggcacacgagcggcca

SEQ ID NO: 130547 - RNA, 57 nt, Homo sapiens
ggccacagaaccagccacagcggggcggagaggaagaaaggaaggggcaccacaaga

SEQ ID NO: 130548 - RNA, 64 nt, Homo sapiens
caaccgacgcccgaggcgggcgacaggaacgaaaagaaaccaccaccaaagaaaagaagccaca

SEQ ID NO: 130549 - RNA, 63 nt, Homo sapiens
cgccggcagaggaccaggcaccaccggccccggaaggccaagccccacaagggacagccccag

SEQ ID NO: 130550 - RNA, 51 nt, Homo sapiens
gaaaccgccagacaacgaccccacccgagacccaggggcccgagacacccc

SEQ ID NO: 130551 - RNA, 68 nt, Homo sapiens
ggacacgaggaccaggaagcaacagcaaggacagagcagggaaccggggaagccggagccagaggacg

SEQ ID NO: 130552 - RNA, 70 nt, Homo sapiens
ggaagaagggccacagcagacaaaggaaaacgaccaggccaggaaaaaggaagaagacgccgaacaacag

SEQ ID NO: 130553 - RNA, 70 nt, Homo sapiens
cagcaaggcagaaagacaaaaaggagccagaaaccagggaacagaagacaaagggcggaaacagggaggg

SEQ ID NO: 130554 - RNA, 60 nt, Homo sapiens
agcggcggccccaggaaaccacccacgcccccgagagcacccgcccccacacgaacccga

SEQ ID NO: 130555 - RNA, 50 nt, Homo sapiens
gaccgcccagcggcggaacgcggcagaacggaggcaggcagcacgagaca

SEQ ID NO: 130556 - RNA, 76 nt, Homo sapiens
cccccagaggcaggaacaggagacagcgccggcccaggcgaggcagggcacaaccggccacgcaaccccaccccca

SEQ ID NO: 130557 - RNA, 78 nt, Homo sapiens
cacaaagcagaagaagaccgaagggaagacccagagcccaaggaggaaggcgaccggcccgaggaccgccgcacgacc

SEQ ID NO: 130558 - RNA, 51 nt, Homo sapiens
ggagagagggaagaaacacagcacagcggcggagaaaccaccacaaacacg

SEQ ID NO: 130559 - RNA, 83 nt, Homo sapiens
gacgacgcccggcgccagcacacgcaggaggcccagcggggcaacagcagacccccgaaccccacccaggagcgaaggaggag

SEQ ID NO: 130560 - RNA, 65 nt, Homo sapiens
gaaagccagggaccagcgccgcgacgccagaggagaacgagcagaccgacacgccacaccagaga

SEQ ID NO: 130561 - RNA, 72 nt, Homo sapiens
gccagcaaaaaggacacagacagacggaaccccaaacccaccagaaaagccccagcgagcggcacccccacg

SEQ ID NO: 130562 - RNA, 64 nt, Homo sapiens
aacagcgaggaagaagaggacgacgacgacgaggaagaggaggcgagacgcaccaggacgcggc

SEQ ID NO: 130563 - RNA, 86 nt, Homo sapiens
cccccaacgccccggagccgccggccgcagcgcagcgccagccaggggcaaggaggaagagcaggaccgcgggacacggcacagcg

SEQ ID NO: 130564 - RNA, 74 nt, Homo sapiens
gccacaaaccaaacagaaggacaagcaaaaaaaaccgccccgccagcagaaggagcccccggacggagagagca

SEQ ID NO: 130565 - RNA, 69 nt, Homo sapiens
gggaaagggccagagcccaaaggcccagaccaacgggacgacgggggacagaagaggaaaacaccacaa

SEQ ID NO: 130566 - RNA, 93 nt, Homo sapiens
ggcgcggaggaggggagcagcgcgcaaggaaccccgaggcaggcaggcaccccaggcccgcagcccccagcccacacccccacaacggccacc

SEQ ID NO: 130567 - RNA, 80 nt, Homo sapiens
gggagaccaaagccgcaagaaagacgccgccccacggcacccacgaagggccgaggaagcagccgggaacaggggaaccc

SEQ ID NO: 130568 - RNA, 83 nt, Homo sapiens
aagaaaagagcaagaggaaaggggggagagacaagcaagcagagaaagcgcgggggagcaaaaacagacaagccagaagcgaa

SEQ ID NO: 130569 - RNA, 74 nt, Homo sapiens
aagccccgcgcaaagaccgcagaggggccggcagggcaaggacagccaggcagaggagggaggcacaacaacga

SEQ ID NO: 130570 - RNA, 76 nt, Homo sapiens
agacagacccaccaaaccagccgaaagggcaagagggcagaagaaagaaaggaaagagagggacaggcaaaaaggg

SEQ ID NO: 130571 - RNA, 57 nt, Homo sapiens
gaagacaaagagccaagaaacccagagggacaccagcaccaggcgcgaacccgggcc

SEQ ID NO: 130572 - RNA, 65 nt, Homo sapiens
agcaccccccaggaaagccaccacgccacacaccaaacgagcacgcccggccaggacacaagagg

SEQ ID NO: 130573 - RNA, 48 nt, Homo sapiens
acagaaaggagggacgaagacaccgacggagcacggagcacccgcgcg

SEQ ID NO: 130574 - RNA, 73 nt, Homo sapiens
acaggaaaaaacgaagaggaaaaccacccgggccggcgccgaccagcaggcaccgaagaggaaaggaagcagg

SEQ ID NO: 130575 - RNA, 55 nt, Homo sapiens
acagacacgcggggagacgggcagcacccaggcggccagagggacaacagagaag

SEQ ID NO: 130576 - RNA, 81 nt, Homo sapiens
cccaggccaggaccaccagccagcgcgggagaacagagacccaccaagaaaccagaacccggacaagggaagggcccgagg

SEQ ID NO: 130577 - RNA, 77 nt, Homo sapiens
cagaaagacccgccgaaaaagcgagacagggcgacgccacacgaacacccaccccgccccaaaccgcagccccgagc

SEQ ID NO: 130578 - RNA, 80 nt, Homo sapiens
gggggggccagcgacccggggccgagaagacacgcgggaaaaggcaacagaaagacggcaacacaccggaggcacagccg

SEQ ID NO: 130579 - RNA, 70 nt, Homo sapiens
cagccgagcacacgccgccgccgccgcacgggaaacacaaagaagacaccagaagggccagcaccacgac

SEQ ID NO: 130580 - RNA, 88 nt, Homo sapiens
gagcgacaaacggcacaagaaacaaaaaaagaagagaaggaaaaaaccacgcaacacgcgcaggaaagggcggcgacggcggcgcgag

SEQ ID NO: 130581 - RNA, 77 nt, Homo sapiens
ggccaggagaacaaggcacacagagacagacaaagcagccggaaacccagacgacaaggaaggccaagggacccacg

SEQ ID NO: 130582 - RNA, 70 nt, Homo sapiens
ccgcccgcccaccccccaagcagcggcagcggcggcgagccagaggccaacgcagaggaacggaacagag

SEQ ID NO: 130583 - RNA, 74 nt, Homo sapiens
agaaccgcccggggaacacccaggggagaacagacaaaccccacaagcacgcaacgcgcagccagcagcacagg

SEQ ID NO: 130584 - RNA, 82 nt, Homo sapiens
ggacggcgggaccacaagacaacgcggagcggcgaagagcaaccagcgcaaacgccaaggcgccggggagcaggagaagaag

SEQ ID NO: 130585 - RNA, 74 nt, Homo sapiens
agagacaggaagaagagagcggaacagcagagcgcacaacggcgccaagaggggcaaagacccagccaccccac

SEQ ID NO: 130586 - RNA, 65 nt, Homo sapiens
gcggggcccccccgcgaccccacgagaggaggccaacacgccaccacccggggccaggaacggac

SEQ ID NO: 130587 - RNA, 85 nt, Homo sapiens
aaaaccgagcagcccccaggaacagggcaaaggagagcacaaccacgcagggaagcccaggggcaggacacccacaccaggccgg

SEQ ID NO: 130588 - RNA, 68 nt, Homo sapiens
ggagaaggaccaagaaccaggaacagaacaacgacccagcccaaaaaacccaacgggaggggcagcgg

SEQ ID NO: 130589 - RNA, 124 nt, Homo sapiens
caagaggcgggcaggagcggcggccaggccagacccgaaggccaggagacccgaccccaaggccgaacgaggcggggggcccgagaccacaccacacccaccagggaggaccggagaagcaaag

SEQ ID NO: 130590 - RNA, 89 nt, Homo sapiens
cggaaacaaaggcacgcaaaacggaaaagcgggaggggagcggaaaaggaagcaccaccgggccgcgacgggacgaccacgaaaaaaga

SEQ ID NO: 130591 - RNA, 81 nt, Homo sapiens
cgggccagggccggacaccacgaccgccagggagcgcggagcccgggccgaagcgcacgcgccgccggagcgcggcccacg

SEQ ID NO: 130592 - RNA, 71 nt, Homo sapiens
aacacacagaaggcagggagggaggggaaagacccacaccaagagaccagcgccaaccgaggaagcagagg

SEQ ID NO: 130593 - RNA, 67 nt, Homo sapiens
ggcaccaaaccacaagggagaaaacccccaacaccgggaaaacaaagcccaaaggaaaccccagacg

SEQ ID NO: 130594 - RNA, 75 nt, Homo sapiens
aaccggagggccgggacccgcagccacggaccgcccaaccgcgacgccgagccagaggggacggcagagacaaaa

SEQ ID NO: 130595 - RNA, 75 nt, Homo sapiens
aaccacgggacgacagcaaaacccggaaaagagcaaagccacagaaagaagacacccgccacacaggacagagaa

SEQ ID NO: 130596 - RNA, 87 nt, Homo sapiens
ggcccagccgcggccagcacacgccgggagaggagggcaagcgagggcgcacggcggcagccaggaggcaggagcagcgggcgacag

SEQ ID NO: 130597 - RNA, 74 nt, Homo sapiens
aaaacacagggcaagccaaaggaaggaagacccacaagagaccacgcagagacagcacccaaccggcagcagca

SEQ ID NO: 130598 - RNA, 79 nt, Homo sapiens
aacccacccagagcccacccccgcagcacagggggagggccaggcccaagcccagcagaccaacagcgcagcccaaccg

SEQ ID NO: 130599 - RNA, 77 nt, Homo sapiens
agaaaaggaaagacgccgcaccaggacccaaggaaccagccaaacggagggaggagaagacagagcgaacagaagcc

SEQ ID NO: 130600 - RNA, 74 nt, Homo sapiens
cgcggagcggaagacggcaacccagagaccacagaaggaaggaagaagacaaagagcggaaggcagggacaaac

SEQ ID NO: 130601 - RNA, 80 nt, Homo sapiens
gcgccgccgcgggcgccgggagcgagcgggagggagccgcgcgccggcgcgcgccgagggccgggagggcccgaacccaa

SEQ ID NO: 130602 - RNA, 41 nt, Homo sapiens
accacaggagcaaaacccacacagaggaagacaaggccaaa

SEQ ID NO: 130603 - RNA, 56 nt, Homo sapiens
ggagcgagcggacccgcgaggaccggagagaacagaaaaaaagcggcccgggacca

SEQ ID NO: 130604 - RNA, 54 nt, Homo sapiens
cccacggaaaagaaaaccccgccacagaaaagagcgaccaaacccccacaacaa

SEQ ID NO: 130605 - RNA, 80 nt, Homo sapiens
gggcgagagggagagccaaaaccaagcggacgcgggccccagccccccaggcgcagagggcaggcacgagcgggggcaag

SEQ ID NO: 130606 - RNA, 83 nt, Homo sapiens
ggagcgaacgggacagcccacacccggcgcggaggggcgaaaagccaggagcaaaagacgagcgcgacgccaccagcaacgaa

SEQ ID NO: 130607 - RNA, 80 nt, Homo sapiens
gaacgacgcggcgcgcgcggacgaagagccccccccccaacaccgcgacacgcagaggaagacaccaccggacaccgacc

SEQ ID NO: 130608 - RNA, 69 nt, Homo sapiens
caaggcaaaggcggcaggcacagaggcaagcaaagcaccacaggggaaaacaagcagaaccggggacca

SEQ ID NO: 130609 - RNA, 90 nt, Homo sapiens
ccagcccgccccggagccgggcccggcgaggcaggaaggccccgaggccccgaccgccgcgccccagaccgccagagcggaacgacccca

SEQ ID NO: 130610 - RNA, 47 nt, Homo sapiens
agcgaccggggacccccaggagaggagcaaccggaagggacaaaaga

SEQ ID NO: 130611 - RNA, 78 nt, Homo sapiens
gacaagcaggagcgggagccccagggagcaacagcgagcaacaggcaacgaaaacagacaaaacaacggaaaagcagg

SEQ ID NO: 130612 - RNA, 75 nt, Homo sapiens
caccgcacccagacgcaggcagggcacgaccagccacacaagccgaccccaggaccaggggaagcaccgggacac

SEQ ID NO: 130613 - RNA, 87 nt, Homo sapiens
cgagaggggcgagaacgccacgcgggccggcgaaagcgcgaccggggagaagacaggaggcgggacagaacgaggggaacagcggca

SEQ ID NO: 130614 - RNA, 75 nt, Homo sapiens
gccagcagaggcggagcccgcagaccgcagaaggccggagacaccagcagggccgaggaggaagcccacaggcac

SEQ ID NO: 130615 - RNA, 58 nt, Homo sapiens
ccaagggagccgcgcaaaggccccggcaagaagggcaggcgccgggaggggccggggg

SEQ ID NO: 130616 - RNA, 63 nt, Homo sapiens
acacaagcagaaacagacaggaccacgcaagaacgaaagagccagaagggagaaaggacgacc

SEQ ID NO: 130617 - RNA, 79 nt, Homo sapiens
gggccaagccgaaccgagccggggcgccgggagcagggaccgcgggaagagagaaggccacgcccgaccccaagcaaca

SEQ ID NO: 130618 - RNA, 80 nt, Homo sapiens
ggagcagaacggcagccccagggagcccgcgggaggcccaacggcgccgggccaaggccggggagggcacacaaaggaac

SEQ ID NO: 130619 - RNA, 80 nt, Homo sapiens
gcaacgccccaccggagaggccgccacagcacacccacaggcccggagagacgagccaaaccaggcgaccgagcagccaa

SEQ ID NO: 130620 - RNA, 74 nt, Homo sapiens
gaaggaagccggcagcccagcacacaacccccgccaccagaccgaagaacggcaaagagaaaagaagcagaaaa

SEQ ID NO: 130621 - RNA, 67 nt, Homo sapiens
ggacagggaggcacaaggacagcagcagaccagcacgaggaaggaccaagaagcacggaaacagagc

SEQ ID NO: 130622 - RNA, 96 nt, Homo sapiens
ggcagcggcgcagcgcccgccgcggcccgggcccccccgccggaaacagaaagccgacaagagacaacccccaaaagcaccgagaccgggcagagc

SEQ ID NO: 130623 - RNA, 77 nt, Homo sapiens
cgcccagcagaagaagagaggagggagaacacagaaaccggccccagagaggcgagggagccgaccacagcgaagca

SEQ ID NO: 130624 - RNA, 79 nt, Homo sapiens
cgcagaggcgggggggccacagagccaggggcaggacccggccgcgcccgcagcaccgggaaccccaagaggaacagca

SEQ ID NO: 130625 - RNA, 77 nt, Homo sapiens
gaagagaaacagagaggcgcagaggaccacgcagcaaggcgcacacagcgggagcaccgagggccagagcccagaac

SEQ ID NO: 130626 - RNA, 75 nt, Homo sapiens
gacaaccccagggaaggggcagcacaacaagaaccacggcgggaaacgccagaaggagaccaaaagacagagagc

SEQ ID NO: 130627 - RNA, 83 nt, Homo sapiens
ggggggcgggcgcagcgcggacagggaccaagaaaggcccagggaccaaagcccggacaaggcccgagcaccaggaccgcaga

SEQ ID NO: 130628 - RNA, 80 nt, Homo sapiens
ggagggaggaaaacaaccgagggcagagcgcaaggaagaagagacgccgcgcggcagacaaggcccggcaggcaaagcgg

SEQ ID NO: 130629 - RNA, 74 nt, Homo sapiens
cccgacgcaacgcggagcgcaaggcgagggacgagaacgagaagcaagcagccggccacaaggaaccaggaaac

SEQ ID NO: 130630 - RNA, 37 nt, Homo sapiens
cgcacacccgcccccccggccagccagacgagccccg

SEQ ID NO: 130631 - RNA, 55 nt, Homo sapiens
ggaggcagaggggaggcgcgaaaggagggcaaaacacagaagaagcaggccgcac

SEQ ID NO: 130632 - RNA, 78 nt, Homo sapiens
gggggagaacagccggaaggcacaaggacaaacccacccacaaaggggcagcgagagcccagagaagggaagaaagcg

SEQ ID NO: 130633 - RNA, 82 nt, Homo sapiens
caacccggacggaaggcccccgacagcagaccaggccggagcccagacgcgggacaggcaccgccagggaggagagcggggc

SEQ ID NO: 130634 - RNA, 77 nt, Homo sapiens
caagaagaacagagacagcagccaaacccccagacgcagaaaacagacacacagcggagacaagcagggccggcagg

SEQ ID NO: 130635 - RNA, 55 nt, Homo sapiens
cggggggccagaaggggaagggaaaagcgaagacgcagccaaggggaccgcaggg

SEQ ID NO: 130636 - RNA, 68 nt, Homo sapiens
agccccagcgccaccgccgaccgaagccgcaaaacgagcaggagcacgaaggggagaaaagggaaggc

SEQ ID NO: 130637 - RNA, 73 nt, Homo sapiens
cggggaggcaagagaccaccagcggccaccacacggcaacggggcggcacacaaggagcgaagggcagggaga

SEQ ID NO: 130638 - RNA, 76 nt, Homo sapiens
gggagcggggagccaaggaaacaggagcgaagcccagcgggccggacggggcggggggaacggaccgcgcagacgc

SEQ ID NO: 130639 - RNA, 61 nt, Homo sapiens
caaagaccaggagagacgagcagcccagggagcgggagacaggcgggccagagcggacgcc

SEQ ID NO: 130640 - RNA, 56 nt, Homo sapiens
agcccaggcggcagcgccagggcaccagccgaccacccaacagcgggagacaaccg

SEQ ID NO: 130641 - RNA, 81 nt, Homo sapiens
gagcgccgccgccgccgccgcggacaagagagagggccaaacaagaaggcccgaagagaccccagcggaggagacccaaac

SEQ ID NO: 130642 - RNA, 70 nt, Homo sapiens
ggcaaacggagaaagcagccagagacgggcgcccgggagagcgaaccagacccagggggcagaaggcagg

SEQ ID NO: 130643 - RNA, 100 nt, Homo sapiens
ggccaagcacgccggccgagggcaccaaggcggcaccaagacaccagccgaaaaggagcccgcagggccgccaccagcacagggagggagaggagccaga

SEQ ID NO: 130644 - RNA, 73 nt, Homo sapiens
aaaggcacagaggccgaaggccccagcagagacgaaaaaaccggaaaaacagagaagagacgaaggaagaaca

SEQ ID NO: 130645 - RNA, 77 nt, Homo sapiens
cacacggacaaaccaacccaaacacaggaagggacgcgagagaaaagacaccgacgagagacaacacagcaagggca

SEQ ID NO: 130646 - RNA, 72 nt, Homo sapiens
agaccgcgcgcagaacagaacagcaaaccaccccaagaagacgaaacgaaacaaagaacacagaaaaaacca

SEQ ID NO: 130647 - RNA, 75 nt, Homo sapiens
gaccgcgcgccaagccgcacgcaaccaccgcccggccacaccagggccgcaggagggaagcgcacggaaaccgcc

SEQ ID NO: 130648 - RNA, 79 nt, Homo sapiens
cagcggccgcgacgcaggcgcacggagacccgccggcagaacgcccaaaacccgccggaccgaagaaggggcaagcacc

SEQ ID NO: 130649 - RNA, 73 nt, Homo sapiens
cagagcaagcaaaggacagccagaacaagcggaagaacaacaaacgaaggcgcacccgacccaaaccggagca

SEQ ID NO: 130650 - RNA, 56 nt, Homo sapiens
ggggccccaggaaccaaaggaagggccacacgcccagccggagaaagcgggaggac

SEQ ID NO: 130651 - RNA, 85 nt, Homo sapiens
cgccggcgccgccagcacgccggccaacggggagcgcggccacagacgcacaggcagagacacaaggggagaagcccaagaccag

SEQ ID NO: 130652 - RNA, 77 nt, Homo sapiens
cacccaaggcagagaggcgagcgcgacaagaagaacccaaagcacgaaccagacagacggaggaggcaggcacccac

SEQ ID NO: 130653 - RNA, 89 nt, Homo sapiens
acgggccagaacaccaggacacgcaacagcaagcacagcagaagaacccccagggcccagagccagcaaaggcccacggggaagagccg

SEQ ID NO: 130654 - RNA, 62 nt, Homo sapiens
aaaacacgaccgaaggagcaaccaggacaggcgcacaaaagagcacaaaagcaccaaggcgc

SEQ ID NO: 130655 - RNA, 72 nt, Homo sapiens
aacccgggaccggacaacaacacggaggccgcaacaagcaagagaggcccgagaaagggcgaaaaagaggcg

SEQ ID NO: 130656 - RNA, 84 nt, Homo sapiens
gcccgggacaccaagaaagaacggcccgacccaggcaagcgagcaggcgagcaggagcccacagccgagcagcggcccagagca

SEQ ID NO: 130657 - RNA, 50 nt, Homo sapiens
acgaagccagcccagccccccagggggacaagccaacacgaacggagagg

SEQ ID NO: 130658 - RNA, 104 nt, Homo sapiens
aaaggcaagaagagaaaggaccgagcccgaaggacaaaaagggaaaccaaccaaaaacgaaggaaggaggacccgaggagagagaagacggaaaggaaacacgg

SEQ ID NO: 130659 - RNA, 92 nt, Homo sapiens
cccggagccgggggaccagcggcgggcccaagcgacgccaccccgccccaccgaggccggcgggccacagcaggcgccccgccggagaaccc

SEQ ID NO: 130660 - RNA, 68 nt, Homo sapiens
aaaccaggcagaggaaagaccccaaaggcagcaggacaggaagcagggagccaagcggcaggaaagga

SEQ ID NO: 130661 - RNA, 69 nt, Homo sapiens
caacaggacggcccaaaaccagccgacaaagagggggcccaagaagaaccccacggacaacgaggacag

SEQ ID NO: 130662 - RNA, 59 nt, Homo sapiens
gcccaccccacgccccaccaagccgccagcgcgcgacgcgaaggggaggcaagcagggg

SEQ ID NO: 130663 - RNA, 54 nt, Homo sapiens
gaagaaacggacgaaagggcaagcacaaggacggggaacaacggccggcggaga

SEQ ID NO: 130664 - RNA, 77 nt, Homo sapiens
agagagagccgcgcacgcacagacaagcaccgacagaaaggcacggccgacacagccaagggggaagacacagacac

SEQ ID NO: 130665 - RNA, 75 nt, Homo sapiens
acggccccgaccggcgggccccgggcacaccaacaagccacgaccggggagcagagccggaggagccaccaacag

SEQ ID NO: 130666 - RNA, 60 nt, Homo sapiens
ccggacccgaagaccaggccagcccgcgggagcgccacacagagcggaagaaccgaccgg

SEQ ID NO: 130667 - RNA, 69 nt, Homo sapiens
cacgggacgggagacccgacggagcagacagaagaagcgcagaaaggaagagaagaagaagcagaaagg

SEQ ID NO: 130668 - RNA, 65 nt, Homo sapiens
gccgccgagcggacccggaccggggagagaggaccaagcagagaccagacagggaccccagagac

SEQ ID NO: 130669 - RNA, 80 nt, Homo sapiens
cgaaacagaaaacacgggcccgacgacccagacaagcagaccggaagaccgacggaagaccacaccccgagggagcccag

SEQ ID NO: 130670 - RNA, 72 nt, Homo sapiens
gaaaacgaagaggagaagacaccaaaaagcaaacggaccagaccgaccaccaaaaagagacgggggcaccag

SEQ ID NO: 130671 - RNA, 66 nt, Homo sapiens
gaacaccggcagccggagggcgaacgacgggcccagggaaggagcgcgacgacgccaaaagagagc

SEQ ID NO: 130672 - RNA, 69 nt, Homo sapiens
cggccgaaacagaaaacaagagaccacagaagccgccccagccaccaccccaggggccagagccccccc

SEQ ID NO: 130673 - RNA, 69 nt, Homo sapiens
aaggggcaaaccagaggcagaacagcgaaacaagcgcccggaaagcgccccaccgacgaacacaacgca

SEQ ID NO: 130674 - RNA, 80 nt, Homo sapiens
acgaaagccccacaccagaccacggagggagcggaaaccgacgcagacgcccagagaaacagagggcaaagaggaccaaa

SEQ ID NO: 130675 - RNA, 78 nt, Homo sapiens
aggacacagcaacacccgaaagggcggagcacgccccggcccagcaggacggcagcccccgccccagcaacacgagac

SEQ ID NO: 130676 - RNA, 77 nt, Homo sapiens
aaggaaggaacagcagcaaaaagaacacaaaggacagacagagagagcgccaaggggccaagggagagcggggcccc

SEQ ID NO: 130677 - RNA, 56 nt, Homo sapiens
cagccgcgacggcgagcccgggccgcgcccgagcggacaaggccaacaaacaccac

SEQ ID NO: 130678 - RNA, 65 nt, Homo sapiens
accgaagaacggccaccgagacaaccaagcaagggccagcagaaaccgacagaaaagcgcacaaa

SEQ ID NO: 130679 - RNA, 78 nt, Homo sapiens
cacccgcaccaggccccagcgagcacgaggaccgcgaccgaagggagacaggccaaggaccagcaaggacacaggaac

SEQ ID NO: 130680 - RNA, 82 nt, Homo sapiens
aggaaagccagggggacccagcacagagccgagagcggcccaggaggaacaaccagcccacccggagagggcacgcgcgggg

SEQ ID NO: 130681 - RNA, 32 nt, Homo sapiens
ggaaccagcgccgaggggggacacaggacaac

SEQ ID NO: 130682 - RNA, 84 nt, Homo sapiens
gcaaaaccaacgccggccggagcagcagcccgaggacccaaagacaggaccacgcaccagcagagaaggaaagcaaaccgaagc

SEQ ID NO: 130683 - RNA, 59 nt, Homo sapiens
cggccgcccggccgggaaccaagcaccggccacgaaacagagacacaccgacgaacccc

SEQ ID NO: 130684 - RNA, 84 nt, Homo sapiens
ggaagaccccaccaggagaccacgcccaggcaggaggcaccaaggagacaacgaagacggggaccaggagcagaggccggcacg

SEQ ID NO: 130685 - RNA, 79 nt, Homo sapiens
aaaaggggagcaaagagaacacgaaacaaccagccaaacccacgcacaggggaacgaggagaaacaggaagaagagggg

SEQ ID NO: 130686 - RNA, 68 nt, Homo sapiens
aagggaaaacgcgcgggccaaggagacgggagggagaccggagaggggaccacagcccagaagaaggc

SEQ ID NO: 130687 - RNA, 77 nt, Homo sapiens
aagagcaccggcgaccgcaccacaagggacgagaccaaacggaagaggaaacacaaagccggggaagcaaagagaac

SEQ ID NO: 130688 - RNA, 69 nt, Homo sapiens
accccggaaaggagagccagacaacaggagccaggaagagacaagcaacgaggaaaagaaacaaaacac

SEQ ID NO: 130689 - RNA, 80 nt, Homo sapiens
ggaccaaaggccgggcgcagaacccccagaccacaccacccaggcccaggaccgagcccgacgcccacagacaggcgaac

SEQ ID NO: 130690 - RNA, 86 nt, Homo sapiens
cgagccgggagaccagcggccacagcccgggagaagaggagaaccgaggaagggaagaaagcggaggcggcggcgcgaaaagagaa

SEQ ID NO: 130691 - RNA, 73 nt, Homo sapiens
gacgcccggcggggcagggaaggacagcgcaggcccccgcccccgagcagccgagcccggacaaacaagggaa

SEQ ID NO: 130692 - RNA, 70 nt, Homo sapiens
agagaagcaaagaaggggaggcgcccgggcgagacaaacggccacgcgccccggcccaagggcgcacgaa

SEQ ID NO: 130693 - RNA, 74 nt, Homo sapiens
cggaccgcggggcgccacggccgcacgacgcgcgggcaccgcgcgacagcacaaggggggggccgggcgggccg

SEQ ID NO: 130694 - RNA, 53 nt, Homo sapiens
ccgaagagagcccggaaccaccggccgcagccgcagacggcaccaggacaagc

SEQ ID NO: 130695 - RNA, 70 nt, Homo sapiens
agaggggaaagcaaaagaaacagagcagggacagacgcagcgaaggaaccagccaggaaaggagaggaaa

SEQ ID NO: 130696 - RNA, 51 nt, Homo sapiens
gaagcccggagaaggaccaaaaggagaaaggaaacaagaaggcgcacccgg

SEQ ID NO: 130697 - RNA, 58 nt, Homo sapiens
agcaaagaccagcgccggaacaccaccgccaggccaggaagggggcaaaccgagggac

SEQ ID NO: 130698 - RNA, 64 nt, Homo sapiens
aaaccagaaaaaggccaagaaaccaccccacccaacccccgacacagaagaggagaaaacggaa

SEQ ID NO: 130699 - RNA, 52 nt, Homo sapiens
cgcagggcgcccccgcccgagagagacgcagcgcaaggccgggggaggccac

SEQ ID NO: 130700 - RNA, 52 nt, Homo sapiens
cgcccccgggagcgcgggcaaaagggagagcccgaccagagaaaaggcggaa

SEQ ID NO: 130701 - RNA, 67 nt, Homo sapiens
acacccccagccagcccacacccgccagaagagcacaggagagagcgaagcaccgcgcagaccgaaa

SEQ ID NO: 130702 - RNA, 81 nt, Homo sapiens
cacaccccacaggccgccccaacaccagggaagagacacacccaggacgagagaggagcgcgggccgagagcggagagcgg

SEQ ID NO: 130703 - RNA, 75 nt, Homo sapiens
gaagaggagagagagcaagagaggaagaagaacgacccgcccggggcagcagcaccgccgggacccgagagggaa

SEQ ID NO: 130704 - RNA, 80 nt, Homo sapiens
ccgaccgagcgggaggccacagcagccagccggcccgaggacaccgacaccagcagaccgggaacagccaggagggacgc

SEQ ID NO: 130705 - RNA, 62 nt, Homo sapiens
cagcaaccagcaccagagaaggagcacccgggaagaaggagagacgaccacgcaacagaaaa

SEQ ID NO: 130706 - RNA, 68 nt, Homo sapiens
ccggaccgacagcagaagagaccgggagaagaaacaaggaccagaccaagcgacagacccggaacggc

SEQ ID NO: 130707 - RNA, 63 nt, Homo sapiens
ccgagcggacccggaccggggcccgagggcaacacccgagaccggcaagagcccagaggagga

SEQ ID NO: 130708 - RNA, 55 nt, Homo sapiens
acaaacccagacgggcagaagagagagaaagggcagagccagaaggagagccaag

SEQ ID NO: 130709 - RNA, 78 nt, Homo sapiens
gggggcaggagcgggagcgcagcgaccacaccgaagacccaagcaccagccgccgccacacccccccccggccccccg

SEQ ID NO: 130710 - RNA, 76 nt, Homo sapiens
ggagcaggaggcgacaagagggagacgagagaagagcggacaaggaacggagaaccccggggaaccccgagcaaca

SEQ ID NO: 130711 - RNA, 75 nt, Homo sapiens
gagagcaagagggcaccagcagcgacggagccacccgcgaaaacggccagggccgccgagaacaagcagaggaaa

SEQ ID NO: 130712 - RNA, 78 nt, Homo sapiens
ggagcgcaaccagaaaggggaaaggaagaagccccagaaacggcccaagagaccaaagcagagaacaaacaccagcga

SEQ ID NO: 130713 - RNA, 74 nt, Homo sapiens
gcgcgccggcagccaggaaaacagagaacagcccagcccccagagaagaggggacacaggacaaagaagagaac

SEQ ID NO: 130714 - RNA, 60 nt, Homo sapiens
cagacccgcaccagaaaacccccaccagaaccagccacgcggaccacacccacgggcaaa

SEQ ID NO: 130715 - RNA, 70 nt, Homo sapiens
aaaaagcagcaaaccggaccaccccgaagaaagcacagacccgggcagaaccgcagagagaagaacagca

SEQ ID NO: 130716 - RNA, 81 nt, Homo sapiens
agcagcacccacagccaaggcgggagccacgggaggagagagcgaggccacccagaaggccagccccagcggcccccagcc

SEQ ID NO: 130717 - RNA, 77 nt, Homo sapiens
acccccacaacccagagcaagaagaccgaaagggcaggagaaaaacaaggcagaagaaggcagagaacggaaagaga

SEQ ID NO: 130718 - RNA, 83 nt, Homo sapiens
aaaaaccaggccgccaccgcggcaaaagccaggacaaaaccaggcagaaccaacacgaacccaagcacaaacaagaaaacgag

SEQ ID NO: 130719 - RNA, 83 nt, Homo sapiens
agggaggcaaggacagcagggcgaccggcggcccccggcgccaaaaggaggagccggacccgggggcaggccggggcagcgac

SEQ ID NO: 130720 - RNA, 59 nt, Homo sapiens
ggcaggcgccgccgaggggcagcagcacaacaagggaaggagaaaccaagagccccaaa

SEQ ID NO: 130721 - RNA, 76 nt, Homo sapiens
gggccccaccacgccgaaacggaaacggacagaaagccgcggggaggaggcccaaccaggaaggagacgccaggag

SEQ ID NO: 130722 - RNA, 68 nt, Homo sapiens
aaccaaggccaagcaagggaccaaacacggaacagggcacgcggaacaggagaggaggaaacagaccg

SEQ ID NO: 130723 - RNA, 73 nt, Homo sapiens
gcggggccgccgcaacgggcaccacgccggccacccacgcccacggccaccgaagagacacaagcgggacgga

SEQ ID NO: 130724 - RNA, 68 nt, Homo sapiens
gcccccacgagaccaggaccggggcgacaggcacggcaagagaacagcccgaacaccacagaggagag

SEQ ID NO: 130725 - RNA, 69 nt, Homo sapiens
acccagcagaagcgcggaggcggaaccccagaacagacagaggggacagcaaaaccacgacgcaggcaa

SEQ ID NO: 130726 - RNA, 71 nt, Homo sapiens
accggcccagccccgaggcgggacacagaggagaacaagcggagaaaacgaagaccagaacaagagagaac

SEQ ID NO: 130727 - RNA, 70 nt, Homo sapiens
acgaggaccaaaggaacaaaagaggcagaaggcccaaagggggcgaaacacaggacccgcaaaaccccca

SEQ ID NO: 130728 - RNA, 81 nt, Homo sapiens
gcggcccggaccgggagacacggccagacgcccccaggcgaaccgaccaagaacaacacccagagggccaggagaaggcga

SEQ ID NO: 130729 - RNA, 58 nt, Homo sapiens
agacaccaggacccaggcacacacagaacaaaagcaacaagacaagaccacacccggg

SEQ ID NO: 130730 - RNA, 55 nt, Homo sapiens
ggccacccgcaggcccacaaccgggagaaaagagccggaagcaaaccccaggacc

SEQ ID NO: 130731 - RNA, 78 nt, Homo sapiens
caagcgccaaccgcccccagacaggccccgcagcagaaggcgacaggaggagcgggcggaaacaagccacccaccaga

SEQ ID NO: 130732 - RNA, 66 nt, Homo sapiens
aagaggcagagagcaaagaacccccaagcaggaagggacccacccccaccccacccagagaccagg

SEQ ID NO: 130733 - RNA, 73 nt, Homo sapiens
acaaaagccagaaaaccccaaagcaaacgggagacaagagcgccaacgccagccacaaaggggcgaaacggca

SEQ ID NO: 130734 - RNA, 72 nt, Homo sapiens
aagagcgggcccgggggccccggaccaggaaaccccacggagaaagaagagagaccagaaacgagaggagaa

SEQ ID NO: 130735 - RNA, 67 nt, Homo sapiens
agagaggaagccaccaaaagcagcccgcagcgacaaggaccgacaaaggcagccccgcaggagccag

SEQ ID NO: 130736 - RNA, 99 nt, Homo sapiens
aggaggcagcgaggcggggaaagacaacagcacacaagaacacccaggccagagaacccaaaagcaaacccaagaccgaaagaaacccgggaaagggac

SEQ ID NO: 130737 - RNA, 68 nt, Homo sapiens
ccccacaaccaccacggagcgcagccgggagaggacgacaaaaggaacagcgcaaaccaagccgaacc

SEQ ID NO: 130738 - RNA, 80 nt, Homo sapiens
cggagaaaacccggaaccgcgacggcggcaggggaacccaacgaaaacaggaaacccgccacaccacgggaaggggacag

SEQ ID NO: 130739 - RNA, 83 nt, Homo sapiens
caagagacagggcacaccaaacccacggacgaagcgaggcgaaacagaacaaccccacggaagaagagggccaaccagcacga

SEQ ID NO: 130740 - RNA, 71 nt, Homo sapiens
aaggaagccagcaaggagggcgaaagggagcaacacaccccacacgagacccaagaaagacaagaagaacg

SEQ ID NO: 130741 - RNA, 82 nt, Homo sapiens
aagacggaaaaagcgacggagcccccccccgggagaaagacagcaaagaaaaggagaagaaaggaaaaaaacaaccccgggc

SEQ ID NO: 130742 - RNA, 80 nt, Homo sapiens
cggaccccgcccaggaagcccccgaagcccccgccgccgcgagaagaggacgcgggagaaggagaagaagaaaaagaaca

SEQ ID NO: 130743 - RNA, 67 nt, Homo sapiens
gacgcacacagcaagacgacaggaagccaacaagcgacagggaccccaccacgccgggacaccaccc

SEQ ID NO: 130744 - RNA, 83 nt, Homo sapiens
agcggcaggcagagaaccgacagcaggaggacggccacgggaggcccagaagggcggacagggacccaagcacgcaagccaga

SEQ ID NO: 130745 - RNA, 69 nt, Homo sapiens
cacccacaggaccccaagcagaaggaggcagggaaaaaccaggacaaaaagcaaaggacggcgcaagga

SEQ ID NO: 130746 - RNA, 75 nt, Homo sapiens
ccaggcgggaggaagaggcagaggacccaccgccagccacccacgccagcagaggcgaaggcaagggaccggcca

SEQ ID NO: 130747 - RNA, 63 nt, Homo sapiens
ggcaagagccaacccaaaaccaaaacagaccggccccccaaacacccgagcccagccccgccc

SEQ ID NO: 130748 - RNA, 53 nt, Homo sapiens
ccagcaggggggaaagagcggcaagcaagagacggggcgacggggagaggcag

SEQ ID NO: 130749 - RNA, 79 nt, Homo sapiens
gaggaggaggggcggagggagacgcccgaggacagggagggcgcgcagcggcgcggaagaggggccggaggacgcgggg

SEQ ID NO: 130750 - RNA, 63 nt, Homo sapiens
cccaaggaggcgacgaaggacacgcaacccccagcacaggaagcagcaaaagaccaaaccagc

SEQ ID NO: 130751 - RNA, 57 nt, Homo sapiens
gggcagggcagagcacccgacgcacacaggagaccggaaaccgagagaaacgaagac

SEQ ID NO: 130752 - RNA, 110 nt, Homo sapiens
gaagaggaagccggcagaccgcaacacccacagcaggaggccgggcagaacgaaagaccccacccaacccccgagaagaaacgccaagcaagaagggcaaaacaggcccc

SEQ ID NO: 130753 - RNA, 69 nt, Homo sapiens
gaaggaccaagaaccaggcccggagagacaaggagaggaacaaaggcggaacagggaagcgaccaggag

SEQ ID NO: 130754 - RNA, 84 nt, Homo sapiens
aaaacagacgcccagccaaacaaaaaggaaaggagacaagcagagacgaaccaggcaaaggccagcagggagcgcggagagaaa

SEQ ID NO: 130755 - RNA, 61 nt, Homo sapiens
gcggacgcaggagcccccccggcagcaacccccacacccagcaccagagggcccagaggag

SEQ ID NO: 130756 - RNA, 82 nt, Homo sapiens
ggaggggacaggcacaaagaagcccaccccgccgggcgccaggcagccggggcggacaaacccggcccacgcgccccacgcc

SEQ ID NO: 130757 - RNA, 65 nt, Homo sapiens
cccacacccccccccccgacaggcaagaagcagagcgcagaggggagagcccagagacaagcaaa

SEQ ID NO: 130758 - RNA, 77 nt, Homo sapiens
gagggccgaggcggcggcggcggcggggacgcccggcagaaacaggaacacgaaagaggaaaaacgcacaagaaacc

SEQ ID NO: 130759 - RNA, 36 nt, Homo sapiens
cgccaaggaaacagacagaagaggagcacggcggcg

SEQ ID NO: 130760 - RNA, 88 nt, Homo sapiens
aaagaaggggggagcccccgagggacaaaaagaggcgaccgcacggcaggagaccaaggaaaggcccgagcgcggcaagggaggagca

SEQ ID NO: 130761 - RNA, 78 nt, Homo sapiens
acgcgccccaccgccggagagaccagcgcaaaggaaccggagggacggagggcaaccaggaagaaggggacaccaaca

SEQ ID NO: 130762 - RNA, 76 nt, Homo sapiens
aagaggcaaagagaaaaacacacccagacggagaaccgcaggaaagaacaaggaccaacaccaaggaccagccacc

SEQ ID NO: 130763 - RNA, 55 nt, Homo sapiens
gcacgagcgccacaaccccaggaggccccgggggccgcggcccggccccaccagg

SEQ ID NO: 130764 - RNA, 57 nt, Homo sapiens
gacaggacacacccgcagcaaggaagcgaagagggaacaccccaccgacaaaaacga

SEQ ID NO: 130765 - RNA, 77 nt, Homo sapiens
cgcgggccgcgggccgccgcaggagaaggccggaacaacgaaggggaggcaccaaggagaaccgcggacacaaacac

SEQ ID NO: 130766 - RNA, 71 nt, Homo sapiens
gaccgcagcagagaaagccaccgacccagcacaagagggaacagaaaagagagggacagacacaacaaccc

SEQ ID NO: 130767 - RNA, 47 nt, Homo sapiens
aaagggccaaagaagggagagagcaaacgaaaccggcagcagccgga

SEQ ID NO: 130768 - RNA, 55 nt, Homo sapiens
gccaccacagaaacaaaagcaacaaagaggagacaagggcagagccaagcgccgc

SEQ ID NO: 130769 - RNA, 78 nt, Homo sapiens
ggcagagacgggaggaagaagcccagggacccccaacaccacacacaggccccacaacgcggccacaggaagcgaaca

SEQ ID NO: 130770 - RNA, 83 nt, Homo sapiens
agacagcgggccggagcagccgcgggcgcccgaggggccgagcgagaaggccaagagaggccaacagaggaacaaggcccgca

SEQ ID NO: 130771 - RNA, 77 nt, Homo sapiens
cagagcagggcaaggagccaggaaggaggaggaaaaaaggagcaaaaggaacacaaaagcaccgggaggaaagagag

SEQ ID NO: 130772 - RNA, 72 nt, Homo sapiens
agcgacacaaacaagcagaaagccagaaaagacgcgcccccgccgcacggaaaaaccagagaggacaaccaa

SEQ ID NO: 130773 - RNA, 70 nt, Homo sapiens
ccacccagcggggagcacggcgagcagccaggccaggagaggaacacacccgcagaacggagaaaaggga

SEQ ID NO: 130774 - RNA, 87 nt, Homo sapiens
gggagagcgaggccgagcccgcgcaggaaacgaaggcagcaaaaagaagagcagaaacgaaggaaaaggcgggaagaggcaggaaaa

SEQ ID NO: 130775 - RNA, 78 nt, Homo sapiens
aaaaagaaagaaaacacaggcggggacggcccgagaaggagaagcggcgaggaaggaagccgacgcccagcagcgcac

SEQ ID NO: 130776 - RNA, 74 nt, Homo sapiens
cccacccggaggcccgccggccccggcaggagaccaccgcccacccggcccggcagagcccccccgacacaccc

SEQ ID NO: 130777 - RNA, 78 nt, Homo sapiens
cggggcccagcagacagccgaggggagcgcggggcccggcagaaagcgggaggccaccgccccaccagcaggcaacgc

SEQ ID NO: 130778 - RNA, 56 nt, Homo sapiens
cgacagccgcgacggcgagcccgggccgcgcccgagaccaagacacccaggagaaa

SEQ ID NO: 130779 - RNA, 74 nt, Homo sapiens
cggcccgcagggacaccgcacggacccgggccggacacggcagcggcccccgggacaaaacccagagaaccacg

SEQ ID NO: 130780 - RNA, 86 nt, Homo sapiens
gaaaaggaagcggaaggcaaaccagccagcacgggggcccagccagccagcagcgaggggggacggaggcggcacggggccagagc

SEQ ID NO: 130781 - RNA, 82 nt, Homo sapiens
ccccggcgccgccgcagcggccgcgcgcagcacgcgccgccggaggagcaacgaagcacagaaagaagcgaagcagacacca

SEQ ID NO: 130782 - RNA, 58 nt, Homo sapiens
gagaaaagaaaaccggagcccggagcaaaagaggcggcagcagccaccacgaccccag

SEQ ID NO: 130783 - RNA, 82 nt, Homo sapiens
gggcgccaccagccggcagcccggagcgcccgcgccagccgcgcacaacggggcaccgagccggcagccaaggcccacggag

SEQ ID NO: 130784 - RNA, 67 nt, Homo sapiens
gggagaagcagacgaaggacagggagccacagcacacggggacgcagccgcgggagggggcccgcca

SEQ ID NO: 130785 - RNA, 68 nt, Homo sapiens
cagcaagaggaggggcccggagagggggaagggcccaaagccagaagaggaagggaggagagaccccg

SEQ ID NO: 130786 - RNA, 78 nt, Homo sapiens
gcagacaaagacaggaagaaaaagagaaccaagcacccaccaagaccagaagcggaagcgaacagaccaggaacgaga

SEQ ID NO: 130787 - RNA, 74 nt, Homo sapiens
acaaggccagccacggaaggagacacccgaacacaaaagaaacggcaagagagcaggaaccagaaagaaaagcc

SEQ ID NO: 130788 - RNA, 68 nt, Homo sapiens
acagggaccacaagagcaggaagcaacacccggccccggggccagcagggaagcgcgagaaccccgga

SEQ ID NO: 130789 - RNA, 78 nt, Homo sapiens
gacaagaaaccgggaggaaagaagacaagagagaacgcaaacaggaagcgaggaaaccggggaacagaccggaggaac

SEQ ID NO: 130790 - RNA, 73 nt, Homo sapiens
aaggccgcaggcagcccggggaggagcggagaggagaaaaccggaagagaaaggccgggaagcaggaaagaaa

SEQ ID NO: 130791 - RNA, 82 nt, Homo sapiens
ccaaacccgggagagcaaggaaagaccacagcaagaccacgcccccagccgggggaccaggccgaacgacccggacacaaag

SEQ ID NO: 130792 - RNA, 75 nt, Homo sapiens
aaaacagacagaacagaacccaaaagccgacaaccccagaaacaggagcacaggagaagagccccgcagccaacc

SEQ ID NO: 130793 - RNA, 56 nt, Homo sapiens
cccaaccgccacggaagggccgaaacacaagcaaggaacacaaagaagaaagaaag

SEQ ID NO: 130794 - RNA, 84 nt, Homo sapiens
aggccccagacaaggaaggggagccagggggacacgcaagaaacgcccccgagagagaaggccgccaaggagccagcaagcgcc

SEQ ID NO: 130795 - RNA, 48 nt, Homo sapiens
gacaagaggggaaaaccgaccaaccaacgaggagcagaaaagcgaggc

SEQ ID NO: 130796 - RNA, 78 nt, Homo sapiens
cccacagaacacgaccgaaccagcagggaaccaaagaaaggcaacgaaagccaaccaggggacaagaggcaagcgcgg

SEQ ID NO: 130797 - RNA, 81 nt, Homo sapiens
cggccgcgccggggccgcgcggccccgcggagccagccagacggaaggcacgagggccgacacgccccccaacgcagacac

SEQ ID NO: 130798 - RNA, 125 nt, Homo sapiens
agagaggcaccgggacggaccgagaccggaccgagagcggaccgagagcgcgaaacgcacgagaagaggaggaaggaccgagcgcaggaaccaggccagcgcccagcaagcggaaggccacgggc

SEQ ID NO: 130799 - RNA, 74 nt, Homo sapiens
ccaagaccgaaaacagaaggaaagaaggaacggagaaggcaaagaagagcagcaaggcgaaccggcgcggagcg

SEQ ID NO: 130800 - RNA, 72 nt, Homo sapiens
cggcaggacaaggagcaagagggggccccgcccggccgcgccgcgaccgaaggggccagacccacccggaag

SEQ ID NO: 130801 - RNA, 75 nt, Homo sapiens
cccgggaagccagcgcagccaaagcagcagaagacagcccaagggcccagcaaccaagggaggaaggcaggaaga

SEQ ID NO: 130802 - RNA, 64 nt, Homo sapiens
cgaggaggaacgcgcaaggcaaagcaccgagaaggacaagggcaggacacgaaggagagcagag

SEQ ID NO: 130803 - RNA, 75 nt, Homo sapiens
cgccagagagcagcacaagcacccagcagcccagcccagacccaagagcgcaaacacggccacagcaggcccggc

SEQ ID NO: 130804 - RNA, 62 nt, Homo sapiens
cgcgcccgcggagagcccaaacaccaccaccaagagacagagaagacggaagaggcaaacca

SEQ ID NO: 130805 - RNA, 52 nt, Homo sapiens
cagcaggaaggccaccagaccacgggcagggaagaagcagccgagccaccag

SEQ ID NO: 130806 - RNA, 79 nt, Homo sapiens
ccggaaaccagaacgggcagccagcaagcccaaacccaaaggggagaaaaagcggggaaggggggcaaaaaaaagaagc

SEQ ID NO: 130807 - RNA, 76 nt, Homo sapiens
gaccacgggcccagggagaggacagaaagcagcaacacgcccagggagcagagaggacagagcccccaggaccccc

SEQ ID NO: 130808 - RNA, 54 nt, Homo sapiens
gcagaacacaccagaagaaaacccagcaagggcacacggcacggacagggcggg

SEQ ID NO: 130809 - RNA, 76 nt, Homo sapiens
cccaggcgaacgcccagaacgccaacggcaagaaagggaaggccgcaaacagacacgcggaaaagccgggagcaag

SEQ ID NO: 130810 - RNA, 52 nt, Homo sapiens
agaggagcggggcacgcggcaacaccgggccgcaaggccaggcgcgcagagg

SEQ ID NO: 130811 - RNA, 72 nt, Homo sapiens
gacgaacaacacaggaccagaacacagagccagagaaaaaaaacacagaaaggcccaagaaaccacagccag

SEQ ID NO: 130812 - RNA, 73 nt, Homo sapiens
cccccagcgccagaccgaccccgaagcccggagaaccgcgcagcaggaaaccccgggaacagagacgcaggca

SEQ ID NO: 130813 - RNA, 68 nt, Homo sapiens
gacaaagagacccgaaggcacaggccaccggaaagaccacccaagaaaccagcgccaccaaagaagca

SEQ ID NO: 130814 - RNA, 75 nt, Homo sapiens
ccgggggaaaagaacgagagaacgaccgaagaaaagcaacaaaccaacaacccaagaacccgaacggcggagggg

SEQ ID NO: 130815 - RNA, 75 nt, Homo sapiens
gaacccggaggaggcgaccgcggcgcagcgacccccgccaggcaaaaggaagaaggaaaagccaccagaccagcc

SEQ ID NO: 130816 - RNA, 75 nt, Homo sapiens
gacgcacgagcgcaacccgacgcagcggaaagaccccacagacaaccacagacaggccaggcgaaagaggggacg

SEQ ID NO: 130817 - RNA, 79 nt, Homo sapiens
cgacgagaccagcacggggaccgaagcgccgggagcccggcgaaaaacagccaagagaaaggagggcaaacagcaacga

SEQ ID NO: 130818 - RNA, 94 nt, Homo sapiens
agcgggacgagggggagggcgcaggcacccggcgcaaaaggggcaggcccaaaggaaagccacaaagaacacgagagacaggaagccgggcagg

SEQ ID NO: 130819 - RNA, 82 nt, Homo sapiens
gaccccggcgcggaccggcaccaacaaaacaccgaggagaacacgagacccgcacaaaaccccgccccccaggccacacagg

SEQ ID NO: 130820 - RNA, 84 nt, Homo sapiens
cgacgccgagggcgggggagagcgcgccgcgccccggaccgggccgcgcacgccgcccagaccccccccgagagaggggcgccc

SEQ ID NO: 130821 - RNA, 85 nt, Homo sapiens
ggagcagagccgagacagacggagagcagcaaagggccggaaggaaagaagaagaggcccgcaagggacgcgcgaaccggagacc

SEQ ID NO: 130822 - RNA, 121 nt, Homo sapiens
cgcaacagaccacgcgccgcgacggccggccgcgccaccgcaccgccaccggcccgacccagagggggaagacagagaagaccacacaaccgaaggggccgggcaggacggcccggggcag

SEQ ID NO: 130823 - RNA, 57 nt, Homo sapiens
gaaaacgacgaacagaacgaacagaaagagaagcgaaagagccgcagacgcacagca

SEQ ID NO: 130824 - RNA, 66 nt, Homo sapiens
gaacgggaggggacgggcggcccagcgggcgagacggaggagacagcgaccgcccggggggacgag

SEQ ID NO: 130825 - RNA, 72 nt, Homo sapiens
acgaacacgccggagccgccaggaaacagggacccagcagggcgggaaacagggacccgagggagaaaaaaa

SEQ ID NO: 130826 - RNA, 69 nt, Homo sapiens
ccgacagccgggaacccccaggggaggcacccacgaagacgcgcggcaaaaccaggaagaagacaggag

SEQ ID NO: 130827 - RNA, 83 nt, Homo sapiens
cggcccgcccccgcagcagcgccagaagacgaccccgacgcaggccaggagccgcggacagaagccgagcacggccgagacaa

SEQ ID NO: 130828 - RNA, 64 nt, Homo sapiens
cacgggaaaggcaaaacacaacaagagggagccaggccagaaaacgggccacaccaccgcaccc

SEQ ID NO: 130829 - RNA, 58 nt, Homo sapiens
aaaaaagcgacaaggcgacagagcgagccagacacaaggcgccaccagcaaaaccaga

SEQ ID NO: 130830 - RNA, 69 nt, Homo sapiens
aggaacccagaagaaaaagagggcacaaaaagcacacagcaagcacccgagcgggaaggcagccaaagg

SEQ ID NO: 130831 - RNA, 75 nt, Homo sapiens
ccaggccgccccaccagccccgcgcccggcccgcggcccccagggaaccaagaccaggacaaagaagacccggag

SEQ ID NO: 130832 - RNA, 77 nt, Homo sapiens
cacgcaagcgacagggaggcaacaaagaagggcagggaccaagaaaggcccagggaccaaagcccggacaaggcccg

SEQ ID NO: 130833 - RNA, 65 nt, Homo sapiens
ccagccccaccacggccaaaacacaaacaagaccgcagcccgaaaccgggccgaagacgcacacg

SEQ ID NO: 130834 - RNA, 70 nt, Homo sapiens
aaaaaccaccccgcacgcaagacaccaagggacgcagcggaagaaaagaaagaccgccccccaaaagccg

SEQ ID NO: 130835 - RNA, 84 nt, Homo sapiens
cgggagcaagacaaagccacaaggagagcgcaccgggcccggcggcgcgaccacaagcgagcaggaagcagcagcgcaggccca

SEQ ID NO: 130836 - RNA, 105 nt, Homo sapiens
gcaccagagcaagacagcggaagaagacccagggaaacccccagaagacgaccccgacgcaggccaggagccgcggacagaagccgagcacggccgagacaaaag

SEQ ID NO: 130837 - RNA, 80 nt, Homo sapiens
cgcccccaccaccccaccgagcaacgcccccccacacacagaagcgagcgacgcgcccacggaggaggcgggggccccac

SEQ ID NO: 130838 - RNA, 66 nt, Homo sapiens
ggaagagcacaagcgaaggagaagagaagaggcaaaaaccaggaaacacaaagaagacaccagaag

SEQ ID NO: 130839 - RNA, 80 nt, Homo sapiens
ccgagagcggaccgagagcgcgaaacgcacgagaaggaaagaaaacaacgcaaaaaccaaagcacagagaggaaacaaag

SEQ ID NO: 130840 - RNA, 79 nt, Homo sapiens
caaaggaggaacacgcagagaaggggccgagcagcgccgcaagaggacaccggagacacaggaaagaaagaccgacaga

SEQ ID NO: 130841 - RNA, 78 nt, Homo sapiens
ggacccacaaccaagcagcagaggagcacgaggacggggagcaagaaagaaaaagaaccccaggaacaaaaacaaaga

SEQ ID NO: 130842 - RNA, 39 nt, Homo sapiens
aaccacacacagcagcgccggcccggcccggcgaggacc

SEQ ID NO: 130843 - RNA, 71 nt, Homo sapiens
agccggcggagaggaccggagcggaaaacccgaagacaaggcacgaggcgcggcgaccaccacagcagagc

SEQ ID NO: 130844 - RNA, 56 nt, Homo sapiens
cgcgaggcccgcgcccccgaccgaggccggcgaggacgagcgcaaggggcagcgca

SEQ ID NO: 130845 - RNA, 89 nt, Homo sapiens
gagagcggcggggcggcggcaccaaggcccccaagccccccggcgacgacgcccgaggcaagaacgccccggcaaggacggaggcaggc

SEQ ID NO: 130846 - RNA, 75 nt, Homo sapiens
ccaagacggcaaagccccccagaagaccaggccagcgcgggccgccagcggcggccaccacagcgccgcagccca

SEQ ID NO: 130847 - RNA, 92 nt, Homo sapiens
cggagcaggcggcgcgacagcgagagccgagcgggcggcgcgggcaggccacgggaagccacacgcccaagaccgcgaccgcacaagcagcc

SEQ ID NO: 130848 - RNA, 66 nt, Homo sapiens
gagcgccaagacgagcaccgaacccagaccagacgcgaacccaagggacacacccggacccgcccc

SEQ ID NO: 130849 - RNA, 82 nt, Homo sapiens
ccgggccgcgcacgggccgcgcggggaaggcggcggccaagagcgcccgcacgaggcaaaagcagaccggaaaacccaccgg

SEQ ID NO: 130850 - RNA, 59 nt, Homo sapiens
ggaaggcaacgggcccacggaggccggccccgaagggagaggaacgagagcccgacccc

SEQ ID NO: 130851 - RNA, 73 nt, Homo sapiens
cacgggacaacccccacagaagggagacagggagaccaccaaaaaccggccccagacgacgccgccgacagac

SEQ ID NO: 130852 - RNA, 68 nt, Homo sapiens
gggcggaggcggaagcccgaccaggcaagacagccgccacccaacgcaagggaggcagaaaggccccg

SEQ ID NO: 130853 - RNA, 62 nt, Homo sapiens
cgccccgccgcggcggggacgcagagaagacggcccagcagagcacccaaccagcgggaaca

SEQ ID NO: 130854 - RNA, 84 nt, Homo sapiens
ggaaaagggagcgggcgagccgggcaagagaagccgagccaggccgcggagagccgcccgcgcccaccgccgcgacccgggccc

SEQ ID NO: 130855 - RNA, 69 nt, Homo sapiens
cagacgcagggcgcccccggacaaaaggaccagcacaggaccacacaagaaacgaaaacagggggagac

SEQ ID NO: 130856 - RNA, 58 nt, Homo sapiens
gacaaagcaacagggaagaccaaaagcgggggaccaagaaaggcccagggaccaaagc

SEQ ID NO: 130857 - RNA, 83 nt, Homo sapiens
ggagggcagaaagaagaacaggagcagacccggagacacacggccgagcaggaaccggaggagaggaccagccgcagagcgaa

SEQ ID NO: 130858 - RNA, 51 nt, Homo sapiens
gcgcccaaacacgcccaagccgacgcggcgcagcaccgcccgcggccaagg

SEQ ID NO: 130859 - RNA, 86 nt, Homo sapiens
gcgccgccgccagggcgcagggccgggccgccgcgcaccgcagcgccggggcacgacacaaaaacagagcgcagagaaacgaacgg

SEQ ID NO: 130860 - RNA, 76 nt, Homo sapiens
ggacgaaggggaacgggaaaggaacaacgggcaagaaaggaacggcaagaacccgaccacaggacagggaccaagc

SEQ ID NO: 130861 - RNA, 74 nt, Homo sapiens
cgagggaagggaggcggcggccccaaaaggccaaaagggaagcggggaccaaccaacccaccagcagagacacc

SEQ ID NO: 130862 - RNA, 74 nt, Homo sapiens
gcacaggggggcggaaaggccaaccacagcacccgggcagcagccggggccggcaggccccgcgcccaccccaa

SEQ ID NO: 130863 - RNA, 69 nt, Homo sapiens
ccgagccgccccgaccggaaagaccgcgagaaaaggccagggcccacgcaagccggccagaaggaggac

SEQ ID NO: 130864 - RNA, 85 nt, Homo sapiens
cgcgggccgggacgccgccgccgcggccgagccagacagacacagcacagcagccacgaagagcaaagcaagccgaaaaaccgaa

SEQ ID NO: 130865 - RNA, 65 nt, Homo sapiens
gaacggcaagaagaagagagaccacgacggccagcacagggaggcaccgcgcggaaaccccaaac

SEQ ID NO: 130866 - RNA, 73 nt, Homo sapiens
ccgacaagccaccggcggaaagcgcaggaggagacagcaaggaagaagaaaagagagccaaggcggcaaaacc

SEQ ID NO: 130867 - RNA, 61 nt, Homo sapiens
cgcgggaaacgggcgaagcgacgagccgcgaggagggaacagggaaggcaggccgaaaacg

SEQ ID NO: 130868 - RNA, 83 nt, Homo sapiens
gaggaaaccgcccccacccgccgccaccagcaagagaaaccccaaacacccgaggccgggaggaaagggggacccacaaggcc

SEQ ID NO: 130869 - RNA, 82 nt, Homo sapiens
gaccccagcgggcccggggaggcaccgacgaggagccgcccccccaccgcggaagagcaagggaagcacaacacccagccgg

SEQ ID NO: 130870 - RNA, 85 nt, Homo sapiens
ggacagaagaagaggaggaggaggaggaagaggaggaagaaaaacgaggacaagacgagcccgaaggagggacccagacaccccc

SEQ ID NO: 130871 - RNA, 77 nt, Homo sapiens
gcccgagacgcgccagcacaccccgaccgcgccagaccgcacagggggaagaagagcgcaccgaaggcacaagggaa

SEQ ID NO: 130872 - RNA, 69 nt, Homo sapiens
aagaaacccagagaacgcccccgacaccacaagaaaagagcacgccacgcgggaaaacagagccagaaa

SEQ ID NO: 130873 - RNA, 71 nt, Homo sapiens
cccggggcagcacggaaccaaaaccgccagccagaggcgcagaggacaggaggcgaagcacaagggaccca

SEQ ID NO: 130874 - RNA, 86 nt, Homo sapiens
gcgcgcccggccaagaggcaaaggggaggacgcagcaaaccaccagaagagacaagcgggcgacacgagagggaagccccagagcg

SEQ ID NO: 130875 - RNA, 69 nt, Homo sapiens
cgacaaggggcccgaacagagggggacaaaggaaaaagaggaggaaaacagcagggacgaacaaaagcg

SEQ ID NO: 130876 - RNA, 55 nt, Homo sapiens
cagcagccgcgcccaggccgcagcagcaggcgccggcgaaagcaacgaagggacg

SEQ ID NO: 130877 - RNA, 71 nt, Homo sapiens
gcaggcgcccagcgcgaagggaccaggagccagcaccgccgaccgccagcgccagaagccagagagggcgg

SEQ ID NO: 130878 - RNA, 115 nt, Homo sapiens
cgagccgccggcgaccccagccagcgcagcgacggggcgcgccggcccaggcgcacacggaagggaggaaaagcgggcgcagcgcgcggacagcgaccgcgaggaaccgcagagg

SEQ ID NO: 130879 - RNA, 87 nt, Homo sapiens
cggggcgaggcgccgccaggcccgcggacccgaccaagaggcagaagacggggggcgcgagaacagacccagcccgaggaaggagaa

SEQ ID NO: 130880 - RNA, 54 nt, Homo sapiens
gcgcagcgaagcacccacagcggggacgggaaagagggcagaagcagcaagaaa

SEQ ID NO: 130881 - RNA, 80 nt, Homo sapiens
aggacccgcccacaaaaaagcaggaccgacccaaccgaagaaagccaaaagaaaaaaaacaagaggaaaaggaaaagaac

SEQ ID NO: 130882 - RNA, 39 nt, Homo sapiens
cccaccgagccaagcccacggcagacacagcaggccaac

SEQ ID NO: 130883 - RNA, 71 nt, Homo sapiens
ggccaccgccacgggccgagacacgcagcggcggccagggaccaagcagcagaggaaccgcgggccccgag

SEQ ID NO: 130884 - RNA, 75 nt, Homo sapiens
gcgccggcgggcgcgcccgcccgcccccgcccgcagcccgggccaccccaggagggaagaacaccaggagaaaca

SEQ ID NO: 130885 - RNA, 80 nt, Homo sapiens
cgccaggaggaccgcaggaggacgcagacggaacgcagaggggagaacgcagaagcgcaacgacagggcaggaaaggaca

SEQ ID NO: 130886 - RNA, 37 nt, Homo sapiens
acagggaaggcacacagcagaaaagcaccgagcagaa

SEQ ID NO: 130887 - RNA, 126 nt, Homo sapiens
ggcggggccggcgggagcgcgaacgagcgacggcggaacccggggccgggacgcagcccggcggcagcagccagcggaaacggagggaaagaagaagaggagggacacccgagaggcagcgccccc

SEQ ID NO: 130888 - RNA, 50 nt, Homo sapiens
accccccgcacacagcaagcacaacagcggaaacgagcaagagaacggaa

SEQ ID NO: 130889 - RNA, 74 nt, Homo sapiens
cgccggcagaccaccggggcaagacacggggcacagaccgagagaagcgacaggaggggagcacaggaaaacgg

SEQ ID NO: 130890 - RNA, 47 nt, Homo sapiens
aaaaccaaggggcaaaccaggggacaaaccgagacaagggcaacacg

SEQ ID NO: 130891 - RNA, 77 nt, Homo sapiens
caccccagcccggcacccgcgggaggccgcgacgcaacccggggagacgccaccgaaaaagccaaggcgaagccaca

SEQ ID NO: 130892 - RNA, 72 nt, Homo sapiens
aggaaacaagaaacaccaacacaaaaaaaaccaacagccccccaggaacgagaaaaagggggagaaagaaca

SEQ ID NO: 130893 - RNA, 84 nt, Homo sapiens
aagcaggcaaccggaggcagcaacagaacacggcccagaaagaagcagacagcgacggcaggccggagagagacagagccgaca

SEQ ID NO: 130894 - RNA, 72 nt, Homo sapiens
agaaggacggaggaggacaaaagggagagccaaacaggaaaggacaggagagacaacggaggcaagaaagac

SEQ ID NO: 130895 - RNA, 75 nt, Homo sapiens
cacggcggaaacgacgcaggagaccaaaccaggcaagaacgcagaacccagaacaggccaagcgagacaagggcg

SEQ ID NO: 130896 - RNA, 64 nt, Homo sapiens
gcagcccaacagaaggaaacacccaaggaaccaaagcaggccagcagaaaaccccgcgcacaga

SEQ ID NO: 130897 - RNA, 52 nt, Homo sapiens
gccccaccgggagacccacacggagccccgccaaaggcgaccgaaccccggc

SEQ ID NO: 130898 - RNA, 84 nt, Homo sapiens
cccacgagggcagccggcgggaggaacgccacgcagcgccggaaacgccacgagacgacccaggcgcgccccaagccgggccag

SEQ ID NO: 130899 - RNA, 72 nt, Homo sapiens
ccacacccacagaacaccggcaaggaccagcaggacagccagcccagagaggaagagaggagcgcgggccca

SEQ ID NO: 130900 - RNA, 79 nt, Homo sapiens
ccaaccagacagccaggaagacccccgagaagacaaaaaaacaggaacgcacagggggcacccgaggaggaagagggca

SEQ ID NO: 130901 - RNA, 64 nt, Homo sapiens
ggggcccgaaaaacggagacggagagggaaagacagggccaaggcccgacaacaagccaaaacg

SEQ ID NO: 130902 - RNA, 78 nt, Homo sapiens
agggcgagaccggagagccgcaggacggcgcggcagagccccgacgccacagaacggccccggggcagaagagcggcg

SEQ ID NO: 130903 - RNA, 81 nt, Homo sapiens
cgaaaacagacccggagaaagacggccagcaaggggaaccacaggaacgggcagccaccggaagagaaaaccaagaacgac

SEQ ID NO: 130904 - RNA, 47 nt, Homo sapiens
gagcgaacgagacagaacaggaaaaaggagaggagggggcggcggaa

SEQ ID NO: 130905 - RNA, 53 nt, Homo sapiens
cccgcgggggacgcccagaaacagacaaggaggacccgcccggagacagagga

SEQ ID NO: 130906 - RNA, 57 nt, Homo sapiens
gagaggaggagccgcgggccggccagaaagcagcccaggccaaccgggcgcgggggc

SEQ ID NO: 130907 - RNA, 69 nt, Homo sapiens
gggaaacccggggcaaggacaacaggccgagggacaagagaaaaaaagggcgggcgaacaaaaagagca

SEQ ID NO: 130908 - RNA, 70 nt, Homo sapiens
aacaaccaacccgaccgcccccagaggccgggccgcacccccgagcgcaacccagcagcaaagcccagaa

SEQ ID NO: 130909 - RNA, 81 nt, Homo sapiens
gggagcggcgggggcgccgcgggcagggaaggaagaaggccagcgaagggaaacaaaacacccagaaggaaaccaggcggg

SEQ ID NO: 130910 - RNA, 80 nt, Homo sapiens
aaaagaacaacaaccaaggacaccgagaagacggcggcgagacaggaagagcccgaaccaaagaacccgagaacaaggaa

SEQ ID NO: 130911 - RNA, 78 nt, Homo sapiens
aagaacacgggccacaggagcagcccgacggccaggaggcgaagagacgaggaagcccaggagcccgaacacaaaaag

SEQ ID NO: 130912 - RNA, 76 nt, Homo sapiens
ggaacccggggccagagaggaggaagccaaacagccaaacgccaaggaagggaagggccagcgacaagaaggcaag

SEQ ID NO: 130913 - RNA, 53 nt, Homo sapiens
agcggcacccaagagaaaaggagaacggagacaggagaccggaaaccgagaga

SEQ ID NO: 130914 - RNA, 73 nt, Homo sapiens
gaggccccccggagcgccgcgaccggcacgcagggcgcagaccaacccaaaaagagaccaagacagcaaagaa

SEQ ID NO: 130915 - RNA, 82 nt, Homo sapiens
aaaaagcaccccgaggaggaagacgaacgaaacacaggcagccggcacagccacaccgagaagaccggcccaagaaccccac

SEQ ID NO: 130916 - RNA, 78 nt, Homo sapiens
cgacaggcggaggacaagacaaccagaggcaccgcacacccagacggagaaacgggagacaagaaccaggcccaggag

SEQ ID NO: 130917 - RNA, 83 nt, Homo sapiens
gggacgccagagccggaacggcccacaccagaagccacagcagcaagccagccccggggccccacggaggagcggcagcagca

SEQ ID NO: 130918 - RNA, 56 nt, Homo sapiens
cagggcgcccccgaaagcaccgggaggaaagagagccacacgaagaacacggccaa

SEQ ID NO: 130919 - RNA, 82 nt, Homo sapiens
gaggagaagcgcagagcagcgaagcaagcgaggagccagaaacagagagaaaccgaaggagagccagggaagggcaaccaaa

SEQ ID NO: 130920 - RNA, 75 nt, Homo sapiens
aggaggggaccacagggaaaggacgccagaacgaaacgaggaggaccaaaaagccaaggacaaagcgagcggaac

SEQ ID NO: 130921 - RNA, 50 nt, Homo sapiens
ggacgacccagccggggggcacagccgggaaaacaacggagcacgcaaag

SEQ ID NO: 130922 - RNA, 45 nt, Homo sapiens
cgaccagaaggagccaccaggccgcggagcggaggcagacacaca

SEQ ID NO: 130923 - RNA, 52 nt, Homo sapiens
cccaaggacggacagccagccaaacacacgccagcagggaaaacagaaccag

SEQ ID NO: 130924 - RNA, 69 nt, Homo sapiens
gaacccgaagcgggaaaggggggcgacgcccccaggaagacagccaggacggcacgccggacacacaga

SEQ ID NO: 130925 - RNA, 89 nt, Homo sapiens
caaccgcggccccgaggccaaggcgccaggcaggacgacagcagcagcagcgcgccccagagaccgagggccgaggggccacggcgggg

SEQ ID NO: 130926 - RNA, 83 nt, Homo sapiens
ggagcggaagggggaaagggccggaaaacacacgccccgaaaccgggcaagccgagagggcggcaccccaccgcccagccaca

SEQ ID NO: 130927 - RNA, 55 nt, Homo sapiens
gaacggagaaagagacagaagccggcccaacaaagaaaggacagcaagaagacag

SEQ ID NO: 130928 - RNA, 70 nt, Homo sapiens
cacacagggaggaaggagcaacccgaaaaccagccagacacaaacaggggccccgggaggaaaggccgaa

SEQ ID NO: 130929 - RNA, 76 nt, Homo sapiens
gcggagaacaccagagcaaagccaccccccgaggaaaaaggacgcaacccaccacgaagcggagagcaggaagggg

SEQ ID NO: 130930 - RNA, 80 nt, Homo sapiens
ccgggggggagcaccacgacacgggacgcacggggaccggagaagagagcaggcagccaggccaccgagcggcagcacag

SEQ ID NO: 130931 - RNA, 84 nt, Homo sapiens
aaaaacggcaacggaacagaaggcacagaagaggaaggaagagggcggagaacggaaaagcaccaggaagcagagaggaccgca

SEQ ID NO: 130932 - RNA, 55 nt, Homo sapiens
gacagcaaaaagacccaccaaggaagcagcggccacgccagagcagacacaagag

SEQ ID NO: 130933 - RNA, 59 nt, Homo sapiens
aggacacaaaagagaggcagaaaccacagaggaaaaggagcgaagcagcaggggacgag

SEQ ID NO: 130934 - RNA, 79 nt, Homo sapiens
gcgaagagacagacccaagaagagccaggacaaaaccaggcagaaccaacacgaacccaagcacaaacaagaaaacgag

SEQ ID NO: 130935 - RNA, 79 nt, Homo sapiens
gagagcgaccgaagcagaaagagaccagaaccaggcacccgcagaaagcggaagagaccacggcagagccgcaagaagc

SEQ ID NO: 130936 - RNA, 77 nt, Homo sapiens
gaggggaagaccaagagcacagggagaagagcaaccggacacagaaggggaaggaaaccccaagcagcagaggggca

SEQ ID NO: 130937 - RNA, 56 nt, Homo sapiens
aaaccagaagcccgggaaaggcgaccccacacaaaacccagcgccaggcccaggag

SEQ ID NO: 130938 - RNA, 52 nt, Homo sapiens
agggccaaagaagggagagagcagcgcggccacgaaacagcgaaacccaagc

SEQ ID NO: 130939 - RNA, 81 nt, Homo sapiens
aacaagaaggaaaaacgccacgcaccggagagagcacagcccaccgggggacggcacggcaggcggacgcccggggccccc

SEQ ID NO: 130940 - RNA, 72 nt, Homo sapiens
aacagcggccccgaagaccccaccacggacaaaccccccccagcaccaaaaggggcagcacagcccagaagc

SEQ ID NO: 130941 - RNA, 74 nt, Homo sapiens
ggaagagccagcacagacccgaggagcaaaggcagacaagaccagccacaaaaagcggacaaagcaagagagaa

SEQ ID NO: 130942 - RNA, 88 nt, Homo sapiens
caggcccggaaggccagggaggaccccagacaccggagacgggaaagggcgaagcggccaggcccgggcggacgcagagccagagcgc

SEQ ID NO: 130943 - RNA, 64 nt, Homo sapiens
cccgaggaagcacagacaaagcaccgaggcgcccagacgacgaacgagaaggaaaagaagagag

SEQ ID NO: 130944 - RNA, 77 nt, Homo sapiens
cccacacccaggcacagaccggccaggacccccgcccaggagaacacacgcagagcacagaccagcgcgcgaccgga

SEQ ID NO: 130945 - RNA, 66 nt, Homo sapiens
aaaagcaaggcggaccagaaaccccagagcgcgaccgcagaggggagaagcagaccgcaccaggcg

SEQ ID NO: 130946 - RNA, 81 nt, Homo sapiens
gcaccggccgccaccagggcacggacagcccagagcaagcacacggaggcccgggagccagaccgggagcccgccccagcc

SEQ ID NO: 130947 - RNA, 82 nt, Homo sapiens
gggccaaagaagggagagagggggaggaccaggaaagccaagcgagccagaaagaaggccaaccacccccaagggaagccag

SEQ ID NO: 130948 - RNA, 75 nt, Homo sapiens
cgccgcgccccggcgcccccccgaggcgggcaacacaacaaggcgcggacacccagacaagcgcgccaccggccc

SEQ ID NO: 130949 - RNA, 67 nt, Homo sapiens
ggaagggcagaaggagggccacaaagggcaaagagggagacgacgacggacagcgcagaccgcagcc

SEQ ID NO: 130950 - RNA, 76 nt, Homo sapiens
cacgggaaagaaacaacgcaggcggaggaccccagagcaccaccaccgagccaagacacgacagcagaagaaggaa

SEQ ID NO: 130951 - RNA, 70 nt, Homo sapiens
gccagcgaaaacgcccaggaggagcgccgaggacgcagcgagcacgccacccagcacggcgccaggcagc

SEQ ID NO: 130952 - RNA, 65 nt, Homo sapiens
gcacgagccacggccggcccaacggccaaaagggcgcccacccgccacaggaagagaccaaagag

SEQ ID NO: 130953 - RNA, 73 nt, Homo sapiens
cccaagccggaagaaccgcagccgagcggggccggccacaggccaccgggagggcagaggccagcacaaccac

SEQ ID NO: 130954 - RNA, 68 nt, Homo sapiens
ccgccgccccgccggcacagcgggaagagcggcccagcgagagccagccggaggacccagcagcaggc

SEQ ID NO: 130955 - RNA, 75 nt, Homo sapiens
cccacagcggaacacacaacacacaggggcacgggagcgcggacggaggcaagggagcgggaagcgagggaaggg

SEQ ID NO: 130956 - RNA, 82 nt, Homo sapiens
ccccggcccacaggggggggcaaacccgagagaacgggacgggaccccggccggggcaggccccgggaccgacaacaggccc

SEQ ID NO: 130957 - RNA, 75 nt, Homo sapiens
gagaccaggacgcaggacagcggacagacgggaaacgaaagaccggcgagaagcgcaaaaggcggaaacgacccc

SEQ ID NO: 130958 - RNA, 66 nt, Homo sapiens
caagaagggacacagacaaaaagacagggcaagagggagaagacagcgaccagggaggcaacaaca

SEQ ID NO: 130959 - RNA, 62 nt, Homo sapiens
ggaaccaggggcccagccaccagaggacagcaaggcggaggcagggcggaccggccacgcaa

SEQ ID NO: 130960 - RNA, 74 nt, Homo sapiens
aaccgccagcaccgggaagagaaagaaaagccgaaggcaccagacagagggagacaaaaccacacaggaaagga

SEQ ID NO: 130961 - RNA, 51 nt, Homo sapiens
acacggggacacaacgacaagggacggacaagggagggccaagaacccgga

SEQ ID NO: 130962 - RNA, 77 nt, Homo sapiens
gcggcggcggcggcgacagagcgagcgcggcgcggggccaccagggggcccagccagcacgacaccgaaaacgagaa

SEQ ID NO: 130963 - RNA, 75 nt, Homo sapiens
gcagcgcaacgagcggaggcccggagccacacccgaccccacaggccaacgggaagagacgcccaaagaaccgga

SEQ ID NO: 130964 - RNA, 89 nt, Homo sapiens
cgggagaccgcaggcagaaagcccacgaccgccccagaggcaccagggcagccgccgaggaagggaaagaccgagccaacccaagacag

SEQ ID NO: 130965 - RNA, 82 nt, Homo sapiens
ccgccgaccacacaaggcaggggggaggaaaccaggaagagagaaggccacgcccgaccccaagcaacaacggggcagggac

SEQ ID NO: 130966 - RNA, 67 nt, Homo sapiens
agaaagcaaaccagcaggcaccaaggaaagcagaagacaaaaaacgacagaagaaaaagaaaaacac

SEQ ID NO: 130967 - RNA, 71 nt, Homo sapiens
aagcccagaacagcacgagccccggaacaaggcacaaggagaggggaccaccaggaagagggacgcggacc

SEQ ID NO: 130968 - RNA, 67 nt, Homo sapiens
ggggccaaaaacagaggagaaaaggcggacagcagcgcaggcaaaaaacaggacaacaacgaagaaa

SEQ ID NO: 130969 - RNA, 35 nt, Homo sapiens
cagagcagcacaggagagggcgacagaagcagcaa

SEQ ID NO: 130970 - RNA, 71 nt, Homo sapiens
gaaggcaaagacaaagaagaagcgcagcaacaaaaaagcacacaaggaagacaggaggccagagcgaccaa

SEQ ID NO: 130971 - RNA, 76 nt, Homo sapiens
ggaagccagaacgagcccagcccaccgcagcgggacaccagcacaaggggccagcacgaaagcagccaggagaaga

SEQ ID NO: 130972 - RNA, 62 nt, Homo sapiens
ggaccaaagggaacaaacaaaacccaaagacagcgccgaacgcaggaagcagccggaaagac

SEQ ID NO: 130973 - RNA, 76 nt, Homo sapiens
cgaagacggaaacgaggaaaccgggaaagccaccgaaaagaaacgggggagaaggaggaacacaaagaggaccagc

SEQ ID NO: 130974 - RNA, 72 nt, Homo sapiens
aacagcgaacaaaaaagggacaggcaaggaccagaaggacccaaggacgaaggcaggggaaaggaccccagc

SEQ ID NO: 130975 - RNA, 74 nt, Homo sapiens
gaagcagaacgcaggaggagaacgacagagagccgccaggggcaaagagcaaacacgcggaggaaccacgccca

SEQ ID NO: 130976 - RNA, 59 nt, Homo sapiens
cccgagaaccgcaggagccagagacaaagacccgcaccgagaacacagccaagaagaaa

SEQ ID NO: 130977 - RNA, 86 nt, Homo sapiens
gccaggcgaagcacgagcagaccggcccgaccgcccacagacccaaacaaagccaagaaggacaagaaggggagaagaaaagaaac

SEQ ID NO: 130978 - RNA, 81 nt, Homo sapiens
acgcagccacgcgggcgagcggcggggagcggcgaagccgcgggcgaggggagcgacagaaaagcagcacaacccccggag

SEQ ID NO: 130979 - RNA, 76 nt, Homo sapiens
gaagaaacgaggccggaagaaaccacaaggacccagggacacaacaacaagacgagcgacgccgcaggggcgaacg

SEQ ID NO: 130980 - RNA, 80 nt, Homo sapiens
cgccggagcggggccgaggccgaaggcccgcggcgccccggcgcagaaagagaggcacaacgggcggacagccggaaaca

SEQ ID NO: 130981 - RNA, 79 nt, Homo sapiens
cgcggacgaggaaacgagagaagaggaagagagagagggcccaaaccaccagaaccgaagaagagaaaacaaagaaaga

SEQ ID NO: 130982 - RNA, 76 nt, Homo sapiens
cacggaagacgaggaaggcagaccaccgaaggggaggagaccagccgaccaacagcacccgaagcgggcccgaagc

SEQ ID NO: 130983 - RNA, 69 nt, Homo sapiens
gagaggcccagcagagacacaccgaggaacggacccggcaggcaccgcccggagccaacccaccgagca

SEQ ID NO: 130984 - RNA, 79 nt, Homo sapiens
ggccaggaccggcggaccggccgcccggcccagccaacaccgacggaacagcgaaagcaccccaaccgggaggcagcga

SEQ ID NO: 130985 - RNA, 77 nt, Homo sapiens
gaaacgaaaaaccgaggaaggacagacggccagccagcacaaaccaccgggagaggcgggaagaagaagggagccag

SEQ ID NO: 130986 - RNA, 87 nt, Homo sapiens
gcacagcccgcgcacggcggcagcccagcgggacccagggagaaacaggggggcgagaagagaaacaggccgcaagcgcaagagaaa

SEQ ID NO: 130987 - RNA, 54 nt, Homo sapiens
gagccaaagggccccgcgaacagaagaaacagggacacaaaagcaaccgagagg

SEQ ID NO: 130988 - RNA, 65 nt, Homo sapiens
aaaaagggaccaaggaccgccaacccaaagaagacaccagagcggaggcgccacaccggcaggcc

SEQ ID NO: 130989 - RNA, 83 nt, Homo sapiens
gcaagcgggacagagggaaagggaccaagcccaaagaggagaaagagccaaggggacacacaggaagggcccaaggaccacgc

SEQ ID NO: 130990 - RNA, 115 nt, Homo sapiens
gcgaggggagaccggccgccccgcccccaccgccgcagacccccaagcagcagcacacggcggcggcgaagccaagacacgggcccgccgagggcgggacccgcgcaggcgcagg

SEQ ID NO: 130991 - RNA, 70 nt, Homo sapiens
gcacagggaccgccagaaaccaaagacgagaggcccagagaacagcggggagcgcccgcaggcccccaag

SEQ ID NO: 130992 - RNA, 62 nt, Homo sapiens
gcgcgagcgaccgaggggagcggagcgggacggaagcagacaccccaccccgacaggacagc

SEQ ID NO: 130993 - RNA, 64 nt, Homo sapiens
gaggggcccacccgccagaggaagccccccaccacaggaacggaagaaacccgcgccgagcgcc

SEQ ID NO: 130994 - RNA, 75 nt, Homo sapiens
cgcccacaccaccacgcagagggagacgagagggggaccaaggagcaaaacacgagggcaacagacaagcagaga

SEQ ID NO: 130995 - RNA, 70 nt, Homo sapiens
gacagcggaaccagggccaacggaaacacgcaaccagccaagggaccgcagggagacggcaccaccaccg

SEQ ID NO: 130996 - RNA, 80 nt, Homo sapiens
aacgccgcgggggaccgccccgcccggagcgaggacccgcggcgaccccgcacacacacccaccagccacggcagcccag

SEQ ID NO: 130997 - RNA, 67 nt, Homo sapiens
aacacagcaagaggcacgcccagagcaagaagcggcccagaaggacggaacagccagggaggcgcga

SEQ ID NO: 130998 - RNA, 71 nt, Homo sapiens
cggccagaggaggaaccaaaccagagcacccaaaggcgcaggaagggcaacaccaaaccagaagaaggacg

SEQ ID NO: 130999 - RNA, 82 nt, Homo sapiens
gacccggacagcgaccgcaagacagccacgccccagccccaacagcccccagccccagcggacccgcccagcagggccagca

SEQ ID NO: 131000 - RNA, 80 nt, Homo sapiens
cgcgagcgcgggcgggggaggccgaagacgcagagaaacagcaccagacgaggccccacgaaggcgaagggaacagcacg

SEQ ID NO: 131001 - RNA, 89 nt, Homo sapiens
gcgaaaaggggacccgggcaaaagcagacgcgcccccgcccgcacaacaggcagggaacacagggaaaaaaccgcaggaggcacacccg

SEQ ID NO: 131002 - RNA, 82 nt, Homo sapiens
aaaaggaggaacgccggcccgagaaagcccgccagcagcacaacaacagcaacggaggcgggaccggaacaggcacacccca

SEQ ID NO: 131003 - RNA, 42 nt, Homo sapiens
gagcaaccacacgccagaccagaagcgcaccacacagaagcc

SEQ ID NO: 131004 - RNA, 79 nt, Homo sapiens
aagcgcccagaagcaaccgcccacagcacggcggggccgcccagcgcaagagaaaggccgggaagaaaacgcagcggac

SEQ ID NO: 131005 - RNA, 61 nt, Homo sapiens
aagcggaagcggccggcaggggaaggacgagagggcccgggagcgcagcaggggaagacac

SEQ ID NO: 131006 - RNA, 37 nt, Homo sapiens
gccccgacggccggcgaccggacagaaccagggaacg

SEQ ID NO: 131007 - RNA, 69 nt, Homo sapiens
gagagcgcccaggaaggagccaaagcacaagaagaagacgagggagacgggagagacacggaagagacg

SEQ ID NO: 131008 - RNA, 66 nt, Homo sapiens
cagacccagcccgggcccggagcaggacagacccccaggccagcgcgggccgccagcggcggccac

SEQ ID NO: 131009 - RNA, 77 nt, Homo sapiens
cggacacgaggagaaacagcagaaacgcaccaggccaaagaaagagaagaacacccacaaaagcagaagcagaaacg

SEQ ID NO: 131010 - RNA, 72 nt, Homo sapiens
gcggggaagcagccgccacggaggcaaagcagccgaggagaacgaaaacccaccaggaaggagcacaggaag

SEQ ID NO: 131011 - RNA, 79 nt, Homo sapiens
gcgcaggcacccagcagagacagcaaccggccacgaggaggggcggcccagaagcccaggaggaaggggcccaagcacg

SEQ ID NO: 131012 - RNA, 73 nt, Homo sapiens
gccaggccccgggagcgcccaccacgccgcgcccccagcggggagcagcccgcacacggaaacacccggccaa

SEQ ID NO: 131013 - RNA, 87 nt, Homo sapiens
aggcaacggagagcaaaggaggcgcggaggggacaagccccgcacagacacacggacaaccggaagagaccgcggagggggccgcag

SEQ ID NO: 131014 - RNA, 82 nt, Homo sapiens
aggggccgccacccaggccacggccggagccggcccgcgccggcaggcgcgggacaacgggcgcgggcggaggcagcaaaga

SEQ ID NO: 131015 - RNA, 57 nt, Homo sapiens
caagcacagcaggagaagccggaaagaacaagaggggaagaagagcgcaccgaaggc

SEQ ID NO: 131016 - RNA, 75 nt, Homo sapiens
gggaccgggcgccacgcgggggcaagacgaaggcccggcaccccggggaccgcccccacggccacacgcccgccc

SEQ ID NO: 131017 - RNA, 75 nt, Homo sapiens
gaggccccccagccagggaacgcacggggagcaagagaaaacccaccacccgccagagacgaggccagcaggacc

SEQ ID NO: 131018 - RNA, 81 nt, Homo sapiens
ggaggacccaggagacgagagagcgaacgccagggacccggcaggccgcccccggcaaggcaaaagcagaccggaaaaccc

SEQ ID NO: 131019 - RNA, 40 nt, Homo sapiens
gcacaaccagggcagcagggacccccaggccaaggaaagc

SEQ ID NO: 131020 - RNA, 77 nt, Homo sapiens
gcaggaggacgcagacggaaaacgaggaaagaaccaaggaagacacccgccgacacaccaaacaaaaaagacgaaaa

SEQ ID NO: 131021 - RNA, 78 nt, Homo sapiens
gagcaacaccgagagaggaggagccagacgacaagcacacacaggcgcgaaacggaaaaaggaaaagaaggaggccag

SEQ ID NO: 131022 - RNA, 84 nt, Homo sapiens
gcaagacgcgggcgcgcgaggacgggacagagcgggagccaccagcgccaaagggaagccaggagcccgggggcacggggagaa

SEQ ID NO: 131023 - RNA, 59 nt, Homo sapiens
gaggccccccagccacgccgacagccgcagaacggaaagggagcagcaccggccacacc

SEQ ID NO: 131024 - RNA, 79 nt, Homo sapiens
gaccccgccaggacccgccccaccacaggagcagcggggcggagccaggcggcacgggcgccgccccccacacccccca

SEQ ID NO: 131025 - RNA, 60 nt, Homo sapiens
gccggagcagcggacccaggcaggcagcccacggaagggccaaggcgaacagagagccca

SEQ ID NO: 131026 - RNA, 77 nt, Homo sapiens
ggaacagccaccccagaagaagacaggccaggagcaaagagcaacagcagaagcaaggaagagaacccacgccaaag

SEQ ID NO: 131027 - RNA, 56 nt, Homo sapiens
gccgcgcgggaacagccagggccaggaaaccacaacacaggcccggagcgccacgg

SEQ ID NO: 131028 - RNA, 60 nt, Homo sapiens
ccaccaccccaccagacggcgccccaagaccaaccgcagcccgaaaggcaagcggggggg

SEQ ID NO: 131029 - RNA, 76 nt, Homo sapiens
ggagggagcggaccccaggacgccgcgggcgccggcgaaagcaacgaagggacgccagaacaagagaaggagagca

SEQ ID NO: 131030 - RNA, 85 nt, Homo sapiens
gcaccccgagcgcaaggacagcgcgaggccgcgcagcccagcgcagccagcaagagcgggagcggggcgccagcccccgggagag

SEQ ID NO: 131031 - RNA, 85 nt, Homo sapiens
cagaagacgaacaaacagcaagaaagaccacaagaccagaagacccagagagaagacagacgccacaaagagagggcaaaaccaa

SEQ ID NO: 131032 - RNA, 79 nt, Homo sapiens
gcggacggcgcacgacgagacggcagcgcacgggacaaggggagcgccgcgcccaggcggaggcaggagcaacggccac

SEQ ID NO: 131033 - RNA, 81 nt, Homo sapiens
cgacggagacgcagagggacgaaagaagcgcagcggaggaaggcgaggagagggcccagagcggcagcgcgcaaacgccag

SEQ ID NO: 131034 - RNA, 97 nt, Homo sapiens
ggacccaaggaggacccaggagacgagagagcgaacgccagggacccggcaggccgcccccggcaaggccgagagaggggcccaggccggggaacgg

SEQ ID NO: 131035 - RNA, 55 nt, Homo sapiens
caggcccgaagcagccggcaaagaagacggcccagcagagcacccaaccagcggg

SEQ ID NO: 131036 - RNA, 69 nt, Homo sapiens
gaggagaacggacacagccaaggagcccaaaaaggacagggagcagaaggccccagaaacagcagggag

SEQ ID NO: 131037 - RNA, 74 nt, Homo sapiens
gagccacgcgaggacgccgagacaagagccccccaacagaaaacaaaaagaagagacaaaaaaagagaaagacg

SEQ ID NO: 131038 - RNA, 82 nt, Homo sapiens
gaacggggcagccgcagaccccaccacgacaggagaacaccgaaggagaagccaagccaggcccaggaaggagccgacgcga

SEQ ID NO: 131039 - RNA, 72 nt, Homo sapiens
gccggaaccagcgcagaaagacccgccccgcccgcagccgaggaccagcccaggagaggaaccgagaacacg

SEQ ID NO: 131040 - RNA, 59 nt, Homo sapiens
cgacccccgccgcggccgcgccgagggagggcagaacgacgaaagacggacaggacgag

SEQ ID NO: 131041 - RNA, 70 nt, Homo sapiens
caggccaaggaggccccccacagccccagaccagcggcgccggagcaccggagcagaagaccgagccccc

SEQ ID NO: 131042 - RNA, 82 nt, Homo sapiens
ccagcaagaaggagcggacggacaagagcccgcacagcccaagggcggggccccgagcagacagcaggaaagaagaagcccc

SEQ ID NO: 131043 - RNA, 72 nt, Homo sapiens
caacccacccaccacacaacaaagaaaaaccagacaccaaaggaagcaggaaaagccgaacaaacgagcccg

SEQ ID NO: 131044 - RNA, 55 nt, Homo sapiens
cggggcgaggaggccccaagggcgagcgggaccgaggccccgagcgcgccgcccc

SEQ ID NO: 131045 - RNA, 74 nt, Homo sapiens
aacagcccaaaaaaggccgggaggaaagaggcgggaggccaagggagaggggagaccccaaaagggggaggggc

SEQ ID NO: 131046 - RNA, 78 nt, Homo sapiens
cgacaagaggccgggcgccccgcaggacacaaggggaaggagggcgaaacaaaggaccagcacgggaaccggccgccc

SEQ ID NO: 131047 - RNA, 63 nt, Homo sapiens
gaggcgggggacaccgagagcacaggacaacgcagaaggacaccaggaggaaaacagaaacaa

SEQ ID NO: 131048 - RNA, 69 nt, Homo sapiens
agaaggaggacaggaaaaagccgagcgaacgaaacgaaagagagaacggacgagaccaacgcggaaacc

SEQ ID NO: 131049 - RNA, 71 nt, Homo sapiens
gaagccggggaaaagccaaagaacaccagcaggacagcagacccagagggacaagggagcaagaaagcgga

SEQ ID NO: 131050 - RNA, 81 nt, Homo sapiens
aagaaacgcccccacacaaaagcgagacccccccgcaagacgggcccaccgagcaggaggccaaaggaagaccaggaaaga

SEQ ID NO: 131051 - RNA, 69 nt, Homo sapiens
gaacaccgcggaaacgagaagcgaggggacaaaggacggaaagcacgccgggaacggaaggagagggca

SEQ ID NO: 131052 - RNA, 36 nt, Homo sapiens
gcccaagccgcgcccgaaacgccccagggacaccgg

SEQ ID NO: 131053 - RNA, 73 nt, Homo sapiens
gcagacggaaggaacggaggccccggacggagaaaaagaggagcagacaagaggagacaaaccccccccacga

SEQ ID NO: 131054 - RNA, 73 nt, Homo sapiens
gagcccccgccaccgagccaccagagagaccagagcccaacgggggggccgagggaagaaaccccggggcccg

SEQ ID NO: 131055 - RNA, 79 nt, Homo sapiens
accacgggcggcgccaggccggcccagggcgcaggaacccaccggcacccagagaaggccacaagcggcggccaacgac

SEQ ID NO: 131056 - RNA, 81 nt, Homo sapiens
cggcgcaggcggcgcggagagggggcgcgagcggggcccccaggcccgccgccagagggacaggagccaggccagaaaagg

SEQ ID NO: 131057 - RNA, 74 nt, Homo sapiens
aacaagccacgaccggggagcagggagagaaggcgcgcaggagagcgcagagacccgcccggaagcgaggcaac

SEQ ID NO: 131058 - RNA, 76 nt, Homo sapiens
gaaggccacaggagaagaaaaaagccaaggggggaaagcagcggcccccaagaccaacggcgccggaccgcgggac

SEQ ID NO: 131059 - RNA, 79 nt, Homo sapiens
aaaagcaagggaaaaaggaggaccccgccaagggccccaagagggcacacagcacacaccgacagcagccgaggaagaa

SEQ ID NO: 131060 - RNA, 64 nt, Homo sapiens
gaaggaccaagaaccaggggacaggaccggcccaacagggcagccgggccccccgcgccgcggg

SEQ ID NO: 131061 - RNA, 77 nt, Homo sapiens
caagccacccagacacgggagcagggcgcacaggaaggccgacaaaaggcagagacgggcaagaggcagcaagggca

SEQ ID NO: 131062 - RNA, 74 nt, Homo sapiens
cgggagggccacaggaggcggcgggccccgcccgccgaaggcggaagcgcagacgccacgaagcaccaggcaaa

SEQ ID NO: 131063 - RNA, 79 nt, Homo sapiens
cggaaaacagcgcacaagccaggccccgggcagaaggccggaggaggaggaccacgcaagaaacgcagcagaaagggcc

SEQ ID NO: 131064 - RNA, 39 nt, Homo sapiens
acgccgccgcgcccccgcgaaaagaccaaggagacagag

SEQ ID NO: 131065 - RNA, 92 nt, Homo sapiens
caggcacagaaaaaaggacaagaagaaaagaggagcccgcggcacagagaacaggcgacaacccacccacaggccagcacacccgcgcaaag

SEQ ID NO: 131066 - RNA, 73 nt, Homo sapiens
gacagggggccaaggggagaagaaaaccggggccgaaacaaaaaaaaaaaccaaggagcaaccacaagaaaag

SEQ ID NO: 131067 - RNA, 94 nt, Homo sapiens
cccaaggaaccaaggcggcccggcgggggaaccacagacaaacaaaaccagccaagcagaggagaaaaagacagcaccccagagccagaaccag

SEQ ID NO: 131068 - RNA, 59 nt, Homo sapiens
caccggcgccaagagaggcccggcagccgcacggacggaccacccaccaccgaggaccc

SEQ ID NO: 131069 - RNA, 68 nt, Homo sapiens
cggacaggaaaacaaggaaaaggccgcgggaaaaaaggcgacgccaggagcacaccgaaaagaaagga

SEQ ID NO: 131070 - RNA, 79 nt, Homo sapiens
agcccgagacgccggggcccaagggaagcgaacgcccggccgagaccccacaagccagcaggcagacccaccacgggcc

SEQ ID NO: 131071 - RNA, 71 nt, Homo sapiens
gggagcaagcaacagccacagggggccagggaacggggacgagagccccggcacaaacggaccaccagaaa

SEQ ID NO: 131072 - RNA, 72 nt, Homo sapiens
cgcagggcgcccccggacggaaggcgaccacaccaccccagacacggccgaccgccaagcacaacgccaacc

SEQ ID NO: 131073 - RNA, 72 nt, Homo sapiens
ggagaacaacacacgacgcacggggccaaaacagacccacaacaggggcaccagcgggcacaccaagaagcg

SEQ ID NO: 131074 - RNA, 74 nt, Homo sapiens
cccgccagagcggcccagccgcccaggacagaaccagcgcagccaggagagcagggacgccggcgaacgcagac

SEQ ID NO: 131075 - RNA, 80 nt, Homo sapiens
acacagacgggggcgagcggacccgcagccccaaagaacacgaggacccaaagaacaaacccggagagaagaaaacccca

SEQ ID NO: 131076 - RNA, 80 nt, Homo sapiens
cgggagagcccggcggcggagcgaagggagaccagaccgagaagaggagggacacaaagccaagagccaaagagcagacc

SEQ ID NO: 131077 - RNA, 59 nt, Homo sapiens
agcaaagggggcccccagggaggccgcacggcccacgcgaaaaccgcccccaaagccag

SEQ ID NO: 131078 - RNA, 87 nt, Homo sapiens
acgaggaggagccccagccccggggaagggcccgcgccgggaagaggacaccaccagcgaccaccccaggggccaggggagaggagc

SEQ ID NO: 131079 - RNA, 75 nt, Homo sapiens
gcggaagaagcaggaggcaagaaaggggaaccccggagaaaaggccaagaaggcaggcagggcagcccccaccac

SEQ ID NO: 131080 - RNA, 73 nt, Homo sapiens
ggaaggaagaggccacaaaagcacccagaaccggagagcccagaacgcgggcagcccgaagaccccccagaga

SEQ ID NO: 131081 - RNA, 112 nt, Homo sapiens
gaggagcgcaagacaggcccccaaggggaggagaccaagcggggggcaccccaaaagaggcaggaagagccggaagaccaagcaacagacaccgaaaacccgacggaggaag

SEQ ID NO: 131082 - RNA, 73 nt, Homo sapiens
cggggacaggaaggggcagacaagcacgccgcccagacaaccggacagaggaaaaccagcaggaaaaagacac

SEQ ID NO: 131083 - RNA, 76 nt, Homo sapiens
aaaggaaagcccgacagaagcaccgagacccaagaaaggaggcacaggaggaagaccacgcggcaagcaaaaagga

SEQ ID NO: 131084 - RNA, 68 nt, Homo sapiens
cgcagcacgcgcacagaagaaagaccaagccgcaaagaggcgacccaggggagacagacccagaaaac

SEQ ID NO: 131085 - RNA, 91 nt, Homo sapiens
ggaggccgaggcgggcggacacaagacaaggacacggaagggaggagcaagcaacgcgccgcaccggggaagaagaaaaagaagaccaaag

SEQ ID NO: 131086 - RNA, 71 nt, Homo sapiens
cacccagggaaaacgccccacggggacggagaccgcccacagagccggccacgaacccggaaggcccacca

SEQ ID NO: 131087 - RNA, 78 nt, Homo sapiens
ggagaaaggggccacagaggccacgagagacgccccagggcaccggacccacgcagccacgggcccgcgccccgccga

SEQ ID NO: 131088 - RNA, 72 nt, Homo sapiens
gagcgagggggggcgcgccggaaaccggagcgcgcagcaggaaagaggagggagggagggcaggccgcagcc

SEQ ID NO: 131089 - RNA, 72 nt, Homo sapiens
gccaaggggggagagaagaacccccgccaaaacagagacaaaagcaggccccaacggccaaacccagggcga

SEQ ID NO: 131090 - RNA, 83 nt, Homo sapiens
ggccgccgcgccccgagggcagccgcacgccaacaagggccgccgcgggaacccgagcgcagaggggaagcagaggacccagg

SEQ ID NO: 131091 - RNA, 61 nt, Homo sapiens
ggaggcgagcagccgggagacaccgccaccgccagggcgccacaaaggggggagggggcca

SEQ ID NO: 131092 - RNA, 32 nt, Homo sapiens
cagccagcccaggagaggccacaaacgaacag

SEQ ID NO: 131093 - RNA, 78 nt, Homo sapiens
cagggcgggccagcagggcagacagccccggaagcagagaagggaaacccagacgacaaggaaggccaagggacccac

SEQ ID NO: 131094 - RNA, 57 nt, Homo sapiens
gggccaccgcccagccaaccacaggaagaacccaaaacaaaacagaacgcaaaagca

SEQ ID NO: 131095 - RNA, 99 nt, Homo sapiens
agggagcggagcccaagaacaaagccaggaggccgcggaacacgggggccagacaggagaagcgcaaagaagggacggggaagaacgaaaagcaaaaca

SEQ ID NO: 131096 - RNA, 84 nt, Homo sapiens
aaaccagaaacaccagccaccaggaacaggaagcagagcaagggagagaagcagaaacggacaaacacggacagaccacggaca

SEQ ID NO: 131097 - RNA, 82 nt, Homo sapiens
gaagcgcgagcgcgacgagaaagcggagccgcggggaagcacacccccccgaaggggccaacgagcccgcagcccacgcagg

SEQ ID NO: 131098 - RNA, 80 nt, Homo sapiens
caccaggaggcagccagcgggacccgccccgcgcaggcggcgacagccggacccacgcagaacagacagacagaagagcc

SEQ ID NO: 131099 - RNA, 59 nt, Homo sapiens
gggacagccaggcagacgcagccaagaagagggaaagaagacaggaaacaagggaagga

SEQ ID NO: 131100 - RNA, 79 nt, Homo sapiens
gaggcgggagcgcggaaacggaaccgggaggcgacgcacacgagcggaggcgaagggaaggagaagaaccacagacaaa

SEQ ID NO: 131101 - RNA, 91 nt, Homo sapiens
aagacgcaggcgacaaaagaaaacgacggaccagaggcccacgaaagcccccgaggagggaacaagccagaccaggaggagaaaacaaaaa

SEQ ID NO: 131102 - RNA, 76 nt, Homo sapiens
gcaccgacagccgacgcgcagaagcagagccaccggggaggaagaacacccaaaggagggcggacgggccacgggc

SEQ ID NO: 131103 - RNA, 74 nt, Homo sapiens
cggcccgaccggccgcgacagcgaacagcgcggccgcagacacccacaacgacccaagccccgccccagaccac

SEQ ID NO: 131104 - RNA, 77 nt, Homo sapiens
ggcccggaaaccccaaaccacaaaaggggaagagcaacacgggaggaaacgaaccacacaccagccaccaagcgaga

SEQ ID NO: 131105 - RNA, 52 nt, Homo sapiens
gggggcgaaccgcccgggcacgcccccacacgggaagaagagagggcgaagg

SEQ ID NO: 131106 - RNA, 85 nt, Homo sapiens
cgaggcggcccagcggcggcagagggggcaggccccaacacgccgccacgcgggggcaccgggcaggcacggcgacggcacccgc

SEQ ID NO: 131107 - RNA, 87 nt, Homo sapiens
gaacggggcgaggcggccggagccgcggagcgccgggaccaccagcggcagcgacaccccgcagcaggacaacagcagcggaagaaa

SEQ ID NO: 131108 - RNA, 68 nt, Homo sapiens
gcagaggccaaggccaaaagccaaagcggaaccaacccaccaaacccagagggcccacaccaccggac

SEQ ID NO: 131109 - RNA, 70 nt, Homo sapiens
gagcagaggaaccacacgcgacagagaaacacgcagaacagaccacgcagaacagaaggaagaacgaaca

SEQ ID NO: 131110 - RNA, 63 nt, Homo sapiens
aaaaggccggagggggggagaaggcgagggggccagccagagcggcaaggacaacagaccagc

SEQ ID NO: 131111 - RNA, 76 nt, Homo sapiens
ccgccgcccgcccgcgcgcagcccccgagacagacccagcacggaccccccccccagccgggcgaggccccgaaac

SEQ ID NO: 131112 - RNA, 75 nt, Homo sapiens
ccagcggacccccaaccggccgccgcccggcgcgcgcaacggcgagaccaaacccgagaggaagaggaagaacag

SEQ ID NO: 131113 - RNA, 40 nt, Homo sapiens
accagaaagagagggacaagcgcagacccaggggagccca

SEQ ID NO: 131114 - RNA, 75 nt, Homo sapiens
ggggacgagacacaagacaagccgagaccaccaggagcagagcggaggcaaccagccaaaacaacggaaaacagc

SEQ ID NO: 131115 - RNA, 84 nt, Homo sapiens
ccgcggagccgccggagagcgcccccgccaccccggcccaggcccggcccgacaagaggcagaaggaacgagggagcacggagg

SEQ ID NO: 131116 - RNA, 80 nt, Homo sapiens
gacaggcccaggggcgagccacagcgaaagcccacgccccaaggacaacacgaggaagcccccgccccccacagcgaacc

SEQ ID NO: 131117 - RNA, 74 nt, Homo sapiens
gcggcccagggggccacgcgaacgaaaacaaacggaagagagggcagcaagaaagaacaagaaagcgaacggaa

SEQ ID NO: 131118 - RNA, 78 nt, Homo sapiens
ggcaacggcggggcgcccggagcccgagcaggaggcaaagggaccccaagaaaccaaagggcaagagccgcagcccgg

SEQ ID NO: 131119 - RNA, 56 nt, Homo sapiens
aggcagcgcccagcagcgcagaaaaaccagacaccaaaggaagcaggaaaagccga

SEQ ID NO: 131120 - RNA, 63 nt, Homo sapiens
ggaggagagggaggcaggagaggaggacgaagaggaccgagaggagaaacgaaggccaggcac

SEQ ID NO: 131121 - RNA, 71 nt, Homo sapiens
acggaaaacccagaaggcaccggaaggcggaagggagcccgccgaaggccccgcgaaacacaccaagcgaa

SEQ ID NO: 131122 - RNA, 76 nt, Homo sapiens
gaccacacaaaaccaggcgaacgaagaagcgggccacccacaaagcagcagcaaggacaagaggagaaaagccagc

SEQ ID NO: 131123 - RNA, 74 nt, Homo sapiens
gacggggagcaaggcccggaagcgaggaccccaggaagccggaaggccagcgagcaacagcagaaaagagaaga

SEQ ID NO: 131124 - RNA, 85 nt, Homo sapiens
gaaacacccccagaagagggaggggggaagacagggcccagcaccacaggacgggccgggaagccgccagcagggacagccggga

SEQ ID NO: 131125 - RNA, 84 nt, Homo sapiens
cagcaacgacaggaaccagaggcaacaagaagcaccaccaccaccacccccagcacacacaaaacaccagaaccagacccgagc

SEQ ID NO: 131126 - RNA, 59 nt, Homo sapiens
gggcaaaaagcaccaccaagagccaaagagcgagaaacccagaaaacgccaaaccgacc

SEQ ID NO: 131127 - RNA, 51 nt, Homo sapiens
ggagcccagcgccgccccgccggggaccgaaaaaaacccaagagacggaaa

SEQ ID NO: 131128 - RNA, 72 nt, Homo sapiens
gccggacaaccgccccgagggaagggaggcggcggccccaaaaacacaggcagaccagagagaggaaacaag

SEQ ID NO: 131129 - RNA, 121 nt, Homo sapiens
cgcaaaggccagcggacgcgacacagcccacccccgaccgccgcgcgcaggccgcccccaccggcgaaagcaaagagagcaacaccaagcgagaggccaaaaggcagacgacagcacaaaa

SEQ ID NO: 131130 - RNA, 70 nt, Homo sapiens
ggaacggaggagcgccgagccaggaacgaagccagccgcagagagcagcgagagcccaaaggaacacaaa

SEQ ID NO: 131131 - RNA, 73 nt, Homo sapiens
cccaccgccgcagacccccaagcagcagaaaaggcacacacacccgcaggagagcgccggagaaaggaagaac

SEQ ID NO: 131132 - RNA, 77 nt, Homo sapiens
ggaaggaccaggcgccggcgccaccccagagagaggacgagaagaagagccgccgcagggcgaaggcgaggaccccc

SEQ ID NO: 131133 - RNA, 63 nt, Homo sapiens
gaagaggccagagcggaagccaaaggcaacgaccacgacagccgaaggagaggaggcgacaag

SEQ ID NO: 131134 - RNA, 48 nt, Homo sapiens
cggcgccagcaagaaagacagagcaccaggaggccggggggggcacag

SEQ ID NO: 131135 - RNA, 34 nt, Homo sapiens
gaacgagacgcgaaccaggcacacagagaaaaaa

SEQ ID NO: 131136 - RNA, 75 nt, Homo sapiens
agacgcccggagagcgcgccgccgccgccgccgccgccacgagaacagcgcaaaagagaacggcgagagagaaag

SEQ ID NO: 131137 - RNA, 85 nt, Homo sapiens
cgaccgaagagacgagggagccggaaagaggccaccaaaaagaggaagcagcgaaacacgccagagcagcaaacagcaaaaggcc

SEQ ID NO: 131138 - RNA, 71 nt, Homo sapiens
aacaaagcccacacacgaacaccaaaggaaacccggacccaagaaaacagagacggagcaaagacgcacag

SEQ ID NO: 131139 - RNA, 76 nt, Homo sapiens
cccgggccggggagcaagcgccagggccaaccgaaaaaacaaccagagaggcggacagcagcagagggaaggagca

SEQ ID NO: 131140 - RNA, 54 nt, Homo sapiens
aggggagaggacggagacaagcagaggagacacgaacggagagcagccaacgca

SEQ ID NO: 131141 - RNA, 74 nt, Homo sapiens
cagggagccgcagagagacagaccaagagcccgaggcaccacccaagcgaaagcaggagcccggaaaggagaag

SEQ ID NO: 131142 - RNA, 58 nt, Homo sapiens
cgcgcgcgcccgccgcaccgggaccaggcaaaccccggacaagccagaagcagcagcc

SEQ ID NO: 131143 - RNA, 80 nt, Homo sapiens
caagcccacgggaggcacggagggggcgaggcaggcaaaagcagaccggaaaacccaccggcaagaccacacccgagggg

SEQ ID NO: 131144 - RNA, 97 nt, Homo sapiens
gaagggaaggccagcagcgcgcggagaagaacggggagccagagaggggagaagagcgagacgagaaagaagaggaagaagagagagaagagaagag

SEQ ID NO: 131145 - RNA, 80 nt, Homo sapiens
caaccggggaggaaaaccgacgaagaaaggaaggcggaggaaggcgggagccgccagcaacaacgcaagaaggggaaaag

SEQ ID NO: 131146 - RNA, 86 nt, Homo sapiens
ccggaaggaaacccagacacgagaaccagagagcacagagaaagcgggaaacggccaaacagaacaccaacaaggccaaagaccac

SEQ ID NO: 131147 - RNA, 41 nt, Homo sapiens
cccccgggacccccacccagagggaggagagcagaaggcca

SEQ ID NO: 131148 - RNA, 78 nt, Homo sapiens
ggagacagaagaggggcccccacagcggagcacaagaggaaaggaacgcaccccccagcagcgaaaaacaggaagacg

SEQ ID NO: 131149 - RNA, 79 nt, Homo sapiens
gaaacaggacaaaggggacgagggagcagagagccaaccgaaagcgcaggaagcgagcaacgccaaagccagggcagag

SEQ ID NO: 131150 - RNA, 78 nt, Homo sapiens
cccagcgagcgccccacacagggggaaaggcaagggagccagagccacagggggcggccacagaccagagacgccgca

SEQ ID NO: 131151 - RNA, 56 nt, Homo sapiens
agcccccgagggcgggaacaggccccaccgaggcaccaccaaccaaagcggcaacc

SEQ ID NO: 131152 - RNA, 84 nt, Homo sapiens
cggacaccgacagcacagacagaacccgcaccagagaaaccagagagcaagacaaagaaacagaagcgcgagaacagaaccccg

SEQ ID NO: 131153 - RNA, 83 nt, Homo sapiens
gaggacggcgcaaccgcgcccgccggcccccccccgcgcccgcgaccgccgcggcgaagagccagacgaagagaaacggccgc

SEQ ID NO: 131154 - RNA, 110 nt, Homo sapiens
cgccacccgcggacacgcaaggggccaagaaggccgggcgccaccccaaaccaggaaagacagaacaagaacggacagaaagagaaccagccgggaagccccaagggaaa

SEQ ID NO: 131155 - RNA, 81 nt, Homo sapiens
cagaaccaggcaccagagcaagacagcggaagaagacccagggaaacccccaggcgcacaagagcagggaccccaggcgcg

SEQ ID NO: 131156 - RNA, 80 nt, Homo sapiens
gccccagcagcccccgaaggcccacaggacaggagagaaagacgcacccagggggaagaaggaaaaagcagcagcaggga

SEQ ID NO: 131157 - RNA, 32 nt, Homo sapiens
gcccaccggacacgccgggcagacgcccgaac

SEQ ID NO: 131158 - RNA, 87 nt, Homo sapiens
gaagcgggagcaggcgagcccggcccccaagaaaccccagacagccagcagcaggccgggaccagcaggggccgcgcagcagcagac

SEQ ID NO: 131159 - RNA, 72 nt, Homo sapiens
aaccggcccggcccggccccacccaaggacgcgccgacagaagaggaggagcagcgacgagaaagagcaaga

SEQ ID NO: 131160 - RNA, 59 nt, Homo sapiens
ccccaagcaaccccaagcaaaagggcaaacaaggcagccggcgaggggggagcccagca

SEQ ID NO: 131161 - RNA, 82 nt, Homo sapiens
ccgcgcccaggagggcgggaagaagcgagagccaacccaggaccgacagcagaggagcgcaagaacggagaacaccgacgga

SEQ ID NO: 131162 - RNA, 69 nt, Homo sapiens
agaggacgaacaaaacaggaaggacaccaaagccaggagcaaagaagaccagcccagaagaagaaacaa

SEQ ID NO: 131163 - RNA, 70 nt, Homo sapiens
agccgacagacgccaccaaaagcaccaggagacaagcggaggacaacgcagaagccaagggggagagggg

SEQ ID NO: 131164 - RNA, 71 nt, Homo sapiens
gaaacacgcaccaaaaacaaaagagagcgcacgacccgagacacagccagcgcgccagaaaccggggaacg

SEQ ID NO: 131165 - RNA, 72 nt, Homo sapiens
cgggaaccgaagccaccgaggcagaacaacaacggaaaaggagaaggaaaggacaaccccacagggagaacc

SEQ ID NO: 131166 - RNA, 76 nt, Homo sapiens
gcagagaacccacgaggagagcgcaacaagcgcaccccaaaagcccaagggcagccgggccaacccacccccccga

SEQ ID NO: 131167 - RNA, 78 nt, Homo sapiens
caggcgaagcacgagcagaccggcccgaccgcccacagacccaaacaaagagaacacaaggaacgaaaggaagggaag

SEQ ID NO: 131168 - RNA, 74 nt, Homo sapiens
aagaaaaccaaagcagaccagaaaaaacagcacaccaggaagcaaggaagaccaagacgaccaagcacggaaag

SEQ ID NO: 131169 - RNA, 77 nt, Homo sapiens
aaaagacaaagcacccggcggccaaaggccaggacaccaacgggaccagaaggaaaggggcggagcagaggaagcca

SEQ ID NO: 131170 - RNA, 66 nt, Homo sapiens
caaaggagagaggaccacccagaggagcaacaccagcaaaaacaggaagccggaggcaccaacaag

SEQ ID NO: 131171 - RNA, 72 nt, Homo sapiens
ccgcggagccagggggaaacacacagaagaccgcagaccaagggagcagggcgggggcaccagcaggcccgg

SEQ ID NO: 131172 - RNA, 84 nt, Homo sapiens
ccgaggcgagaacgcacaggccgcgcagagcgggaccacccgggcacagcaggcacggagcgcgccgggggcccggaaagggac

SEQ ID NO: 131173 - RNA, 61 nt, Homo sapiens
gcaccggagagggacaagaaacgaaggaagagccaggaaagcaaaagggcacccgccccca

SEQ ID NO: 131174 - RNA, 102 nt, Homo sapiens
gccgggcgacgacgaggaggaggcggccgccgcagccggggcccccgccgccgccggagcgggcgaagagagaacacgcacggaaggaaggagaccacgaga

SEQ ID NO: 131175 - RNA, 68 nt, Homo sapiens
agcacgagagaaagggacgccggaaaaaagggaacgaaagcaagaccaggggcgaagcagccccaaaa

SEQ ID NO: 131176 - RNA, 77 nt, Homo sapiens
ccaagaagagccccgcagacgcgcaggcccaggcaaggaccagaagagcagccaaagggaagggcgggggcgcgcgc

SEQ ID NO: 131177 - RNA, 76 nt, Homo sapiens
gccaccaacccagaggggagcacccacacgccaggcgcggcccaagaggagaaacgaggcccagaaagagccagaa

SEQ ID NO: 131178 - RNA, 58 nt, Homo sapiens
cagaggccaccccgccggacaagccaacaccacaccagggaccaagaaaggcccaggg

SEQ ID NO: 131179 - RNA, 69 nt, Homo sapiens
ggcgaaaacagagacagagggagcaggggggaggacccgcacgcacccagggaggccgacaccccccga

SEQ ID NO: 131180 - RNA, 79 nt, Homo sapiens
gccgagcaggcgagcgaacgacggcaggggaaaggaagggagcagcgaagccagggaggagccgaaacaaaaggaaagg

SEQ ID NO: 131181 - RNA, 53 nt, Homo sapiens
ccaccggccgccgcccggaggacccgcagacacaacggaggcccgaccgagcg

SEQ ID NO: 131182 - RNA, 43 nt, Homo sapiens
cgggccagaggggagcagccagacacaggccaacaaaaccaca

SEQ ID NO: 131183 - RNA, 76 nt, Homo sapiens
aaaacaggcggaccagaacgcggcgcacaacaaggaaagaaccccacccaccgcccccccgcaggggcgagaacca

SEQ ID NO: 131184 - RNA, 85 nt, Homo sapiens
cccgccagcagccgccggagccagccaacgagcgcccagagcagccagacccagaggagccgaggagcaggaagacccagccgca

SEQ ID NO: 131185 - RNA, 77 nt, Homo sapiens
gcccaccaaggagacgcaggcacccaggggccgccccaggacacgccggacccccccgaggcagaggagaccaggcc

SEQ ID NO: 131186 - RNA, 66 nt, Homo sapiens
ccggcacccagaaacgccagccacagggcacccagcagaacgcagcacagagcccgaagaagcaaa

SEQ ID NO: 131187 - RNA, 58 nt, Homo sapiens
aaaaagaaaacaccaaggggagcgggaagaagaagaggcggggaaaaaggagaagcca

SEQ ID NO: 131188 - RNA, 72 nt, Homo sapiens
ggagcggcgcggagccgggcgccccgcccaaggcggggcgcgcccgggggacgcgagagcccacgaagagcg

SEQ ID NO: 131189 - RNA, 73 nt, Homo sapiens
agacaaaagggccaaagaagggagagagggccgccaccgccgagccaaaacaaccagagacaagagcaagaag

SEQ ID NO: 131190 - RNA, 74 nt, Homo sapiens
agggggggaagaccccaggcgaccacaccagacacagacacagaaaagcccacgaggaaaaacggccaacaaaa

SEQ ID NO: 131191 - RNA, 76 nt, Homo sapiens
gcggagcgggggcccgagaagccgacgggcagaagacgcaagccggaaaacccacccgagagaaagcaggccccac

SEQ ID NO: 131192 - RNA, 76 nt, Homo sapiens
ccgaaggcgcaaacgacaccacccgaccggacaaacaacagaccaaggggcggaaaacccgaagccaggaacagcg

SEQ ID NO: 131193 - RNA, 60 nt, Homo sapiens
cccgaaagccaacgagcacgggccaaggagaggccagagacgaggagacaccgagcccag

SEQ ID NO: 131194 - RNA, 87 nt, Homo sapiens
cgaagacgaccgacccgcccagcacgaccagccagcagccgggaacagacgaaaccaacaacaaacccggaggagaagagcgggaag

SEQ ID NO: 131195 - RNA, 85 nt, Homo sapiens
cggccgcccggccgggaaccaagacggaacgacaagagagagggaccaagagacacgagaaaagagcgacgcaaaacccgagaga

SEQ ID NO: 131196 - RNA, 69 nt, Homo sapiens
aacacaacaccacgcagagggacgagcagagaacagcaaaagagcacaaggccacagggcacaagggca

SEQ ID NO: 131197 - RNA, 78 nt, Homo sapiens
ccgcggggcgcgcggcgccggcggcgcgcgacccccgcgcaggacccaaagacaggaccacgcaccagcagagaagga

SEQ ID NO: 131198 - RNA, 76 nt, Homo sapiens
caagcgcacgcgaggccgaggcggagaaggggcccgagcgcccagacacgacagagcgcccgagaccaaggcgcac

SEQ ID NO: 131199 - RNA, 36 nt, Homo sapiens
gcagagaagggcacagaaaccccgaaccaaacagag

SEQ ID NO: 131200 - RNA, 89 nt, Homo sapiens
cgccgcggaggagaccggaccgaagacggaccggccgggaagagccggggagcagacacaaagagccaggagcaggccacaaacaagcc

SEQ ID NO: 131201 - RNA, 72 nt, Homo sapiens
gaacagggagccaacgcgaacagaaacagacacgcggcgcccacgcacaagaggccaaacgcacagcaagga

SEQ ID NO: 131202 - RNA, 59 nt, Homo sapiens
acaagacaggggacacacaaaccaagggaagacgagggaaggggaagacggcagcgggc

SEQ ID NO: 131203 - RNA, 82 nt, Homo sapiens
cgacgcccccagaacaaaggggaaagggaagcagcccgccgcgccgccccgagcagcccgccagaggcagcgagaagaaaaa

SEQ ID NO: 131204 - RNA, 80 nt, Homo sapiens
cagcccaaacaggcggcacagccgaagcaggacacaaagaaaagacgaaggaagcaacacaaggaagcggagggaaccac

SEQ ID NO: 131205 - RNA, 74 nt, Homo sapiens
cccagagaacagccgcagagagggcagcgggagccaaaggcaacggaacacgagcagccaacaagccaaaggaa

SEQ ID NO: 131206 - RNA, 83 nt, Homo sapiens
ccacgaggggaccaaaccccacacccaggggaccaagaaaggcccagggaccaaagcccggacaaggcccgagcaccaggacc

SEQ ID NO: 131207 - RNA, 70 nt, Homo sapiens
gggaggaggaggaggagagcggacgccgccagccaccggcgcgaagccagaccagaccagcaggggcaca

SEQ ID NO: 131208 - RNA, 82 nt, Homo sapiens
ccgccacgccgcagccaggagaggcgggccagcggagccgggacggaggcggccacgcagacacgacagggaggagaaaaga

SEQ ID NO: 131209 - RNA, 59 nt, Homo sapiens
ggacgcgccgcgccccaaggccgcaggagggaagcgcacggaaaccgccccgggaggca

SEQ ID NO: 131210 - RNA, 74 nt, Homo sapiens
ggccccccaccggacacccgcgggggacaacgacggacgggacgaggaacgggcgagaccagcggcagaacgag

SEQ ID NO: 131211 - RNA, 69 nt, Homo sapiens
cccacgcacaaggagcgagcagaacacacagagccaccaggagcccccggccacgcagcgccgaggaaa

SEQ ID NO: 131212 - RNA, 67 nt, Homo sapiens
ccggccccaaacccggaaacaacaaggaggaagcaccggagcaaaacgggaagagccagaagcaaag

SEQ ID NO: 131213 - RNA, 82 nt, Homo sapiens
aggcggcgcaggggaacccggcggcggagagaggaacaagggaaaaaaggcacgccgagcccaaaggacgcagggaccggcc

SEQ ID NO: 131214 - RNA, 80 nt, Homo sapiens
aaaggcgcgcaaggaggaaggggggcaggccggaccgaaggacaggagaagggcagcaccaggagcaccggagccacacc

SEQ ID NO: 131215 - RNA, 80 nt, Homo sapiens
cgcgccaggacagacgcacagacaccgcagcgcgaaaggggcggagaacaagagagaaacggagaaaaacggccgggaaa

SEQ ID NO: 131216 - RNA, 72 nt, Homo sapiens
aagcgcggcgcgcaggacccagacccccccccgagaccggaagagaaagagcagggggacacagcaggacac

SEQ ID NO: 131217 - RNA, 64 nt, Homo sapiens
ccagaagacggaagaagcggcggagcaggacacgaaccacccaaagcggggaaaagaccgaaga

SEQ ID NO: 131218 - RNA, 102 nt, Homo sapiens
gaggccaaaacaaaagaacggaaaagcccggccagacgcaaaccaaaggccaaagagcacagggacagaaaaacagcgcagacgagccgcaaggacaagacg

SEQ ID NO: 131219 - RNA, 83 nt, Homo sapiens
agggccgccccaagaccaaggacaacccggcagcacgggaagcacgagccagggagccgccgggaccggcccgggagacgaca

SEQ ID NO: 131220 - RNA, 73 nt, Homo sapiens
ccaacaccgcagacgaagggcaaggccagagaaggcgggagaaagacacgaaccacagaacgcaacaggacag

SEQ ID NO: 131221 - RNA, 81 nt, Homo sapiens
cgggccccaacacccagagacgaaagaagcgaccaagcagcggaagacagcagaaggccccgcaagaggcagcgaaggagc

SEQ ID NO: 131222 - RNA, 109 nt, Homo sapiens
ccgaagccggagcgcgcggccgggagcacgggcgccggcaagacaagaggcagccagcggacgggcagcgggagagaggagagcagagagcagaaacaccgaccaccca

SEQ ID NO: 131223 - RNA, 82 nt, Homo sapiens
cacagccgcccgggagcaagggcacacaggcccgagcacaaacacaagaaacgcacgcccgccagcgagaagagagagaagc

SEQ ID NO: 131224 - RNA, 78 nt, Homo sapiens
aaaggccgcgggggcaacggagaaaacccggaaccgcgacggcggcagggaacagcaagaaagaaagccgaaccacag

SEQ ID NO: 131225 - RNA, 79 nt, Homo sapiens
cgggagaggcgggacaagccaagggacaggggggccgggggaacgaggaagcgcccaagggcgaggagagagaacaaga

SEQ ID NO: 131226 - RNA, 72 nt, Homo sapiens
ggcgggaccgcggcccgacaagcccagagaacaggaaagcaaaacccaaccccaaagcgaagggagagagaa

SEQ ID NO: 131227 - RNA, 127 nt, Homo sapiens
aggcggggcagacaagaagcggaggcaacgaggccgagcgcgcggcgccgcaacaaagcagacaccaggggaccccgaagcaggaggcccaaggaacagcacagcagcgacacacggaccggagcag

SEQ ID NO: 131228 - RNA, 75 nt, Homo sapiens
aaaacgcggaccagcacacaaccacgaggacgaccccacaacaggaccgggagcacccagacaaaccgaagggca

SEQ ID NO: 131229 - RNA, 72 nt, Homo sapiens
ggccaaagcaagagggacggagaagacagcggacacaccgccacccagggagccagaacaacccgaaccggg

SEQ ID NO: 131230 - RNA, 76 nt, Homo sapiens
aaaacggggggagggcaaccaggagacaaaaaccaaagcccgcgggaaacccagacagacagacggagcaccaggg

SEQ ID NO: 131231 - RNA, 70 nt, Homo sapiens
gaagaggccggcagagcccgcagagaaaaaaaaagcacaacccagccagagcagcaggcgcaaaaacgaa

SEQ ID NO: 131232 - RNA, 65 nt, Homo sapiens
cgcgccgggcgcagcgaagagagaagaagcaaaccgggaccggaagcaccaaggagaaaaaggac

SEQ ID NO: 131233 - RNA, 85 nt, Homo sapiens
cagggagccggggggggcggagggggagacggccgggagggcccgccagccgcgcccggcggacgaaagaaagaaggagcaccaa

SEQ ID NO: 131234 - RNA, 64 nt, Homo sapiens
gacgacgcaccgcaggcagacaaaagggccaaagaagggagagaggccccggacgggcaggcag

SEQ ID NO: 131235 - RNA, 52 nt, Homo sapiens
aacgagccacggaggcggagagaggggacaacaggagaagcggaaggagacc

SEQ ID NO: 131236 - RNA, 69 nt, Homo sapiens
ggcccggcaaccaagaaaggcgaaggaaaaccccagcgaaacaccaagaggaaacgccgaagggaccag

SEQ ID NO: 131237 - RNA, 97 nt, Homo sapiens
aagcgaagggagaaagccccggagcccgcagagcacagagaaccacacaggcaggaagaagaccagcgacaagaccagacaggaccagaaacgggac

SEQ ID NO: 131238 - RNA, 40 nt, Homo sapiens
cagggcaaaggacagaccaggggagcaaaacgcccaccac

SEQ ID NO: 131239 - RNA, 72 nt, Homo sapiens
agagcaaagagaggaacggggggagagaacccaaccagggggaaacacagaacgcaggcggccagcaccaag

SEQ ID NO: 131240 - RNA, 77 nt, Homo sapiens
cggcgaccaaccccgccacgccagccaggacaagggcccggccaaggggccccggggcgacacacgccccaacacgg

SEQ ID NO: 131241 - RNA, 69 nt, Homo sapiens
cccagcggccgcgacgcaggcgcacggagacccgccggcagcgcgggacaaccaacacaaccaaagaga

SEQ ID NO: 131242 - RNA, 81 nt, Homo sapiens
ccagcagccgggcaaggaggggaggcgagaacacgaggagcccgacacgggagcgcgaggccaggccaacgccgggaagac

SEQ ID NO: 131243 - RNA, 73 nt, Homo sapiens
gcacaagcggagcccaacgaaaccgaacaggacaggaccccccgcagagacaggggcgagcccaaaggaacac

SEQ ID NO: 131244 - RNA, 73 nt, Homo sapiens
agggaaaaaaagaccgaacagaaaccccccccccagccaccaagagaaggcacccggacacgaccaaaacccc

SEQ ID NO: 131245 - RNA, 76 nt, Homo sapiens
gggagcgcggaggagcggccagggcccaaggagcgcagcgcgcagcccaagagcgggggggcacgaccgggagaaa

SEQ ID NO: 131246 - RNA, 82 nt, Homo sapiens
agcgaacaaggagaaagccacaacagggcggcaacaggggcgagaaagggccagacggggcagggaacaacgggcgaaaggg

SEQ ID NO: 131247 - RNA, 44 nt, Homo sapiens
ggaaaagacaagagaccggaagagcgcccccgagggaagcaagg

SEQ ID NO: 131248 - RNA, 71 nt, Homo sapiens
cacaagaccaaaggaacgggcacaaccacggggcaggggcaaggccacaggccccaagaaccgacgagccc

SEQ ID NO: 131249 - RNA, 76 nt, Homo sapiens
gcccagcgaccccagaaaggaaacggaaagacccagggaaacgacagggagaccagaaacgcagaaggcaaaggag

SEQ ID NO: 131250 - RNA, 66 nt, Homo sapiens
cacgccggcccagcccaaacgggcagcgaagggaacagcagagaacaaaggaccgcaaacgaagac

SEQ ID NO: 131251 - RNA, 75 nt, Homo sapiens
gacaagagcaagaccccggaacccgaagcgggaaaggaaaaggggaagaaggagaccagaaaagcagagcagaca

SEQ ID NO: 131252 - RNA, 69 nt, Homo sapiens
gcccagcaccacaagacccaagggcccagcagggaagaggcaggaaccgcagaacgaagccacaaaggg

SEQ ID NO: 131253 - RNA, 38 nt, Homo sapiens
ggaccagaagaaccaaacaggcagggcccagccccaac

SEQ ID NO: 131254 - RNA, 80 nt, Homo sapiens
gggccgggaagcgcggagagacggcgcccgccccccgccgccgcccaagcgggccaagaccgaacggcgggcggccagga

SEQ ID NO: 131255 - RNA, 83 nt, Homo sapiens
gggcccgcacgcagcccccccggcagagagccaggacccagaccaggaacaggggaaacgaagacaacaaagagaagaaacgc

SEQ ID NO: 131256 - RNA, 83 nt, Homo sapiens
gacggggcagcaaccaggagacccgggccgcaggaagcccccgcggaccgaaagacaaagaaacagccggaaaagcacgagca

SEQ ID NO: 131257 - RNA, 78 nt, Homo sapiens
aaagccgaagaccccggagccccagccagggaaccacggagcacgagaaaacggcgggaacgcaaggagggacaggac

SEQ ID NO: 131258 - RNA, 95 nt, Homo sapiens
gaaaaacacgcaggaagcgcacaagaagcacaagaggacgagacccaacagggacccggggcaggaccgagggagcagcgcggagggagagccag

SEQ ID NO: 131259 - RNA, 83 nt, Homo sapiens
gcagccccggccggccccggccccccgcccaggcggggccgagcgacacgcaggccagccgagaggaagaggcaagcgaggag

SEQ ID NO: 131260 - RNA, 72 nt, Homo sapiens
ggaagaaccggccgaaaggggagccccccaaacccgggaagcggaggaggaagaagcaaagggggccgcgcc

SEQ ID NO: 131261 - RNA, 54 nt, Homo sapiens
cggggagccagcgagcccccccgacacggccaaggagacagacccagcacggac

SEQ ID NO: 131262 - RNA, 72 nt, Homo sapiens
gcaagaagcaaagcgaaagggagaaagccagggcacccacagaaggagaacaagcagagcaccggacacgag

SEQ ID NO: 131263 - RNA, 83 nt, Homo sapiens
cggggaaggagcacaagacaggggggagacggacgaccccagcggcagcccccgacccaagggaggacggaggcacaggagga

SEQ ID NO: 131264 - RNA, 37 nt, Homo sapiens
acgcacaaggagagaggagacgggcaccaggcccagg

SEQ ID NO: 131265 - RNA, 75 nt, Homo sapiens
cacgacggcgaggaacgcgggaaccgcccgggggaacccaggccagcccgcagccggaggggccaccagccccgg

SEQ ID NO: 131266 - RNA, 57 nt, Homo sapiens
gccaagagggaaggagacgaggagcaaccaaggccaaaggagaggaagagaaagcag

SEQ ID NO: 131267 - RNA, 107 nt, Homo sapiens
cggggcagcccagaacgccgaggaagagggccccgggcccccacgccccaggcccaggcgcgcgacgggaccacaggcgaccgggaccacgcggcgacgcggccgac

SEQ ID NO: 131268 - RNA, 63 nt, Homo sapiens
cgcgcccgccgagcgcaacagcggcgggcggggcaccccagagccacacgaaagccaaaggga

SEQ ID NO: 131269 - RNA, 73 nt, Homo sapiens
gaaggcaccaagcgggaggcagggaaggaacacacaagagaccaggcgcgaaacccagacccgaacacagcga

SEQ ID NO: 131270 - RNA, 81 nt, Homo sapiens
agccgggcggcagggccccgagccggcccgggcgagaggaggaaaaccaggaaggacaggaccagaagagaaaaacagcag

SEQ ID NO: 131271 - RNA, 72 nt, Homo sapiens
cgagaccagccgcgaacgcgaaacagaccccgaaaagcccggaaggacaagccagcccaaacgaacaacaag

SEQ ID NO: 131272 - RNA, 51 nt, Homo sapiens
gaccccacgaaccgggggcagaacagaaaggcgcgcccacccgggcagaaa

SEQ ID NO: 131273 - RNA, 68 nt, Homo sapiens
gccagagaaccaagaaaggaccaggacccaagggaagacaaaggccaacagagcgaacaaaggcagca

SEQ ID NO: 131274 - RNA, 55 nt, Homo sapiens
caagagaagacggggcgagcccccccagaaaggaaaacaggcaacccgaaaccgc

SEQ ID NO: 131275 - RNA, 70 nt, Homo sapiens
gcggaaaggcgcaggaaagggcggagaacggaaaagcaccaggaagcagagaggaccgcagaagggaagg

SEQ ID NO: 131276 - RNA, 76 nt, Homo sapiens
aacagaccacgcgccgcgacggccggccgcgccaccgcaccgccaccggcccgacccaagcaaaggggaccggaca

SEQ ID NO: 131277 - RNA, 73 nt, Homo sapiens
acgaagccgagaggccggacgagacccgggcccaaagccgaaggcaagggaaggaagaccgaaaacagcacca

SEQ ID NO: 131278 - RNA, 39 nt, Homo sapiens
ccggggacgggaaagaaccagacggagcgcccgcaccca

SEQ ID NO: 131279 - RNA, 58 nt, Homo sapiens
gccgacgcaccacacgacggcgcagggcagaccacagagaagcccacccggaaacaaa

SEQ ID NO: 131280 - RNA, 79 nt, Homo sapiens
ggcggaagacgcagacgccggccagggccaccggccaccaaacgcaccacgggcccaaaccaggcccgcaacaggcgcg

SEQ ID NO: 131281 - RNA, 56 nt, Homo sapiens
acgccgggcgccaagcacccgggccgaccgaagacagagccgccgcccaagggcag

SEQ ID NO: 131282 - RNA, 55 nt, Homo sapiens
ccacacgcgacgggggagccgcgggcagcaagcaaagacggaggagcagacggcg

SEQ ID NO: 131283 - RNA, 79 nt, Homo sapiens
gcaagacccacggaccggggcaggaaaggaaccaggagagagcagccagaggaccaggacacagaacgacagggcccca

SEQ ID NO: 131284 - RNA, 81 nt, Homo sapiens
gcccagagcacgacgagcgcggaggaccgggaggccccgggcgcggggaaggaagacccacaagagaccacgcagagacag

SEQ ID NO: 131285 - RNA, 46 nt, Homo sapiens
agcgacccgacgagcgcaaggagaggcggcaccgcagagccggccc

SEQ ID NO: 131286 - RNA, 95 nt, Homo sapiens
gcgggaacagccagcaaaggcaggggaggaagccacccgagaacccaggagaaacgagagggacagcaaggaagacgccagagagcggcacaccg

SEQ ID NO: 131287 - RNA, 76 nt, Homo sapiens
ggcgccagccggaagcccgagggcagcgcccacggccgcgaccggccggacgaggccagagcagaaacagaaagca

SEQ ID NO: 131288 - RNA, 84 nt, Homo sapiens
aggaagaaggaccaaaacagcagaccgaaccacacccggggggcagcgggcccggacgccgacccccgcagaagggcgacgacc

SEQ ID NO: 131289 - RNA, 73 nt, Homo sapiens
aggaacagcagcaacgcggaaggaagaacagaaacacgaccaagagaggggcagcagggaccgggcgccagcc

SEQ ID NO: 131290 - RNA, 71 nt, Homo sapiens
agcaaacgagcagggcaaggccagaaaggaggcccacagccgaccgagcggggcaggacacggaagaacaa

SEQ ID NO: 131291 - RNA, 56 nt, Homo sapiens
cgcccaggcacccggcccgggaaaaggacaaccggggaagcagaacacgacgagga

SEQ ID NO: 131292 - RNA, 82 nt, Homo sapiens
agacagggacagcaacgcaccggacccccaaagaagcaaagaggcggcgacggcggcgcgaggaccgaccgggcccgcggac

SEQ ID NO: 131293 - RNA, 67 nt, Homo sapiens
aaacaaaggaagagccccgaggagaccagcaaacgcagaacaaagacgcccaggaagagacaagaac

SEQ ID NO: 131294 - RNA, 64 nt, Homo sapiens
caacgacacaagaaacacaaccagacgcagaaaaccaggaaggggcaaacagagcacgggaccg

SEQ ID NO: 131295 - RNA, 77 nt, Homo sapiens
acacgcaggaacggcccagcacaagaccgcgacaggccgcccaggcccacccgcacacccacaacagacagagacag

SEQ ID NO: 131296 - RNA, 65 nt, Homo sapiens
cgggcgccgacgcccgcggcccacaggcccagaaacaagaacgagaagacagaccggaaacgagg

SEQ ID NO: 131297 - RNA, 76 nt, Homo sapiens
cggagagggcgaacaggaaccccagacaccgcaccgagcgacaggcagggcccagagcgccgcacccacaccaaag

SEQ ID NO: 131298 - RNA, 87 nt, Homo sapiens
cgcgcagccaggccgagaaccccagcggagaaccaccgcacaagagccaagaacaagggccgcgagggaagcccccacagagagcac

SEQ ID NO: 131299 - RNA, 65 nt, Homo sapiens
cagcgccacaggaaaccgaaaccaggggaacagagcagccggagccggacgagcccagcaaccag

SEQ ID NO: 131300 - RNA, 70 nt, Homo sapiens
ccacacagcaaggcagagggcggggcgcgagagagacgccaggccacgcaacgagaagcgggggacagag

SEQ ID NO: 131301 - RNA, 85 nt, Homo sapiens
aaggcaaaagcagcacggccagagggcaggaacagagcaacagggagaaagacagcaaagaaaaggagaagaaaggaaaaaaaca

SEQ ID NO: 131302 - RNA, 81 nt, Homo sapiens
acaccgccagccacggaaacagaacacgccggaagagacacccaagcaggagagaagcacaaagaggccggaagagcggga

SEQ ID NO: 131303 - RNA, 78 nt, Homo sapiens
gaggcacaagcaacaaaaagaaacagaacacggcacgagcgcgcagccagagaaacagcaaaaaaccaacaaaagccc

SEQ ID NO: 131304 - RNA, 86 nt, Homo sapiens
caagaagccagcaagcggccaggcaaaagcagaccggaaaacccaccggcaagaccacacccgaggggagcccaggacaccacgaa

SEQ ID NO: 131305 - RNA, 110 nt, Homo sapiens
gcccaccccaccgccagcggaacccggggacacgacgccccaaaccgccaggagaaaaaagcggagcggcggacaccagaagagaaaagggcaagccagacgcacagggc

SEQ ID NO: 131306 - RNA, 79 nt, Homo sapiens
cgcaccggacagagagagagaaagaaaacagcccggccacaacagagcgaggaacaaacgaggagccagaggaaagcgg

SEQ ID NO: 131307 - RNA, 69 nt, Homo sapiens
accccgacaagccaggagcgcggaacccgggaccagacagccacagggaaagacgggccaccagagaac

SEQ ID NO: 131308 - RNA, 55 nt, Homo sapiens
gccacggaagacggcccccgcgcccccagggagcgcgaaggacggaggcccagaa

SEQ ID NO: 131309 - RNA, 85 nt, Homo sapiens
gcacaaagccagacccagccgcgccgaaagggacgccgccagcggaacaccaaacgaggccggacacgaggccgccaaggcgagc

SEQ ID NO: 131310 - RNA, 80 nt, Homo sapiens
agaagaaaagaaaaccccaaaaagccgcccaaccggacaagagagaagcgagggacaccgcgccccgggcaccagcagcg

SEQ ID NO: 131311 - RNA, 77 nt, Homo sapiens
aagaacaaagcgccccaaaaaagcgccagaaccagacagccagaaggcaagaggaaccaaaggaaaaggcacaaagc

SEQ ID NO: 131312 - RNA, 66 nt, Homo sapiens
cggccacagacaagaagccacagcagacgggggcacaggcagagggaggagagaaccccagccccg

SEQ ID NO: 131313 - RNA, 56 nt, Homo sapiens
cagcgagacccggggcgaggacccccgagccaggcacacagacagaggcccccaag

SEQ ID NO: 131314 - RNA, 84 nt, Homo sapiens
ggagcacggcgacgccagcggcgggaaggaggcagaaagggagccccaagagagagggccaagccaaccggccaaaacaaccag

SEQ ID NO: 131315 - RNA, 77 nt, Homo sapiens
ggacaagaagaagacagaacgcccccaccaccgcaaacagaggagacaggccgagaccgagggccccgcaccccgga

SEQ ID NO: 131316 - RNA, 71 nt, Homo sapiens
cgggggaaacagagaaagaaggcggccaggccaaccgaagccacagaccccgccggggaagaacaggaggg

SEQ ID NO: 131317 - RNA, 49 nt, Homo sapiens
accagaaccagcacgagggacgaaccagcgcagcggcgaccagcaccac

SEQ ID NO: 131318 - RNA, 93 nt, Homo sapiens
cacgggccggaagcaccaggacccccggggaaacgcgccggcggcgaaggagccgagcccccaggcaacaggaagaagaacccacaggggcca

SEQ ID NO: 131319 - RNA, 76 nt, Homo sapiens
cggaccgcaggcaaaacagaggaaaaggcccaggcgagaaagaaaccggaagaaagagacgccaaaggagaccgag

SEQ ID NO: 131320 - RNA, 60 nt, Homo sapiens
ccggaggaagagaaggcagcggacgaggcaggcgggcccgcgaaggggcagaccaacacc

SEQ ID NO: 131321 - RNA, 74 nt, Homo sapiens
ccccggaggagcggagaaccggagcggccaacggcaggagaaccacccccgaacaacaaacccacaccagagac

SEQ ID NO: 131322 - RNA, 69 nt, Homo sapiens
cggccgagacaaaggcaccaggccaccacagaaacaaaagcaacaaagaggacaacaggcacaaagaga

SEQ ID NO: 131323 - RNA, 49 nt, Homo sapiens
cacagccacagagaggaaacacgccgaacacacgaagggacccagcaga

SEQ ID NO: 131324 - RNA, 87 nt, Homo sapiens
aagggaaaccgggggccccggacaacccgagcagcacccaggccacagaggaggaaagagaggggaaagaagcagccaagccccaag

SEQ ID NO: 131325 - RNA, 86 nt, Homo sapiens
ccaggccaacacccccccccaccccaggacggcccccgcagcaagccccagccaaagggggcgcggagaccgaaaaaagccagaaa

SEQ ID NO: 131326 - RNA, 56 nt, Homo sapiens
gcgaacacgccgacagggacgaagaaaagggggacggacagcgcaggagaagaggg

SEQ ID NO: 131327 - RNA, 79 nt, Homo sapiens
aggacgggccccaaggaggccccaacggcggcccacggcacccacggccccagcacaccccagagagacggggcaccgg

SEQ ID NO: 131328 - RNA, 77 nt, Homo sapiens
ggagccgcgaagaacgcccgcagcaccggaccccgggcagaggcagcccaagaagagagacaaacacacacgagaga

SEQ ID NO: 131329 - RNA, 80 nt, Homo sapiens
ggaaaggcagaggccagaacccagccaaggacccaaaccgggagaaggcaaaagcagaccggaaaacccaccggcaagac

SEQ ID NO: 131330 - RNA, 80 nt, Homo sapiens
ggccaggaaagacagggcacaaaggagccagaggaggcgaagagccacgccaagaccggcaacaccacacaggccggcca

SEQ ID NO: 131331 - RNA, 66 nt, Homo sapiens
gagacggacaagcaggacgccagccacgagagcgcaccacaagacaaacgccacaccgcccaccgg

SEQ ID NO: 131332 - RNA, 82 nt, Homo sapiens
cacagcaacacagcgccaccgcggcacccagggcccagggacgacccaccggagcccggacgcgaacaagagaggcagcccc

SEQ ID NO: 131333 - RNA, 85 nt, Homo sapiens
gccgcaccgcgagacgagccaagaaccggcacggcccggccccgcccggcgccgaggacccccgacagacgcgaagcaaagcgcc

SEQ ID NO: 131334 - RNA, 78 nt, Homo sapiens
cggaaacccaaaccagccgaaagcgaaagcaaccaagcgggcgaacgcaagcagacggaagaagacgaagaaaacccg

SEQ ID NO: 131335 - RNA, 68 nt, Homo sapiens
agagaaagaagacaaagagacccgaaggagggaggacaggcaggggagcgggagcaagcaggcagggg

SEQ ID NO: 131336 - RNA, 70 nt, Homo sapiens
caggcaagcggaagaaccgaacacacaaagcgagacgacgggaccgaaggaccccgccagagacaaccga

SEQ ID NO: 131337 - RNA, 50 nt, Homo sapiens
cagaaaaacagggagggcagcccagggacccgaaggcaaccaaacgggcg

SEQ ID NO: 131338 - RNA, 82 nt, Homo sapiens
gagacggcgacccaggcacggggagccacagaagcgaccccaaaccgagacacaaagaccggacagaggaagaaacccggaa

SEQ ID NO: 131339 - RNA, 85 nt, Homo sapiens
ccgccgccgagcgagcgggccgagccggaggggggcgacgcgcgggcaccccgggccgcagcgggcacggccgagcagagaggac

SEQ ID NO: 131340 - RNA, 79 nt, Homo sapiens
ccccccggccggggcggcgggagggggcgggacggccgcccgcagcaggcacacacgcagggcccgcgaggcagccacg

SEQ ID NO: 131341 - RNA, 76 nt, Homo sapiens
gcgccagcagacaagacagaccacaggaccaacaggcagcaggaaagaaagccccaaaagaggagaccaagaaagg

SEQ ID NO: 131342 - RNA, 73 nt, Homo sapiens
aggcgcggccacacgacaaaccgaccagcagcggaccagaggcacaggccgcaggaaacgacaccccaccagc

SEQ ID NO: 131343 - RNA, 80 nt, Homo sapiens
gggaagcggaacagccagaaggacccgaaaccagcccacgccaggcaagaaaaagcggggaaaacaaaaaaaagaaggag

SEQ ID NO: 131344 - RNA, 74 nt, Homo sapiens
cgggcagggcccaccccgcgcccgacagaaaaacacggagagcaacaaagagggaagcggagaagaaagaagac

SEQ ID NO: 131345 - RNA, 71 nt, Homo sapiens
gggcgcgggaggcccgccggcccgcggcccggggacccacacccagcagacacaggacaaccagaagaaca

SEQ ID NO: 131346 - RNA, 73 nt, Homo sapiens
cccgaggcccagaggaggaggcacacgcccaaaaaccacggagcacggggcggacgagagcacccaggagaaa

SEQ ID NO: 131347 - RNA, 40 nt, Homo sapiens
ccgggggagcaggaaagggcaggccgagggcaccgaaacc

SEQ ID NO: 131348 - RNA, 75 nt, Homo sapiens
ccgaagggaagacggaccaggcaaaaggaacaagacaccaagggaaggaaacacaaaccagcacgaagaaaagcc

SEQ ID NO: 131349 - RNA, 60 nt, Homo sapiens
gggggaaaccggcaacagaaaggaagggaaggaccagggaacaagagacggaaaaccggg

SEQ ID NO: 131350 - RNA, 70 nt, Homo sapiens
cagcggagaaacagggaaaaagaaaagggcgaagacccgaagcagcgcaggaacagaagagaagaccaga

SEQ ID NO: 131351 - RNA, 78 nt, Homo sapiens
cccggcaacgcggcaagccaaagcgccacagagggaaaacgaaagccggaaacgcgggaacaagaaaaaaaaaacaac

SEQ ID NO: 131352 - RNA, 57 nt, Homo sapiens
cccggcagaaccccgacgacgaggacgcaggaaacaggaacacgaaagaggaaaaac

SEQ ID NO: 131353 - RNA, 80 nt, Homo sapiens
acacagagcccaaacccccaaagcaaagcgaggaagaggagcccagcagcagcaggggggaaccagcgcgccccaaaaga

SEQ ID NO: 131354 - RNA, 73 nt, Homo sapiens
gacacggcaggcgccaggagaaaggaggacccgggaagacagagacgggcaacggaaagcgaacaccaagaga

SEQ ID NO: 131355 - RNA, 37 nt, Homo sapiens
caccaaccccgacaggagggaaacggaaacggccaga

SEQ ID NO: 131356 - RNA, 83 nt, Homo sapiens
cccagccccgccaagcgcggccgccgcccccgcccagaaaccccaccacgcggcaggggccgccgaggaaaaagcaacaagaa

SEQ ID NO: 131357 - RNA, 82 nt, Homo sapiens
cggcgcaaccagcccagggcggcggagccggccccaaagacgggaaagcacgccaccaaagccacggcacagggaagaagaa

SEQ ID NO: 131358 - RNA, 79 nt, Homo sapiens
gcggccagaacccggccccaccgccccaccaccccaccagacggcgccccaagaccaggcgcccaagcgcaaggaaaag

SEQ ID NO: 131359 - RNA, 79 nt, Homo sapiens
cccacaaccgcccccggacaaggggccgacaaccggccaccagcgcgccgcccaaagaccaacagggcagcagaccccc

SEQ ID NO: 131360 - RNA, 71 nt, Homo sapiens
cgggggagcgcacacccacggagcccagccggccgggccgcggagccaagggacggaccgcaaggacccag

SEQ ID NO: 131361 - RNA, 40 nt, Homo sapiens
ccccaggggcccgcccagcagcccagcgacaagcgccccc

SEQ ID NO: 131362 - RNA, 75 nt, Homo sapiens
aaccgcagcacaaaagacagggggggacagcccggcagacgggccgcccccaggcaccaccaacgcgcccacacc

SEQ ID NO: 131363 - RNA, 72 nt, Homo sapiens
gaaccaggccgcgcccagagcccccagaacgcagaaggcagcgcaggaccaggcgcgagcggccaggcgcgc

SEQ ID NO: 131364 - RNA, 83 nt, Homo sapiens
cccgcacagagcagacgaaaccgacaagcgcgcaaaggacaccaggggggaaaaaccacacaggcaaagaacgcgcaaaacag

SEQ ID NO: 131365 - RNA, 78 nt, Homo sapiens
gcgcagagaccgccagcggcagggccacgaggagaacacccgcagcacaagagaggggcgccccacgcccccaccaaa

SEQ ID NO: 131366 - RNA, 51 nt, Homo sapiens
cagacacgaggaaaagccagaccagggcagaacaagcagaaaacagaacgc

SEQ ID NO: 131367 - RNA, 86 nt, Homo sapiens
caggccaagagggacccacccggcgcggggagacacagagcaccagccagaggagagggcccagccgccccgcccccccgcccccg

SEQ ID NO: 131368 - RNA, 67 nt, Homo sapiens
ggagacaggaaaaggccaaagaaaacggggacggacccaggccaggaaagaaagaaccgccacgggc

SEQ ID NO: 131369 - RNA, 80 nt, Homo sapiens
caggcgaggcagcccgagcgcagcgcaccccggacaccggaaacacgccgcaccagggaggagagaaacgacacccccca

SEQ ID NO: 131370 - RNA, 76 nt, Homo sapiens
ccggcgcaggcggcgcggagagggggcgcgagcggggggcaagcagcccggccagggacagcgcacagcagggaac

SEQ ID NO: 131371 - RNA, 82 nt, Homo sapiens
cggcccaaaggcccggacccaaaacaggaagaccacaccacccggcaagaacgccacacggccccgccccagaagcacacgg

SEQ ID NO: 131372 - RNA, 72 nt, Homo sapiens
cccgagaggaaacacccccagaagaggggcacagaacgaagaggagcaggaaacagagaagagacaacagca

SEQ ID NO: 131373 - RNA, 70 nt, Homo sapiens
cgcgaggacccacaagaaccgagaggaccaacaccgcagacgaagcgccacgccaggacacagaccagcc

SEQ ID NO: 131374 - RNA, 73 nt, Homo sapiens
agacaagaaccagagaaacacagagcccggagggacaggaagggcaacccaggaaccccgcccaccaaaccgg

SEQ ID NO: 131375 - RNA, 73 nt, Homo sapiens
gagccgggaacccacagggaggacaagaacgagccagcaaacccgaggagccagagaccaaagccacaaaaaa

SEQ ID NO: 131376 - RNA, 84 nt, Homo sapiens
caaagagagcgcgggccgcaccgccgcgccccgcaccccccgagcagcccggggaccagcacgcagaaccacaccggacggagg

SEQ ID NO: 131377 - RNA, 89 nt, Homo sapiens
ggccgggcgcccacccccggggcggcagcgcacgcgcagccaccggggccggaccaggaacgcaccaagaagaagcgccggggggaccg

SEQ ID NO: 131378 - RNA, 81 nt, Homo sapiens
gcagggagaagaccagcaagcgggcggcaagacacggggcgacgccacagagaaagaccgaacaggaaggccccggaacca

SEQ ID NO: 131379 - RNA, 76 nt, Homo sapiens
cccacgccggggacaagccggcaacacacggaagagaagcagaggaaaagaaggcaagaagaagggggaaggaagg

SEQ ID NO: 131380 - RNA, 76 nt, Homo sapiens
cagaccggcgacccgcgacgccgagcacccaggcgacgcccaccaagaggcccacgcggaccggcagcgccaccgg

SEQ ID NO: 131381 - RNA, 71 nt, Homo sapiens
gaacgacccaaggaagggagagcgaaaaggccaagagaacggggcggcaaaggcaagaagcgaacacccgc

SEQ ID NO: 131382 - RNA, 78 nt, Homo sapiens
cagaagaccacacgccggggggagacgggacgcgcgacgccccgcccagaaaaaggcacaaacccagcacagagaaga

SEQ ID NO: 131383 - RNA, 52 nt, Homo sapiens
gagcccaaacaccaccaccaagcagaccgaaaagggcggaaaaggaccaagg

SEQ ID NO: 131384 - RNA, 54 nt, Homo sapiens
cacaacaccaggcgccagcacacccacagaggcagaccgaaaacacccagcaag

SEQ ID NO: 131385 - RNA, 80 nt, Homo sapiens
ccgaacgcccgagaaaaacgccggagcagccgggaaagcgaaagcgggcgaaggaaggggacagaaaccaagcaagacgc

SEQ ID NO: 131386 - RNA, 68 nt, Homo sapiens
cgcacacgcacccaggggcagccgcaaggcgcgccccccgggagaaccccagcggcagcaccaaggcg

SEQ ID NO: 131387 - RNA, 72 nt, Homo sapiens
cagccaaccgccggcaaccccgggcggccgcaccgccaggccgaacggccccccccaaagaggagaaaccca

SEQ ID NO: 131388 - RNA, 76 nt, Homo sapiens
gaggggaagggaaacacacggagacaaaccacaaaacgaagcaaggccagcagagcccaagggcgccagccaccac

SEQ ID NO: 131389 - RNA, 41 nt, Homo sapiens
agccccagaaaaaggggcaaaagcaagcggaaaaggaaacc

SEQ ID NO: 131390 - RNA, 66 nt, Homo sapiens
aacccccaaccgaccggcaagaaaagaaagggagaccagaagagaaccgacaaaccaccaccaagc

SEQ ID NO: 131391 - RNA, 38 nt, Homo sapiens
ggaaccggagggggcacaaagcgccggaagaagacggg

SEQ ID NO: 131392 - RNA, 80 nt, Homo sapiens
caaccccacccacaccagcccaagggaaagccaaggaggagacacacagccccagacgggaggaaaaaaggaaggaccgc

SEQ ID NO: 131393 - RNA, 74 nt, Homo sapiens
acaacccgacccgacgagacgggggaggagagcaaggcgagagaggagaacagagaaaccaaaagcagaagaaa

SEQ ID NO: 131394 - RNA, 78 nt, Homo sapiens
gcaggcggagagacacgccaggaggagagagcaaaagagaagcaaccaacgcggaaacggggcacaagccagcaagcg

SEQ ID NO: 131395 - RNA, 64 nt, Homo sapiens
gcggacaaggcaggcccggaggccaaaaggaggcccagaggaaaaagacacgcgagaagacgag

SEQ ID NO: 131396 - RNA, 78 nt, Homo sapiens
aagccaaaggggaaccaggagaacggaggcaagcagacacgccaagaggccaagcaagacaagggaggcgaggacgga

SEQ ID NO: 131397 - RNA, 71 nt, Homo sapiens
gaaccagggaagaaagaggcaaccccggaaagggacagggcagcggccgagagcccgagaagaggccgccc

SEQ ID NO: 131398 - RNA, 72 nt, Homo sapiens
gggaaaccagcgcgcgccaaagggcgacggcacacagagagaccgaggccgagcggaacgcagagagaaaaa

SEQ ID NO: 131399 - RNA, 76 nt, Homo sapiens
ggcagcgaacaaggagaaagccacaacagggcggcaacaggggcgagaaagggggcacccggccgccgccagggca

SEQ ID NO: 131400 - RNA, 77 nt, Homo sapiens
agaccaaggaagaggcgaacaaggaccgaagagcaggcggggcggggaaggagacacccagaccacaacacagcaga

SEQ ID NO: 131401 - RNA, 47 nt, Homo sapiens
gagagggaagccaaagaaggaagagccgcccgggagacgcaccagag

SEQ ID NO: 131402 - RNA, 77 nt, Homo sapiens
ggacgcgcgacgccccgcccaggaggacccacagcccaggacccagagggacaggaaccacggagggaccaggagca

SEQ ID NO: 131403 - RNA, 69 nt, Homo sapiens
aaacgccgcacgaacgaaagcaagggcgcgggcgggagaacgggcgcaccggccagacgagcagccgcc

SEQ ID NO: 131404 - RNA, 40 nt, Homo sapiens
gacaaaacagacaagcacaggaagaccgaagaggccaacg

SEQ ID NO: 131405 - RNA, 79 nt, Homo sapiens
ccagagcggagggccgccagccccccacgagaaggaggaccggcgcaaagaaggaggagaaggaggagccagagccccg

SEQ ID NO: 131406 - RNA, 85 nt, Homo sapiens
cggccgcgacgcaggcgcacggagacccgccggcagaccacccgagcacgaagagaccagaaaagcgcagagcagaccacgggcg

SEQ ID NO: 131407 - RNA, 73 nt, Homo sapiens
cgaaccacgcccgggccaacagaacacagggggggacacccacggccaaccaaaaaccgggaacagagaaaca

SEQ ID NO: 131408 - RNA, 85 nt, Homo sapiens
ggcgggcaacacccgccgcagagagggagaacaagaccaagaggaaagccagccagaggagggaaacagcaaaaagaaccagaca

SEQ ID NO: 131409 - RNA, 74 nt, Homo sapiens
cccgggcgaccacggggcgcggcgcaaaggccgcaggcgcgcgaccaagaacgcccagcccgcgggcaccggca

SEQ ID NO: 131410 - RNA, 78 nt, Homo sapiens
aagaccccgcaaaaaagccaaaacaaagagccggcccaagacaagggcacacagggaccaagaagccccggggacacg

SEQ ID NO: 131411 - RNA, 77 nt, Homo sapiens
gggggcggggcggcccaccaacaggaacagggcagacgagcggaggacacccaacccgggacggaaacagcaggggg

SEQ ID NO: 131412 - RNA, 58 nt, Homo sapiens
ggaccaggccccaagcccgaggcccagaggaggagacggaggaaccgaggcccagcac

SEQ ID NO: 131413 - RNA, 71 nt, Homo sapiens
ccggcgcccccggggacggcagcggcaccaccgcgcagaggggcagggggagagaaccccagcacaaaagg

SEQ ID NO: 131414 - RNA, 86 nt, Homo sapiens
gccacaacgccgcaacaaaagaaacccgggccgcggaaggcccgaaggcacagccagagaacaacacacacacacaggaaacaggg

SEQ ID NO: 131415 - RNA, 69 nt, Homo sapiens
ggagagccgaaccagaagagaaagccgccgcggagaggccggaaggaccacggaaaccccaccaagaca

SEQ ID NO: 131416 - RNA, 55 nt, Homo sapiens
gaggcgaagaaagaccacgccagcaacagaagaaagcaagcaccggggaaagcgg

SEQ ID NO: 131417 - RNA, 69 nt, Homo sapiens
aaacgcggccccagcccagacgccgagagaagggggcaggagccagccacgggcaaggccagagaaggc

SEQ ID NO: 131418 - RNA, 85 nt, Homo sapiens
aggacggaaggggaagaggcccacccggagaaccccacggagaaccagagcaggaggccacgcgcagccccggaagagccaccca

SEQ ID NO: 131419 - RNA, 42 nt, Homo sapiens
gaaggagcaaaacccaacaccaaaaaggcaaggacagaaccc

SEQ ID NO: 131420 - RNA, 35 nt, Homo sapiens
agaccagcaagacacacgagcaaccgaggaggaca

SEQ ID NO: 131421 - RNA, 75 nt, Homo sapiens
agcaacaaaagcccacacggcgagagagggggaaggcgacaggaaacggccggacaaaggggaccaaagaaaaaa

SEQ ID NO: 131422 - RNA, 76 nt, Homo sapiens
aaccaaaagaagcacaccgacccagagcaacaaacagacagagaccgagagaggcgacagccacccacagccccag

SEQ ID NO: 131423 - RNA, 82 nt, Homo sapiens
aagaggccaaagaagaaagaaacgaagagccacggagccacagagagcggcacaagcccagaacccagcagcggaaggagac

SEQ ID NO: 131424 - RNA, 53 nt, Homo sapiens
cgaaacagcgaggagagagccaaagcagggggaccccaagcaacacacaacac

SEQ ID NO: 131425 - RNA, 66 nt, Homo sapiens
agcgcccccaaacgaggggcgagaaggagcgcagacacagacacaccaacggcaacacccgagagg

SEQ ID NO: 131426 - RNA, 39 nt, Homo sapiens
gcccgcggacccggcagggacgggacaggaacaccagag

SEQ ID NO: 131427 - RNA, 64 nt, Homo sapiens
aagaagaacccaagacggacaccaggacaaaccagacagcaagaaagcaccagccaagcagaag

SEQ ID NO: 131428 - RNA, 78 nt, Homo sapiens
cgacaaaagccaagggcaaacgggcaaacgaagaaaacgacccagccagaggacaaaggaccgaggacagggaagaaa

SEQ ID NO: 131429 - RNA, 84 nt, Homo sapiens
caggccgccccgcggcgcggcagcaccagggccggccgccaccgcccagaacgcggaggagggcaccagacaagaccacccggg

SEQ ID NO: 131430 - RNA, 74 nt, Homo sapiens
agcccccaggacaagggaaccaccggcggaaagaaggagggaccagcacgccgggccaacaccggaaacgccag

SEQ ID NO: 131431 - RNA, 68 nt, Homo sapiens
agagaagcgaaggagagagaaacagccgaagaagaggggagagaacgcaagccagaccaagagagaca

SEQ ID NO: 131432 - RNA, 75 nt, Homo sapiens
gagcaacccgcgccggcccgcccgcccaacccaacagaggaagccgcaagaaacgggacgacaggaaggccagag

SEQ ID NO: 131433 - RNA, 110 nt, Homo sapiens
cggaaggacacacgagaagagggggcggaaccaaaggcgagggcgagaaaagcccagcacagaaacacaggggaaacacgagagagcaacagccgacagagcggcaccga

SEQ ID NO: 131434 - RNA, 76 nt, Homo sapiens
cagcagcagaaaaaccaaggaagaaggagaaagacaaagccccgagaaagaccagcaccgccgaaaagcaaaaaag

SEQ ID NO: 131435 - RNA, 71 nt, Homo sapiens
agccaagggggagcagccacagggcagaccccggccaaagacaagcacaacaagaacgcggcaggagaccc

SEQ ID NO: 131436 - RNA, 77 nt, Homo sapiens
agcggggagcaggagcggcgggcaccccgagacccggggcagacgcccacccagcagcggcggccagaggaaacaga

SEQ ID NO: 131437 - RNA, 61 nt, Homo sapiens
acacgacaccggcgaggaacggcaggggagcccggagcaaccaggagcaaaaggcaaaaca

SEQ ID NO: 131438 - RNA, 81 nt, Homo sapiens
aggcgagggcggagaggcgcacggcgaggcggagaccgagggggagccccgcgcgcggcgcggaccgcacaggacgagcga

SEQ ID NO: 131439 - RNA, 73 nt, Homo sapiens
aaagcggcggagagacaaagagcagaggagcgcagaaaccaaaaaagcaggccgagggacagagaaaaacacg

SEQ ID NO: 131440 - RNA, 74 nt, Homo sapiens
cccgcggcggcgccccaggcgcacaaccaaaccagaccgcagcagccaaagcggacgccggccaccacgaaggc

SEQ ID NO: 131441 - RNA, 70 nt, Homo sapiens
gccggcgggggggcccgaggcgccagcggaaaccacgccaagaaggcgaggcccagaagcacgggcacag

SEQ ID NO: 131442 - RNA, 75 nt, Homo sapiens
gggggcggggccgggccgccgcccgccccggccaccgccccgggaagcccggaaaggagcacgaaaaaccgaacg

SEQ ID NO: 131443 - RNA, 78 nt, Homo sapiens
caggcccggcccagcacccccaggaaagccacacgcaagcacggcagcccacaggcgccccaggggagagcagaccag

SEQ ID NO: 131444 - RNA, 74 nt, Homo sapiens
accaagcaaggaaagaacaagaaaggagagacaaggcgcccgcgaagagcccgcggccccaggcccccccccgc

SEQ ID NO: 131445 - RNA, 81 nt, Homo sapiens
caaagaagcgcagccggagccaaacaggcaccccaccacccaccagggccccgagcaggacccagggccgaggagggcgga

SEQ ID NO: 131446 - RNA, 73 nt, Homo sapiens
accggggcggcccaccccccacgcaccgcacaacaagaggccggcggggcgacaggggaaaaagaaaagggcg

SEQ ID NO: 131447 - RNA, 76 nt, Homo sapiens
ccccagaaggcaccaccacagccgcccaccggaaggccaccccgcagaccggcgggagccccgaggcaccggccaa

SEQ ID NO: 131448 - RNA, 89 nt, Homo sapiens
gcagcccccggggcaagagcaggagcccggcaccccccgccgacaaggaggggaacaagagccaacaaggccccaggcaggggggccgc

SEQ ID NO: 131449 - RNA, 77 nt, Homo sapiens
gaagaggcacaggcccaggcagaccgcagcaaagcgcagaagaccgaaggaccgaagaaagaacgaagaaaaagcgc

SEQ ID NO: 131450 - RNA, 80 nt, Homo sapiens
ccaaaccgccccaagagccgcaggcaccgccgaccgaaaccgcaaacacacgacagaggcaaggcaaacacgaagaggcc

SEQ ID NO: 131451 - RNA, 72 nt, Homo sapiens
gaagacggcccaaaacacagcgcaccacacacagagggaaacggaaagagagaggggcgccagggccaggcg

SEQ ID NO: 131452 - RNA, 69 nt, Homo sapiens
ccgacgcgcaccccggacaccccggaaggggagaggcaaagcagaaagagaaaagcggccagaccagga

SEQ ID NO: 131453 - RNA, 78 nt, Homo sapiens
gagcaaggacccaggggggaacagcagagacgcaacggaaaggcgcaggcagaagccgcccacgaggacgcgggccca

SEQ ID NO: 131454 - RNA, 73 nt, Homo sapiens
gggggcggggaaacggaccaggaccaggaagaacagaggaggacgaccgaagcgagagaagggcaggaccacg

SEQ ID NO: 131455 - RNA, 81 nt, Homo sapiens
gcaggagcccgaccgaagccggaaacgaggcaccagggaagagccagcaagagacggccagcccaacagaaaaggacagga

SEQ ID NO: 131456 - RNA, 97 nt, Homo sapiens
caaagccacagaacacccccaaagagcaacgaagacaacgcagcggcagaaacaaggcgcagacaacgaagagaggaaagaagcggaaaggagggag

SEQ ID NO: 131457 - RNA, 73 nt, Homo sapiens
ccgcgggagagaggacccccccccccccccaagggccgaggagcccaagagaagaaaaggagagagccgagaa

SEQ ID NO: 131458 - RNA, 70 nt, Homo sapiens
ggcggaagggaaccggggcgcaaggccagccccagggaggcacaggacccaggagaaggaccagacgaca

SEQ ID NO: 131459 - RNA, 74 nt, Homo sapiens
ggcaggagagccggccgcgacaggacgcaaaagacgaacacccaagcccagggcgcgaccaccagaaaccacgc

SEQ ID NO: 131460 - RNA, 73 nt, Homo sapiens
gcagaaccaccaaaagccaagaaacgaccccgagagaaacggcgagaaaaccaaacaggagccgacagccgga

SEQ ID NO: 131461 - RNA, 76 nt, Homo sapiens
ccaggccagcccaaacacgccacacgaaacaagaagcagcaaacggagaggcgccggaagaagccgacaaaggcaa

SEQ ID NO: 131462 - RNA, 83 nt, Homo sapiens
gcgcccccggcccgagccgacacccagggaaccccaggaggaagagaaagggaagaaccggagccccaccgcacggccaaccc

SEQ ID NO: 131463 - RNA, 70 nt, Homo sapiens
agcacaagggcagcaccagaaaggcccagggggcgaaagcccaccacaccagcacgggggcggaagcaca

SEQ ID NO: 131464 - RNA, 81 nt, Homo sapiens
ccaggacagcaccagcgggccggaggagccagagcgcagaaaggagcccaagaggacagagaacgaagcacagaaaagcag

SEQ ID NO: 131465 - RNA, 82 nt, Homo sapiens
accgaggagggggcggcgggagaggagaagaaccacggagcaggacccaggcagaggaggccggagcccaccacagacccca

SEQ ID NO: 131466 - RNA, 58 nt, Homo sapiens
aaagaaaccaacaggcggaaagccagaacaggaaagccaccgccaccaaccagcaacc

SEQ ID NO: 131467 - RNA, 58 nt, Homo sapiens
ggcgaccacgccacgcccgacaaagccacagacccaagcagcggaacaggaggcagca

SEQ ID NO: 131468 - RNA, 87 nt, Homo sapiens
ggaacccgggagccaggaaggaaggagcacccagaagcagggacagggagcggggggaggaccagaaacagagcggaagcgcagcac

SEQ ID NO: 131469 - RNA, 63 nt, Homo sapiens
cgccaacgcccaccgaacggccagagaagggacaaaggaaaaagaggaggaaaacagcaggga

SEQ ID NO: 131470 - RNA, 57 nt, Homo sapiens
agaggagagaacggccgaggaacagcgcccagaggcaacagccaaccagaaaaccag

SEQ ID NO: 131471 - RNA, 74 nt, Homo sapiens
gcggcacagcacagacaccgcgccgaaggagcagccaccaaccagcacaacaacaggaacacgcgagacagggc

SEQ ID NO: 131472 - RNA, 72 nt, Homo sapiens
agacacgagacgaaaaagcagaccggcgcgagaaccgggagccacgcacccaaggcagacccagaaggccga

SEQ ID NO: 131473 - RNA, 59 nt, Homo sapiens
ggccacgcccaggcgacgggaaaagccagccggcacggccacaaccgaccggacaccaa

SEQ ID NO: 131474 - RNA, 73 nt, Homo sapiens
gaggagaggagagcagaggcggcagaaggccacagaccggccggcggaggaggccaagcggaaaaagggccac

SEQ ID NO: 131475 - RNA, 32 nt, Homo sapiens
ggcgaaacccacaaggacaaaccggcgaccac

SEQ ID NO: 131476 - RNA, 98 nt, Homo sapiens
ggccagaggcgaggcagggaggacccacccccgggggaaaagaacgaggcaaaaaccccccacgaaagaaacggaggccaggaaacgagagcagcaaa

SEQ ID NO: 131477 - RNA, 78 nt, Homo sapiens
cccggcggcgacaccacgggaggcagaccacgagaagccagagaaaccgcaagaagcacagaagcagggaggaggggc

SEQ ID NO: 131478 - RNA, 39 nt, Homo sapiens
cgccccaccgcgaggcagagaagaccaagagacagaagg

SEQ ID NO: 131479 - RNA, 72 nt, Homo sapiens
gggggaagaggcgcggccggaggaaaccaagacagcccaaacgccccacgaccaggaggggcccgagagaag

SEQ ID NO: 131480 - RNA, 68 nt, Homo sapiens
acaaacggccaagaagggccaccccacagacggcgcaaaaaccagacaccccacaccaccacccagac

SEQ ID NO: 131481 - RNA, 41 nt, Homo sapiens
gagaggcaagaccaccgggacgggcggaccccggcaaaacg

SEQ ID NO: 131482 - RNA, 97 nt, Homo sapiens
ccgccccgccgccccacgggaggaggaggcccgcccggccgagaccccgcgggagaccagaaggaaaacacaccaggcacagaaaggccccccgcca

SEQ ID NO: 131483 - RNA, 63 nt, Homo sapiens
gcagcggcgcagcgcccgccgcggcccgggcccccccgccggaaacagagacagcagcaacac

SEQ ID NO: 131484 - RNA, 81 nt, Homo sapiens
aggccccaacgggggaagacccccacggggcggccaagagcaagaacgaggccaaggaggagggacacagagacagcgaag

SEQ ID NO: 131485 - RNA, 57 nt, Homo sapiens
caaccaggaaagaagagggcagcagaagaaaggaaccaggcaagggacagaacccgg

SEQ ID NO: 131486 - RNA, 70 nt, Homo sapiens
aggagccagaagaagggaaagcacaagaggagagcaagagcaaaaaggaaacgaacagaggcgccaagaa

SEQ ID NO: 131487 - RNA, 76 nt, Homo sapiens
cagggaaaacacaaaacacaacgggcacacagaagaagggacagcacaaagaaagcagggccgcaggaccgcccag

SEQ ID NO: 131488 - RNA, 70 nt, Homo sapiens
gaaggaccaagaaccagggacacggacacccccggaagacagaagagcccgcagagggccagagcaaacc

SEQ ID NO: 131489 - RNA, 76 nt, Homo sapiens
ggaagagaacggcacgaaaaggcaacacacaagaaacccaggagaaacgagagggacagcaaggaagacgccagag

SEQ ID NO: 131490 - RNA, 78 nt, Homo sapiens
ccagagcgaggacgccggcagggggcacaccaggacagagcaaacagaaggggacccagaagccagcccaaaggaaag

SEQ ID NO: 131491 - RNA, 73 nt, Homo sapiens
gcccgaccgcccacagacccaaacaaagagcccggaaaaggaagaggccaaagaccgcgacaaccagagccga

SEQ ID NO: 131492 - RNA, 85 nt, Homo sapiens
caacaaccccacagaggacaggagaaaggcgaaggcaggagggcaaagggaagagccacaaagggaaccaggcgaagaggaaaaa

SEQ ID NO: 131493 - RNA, 54 nt, Homo sapiens
acaaaaaggacaccagcaagcgcaagaggagaaacccggacacaaaacaagacc

SEQ ID NO: 131494 - RNA, 85 nt, Homo sapiens
ccagcaagccggagccgccagagccaaggccaagccccaagcagcaccccaagcagggggaggaggcaggggaagcacaaaagcg

SEQ ID NO: 131495 - RNA, 58 nt, Homo sapiens
caagcccagacaagccggggaggaagggcggcggaccgcagccggcagacgggggcaa

SEQ ID NO: 131496 - RNA, 118 nt, Homo sapiens
cgggggaggggagcccgcgcccgccgcgggagagaggacccccccccccccccaaggcggacgaaagaaagaaggagcaccaacgcaaagaaaaagaccaagaagaccagggacgcga

SEQ ID NO: 131497 - RNA, 54 nt, Homo sapiens
cgagggaaaacacaaggaaggcagaaaaggaggcaccccagaaagaagaaaggc

SEQ ID NO: 131498 - RNA, 65 nt, Homo sapiens
acagagggacccggacaaccagaggcagccagcagggggagcaagcccaagccacagaccaaaaa

SEQ ID NO: 131499 - RNA, 79 nt, Homo sapiens
cggggcggcaaaaccacccaaagaaagccgacaagagacaacccccaaaagcaccgagaccgggcagagcccaggggga

SEQ ID NO: 131500 - RNA, 54 nt, Homo sapiens
accagggagcccacagcgcccaaaaaggccgacgccacaccaggggcagaggcg

SEQ ID NO: 131501 - RNA, 74 nt, Homo sapiens
gcggccccaagcagaacacgcgggagccaaaaccgcgacaggaaggggaaaaccaaaagaggccgaacaacggg

SEQ ID NO: 131502 - RNA, 71 nt, Homo sapiens
gcagaaggagcccaagccagacgcagagacaaaacaagcccccaggaaccacaacccgacgaaccacagga

SEQ ID NO: 131503 - RNA, 77 nt, Homo sapiens
cgccagcgccgagggcgagacggcagggacagagcgaagaaccccccaagaagacgaaacccccgggccacaagaag

SEQ ID NO: 131504 - RNA, 75 nt, Homo sapiens
ccccagccacgggaacgaacagagacgcaggcaagagcgcggaggagagagccaaaagaagggggccagcggggc

SEQ ID NO: 131505 - RNA, 51 nt, Homo sapiens
cccccacaagcaagcacaaggcaacggccgagcgaccaggagaggagcccc

SEQ ID NO: 131506 - RNA, 72 nt, Homo sapiens
cagcagagcaaaacagagcggaacgaacaaggggaacaggcccaaagacgcacccacagagaaacccgaccc

SEQ ID NO: 131507 - RNA, 78 nt, Homo sapiens
accaagcccgcggacgccaggggccagacccacgaaacaggccaggaggcagggaggaaggggggagggggaggagcc

SEQ ID NO: 131508 - RNA, 71 nt, Homo sapiens
cgccgggccaaggcacaacggacgagaagaggaaacaagaagaggaggaagcaaagaaggcggggaccacc

SEQ ID NO: 131509 - RNA, 69 nt, Homo sapiens
acaacccgacccgacgaaaggaggggcagagggaaaaagaaaagaaacaagacaaccagaaggagaaga

SEQ ID NO: 131510 - RNA, 69 nt, Homo sapiens
cccaagaacaccaagaggggcagcgcaagaccccgcacggaagcagcaagcacaggcagcgcagagcca

SEQ ID NO: 131511 - RNA, 78 nt, Homo sapiens
accgaccgagagcgagcagaagaagcagaacggcggaacccgaacagaggaaaagccaaggccgcccgcaaaaccaaa

SEQ ID NO: 131512 - RNA, 94 nt, Homo sapiens
cagggcagcccaggccccaacaggagacagggcgaggaaccaaagccccggcgcgcaacagaagaggagcggagcaggccaacgagagggaggg

SEQ ID NO: 131513 - RNA, 64 nt, Homo sapiens
gaaagagcccggaagacgcggcgccggaggcaaagggagagagccgcgcagcggccaggaggcc

SEQ ID NO: 131514 - RNA, 72 nt, Homo sapiens
cccgcgcagggggcagcccccaggcacgcacagggcccaccaagagccggccaagacagagcggcagggccg

SEQ ID NO: 131515 - RNA, 76 nt, Homo sapiens
gacccggcagacacccacaaaacagagagacgcaaaaaaagaagcccgggcgaaggagaagaagcaccagccgacg

SEQ ID NO: 131516 - RNA, 52 nt, Homo sapiens
ggagcaccagcccgggacccacaggcggagaagagggggaagacgccacgcc

SEQ ID NO: 131517 - RNA, 56 nt, Homo sapiens
gccgcagccacaacaccggcaggaaccaccaggacagagagcagagcgaggcaggg

SEQ ID NO: 131518 - RNA, 53 nt, Homo sapiens
ggaccagaaaaccgacaacccccagaaagccaagccgggaacgaggcgcgaca

SEQ ID NO: 131519 - RNA, 77 nt, Homo sapiens
agaagaggcaagagaagacaggagcaaaacgcacaggaagcaaaggccagaagaaagagagaccagaggagaagaga

SEQ ID NO: 131520 - RNA, 76 nt, Homo sapiens
agcaagaccgcccacccgcgggcgcaccagggaaaccggaccggaaaaggcccgacccggccaaagccagagccca

SEQ ID NO: 131521 - RNA, 76 nt, Homo sapiens
cacagggaccgcaggcccgagaacacgcagacagccgagagcagaagaccacaagccgaaaaaaggaagcgaaccc

SEQ ID NO: 131522 - RNA, 84 nt, Homo sapiens
accccaaagggagaagaccacggccgaaggcagcagagagacgcaagaaggcggagcaaccccagacccgcaacagaaagaaag

SEQ ID NO: 131523 - RNA, 92 nt, Homo sapiens
gcggcgccgcgcgcgcacaaggcggccgaagagggcgcgcgcagcgaaccaccaggaacacagccagcccgaagacccccgagggaagaaag

SEQ ID NO: 131524 - RNA, 79 nt, Homo sapiens
cgggagcagaggggagagcggccgccgccgcgccgcccaccacagacgaccaaagcaaaaaaaaggccagaggacaggc

SEQ ID NO: 131525 - RNA, 77 nt, Homo sapiens
ggaacccaagcagggcgaagggaacgcaaggcccccgaccacacgcccgcgcgagagcggggcccggcgcacccacc

SEQ ID NO: 131526 - RNA, 81 nt, Homo sapiens
cgaccgaagaaagacagaccggcacccggcaaccagaaacacaggccaaggaccgaaagaaccgcacagagcaggcccacc

SEQ ID NO: 131527 - RNA, 83 nt, Homo sapiens
gcaacacgcaaggccgccaccagggacccggcaaagagagaggcacacgccgccgaaggccaggagcagaggccaacgcccca

SEQ ID NO: 131528 - RNA, 83 nt, Homo sapiens
gccaggagcgccgcggccgccgcagccagaccgggagcgaggaggcgcaaggacccccgcgccagagggaacaggcacgcccc

SEQ ID NO: 131529 - RNA, 73 nt, Homo sapiens
acccgccaacaagaaacacgcggaaaaagggaccgcgaagaggcgcacgcccccagccccccccgcccaccag

SEQ ID NO: 131530 - RNA, 69 nt, Homo sapiens
aaagaacagcaccggaaccggaccaagaggcccacacaaaggcgcgaaaaccacacaacggccccccgc

SEQ ID NO: 131531 - RNA, 81 nt, Homo sapiens
aaaagacaaagagccacccccagcaggacggcgcaagaaagcgaagagccacgaaaagcccaggggaaaaagggaggccac

SEQ ID NO: 131532 - RNA, 34 nt, Homo sapiens
ccgacacaaccagaaagaggaagccccaggacca

SEQ ID NO: 131533 - RNA, 36 nt, Homo sapiens
ccgccggagcgaacgcgagcgacgcgcccacggagg

SEQ ID NO: 131534 - RNA, 72 nt, Homo sapiens
acgggaaaccggaccgggcggcgccagcgcgcgccccccagagaagggcaccccgggagcaggcacgcggcc

SEQ ID NO: 131535 - RNA, 54 nt, Homo sapiens
cgagagcaacagaaaggaaagaacagacacaagccaaggggaccggaagggacc

SEQ ID NO: 131536 - RNA, 75 nt, Homo sapiens
cagaagggaaaaaaagaccgaacagaaaccccccccccagccaccaagagaaggagaaggaagcgccggccaaac

SEQ ID NO: 131537 - RNA, 66 nt, Homo sapiens
aggccaaagcagccgggcgaggcgaagccggaccagaccaagagaggagcgcagcagacagcggcc

SEQ ID NO: 131538 - RNA, 80 nt, Homo sapiens
gaagacgccccaccacgaggccagcacgggaacgcgaagcgccaaagccagacaagggagcggccgggcagccgacacgg

SEQ ID NO: 131539 - RNA, 76 nt, Homo sapiens
gacggcaccagacaagaagggaccacacgaccccagaggacaggcgaagaaacagagaccacagagcgggaaaagg

SEQ ID NO: 131540 - RNA, 32 nt, Homo sapiens
aacgagacgcgaaccaggcgcaaaaaccagac

SEQ ID NO: 131541 - RNA, 81 nt, Homo sapiens
gccgcggcagggcccgcaggcggcgcacaggaagcacgaccccgagagaaacggcgagaaaaccaaacaggagccgacagc

SEQ ID NO: 131542 - RNA, 80 nt, Homo sapiens
cgcgcccgccgccagcaggggcgccccggacgagagcccggcgggggcgcagaggaaccagggaagaaagggacaacaac

SEQ ID NO: 131543 - RNA, 47 nt, Homo sapiens
gccccagcaccaccaaggacgcccccgcagcagacgaagacaaacgg

SEQ ID NO: 131544 - RNA, 70 nt, Homo sapiens
aagcaaagaagcgggagaagccggaaggagggccagacaaggggaacacaagaggagagaaggggaccgc

SEQ ID NO: 131545 - RNA, 76 nt, Homo sapiens
ggagaggccaaaaaaaggccccacggaagagggggcaagaaggacgcacaggagcggaggaaggccagcgggccga

SEQ ID NO: 131546 - RNA, 78 nt, Homo sapiens
caagaggaggggaaaacccccagcggcagcgcaaaagcgcacccaggcagcaacgaagaggcacggagccagagagac

SEQ ID NO: 131547 - RNA, 72 nt, Homo sapiens
caccgacaggaaacaaacagaaggaccagcgaaggaaaccagcacgagccagcagcggcagacaaggcccaa

SEQ ID NO: 131548 - RNA, 70 nt, Homo sapiens
ggaccagaccgaccaccaaaagaacgggcgcaccacgccaccccgccacgagagcaggaaacggaacgcc

SEQ ID NO: 131549 - RNA, 99 nt, Homo sapiens
accaaggacccaaagcacaggaaccaccgaaagcggcgcaacgagagaaaagagcagaacacaaaaaaacaaagaggcagaagcgaccagagcgaaaaa

SEQ ID NO: 131550 - RNA, 54 nt, Homo sapiens
aagaaacccagcgaaggacaccaacaaggaaagaacggaacgaccgagaaaaac

SEQ ID NO: 131551 - RNA, 78 nt, Homo sapiens
ccaagaagacccacaggcaaagaggaggcgaccagcacaaccaaagccggggagggagggacaagagagaagcgcgca

SEQ ID NO: 131552 - RNA, 70 nt, Homo sapiens
agccagcacacacgaaagacaggaaaacacagcggagcacgacagcaagagagcaagaacacgcgggccc

SEQ ID NO: 131553 - RNA, 69 nt, Homo sapiens
cgacagaggcagacaacacaaaagggaagagagaagagggggaagaagcccccacccccaggacgccaa

SEQ ID NO: 131554 - RNA, 83 nt, Homo sapiens
gaagccaagggcagaagacaccgaacaccaggacaccccacagcaagcaggcacagcggcacagagacgaggagaagagggag

SEQ ID NO: 131555 - RNA, 83 nt, Homo sapiens
aagggcacgaccagacgcccacccacaaagccagagggcccccagacacccgagcacccacccgccgggagagaggagcagcg

SEQ ID NO: 131556 - RNA, 93 nt, Homo sapiens
cgaggaggcccgggagcgccgagcgcgccgccgccgccgccagaacaaccgggcgccgacgagacggagaaggcaccggccaaagggggcgac

SEQ ID NO: 131557 - RNA, 80 nt, Homo sapiens
ccaacccaaccccaggaaggaaggccggaggaccccagagaaggacccggggaccggggagagcaagaagaacaccagac

SEQ ID NO: 131558 - RNA, 75 nt, Homo sapiens
aaaacaaggcgaaagcgcccgcaaacgcaggaacagcagagaacaaaggaccgcaaacgaagacggcagcacagc

SEQ ID NO: 131559 - RNA, 83 nt, Homo sapiens
cggaaggagaaggaagaggagcggaaaaaccagaagagaaaaaacaaaggggagaggcaccccgcgggacgaccggacagaga

SEQ ID NO: 131560 - RNA, 67 nt, Homo sapiens
aagaaggacagcaaaggagcagggggggaaccgaagagcaaggaaaagaaaagggggaaggaaaccc

SEQ ID NO: 131561 - RNA, 67 nt, Homo sapiens
cagaaacaaccacagcaagccccaaacaacagagaagcaaaggccagaaacagagaccaccaacgcc

SEQ ID NO: 131562 - RNA, 96 nt, Homo sapiens
cgcgaggagccggcgcggcgcagcccacggcgcaggcccacggagcgcagccgccgagagggagagacacagaccaagaacaagccagcaagagga

SEQ ID NO: 131563 - RNA, 76 nt, Homo sapiens
gacacagaaggggaggggagggaaaggcccaggaaaaaggcccgaagggaaacaaagcgaagagacaagacgaacc

SEQ ID NO: 131564 - RNA, 84 nt, Homo sapiens
gcggagccaggcaaagcccccaagcacgcgggcagaagaaaaccaccgagcggaccgccagaagcagcgcgacggagagccaag

SEQ ID NO: 131565 - RNA, 60 nt, Homo sapiens
aaggaagccacggcagacacacaacccgacccgacgaggaccgacacaagaagcagccag

SEQ ID NO: 131566 - RNA, 84 nt, Homo sapiens
ggcccgcgggcgaagcggacgcagccgcgagcccggaggcggcgggaggaggcggcggccggaacagagacagacccgggggcc

SEQ ID NO: 131567 - RNA, 91 nt, Homo sapiens
ggagggcgccccccgccagaagccgaggaaagcggaagcggccggcaggggaaggacgaggaaggaagcagccaccccgccaggccccccg

SEQ ID NO: 131568 - RNA, 50 nt, Homo sapiens
gccaggaggacaaagcagacacaagacaacggcaagcggagaagagcaag

SEQ ID NO: 131569 - RNA, 85 nt, Homo sapiens
cgacagcgccgccaccgagccgggcccaccccccaccaaggaagggacccggcaaagagagaggcacacgccgccgaaggccagg

SEQ ID NO: 131570 - RNA, 81 nt, Homo sapiens
gcccgaggacagagaggcgagcgcccggaggggagagagcggaggacagccgagaggagaacccagcggggccgccccacc

SEQ ID NO: 131571 - RNA, 81 nt, Homo sapiens
ccgggggagaccggaagaggcgcgcgccgcgcggccccggccgaccaggacagaaaaagcaagagagcccaacaaagaaga

SEQ ID NO: 131572 - RNA, 68 nt, Homo sapiens
caccggaccgagacacagcgcccccagcaggcaagcagggcccgagggcaggacagcaggcaccggcg

SEQ ID NO: 131573 - RNA, 70 nt, Homo sapiens
aaaggcgggaacagaaagcggcaccagacacagacggccacccccccgcaggaagagggcggagagacac

SEQ ID NO: 131574 - RNA, 79 nt, Homo sapiens
agaaggcagagaggggaagaccaagagcacagaaaaaaggcagcggaaagaagaaaagaaacggcccacaagacccagc

SEQ ID NO: 131575 - RNA, 71 nt, Homo sapiens
cgccaaccagaaagcacccagcagccgaagcaaaccaacacagaaaaggggcaagccagccaccaaaccag

SEQ ID NO: 131576 - RNA, 66 nt, Homo sapiens
ggacgcggccaagggaccaaggggaaacaaacgcagcccaaggcgccccccggcaccgcccgcccc

SEQ ID NO: 131577 - RNA, 97 nt, Homo sapiens
caaccggcggcgccacgcggcccgccggccacgcgcccgggacaaccacgcccggccacggacaggccggcgaggagagacacgacaagacaccgag

SEQ ID NO: 131578 - RNA, 79 nt, Homo sapiens
ccgcgacagaggagggaggaaaacaaccgagggcagagccagagaggcagaagaccaaacagaagcgcaggacaaaacg

SEQ ID NO: 131579 - RNA, 77 nt, Homo sapiens
gggaacccggcaccgccccagacaagcagaccggaagaccgacggaagaccacaccccgagggagcccaggacacca

SEQ ID NO: 131580 - RNA, 42 nt, Homo sapiens
gcggggacaccacaagcacggaacagcaggccacaaggagaa

SEQ ID NO: 131581 - RNA, 77 nt, Homo sapiens
cagaaagggggagaagaaggaggaaaggaaacggacagaaccacccaagcaaagggagagaacagcacacagaggcg

SEQ ID NO: 131582 - RNA, 75 nt, Homo sapiens
accacacagaggcacagggacgcacaaaaggcggcagacgcagacaaacaaaacaagaagccgaagaagaccggg

SEQ ID NO: 131583 - RNA, 68 nt, Homo sapiens
gaaacccggaaggcgcaaggaaggccagagaagccccaaaaaccccaggaaggccaacagaggaacag

SEQ ID NO: 131584 - RNA, 68 nt, Homo sapiens
cacaaaggaacgcccacccacggggaccagcagccgggccagggccagagcaaagcacagaaagcaag

SEQ ID NO: 131585 - RNA, 78 nt, Homo sapiens
cacgcccacgggacgaggagagggagggaaccgggcagagcccacaggacacaggaagggaaacagcaagcgcacaac

SEQ ID NO: 131586 - RNA, 80 nt, Homo sapiens
acccgcccgccgccggcgaccagagggaacaggcacgccccacccgccagccgagcccccgacgcagcacaaagccccca

SEQ ID NO: 131587 - RNA, 58 nt, Homo sapiens
cggagaaaagaagaacacgcccaaaacgagccggcgggcgacccgcccgacccggccg

SEQ ID NO: 131588 - RNA, 84 nt, Homo sapiens
ggacaacacgcccgggagacgagaccgaaccggcaccgcacaccggaccaggaaacggaggcggggcgcagcgaggaggggaag

SEQ ID NO: 131589 - RNA, 71 nt, Homo sapiens
acggccaagagagccgcgacggcccagaccaggcgaggcgcagaaggggacagaacacagaccgaaaaggg

SEQ ID NO: 131590 - RNA, 81 nt, Homo sapiens
gagcagagggaaaagaacagacacgccagcggaggaggagcagggggagcgggccggagagaagagaggggcgcgaggaga

SEQ ID NO: 131591 - RNA, 77 nt, Homo sapiens
ggcgggaaagagagcacgccgcgcagagcacaggagcgcccagcagccccaaggaggacgcagcaccgaagacccgg

SEQ ID NO: 131592 - RNA, 78 nt, Homo sapiens
ccgcccaccagcgcccgcccccgccccgcacaagagccaagaggccacgacagaagaacagcaacagaacacaccaag

SEQ ID NO: 131593 - RNA, 55 nt, Homo sapiens
cggacaccccacacgccgccacccccaccggagccgaaacagagaaccgaacggg

SEQ ID NO: 131594 - RNA, 77 nt, Homo sapiens
aaagacccacacagcaaggagaagagaaagcacaaagcaggagaccccccccagacacggccacacagaccgaacac

SEQ ID NO: 131595 - RNA, 66 nt, Homo sapiens
cagagcccggcggacacgagcgccagaccgccggcaccgccacagcaacaacggccagcccaggga

SEQ ID NO: 131596 - RNA, 64 nt, Homo sapiens
agcccgagaacaacaacggaccccgaccaggaggaccagaggacgcaccagaagacagggcaac

SEQ ID NO: 131597 - RNA, 89 nt, Homo sapiens
cagaaccccaaagaaacccaaacagaacacacagggaccaggagaagagcacaagccagcggcaagaacgcgacagagaggccggaaaa

SEQ ID NO: 131598 - RNA, 36 nt, Homo sapiens
agcccgcgaacaagacaaggagagccgaacaggaac

SEQ ID NO: 131599 - RNA, 84 nt, Homo sapiens
acccagaccgcaagcacaacaacacagagacccgccgccgcgcacacccggacagccaggggccaagagcagcagaggacccca

SEQ ID NO: 131600 - RNA, 76 nt, Homo sapiens
ggcgcccagaagggcgagggcaccccaacacgccggcgccccgcaacccaacccggcagaacacagaagagaaccc

SEQ ID NO: 131601 - RNA, 63 nt, Homo sapiens
cgaccgcggcgcgccacccggccgcagcaaaagggcgaaccaaagaaggaaggcgacccaaaa

SEQ ID NO: 131602 - RNA, 69 nt, Homo sapiens
gacagaagcagaggacgccagaggaaaaagagagcagccagcgaaaacaagggacacaaggcaaaaaca

SEQ ID NO: 131603 - RNA, 60 nt, Homo sapiens
agcaggccgagcccgagccgcagcacgagccaaaccgagagaggaagaagacacggaccg

SEQ ID NO: 131604 - RNA, 83 nt, Homo sapiens
ggccgccgccgccgccgccgcgccgagcggaggaggaggaggaggcgaggaggagagacggacaagagaaaaaaagggcgggc

SEQ ID NO: 131605 - RNA, 55 nt, Homo sapiens
ccagaaaagcgccaagcgggaaagagggaccagcgcagcagaagcagggagacgg

SEQ ID NO: 131606 - RNA, 73 nt, Homo sapiens
gacagacggacaacagcccaacaacacccaagggacacgaggggggcggacgaacaagacacccaagaccgag

SEQ ID NO: 131607 - RNA, 63 nt, Homo sapiens
gaagggaacgcccccgacacaaacagccgagaacccccgaggcgcagagacaaggaagggaag

SEQ ID NO: 131608 - RNA, 68 nt, Homo sapiens
accagggccacccaaagcaccaagaaagaggcccaaccaaagacagacgacaacaccgaaacaaacaa

SEQ ID NO: 131609 - RNA, 79 nt, Homo sapiens
cggacacgaggacacgccagcgagccccacgccggggaggaggagccacggccggggacagggaggaggacaggacgga

SEQ ID NO: 131610 - RNA, 69 nt, Homo sapiens
cacaacaggaagaaacacccaaagacccacagggagccaacccagccccagagagcacgaaccagacca

SEQ ID NO: 131611 - RNA, 42 nt, Homo sapiens
aggccaaggccccaggacagaccgaggaccggaagaagcaga

SEQ ID NO: 131612 - RNA, 79 nt, Homo sapiens
aacaccaaaaggcccgaagacaaggcaaccggcggagaaggcggggcggcggccacaccccccagaggaacccgaagca

SEQ ID NO: 131613 - RNA, 59 nt, Homo sapiens
aagccacaccaccaaaacgaaacaaaggaccaaccaagggaccagaccccacaagaaaa

SEQ ID NO: 131614 - RNA, 83 nt, Homo sapiens
cccagcagaggggcgcacgcccgcgccggagaggggggacagacacccggagcaccccacgaggcgaggggacggcggggagc

SEQ ID NO: 131615 - RNA, 73 nt, Homo sapiens
gagcagaggggaagcggcggagcaggaggagggcggaaaaagcccagaggaacaggcagaagaaggacagaga

SEQ ID NO: 131616 - RNA, 63 nt, Homo sapiens
aggaaaggcgccgaagagacggaaagcagaagacgggcccagccgggaacgcagcgcaacccg

SEQ ID NO: 131617 - RNA, 53 nt, Homo sapiens
gcggagggaccaccaagcagggacaagcggaagcacaccaggggacaccacca

SEQ ID NO: 131618 - RNA, 78 nt, Homo sapiens
ggaccgccgacaccggagagaggaagaagagcaccggcgacaaaggacagccaccccgacacccgacaaaggggcaca

SEQ ID NO: 131619 - RNA, 72 nt, Homo sapiens
ggagggaagaggggacagacagaggcagggcccgagggcaggacagcaggcaccggcgaagcacagagaggc

SEQ ID NO: 131620 - RNA, 82 nt, Homo sapiens
gagccgccggggggccccggcgcgggaggggccggcagggaggagacggagacacgaaggggaggggggagaccagagacga

SEQ ID NO: 131621 - RNA, 106 nt, Homo sapiens
gaaagagaaaaagagcaccaccagggaccggcaaagaccagaacaccccagaagcagggcaaaaaacagagccaaacagcccaagaccacaagagcaaacagaaga

SEQ ID NO: 131622 - RNA, 83 nt, Homo sapiens
cgagaaacgccgccaagcccaggacccagacccagacgggaggggagaagcagaccgcaccaggcgggaccccgaaaaagccc

SEQ ID NO: 131623 - RNA, 39 nt, Homo sapiens
gcagcaaacagcaaggcggaggacaaggcgcacgcaacc

SEQ ID NO: 131624 - RNA, 78 nt, Homo sapiens
gcgacccagggcgggcggagaccggccggaggcccacagagagaggggcacggagccaggaggccgacccgacccgga

SEQ ID NO: 131625 - RNA, 104 nt, Homo sapiens
ccgcgggggcaacggagaaaacccggaaccgcgacggcggcagggcggaaaacaccccaaaagccaaaagggaaaggaaaagaccaacaacagcgcaggacacg

SEQ ID NO: 131626 - RNA, 72 nt, Homo sapiens
aaaagggaccccgaaaggggacccccgcaggcagcggcaggaccgaaggacacagcgagaagcggggagcga

SEQ ID NO: 131627 - RNA, 82 nt, Homo sapiens
ccgggacaaaggaaagcgggcccacaaagagaaagcgagggaagcggcacgaacaccaaggggggcagaagaaaaagcagga

SEQ ID NO: 131628 - RNA, 84 nt, Homo sapiens
gcggcggcgggaagcggagcgcccccacccggaggcccgccggccccggcgacaagcccagagaacaggaaagcaaaacccaac

SEQ ID NO: 131629 - RNA, 55 nt, Homo sapiens
acacccccgagagagacgggccgcaaggccaggcgcgcagaggcacccaacggca

SEQ ID NO: 131630 - RNA, 60 nt, Homo sapiens
ccgcccagaggggcccaccgcgcccacaagcagaccggaagaccgacggaagaccacacc

SEQ ID NO: 131631 - RNA, 78 nt, Homo sapiens
ggagaaccgaacaagcccagcgaagcgggcacggggcggggaaaaagaaaagggcgaagacccgaagcagcgcaggaa

SEQ ID NO: 131632 - RNA, 123 nt, Homo sapiens
agagagggagaagagaccgggccggggaggccacccaccaagacacagggaacccggggagaggccgcaggagggaagcgcacggaaaccgccccgggaggcacagagcaggagacgccaccc

SEQ ID NO: 131633 - RNA, 85 nt, Homo sapiens
ggcccgggccagccagaggacccccagaggcggcagcaggcggggagcaggccacagaacgcagggcggagaacggaaaagcacc

SEQ ID NO: 131634 - RNA, 78 nt, Homo sapiens
cgaaagacaccacaaacaaaagaccaggaggaggaagggaagcagagcaccaaccaggagaaaaggacggacacacag

SEQ ID NO: 131635 - RNA, 78 nt, Homo sapiens
ccgccacgccagcacgccaacccggacggacaacaccggggagcgcggcgcacccacacgaacaaagagccaagacag

SEQ ID NO: 131636 - RNA, 75 nt, Homo sapiens
acagcccccaccaacacaggaagaaccgcccacaggccacagagagcgagacacggaccgaagcgcaggaggagc

SEQ ID NO: 131637 - RNA, 62 nt, Homo sapiens
gcagaccccccagcagggccgccgcaacgcgcagggccacggccgccccggcggccggcaag

SEQ ID NO: 131638 - RNA, 77 nt, Homo sapiens
cgaaaaacccccggaaccacaagaccacagagaaccagaacaaaaaagagacccgaacaaacaaagaaaagggccag

SEQ ID NO: 131639 - RNA, 75 nt, Homo sapiens
aaaaacagagccgagaaaggaagggcgggaccaacagggagccagaaaccccacacacgccaaagaagggaacac

SEQ ID NO: 131640 - RNA, 76 nt, Homo sapiens
ccgacaaaaggggaaagacccagcccagaccaggcacaagccaggggcgaggaacggacaaaacaggaagccaaaa

SEQ ID NO: 131641 - RNA, 77 nt, Homo sapiens
gcagccggagacaggcgagaggaagacgacgaggaagagcccgccgaagaaaaagcggggaaaacaaaaaaaagaag

SEQ ID NO: 131642 - RNA, 87 nt, Homo sapiens
ccggcccaaggccacaccggacacgaggacgcacagaagcaggcaaggggcagcccccgaagggggaacacagggcccagccgggcc

SEQ ID NO: 131643 - RNA, 68 nt, Homo sapiens
aaacgggccccaaggcgaccggccacagggcaggcggccagcgcgcgaaagcacgaaggcggcagcca

SEQ ID NO: 131644 - RNA, 83 nt, Homo sapiens
aacgggagggcgcacggaagaggcggccgggagaggagacaaaggacaggcagaaaccagaacaggcaaagggcccccagacc

SEQ ID NO: 131645 - RNA, 42 nt, Homo sapiens
agggagcacggaacagacaagccagagaaggggccaggagca

SEQ ID NO: 131646 - RNA, 86 nt, Homo sapiens
agagacccagcacacccccgaagagaggcagaagccccagaggagcccgaaacccccaggcgggcaggaaggagagccccagcgag

SEQ ID NO: 131647 - RNA, 59 nt, Homo sapiens
ccaagcaccacaccaaccaagcccccggaaggcagggaagcaaagagcacccgagccca

SEQ ID NO: 131648 - RNA, 79 nt, Homo sapiens
ccaggcagagcagcggcaggcagaacaccagccccaccggggacgaggcgaaagagggccagagacaagacaaaagaca

SEQ ID NO: 131649 - RNA, 55 nt, Homo sapiens
gaaagccccacccgccgcagcaagcagagggcgggaggccaggcagcacgcagac

SEQ ID NO: 131650 - RNA, 73 nt, Homo sapiens
caggcgaccgcccgcccagccccaaagggggaaaggcggagccacgcaccggcacagagcccccaaaccggag

SEQ ID NO: 131651 - RNA, 88 nt, Homo sapiens
agccacggagccgcaccagacaacgccccgggaccggagcagaacccccgcagagaaaggcgaagaacccgaagagcggccgacccca

SEQ ID NO: 131652 - RNA, 90 nt, Homo sapiens
cacccagcccccgaaagcgggaccacagggccaaaagagaaacaggcacgacaaccaaagcggacccaggaaacaccaacagcagaccgc

SEQ ID NO: 131653 - RNA, 68 nt, Homo sapiens
cccggaagccccgcgacgcggaagacagcacgcgacgaggagaagcaaaacacagaggaaaagggaaa

SEQ ID NO: 131654 - RNA, 68 nt, Homo sapiens
acccggggacccccgacgccaggcagcgcccccaaacgaagaacggcacaagcccggcggcggccccc

SEQ ID NO: 131655 - RNA, 50 nt, Homo sapiens
gggccaagcacgccacccggaaggagggacggagagaccggaggaaacca

SEQ ID NO: 131656 - RNA, 85 nt, Homo sapiens
aacgaggcaaggagcaaagcagcggcgcagcccggggacgagagcacagcccccaggagaggcaggcgcaaaggaggcaacagag

SEQ ID NO: 131657 - RNA, 85 nt, Homo sapiens
cgggaggccggagccaagccagcgacccaccaggagacccgcacaaccgaagagccggcacaaaagaagaaccgaggaccaagac

SEQ ID NO: 131658 - RNA, 68 nt, Homo sapiens
gggcgacacgcgggccgcgggccgggacaggagacaaggcaaccgcgcccagaccgccaaacaagaga

SEQ ID NO: 131659 - RNA, 60 nt, Homo sapiens
ccggcccgcagcccccgccggccgcccaacaccgaacaccgagaggaaccgcacccaagg

SEQ ID NO: 131660 - RNA, 80 nt, Homo sapiens
agccagaaacggacgggagcaacgcccgggagcaagaggcagacagaccgagacgggcaaccaacaagaaacagacacac

SEQ ID NO: 131661 - RNA, 65 nt, Homo sapiens
ccggcgaccaggaaccgggcgagcagcggcgggggcccgagggacagcgcacgaaacacacaaag

SEQ ID NO: 131662 - RNA, 56 nt, Homo sapiens
cccgagcccacaagggacggacaggcgagaacgcggacaagcaaacaaagaggaaa

SEQ ID NO: 131663 - RNA, 76 nt, Homo sapiens
aacgcaggaccggcgccgaaggcccgccagcaggcccagaagcacagaaaacggcaacgagagccaaaaaacaccg

SEQ ID NO: 131664 - RNA, 71 nt, Homo sapiens
cgaacccagccgcaccggaagagccgcgggcagggaaagcagccacagacgccgaaaaccagccaccccag

SEQ ID NO: 131665 - RNA, 48 nt, Homo sapiens
agagccggcgcaaaaccggcagcaaggaaaacgggaggggaagaaaag

SEQ ID NO: 131666 - RNA, 74 nt, Homo sapiens
caccgccccccgccgcgaagcacacgccgccccgacgcgagggcagccccgccaggagacccggaagagaaaaa

SEQ ID NO: 131667 - RNA, 81 nt, Homo sapiens
ccaggagccaggggcccagaagaagaagaacgaaggcgaggacacagaagggggcagaacgggaaggcggagggagggaga

SEQ ID NO: 131668 - RNA, 78 nt, Homo sapiens
gagagggcacaaaacagccagagacaccaggagacaagaagcaaaaaggaagaaccgggagaacgcagaagaaagaag

SEQ ID NO: 131669 - RNA, 66 nt, Homo sapiens
gccgcgcggggacccgacgcccgcacgcccaccacagcggagaagagaacccgaccgaagaaggaa

SEQ ID NO: 131670 - RNA, 70 nt, Homo sapiens
caaagagaggggagaaagacgaaagcgcccaggaaaaccggagcacggagcgggaggggagggcgcagac

SEQ ID NO: 131671 - RNA, 80 nt, Homo sapiens
cagagaaaaagcagccggagacaggcgagaggaagacgacgaggaagagcccgccgaagccccaaggcacaaaagaggag

SEQ ID NO: 131672 - RNA, 71 nt, Homo sapiens
cccagggaagaggaccaaagcgaacagaacaggaggcccggacccccagcacaagcgcaggccagggggag

SEQ ID NO: 131673 - RNA, 74 nt, Homo sapiens
gaaaaaggcaaagaaagaggcccacccggcaccgcagaaggcaaagagcagaacgagaacaggaccgccccagc

SEQ ID NO: 131674 - RNA, 82 nt, Homo sapiens
gagagccacgggccgcgccgggcacagccggaaagcaggaccgcgacggcagcagagcacagacaacagggagaccccacgg

SEQ ID NO: 131675 - RNA, 62 nt, Homo sapiens
gcgaggggagcaccaggaccgggccggaacgagacgcacggcgaaggggcgccgaaccgagc

SEQ ID NO: 131676 - RNA, 69 nt, Homo sapiens
caagaccaaaaacaaacgccacaccaaaaacgccacgaagaaaggcccagacgagagaaagcggaaaaa

SEQ ID NO: 131677 - RNA, 83 nt, Homo sapiens
gacggcgggccccgggaccgggcgggaacccgcggggagcgggacacgaacgggacagcccaaggcggaaaagcgaaggaagc

SEQ ID NO: 131678 - RNA, 74 nt, Homo sapiens
cgcgcccggcccggcggggaacgcagaggcacacaagccgaagccaacacgcccagaacagcggaacagcggaa

SEQ ID NO: 131679 - RNA, 77 nt, Homo sapiens
agggacccgccaggaaagccagggaggggacaagcaaacggcgcggagaaagaagccaaggcaaaagaggcaaggcg

SEQ ID NO: 131680 - RNA, 52 nt, Homo sapiens
gcagcccggccgacaaccacgaaggacaggagaaacaggggccaaaaaacca

SEQ ID NO: 131681 - RNA, 73 nt, Homo sapiens
aaccggccagcgggaggacaggcgaccccccaagacaggggccaggccaggggcaggggaagcacccaaccaa

SEQ ID NO: 131682 - RNA, 79 nt, Homo sapiens
caggaggcagaaaccagcgccggacagagaagcccccaaggagcgcagaccccacggaagaaccaaacagcgcacacca

SEQ ID NO: 131683 - RNA, 83 nt, Homo sapiens
gggcccaaagccgaaagaggaggcccaccgccacggaaccagcagccagaaaggaggagcaaggaagcccaggaacgagaacc

SEQ ID NO: 131684 - RNA, 74 nt, Homo sapiens
ccccaccgccccgaggaaggccacagagacacaccacgccggccggaaggccagggagaccgccacgacgagcg

SEQ ID NO: 131685 - RNA, 72 nt, Homo sapiens
gagaccagccccaggccccagcgcgagagacacaggaacggagaagaaacgaggccggaagaaaccacaagg

SEQ ID NO: 131686 - RNA, 77 nt, Homo sapiens
gcgcgccgaggccacaggaaaggggccgcggcgccgccagacagcgagcgaggcggagaccaagagaagacagaaca

SEQ ID NO: 131687 - RNA, 80 nt, Homo sapiens
gcgagacccaacgcggaccgagagcccgcaacgacgggaggagcccaccaggccccggacggcccgcgggcccagcagcc

SEQ ID NO: 131688 - RNA, 69 nt, Homo sapiens
acccggggacaggcagcgcagcccaggaggcagcaccaaggaaacaacaaggaccaagcacccaaaaac

SEQ ID NO: 131689 - RNA, 71 nt, Homo sapiens
cggagccagcagaaggagggacgagaaaagcgacgaggagcaaccaggaagaaagggcaggcgagagaggg

SEQ ID NO: 131690 - RNA, 43 nt, Homo sapiens
acgcacgggaagaggggaaggaggaagagcaagcaggcccgag

SEQ ID NO: 131691 - RNA, 82 nt, Homo sapiens
ccaaagcgaaaagacaagagagcagagaagaaacgacaccaggaaaaggaaaaaacagcaaccacacacccgaagcagccca

SEQ ID NO: 131692 - RNA, 67 nt, Homo sapiens
agcagagcgcagaggcacccagccaaacccaggcccgagaagaagaggaaaacccaccaccgaacca

SEQ ID NO: 131693 - RNA, 75 nt, Homo sapiens
cagacgaaagaaaaaaaaaaccggagaggaagagaagaggcgggggagcgggaggagccagagcacaccgcacca

SEQ ID NO: 131694 - RNA, 56 nt, Homo sapiens
cggcacaaaggagaggcgaccggaacgcacaccaccgagggaacagagagcagaca

SEQ ID NO: 131695 - RNA, 72 nt, Homo sapiens
gaagaacccaggcagcagacagcggacgggaaaaggcggggccggggagccccgggccagacccagacccag

SEQ ID NO: 131696 - RNA, 74 nt, Homo sapiens
acaaggacagggcaacaccgaagaaagagccaaacgccaaggcggcaggggaaagcagcaggggccagaagaca

SEQ ID NO: 131697 - RNA, 77 nt, Homo sapiens
cgaagcgccccgacccaccgggacgggacccaggggagaggccccccaggcacgcagaaaagaagagcgaaacggga

SEQ ID NO: 131698 - RNA, 81 nt, Homo sapiens
gaagaaggaccgaggaaacgcggaaacagagaagaagagaagaaagcacaaaccggccagggaaagaaaacaagccaccca

SEQ ID NO: 131699 - RNA, 72 nt, Homo sapiens
gggggaagccacgcacacaggaaacgaaaagagacagcagggcaaaacgggccacacacagggcaaaaagaa

SEQ ID NO: 131700 - RNA, 77 nt, Homo sapiens
aaccccaccaacccccgccagaaaacaggaagaggcagagaagagagaccaacccgagaggccgacagcaggaacaa

SEQ ID NO: 131701 - RNA, 75 nt, Homo sapiens
gccgaccccccggcgccgcgccggcggcgggcagcggggaagaagaaaaggaaccgaggccccccggcgacacgg

SEQ ID NO: 131702 - RNA, 79 nt, Homo sapiens
agggacaggaaggaacacacggagcagagccgagaaaaagcggaccgggcacgccaagcccaggccggagaagcggcag

SEQ ID NO: 131703 - RNA, 97 nt, Homo sapiens
ggagccgacgagaaaaacaaggagcggacacgagccgagggaggggaaaggcgcagggccgaacgaggcggggggcccgagaccacaccacacccac

SEQ ID NO: 131704 - RNA, 35 nt, Homo sapiens
cccacacgcggcacagaggcgcacccgacccaaac

SEQ ID NO: 131705 - RNA, 80 nt, Homo sapiens
gaagaaacacccggaccccgcaacgcggaacccaagaaggcggagagaggaagggaggcacaacacagagccaaaacgca

SEQ ID NO: 131706 - RNA, 85 nt, Homo sapiens
accacagaaagaccgaagacaaaaaccagaagacaagcagcgaccaagaggaacccggcgcgcagagaacagaagcgagagcaca

SEQ ID NO: 131707 - RNA, 44 nt, Homo sapiens
aaacaaagccggaagaacaaaaaggcagccaccggcaggggagc

SEQ ID NO: 131708 - RNA, 75 nt, Homo sapiens
gcgcaaccggcacaacaggcagagcgcaaaacacagcaaagacaaagacgaacagagacagcgaagagaaaagga

SEQ ID NO: 131709 - RNA, 73 nt, Homo sapiens
acagaaacggagggaagacaggaacccagagggaagagagggcaaaaacagggagagaacagcacacagaggc

SEQ ID NO: 131710 - RNA, 75 nt, Homo sapiens
gagcccacacccgaagacacaggcggccggaggaaggggaggcgcgagccccggccgccgggaccacgacaaccg

SEQ ID NO: 131711 - RNA, 86 nt, Homo sapiens
cccgcccgcggccagcacccgcccgccgccggcgaccagggcagcgggggcagagacggggaacagggccacccacacggacgcca

SEQ ID NO: 131712 - RNA, 88 nt, Homo sapiens
cgggaggcgccccaccagagaaacagccggcagccggcccgcagcgcgccccgggagagggagaagagagggacagagaccggaaaca

SEQ ID NO: 131713 - RNA, 74 nt, Homo sapiens
cgaggagacaacccccacaggcccagagacccacccacgaaacaaacaaggacccccagaaacggccaagcgaa

SEQ ID NO: 131714 - RNA, 74 nt, Homo sapiens
cgcgacaccccacaacgcgcggagccgacacggagacacgaacggagagcagccaacgcaggacggaccacagc

SEQ ID NO: 131715 - RNA, 65 nt, Homo sapiens
aggggggaagggagccaagacacacaagcaggcagcgacaagacaagccccagcccagaaaccac

SEQ ID NO: 131716 - RNA, 75 nt, Homo sapiens
aaaaggcggaagaccgccaaaaaggacacggagccagggaaagggagcagcaccggccacacccacagcacgacc

SEQ ID NO: 131717 - RNA, 85 nt, Homo sapiens
gcgccggcccggagcggagccgcgacggcagcggcaagaagacaggaaccgccggaagagcacaagggaagaacaacgccgaaac

SEQ ID NO: 131718 - RNA, 76 nt, Homo sapiens
ccggcagcggagagccgagcccaaggcaagacccaaggcgacgaccgacaggggggaaaggcaagagggaagcaag

SEQ ID NO: 131719 - RNA, 77 nt, Homo sapiens
aagccccagaacgcggggagggggcgaacgcaggggagaggagaagagagcggcggaagggagagacggggcgccgg

SEQ ID NO: 131720 - RNA, 69 nt, Homo sapiens
ggaccacgccggagccgaggacacccgcgcacagaggaaggacacagacaaaagaccaggagagagcag

SEQ ID NO: 131721 - RNA, 76 nt, Homo sapiens
ccccagaacgcgcgcccgacgcccgcaggcccgcgggcgcaccggcgacggaaacgagacaagaagacccaaaagc

SEQ ID NO: 131722 - RNA, 76 nt, Homo sapiens
ggagcaggagaaagcaaaggcgccgaagcgcacgaccccgacacccccaagcagggggaaagaccaccgcaccaga

SEQ ID NO: 131723 - RNA, 74 nt, Homo sapiens
gaagagaaaaaaaaagagaagaaggggaggagaagaagaccaggaacaggggaaaaggaggccaacaggcacag

SEQ ID NO: 131724 - RNA, 73 nt, Homo sapiens
ccgacacaacagaagaggagcacggaggagccgaccgcagcgagggaccagcgcacaccagcccagccccgcg

SEQ ID NO: 131725 - RNA, 80 nt, Homo sapiens
gagagaaagaggcccagagagagcagccacaaacgggaccagaggaagaagcaacacagccccaaaggagccaccgcacc

SEQ ID NO: 131726 - RNA, 79 nt, Homo sapiens
aagcagcacaaggcgagccaggagaagcgggccgacacccgcggaaagacagaaaccaacgagaaccaagaagaggaga

SEQ ID NO: 131727 - RNA, 74 nt, Homo sapiens
aagagaccgcagagacagccaacacggcacccacaggcacgacgacggagagaggaagaagacggggcggcacc

SEQ ID NO: 131728 - RNA, 68 nt, Homo sapiens
accacagaaggacgggagaacaccccacagggaagagggaagagacccagacgaagagcgcacagaaa

SEQ ID NO: 131729 - RNA, 77 nt, Homo sapiens
gccacggaggcaccagaagaagcaccaggaaggagggccccggagcagccacaccaccgaggccccacccagcacga

SEQ ID NO: 131730 - RNA, 54 nt, Homo sapiens
ccgggcccgacccgcgagagggccaaccgccccccagcagcaggcacgggcgaa

SEQ ID NO: 131731 - RNA, 74 nt, Homo sapiens
cggcaggcgcacaggcccggccaggcacaagggcaccacaaaggcacaccagcccggacacaacaagcaaaaca

SEQ ID NO: 131732 - RNA, 78 nt, Homo sapiens
ccaacaccccacgagcgaggaagaaggagagacgaccacgcaacagaaaaagagcgcacccaagggaagagcgaaaac

SEQ ID NO: 131733 - RNA, 65 nt, Homo sapiens
cggcccgaggcgcagcagcaggaggaggaccgcagcaaggacagagaaaaggacagcagcaggac

SEQ ID NO: 131734 - RNA, 73 nt, Homo sapiens
cccagcacaccccgcgaaaggaggaggcacagaccagaggagcagccaagaagccccccaggggcccgcagac

SEQ ID NO: 131735 - RNA, 78 nt, Homo sapiens
acaggccccggcccagaaccgccagagcggaacgaccccagagcgagcccgcagcagcccagaaacaaagacagccag

SEQ ID NO: 131736 - RNA, 37 nt, Homo sapiens
aaagggaaagcacaacaaggcggaaggaggagagaga

SEQ ID NO: 131737 - RNA, 81 nt, Homo sapiens
aagaccaccgcccaacacaacacgcagggcagagaccacaagaaccaggagagacccagagccagcgcaggggaagccgca

SEQ ID NO: 131738 - RNA, 84 nt, Homo sapiens
cccaaccacacaccagcggcgcaggacgggcacagcagagaccaaaggcagggcaaggaaacggccacaacgcaccaagcccga

SEQ ID NO: 131739 - RNA, 83 nt, Homo sapiens
aggccccacacccacgccaccacgcaggaagaccgcaggaaagcaggaaggcaagaaagccaaggacgaaacccacacggagg

SEQ ID NO: 131740 - RNA, 77 nt, Homo sapiens
caacaagaagagacaggggaaacaaagcggagagaagaaggaaaacccagcaaccagagaagagcccaccagcagac

SEQ ID NO: 131741 - RNA, 79 nt, Homo sapiens
aacaagcggccacccgaaagggggcaggggagggaaggcgagagcccgcccggagcccaccagagagacaccacaagcc

SEQ ID NO: 131742 - RNA, 73 nt, Homo sapiens
gaaaggaggagggcagaaggggacagggaaaagaaagagaccaaagaacgcgcccacccgggcagaaaacgca

SEQ ID NO: 131743 - RNA, 80 nt, Homo sapiens
gcacaccaggcacccgggcccagccgggaacccccacgcggccagcgaaaacgcccaggaaggggaaaaccgccgccacc

SEQ ID NO: 131744 - RNA, 77 nt, Homo sapiens
accgggggaggggcgcgaccgcacggcccgggacacacacccaggaagcccggggcggcgacggagcacgacccaag

SEQ ID NO: 131745 - RNA, 80 nt, Homo sapiens
aaacagaaaacacgggcccgacgacccagagcggggcccggcgcacccaccaccgccgcccacggcagcccagggacccg

SEQ ID NO: 131746 - RNA, 74 nt, Homo sapiens
ggcagcgcgagcgggaccagcgccggaggcgccgcagggagccacgccccaggggagccaacgccagcagccgc

SEQ ID NO: 131747 - RNA, 80 nt, Homo sapiens
agcagcaccagcccagcagaagacaaaagacgggcaaagcaggaagaacggaagaagaccgaaagccagaccaggaacaa

SEQ ID NO: 131748 - RNA, 91 nt, Homo sapiens
aagaagccgcccggaccgagcgcgccggagaggaggggcgccggggacagaaggcgacgccccgaaacgcaaacagcagacggaagacccc

SEQ ID NO: 131749 - RNA, 90 nt, Homo sapiens
ggccgccggccaccgcgcacccacgaacgcccaccccccgaacccagccgcaccggccgagaaacagacaacccacagaacaaagcggac

SEQ ID NO: 131750 - RNA, 48 nt, Homo sapiens
agccggcccaccagacccaagcaggaaacagaaccgaagccggaccgg

SEQ ID NO: 131751 - RNA, 71 nt, Homo sapiens
cagcaccggcagaaacgccaccgagccggacaagaagcggaccggcgacccaacggagaaacgccccccca

SEQ ID NO: 131752 - RNA, 74 nt, Homo sapiens
aaggaagaaagggacaaagagaggagcagaacagggccggacccacacccccagacccagagacacacgcccaa

SEQ ID NO: 131753 - RNA, 73 nt, Homo sapiens
ggccggaagagccgggggaggaagcaggagaagggggcagccaggagagaggagagagagggcagcaacgaaa

SEQ ID NO: 131754 - RNA, 61 nt, Homo sapiens
cgagcgccaggaggaggaagaccgaccgccgccgcgcaccgcacgaagaacggaagcgccc

SEQ ID NO: 131755 - RNA, 70 nt, Homo sapiens
agagaagcaaagaagcagcgacagacggcagcgcagacggaccccgggagaaagagacaacgacaaaaga

SEQ ID NO: 131756 - RNA, 85 nt, Homo sapiens
cagacgcccggagagcgcgccgccgccgccgccgccgccacgaggggaacccggaggcaagacacgaggagaggcgcccagccgg

SEQ ID NO: 131757 - RNA, 74 nt, Homo sapiens
gcccccgcgccccgacccaggcggcagacaaagagccagcaggggcagcaaaggagcggaagccgcaggccaac

SEQ ID NO: 131758 - RNA, 84 nt, Homo sapiens
aaagaacaccacagaaagaccgaagacaaaaaccagaagacaagcagcgggcagggcgaggaaaggagacggcaccaaccaaag

SEQ ID NO: 131759 - RNA, 79 nt, Homo sapiens
cacgaacagcggagcaaggcgacgaaccggagagaggagaacgaacaccggaccgccagccaagccacagagacgccgc

SEQ ID NO: 131760 - RNA, 75 nt, Homo sapiens
agcgacccgaaaacgaggcgcgacaggaacgccccagcagagaccagagaagccccccaccagccccaacagcaa

SEQ ID NO: 131761 - RNA, 73 nt, Homo sapiens
accacggaaagacggacagccaagcaacgaaggccggggggggcacagagccccggaagacagcccccagcga

SEQ ID NO: 131762 - RNA, 85 nt, Homo sapiens
gcggaggcagggcagggggccagccggaccagcaccccaccacgacacgggaggacgaccccaagaagaagcggaagaggagccg

SEQ ID NO: 131763 - RNA, 54 nt, Homo sapiens
gcacaccagggagaggagcaagaaagagcaccagaccagaaagaagaaaaagac

SEQ ID NO: 131764 - RNA, 77 nt, Homo sapiens
gaaaacaaccgagggcagacccgagaaaggaggagaaacaagcagcaccgcaggaggcagcagcaagcagcaacaag

SEQ ID NO: 131765 - RNA, 72 nt, Homo sapiens
ggaccaagaaagagacagaaggccgagcagcagccaacggaacaggcccccacagagagcacacaaacaaag

SEQ ID NO: 131766 - RNA, 71 nt, Homo sapiens
aagaggcagccaccacgggccggggggcagcacgccgaaggagagaccagacaacaggccagggaagggaa

SEQ ID NO: 131767 - RNA, 80 nt, Homo sapiens
ccaaaaggaagacgggaacccggcgcaaggacagaaaccaaccaacagacgagccgagcgggaggagaagcgcaggcggc

SEQ ID NO: 131768 - RNA, 73 nt, Homo sapiens
gaaccacggagcacgagaaaacggcgggggaaaaaagaagagaagcagaagcgaccacagcagaaggaagaga

SEQ ID NO: 131769 - RNA, 78 nt, Homo sapiens
cacgggggacgccccgacggccagaagcgacccagggaaagggagcagcaccggccacacccacagcacgaccggaac

SEQ ID NO: 131770 - RNA, 83 nt, Homo sapiens
cagagcacgagaagcaagccggccaggaaggaacgggcgagccagcccccacccagaggagaacgaaaccacgacaaccagcg

SEQ ID NO: 131771 - RNA, 71 nt, Homo sapiens
ccacaaccgccagacaaccggagccacgccccacgaccgccagccccgcgcaggggaaaccgcccccaaag

SEQ ID NO: 131772 - RNA, 85 nt, Homo sapiens
acaagagcaagaaaaggggcccgggaggggaaaaaccagagacccccgaagacgagaaggaaggcccgcccgccgcaggaaagaa

SEQ ID NO: 131773 - RNA, 82 nt, Homo sapiens
cccgacccccagggagccggggggcgcagggacagaacgcccagaggagggccacacccccggagaccaagagaagaaacag

SEQ ID NO: 131774 - RNA, 77 nt, Homo sapiens
gagccacaccgcgaacacccgccagagcggcccagccgcccaggacagaaccagggcccaaaggaccagccaaaacc

SEQ ID NO: 131775 - RNA, 89 nt, Homo sapiens
gggccgacgcggaggcggcagcggcgggccgaggcgaaggagcggccgggagcccgccgcgcggagcgacccgccccgccacgagaaca

SEQ ID NO: 131776 - RNA, 77 nt, Homo sapiens
cagacacccgcaaaagagagacgcagaaggaaagcgcaggcaggagaaggacagcagagccacaagggacgcaaaaa

SEQ ID NO: 131777 - RNA, 80 nt, Homo sapiens
agcggcggaagcccagcgaccacccaaaggaggcaaaagcaagcaacggagaacacccaagaagaaagacacacgcacca

SEQ ID NO: 131778 - RNA, 72 nt, Homo sapiens
caccagggcaacccccgccacccagaaaaggcgaccgaacgggaggaagcgaagccaggaccgaacaacccc

SEQ ID NO: 131779 - RNA, 107 nt, Homo sapiens
gacgaccaaggcaaaacgacgaccaggaagaacggagcacgacagaaacacagccgcagccggagcagacagcgaagaccccgggaacgggacacaaaaacagcaca

SEQ ID NO: 131780 - RNA, 75 nt, Homo sapiens
gccaggacagagacaccacgggaggaccacgcgagaggagagaaggcgaggaagcccaagcacaaaggagaagac

SEQ ID NO: 131781 - RNA, 70 nt, Homo sapiens
aacagggagaaacacagccagaagaacgcggcagaacggaggcaggcagcacgagacacaccacaagagg

SEQ ID NO: 131782 - RNA, 69 nt, Homo sapiens
gccaggaggaccggggcgggagagcgacccgggccggcagacaggaacggccgaacacagagggagaag

SEQ ID NO: 131783 - RNA, 73 nt, Homo sapiens
aggcggcgcggacggggcggggcggagaacggaaaagcaccaggaagcagagaggaccgcagaagggaaggag

SEQ ID NO: 131784 - RNA, 68 nt, Homo sapiens
ggacaaccacaggaccgaagcaaaacaggaccccaggggagaagggggacggcgagcaggcccccgac

SEQ ID NO: 131785 - RNA, 70 nt, Homo sapiens
gaggcgcgagaagacccaaaccgacaaaaaacaagagaaccaagcgcaagggcaggccaaggaggcaaag

SEQ ID NO: 131786 - RNA, 93 nt, Homo sapiens
aagcagccggccacaaggaaccaggaaacaacccgacgccagaggggaacagaggccgccccgggacagcagacagagggacggagacccaca

SEQ ID NO: 131787 - RNA, 81 nt, Homo sapiens
cacgggcggcgccaggccggcccaaaggaagaggcccagcagaagggaccgcgagccaccccccgccccacccagggcggc

SEQ ID NO: 131788 - RNA, 63 nt, Homo sapiens
aggaggccagggggcgccaggggagcggcccgcacagcgcccaccaggaccggcccgcagaca

SEQ ID NO: 131789 - RNA, 83 nt, Homo sapiens
ggagggacaggagcaaccacccagccacccgaccacacacaccaggaaaaaggacgagcagaaggccaagagaggccaacaga

SEQ ID NO: 131790 - RNA, 59 nt, Homo sapiens
gacggaccacacgccagaagaggaaaaggcagcgaaggcaagcagagcagcgaagcaaa

SEQ ID NO: 131791 - RNA, 67 nt, Homo sapiens
gaaaacgaagacaccaagcgggacccaaagcgggaaccaaaggcacggaggaaaagaaggaggccag

SEQ ID NO: 131792 - RNA, 78 nt, Homo sapiens
agggagcaggcgggagggacgaaagaacagaaggcgcgcagcaccggagcgccaaggcgaccaacgacgaagagcaga

SEQ ID NO: 131793 - RNA, 68 nt, Homo sapiens
ccacgccaagcaaaccgggaaaggagaggacccggagccggaccacagcacggcccacgacaccagac

SEQ ID NO: 131794 - RNA, 97 nt, Homo sapiens
ccgggggacgccggagaacggcccaaccgccggacgcagcgaaggccaaggggacgccggaaagaccagaaaagcacccaagcaaagcccaaaccaa

SEQ ID NO: 131795 - RNA, 75 nt, Homo sapiens
gaagaagccggcccaagccacgagaaggcggaccgaggacgaagggacaggagagacaacggaggcaagaaagac

SEQ ID NO: 131796 - RNA, 72 nt, Homo sapiens
agcagagaccccagacgccaccacaacccccagacgcaagccaaggagaggagccaagcccaacgggacggg

SEQ ID NO: 131797 - RNA, 86 nt, Homo sapiens
cacaccggcggagacgggcggccggccgacccccgcgcgacggcgacgcgggaggccagggggaggaggagccgccaagcgcagaa

SEQ ID NO: 131798 - RNA, 77 nt, Homo sapiens
cggacgcaggccccgccaccccccaccggggacagaagccgggcggaagcccacgcacaggcgccggggcggcagaa

SEQ ID NO: 131799 - RNA, 72 nt, Homo sapiens
aaacaccacgggagaacagaggaaaccgccaaagacaaagaagacaggggagaacaccacagagcggggcga

SEQ ID NO: 131800 - RNA, 71 nt, Homo sapiens
gcaagcaccacaccgaaccggaggcaggggaagcacaaaagcgcacccgcgccagcgaggaccggaacggg

SEQ ID NO: 131801 - RNA, 67 nt, Homo sapiens
ggcgaacccagccacaacaggcgcaaaagcagaagaccgaaaccgcccagagcgggaagggggcaaa

SEQ ID NO: 131802 - RNA, 67 nt, Homo sapiens
gaccaagccagaggacagaagaagaaagagcagccgcaacagcgcaccgacacaagcccagaagccc

SEQ ID NO: 131803 - RNA, 75 nt, Homo sapiens
ccggccccccacgcgcacacaagggagcccccccaccacccccgagaccacggcacgaacaggacaggcgccaac

SEQ ID NO: 131804 - RNA, 69 nt, Homo sapiens
aggcgagcgcagaaaaggggagcaaagagaacacgaaacaaccagccaaagcaaaaaggaaagacggca

SEQ ID NO: 131805 - RNA, 78 nt, Homo sapiens
ggcccccggaccgcagacgggggacgcagggaggagcgggacaccccggaagcgggaaaggcgcgaagcaaggaaaag

SEQ ID NO: 131806 - RNA, 56 nt, Homo sapiens
ccggcagggcaagcggcgacacacgacggggcggcgacggcggcgcgaggaccgac

SEQ ID NO: 131807 - RNA, 69 nt, Homo sapiens
ggggaaagaggacaacagggaccgcccccaaaggaagaaaaagacaaccagggacaaaaaaggcaacaa

SEQ ID NO: 131808 - RNA, 72 nt, Homo sapiens
ggaccgagaacggaggacaacaccaagcaagaagagaacaagcgcggaggcacagaccggaagcagagcgag

SEQ ID NO: 131809 - RNA, 83 nt, Homo sapiens
ccggccgcgggcgcgaccggaggcaggaccacaggaagcaagagaagaggagaaaccgccggaaccgacacagcaggcaagag

SEQ ID NO: 131810 - RNA, 72 nt, Homo sapiens
gcgcaggagaaggcagagcgacccaggcacagcggcccggcagcaaggcgagaagaaagaggccagacagga

SEQ ID NO: 131811 - RNA, 110 nt, Homo sapiens
acggaaagacgagggagaaagggacccaggaagagaagaaagaggacaacagacgccgcaaagcacagaaaaggaaagaacacaccaggaacagacaaggaaaaaaaagg

SEQ ID NO: 131812 - RNA, 76 nt, Homo sapiens
aaaaacaagaaaaagccaacggaccagccacggcgccaaagggcaacaccggaggacagcaacccccaccgaacaa

SEQ ID NO: 131813 - RNA, 91 nt, Homo sapiens
gcgacagcaacagccgccggcggaagacgagacagcccgcacagagcagagcgcagccgccaggccccgcccagccccaccagggcagcag

SEQ ID NO: 131814 - RNA, 81 nt, Homo sapiens
agaaggcgggacacacagcagggaccacccccagcacccccgggaagaaaacgccagagaagcagagcagcccggagcgag

SEQ ID NO: 131815 - RNA, 77 nt, Homo sapiens
gacgggccaggcgcacaggaaacgagagcgcagaacccgagcaagagaaaggagagagaaaagaaggaaggaaagaa

SEQ ID NO: 131816 - RNA, 77 nt, Homo sapiens
cccgggggggcggagcgcgcgggcagggacaagcaaggggccaaggagccaaggaggaaacccacaacagaggacag

SEQ ID NO: 131817 - RNA, 95 nt, Homo sapiens
gaagaacgaaggaaagacacaagagaccacaagaccgaccaggaaaagagacaaagaccacaggccaggcggcgaacccggcccaagcgaccccc

SEQ ID NO: 131818 - RNA, 66 nt, Homo sapiens
cacaacccagcagaccgagaggcggaacagaacgacgagacgacacaagcccacacaaggaccgga

SEQ ID NO: 131819 - RNA, 72 nt, Homo sapiens
cgcgccgcgccggcgagcagaagaagacgaaacggaaagaacgaggacagggagaaccagcggacagcagcg

SEQ ID NO: 131820 - RNA, 73 nt, Homo sapiens
gagcgcggcgcggagcgagaaccagcagacacggagagaagacaaaggggcgagacgggacacccccggaaca

SEQ ID NO: 131821 - RNA, 78 nt, Homo sapiens
gaagaccgcgccgccagccgaaaagaggggacgagaaaaaaaagagggaagccggagcgagaaaagcagaggaagaca

SEQ ID NO: 131822 - RNA, 63 nt, Homo sapiens
gggagaaaggaagggacagagaagcggcaagcacgcaggcccaacgacggcaggggaaaaacg

SEQ ID NO: 131823 - RNA, 83 nt, Homo sapiens
acgcaagcccacggggagcagagcagcaaccacccagcacacaaaaggaccacggaggagcagcacaaggcacggaagcagag

SEQ ID NO: 131824 - RNA, 74 nt, Homo sapiens
gacaccggcagagaaccaaaaccaaggagaacagaagcgcgccaggcgccagcaagaaggcagggaggaacgcc

SEQ ID NO: 131825 - RNA, 109 nt, Homo sapiens
agaagaggcggaagccgaggcccggggcccggaggcgcggagaggaaggagcagagagaaggccccccgccccccccgcagcgcgcagagcccggccaagaacaagcag

SEQ ID NO: 131826 - RNA, 78 nt, Homo sapiens
caaaacaaacaagaaggagcccgcccaggagaaagacagcaaagaaaaggagaagaaaggaaaaaaacaaccccgggc

SEQ ID NO: 131827 - RNA, 58 nt, Homo sapiens
cacagcaagggacaggaaggaacacacggagcaggcacagcaaggcggggcgggcaca

SEQ ID NO: 131828 - RNA, 85 nt, Homo sapiens
ccgaaacgagaccgggcagaggcgcaaggcggagaacacaggaaaacaacaccagggcaagaagagcagcccgacggccaggagg

SEQ ID NO: 131829 - RNA, 52 nt, Homo sapiens
gcccacgacagcaacgcagccggagcgcccgccgaaggagaccagagcacga

SEQ ID NO: 131830 - RNA, 80 nt, Homo sapiens
aaggcagaagaacagacggcccaggaggccagaaggaaaacgggggaggaggccgcagccgaagagagggagaagagacc

SEQ ID NO: 131831 - RNA, 77 nt, Homo sapiens
gggcccagcgcccgggcagggaagcagaggcacccacgcccacaagcaaccagacacacaaccaccagaaggagaga

SEQ ID NO: 131832 - RNA, 71 nt, Homo sapiens
aagagaggagggagaacacagaaaccggccccaggcccaaaaccaaagaacaggcagcagcaaggagggaa

SEQ ID NO: 131833 - RNA, 72 nt, Homo sapiens
gaacaagccacaaccacaaaaaggaaagcagagaaggagaagaagggaccaggcgccggcgaaagcaacgaa

SEQ ID NO: 131834 - RNA, 73 nt, Homo sapiens
aggcgacgccggcggaaacggagaaggacggagaagcgaaagccagaccggcaagagcggaagaaagcaccaa

SEQ ID NO: 131835 - RNA, 78 nt, Homo sapiens
ggaccggggacgcacggaccaaaaacccgcaacagcccccgcccaagaggagaaccgcacaaccgccagcacagccag

SEQ ID NO: 131836 - RNA, 37 nt, Homo sapiens
gcaaaacggcacgggagaggccggagcgcgaagacgc

SEQ ID NO: 131837 - RNA, 72 nt, Homo sapiens
cacgcgaacagaaagccgccgagggagccgagaggcgaggggaaaaggaaggaaaccgggccagggagacgg

SEQ ID NO: 131838 - RNA, 58 nt, Homo sapiens
aacgcgaaggaagccccggacaggaacgcaaggcggggaaaaaaaggcagcacacaga

SEQ ID NO: 131839 - RNA, 84 nt, Homo sapiens
ggagcacaacaggcagacagacaagcacacacgcagggcccgcgaggcagccacgcgaagggaggaagaaaagccccggaccgg

SEQ ID NO: 131840 - RNA, 70 nt, Homo sapiens
ccacagaaggagcaaaacccacagggcagaaaagaacagacccagaagaagcgaaaggggagaaagaaga

SEQ ID NO: 131841 - RNA, 94 nt, Homo sapiens
aacaggaagaaacaccaaccggccagaggaccaaccacaccacacggccacaccccagagacgaggacgcgcacaggaaaggacgcggaacaag

SEQ ID NO: 131842 - RNA, 72 nt, Homo sapiens
agcagaagaagcaccaacagcaggcgcaaaaacgaacccacaaccgaacgacggacgggaacaaagaaggag

SEQ ID NO: 131843 - RNA, 76 nt, Homo sapiens
gcagcacgccaggacgagcagagccccccccaccagaggacgggaggagcagcaacagggcaaaaaaacagcacag

SEQ ID NO: 131844 - RNA, 102 nt, Homo sapiens
gagcgccaggaggaggaagaccgaccgccgccgcgcaccgcgcgggagaggagagagaaggaggagcccagagggagcacaaccagggaccggcacgaaacc

SEQ ID NO: 131845 - RNA, 83 nt, Homo sapiens
ccccgcgccaacgccaacagcagcaggccccgagggagggagcgcagccagggaaaaccgagaacaccacaccagacaaccag

SEQ ID NO: 131846 - RNA, 68 nt, Homo sapiens
cagggaaagacccgagcagaggagcagggagaagagaaagagacgcaggcagcaggcaccagaacgga

SEQ ID NO: 131847 - RNA, 83 nt, Homo sapiens
gaagcgggcggcggcgcgccgccccgggcggccgcgggcggacgcaaacagcagacggaagaccccacggcaaaaccacaccc

SEQ ID NO: 131848 - RNA, 80 nt, Homo sapiens
gacgccggccgacgggacaccaagggaagaaaacgccagagaagcagagcagcccggagcgaggggagaccggggaagcg

SEQ ID NO: 131849 - RNA, 74 nt, Homo sapiens
cggggagcgcccgcgacagaggagggaggaaaacaaccgagggcagagcagccgcgaacccccagaaccgaaac

SEQ ID NO: 131850 - RNA, 117 nt, Homo sapiens
accggggcaaagccagaccagcggccgggggcagaccccagcccacaacccacgcgcaccggcaagccaggcggcagacaaacggaaccaaccaaagcaaaacagggaaccagaaga

SEQ ID NO: 131851 - RNA, 65 nt, Homo sapiens
aggcggcggagcgcgagagccgagcggaccagaaaaagcggggaaggggggcaaaaaaaagaagc

SEQ ID NO: 131852 - RNA, 68 nt, Homo sapiens
acagaacgaaaagaaaggaccccaggaaaaggcagaaaggcccggaacacaaaacaggaaaagaccca

SEQ ID NO: 131853 - RNA, 69 nt, Homo sapiens
aagagacccacagccagcaacaccgaccgcccaggggcgcaggggaagcgacccagcgacgaaagaccc

SEQ ID NO: 131854 - RNA, 100 nt, Homo sapiens
ggcaaagcgcagcccgcagacagaggggcgacgaccgcacaacagaagggagcgggagagaagggagacaaaggcgcccccggacggccggaagagcggc

SEQ ID NO: 131855 - RNA, 69 nt, Homo sapiens
acgaaggcaggaccacacggacgcgccagcaagccggccaaacaacaagcaggcaaaacacggagaagc

SEQ ID NO: 131856 - RNA, 68 nt, Homo sapiens
ggacaccaacagagcaacgagaaggacacccaaagagagggcaggaagaggccaagggcaccagacag

SEQ ID NO: 131857 - RNA, 85 nt, Homo sapiens
agcggacccagggcccggcgaaggacccggccgaggcgggcgcaagagaaggcaccaagagagagagcaggagcggagaggacgc

SEQ ID NO: 131858 - RNA, 81 nt, Homo sapiens
gagcaaagggggcacaggagggcccagggacaggacggccaagcgggccgccacccagaaagggccgcacccgccccgccg

SEQ ID NO: 131859 - RNA, 57 nt, Homo sapiens
caaagcaacagccaaaaaacagagacaaagcaggaggacacaagaagggaggaaagg

SEQ ID NO: 131860 - RNA, 85 nt, Homo sapiens
aggacccagcagggcaccaggcaggaggcggagcagaccaagaccaggagcgagcgggcaaaggagacggcagccaggacaagcc

SEQ ID NO: 131861 - RNA, 90 nt, Homo sapiens
ggaaaagcgcagcagacaagcgccggaagagggacggaagaaacccgaggcaaagcaggcccaaggggccacgaaggcggcggcagcgcc

SEQ ID NO: 131862 - RNA, 72 nt, Homo sapiens
cgagagaagccagagaagaccaagacaacaagaaggaccaagcaggagacaccgcaaagagacgaagggacc

SEQ ID NO: 131863 - RNA, 73 nt, Homo sapiens
aggagcgaacacaaaaccaacgagcccccgcacgcggagcgggacccggggcaccagaggaccgagagagaaa

SEQ ID NO: 131864 - RNA, 80 nt, Homo sapiens
gaacacacgcacccaaggaacgccgcagaaagaagaaggggcaagaacagccacagcagagacaaaaaaccagcccaaag

SEQ ID NO: 131865 - RNA, 78 nt, Homo sapiens
ccccaacccacgagaggacagcccaggagcggagagacgaggagcagagaaggagacaccgaaggcccaccaccgcca

SEQ ID NO: 131866 - RNA, 83 nt, Homo sapiens
ggagcaggcgccagacgagcacggaagcacaagcaggagccgggaaaccgaagaaggcagagaaggcaaacaggaggcgcggg

SEQ ID NO: 131867 - RNA, 83 nt, Homo sapiens
agccgacgcccaccagcgaacccggcccccgacggccgcagaacgggaccagccgcggaccggacagggacggcggcgggcac

SEQ ID NO: 131868 - RNA, 83 nt, Homo sapiens
gaggggccacaaaggggggcccaggacaagggcccaggaaaggaacgggaaagagagaggcacggacgagaaaccccagggga

SEQ ID NO: 131869 - RNA, 73 nt, Homo sapiens
gggaacagccagcaaaggcaggggaggaagccacccgaggggggcggacgaagcaggacacaccgaacacgca

SEQ ID NO: 131870 - RNA, 71 nt, Homo sapiens
agccgaggaagcgaagcagaggcccaggggccacacgcggacccggagggaccagacgggcgccacaggcg

SEQ ID NO: 131871 - RNA, 69 nt, Homo sapiens
ccacagaaacaccccacagaaaagaaacaacgaacgagcaaggaagggccaaggcagaccccacaccgg

SEQ ID NO: 131872 - RNA, 54 nt, Homo sapiens
cccaaacccaagagaaaagcaaaagcgaggaaaggaaagagcggaggacccgga

SEQ ID NO: 131873 - RNA, 61 nt, Homo sapiens
gaagaacagagacagcagccaaacccccaggaacgccccgagcgggagccgccaagcacca

SEQ ID NO: 131874 - RNA, 68 nt, Homo sapiens
gcaggaaccacaacccaaccagggggaaacccgcccagggcgggagaccgccaagaaacaccacaagg

SEQ ID NO: 131875 - RNA, 69 nt, Homo sapiens
ggcgaagaggcaccggaggaggggagcgggacgggcggcgagcggaccgcgaggcccccaaccccccca

SEQ ID NO: 131876 - RNA, 68 nt, Homo sapiens
gaacaacaggagggcaacccagaacacaaaaacaccccacagaacagcaggcaacaggaggccgccaa

SEQ ID NO: 131877 - RNA, 65 nt, Homo sapiens
cgggccaagggaagaggagcgggcgcccgccccgcacagccaggcccccgcggcaccggggccag

SEQ ID NO: 131878 - RNA, 81 nt, Homo sapiens
cacgccgggcgcgcgcggccccagcgacgagagcccgggagggccaggccgagggcccgcccggccccaggagaagaacca

SEQ ID NO: 131879 - RNA, 77 nt, Homo sapiens
ggaaaccaaagggccacagcacgaagagaccgacggggagacagaggaaccggcagaggcagaaaagcagagacaga

SEQ ID NO: 131880 - RNA, 123 nt, Homo sapiens
gcaggaagaaccagagccgggaagcccccacacagaagcacgagagagcggccccccgcaggcgaacagaggaggaagccgagagaaccaccccaaagcgagggagacagcaacagaagagaa

SEQ ID NO: 131881 - RNA, 77 nt, Homo sapiens
aaggcgcgcgccgcggccccgccccccggccggaaccgccacccagcaagacggcgcccgaccaagagacaggagac

SEQ ID NO: 131882 - RNA, 68 nt, Homo sapiens
cccccacacacaaaagcggcagcccaccccagacggcagcacagccaccaagcgacacgcacaaacaa

SEQ ID NO: 131883 - RNA, 52 nt, Homo sapiens
caccaacacggacacggggcgaccccaggaagacaccccaagcagaaagagg

SEQ ID NO: 131884 - RNA, 80 nt, Homo sapiens
ggacggcccgccacacagccaccagaagccccccagccgaggagaacggcaaaaagcgagggagacaacaaggccacccc

SEQ ID NO: 131885 - RNA, 75 nt, Homo sapiens
acgcaagagagaagaaagaaacggcgaggaaagagaggagccccggaaagaaaaggacagacccggccagaaagg

SEQ ID NO: 131886 - RNA, 72 nt, Homo sapiens
cgggaagaccccaccagaagcggacaggaaggccgaaacacaagcaaggaacacaaagaagaaagaaaggaa

SEQ ID NO: 131887 - RNA, 84 nt, Homo sapiens
cgcgggcggaggacggagaagggggcggcgagggccggaaccgaggagcgccccgccgcgcgcaccacgggagaagggcgaaag

SEQ ID NO: 131888 - RNA, 61 nt, Homo sapiens
gggcaaccaggcgggaccgcggccgcccaccagaagagccgacaagccggcagaaggcaga

SEQ ID NO: 131889 - RNA, 60 nt, Homo sapiens
ggggcccggcggcggggagggggccaaacgaaagcagaaggccagaacgaggcagccgac

SEQ ID NO: 131890 - RNA, 48 nt, Homo sapiens
ccaggagcccgagagagaaggcaacccccagccacaacgcgaaccggg

SEQ ID NO: 131891 - RNA, 73 nt, Homo sapiens
gaggagacccgggcgagcggcggagaaaccaccacaaacacgaggccagcaacgaccaacaagacagacccgc

SEQ ID NO: 131892 - RNA, 82 nt, Homo sapiens
gggaagaacacagcccgggaaagcacagaaagccaaaagggcacacagggaccaagaagccccggggacacgcgagaaaaga

SEQ ID NO: 131893 - RNA, 74 nt, Homo sapiens
aaggcggagccaccggccggcgaaggccaacggagaccacacaaggaggcaagggaagggaggccagccagcaa

SEQ ID NO: 131894 - RNA, 78 nt, Homo sapiens
agcgcagcgcacggaaaaggggagaacagacacaacacaaagggagaggaacgagaaaaagggggagaaagaacaagg

SEQ ID NO: 131895 - RNA, 79 nt, Homo sapiens
gccaacacaccagcccagacagcgcaagcaccaggacgcgaagaccgcgacccccgcacccacgccagcagggcagccc

SEQ ID NO: 131896 - RNA, 36 nt, Homo sapiens
gcgaccggggagccgaccgaggcccgagccggcaaa

SEQ ID NO: 131897 - RNA, 69 nt, Homo sapiens
agaaccgggcacaaaacgacaagaacaagggaaaaacagaggagacaacacccggagacaggcccaaag

SEQ ID NO: 131898 - RNA, 91 nt, Homo sapiens
cggagcgccgcgaccgggcgagggagccgggccaacagagggacggccccagaaggcagaggccgaagacaagccccggcacaggaggaga

SEQ ID NO: 131899 - RNA, 73 nt, Homo sapiens
gcggcggcgccccaggcgcacaaccaaaccagaccgcagcaggcacgggaccccaaccaggacgcaggcgaca

SEQ ID NO: 131900 - RNA, 80 nt, Homo sapiens
gcaaagacaggagcccggaaggaagagacagagaccaagccaaacccccaggcaacgcgagcgggacgcgggcagcagca

SEQ ID NO: 131901 - RNA, 80 nt, Homo sapiens
cgccagcccggcgggacacacaagcaccccaaaacccaagggggagggccacagcaggccacgggggagggcgcagacca

SEQ ID NO: 131902 - RNA, 92 nt, Homo sapiens
caacggcaaagaaaaccgggcccgccgcgaccacggcaggaaaccccccaggcaagaggcgcaggaccgggaagaccaacaaacgcaccgcg

SEQ ID NO: 131903 - RNA, 72 nt, Homo sapiens
gaagcggccagagaaaggaggcagacgcgccaggacccacaaccccagcccggccgaccgacagaagaccgg

SEQ ID NO: 131904 - RNA, 67 nt, Homo sapiens
caagaaggacaaagagacaagccgagagaaagcaagcaaagcaacgagaagacgacccggccggagg

SEQ ID NO: 131905 - RNA, 88 nt, Homo sapiens
ccagagccggagcgcgaaggccgggacccggccccggcccacaggggggggcaaacccgagagaacggcaaaagcaaacagacccccc

SEQ ID NO: 131906 - RNA, 74 nt, Homo sapiens
cccggcgcccgcgcccgacgcgcgcccgcggcaagcggaagcgaagaacggggacggaaacgggacccacaggc

SEQ ID NO: 131907 - RNA, 86 nt, Homo sapiens
caccccgagcgcaaggacagcgcgaggccgcgcagcccagcgcagccagcgcggggaggcccagcccgccgcagggccaccccgcg

SEQ ID NO: 131908 - RNA, 79 nt, Homo sapiens
gcgagagcgaggccgagcaacaccgcgagccgcgcggcgcggggccccgcggcggagggacgcaacccaccacgaagcg

SEQ ID NO: 131909 - RNA, 75 nt, Homo sapiens
caaggccaagaaccccagacaccagaggagagcagaacaccggaagaaggcggccggccaggggagagcgcaacc

SEQ ID NO: 131910 - RNA, 55 nt, Homo sapiens
caagacggaagcccaagccgccccgccgaagagaaggccagagaaggggagaccg

SEQ ID NO: 131911 - RNA, 78 nt, Homo sapiens
cgcgccccgcccccccccagagcaagggaggccccgaaggagcaaggaaacgcgaaccaagggccacggggagacaag

SEQ ID NO: 131912 - RNA, 66 nt, Homo sapiens
gcagacacccaaaagcggaccaaggaaagggggagcggagcagagacggcagaacagccacaaaaa

SEQ ID NO: 131913 - RNA, 80 nt, Homo sapiens
caccagagcaaagcaaagcgccagaacccacaaacaaagcaccagaaagcagccaaaaggcagagcccaccaaggccgga

SEQ ID NO: 131914 - RNA, 72 nt, Homo sapiens
cacacaacggacaacaagcagggcacgagacgaagaaggaaccagcaaagcgccacgaagcacaagcaagag

SEQ ID NO: 131915 - RNA, 80 nt, Homo sapiens
aggcgaggccacagaaccagccacagcggggcggagaggccgagaaacagacaacccacagaacaaagcggaccaaggca

SEQ ID NO: 131916 - RNA, 98 nt, Homo sapiens
cccacgggcaccgagcccgcccacgacggagaggagacaagccagggaagcacagacggaccacagccagggcacaagaccccacccgagcccgggac

SEQ ID NO: 131917 - RNA, 72 nt, Homo sapiens
gaagaacgccaaaggagaccaaggccaggaaaaaaaggcacagaacaaggcaccccagagaccaaagggcgg

SEQ ID NO: 131918 - RNA, 69 nt, Homo sapiens
ggacagaccagcgcaaggccaaggaagcacgggaagaacagaaaagagaagcaccacggaaaccaccgc

SEQ ID NO: 131919 - RNA, 80 nt, Homo sapiens
ccgcgccgcgccgccacggccagcccccgggcaggggaaaggaagggagcagcgaagccagggaggagccgaaacaaaag

SEQ ID NO: 131920 - RNA, 76 nt, Homo sapiens
gacccccagagccccaggaccagaaccaaggccccccagccccaaaacaggggggcaaaccgagggacacccagcg

SEQ ID NO: 131921 - RNA, 80 nt, Homo sapiens
ggcgcggagcgggcagccgccgccaccccgcggccgcacccccgccccagagaccgaaggagcagacgaggcacgagcgc

SEQ ID NO: 131922 - RNA, 72 nt, Homo sapiens
cgggcggaagacaggccacccagcggggagcacggcgagcagccaggccaggagaggccccgggggcgccga

SEQ ID NO: 131923 - RNA, 73 nt, Homo sapiens
ggacccaaaaggcgcaggggaggccggccccagacaaacccacaagcgaaagaacacgagaagaagaacagga

SEQ ID NO: 131924 - RNA, 68 nt, Homo sapiens
caggaggcgcggaggacgccccaccgccgacgcccccagccaccagggggcccacgagaagagcaggc

SEQ ID NO: 131925 - RNA, 81 nt, Homo sapiens
aggccagcccaagacaaggcaacaacaccccacaggacgaaggagacgcaggagggagagcagccagaggaagaagaggac

SEQ ID NO: 131926 - RNA, 75 nt, Homo sapiens
ggaccggaaggcgcgggcaggagccggcgaggagcaccccccgccggaaagggggggagacaagagaagacgcag

SEQ ID NO: 131927 - RNA, 70 nt, Homo sapiens
gggcacgcgcggaaacggagggggaagaagaaaagcccagagaaacagagggcaaagaggaccaaagaac

SEQ ID NO: 131928 - RNA, 69 nt, Homo sapiens
gcagaacgaggccccacccagcgcacacaccaccacacacggggaaggaacaaagcagagaaaccaaaa

SEQ ID NO: 131929 - RNA, 73 nt, Homo sapiens
gacacagggaggaaggaggaagaaccgggaaacagcaagaacaagagcaaagaccaagagccagggggggggg

SEQ ID NO: 131930 - RNA, 56 nt, Homo sapiens
aaaacaaccgagggcagagggaggcaagcaggggggcaaaggaaagaaggcagaaa

SEQ ID NO: 131931 - RNA, 77 nt, Homo sapiens
agaaaagaagcagcaagcccagaacacaaccccgggccgcccccccaaccgaaggcgcaaggacccaaagacaggac

SEQ ID NO: 131932 - RNA, 77 nt, Homo sapiens
gccaggcgggccacaccgcaacccagcacgaccccagccacagcggaggacgaggccaacaaggagcaggaacagag

SEQ ID NO: 131933 - RNA, 75 nt, Homo sapiens
gcgggacccggcccgcgaggccgccgggaccacgacaaccgggaaacagacaaagcagcagggaaagagaccagg

SEQ ID NO: 131934 - RNA, 79 nt, Homo sapiens
cgaaaagggcgcaccaacaccaccagaaaggaagggacccgaccaaccacggggggacccacagccccagacgaacgcg

SEQ ID NO: 131935 - RNA, 36 nt, Homo sapiens
agcaggccgaccgcccgccacgaggcaccagaaaaa

SEQ ID NO: 131936 - RNA, 50 nt, Homo sapiens
caggaaaacaagacgccagacagggaaggggaacaggaccggccacagac

SEQ ID NO: 131937 - RNA, 73 nt, Homo sapiens
acagagcaaacagacggaagaggacccaggaagccacccgcagaggggcaaggagaaagggcaaacgcagcac

SEQ ID NO: 131938 - RNA, 80 nt, Homo sapiens
cacgccgcacgcgccgccaacgggaaacagagcgcagcaggcgaaaggccacccacaggaacaccaaggaaccaacaaag

SEQ ID NO: 131939 - RNA, 65 nt, Homo sapiens
ccggccggagccccagggccgagacggccaccaccgaccccggaggcccgccccccccaccccac

SEQ ID NO: 131940 - RNA, 78 nt, Homo sapiens
gcgacccccaaagccaggcggacgcgcgggagggccgccgcaacccagcagagagcagggacagcacgggccgagcgg

SEQ ID NO: 131941 - RNA, 101 nt, Homo sapiens
acaaacaaacggccaaaacaggggcaaagaggccgagaacggaaaacaacggagcacgcaaagcaagccggcaacgggacaagcaggacgggagagcacag

SEQ ID NO: 131942 - RNA, 72 nt, Homo sapiens
aggaggccaagcccaggcccacgcacaagcgggcaccagggccgaccgccgcagagggagaacaaaacagaa

SEQ ID NO: 131943 - RNA, 80 nt, Homo sapiens
cagccgacggggcgaccgccggcccagggggagacggccggcgacccacccgagggggcaggggccgaggacgaacacgg

SEQ ID NO: 131944 - RNA, 72 nt, Homo sapiens
aaaagagagacacaggaggaaagcggcacagggagacaggcgcaagaggaaaggccgccccggaggaagaaa

SEQ ID NO: 131945 - RNA, 79 nt, Homo sapiens
caagcgaaggcaaaaccaaacaccccagcccacagagagcaaaacacaagagagcagggaggagggcgccgggcccagg

SEQ ID NO: 131946 - RNA, 69 nt, Homo sapiens
agagcgacaggaggagacaggcgagagaggaggacacgaccgaaggcgaccgagaacacagagaacggg

SEQ ID NO: 131947 - RNA, 84 nt, Homo sapiens
cggccaagaaggagcccaagagcaggaaaagcaccagagagaccagagggcggaaggaacagaaagaagcacacgaaccggaag

SEQ ID NO: 131948 - RNA, 77 nt, Homo sapiens
aaggccacagggccccagcagagggagcagggacccaggaggaggacagaagcggaccgaagcggcgggcgacacgg

SEQ ID NO: 131949 - RNA, 80 nt, Homo sapiens
agaaggccagccaaaaaagagaaagccaacccagcgaaggaacaagcaaaccccaagcggcaagagaccgacaaacagag

SEQ ID NO: 131950 - RNA, 83 nt, Homo sapiens
ggagagcgaccaaacacaaggggggaaggcagggccggcccgcagccgcccagacccagaacagccaccaaggagcgcagcag

SEQ ID NO: 131951 - RNA, 72 nt, Homo sapiens
agcgcaggaacaggacaggaggccccaccgaggcaccaccaaccaaagcggcaacccgacagaccgaaaggg

SEQ ID NO: 131952 - RNA, 77 nt, Homo sapiens
acagcagcagagggaagcaaccacagaaaagaaaggcggggcgagagcgccaaagacccccagccgaacggaggacc

SEQ ID NO: 131953 - RNA, 49 nt, Homo sapiens
cgacaacaggaggccggaagacccaaagcgagaagcgcgaggacccagg

SEQ ID NO: 131954 - RNA, 80 nt, Homo sapiens
gacaggggagcaggcccagcaagaggagcagccagcggcagaccaccagccccgccaggaagaaccaaagcccgcaagca

SEQ ID NO: 131955 - RNA, 50 nt, Homo sapiens
cggaacccgggacgacgggcagagaggcggaccccgcgggcgcgcggccc

SEQ ID NO: 131956 - RNA, 81 nt, Homo sapiens
cgcggcacggcaccggcgcccaggaacagcaggaaacgacgcgggcgcaggccccagcaggaaggcagccaacacacgccc

SEQ ID NO: 131957 - RNA, 66 nt, Homo sapiens
agggaaaaaagcagagcccaggagaaaccggacgcgacggggagccaggaggaggaaaggacaggc

SEQ ID NO: 131958 - RNA, 66 nt, Homo sapiens
gccccagcagcccccgaaggcccacaggacaggagagaaagacggaccagaggaaggcggggaggc

SEQ ID NO: 131959 - RNA, 71 nt, Homo sapiens
gcaccaacagcagcggcagccaagggacagagaaagcaccaaaaccacgagacccgaaagcagacagccga

SEQ ID NO: 131960 - RNA, 76 nt, Homo sapiens
gcagccgcaagccgcgaggccacgccccgcccaggcacgcgagaaggggagggggagaaagaagaggaagaagcca

SEQ ID NO: 131961 - RNA, 72 nt, Homo sapiens
accccccacggcgggacgccaacagcgcgccaaccccacacacaaccccagggacgggccaacgcacggccc

SEQ ID NO: 131962 - RNA, 68 nt, Homo sapiens
gggacccggcaggccgcccccggcaagcgccccgggggcagcggcccccaccgaggccggccacgccc

SEQ ID NO: 131963 - RNA, 81 nt, Homo sapiens
gcgaccagcccaccgaaaggagagaagcaggagccgaggccagagcagaaaccagcccaggaacccagcgccccccacgac

SEQ ID NO: 131964 - RNA, 85 nt, Homo sapiens
gaccagacagggagcggaggagaaggcaggaagagccaaggagacaacagggcgggaggccaggcagcacgcagacaagaagcgc

SEQ ID NO: 131965 - RNA, 55 nt, Homo sapiens
agacgggaacccggcgcaaggggggagagacaaccagagcggaaagggagaaaag

SEQ ID NO: 131966 - RNA, 80 nt, Homo sapiens
gaaacagaagccgggcgcggggaacggaagcggagcagggaagacggagcggcggcccgaaggggaggggcgaccccggg

SEQ ID NO: 131967 - RNA, 85 nt, Homo sapiens
cagcaccaggcccaggacagcacgagggcggcacccaccccccgagcccgcccgccggccccagcccccaccagcagccccgggc

SEQ ID NO: 131968 - RNA, 72 nt, Homo sapiens
cacgaaggacaggaaaaggcccaaaaagaccaggcaggaaagaccgaagaccagggccggccccaaccacac

SEQ ID NO: 131969 - RNA, 84 nt, Homo sapiens
ccggagggcggggcccgcggccgccgcgccccgagggcagccgcacgccaacaagggccgccgcgccggaaccaaaaagaagcc

SEQ ID NO: 131970 - RNA, 75 nt, Homo sapiens
acgggaggcccggccgccccggagggagacgcgcgccgaggagaacccagcgggaaaggccgaacagccacgacg

SEQ ID NO: 131971 - RNA, 80 nt, Homo sapiens
aggccgggacggccgagcggaccaaaaggggaaaagaagaaaccacagagcagagaaacagaagaaaggccacggaggaa

SEQ ID NO: 131972 - RNA, 75 nt, Homo sapiens
ggaaccaagggggccagccgccgcgcccgcccgacccgccaccgccaggccagacccggcaggcaccgcccggag

SEQ ID NO: 131973 - RNA, 71 nt, Homo sapiens
agagaagcacacacaagagaggcccgagagcccccagacaggggcacgaggaggcaaaacagaggagccgg

SEQ ID NO: 131974 - RNA, 75 nt, Homo sapiens
gcggcagcggcgcccgagcggcagaccgaccaccccccagacacagaaaagcccacgaggaaaaacggccaacaa

SEQ ID NO: 131975 - RNA, 75 nt, Homo sapiens
accacagagcaaaaaaacaaaagcacccagacaaaaaccggcaagagacaaaacacgacacagagaccgacaaga

SEQ ID NO: 131976 - RNA, 72 nt, Homo sapiens
aacgggcccgaagaacacagagagcgagacaacaggcacaaagagagaaggaacacccacagggcagacaga

SEQ ID NO: 131977 - RNA, 86 nt, Homo sapiens
gacaacccccggagccgcacgagaccacagccaacggccgagaggccaagggagaaaaaagaggccggcgggaccaccgcccaccg

SEQ ID NO: 131978 - RNA, 59 nt, Homo sapiens
cgcaaacccaaagaccccgccggagacgagagccagaggagcagccaagaagcccccca

SEQ ID NO: 131979 - RNA, 79 nt, Homo sapiens
ggacaaaaccgaaggaggggcgaaaccagcgaagacacagccacccaaaccgcccccaggaagggagaacggaaaaaac

SEQ ID NO: 131980 - RNA, 65 nt, Homo sapiens
cagcagcgcgcggagaagaacggggagccaggaagaagccccacggcagcagcaaccacacgccg

SEQ ID NO: 131981 - RNA, 81 nt, Homo sapiens
gcgcggcgcggcgcggcgagacacacccgaagcagcccaccacggggcagaacaccgaaaaccgccgaagcagcaaaggaa

SEQ ID NO: 131982 - RNA, 68 nt, Homo sapiens
acaaggcgcggcggcggagcggcggcgggcgacaaaccccgggggaccacccaccgggggaggcagcg

SEQ ID NO: 131983 - RNA, 67 nt, Homo sapiens
cgcaaacacaaccaggaccgaagcccgcaaaggacaacgaacgaaggagacacacaagaacaacgac

SEQ ID NO: 131984 - RNA, 85 nt, Homo sapiens
aagaagcaggaggagagaggggaagcgagagaaaaacaagcgccacacggcagaccagagggaaacagcaggaaccaaaaagaac

SEQ ID NO: 131985 - RNA, 62 nt, Homo sapiens
agcaccgggacccaaaggcaggcacaccagacacgcagcagacacccagaaagaccagaccc

SEQ ID NO: 131986 - RNA, 68 nt, Homo sapiens
gaccagcacaagagaaggaaaagggcccgccgagaggggcccccgggaggagagaagcagaaccacgg

SEQ ID NO: 131987 - RNA, 76 nt, Homo sapiens
accgagagcgcgaaacgcacgagaagcagacacgaacggacgcaagacagagagacaaagaagaccagagcagagc

SEQ ID NO: 131988 - RNA, 79 nt, Homo sapiens
caaggcaccagccaaaacacacaccggccaaagagcggaaaggcaaaaggacagggggggccgcccgcccaaggcagga

SEQ ID NO: 131989 - RNA, 87 nt, Homo sapiens
cccagagacggaggacaccggaaccaaccgggagccccccaagagacccaggggaagacccaaaggcagcaaaaacaagagccccaa

SEQ ID NO: 131990 - RNA, 67 nt, Homo sapiens
aggagaagagccagagcgggaggacgacgagagagaggcaaacggagaggcaagaccagcagaggga

SEQ ID NO: 131991 - RNA, 77 nt, Homo sapiens
gcgacggcaccagcagacaaggaaaaccagagcaaagggcacgagacaaggaaagcacaaagagccagaccgaaaaa

SEQ ID NO: 131992 - RNA, 80 nt, Homo sapiens
aaaggacagacacaaaaagggcaagacacccgcacgagggccagggggaaaaaccccaaaggggacagccccagaagcca

SEQ ID NO: 131993 - RNA, 63 nt, Homo sapiens
cccggcagcggcacgcgagccgccgggccaaccgccccccagcagcaggcacgggcgaacccc

SEQ ID NO: 131994 - RNA, 59 nt, Homo sapiens
ccagacaaaccgaaggcgacagagacaggccacccagggaagcgaagaaaaaacaaagc

SEQ ID NO: 131995 - RNA, 67 nt, Homo sapiens
gaaagacccggcaaagccaaccgggaacagggaagagccaggccggcggggcacgcccgaacggacc

SEQ ID NO: 131996 - RNA, 81 nt, Homo sapiens
ccaggggccgggagggcgccaggccaccagaagcaaaccgagacaagcacggcagggcacccaacgagggagccacaccag

SEQ ID NO: 131997 - RNA, 83 nt, Homo sapiens
cggaagcccccacgggccaccgacccgcagccacccgacgacgccacccacaaagaagcaagcccggacagaagccccgagac

SEQ ID NO: 131998 - RNA, 71 nt, Homo sapiens
aaggaccaagaaccagggggaggcaccaaaaagaagcgcgggccaaagaacaacaaagggaaggaaagaca

SEQ ID NO: 131999 - RNA, 71 nt, Homo sapiens
acaaagcaaaaaggacaccagaaagagaggagaagggaacaaccgaaaaagcaacaaacaccgggccaacc

SEQ ID NO: 132000 - RNA, 80 nt, Homo sapiens
gaggccccccagccagggaacacacaaccaaagcccaccagaggacagacagaaagcaccaagcggacagagaccgccgg

SEQ ID NO: 132001 - RNA, 71 nt, Homo sapiens
gagacaaggagagaagaaccaaagaagcaaaacacgagagaaacaaagccaccggaacacacccgccgaga

SEQ ID NO: 132002 - RNA, 82 nt, Homo sapiens
gacgaaagaggacacgggaagaacaaagacagaccggaacaaggaggccaccgccgaaagaagcgggccaagcgacccacgg

SEQ ID NO: 132003 - RNA, 74 nt, Homo sapiens
accggccacccagagagcaaaaggcagcgaaacaggaaacagggcggcagcagcaggaggacggacaacccaca

SEQ ID NO: 132004 - RNA, 52 nt, Homo sapiens
gcggaagagcgccagcacggagaggagccaagcccaacgggacgggaaaacg

SEQ ID NO: 132005 - RNA, 82 nt, Homo sapiens
ccggccgggacgcggcggcggggagagcggcggacggggaggacgcacgacgcgcggcacgggaacgcagccggcacaacca

SEQ ID NO: 132006 - RNA, 75 nt, Homo sapiens
gacacgaaaaccaggaccgagaaggcgcagcggaaaggagagggaaagggcgggggcaagacccagagaagacaa

SEQ ID NO: 132007 - RNA, 80 nt, Homo sapiens
cggagacgcaggagccgcggacaacggccgcggggccccgagcagccccagcccacgcacgagcaccggccagaacaagc

SEQ ID NO: 132008 - RNA, 67 nt, Homo sapiens
aaaccccgacacagggcaaacaccaagccagcagaggcgcccaaggcaggaacaccaccccagagca

SEQ ID NO: 132009 - RNA, 83 nt, Homo sapiens
aaggccacaaagcgcgacaccccggacccagccccaacggcaagcaacgcgccacccgggaccaggagagagggcagggcgag

SEQ ID NO: 132010 - RNA, 80 nt, Homo sapiens
acccccaccacccagccccgagagcggaaccacaagcaccagcacgccggcaaaaggcagcgggggcacagcgagggggc

SEQ ID NO: 132011 - RNA, 82 nt, Homo sapiens
gcagcggcagcagcggagaaggcgggagcagcaccgccgcaggaagaaaacaggcgaaacaaggcacccccagcgccgaaca

SEQ ID NO: 132012 - RNA, 103 nt, Homo sapiens
gcgcaggaccccggcggcgcgcggaccagggggcggcgccaggacagggcccgggacgagcggcccagcgacgagcgaagaggcacaaaaccgccaggagccg

SEQ ID NO: 132013 - RNA, 77 nt, Homo sapiens
ggagcaggacaccaacagagcaacgagaaggacacccaaagagagagccaaagcagggagggaaaagaaccagaaag

SEQ ID NO: 132014 - RNA, 81 nt, Homo sapiens
gcgcagcagcaggaggaggaccgcagcaaggaagcgggcaccaacagacaaccagggcaagcagaggcaaaggcaagggcg

SEQ ID NO: 132015 - RNA, 60 nt, Homo sapiens
cggcgaaaaaggagaagggagaagcacacaccagaaagcgccaccccaaagccgacaagg

SEQ ID NO: 132016 - RNA, 67 nt, Homo sapiens
cgaaaggaaagacggagcaggcgggaacgaggaggaagagcgacagccaaagacagaacagacaaac

SEQ ID NO: 132017 - RNA, 83 nt, Homo sapiens
ggccaaagggaccacaggccccgaggaccaggggaaggagacaaggccaaagaaacaacgaacgagcaaggaagggccaaggc

SEQ ID NO: 132018 - RNA, 86 nt, Homo sapiens
cccgcagggacacaacgccacaagccggacacggggacacacccagaagggcagaaaagaaaaggccaaacccacccacagcccgc

SEQ ID NO: 132019 - RNA, 96 nt, Homo sapiens
ggcgcccccgccggccgccgcgccgcccggcagcccggcagaaagcgggaacccacaacgaaggaaggaacagaggcacagcgacgcaaaaggagg

SEQ ID NO: 132020 - RNA, 32 nt, Homo sapiens
ggcgaaaccaccccagaggagccgccgcaccc

SEQ ID NO: 132021 - RNA, 84 nt, Homo sapiens
gaacgcccgcggacgacccgagggcgcagcaacggcacacagaggggagaccagacagaggacaccggcaaaaccaaaaaggga

SEQ ID NO: 132022 - RNA, 85 nt, Homo sapiens
gccgccccgcgagcacagagcccgccgccgaccgccgcccgccacacccgccgccagggcacggccgagcagagaggacggggac

SEQ ID NO: 132023 - RNA, 70 nt, Homo sapiens
accaaaggcaccggccagaccacccccagcgagcacagccagggaccgggaccacgaaagggcaaagagc

SEQ ID NO: 132024 - RNA, 69 nt, Homo sapiens
agggaagggccgaaccggccagagggcaagcaaagaccaagagaagagagggaaaccaaagggcagcca

SEQ ID NO: 132025 - RNA, 79 nt, Homo sapiens
ccccgcacgcccgggaagcgcgcaccgccaagcagcgcaaaaggaaacaaggcccccacggagccaccggccaaggccc

SEQ ID NO: 132026 - RNA, 67 nt, Homo sapiens
gccgcgccccaccgggcaaaccgcggacaaaaacaaccaccagcgagcaaaaaggcaaagaccaaga

SEQ ID NO: 132027 - RNA, 72 nt, Homo sapiens
ccaccgcgagaagagcaagacagggggccgggaaacagagagcgaccagggggaaccgaaggagccaggcag

SEQ ID NO: 132028 - RNA, 71 nt, Homo sapiens
acaacacacagaaggcagggagggaggggaaagacccacaccaagaggggcgagaccaaaaggaggagaag

SEQ ID NO: 132029 - RNA, 80 nt, Homo sapiens
cagggccgagcacgggaaggggcagacccaaaggaaacgcacgaaagaaacaggagagcgcagcgaagcccggggaagca

SEQ ID NO: 132030 - RNA, 78 nt, Homo sapiens
gagaggggcggcggcggggcaggggccgaaaaaagccgccccacaggggagaaaaagacagcacccaaagcagaaccg

SEQ ID NO: 132031 - RNA, 67 nt, Homo sapiens
ggaagagagacagagaagacgcagcagcaggcgcaaaaacgaacccacaaccgaacgacggacggga

SEQ ID NO: 132032 - RNA, 81 nt, Homo sapiens
caagaggaggacagcgcacacagcaagcacgaggcgcgcccccacccggggccgagaaccacaccgcgggagaaggccacg

SEQ ID NO: 132033 - RNA, 89 nt, Homo sapiens
gcgcagcacgagccaggaacgcgcagccccgagcgccgcggacgcgcacgagggacggggaaaggaggagccaccgacccaggccggag

SEQ ID NO: 132034 - RNA, 77 nt, Homo sapiens
accacccgagcggcgcggacgaaggcaaccgcacacaaggaggccccggcaggccacccggccccagagcaggcagg

SEQ ID NO: 132035 - RNA, 73 nt, Homo sapiens
gggacgcgagagacgcaagacgaacaggaacagagaagcaaacggcgaggaaagagaggagccccggaaagaa

SEQ ID NO: 132036 - RNA, 71 nt, Homo sapiens
agggaaaacccaccgggagcacgaaggaagaccgcaggaaagcaggaaggcaagaaagccaaggacgaaac

SEQ ID NO: 132037 - RNA, 73 nt, Homo sapiens
ccacaagaaacaaagcaacagcacgaggcagcaaacaacaagaaaagaagaccgcaaggacaagagaaaggag

SEQ ID NO: 132038 - RNA, 73 nt, Homo sapiens
ccagaagaaggaccggaagcacacaacaggaaaacaaaagaggagaaaggacaagagacacgcaaaccaaggc

SEQ ID NO: 132039 - RNA, 92 nt, Homo sapiens
cggccggcccggagcaccgagccgcggcacggaggagggcccggccaggccccaccgccacaagcaggggaacaccgccaaccccaagggcc

SEQ ID NO: 132040 - RNA, 82 nt, Homo sapiens
ggacgacgcggagacccaggaagcgcgagaccaggacggcgcgggaaccacgccaacggggcgggacgacagaaaagaaccc

SEQ ID NO: 132041 - RNA, 42 nt, Homo sapiens
gcgcagaggggcagggggagacacggccgagaccccgacgcc

SEQ ID NO: 132042 - RNA, 38 nt, Homo sapiens
gccaagcccgccgcgcccggagagaacggagagccccg

SEQ ID NO: 132043 - RNA, 77 nt, Homo sapiens
ccgcggcccgggcgagcccggagaagaggaaggggccaaggaccacccgacgcgggcggaaagacacccccaaccca

SEQ ID NO: 132044 - RNA, 84 nt, Homo sapiens
cgggagcaccagcgcgccacgacccgcagacaagaaagcgagcccacagcccgggccccccgagcggacggaccggagcccacg

SEQ ID NO: 132045 - RNA, 81 nt, Homo sapiens
gacgggacagagcggcgggacagcccaagggccagcaccgcgcccaggcagagccagaccggcccaaaccgacaaagaggc

SEQ ID NO: 132046 - RNA, 83 nt, Homo sapiens
ggacccaacagaacacgcagcaaaggagccagcaccaccaacaacagaacagcaggcggacaaccaaaccggcagaaaagagc

SEQ ID NO: 132047 - RNA, 84 nt, Homo sapiens
ccccaacagccaaggacgaggaggacagcaaaggccagacgcaccaacaaccccgccaccaccccaccacccaccggccagcca

SEQ ID NO: 132048 - RNA, 74 nt, Homo sapiens
gaagaacagccgagagagcaacaagccagcccgggaccgagggcggccggcccaaggaggcagggcgaccggcc

SEQ ID NO: 132049 - RNA, 69 nt, Homo sapiens
gcagccccagcgacccaagaaccggaccagacaaagggagcaccagccagaccgggaagaaacgaaggg

SEQ ID NO: 132050 - RNA, 68 nt, Homo sapiens
ggacaagggcggcagcgacccagcaaagcccaagcaggacgacgacggggaaacccagacgacaagga

SEQ ID NO: 132051 - RNA, 75 nt, Homo sapiens
cccacgcggggggggccaagagacagggcacaccaaacccacgggaaagacaaggagccgggccgagaaaccgaa

SEQ ID NO: 132052 - RNA, 77 nt, Homo sapiens
gcaaaaaaggggcggagaaacaacagaagaacgagcagaaagaacagaccacccgaaagaggagagaaagaacccac

SEQ ID NO: 132053 - RNA, 74 nt, Homo sapiens
ccagaaaacagggaaaacgcgaaaaaggagcccaagccaggcgacagcggcaggcagcaggaggagccagagca

SEQ ID NO: 132054 - RNA, 62 nt, Homo sapiens
gggcacgcgaggaacccagcagccggcggacgggcagcgggggcagagacggggaacagggc

SEQ ID NO: 132055 - RNA, 78 nt, Homo sapiens
gcgcgcggccccgacgccggcaggcggggccgcgccacccgcaaacagggcagagacgaagaggagcagaaccagaag

SEQ ID NO: 132056 - RNA, 81 nt, Homo sapiens
cgcgacggccggccgcgccaccgcaccgccaccggcccgacccaggccagaagcccccaggaggagaacgagcaacggaag

SEQ ID NO: 132057 - RNA, 75 nt, Homo sapiens
cgcagcgaagccacagaccccagaaacgggcaagcgcgcaaacccagaagggaggcagggagcccagaaagaaga

SEQ ID NO: 132058 - RNA, 75 nt, Homo sapiens
ggcccgcagcccccgccggccgcccaacaccgaacacccccccaagggcaagaccacacagaagagccaaaaagg

SEQ ID NO: 132059 - RNA, 85 nt, Homo sapiens
gagcgcgaacgagcgacggcggaacccggggccgggacgcagcccggcggcagcagaagccggaaggccccccccgccgggagaa

SEQ ID NO: 132060 - RNA, 66 nt, Homo sapiens
aagcacggcgggcgaaacagaacgacagaggcgagaccaaagccaacaacaggccagaacaagaag

SEQ ID NO: 132061 - RNA, 85 nt, Homo sapiens
ggaccaacaagcacaagcagaggcaggaagaagaacaggaagagccagaagagccggaagagcgcagaagccggaagagagccaa

SEQ ID NO: 132062 - RNA, 65 nt, Homo sapiens
cacaccaaagagcagagccaaacggacacccaacacaccgcagcgcgcaaggcgagagggaacgg

SEQ ID NO: 132063 - RNA, 42 nt, Homo sapiens
gaggaccccgcggggcggggcgccccggacacgagacaggag

SEQ ID NO: 132064 - RNA, 79 nt, Homo sapiens
cgcacgccaacgacgaggaccgacgcagcagaaagacaccacagaaagccagagaagaaagcgcgcgcacgagcacacc

SEQ ID NO: 132065 - RNA, 73 nt, Homo sapiens
aaccggggaggaaaaccgacgaagacaagggaggcgaggacggacaaaaggaaacggacgggaggccagccag

SEQ ID NO: 132066 - RNA, 79 nt, Homo sapiens
gacccgcaagcagcccaccacgccacaaacgccgcaccaggcgagcagcgcccccggcgacgagaagagcaccccccag

SEQ ID NO: 132067 - RNA, 69 nt, Homo sapiens
gggaaaggccagcgcagaaacgcaggacagcagaccacagcccggcaggcccaaaaacccaaagggaca

SEQ ID NO: 132068 - RNA, 96 nt, Homo sapiens
ggacccgaagccaaaccaggaggaggacagcagcggacggccggaccaagaggcgccgccccccagcaaacgagaaaaacccagcgaccgacgacc

SEQ ID NO: 132069 - RNA, 74 nt, Homo sapiens
aaggcgagagaagacaaaccagaacacgaaaagaaaccagaacaggaggaacaaccaacgcaacccccaaaccg

SEQ ID NO: 132070 - RNA, 77 nt, Homo sapiens
cgaggagcccacagaacccgaagccacagaaagaagacacccgccacacaggacagagaagccaaagaaaacccccc

SEQ ID NO: 132071 - RNA, 89 nt, Homo sapiens
accccgagaggggacagagccagcccaacccaacagagacagcggaagggagaccaacgcaaagggagagacaagccaacgagaagagc

SEQ ID NO: 132072 - RNA, 76 nt, Homo sapiens
ggaagcgccaacgagaggagaaaaaaaaacaaacgggcccaacaggacagagcagaagggcgaaagaccgggccgc

SEQ ID NO: 132073 - RNA, 61 nt, Homo sapiens
ccgggggagcggggccccacacccccccggggggggagagcagccagcgggacagaaggag

SEQ ID NO: 132074 - RNA, 78 nt, Homo sapiens
gaacccagcagccggcggacgaaaggccaagccggaagagacggggggggacaccagggacaccagcggagggggccc

SEQ ID NO: 132075 - RNA, 74 nt, Homo sapiens
ccggcgcccgagccccccccccccagcacgcgaggcgcgacagaacaccaggagcgacaggcggaacggccgag

SEQ ID NO: 132076 - RNA, 79 nt, Homo sapiens
gagcccgaggcaccacccaagcggccacaggcacagacggccggacaaccccccagcgggcaggccaaccccccacccc

SEQ ID NO: 132077 - RNA, 79 nt, Homo sapiens
cggaggaggaggaggaggcgaggaggagagacccccaggcgggggaggaggaggggacgaggcagaaacgcacgaagcc

SEQ ID NO: 132078 - RNA, 66 nt, Homo sapiens
gaaagacgaaggcgaacaggaacaaagagagagaagggcccacaggccacccgccagacgcagcgg

SEQ ID NO: 132079 - RNA, 64 nt, Homo sapiens
cccggcgcaacccggcgagggaacccggccagcacggaggagcgccgcgcccaggcggaggcag

SEQ ID NO: 132080 - RNA, 80 nt, Homo sapiens
cggacggggaccacacagccagaacagggacgccagccgcagaggaagacccggcccagagaaggacgcagcgcgagcgg

SEQ ID NO: 132081 - RNA, 44 nt, Homo sapiens
gagagaaggacccacggcgcgcgaagagcagaaaagcgagaaga

SEQ ID NO: 132082 - RNA, 59 nt, Homo sapiens
accaccaacaaccagaagggaggaccccaagaggagccggcccagacaacccaacccgc

SEQ ID NO: 132083 - RNA, 77 nt, Homo sapiens
acggaaagacccgccaagagagaaaccaacaagcgggaggcgacgagacggagacagcaaacagaaagcacccccag

SEQ ID NO: 132084 - RNA, 81 nt, Homo sapiens
cggcccgggagccgccaaccagcgaggccacggcgcaccgcagcagcccacccaggcccaaaaaaacagaccaccagccgc

SEQ ID NO: 132085 - RNA, 85 nt, Homo sapiens
gccagcagcagcagagcaggcagggcagaagaaaagaaaagcgccaggcaggcaggaaagcgccgggaagaaagccagagccgga

SEQ ID NO: 132086 - RNA, 74 nt, Homo sapiens
cgaacagcagaccgaaagccggcggagaggaccggagcggaaaacccgaagccccaagccgggagagccgaaga

SEQ ID NO: 132087 - RNA, 76 nt, Homo sapiens
gcccggcagcgccaggcagccccccgcgaaaagagaaccgggggaccacagaacccaggagaaacgagagggacag

SEQ ID NO: 132088 - RNA, 32 nt, Homo sapiens
gcggagggccagccgcacgcccccacgaaagc

SEQ ID NO: 132089 - RNA, 37 nt, Homo sapiens
gggacggggcccgagacaccagcccgagcccgaccac

SEQ ID NO: 132090 - RNA, 83 nt, Homo sapiens
ggggaccgcccggacacaagaaaaagagcgaaaaagacacgccgggaagagaagaaggggaaaagaggaaaaccaggcagaaa

SEQ ID NO: 132091 - RNA, 70 nt, Homo sapiens
ggccccagcgccaaccaaaccgaaagccagaagaacaaaccaggggagggaaacgagaaaaacgacgcca

SEQ ID NO: 132092 - RNA, 62 nt, Homo sapiens
ccggcacagaacgagagcaaacgaggaaaacagccaagaaaaacgcaagggaaaagagaaaa

SEQ ID NO: 132093 - RNA, 123 nt, Homo sapiens
aagcgcaccagacaaagcagagcacaaccgaacaacgaaggagcccacaccccagccacaccagaagccgcaaggcgaaaagggaaagaaaagaggcgcccggaggccaaaacgcacaaagag

SEQ ID NO: 132094 - RNA, 112 nt, Homo sapiens
ggagggccgagggagggccgagccagccgcggccggaggagcccccaggccgacaccagaaaagaaccagaaaaccacaccaagcaccagaaagccggaaaggaagaaggag

SEQ ID NO: 132095 - RNA, 77 nt, Homo sapiens
aagccgacaaggggcggaggaagggaggagacccgaccccagaagaggagaaggagaaacggaggacgcccccacac

SEQ ID NO: 132096 - RNA, 69 nt, Homo sapiens
cggagccaccggccggcgaagccaaccaggaaaccgccagacggccgcaccagaaggaaaggcgacggc

SEQ ID NO: 132097 - RNA, 93 nt, Homo sapiens
cagagccagccagagccggacccagagggggggaaaaccggagaagccccacccaaaggcgccaggcgcaaacccccgccagaaccagccacc

SEQ ID NO: 132098 - RNA, 79 nt, Homo sapiens
ccagaggccacaccgcaccaccgcggacccacccggcgcagccccacagaagacagaccgccaggacagagccaaaacg

SEQ ID NO: 132099 - RNA, 72 nt, Homo sapiens
gagccgcaggcccggcacggcgggcaggccagggcgccgagccagacggacacccccaaggagggcacacca

SEQ ID NO: 132100 - RNA, 83 nt, Homo sapiens
cacggcaccgggggacagcaaccaggcacacccggggaggacacggacgcagccccgaccaggccgccgcacccccggcgaag

SEQ ID NO: 132101 - RNA, 73 nt, Homo sapiens
gggcaaaccccgccagaggcacacacggaaccgacagcacaggggcgcggcaggcgaccaagccacaaaccag

SEQ ID NO: 132102 - RNA, 79 nt, Homo sapiens
gaggcgggaccggaagaggagccggcagagagaccgacagagccacaagaaacaaaggcacggcacggccggcacaccc

SEQ ID NO: 132103 - RNA, 75 nt, Homo sapiens
gccgcgcgcgcaaccccaagagcggagacacggggaaacgcagacaaaacagaggagaccagaccagaagccccg

SEQ ID NO: 132104 - RNA, 79 nt, Homo sapiens
cgccccacccgcagcagaacaagcccaaacgccacaacacccgaaggaagccgccccggcaaaaaggaaaggggagccc

SEQ ID NO: 132105 - RNA, 59 nt, Homo sapiens
gaagaaaaagcaaaagcagaacaggacgggacagggaaccgaaccaccaggccaaaaag

SEQ ID NO: 132106 - RNA, 77 nt, Homo sapiens
aacgaggggaccccacgaggcgagcggcagcaaggaaacaggagggggcgcggcaggacacaagggcaagagccgga

SEQ ID NO: 132107 - RNA, 74 nt, Homo sapiens
gcaaaccgcaggaacagacagagccgagggaggagaagaagaaacccaagcaagagagacagagagggaaaaac

SEQ ID NO: 132108 - RNA, 59 nt, Homo sapiens
ggcccggcaggcggcaaaacgcagaaagaagccagcccagaaagggaaaacgacaccag

SEQ ID NO: 132109 - RNA, 53 nt, Homo sapiens
ccgagagcgggagcgggcgggccaggggaagaacacggaaaccggacagggac

SEQ ID NO: 132110 - RNA, 79 nt, Homo sapiens
gacggaccagcgacccaagcgccgcggaaccacgccgccacgacccccaggcacggaagaacacgggaaagcagcaaaa

SEQ ID NO: 132111 - RNA, 74 nt, Homo sapiens
acagagaggagccaaacccccagacccagggagaaggggggcaaaggcacaggggacaggggccccaacagaac

SEQ ID NO: 132112 - RNA, 52 nt, Homo sapiens
gggccacacgcacaaggcggcacccccacaagcgggaggaacagacacgcca

SEQ ID NO: 132113 - RNA, 77 nt, Homo sapiens
ggacgcaggagcccccccggcagcaacccccacacccagcaccagaacagggagcaacgacacaagcggcccaggag

SEQ ID NO: 132114 - RNA, 73 nt, Homo sapiens
gaaaagggaaggccccaagccaagaacccaaagaagcaaggacagagacaagaacggcagagaagaacaagac

SEQ ID NO: 132115 - RNA, 52 nt, Homo sapiens
gcggggacagacagcacccaccggggaagaggaggacgcagcagagagggca

SEQ ID NO: 132116 - RNA, 75 nt, Homo sapiens
aagcgcagcaaagcgggaagacaaaaaacgcacaaggcagagaagggcagagagaacacgacaagcacagcaaaa

SEQ ID NO: 132117 - RNA, 48 nt, Homo sapiens
gacaagccgcaccacgccaaggaaagagaaaagacacagacgacccag

SEQ ID NO: 132118 - RNA, 84 nt, Homo sapiens
ccggacgccggccgcccgggaccgccagccgccgcgcccacagccagcagcgggaccgacgagaccagaaggaaaacacaccag

SEQ ID NO: 132119 - RNA, 73 nt, Homo sapiens
cggagacagggcaagcaccgaccgcacgagcaacccggaagagcccgcacaaacaccgaagcccagaggccaa

SEQ ID NO: 132120 - RNA, 72 nt, Homo sapiens
gcccaccacaaaaacgaaggcggcggaggagcaagaggggggggcccccccgaagaaaggaaccggggagcg

SEQ ID NO: 132121 - RNA, 61 nt, Homo sapiens
ccgcaccagcccccaaggagcgggacccagaggagccacgcccagagaagcgaacaccacc

SEQ ID NO: 132122 - RNA, 77 nt, Homo sapiens
cgccgcacggccaccaccagcccaaacggcggggaggacggcccgcgaacgcagcccaagccacggacagacgagca

SEQ ID NO: 132123 - RNA, 82 nt, Homo sapiens
cgccgcccagagacgcgagcccgccgccgccgccaccacccacccggacacaggaacacagcacccacccacacccacaccc

SEQ ID NO: 132124 - RNA, 112 nt, Homo sapiens
aacagagagggaagaaacaccaagggccagacccgacgggagaggggcgacaggcccaaccaggaaggagacgccaggaggccagggcagcaccgggcagcgagacgaaaaa

SEQ ID NO: 132125 - RNA, 79 nt, Homo sapiens
gacgcccggagagcgcgccgccgccgccgccgccgccacgagaaggaggggagaaagaagagaccggacacacgagcca

SEQ ID NO: 132126 - RNA, 69 nt, Homo sapiens
ggggaggaggcgaagccacacagagggcaaggagggccaggagcaagagagacccacgcggccaggcgc

SEQ ID NO: 132127 - RNA, 78 nt, Homo sapiens
cggagccaacgaaacaaaaagcagcaaagggaagagccacaaagggaaccaggcgaagaggaaaaaaggaagaaaagc

SEQ ID NO: 132128 - RNA, 69 nt, Homo sapiens
cagcagccacgacacccaagccgcacaggcagacgggggagggcgaccgaaggggcgcacggagagcgg

SEQ ID NO: 132129 - RNA, 119 nt, Homo sapiens
caccgcgcgccgccaccacgcgcgggcgggcagccccgggccaggccgcggccggggcaggagcgcaggcccggagcacacaaggcgaaagaaaaggcaagagaaccgaagaaggacag

SEQ ID NO: 132130 - RNA, 64 nt, Homo sapiens
ccgaccgcaacagaacggacccgggagcccagacacccccccagcagccaccggaacaagcgca

SEQ ID NO: 132131 - RNA, 63 nt, Homo sapiens
cgggcggcggcggcgggcgggagccccagagaccaagaggggggagaccggaggacccccaaa

SEQ ID NO: 132132 - RNA, 90 nt, Homo sapiens
gacgccgaacgacgccccgcacaccggagcgcccagcgcgaggaggagaaggcaaccaaaggcaggacacaaaaacaaccgaaagaggcg

SEQ ID NO: 132133 - RNA, 66 nt, Homo sapiens
aggagcgggggggcggaacacaccgcaacacggacgggagaagcgccacccaccagaacccaggga

SEQ ID NO: 132134 - RNA, 82 nt, Homo sapiens
acaaaaaaaaagaagccccaccagccaagcaaacaccccccccaccaccccaccagaaagcccagaaccgggacaacccagc

SEQ ID NO: 132135 - RNA, 77 nt, Homo sapiens
acaaaagaagagaagaggacagcaggcaacagggaccgggagccgaagccacgcagcccgcggccagcacccacccc

SEQ ID NO: 132136 - RNA, 68 nt, Homo sapiens
gcccaccgagccacaaagcaggcaaacacgccgcaggcagagggccaggcagcgaagaagacaaagaa

SEQ ID NO: 132137 - RNA, 59 nt, Homo sapiens
ccgcgcgcacggccaggagggcacggccgcggaacaccggggacagcagaccacagccc

SEQ ID NO: 132138 - RNA, 59 nt, Homo sapiens
ccccaaggaggacgagggccgggccgggcgcgggcgagaaagccaaccaggaaaccgcc

SEQ ID NO: 132139 - RNA, 37 nt, Homo sapiens
agaccagaaacaccaagaccaggcagccggaccagcg

SEQ ID NO: 132140 - RNA, 83 nt, Homo sapiens
ccggagcccgcgcgggccgcgcgcggggcggagcccggggcccggagccggcgcccccggcgcgggccccgccgaacgccacg

SEQ ID NO: 132141 - RNA, 75 nt, Homo sapiens
gggggagaaccgcccagacacgacggcagagccgacaagcagaccggaagaccgacggaagaccacaccccgagg

SEQ ID NO: 132142 - RNA, 79 nt, Homo sapiens
aagagcagcggcgcagaaaggggaggccgggaggacgaaggaacccggcaccagccgggcaaaaacccaaaccaacaga

SEQ ID NO: 132143 - RNA, 81 nt, Homo sapiens
gaacaagccgagagggaaacaacccacccccgacaagggaccgggcgggccccgcaggaaacccccaccggcccacacaga

SEQ ID NO: 132144 - RNA, 55 nt, Homo sapiens
gacgaaggcggacaaggggggagcgaggcccagagaccaagagggcgcagagggc

SEQ ID NO: 132145 - RNA, 60 nt, Homo sapiens
cgggagggcgccgcggggcagccgccgcccccggggagaaagaagaaacaaagagggacc

SEQ ID NO: 132146 - RNA, 54 nt, Homo sapiens
gaaggcacacaacgacccggacagcgaccgcaagagagaagcagagaaccccag

SEQ ID NO: 132147 - RNA, 66 nt, Homo sapiens
gagccacgaaaagcggaagagaccaaggggggccagggagcgcacgccgccgcgagcaaaggggga

SEQ ID NO: 132148 - RNA, 71 nt, Homo sapiens
cagcggaccagcccggagggaacagcagcccagagggaccacagaaagggccacagagccgaacacagcag

SEQ ID NO: 132149 - RNA, 76 nt, Homo sapiens
gggagcagcccagccaagcacgcaggggacaagaccaccccaggacacggcgggcacaggaagaggaaagcagggg

SEQ ID NO: 132150 - RNA, 71 nt, Homo sapiens
gggggcccgccccgccgcgcccgccggccgacgagggagaaaccggccccgggcgaagagccggccgccgc

SEQ ID NO: 132151 - RNA, 74 nt, Homo sapiens
agagaagacccagaggaagccaaaaggcagagcagagaagcaggcaaaagcaccagagcggcccgcggccgcac

SEQ ID NO: 132152 - RNA, 68 nt, Homo sapiens
ccccgggaaacagaacaggccaccaacacagcacacacgggccaggggaggcggagaagacaacacag

SEQ ID NO: 132153 - RNA, 52 nt, Homo sapiens
gccagcccccccaaaaaggaaagacaccggcgggagagcccggcaaagagcg

SEQ ID NO: 132154 - RNA, 60 nt, Homo sapiens
gggggcggcagcgcggacacccagccccagggacagagagaggcagaagaaaaagcaccc

SEQ ID NO: 132155 - RNA, 71 nt, Homo sapiens
gccaacaacccgacacaggagaggccccccgggcacaggcaggaagagagaagacagcagcgaacaagaag

SEQ ID NO: 132156 - RNA, 79 nt, Homo sapiens
gacaagagcaccagggaaaacacgccagccaaagcaagggcaaaggagcacaacggaagaagaccagaagagaaagggg

SEQ ID NO: 132157 - RNA, 77 nt, Homo sapiens
aagcaacagcccaaaagcagggagccacgggccgcaaccgcccacgggagcacccacgggaacagcccagaaacgag

SEQ ID NO: 132158 - RNA, 50 nt, Homo sapiens
caaaacggacagaaaaccccaccagggggaaagaaaaggcacccaaaagc

SEQ ID NO: 132159 - RNA, 85 nt, Homo sapiens
cgcaggagaagcgccaaggacccgggacagggaccagcgggaaggcagacagcgagggcgacgacacgcaccccgcgccgccgcc

SEQ ID NO: 132160 - RNA, 71 nt, Homo sapiens
cgccacaggacaggcagacccgaccccagaaagcacaagggcacaggcgaggacaacaccgcgccccagcg

SEQ ID NO: 132161 - RNA, 42 nt, Homo sapiens
ccacaccgcgggccacacacaagcagaccagcacagcccacc

SEQ ID NO: 132162 - RNA, 59 nt, Homo sapiens
ccgccagacccacgcggccggaagccgggcagacgccccgagggcccgcgccgagccca

SEQ ID NO: 132163 - RNA, 77 nt, Homo sapiens
agcccggcccggcccgacaccgcgggccgccagacgggaaggggccccccaaaccaaaacaaaccagggagcaaggg

SEQ ID NO: 132164 - RNA, 81 nt, Homo sapiens
agcacacagccagcaaacccggcccaggccacgcggggccgcaggggcagaccgcggcgccagcccccggaggcggcaccc

SEQ ID NO: 132165 - RNA, 80 nt, Homo sapiens
cggcgcggagggcggaccgcgccgagcagggccggaaagagggcgggcccgcacggagcgcggggagaaaccggagacac

SEQ ID NO: 132166 - RNA, 83 nt, Homo sapiens
aagcaaggccaaagacagggagaagaggcaccagaccagagccccacagagaggaaacccacggcacacccaccggaaagccg

SEQ ID NO: 132167 - RNA, 69 nt, Homo sapiens
agcaaaagcccagaacgcggaaaccgcggccggcacaaaaccggcacacaaaacccgaaagcgcgcagg

SEQ ID NO: 132168 - RNA, 76 nt, Homo sapiens
caggacagagaccagaaacacaggcagacggaagcacagaagcgcaggcccagaaggggaagacccccagcgaaca

SEQ ID NO: 132169 - RNA, 78 nt, Homo sapiens
ccgacccacggccaccaaaaagagccaaagaagaggaaggcccacaaagagccggagcacaacgccaaaaggcagcac

SEQ ID NO: 132170 - RNA, 79 nt, Homo sapiens
ccgccagcgccagacggacgaggcggcggagaacaagcggcagagaggggggaaaggaacggaagaccaagaacaggag

SEQ ID NO: 132171 - RNA, 76 nt, Homo sapiens
caaacgcggcaacgcccccgggacagcacgccccggaccccaagccaaggaagcgacagccaggaccaggcacccg

SEQ ID NO: 132172 - RNA, 71 nt, Homo sapiens
agagccgaggaacgacaagcacggaggcacagggggggccacccccagaggaggcagaacgaacaaagaag

SEQ ID NO: 132173 - RNA, 77 nt, Homo sapiens
ggcagacacaggcacaccaaggggacccgagccccaaagacagaaaagccccgagacggaagagaagagaagagaac

SEQ ID NO: 132174 - RNA, 80 nt, Homo sapiens
agaccacgcaagccccaggagggcgaggaggagccggcaccaaccaggccacggagccaagcaacagaaaacgaggaaag

SEQ ID NO: 132175 - RNA, 82 nt, Homo sapiens
cgacaccaggggcacgcgcggcaagggccacggacgagcgcacgcccggggaacccccagcaccaggaggacagcaagaagg

SEQ ID NO: 132176 - RNA, 72 nt, Homo sapiens
acgaaaaaccgccagaagaacgggaagggcacaggaagaaaggaccaaggaaacaggaacccgcaaccacac

SEQ ID NO: 132177 - RNA, 79 nt, Homo sapiens
aaggaaaaacggagagccacaaaaaaggaagcgaaaggagcgaagaacagagccgcccaaagagacaccaaacccaggg

SEQ ID NO: 132178 - RNA, 75 nt, Homo sapiens
ggaggagacggggcagacaacggagcccgggggaaccaaagaaagcggagaaaacaaagaaaagaacgaagaacg

SEQ ID NO: 132179 - RNA, 79 nt, Homo sapiens
caaaacagagcggaggaaaagaaggcacggaagcaaggcaggcgaccaaaaggaaagacgggaagagacagagaagaca

SEQ ID NO: 132180 - RNA, 83 nt, Homo sapiens
cacacgggaaaacacaccggagacggggggaaacaggcgaggcggcggcgcccggagggcagcgaggcggaggcagggggacc

SEQ ID NO: 132181 - RNA, 97 nt, Homo sapiens
ccgggacccggccccggcccacaggggggggcaaacccgagagaacggggaccggagggccggaagcgggccgggacaacgggcaggagccggaagg

SEQ ID NO: 132182 - RNA, 69 nt, Homo sapiens
aaacccgagaggaaaaggcccggcagaaggacagaaaacgggccccagacacaagccccaccaagagga

SEQ ID NO: 132183 - RNA, 88 nt, Homo sapiens
cgggaggggggaggaccggccccaggcgcgccacagccgagccggccggacacccaacagcacgcagacaaggcaccaacagaacggc

SEQ ID NO: 132184 - RNA, 54 nt, Homo sapiens
gagaagcagagggaaacggggagaaagaacccaagggccgggcgcgggccacgc

SEQ ID NO: 132185 - RNA, 80 nt, Homo sapiens
cggaaccacacagggccgccaccaacagagaagacagagcaccaacgagaccagaaccggcgcaacaccccagccaaagc

SEQ ID NO: 132186 - RNA, 77 nt, Homo sapiens
cggcgcagcccggaaagccggcaagacgagaaagcaggcgcaaaaaccagacaccccacaccaccacccagacgacc

SEQ ID NO: 132187 - RNA, 49 nt, Homo sapiens
ggaccgaccgcaacagaacggacccggcgggaaaacggcacaaggcgac

SEQ ID NO: 132188 - RNA, 59 nt, Homo sapiens
cgcagggcgcccccgagacgaagagaccgcagaagcgaaaaggagggaaagaaaggagg

SEQ ID NO: 132189 - RNA, 75 nt, Homo sapiens
gaacacaacagaccacgaaacaacgaacgagcaaggaagggccaaggcagaccccacaccggagaacgcaaccag

SEQ ID NO: 132190 - RNA, 72 nt, Homo sapiens
gggacacgcgcgggcgggagcggcccacgacgggacacgccccggagggaacagagacagacccgggggccc

SEQ ID NO: 132191 - RNA, 47 nt, Homo sapiens
ggacgccggggccgggccaggagcagaggccgcaggagggaagcgca

SEQ ID NO: 132192 - RNA, 75 nt, Homo sapiens
gaggcccaaggcagaggcgaggcggaagggcaccccacccggggagaagcgcaccaagcgccaggcagccagagc

SEQ ID NO: 132193 - RNA, 65 nt, Homo sapiens
cacgccgaccggcgccgggagaccgggacagaacccggacaaaaaggacgaacaagagccgcggc

SEQ ID NO: 132194 - RNA, 85 nt, Homo sapiens
gacccggagggggcaagggaccagcaaggcggcagagcaaggggcacgcagaaggaccggccacgcaccaaaaagcccgggcacc

SEQ ID NO: 132195 - RNA, 51 nt, Homo sapiens
gacagcgggagccacggccacacgggagagaacgccaggcagccacgcgga

SEQ ID NO: 132196 - RNA, 120 nt, Homo sapiens
ggaacgacgcagagccgaggcagaagacggggcccgggaccacaggccccggcccagaggagaagcccaccacgcaacgggacggcgcggcggaaggcgcgccagacgagccacgcgcca

SEQ ID NO: 132197 - RNA, 63 nt, Homo sapiens
gggaaaaaggaacagacccaacaaagggccagcccgccagaggcccacccacagagcgcggag

SEQ ID NO: 132198 - RNA, 34 nt, Homo sapiens
accaaccggaggagacacgaacaagagaaagggg

SEQ ID NO: 132199 - RNA, 81 nt, Homo sapiens
cagccaagaacacaagcaaggcaggaaaacaaaagaggaaggaacggaaaaggcccacaccaaacagcaccagcacccaaa

SEQ ID NO: 132200 - RNA, 78 nt, Homo sapiens
cggcacgaaacggagcccggagcagcggcggcgaaagacaaggaccacgaaaaacacacaacacgacgcagaccccaa

SEQ ID NO: 132201 - RNA, 69 nt, Homo sapiens
gcggagaaaccaaaacgcaaaggcagaaaaaccacagaaacgaaagaaaagacaaaaaacaacgaaaag

SEQ ID NO: 132202 - RNA, 79 nt, Homo sapiens
ccccaccaacacccgggaccgcaacgacggcagccccgccggggccaaccgccccccagcagcaggcacgggcgaaccc

SEQ ID NO: 132203 - RNA, 88 nt, Homo sapiens
gaaagagcaagggaaaaagaagggagcggccgaaggagccaccaggccgggaagcccacgggggcagggggacaggaagcagccagcc

SEQ ID NO: 132204 - RNA, 75 nt, Homo sapiens
gaggacacagcccgcggaggcagcgaccgccagagcggaacgaccccagagcgagcccgcagcagcccagaaaca

SEQ ID NO: 132205 - RNA, 80 nt, Homo sapiens
caggggagggaaccgagcggcaaagccccgcaccgcgaccgcacaagcagccgccagcggaaccaagcggcgcggcacac

SEQ ID NO: 132206 - RNA, 50 nt, Homo sapiens
gagagcccacagacccagccacgaagcggggccaggacacacgagcaaga

SEQ ID NO: 132207 - RNA, 75 nt, Homo sapiens
acagacacgaccgcccacgaagccacagaagggaacacaagccgagaacagccgagcccagccccacagagccca

SEQ ID NO: 132208 - RNA, 85 nt, Homo sapiens
ggacccacagaagagcgaagcgaggacacacccaggaaaagaccaggacggacaagcacagccggaagagccgagacaacccaac

SEQ ID NO: 132209 - RNA, 77 nt, Homo sapiens
ggacccaagaggcgacagaccgcagaaaacacagcaagcagggacacacagcagccaccaagaaaacaccagaaaga

SEQ ID NO: 132210 - RNA, 82 nt, Homo sapiens
gcaaagaaaggcgaaaagcaaggcagaaaccaaggcacgccccaccggaggaagcaaaaaaagcaggaaaggagaagggaga

SEQ ID NO: 132211 - RNA, 75 nt, Homo sapiens
gaagagcgggaggaagaacagcaagggccaacggaagccagagaaaggcaacggggaccccggagcccagaagac

SEQ ID NO: 132212 - RNA, 77 nt, Homo sapiens
ggcggccgaggagaggcagggcgcgagggcgggggcagcggcagagaggcccgaagagaggaagggcaaggggaagg

SEQ ID NO: 132213 - RNA, 60 nt, Homo sapiens
cccgggaccaggaaagacaggacaccgggaagcgggaccaaacgcagcgcgcacgcagcc

SEQ ID NO: 132214 - RNA, 78 nt, Homo sapiens
aagagaggacccacagacgacacaaaacagacccgcaggaccccacagaggacggagggaacgggcgcgggacgcaca

SEQ ID NO: 132215 - RNA, 64 nt, Homo sapiens
cagggcaacaccgaagaaagagccaaacgccaaggcggcagaggggcggggagaggagacggca

SEQ ID NO: 132216 - RNA, 70 nt, Homo sapiens
cagagaagaggcccgcgaagacaaaaaacccaagaacccaaggacaggcacccaccgcaggcaagaacag

SEQ ID NO: 132217 - RNA, 79 nt, Homo sapiens
ccgaacagaccgcccggggccccaggacggggacagggccgaagagaggagcagcacccggaccgcgaccacacagacc

SEQ ID NO: 132218 - RNA, 68 nt, Homo sapiens
aaccgaaacgaaggaagaaaacacccgccgcgggaacgaccgggagacgaagaggccaaagggaccga

SEQ ID NO: 132219 - RNA, 80 nt, Homo sapiens
aggggaggcaggcgcggcagacggcgacagggcggcggcgccaggcagggcgcagcggagccggagcgaggcgggggagg

SEQ ID NO: 132220 - RNA, 84 nt, Homo sapiens
cggcgccgccaggccgacgaaaagcccaaggacggccggagcagcagaacaagagcggagaccaagggagccccgcagcagcag

SEQ ID NO: 132221 - RNA, 93 nt, Homo sapiens
gacgggaaacagggccagcgggacaaggggccagagccggccggccgacaccggcccggcccaagcggaagcagcgggcagagccgagacaca

SEQ ID NO: 132222 - RNA, 75 nt, Homo sapiens
gagagcgagcagagaaccacccgaaggaagccgggagaccacaggacagacagagaaagggaagaacaaagcccc

SEQ ID NO: 132223 - RNA, 78 nt, Homo sapiens
caaggaagacccagaggagcaagagagccaccccaaccccccgaacccccagaccaggcgaccagaagcaagaacaac

SEQ ID NO: 132224 - RNA, 66 nt, Homo sapiens
ccaccacgagcacggcccgcgcacgcccggagagaggaagaagagacacgaagagcacggagcgga

SEQ ID NO: 132225 - RNA, 75 nt, Homo sapiens
gcagccccgcagcaaccacagcaacacggaagacagacaaacaagacaccgaggcccgggggccgaagcgagcgc

SEQ ID NO: 132226 - RNA, 86 nt, Homo sapiens
agggcggcaacaggggcgagaaaggggccagaagcccccaggaggagaacgagcaacggaagccagaagaagcacccccagcaggc

SEQ ID NO: 132227 - RNA, 99 nt, Homo sapiens
ggagaggcgaagcagacgaggaacagacaagaaggccagcaaggggggagacacgccacgcggccaaaggaacacggaggaaaagcagccaggagcacg

SEQ ID NO: 132228 - RNA, 81 nt, Homo sapiens
agcacgagggaacccgagagccggaaaccccaaggcgcagacaccgacggagcgggagccagagagcgccgccaccagagc

SEQ ID NO: 132229 - RNA, 69 nt, Homo sapiens
acaccagccgcacgcgcgggacggagccagcgggaaggaggcacaggcaaggacgcacggacagcaaaa

SEQ ID NO: 132230 - RNA, 48 nt, Homo sapiens
ccggcagggcaagcggcgacacacgacggacacaacacgcgaaaccgc

SEQ ID NO: 132231 - RNA, 57 nt, Homo sapiens
cgaaaacggaaaacccgaaaaggagaaccaagaagaggccccccaggcccaaaccaa

SEQ ID NO: 132232 - RNA, 76 nt, Homo sapiens
accgaccgcacgggccacccaaaacagggggcacggaccaggagcacccacccaggccccccgacaccacaaagca

SEQ ID NO: 132233 - RNA, 34 nt, Homo sapiens
agcccccaccaacacaggaaggacaggccgccgc

SEQ ID NO: 132234 - RNA, 78 nt, Homo sapiens
gaaggggcccgaagcccccgcaggaaccacaacccaaccaggcccaagggcagagaaagaccgaacggggaaaaaggc

SEQ ID NO: 132235 - RNA, 77 nt, Homo sapiens
ccgagagccgcccgggccagcggccgcgcacccccggccggaggcaccagcccacgaaccgacggggaccccaagag

SEQ ID NO: 132236 - RNA, 82 nt, Homo sapiens
cggccgcccgcccagcgccgcccccggagggcccacgcagcgccggacaaggccgcaacgggagcgcccgccaagaggaggg

SEQ ID NO: 132237 - RNA, 63 nt, Homo sapiens
cgaagaggaacgaaccggagcacaagaaccgcccagcacccggagcccccagggagcagcggg

SEQ ID NO: 132238 - RNA, 38 nt, Homo sapiens
acacaagcacaacaacaaaggcagcaagaagggaaaac

SEQ ID NO: 132239 - RNA, 78 nt, Homo sapiens
gacgcccgcaggcgaaaggggggaaccgcgagcagaacaccccccccagcgggaaaccgggacacgcaggagcccagg

SEQ ID NO: 132240 - RNA, 88 nt, Homo sapiens
cgaaacagacgcgccggaccgggacagccgcggcccccgagagccagccgcgaggagcgccggggacgaacccaagcggaggccgcgg

SEQ ID NO: 132241 - RNA, 54 nt, Homo sapiens
ccgccgaccccccggcgccgcgccggcggcgcacagagggccggagcggagagg

SEQ ID NO: 132242 - RNA, 74 nt, Homo sapiens
ccacaaaggaacgcccacccacggggaccagcagccgggccagggccagagcaaaggaagagggaccagacacg

SEQ ID NO: 132243 - RNA, 127 nt, Homo sapiens
caacaaagcacccaaggaaagcacaaaagggaaagagacggagaaaagaagaacacgcccaaaacgacagcagccgacacaaaccacccgccaccgcaaccccaaccaaccggaggccagagcacca

SEQ ID NO: 132244 - RNA, 83 nt, Homo sapiens
aggaggggcgggcggaagagcagagggccacgcgccaggacaaggagagagaaccccagaaacggaaaacaagcagcagcgcg

SEQ ID NO: 132245 - RNA, 70 nt, Homo sapiens
ccggcccggacgggccggagcggggcgcggaaggaggaagaagagccaggggaacgaagaaggagcacca

SEQ ID NO: 132246 - RNA, 82 nt, Homo sapiens
cacccggccccgccagcgcgcgaaagccgaggaaaaagcggccgcgaccgcagcacaagacgggaaaacagcaccacaaggc

SEQ ID NO: 132247 - RNA, 73 nt, Homo sapiens
aaacccaggagacaagaagcagcgaccaaaggggagaggaaagcccggagggccaaagccaccagccaccaga

SEQ ID NO: 132248 - RNA, 82 nt, Homo sapiens
ggaaacacccaggacacggccacaacaccaagagaacgaagcgcgcggcaggcgcgcgccgccccaggccgcaagacccagc

SEQ ID NO: 132249 - RNA, 101 nt, Homo sapiens
gcaagaccgaacagaaggaacgacgcggaccagaagccagagcgaggacgccggcagggaggcgggccacaaaacccacgaacgaaagaggaaaccacaaa

SEQ ID NO: 132250 - RNA, 79 nt, Homo sapiens
cgccgcacccggacggaccgccacgcgcccgggagacgcccgcgccgccgacgacgacacgcggaggcgccggaagccc

SEQ ID NO: 132251 - RNA, 76 nt, Homo sapiens
cgagaaacagagagaaaagagacggagcaagagaacgcaagagacggagaaaagcgagaagccgcagcaagcgggc

SEQ ID NO: 132252 - RNA, 82 nt, Homo sapiens
ggaggaacaggagaggagagcagcgggcccaggcgggcagccgcccgcgcagggcacccacggcgcaccgccggccgcagaa

SEQ ID NO: 132253 - RNA, 55 nt, Homo sapiens
aagccgaggaacagggagcagaggcacaccggagcggccaaggagaccgggagag

SEQ ID NO: 132254 - RNA, 55 nt, Homo sapiens
cggccaaagagcggaaaggcaaaaggacagaacgcggaaccccagagaggacaga

SEQ ID NO: 132255 - RNA, 72 nt, Homo sapiens
caggaacgagcacggcccgggcaggaaagaaccaccgaccaggccaacaagggggcgaggaagagacaggcg

SEQ ID NO: 132256 - RNA, 78 nt, Homo sapiens
cacgcacgcgggcagggaacaggcggagcggaaggaagaaccccaccagggccccgcggggcacagggcgggcacaac

SEQ ID NO: 132257 - RNA, 63 nt, Homo sapiens
gaccgcagcagcgagaaaggagccggggaccccccaaagacaagggagggccgaacagggggg

SEQ ID NO: 132258 - RNA, 69 nt, Homo sapiens
cagacgcagggcgcccccgggaccgccgggcccacccggagacgagagaccagccccggaccggaccgg

SEQ ID NO: 132259 - RNA, 88 nt, Homo sapiens
gaggcaaggcgaggacgggaggcgagagaggcgaagcccgggaccgggagcccgggaccgggagccggggggccaccccgaccggagg

SEQ ID NO: 132260 - RNA, 79 nt, Homo sapiens
cgacgcggggccaggcaggacccaacgacaggcgccccggcccaacgggaacaacgagagcgccccaagggagccagcg

SEQ ID NO: 132261 - RNA, 71 nt, Homo sapiens
caagccggagaaccgcgggagcagggacgcccggggacgggcggggcgagacaacaagggagggcacagcc

SEQ ID NO: 132262 - RNA, 85 nt, Homo sapiens
gagcaaaaccaacgccggccggagcagcagcccgaggaaaagaaaagccaagaggaaagccgagggaagggaagaggcgaggccg

SEQ ID NO: 132263 - RNA, 79 nt, Homo sapiens
ccagacagagaagaaggccaacagggcaaccaggccggaggacaagaggacgcagaaaacgcaggacccccgcggacgc

SEQ ID NO: 132264 - RNA, 78 nt, Homo sapiens
gggcggagcagacacagacagcagagggaggaagacgaagcagaaacgaaaaaacaccaccaacaggaaagcaaggga

SEQ ID NO: 132265 - RNA, 73 nt, Homo sapiens
ccaggccccgccccggcccccgccaccgggagaacagaacaacccgagagcacaagaacccacacggcagagg

SEQ ID NO: 132266 - RNA, 84 nt, Homo sapiens
ccagaaccggaacagcgcacaaccggacagggccacaggcccgggagcggcgcggacacccgcagccgcacagccgggccggac

SEQ ID NO: 132267 - RNA, 75 nt, Homo sapiens
acaagaagaaggaacaagcgagaaacaaagagaaacgaggacagagccgaaagaagggccccagacagccacccc

SEQ ID NO: 132268 - RNA, 76 nt, Homo sapiens
cgcagcgccggccgcgccaggcagccaccagccccagggacgccagccagacaacaggcacaaagagagaaggaac

SEQ ID NO: 132269 - RNA, 77 nt, Homo sapiens
aaagagcccgcaagaagaacagagacagcagccaaacccccagacaacgaagagaggaaagaagcggaaaggaggga

SEQ ID NO: 132270 - RNA, 82 nt, Homo sapiens
ggcaggcgaggagaaagcggcgcgcggaggaagagaccgagaccaggaaccaggcaggggaacggagcgaaccagggagcgg

SEQ ID NO: 132271 - RNA, 58 nt, Homo sapiens
aaaagaaagaagagaaccagcgaaacacagacaacacaagggggaaagaaaggaagac

SEQ ID NO: 132272 - RNA, 74 nt, Homo sapiens
cggggcaggcgagcccgccacagagccgaaagggggcacccgaggaggaagagggcagggcccacggaaagaag

SEQ ID NO: 132273 - RNA, 73 nt, Homo sapiens
caaccaaaaagaaaccagcaacaaaaagaaagcgcgaaggcaaagcagaggaagaacagaggacagcagacca

SEQ ID NO: 132274 - RNA, 75 nt, Homo sapiens
gaacgggccaggaaagacaggggccggacggccagcgcccagacccaaggggcagcccacgcggggacccgcacc

SEQ ID NO: 132275 - RNA, 87 nt, Homo sapiens
gccgcggggcgcgcggcgccggcggcgcgcggcccccgcgcagacaacggcaagcggagaagagcaaggccgaaccgagaggaaggg

SEQ ID NO: 132276 - RNA, 84 nt, Homo sapiens
agcccgaccgagcccaccacgcagaaaaacacggggacgagaagagcgagccagcaccaccacgagccacggcccgcaaacaga

SEQ ID NO: 132277 - RNA, 61 nt, Homo sapiens
ggaggggccgcgccgccaccgcgaacaggagcccgacagaagccgaacgacacaaccccaa

SEQ ID NO: 132278 - RNA, 69 nt, Homo sapiens
gggcgggcccccgaacaaggaaaagaggccgagcagagaagaccgacaaagcgagccaagcaaagagga

SEQ ID NO: 132279 - RNA, 79 nt, Homo sapiens
gcaggaagacggccgccgcggccaggccaagcccaacaggggacaccggccagggcccggacgggcaggcgagagcaga

SEQ ID NO: 132280 - RNA, 39 nt, Homo sapiens
gccaccgaaagccagggcgaagagggaagcaaggaccag

SEQ ID NO: 132281 - RNA, 57 nt, Homo sapiens
gggacgaagaagaaccgagaagggaggcgggggagccaagggagagggaagaaaaca

SEQ ID NO: 132282 - RNA, 81 nt, Homo sapiens
aaaacacaaacgaccaacaggacgccacagagaagcaagggacaaggccccgcagcagcacaagcagcgccagacacaaca

SEQ ID NO: 132283 - RNA, 74 nt, Homo sapiens
gaaagacacagcaggccaagcaaagaggaggagaaccaggaccaaagcaccagcacagaagggaagaacgccaa

SEQ ID NO: 132284 - RNA, 82 nt, Homo sapiens
ggcccagccccgagggagccggggcgccgggcccgggccgggcagcacaacaacagcaacggaggcgggaccggaacaggca

SEQ ID NO: 132285 - RNA, 117 nt, Homo sapiens
ccacgggccggacgaggacaaaggaacagcacagggcgcaacaagagcgacaaacgcagggaccgggagaggggacgaaggcgaaccagcaagacaaagcaacaaaagaccaccgag

SEQ ID NO: 132286 - RNA, 60 nt, Homo sapiens
agccccagcccacaggaaaggcgacagcgaggcccaggacacaaagccgcagaaagaacc

SEQ ID NO: 132287 - RNA, 77 nt, Homo sapiens
aaagcggcacagagagacaaaccggggacccacacagaggaaaggcgcgcccaaaacggcacaaagccgggaaaaga

SEQ ID NO: 132288 - RNA, 72 nt, Homo sapiens
aaggcaacacacaccgaccaaaggcagcgcacagggcaaagccgaacagcccacagagaagcggagagccgc

SEQ ID NO: 132289 - RNA, 62 nt, Homo sapiens
gaggccccccagccagggaacgaagagaaggagacacacaagggaaagaggaagaacccgga

SEQ ID NO: 132290 - RNA, 71 nt, Homo sapiens
gcgaagaaaagcaaacacgagggcaccggcacggaccaccccaacaccgggggagaaccgggcccaccagg

SEQ ID NO: 132291 - RNA, 76 nt, Homo sapiens
aacgaggaagccgccagaaaccagcaaaaggacagagacaggaaaacagggaaaggggagaacaggacccaggaga

SEQ ID NO: 132292 - RNA, 70 nt, Homo sapiens
ggccagccgcccagcagccggccagaaccgaggaagacggggagcaggaagagacccgccacagagccgc

SEQ ID NO: 132293 - RNA, 49 nt, Homo sapiens
gcagcgcccccaaacgacaaaacccaagacggaccaagcgacagaccgc

SEQ ID NO: 132294 - RNA, 67 nt, Homo sapiens
gaccagcggagcacggaaagggccacccacagcaggcgacgcaccacgggagacccgacgggcaggg

SEQ ID NO: 132295 - RNA, 74 nt, Homo sapiens
gcgcgcagcaacggcggagcccgaagacaaggggaacacccaaaaaggaccaccacccacccaggccgagcagc

SEQ ID NO: 132296 - RNA, 64 nt, Homo sapiens
gcaacgcgccgcaaaacagaacgcgaggaacggccacaaacgcccaccaaacccaaaagaaaag

SEQ ID NO: 132297 - RNA, 69 nt, Homo sapiens
caacgaaggggcaacaccccggaaacacgacaagccaaagcaacaggggaggacaaaaagcacaaaaag

SEQ ID NO: 132298 - RNA, 70 nt, Homo sapiens
cgggaccccgcaaaaccaggacggagcccggaggcaggagaagcgaagccacaggaaagcagaccacagg

SEQ ID NO: 132299 - RNA, 72 nt, Homo sapiens
ggaaccgcacaaggagcgcccagcgggggaccgacgcgcaggcggccccggagaaggcccggaggagggcca

SEQ ID NO: 132300 - RNA, 81 nt, Homo sapiens
cacgcggccgccgacacgccgcccggcgccagggagaggaaacagcagggacggaaaggggcccccccgggcggcgggccc

SEQ ID NO: 132301 - RNA, 76 nt, Homo sapiens
aaagagaaaggcaagagaaggaagaggccaagaaaaggagcaaccgagcagcccagggaccgcagagacccaggcg

SEQ ID NO: 132302 - RNA, 52 nt, Homo sapiens
gcacaaacggggcggggccggggaacacacagacaacggcaagcggagaaga

SEQ ID NO: 132303 - RNA, 75 nt, Homo sapiens
aagaaacccaggacgagaacagcaacaggaacaaagggcagaagcagagaacagaggccgagcaggagaaagcgg

SEQ ID NO: 132304 - RNA, 55 nt, Homo sapiens
cggagcgcccccacgcggggggacgcccacccgggccacgagaaagcggagaaag

SEQ ID NO: 132305 - RNA, 82 nt, Homo sapiens
gcgaaggccgggacccggccccggcccacaggggggggcaaacccgagagaacgggagggccaaaaccaggcgagaaccagg

SEQ ID NO: 132306 - RNA, 41 nt, Homo sapiens
cccgcccacaacacaagaagaaccccacggacaacgaggac

SEQ ID NO: 132307 - RNA, 59 nt, Homo sapiens
cggccgcaggccccggcaggcgccccccgggggcgggaagcgagcaccggggcgcacaa

SEQ ID NO: 132308 - RNA, 76 nt, Homo sapiens
gcgggcggggcccgggcgggcaccgccgggaaccaccggcacgccaagacaggaagaaggaggccgaccaggccga

SEQ ID NO: 132309 - RNA, 56 nt, Homo sapiens
ccccgcggcgccgcgccccagaccagaggcgagggaaaaaggacagaccgcgagag

SEQ ID NO: 132310 - RNA, 36 nt, Homo sapiens
gccgcacacgggcgcagggggcaaaaccaggcaagc

SEQ ID NO: 132311 - RNA, 83 nt, Homo sapiens
gagaggcggcgccgaggacagagcgacgggcgcaagccccagcccgacggagcagcagcgccgggaaggaaagcacacaggac

SEQ ID NO: 132312 - RNA, 77 nt, Homo sapiens
ccagaccgaaaaccccgcaagaacagaaacgacgcacccccagacgccgacccagaaagccagggacaccaaacccc

SEQ ID NO: 132313 - RNA, 68 nt, Homo sapiens
gaacaagagcacaaacaacaaggagagagcaaacggagcgagcacagacagccccgcggcgcagcccc

SEQ ID NO: 132314 - RNA, 72 nt, Homo sapiens
gcaagcaagaacgagagcagcagagaagggcccgagggcaggacagcaggcaccggcgaagcacagagaggc

SEQ ID NO: 132315 - RNA, 67 nt, Homo sapiens
aacgacacccgccccaccgccccccaggaagccaaccaggagggcagcccaagggcagagagccacg

SEQ ID NO: 132316 - RNA, 65 nt, Homo sapiens
ggccagaaggagcgcccccagcaggaagcaggaaaccggcaggccagcgagagaagggaaagcgg

SEQ ID NO: 132317 - RNA, 77 nt, Homo sapiens
cccaacacacgcagcaagaacaaaccagcccaccaaagccccccagcgggcggccggggccaggagagaagggcggg

SEQ ID NO: 132318 - RNA, 78 nt, Homo sapiens
agaaaagaaaaggccaaacccacccacagcccgcagacacaaggcgagggggcacacaggcaaacaggaagagaacca

SEQ ID NO: 132319 - RNA, 75 nt, Homo sapiens
cgagaagagagagaagggagagagaccaaagacgagaggcagagaaagcaagagacgcaaccgaacgcagagcgg

SEQ ID NO: 132320 - RNA, 90 nt, Homo sapiens
cacgacgcacccaccaggaagagggcgcacgccagagcggaagccagcccccccacccacagaggggagcccaggacccgacggaagagc

SEQ ID NO: 132321 - RNA, 88 nt, Homo sapiens
cgccccccacagagaaaggaaagccaggccagaagaaggaaggccggggaggggacaggaaagacacaccaccccaccgaacaaggag

SEQ ID NO: 132322 - RNA, 71 nt, Homo sapiens
agaaggcagccaaacgagaccaagaaaagggcgccaacacgaaaagaagacagaaggcgccgaggagacaa

SEQ ID NO: 132323 - RNA, 81 nt, Homo sapiens
caacagacagaggaccaggagcaccgcccagcgcaaccgaacgcacacgaaggaagacccaggaaaggggagcggaagcac

SEQ ID NO: 132324 - RNA, 85 nt, Homo sapiens
cgaaggggaccccagcccccccagccgaaacaaacagcagacaaggagccgccacccgccagggaaggagaagccaccccgaaga

SEQ ID NO: 132325 - RNA, 63 nt, Homo sapiens
gacaaagaaggacagggaaaaccgacgaccggaagaggccaggaacagaaaccccaaacaaca

SEQ ID NO: 132326 - RNA, 71 nt, Homo sapiens
gaacaagcccaaaagaacgaggccggaagacgccgaaggaaaacgcaaaaccagaagcgcgccgacacggc

SEQ ID NO: 132327 - RNA, 104 nt, Homo sapiens
ggcgaggcagcgagcggccgggaggaggcggccagccgggcaggaggagcgcgcgcccaaagccaaccggccccgggcgaagagccggccgccgcgcgcccgac

SEQ ID NO: 132328 - RNA, 118 nt, Homo sapiens
ggcgacgcaaaggagacccaaggaacaggccaagagagccgaacccaccgagccagggagaacacgggcagaaggagaccacacgagaaacaacggaaggagcgcaggccaggagaaa

SEQ ID NO: 132329 - RNA, 37 nt, Homo sapiens
gcaacccagcacgaacaagaccccagaccagcagaag

SEQ ID NO: 132330 - RNA, 82 nt, Homo sapiens
ccggcgcgcgcgccccgccccaagcaccgcagagacgagagggacaggagcgagcaagcccagagcggccgccagcaccccg

SEQ ID NO: 132331 - RNA, 85 nt, Homo sapiens
ggggcccaggcccggacccgcggccggcccggcgcggcccagcgccccagaggacagcagcggacggccggaccaagaggcgccg

SEQ ID NO: 132332 - RNA, 64 nt, Homo sapiens
gaaccgcgcaggacgccaaaccaagccgcagggggaaggagccaccaaacaccagcccaggccc

SEQ ID NO: 132333 - RNA, 121 nt, Homo sapiens
cacgacccagccccacacggcaagacacagagagacggcagccgcgacagacacaccacggagcgaggacacacaaaggcagcaaaggcaaggagccagggacagaaagaaaagcacacac

SEQ ID NO: 132334 - RNA, 85 nt, Homo sapiens
cagcagccgcgccgccgccgcgggagccgcgcccgaaccccggcccgaacccagggaggggcagcagacccaacagaaccccccc

SEQ ID NO: 132335 - RNA, 74 nt, Homo sapiens
ccgcgccgcccgagcacgccgcgcagcccggccgccggcccccaacagcgccggagacgacccaaaaaggaaac

SEQ ID NO: 132336 - RNA, 83 nt, Homo sapiens
agcggcgcagcccacgccagacgaccccacccgcgccgcgacccgaacgaagcgcgcggcaggcgcgcgccgccccaggccgc

SEQ ID NO: 132337 - RNA, 70 nt, Homo sapiens
aaacccgcgacgccaaccacgacgaagcggaaggcagaaggggaaacgggcccagagccgccaagaagca

SEQ ID NO: 132338 - RNA, 78 nt, Homo sapiens
gcacaacaagaggccggcggggcgacaggcacgcgagaaggggagggggagaaagaagaggaagaagccacaggcaag

SEQ ID NO: 132339 - RNA, 76 nt, Homo sapiens
cagcggaacacgagcaggggcccaaaagacgcgcgagaccgaggcacgggcaggcacagcagaccagaagcagcga

SEQ ID NO: 132340 - RNA, 75 nt, Homo sapiens
gcaggaaggaagaggcaccgccggagccgccggaagggcgcccgcagccccccacggaggaagacgcacgccgga

SEQ ID NO: 132341 - RNA, 106 nt, Homo sapiens
ggggcaaccccgaaccaagcagccgccgaggccgcggcccaaaggccaggagccgaggccagagcagaaaccagcccaggaacccagcgccccccacgaccggggc

SEQ ID NO: 132342 - RNA, 71 nt, Homo sapiens
cagggacagaacccaaaacaaaaagcaaccaagaagcggcagcagcagacagagaagccagcggagcaaaa

SEQ ID NO: 132343 - RNA, 87 nt, Homo sapiens
agaagccgaaacaaaaccacaaaaagggaccaaggaccgccaacccaaagaagacaccagaggcgccacaggagccgcagaagcaaa

SEQ ID NO: 132344 - RNA, 96 nt, Homo sapiens
cgccaacggccccagcacacagccagagagccaggaagcaaggagggaccaagaaaggcccagggaccaaagcccggacaaggcccgagcaccagg

SEQ ID NO: 132345 - RNA, 82 nt, Homo sapiens
cgagaaaccccgcgcccgccgccaccaccagcacagccagcccagcgggaacacacagcagacggacggacgagcccggcca

SEQ ID NO: 132346 - RNA, 74 nt, Homo sapiens
acgggggacaacaggacgaagagaacgcccgggaccgagcacccgccccgggcaccaacgcgcaagccccaggc

SEQ ID NO: 132347 - RNA, 94 nt, Homo sapiens
gacaacaagcagccaagcccagacaagccccagggaagccacagcaccccagcacccaggaggagagaaagaacccacgcaggacgacagaaga

SEQ ID NO: 132348 - RNA, 75 nt, Homo sapiens
agccaagcacagcaggcagcagagccaagcccagcgggccaaccacgagcaaacagggaagacgggccaaacaag

SEQ ID NO: 132349 - RNA, 67 nt, Homo sapiens
cgcggcccccccccgcccggcccgggaaacgaacaaacgcacggagaaaaagaacgagaccagaaac

SEQ ID NO: 132350 - RNA, 68 nt, Homo sapiens
ggcgcgccaacacaagagaaacaccaaacaagcaccacgcgccacaccacgaggggagcaggagccac

SEQ ID NO: 132351 - RNA, 81 nt, Homo sapiens
gaggagaaggaaaaggagcacagccaaccggagccccaaggagcggacagggggaagaggcagaccaggaggcccagccca

SEQ ID NO: 132352 - RNA, 52 nt, Homo sapiens
aagggaaggaaggaccagagaaacgaaaggagagaccgcacgcagggccaca

SEQ ID NO: 132353 - RNA, 75 nt, Homo sapiens
aaaacccggaaaaacagaaaagagcaacggagcgaaagaaaaaacaccagcagcccagcaaccaaaaagaagacc

SEQ ID NO: 132354 - RNA, 52 nt, Homo sapiens
acggagcacaagcagacaaggaggacaggagcaacaggaacaaccaacaaaa

SEQ ID NO: 132355 - RNA, 74 nt, Homo sapiens
gagcagccacagagacaaaccaccaaagaaagagccaaagggaccgggacaggggaagaaaagaagaagaagag

SEQ ID NO: 132356 - RNA, 70 nt, Homo sapiens
agacacagggaaagcggagggcaccgcccaacagcgccacacgagacaaaagagcccaacccaggcacag

SEQ ID NO: 132357 - RNA, 82 nt, Homo sapiens
ccgacgggcgcggccgaggcaagaaccggccacgaaccgacggggaccccaagaggaaggaaccggagacgcagccagcaga

SEQ ID NO: 132358 - RNA, 71 nt, Homo sapiens
cagccaaaccaaacagaagccaaagagaccgagagcccagcaggagaaaccacaacgaaagaggggacgca

SEQ ID NO: 132359 - RNA, 68 nt, Homo sapiens
ccaagcaaacaacagaggcaagggaggaacaagcaggaacagcacagaagagcaaccagcagaagaag

SEQ ID NO: 132360 - RNA, 97 nt, Homo sapiens
aagcagggcacaaaaccaaggccaagcaagggaaaccaccccacccaacccccgacacagaagaggagaaaacggaacaacaggagggcaacccaga

SEQ ID NO: 132361 - RNA, 83 nt, Homo sapiens
cggccagaccgaacccagaaacagagggaggaagacagccagcaccgaagcaggacacaaagaaaagacgaaggaagcaacac

SEQ ID NO: 132362 - RNA, 55 nt, Homo sapiens
gccggggcaaggagaaaaggaccaaaccacagcaaaaacaccaggaaagacaacg

SEQ ID NO: 132363 - RNA, 77 nt, Homo sapiens
cgaagcagagagaacgggcaaaacggaaaagacaagagaccggaagggagcgagaacgcggagcacagccacgggac

SEQ ID NO: 132364 - RNA, 84 nt, Homo sapiens
ccgcccaagcgcacgcgggacggccgggcggggccggggggaagcaccgaacaagaggagaaaggagccggaacaaacccggga

SEQ ID NO: 132365 - RNA, 80 nt, Homo sapiens
aacaacaccacaaaaccacagccaaggaccagaagaacccaggagaagcgagcaccaaggagaaggcgcgccaggaaaaa

SEQ ID NO: 132366 - RNA, 37 nt, Homo sapiens
ccaggagagaaggacccagaacgacaccaaaggaaca

SEQ ID NO: 132367 - RNA, 84 nt, Homo sapiens
agagccggccacagaggccggaaaagccccaaacgcgccaacggcccagccagcaccgcgcacccagcagcacccaaagggaca

SEQ ID NO: 132368 - RNA, 76 nt, Homo sapiens
agcagagccccccccaccagaggacgggaggagcagcaacagagcagagaaagggggaggcggacccggcaacacg

SEQ ID NO: 132369 - RNA, 81 nt, Homo sapiens
aaaggagacagagaagacaaggagaacgccaagcgccggcgagggcgcggaggacccacagggggcgccgaggacaaccga

SEQ ID NO: 132370 - RNA, 81 nt, Homo sapiens
cgaggaccgcgcgccacgcaacgggccgaaagccacacacgaggaggggcacggaagcaaaagccacgcccagaacccagg

SEQ ID NO: 132371 - RNA, 83 nt, Homo sapiens
ggggccgaggccgcgcgcggggccgcccacgcgcgcccaggagaacgcgcacccaaggagcgggacgcgcgggcccagaagcc

SEQ ID NO: 132372 - RNA, 74 nt, Homo sapiens
gagcgccgaggaggcccgcggggcaaccgccacgagacaccaagacagcgaacgggcacgacggccagcgaaac

SEQ ID NO: 132373 - RNA, 40 nt, Homo sapiens
ccaacacagagccaagcgccaagcgagaaccacgccgaca

SEQ ID NO: 132374 - RNA, 60 nt, Homo sapiens
aggagcgaaaccaggggagagcgcgaaacgcagggaaaggggcccagacagcggagcagc

SEQ ID NO: 132375 - RNA, 78 nt, Homo sapiens
ccgccgcgcgcccgcgcccccgcgcgacgccagcaacggggcggcacacaaggagcgaagggcagggagaacgccagg

SEQ ID NO: 132376 - RNA, 73 nt, Homo sapiens
aggacaggaagaggagggggagccagagcaacaaacgagaaggaaaagcagaaaaaagaagaccgcgaaaaaa

SEQ ID NO: 132377 - RNA, 74 nt, Homo sapiens
aacgaccccaccgcccagaaagaccacagacagggccagcacagcaaggggaacaggggaaagaaggcggaagc

SEQ ID NO: 132378 - RNA, 85 nt, Homo sapiens
cggcccgccccggcgggcagagaccagcaccggagaagcgaggagccagaggaaagcgggggcacacagaaaccagcaaggaagg

SEQ ID NO: 132379 - RNA, 70 nt, Homo sapiens
gacaggaaggacgggaacacgcaaaaccaagcacggaaccaaacgggggacccaacccaacgagccagcc

SEQ ID NO: 132380 - RNA, 63 nt, Homo sapiens
caaaccccaacaagggacacacaggaagacgaacacggaacgggcgagaagaaagcagagagg

SEQ ID NO: 132381 - RNA, 50 nt, Homo sapiens
cggcacagcccgccgaacccgaaaggagcaacgagggggaaccaagggcg

SEQ ID NO: 132382 - RNA, 71 nt, Homo sapiens
acggggcgcaaagggaggggcgccgacgaccggccaggaaaagccggccacgcaggagggagaagaccgaa

SEQ ID NO: 132383 - RNA, 91 nt, Homo sapiens
gcgccgcgggcccgcgcccggccggacccgggcccgagggaagaagcccagcggaggcgaacggcccccgccaacacgaggaccccacgga

SEQ ID NO: 132384 - RNA, 57 nt, Homo sapiens
caaggagacgaggggaagagagcccaaaagcaaagcagggcagcaaagaacacaaag

SEQ ID NO: 132385 - RNA, 82 nt, Homo sapiens
ccagaacccaaggagggcaaaggacagagccaacgcgaagcggccggaaaccggaccaaccccagaccgcgaagcccggagg

SEQ ID NO: 132386 - RNA, 78 nt, Homo sapiens
gggaaccacggacaacccagaggacaacgaaggcggcccgagggaaagcacgacaaacaccgaagcacaaagaaaccg

SEQ ID NO: 132387 - RNA, 78 nt, Homo sapiens
aagccacgcgccaggcagacgggccagggaagacaacaccagggggaggccaggggacagccgcacgagaaccaccca

SEQ ID NO: 132388 - RNA, 55 nt, Homo sapiens
gaacaaagcaccggcaggaggagcaaagcccacaggaggcccacccgacgcggag

SEQ ID NO: 132389 - RNA, 79 nt, Homo sapiens
ccggcccgggccgccgccgcggaaccgcggcgcagacagccaaggagacgggcgaaccaagaagaaagagagacgaccg

SEQ ID NO: 132390 - RNA, 72 nt, Homo sapiens
cgcagaaagaacacacacagaaggacaggccgaacacagagagaagagcgagagaacagcggaagcaccaac

SEQ ID NO: 132391 - RNA, 71 nt, Homo sapiens
gggaggagcgggacaccccggaagcgggaaagggagcagggagcgcaggcaaggaggcgagcaccaaccga

SEQ ID NO: 132392 - RNA, 78 nt, Homo sapiens
acagaacagaggagcaagaaggagaaagggaccccacaccacaaaccgaggaaagaagggacagcagaaaacgcagag

SEQ ID NO: 132393 - RNA, 80 nt, Homo sapiens
caacaagaccaccacgagacacggcaggagcccgcggcgaggaaggccgggacaggcgaaccggacaggccggcaccgag

SEQ ID NO: 132394 - RNA, 77 nt, Homo sapiens
cagaggccgaaccgggcgacaagaggccgggcgccccgcaggacacaagggcgcacaaaagagcacaaaagcaccaa

SEQ ID NO: 132395 - RNA, 71 nt, Homo sapiens
ccaacaacccaagggagcgcacgacccacgcggaacgggacacgcacccacacacccacaggggagaagca

SEQ ID NO: 132396 - RNA, 70 nt, Homo sapiens
gaggacagcaaagaagacagggagcaagccagaccggcccggaccgcccccagagaaacgccaggagaac

SEQ ID NO: 132397 - RNA, 70 nt, Homo sapiens
ccaacccccccacgcgcacgccgggggcgaggagacaaaaaagcccaagggccgaacaaacgcaagaaac

SEQ ID NO: 132398 - RNA, 86 nt, Homo sapiens
aggaggagggcagcccagccaagagcaagggcccaaggcccagaagacagaaggaagccggccacaggaccaagaacgcccagccc

SEQ ID NO: 132399 - RNA, 43 nt, Homo sapiens
cgagcgcgccgccgccgcagcagcgacggcccagagggggggc

SEQ ID NO: 132400 - RNA, 75 nt, Homo sapiens
agaagccaagaaagacagagaagacggaacaagaaaggaccaggagccccgggcaacagacagagggacaccaag

SEQ ID NO: 132401 - RNA, 76 nt, Homo sapiens
gggaaaaaccgcgaagcaggggccgcgggaaggaaggggcaggaccagcgcccggcaggcgccacgcgccgcagac

SEQ ID NO: 132402 - RNA, 57 nt, Homo sapiens
agcaaaagagacagacggacaacagcccaacaacacccaagagcacgcaaacaagga

SEQ ID NO: 132403 - RNA, 81 nt, Homo sapiens
accgcaggcagcaccggaggcccaggcccggcagcccaacccagcaggacaagcacgagccagggagccgccgggaccggc

SEQ ID NO: 132404 - RNA, 37 nt, Homo sapiens
ggagacgcccgcgccgccgggcccccagggagacaca

SEQ ID NO: 132405 - RNA, 61 nt, Homo sapiens
gaggccaagccaccccggcggaaccgcccccagagaaggacaagggcaggacacgaaggag

SEQ ID NO: 132406 - RNA, 71 nt, Homo sapiens
agagccgcccgggccagcggccgcgcacccccggccggaggcaccagcgagacccccgagacccacgcgga

SEQ ID NO: 132407 - RNA, 81 nt, Homo sapiens
ccaaacagccaggcgacggggccaaacaaacgaacccagaggaggaagccagaaggaccacaaagggagcaaacaagccgg

SEQ ID NO: 132408 - RNA, 75 nt, Homo sapiens
ggacagacgccgacgcccagccccggcccaacgaccggagccccaaccgggcccaccagggccaggggaacaggc

SEQ ID NO: 132409 - RNA, 75 nt, Homo sapiens
ggaagaagcaggaggcaagaaaggggaaccccggagaaaaggccaagaaggcagcccagacccccacggcagcca

SEQ ID NO: 132410 - RNA, 69 nt, Homo sapiens
caggacggggaggcggaaggcgagcacagaagcagaggaagcaaccaggggaaaagggagaccaaagag

SEQ ID NO: 132411 - RNA, 53 nt, Homo sapiens
agaccgcgccgccagccgggaccccgacggagagacaaagaagacggaggggg

SEQ ID NO: 132412 - RNA, 70 nt, Homo sapiens
aacaccagacagcagccggagcagcaacagcccaaaaggggcgagaccaaaaggaggagaagagacaacc

SEQ ID NO: 132413 - RNA, 68 nt, Homo sapiens
aaccgaaacacgcagaaagagagaaccagcaagaagagggacccaaaaaaacgcaaccgcccccacag

SEQ ID NO: 132414 - RNA, 81 nt, Homo sapiens
cgcggcgcccccggcccggagcaacgagcgcagcgccggcaccgcacagccgccaacccaaaacaaccgaaccggacggaa

SEQ ID NO: 132415 - RNA, 58 nt, Homo sapiens
cagggaagagacacacccagacgagagagccaggccagaaggaaagcggggcaaggag

SEQ ID NO: 132416 - RNA, 78 nt, Homo sapiens
accagcggcacgagacagagcagcccgcggagcccggagcggccaaggaacggcagagccaggacaaaaccaggcaga

SEQ ID NO: 132417 - RNA, 74 nt, Homo sapiens
accagaggaacccaaacagagaaagacagaaccagcacagcaaaaaaggcagcgcaccgaccccaacgaacaca

SEQ ID NO: 132418 - RNA, 72 nt, Homo sapiens
ccacaaccagaccacgaaagaacgcaaggcaggaaaacagggcgacaccccaacgcggagacagccgaggag

SEQ ID NO: 132419 - RNA, 75 nt, Homo sapiens
gaagaagcacgaaagccccacccgccgcagcaagcagagacaagcagaccggaagaccgacggaagaccacaccc

SEQ ID NO: 132420 - RNA, 73 nt, Homo sapiens
cacccgagaagagaagaaagcagcacaggagacagacccagcacggaccccccccccagccgggcgaggcccc

SEQ ID NO: 132421 - RNA, 82 nt, Homo sapiens
aggggcgacgaggagaacccagcggcggagcaggacgcggaacacccagaggccagcacaacagacacaggaacgccacaag

SEQ ID NO: 132422 - RNA, 74 nt, Homo sapiens
aagggagacgacagaccggggcaagccccgggcgggacaggagagacgcacaggccccccccaacggcacaaca

SEQ ID NO: 132423 - RNA, 97 nt, Homo sapiens
caagccaaggccggaaaaggagcaggagccaaggagccaccacccgaggaagacgacagaccacagcgagaaacccggagccacccccgaggcaccc

SEQ ID NO: 132424 - RNA, 48 nt, Homo sapiens
cgggcaagaggaggacggggagcggcggcccaccgcacacccagggcg

SEQ ID NO: 132425 - RNA, 77 nt, Homo sapiens
aaaaaggagaggacagaaagcgcaaaggcgagcgggaaagccgaagaaaggagggcgagagcacggagcaggggccg

SEQ ID NO: 132426 - RNA, 34 nt, Homo sapiens
gcaggaaagcagaacgggacaggcgcaggggcag

SEQ ID NO: 132427 - RNA, 83 nt, Homo sapiens
gcggaggagccgccgagcggagacccgggagcaggagcgggccaggcgcgcccggccagcagggagaacaagacccggcgcac

SEQ ID NO: 132428 - RNA, 69 nt, Homo sapiens
gcaacccgccggcccccagagggggaagcagaggaggacacacagccaggcccagcaaaaggggaaggc

SEQ ID NO: 132429 - RNA, 88 nt, Homo sapiens
gacgagagggaaggcacagggagaagggaaacccacacccagaccccaggcggagacaaggcgagaccagccacggcaaccccgcccc

SEQ ID NO: 132430 - RNA, 71 nt, Homo sapiens
gcggaagcaaaccaagcgcgggggaagaagagaaagaaaaccaggagccccccaacagagcgagagaggca

SEQ ID NO: 132431 - RNA, 77 nt, Homo sapiens
agaagggaagcacaggcgccagccggccggccccgaggaagccaagacccgccccggaggagacaggcagacacaac

SEQ ID NO: 132432 - RNA, 68 nt, Homo sapiens
gaaaagcagcagaccagacacaagaaaaccagccgagaaggggacccagaaagaagcacaaaacaaac

SEQ ID NO: 132433 - RNA, 82 nt, Homo sapiens
gcccaggcggcaacacgccggggaacaaacgcgccccagggagacagacaggcgacaggacagcccagagcaagcacacgga

SEQ ID NO: 132434 - RNA, 69 nt, Homo sapiens
accaagccccagccggagaaggagcccacaacaaccacagccagacgcagagacggcgagcaaagcccg

SEQ ID NO: 132435 - RNA, 70 nt, Homo sapiens
gggggcacccccacaacgaaggggaggcccgaacacagaggccggaaaagaagccggcggacaacaagga

SEQ ID NO: 132436 - RNA, 74 nt, Homo sapiens
ccgagagccgcccgggccagcggccgcgcacccccggccggaggcaccagcgacccaagcagaacgacagcacc

SEQ ID NO: 132437 - RNA, 77 nt, Homo sapiens
gacggcggcggcgagcggcggacaggccgacgcccgccgcggccggggaacaggccacagccaggagcgcacacagg

SEQ ID NO: 132438 - RNA, 81 nt, Homo sapiens
cagggcgacccaccagcggaggagcaccggaacacagaagcagagaagcccacagaaaaagcagagccagcgggcaagaga

SEQ ID NO: 132439 - RNA, 58 nt, Homo sapiens
gagagacacgggcaggaagggggaggaacagacacagacgagaaacgcaggagaaggc

SEQ ID NO: 132440 - RNA, 73 nt, Homo sapiens
ccgcccagacggccaccggcgggaggaacaaaaggagggaaggccaggacaggggaacaggcacacgagccac

SEQ ID NO: 132441 - RNA, 78 nt, Homo sapiens
ccagcaagacggacacaacaaggacagagggccaaacaagaaggcccgaagagaccccagcggaggagacccaaacga

SEQ ID NO: 132442 - RNA, 84 nt, Homo sapiens
acacagacaaaaggagagacgccagaagcaagaaaaagcaaaagggcccaaggcccgaccaggaacaaagagagaaagacagcc

SEQ ID NO: 132443 - RNA, 66 nt, Homo sapiens
gagcagagaagaccgcaaagccagaaccagcaggaaggccgaaagaaggaaaacaccagcagggac

SEQ ID NO: 132444 - RNA, 50 nt, Homo sapiens
cccggacagcagagaggagcccacaggggcggcggccggcgggcaaagga

SEQ ID NO: 132445 - RNA, 90 nt, Homo sapiens
cccgccgcccacaacccaaccaggcaccccaccgcgaagacaccgcccacggaaaaaagacgggaagagcagccccagcccaacacgagc

SEQ ID NO: 132446 - RNA, 59 nt, Homo sapiens
ccgaccaagagcgaagcgacgaacgaaggcagaagcagcaaggaccagagagagggaag

SEQ ID NO: 132447 - RNA, 58 nt, Homo sapiens
ggaaacaaggcaacagaaagagcaacagcagggcaacaggcgccggcgaaagcaacga

SEQ ID NO: 132448 - RNA, 67 nt, Homo sapiens
acgcccaaggcacgaacgagcgaccgccccaggaccgggcaaaccagaacaagaccgaaccgggcca

SEQ ID NO: 132449 - RNA, 60 nt, Homo sapiens
gaaacgcgagagagacccagaaagagaaggccaagagaggccaacagaggaacaaggccc

SEQ ID NO: 132450 - RNA, 77 nt, Homo sapiens
ccggaccgcggcagaagaaagcaagacccaggacaccccgaagccgagaaagaagccagaggacaacagagcaacca

SEQ ID NO: 132451 - RNA, 76 nt, Homo sapiens
cggcagcagcagcggagcgcccaaggagaaggacgcgaaagaagacagacccagagagaacacaccgccaccaccc

SEQ ID NO: 132452 - RNA, 82 nt, Homo sapiens
gagcagaacaaacggccaagaagggccaccccacagacgaagagagaagaagcaaaccgggaccggaagcaccaaggagaaa

SEQ ID NO: 132453 - RNA, 90 nt, Homo sapiens
ccgagagcggaccgagagcgcgaaacgcacgagaaggagcaggcccagaaagaacagacaaagaccgaaaaacacgaggaaagcagaccc

SEQ ID NO: 132454 - RNA, 50 nt, Homo sapiens
ggcaccgaagaccgaaccagagacgcgaacaccgacagagagaaagaaaa

SEQ ID NO: 132455 - RNA, 76 nt, Homo sapiens
ggaccgacgacggccggccggccccggaacggaaggcaaccagaagcccacacaacgccaccggccaaacaggcca

SEQ ID NO: 132456 - RNA, 71 nt, Homo sapiens
aaagcgcgcgagggcccgggccaggcaggagggaccggcgaagggagagagacagaagaaggcgccagacg

SEQ ID NO: 132457 - RNA, 88 nt, Homo sapiens
aacccggccgcgcaaggggagagaagagacgaggaggaggggagaccgcggcaggacacgaggacagcaacggcgcacaacacgaggg

SEQ ID NO: 132458 - RNA, 74 nt, Homo sapiens
ggcgccaagcgggggccccgaggacggcgacggaggggggcagcagaccgcgcgccagacgccaaggacgccca

SEQ ID NO: 132459 - RNA, 72 nt, Homo sapiens
gcagacacccagcgaccgggaaggaacaaagcagagaaaccaaaaggccagacgaacacgagagggagcgaa

SEQ ID NO: 132460 - RNA, 70 nt, Homo sapiens
cacgaaacccaacaaaaggcaaaagggggaggggaggcaagcaggggggcaaaggaaagaaggcagaaag

SEQ ID NO: 132461 - RNA, 110 nt, Homo sapiens
acagaacagcacgaccagaggggaagccaagcaaacgcagaaggacgcccacgagcaaccaagagggagcgggaggggccaaccgcgcgagcggcaccagccaccaggac

SEQ ID NO: 132462 - RNA, 66 nt, Homo sapiens
gccggaagaaccgcagccgagcggggccggccacaggaggcacaaaaagaacaaccagaaggaacg

SEQ ID NO: 132463 - RNA, 77 nt, Homo sapiens
gaaagccaaagggggaccccgcgacgacgaaaagagcccgccaagggacaggagcgcagcaggccacccaagcggag

SEQ ID NO: 132464 - RNA, 59 nt, Homo sapiens
cgagcaccgcgacacacaccccgagcagagacccagggaacgccaacaacgccagccgc

SEQ ID NO: 132465 - RNA, 42 nt, Homo sapiens
ggggcccgaggccccgaccagagccgaggaaggcaccaggag

SEQ ID NO: 132466 - RNA, 63 nt, Homo sapiens
cagcagcagcagcagccagacgggaaaggcagacagcgagaaccagccaaaacacacgaacag

SEQ ID NO: 132467 - RNA, 79 nt, Homo sapiens
cacacccaggaagccaggcacgcacagcaaaaaaaaccgcgaagaagcaacagcggccacgaaccaagcagcccccaga

SEQ ID NO: 132468 - RNA, 82 nt, Homo sapiens
gaaccagaaccagcacaggccgggcaaaaacaggacccagaccagccaaagagaagaagaaaggaagcaaaacaaagaaaaa

SEQ ID NO: 132469 - RNA, 84 nt, Homo sapiens
ggaaccagacgagagacagaggcgaccgcgcggcagggcaagcgggagggcgggcgcaggcggagaaggccccggccccagagg

SEQ ID NO: 132470 - RNA, 75 nt, Homo sapiens
ggcccgcggcgcggacgccggcgcgggagagaaagagaagacccagggcccccagccggaaaacgaggccgaaag

SEQ ID NO: 132471 - RNA, 39 nt, Homo sapiens
ggaggagagaacgagaagcaggcgaagagcccccaggca

SEQ ID NO: 132472 - RNA, 84 nt, Homo sapiens
caccccaccggagcccagagcccagcaccaggggcccgaggcagccgggagacagccccccaggaaccgcgccgcgagaaacag

SEQ ID NO: 132473 - RNA, 31 nt, Homo sapiens
cgcagggcgcccccgccccaagggaggaaga

SEQ ID NO: 132474 - RNA, 61 nt, Homo sapiens
cgcggaaaccgacagcgcagccagccgcaacgccaccagggccacagcaggcggcgaaggc

SEQ ID NO: 132475 - RNA, 78 nt, Homo sapiens
agcacccgaggcaccggcagggcacaaggaaaacgaaacagcgaggccgcagcaaaggcagccacaggacagaaccgg

SEQ ID NO: 132476 - RNA, 76 nt, Homo sapiens
gggcaaaggaaagcgcaggagacagcacaagccccgccaagacagccacacgaacacggacccccccaggcagagc

SEQ ID NO: 132477 - RNA, 78 nt, Homo sapiens
gcggagacgggagaagaaaagacgccccagggcaaagagcggcagaagggaggagaggagggggagggacaccgcccc

SEQ ID NO: 132478 - RNA, 72 nt, Homo sapiens
cgagcacccgagcgaagaagaagcgaagggagcgccacgaagggcaccaacccgcggcaccagggaacgcca

SEQ ID NO: 132479 - RNA, 77 nt, Homo sapiens
caaccaagaggaaagggggccagcaacccagacgcccacaggacaagcacggaaggacgagcgcacaggagccggag

SEQ ID NO: 132480 - RNA, 69 nt, Homo sapiens
ccccggaacggggccccgcaaggccggcgcggaggaggggagcagcgcgcaagagacgaagaggagcag

SEQ ID NO: 132481 - RNA, 75 nt, Homo sapiens
ggccgccgccaacaccgccgaccaacgccggaaaggcgcggaaggacacagaaagcgccccaagccccggcgcag

SEQ ID NO: 132482 - RNA, 71 nt, Homo sapiens
gaccgcgggaggagacgagcaagaccacgacacccgaagccgggaaagaaacggcaagagagcaggaacca

SEQ ID NO: 132483 - RNA, 85 nt, Homo sapiens
gcagccccaaagcgagcgaagcagggcgccgccacgccgcaggaggcggagagaagaagcccggaccacggggaaggccccgagg

SEQ ID NO: 132484 - RNA, 89 nt, Homo sapiens
ggaaggggccgacaaaagcgcagcaagacggccgcgcggcccgcagggaaccacaacagcacaagccagacaagcaaaaggggcacaac

SEQ ID NO: 132485 - RNA, 51 nt, Homo sapiens
aagccaagaacgccgcagccaggaagaaagggacccggagggcggagggaa

SEQ ID NO: 132486 - RNA, 74 nt, Homo sapiens
ccagccgcggggcccgcacggaccccaccagcagcacggaggacagaaacgggaagcgagaaagaacagaaacc

SEQ ID NO: 132487 - RNA, 72 nt, Homo sapiens
gaaaagagacagaagaaggacaaagaccaccaggcaaaaggcgcagggagcaggagaagcggagcgaagggg

SEQ ID NO: 132488 - RNA, 61 nt, Homo sapiens
gggaacccacaggcaggcaaacaagaaaagagaacggagcagcgcaagagacagaaagcgg

SEQ ID NO: 132489 - RNA, 74 nt, Homo sapiens
ccgagagccgcccgggccagcggccgcgcacccccggccggaggcaccagcggcggagaacggaaaagcaccag

SEQ ID NO: 132490 - RNA, 65 nt, Homo sapiens
cagcccggccgccggcccccaacagcgccggaaggcccgaacaagacaggaacgccggcccggac

SEQ ID NO: 132491 - RNA, 79 nt, Homo sapiens
cggaaggagggaagggccccacacggagacaagccccaccaaacaggacaaagagagagggccccggaccaggcggcga

SEQ ID NO: 132492 - RNA, 56 nt, Homo sapiens
gcggaccgagagcgcgaaacgcacgagaaggcgcagcggaccaccagccacagccc

SEQ ID NO: 132493 - RNA, 62 nt, Homo sapiens
caagaccgcacaaggaggggaagcgaccccaaggccaagaccggagcaagaaagcagaggca

SEQ ID NO: 132494 - RNA, 85 nt, Homo sapiens
ggcacaagcagacggcaaaggcaagagaacagcagcgccgcccgccgacagccaggcccgggagaaaacagccagcaaagacaag

SEQ ID NO: 132495 - RNA, 96 nt, Homo sapiens
ggagcacggaggacggggccgggcgaccgggcaccagcaggacccgaggccaggagccaggggcccagaaggcgaccccgcacacacacccaccag

SEQ ID NO: 132496 - RNA, 71 nt, Homo sapiens
ggccaaacaaggcaaggcaccggagcggaaaaaccgaacaaggggggacccaaacgagcagccagagcgcc

SEQ ID NO: 132497 - RNA, 69 nt, Homo sapiens
ggagaaacacgcgcaagcccgcccggaccacaggcaaacgagagaccggaacacaggaaagaaaaagca

SEQ ID NO: 132498 - RNA, 100 nt, Homo sapiens
cccagcggaggccaaggagcggcaggagcaggaagaggccaggaggaagcggaggagagccaggaggggccagagagaaacaagaagaacacaagcccgc

SEQ ID NO: 132499 - RNA, 80 nt, Homo sapiens
gcaaaggcccaggaagagaccgcagaaagaaaaaggaaaggagaccaacagacggacaagggccggagcgagggagagca

SEQ ID NO: 132500 - RNA, 77 nt, Homo sapiens
gccggcgagcgcggaggacaagacaaggagagcgggaaacgagaaaaacagcagaacaaaccaacaaaaaggcaaca

SEQ ID NO: 132501 - RNA, 74 nt, Homo sapiens
gggacgccggcgacggccggacgcaacgcggcgggcgagacgccaggcccgacccaccagcaggccgcacagcg

SEQ ID NO: 132502 - RNA, 77 nt, Homo sapiens
cccaagaggagacgacccagcaaaacccagcagccagaccgccaggcagcgggagagaaagaaccgacagcaacgcc

SEQ ID NO: 132503 - RNA, 65 nt, Homo sapiens
aacccccccgaaagaccacagagaagcaggcgaccaggcgcgcgggcaagaaagcagacgcgacc

SEQ ID NO: 132504 - RNA, 78 nt, Homo sapiens
acggccgcggagcgcccggggcggcccggcgcggcacagcgccgccagcagggccgaccaggggggacacaggacaac

SEQ ID NO: 132505 - RNA, 73 nt, Homo sapiens
caccggccacagaacagcaagggagaaccaggggaaccggaagacgcgaagacgggggcaagacgaacaggac

SEQ ID NO: 132506 - RNA, 71 nt, Homo sapiens
gcgcgaggcgcggagagcaacgccgggacagcgcaagaccgaagcggcagccaaaaccgggcaccgagagc

SEQ ID NO: 132507 - RNA, 77 nt, Homo sapiens
ccgggaaacggagaagagccaaccgcaccgcgcagaggaagacaccaccggacaccgaccaggccgcccgagcagcg

SEQ ID NO: 132508 - RNA, 70 nt, Homo sapiens
ccagagcgaaacgaagaaccagacccaaaagagcaaacaaccgacggagaaggaaaaaagccgagaaagg

SEQ ID NO: 132509 - RNA, 98 nt, Homo sapiens
aggaggaagaagaagcacagaaaaccgcagaacgggaccaagaaaggcccagggaccaaagcccggacaaggcccgagcaccaggaccgcagaaggcc

SEQ ID NO: 132510 - RNA, 78 nt, Homo sapiens
agaggggagcacagagaaagagaagagaagagaaaggcccggagacgcagacgagaagggacgcagggaggggaagac

SEQ ID NO: 132511 - RNA, 71 nt, Homo sapiens
gcagccgcagcccacggggagaggagccaagcccaacgggacgggaaaacggccacagccaacgacgcagc

SEQ ID NO: 132512 - RNA, 79 nt, Homo sapiens
cggccggcgcggccaggaggcacacccgcccgcagaagagagcgaccggagcggggaacacggggccaagggcccccag

SEQ ID NO: 132513 - RNA, 68 nt, Homo sapiens
gacagacccggacgagagaggaggccgccggcccgcccggggggaccccaccagaggacagccagccg

SEQ ID NO: 132514 - RNA, 82 nt, Homo sapiens
gagggacgagccagggcaagacccagacccggacgacccccagcgagccagcggagcgcgaggccacgagagccagaggagc

SEQ ID NO: 132515 - RNA, 62 nt, Homo sapiens
gggggggcaaacccgagagaacggagcggggcccggcgcacccaccaccgccgcccacggca

SEQ ID NO: 132516 - RNA, 76 nt, Homo sapiens
ccccacgggaaggagagcagccagcagggaacagggaaaaacaacacgggcagaacacagcagagccgaaggaaac

SEQ ID NO: 132517 - RNA, 74 nt, Homo sapiens
ccaaacggaaggacacagagccaacccagaagagccaagacagaggcgggcgagcggacgaaacagacggccac

SEQ ID NO: 132518 - RNA, 69 nt, Homo sapiens
aggggcgagagcgggcaccccccaaacgacgcagccacggagagaggaccgcccaccagccggcaccca

SEQ ID NO: 132519 - RNA, 64 nt, Homo sapiens
cggagcgggcgcggacgccgaggcaccgaggcaccagaggaggggcaaagaaaaaggagagaaa

SEQ ID NO: 132520 - RNA, 80 nt, Homo sapiens
aaagagggccacagcggccaccgccggcgggcaacagggaaacgaacaaccgccaaacagcaagaggacggaagaagaga

SEQ ID NO: 132521 - RNA, 76 nt, Homo sapiens
ggggccaccaccgaggagaacagggcgagacgaacaacgcgcgcaggagaccaccaagccacaggcacccaggccc

SEQ ID NO: 132522 - RNA, 56 nt, Homo sapiens
ccgcggcgcgcccccgccaaggggcgggccaagaagagcggagaagcagcccagcg

SEQ ID NO: 132523 - RNA, 81 nt, Homo sapiens
caaagccacacaccgaaacagcagggaagcaaaggccaggcagaaagcggacgacacggacaagcaaagcagaaaccccgg

SEQ ID NO: 132524 - RNA, 57 nt, Homo sapiens
ccaaagcaccaccgcgccggagcgcaccaggaagcggaggaggaagaagcaaagggg

SEQ ID NO: 132525 - RNA, 72 nt, Homo sapiens
ggcgggaggaaaccagggcgggggaggacggggggaagggggaaggagcagaaggcaaaaacagcagaaaag

SEQ ID NO: 132526 - RNA, 84 nt, Homo sapiens
cgcccagcccccgagggcgggaacagggagggacagcgggccccagaccggggagggggagacagaagcacagaagaaaccgga

SEQ ID NO: 132527 - RNA, 79 nt, Homo sapiens
aagaaggggcaagcgcccgcacacaacaacgagaagcgccccaaccgagagcaccaccacaggcccaccgcggcagcgg

SEQ ID NO: 132528 - RNA, 71 nt, Homo sapiens
gaggaagagggggacgccccggcaacccaggggcggccacgaccaccaggcgccagacaggcgacaagcgc

SEQ ID NO: 132529 - RNA, 90 nt, Homo sapiens
ggcgggccgaggccgcaggaggagggagaggagccagcccccacagagcgggagcgaccggaccaccggacagcccgaacccaagcgaag

SEQ ID NO: 132530 - RNA, 67 nt, Homo sapiens
acaggacggagggagaacaaggagggaccccgacggagagacaaagaagacggagggggggccagcc

SEQ ID NO: 132531 - RNA, 75 nt, Homo sapiens
gaagaacaaaacagaggacaaggaggcagggcaaaggacaagcaaagagccagcaaacaggcaaaacccggaccc

SEQ ID NO: 132532 - RNA, 71 nt, Homo sapiens
ccaggagccaccaacaccaaaaagaacccgaagagcccaagcagccaagaaaaaggcaaaaaaaaagcagg

SEQ ID NO: 132533 - RNA, 75 nt, Homo sapiens
ccgcccccaccacgggacagccggagacgggggagacacagaacaaggaccaacaccaaggaccagccaccgaac

SEQ ID NO: 132534 - RNA, 83 nt, Homo sapiens
cagggcagcaaagcacacaagccagaccaccaggccacaacagcagagacggagcacgaaacccagaacggcccagaaacaac

SEQ ID NO: 132535 - RNA, 67 nt, Homo sapiens
gacccggaaaaaccacgagaccaaccggcagaggggcagcggcgaagggaaacgacagacgaagaga

SEQ ID NO: 132536 - RNA, 95 nt, Homo sapiens
cagaaggagcggcggacacacagacccccaccaagcaggaagccaagaggggcaacaagacaccaggagcaggagaaagaagcagcgagcagcgc

SEQ ID NO: 132537 - RNA, 83 nt, Homo sapiens
caagacgcgggcgacgccaaccgcaaacagagcaaagccgggccaacgggaagggaccccaggggaagaaaaggagggggagc

SEQ ID NO: 132538 - RNA, 53 nt, Homo sapiens
cgcacagaagaccacgggagaaacaaagaccacaccaggaagcggcccggaga

SEQ ID NO: 132539 - RNA, 78 nt, Homo sapiens
gggagcaccaggaccgggccggaacgagacgcacgaagagagggcacccaaagaaaaaaagcgccgagggcgcaccca

SEQ ID NO: 132540 - RNA, 68 nt, Homo sapiens
ggccaagcggacaccaacagcgaagaccaggcgggaaaaagagcagcaagggaagaagaacagaaaag

SEQ ID NO: 132541 - RNA, 75 nt, Homo sapiens
aaccaaaacacgaaaaacgaggaaccgacacaagaaaggccccgccgcaggaagaccacccgcaggaacacccca

SEQ ID NO: 132542 - RNA, 60 nt, Homo sapiens
cgaaaagcaccaaaagaaagaaaccagagaaaaaacagcacacaggggcgcggcgaggga

SEQ ID NO: 132543 - RNA, 76 nt, Homo sapiens
aacaggacaaccggcagagaaaaccacacaggaagcccagacccagggagagcccgaccagagaaaaggcggaaga

SEQ ID NO: 132544 - RNA, 79 nt, Homo sapiens
cacccagaagcggcgccgccggcagaggccgagacagaggcaaacccacccggaaagacaagaggagcgagcacaagac

SEQ ID NO: 132545 - RNA, 61 nt, Homo sapiens
ggacaaccaggaccccccgaaccagaggcgaagagcagagacaagcacaagcggccagaag

SEQ ID NO: 132546 - RNA, 68 nt, Homo sapiens
gggcgccgagcgaacgcgcaacagggccgcacgcaaggcaaacaggccaaaggccacggccgcagaca

SEQ ID NO: 132547 - RNA, 53 nt, Homo sapiens
ccgaccggaaggaaagaccaaccagacaccgcaccacaaaccggaagagagaa

SEQ ID NO: 132548 - RNA, 70 nt, Homo sapiens
ggcccaccaggggcggaaacgcggggacgccacaaggagcgacgcgggcaggaacgcccaggagaaagag

SEQ ID NO: 132549 - RNA, 73 nt, Homo sapiens
aaaccccccaccccaacgggccccagcgccaaccaaaccgaaagccagaagaaaacaaggcaagcggggggaa

SEQ ID NO: 132550 - RNA, 68 nt, Homo sapiens
gaccgggcccccaaggcggcaaaggagcacagaaaagggcgccaacggggagaaggaggcacaagaag

SEQ ID NO: 132551 - RNA, 72 nt, Homo sapiens
ccacgggagcacggggcacccaaggagaagagaaagcaccgagccaaggaacgaacagggcgggcggaggcg

SEQ ID NO: 132552 - RNA, 68 nt, Homo sapiens
ccaccgacacgcagcagcggccagacaggacgacccggacaaccacccacaagcggccaggcgcacag

SEQ ID NO: 132553 - RNA, 54 nt, Homo sapiens
accccccggcgccgcgccggcggcgccgcagcgccagcgaggggcccggagacc

SEQ ID NO: 132554 - RNA, 73 nt, Homo sapiens
cacgaaacggagcccggagcagcggcggcgaaagacaaggcccaggccccccgagcgcacgcacgcggagcca

SEQ ID NO: 132555 - RNA, 55 nt, Homo sapiens
ggaacgagcggaagacgccgagaaaggaaaccggaggcggcaaggcgcacggaac

SEQ ID NO: 132556 - RNA, 81 nt, Homo sapiens
cgaaaagcagcaacgagaagaagccaccaaggagcaggaaaacgaccgggacccacaaccaagcagcagaggagcacgagg

SEQ ID NO: 132557 - RNA, 76 nt, Homo sapiens
gagccccggagggaagcgcccggggccggccgccgcgggaccgaggaaaagccgcaccagggcgaaaccaagagga

SEQ ID NO: 132558 - RNA, 81 nt, Homo sapiens
gagaagcaggccgaggagcagcagagacgcccagccaaggcccgcgaaggcggagagcggcaggccccggccagcagggcg

SEQ ID NO: 132559 - RNA, 65 nt, Homo sapiens
acagaccaagggggacccaccgcacacaggacaaaaggggaacccagaagccggaagcggaaaca

SEQ ID NO: 132560 - RNA, 75 nt, Homo sapiens
aaagaccaaggaaggaaacagagcaagggggaaagcggaccaagaggaaacccgaagaggcacaggaagaaacag

SEQ ID NO: 132561 - RNA, 89 nt, Homo sapiens
agggccgcggggaccgaaaggacagaacaggaccggaaaggagaaagaaggggcaagaggaagaagcagaagcagagagaggagcgaag

SEQ ID NO: 132562 - RNA, 76 nt, Homo sapiens
gccgcccccaacccgggaaagagccggacccaaggcacacagagcggaagcaccaccagaaggggcaggaccagcg

SEQ ID NO: 132563 - RNA, 70 nt, Homo sapiens
ggcaccgagcaacgagggcagccccacagccaagcccaggaggaaaaggccacaggggagcaacggggaa

SEQ ID NO: 132564 - RNA, 79 nt, Homo sapiens
aaggaccaagaaccaggaacaacggaaaccccaggagggaaagagggccaggaaagagacagacagacaagaagaacag

SEQ ID NO: 132565 - RNA, 72 nt, Homo sapiens
gaagacggcgaaaaccaacgcccccccagcacacagaggagagcgacgagaagggcaccgccgaccgaaacc

SEQ ID NO: 132566 - RNA, 79 nt, Homo sapiens
agggggccggcgcccgcggcaggacggaggggagagcaggagggggacgacgggccgaagagaaaggaaacagaagaaa

SEQ ID NO: 132567 - RNA, 73 nt, Homo sapiens
gaaaaaagcaccccaacaaccaggaaggcgacagccaacagaacccagccaggaggagacgcgacaccgaaga

SEQ ID NO: 132568 - RNA, 72 nt, Homo sapiens
cgccaggccacaaaagaaagaaaccgcgaggcagggaaagaagggaggacagggccaccagaagaccaggag

SEQ ID NO: 132569 - RNA, 55 nt, Homo sapiens
gaaaagagacggagcaagagaacgcaagagacggacaaaccggcgaccacacacg

SEQ ID NO: 132570 - RNA, 72 nt, Homo sapiens
ggggaaacaaccaagcgaccacagaaggaaacaacagaacagcaaaagcgaagagcagggcagaagaaaagg

SEQ ID NO: 132571 - RNA, 82 nt, Homo sapiens
ccggccgggccggccagcgccggaaaccaacaaggggagaggcaccagcaacagaccaaccgcagcaagcacagagacagga

SEQ ID NO: 132572 - RNA, 76 nt, Homo sapiens
gaccgagcgcggcccaggagccagaggaaggcaacagcgcccaccgggacaccaggccagcaaaaaacagaagaga

SEQ ID NO: 132573 - RNA, 53 nt, Homo sapiens
aaagggagcacggcagccagcaggaaggcccgccgaaggagaagggcaggaag

SEQ ID NO: 132574 - RNA, 69 nt, Homo sapiens
aacaggggcaaaaaagaagaccaagcggggggccccccgggcagagagccagccgcggaaccgcgcgag

SEQ ID NO: 132575 - RNA, 72 nt, Homo sapiens
ggaggaaggagcggaaggaagccagaagaagacgaggggaagcacgagcaagaagggagaaaaaccggaaca

SEQ ID NO: 132576 - RNA, 57 nt, Homo sapiens
gcgcccagacccacacccagcaagcaggacgggaacacaggaacaaaacaaagaccg

SEQ ID NO: 132577 - RNA, 74 nt, Homo sapiens
agcgagcgcagacccaaacaccgcaaaaaggccgggccgaggccacgggcaagcccgggagggaaagccagacc

SEQ ID NO: 132578 - RNA, 74 nt, Homo sapiens
ccggaagaaaacagaagcggagaaagggagagcacaggggggcagaggaggcaaggaacggcaagaacccgacc

SEQ ID NO: 132579 - RNA, 85 nt, Homo sapiens
aaaaaaagcacaaaacagagcaaggcaagaagggaaaagaacgaaggagccacccagggagagacccgagacccacagcaggccc

SEQ ID NO: 132580 - RNA, 73 nt, Homo sapiens
gagggaagccaccaacaggaggaaacaaccaggacacgcaggccaccagcgcccaaagcagacaaagaaggag

SEQ ID NO: 132581 - RNA, 104 nt, Homo sapiens
gcgaagcgggagagccgacgagcgcgcacaacgcaggaccggcgccgaaggcccgccaggacgcagaccggaaaaagccacagacggagcagaacaacagaagc

SEQ ID NO: 132582 - RNA, 58 nt, Homo sapiens
ccccggggggggccaagccgcacggaccgacggagaggagggcacgcccacacacgca

SEQ ID NO: 132583 - RNA, 82 nt, Homo sapiens
gcggacgaggaaggcacgccgccgggggcgcgacgcggagcagccggacgaaacgcacgcagagcacgaaggaacccggcca

SEQ ID NO: 132584 - RNA, 76 nt, Homo sapiens
aagcccacaaacagaggcagggggcacagaacgaagaggagcaggaaacagagaagagacaacagcagggaaacgg

SEQ ID NO: 132585 - RNA, 70 nt, Homo sapiens
agggcaccaaacaaaaggaaaccacaccaaccaagaagagccaggaaacagcagaggcacacaggacaac

SEQ ID NO: 132586 - RNA, 68 nt, Homo sapiens
acgagggggaacccccgcggaacccacggagagacgacaacggcaagcggagaagagcaaggccgaac

SEQ ID NO: 132587 - RNA, 89 nt, Homo sapiens
agccaaaggagcagacgcccgagaagcccagcccgggcgcgccaggcacagccaagagcggaccggcagcggccagcgcagcggccgga

SEQ ID NO: 132588 - RNA, 59 nt, Homo sapiens
ggggcaggaggcacaaggccacacaacggaccacacaagcaggagcgggacgccccagg

SEQ ID NO: 132589 - RNA, 81 nt, Homo sapiens
cccaggccagaggccaaggggggccgcgccaagcaggacccgagccccaaagacagaaaagccccgagacggaagagaaga

SEQ ID NO: 132590 - RNA, 86 nt, Homo sapiens
ggcgacgcacacaccacgcaggagacaaggacggcagcaagggacaacagggggcaacccgggcagggccagacaggccacaagaa

SEQ ID NO: 132591 - RNA, 80 nt, Homo sapiens
accacggcgacacgaagcagagaaggacggccaagaaaccaggacccccaggcagaagacgcaagagagccgcgaagggc

SEQ ID NO: 132592 - RNA, 74 nt, Homo sapiens
gaacaaacggccaagaagggccaccccacagacggcgagaaccaccccagcgaagaaagaccggagaccggaca

SEQ ID NO: 132593 - RNA, 78 nt, Homo sapiens
aagacacacaacccaggacacaagaaaccccacacggaagaacgaagggaaagaaaacaagccacccagacaagagga

SEQ ID NO: 132594 - RNA, 55 nt, Homo sapiens
ggaggcacacccgaacgagcagagaaacggaagcaccaccacaaaacccaagaag

SEQ ID NO: 132595 - RNA, 79 nt, Homo sapiens
cccacgggagaagcccaggaagacggccagggaaccaaacagcagagcagcgcagaaggccagacacagaaccaggaaa

SEQ ID NO: 132596 - RNA, 76 nt, Homo sapiens
cggagcccggggaaagaggcgggagagggaggagcccagaccgggcgacccgccaaggccacacggccagggacca

SEQ ID NO: 132597 - RNA, 78 nt, Homo sapiens
cggcggagcaacgcgcgcacacggacgagaacggagagaacgcggaaggagacggagaagaagccccgcgagaccggc

SEQ ID NO: 132598 - RNA, 80 nt, Homo sapiens
gagacaggacccccacacgcgggcagaagaagccacaagcagaggccagccaagcaagcgcaagcaggaggaagaacaaa

SEQ ID NO: 132599 - RNA, 73 nt, Homo sapiens
gggacggaagagggcacccagccacagccgagggagaaggaaagaggcagaaggccagaagggcgaagaagaa

SEQ ID NO: 132600 - RNA, 71 nt, Homo sapiens
ggcacgaccccggacacgggcaggcaggcacggggccaaaaaggcacgagggaacgggaaagaacagagaa

SEQ ID NO: 132601 - RNA, 67 nt, Homo sapiens
ggaaacaagcggaaaggacacagacggaacagccccaagccggaaacccaggaacggaaacagaacg

SEQ ID NO: 132602 - RNA, 75 nt, Homo sapiens
ccgcccacgcccagcagcagcagcaacagggcgggcaggaaccggcaggagccagaaccgaggagggcggaccac

SEQ ID NO: 132603 - RNA, 70 nt, Homo sapiens
ccaagcaagaagacacagagaagcccggccggaacccggagaaagacgagagccagcccccgaggcaggg

SEQ ID NO: 132604 - RNA, 91 nt, Homo sapiens
cgacagggagacacggcaggaacccgcgaagcgggaaggcaagaagggaaagagagccaggagggaaggagcaaaaaaggcccaacggcag

SEQ ID NO: 132605 - RNA, 59 nt, Homo sapiens
agaggacggagcgccgccgccgggaccccgcccagcagggcgccggccgagcccgggaa

SEQ ID NO: 132606 - RNA, 77 nt, Homo sapiens
gaaaaacgccgaaagaagcaccgcaagccaaccagagccggcggcagaccgaggaagccgacaggaccgggggcacg

SEQ ID NO: 132607 - RNA, 79 nt, Homo sapiens
cggcgggcacaggaccgacacccagcccacacaccccagggacagcaacagagcgaacaggcaaaagaaaccggaagag

SEQ ID NO: 132608 - RNA, 83 nt, Homo sapiens
cgagccaggaagagggacggaaccaccagaagccagcccccaggcggaacgcccgccccgcagagaggcgaggaagaaacaag

SEQ ID NO: 132609 - RNA, 93 nt, Homo sapiens
gaacacccccccaggaggcgaggagagggggcgcaggcaaaaggcaaccaaggaaaaaccagcaccaggcggaagaagaggcaacagccaaac

SEQ ID NO: 132610 - RNA, 67 nt, Homo sapiens
ccaccccgagcccaaccagagcgaaccaccagcagccaaaggcagaacaagaagggcaaccaggggg

SEQ ID NO: 132611 - RNA, 54 nt, Homo sapiens
gaagaacagccaccgggcgccaagcccacgggcgcaccaacggagagccagagc

SEQ ID NO: 132612 - RNA, 56 nt, Homo sapiens
agcgcgagaccagcacaagacccgaaagagggcagggaggccaccagggcggaggc

SEQ ID NO: 132613 - RNA, 73 nt, Homo sapiens
gggggcgggaggccacgggagggccgcgcgccggagaccgaaggaacaaagaagccacagacaaagagggagg

SEQ ID NO: 132614 - RNA, 74 nt, Homo sapiens
cgcagacggaaacaaggcaacagaaagagcaacagcagggcaacaggaacaggaggcccggacccccagcacaa

SEQ ID NO: 132615 - RNA, 80 nt, Homo sapiens
ggcagagccgagcgaggaaccggcccaaaccacaccaagaaccccggaaaaggagacagaagcgcaagaacccgacaaga

SEQ ID NO: 132616 - RNA, 53 nt, Homo sapiens
gaccgaaggcgcaagagggaggcgcacacacagcgccaaagaccaagcgcgcg

SEQ ID NO: 132617 - RNA, 73 nt, Homo sapiens
cagggcggcggccagcgccacgcgccccaccgaggcaccaccaaccaaagcggcaacccgacagaccgaaagg

SEQ ID NO: 132618 - RNA, 73 nt, Homo sapiens
aaagagaagagccggcgaggacaggcagaggaggacgggaccagagagaggagggcagcaacggaccaccaaa

SEQ ID NO: 132619 - RNA, 82 nt, Homo sapiens
agaccaagggaggaacggggacacgccagccagcccaacccagacgggaccccgaacaaccagcgagcgagacccgcagagc

SEQ ID NO: 132620 - RNA, 32 nt, Homo sapiens
cgcgacacacaccccgaggacagcacaaaaac

SEQ ID NO: 132621 - RNA, 52 nt, Homo sapiens
aaacaggcgacccgacacagagggaacgaagaaacaaccacccgggcacacg

SEQ ID NO: 132622 - RNA, 72 nt, Homo sapiens
gagaccaccaccccggcgccaccaccgacgagcgaagagcaaggaggacgcccggaaaagagaaccgacaag

SEQ ID NO: 132623 - RNA, 81 nt, Homo sapiens
caccgcgcggaccgcccggagcaaaagaggacgccgggacaccaagaagcagggaaagagagaaaaggaacagccgaagcc

SEQ ID NO: 132624 - RNA, 76 nt, Homo sapiens
acagaaccgacccaccacaccacgggcggccccagaagaaggaggggaaagccagcgcagcgcgagaagcgacagc

SEQ ID NO: 132625 - RNA, 73 nt, Homo sapiens
gagcccaaacaccaccaccaaggggagcagcggaggaagccacaggacgccggggaccgacaggccacaggac

SEQ ID NO: 132626 - RNA, 76 nt, Homo sapiens
gaaggaagcggaaaacagcacaaaacccagcaacagaacaagaggaacacagcacccacccacacccacacccgcg

SEQ ID NO: 132627 - RNA, 76 nt, Homo sapiens
ccaaccggaaaaaccgccaaccaaaaaccccggggccaacagcaccaccggccaccaacaagggaggaaaggggag

SEQ ID NO: 132628 - RNA, 78 nt, Homo sapiens
gaagccagggaaggcggcccagcagcgagacacagggaaagacaagacaaggaaccgaagaagggcaaggccccacag

SEQ ID NO: 132629 - RNA, 55 nt, Homo sapiens
aaccggagaccagggcaacccagacgcaccacaacggaggagaaagccaggaagc

SEQ ID NO: 132630 - RNA, 67 nt, Homo sapiens
ggagcgagcgggcagcgcggagggagaggcgcacacaggaaagacaaccaggcgaagaacccccccc

SEQ ID NO: 132631 - RNA, 83 nt, Homo sapiens
cgagcgcgggcaggcgggaggcaacggagcaccagccggagcaccagaccgcaacaggagcagacggagaaagagaccacgag

SEQ ID NO: 132632 - RNA, 49 nt, Homo sapiens
caagaacacgcagcacggggaaccagaagaggccaaccagcacgaacgc

SEQ ID NO: 132633 - RNA, 78 nt, Homo sapiens
aacacccgggcgcgccgagacaaagaaccggcgcgcaaacgcgccccgggaggcgccccccgagcaggagcaggcaca

SEQ ID NO: 132634 - RNA, 78 nt, Homo sapiens
cccccgcacccggggcccgaaaccacaggccaccaagcgaagacgcgcgaccaagaagaagccgggaccaaggaaacc

SEQ ID NO: 132635 - RNA, 64 nt, Homo sapiens
ccaccacgcacccaacagagcaaaccaagaccccacccagcggaacaagggcaacagcaggaga

SEQ ID NO: 132636 - RNA, 75 nt, Homo sapiens
gaggcgcagcgcgcccaggcggcccggcccggagggcgggaagcggggaaaggaaaacaccagcacaccaaagac

SEQ ID NO: 132637 - RNA, 77 nt, Homo sapiens
ggaccaaggaagaacccgaagcaccgccggcacagccacaccgagaagaccggcccaagaaccccaccgcccgaaga

SEQ ID NO: 132638 - RNA, 79 nt, Homo sapiens
agcggaggccaccagcccaacaccaccgggaagcagcagaccagggaaaagccgggccacagaagcaccaccacaagcc

SEQ ID NO: 132639 - RNA, 100 nt, Homo sapiens
agggaaaacaacaaccgagcagcggggccaacacacagaccacccccagaacagggacccaccaggccacacccagcggaaaagaccgccagcaacagac

SEQ ID NO: 132640 - RNA, 46 nt, Homo sapiens
gccacgccccccgcaacaacccacaaggagggacaaggcacacgcg

SEQ ID NO: 132641 - RNA, 116 nt, Homo sapiens
ccgccagggcgcagggccgggccgccgcgcaccgcagcgccggggcacgacacaaaaacagaaccccgagagccccgcccacaaaagccgaggacggggcgcccacaccggggcgc

SEQ ID NO: 132642 - RNA, 82 nt, Homo sapiens
ccacaacagggcagaagaaaacaggggcacagacgacagaagccaagagggcgcaaagaggaaaagaagagaaaagcggggg

SEQ ID NO: 132643 - RNA, 73 nt, Homo sapiens
cgggggccagcacacaacaacacacggaccgacccccagccgaggcagacaccacccggggaacggggaggac

SEQ ID NO: 132644 - RNA, 77 nt, Homo sapiens
ggacgcaggcgcacggcccgacagacccggcggacagcagacagaggacaaggacccaccggggccagcagaaagcc

SEQ ID NO: 132645 - RNA, 98 nt, Homo sapiens
ccgagaagaggaaggaggcaaagaaccccgacccagcagcaaggccagcaaccgcacaggggccaaggcgacagcaaaacggagaaagaggagagggc

SEQ ID NO: 132646 - RNA, 79 nt, Homo sapiens
ccccccgcaacaacccacaagggaagaggagcggaaaaacaagcaaaagaaaaacagggaaagaggagaaagaaaggaa

SEQ ID NO: 132647 - RNA, 77 nt, Homo sapiens
gccagcccccccccagaccacaccggggcccgccgggaggcagcacggcaggagacgaggagaggacagcaggacac

SEQ ID NO: 132648 - RNA, 82 nt, Homo sapiens
gaggcaccgggacggaccgagaccggaccgagagcggaccgagagcgcgaaacgcacgagaagacgagcaagaagacaaaca

SEQ ID NO: 132649 - RNA, 79 nt, Homo sapiens
gcggggcaagccgacggaacaggccgaagaccccaagaagagagagaagaaccagacacgcgaagaaaaaaggaacaga

SEQ ID NO: 132650 - RNA, 71 nt, Homo sapiens
aacccccggggaccgaagaaagacagcccggaaacaacaggaacaccaccaaagggccccacgaagggcca

SEQ ID NO: 132651 - RNA, 84 nt, Homo sapiens
agcggcgccgcgggcacggcgaggggggcggccgcccaccgaacgccaacgaagccaacgcaaagcaaagcgagcccccagacc

SEQ ID NO: 132652 - RNA, 71 nt, Homo sapiens
cagaaacagaggacaaggcagcaaagaagagaccaggaaccaccgggagggcacggggggcccgggacgcc

SEQ ID NO: 132653 - RNA, 80 nt, Homo sapiens
ccagcagcgcagccgcagccgggcggcagggccccgagccggcccgggcgaggcagaacagagaagaagaaacaaaagac

SEQ ID NO: 132654 - RNA, 73 nt, Homo sapiens
gaccgaacgagaccgcagagaacggcaacagggagaaaaagaacaaaaacaaccaggaggagagaagcggaga

SEQ ID NO: 132655 - RNA, 39 nt, Homo sapiens
cccagaggggcccaccgcgccccaccgggcagcggcaaa

SEQ ID NO: 132656 - RNA, 65 nt, Homo sapiens
gcaccgcgcggcgcccgcccggagaacggcagaaccaagggaccaaagcgggacggcaggccacg

SEQ ID NO: 132657 - RNA, 55 nt, Homo sapiens
agagaagcagaacccacagagagccaggaggagggggagcagaccggaagacccg

SEQ ID NO: 132658 - RNA, 100 nt, Homo sapiens
cgcacagcggggaccacccacgacccgagcgagaaagcccgagacacacgaccaccaggccacagacaggaggggacggcccaccaccacggcagggcag

SEQ ID NO: 132659 - RNA, 38 nt, Homo sapiens
agccaccaggaagaaagcaggggaaggaacaaagcaga

SEQ ID NO: 132660 - RNA, 57 nt, Homo sapiens
caggacccaaaaggcgcaggccgagcgccggaaaccagcccggccacagaaaccaga

SEQ ID NO: 132661 - RNA, 95 nt, Homo sapiens
cacccgagcagacggagacacggagcagcggccccggccccgccaacgcgccgccggggaccagaagcagcagccccagaagccccgaagccggg

SEQ ID NO: 132662 - RNA, 80 nt, Homo sapiens
agaggcggcagcaggcggggagcaggccacagaacgcagaagacaacggcacgaacaaaagaaggggaaacccaccggcc

SEQ ID NO: 132663 - RNA, 69 nt, Homo sapiens
agcaccaggccaaacacaagaagcaagaaggggggacagcaaggaaacgccgcacaggcacaagggcca

SEQ ID NO: 132664 - RNA, 48 nt, Homo sapiens
ccggggagcaccggagcgagcgcgaaccagaaggagaaacaccaacca

SEQ ID NO: 132665 - RNA, 63 nt, Homo sapiens
ccagggcaccaaagaacaggcagaagggaagaggcgggaagggaaagacgacaaggagaaaaa

SEQ ID NO: 132666 - RNA, 80 nt, Homo sapiens
ccgcgggccgcaggccgcgagcagcggacgccggccgccgcaggaggcaggcaaaaccccaaaagagccgcgcagcgagc

SEQ ID NO: 132667 - RNA, 72 nt, Homo sapiens
gaacccgaagaagaccaccgggagagagggaaaaaacaaccccgccggcagaagagacaacacagaaaccag

SEQ ID NO: 132668 - RNA, 85 nt, Homo sapiens
cccaccaaccaccccgaagcgacacaaaaccccaaacgcccaggagagaggccagaccaggacacacacccagcaaagagacggg

SEQ ID NO: 132669 - RNA, 81 nt, Homo sapiens
aggcccaccggccgggagggcccagggcggggcccgagcaccagaagaagggccacaacccgccagcgaaggcaccaccgc

SEQ ID NO: 132670 - RNA, 73 nt, Homo sapiens
aggaaaaacggagagccacaaaaaaggaagcgaaagccaaggaaaaggaacagagagagcagaaccgaaacgg

SEQ ID NO: 132671 - RNA, 74 nt, Homo sapiens
ggagagcacgagagaaagggacgccggaaaaaagggaacgaaagcaagaccagcggacccaaaaacaaggaaca

SEQ ID NO: 132672 - RNA, 71 nt, Homo sapiens
caggcccccgggaaccggcacaacgggggcccacaaggacacccccacccagggaaacggcaaaccggaac

SEQ ID NO: 132673 - RNA, 76 nt, Homo sapiens
gggccgcagcccaccacagcccccagggcgacccagcaacgcggccggccaggggcaagcgagcacggagggagcc

SEQ ID NO: 132674 - RNA, 70 nt, Homo sapiens
acaaaggagagaggaccacccagaggagcaacgaacagaggagaaagaaggaagaagaaagggaacagga

SEQ ID NO: 132675 - RNA, 50 nt, Homo sapiens
ccgagaggaaccggggcaggaagggaccaaaaacaaacggccaagggaag

SEQ ID NO: 132676 - RNA, 58 nt, Homo sapiens
acaccaccccgcgcaggggcaccgccgaggcagacccgaagccagaaacgcacccaag

SEQ ID NO: 132677 - RNA, 76 nt, Homo sapiens
gaacgggaaacacacacacaaaaaacccacacaggacgcggacaagggcggcagcgacgagagaacagcccccagg

SEQ ID NO: 132678 - RNA, 87 nt, Homo sapiens
gaaaaacccaacgccgggcgccgcgggcagcacccacggagacccgcggggagcggcggagcccggcacgggcaaacagagcaggca

SEQ ID NO: 132679 - RNA, 79 nt, Homo sapiens
gaaggagcagcagagagccgggccagagccaggggccgggagggcgccaggccaccaacgacgaacggcccagaagcac

SEQ ID NO: 132680 - RNA, 77 nt, Homo sapiens
gcggccgggacggaggacgcgcagggggcgaggaagagacaggcgggggagaagaagcagggccaaacgcaggagaa

SEQ ID NO: 132681 - RNA, 74 nt, Homo sapiens
acggccccgaccggcgggccccgggcacaccaacaagccacgaccggggagcagcccgccaccgaagaccagac

SEQ ID NO: 132682 - RNA, 76 nt, Homo sapiens
caacgacaagcacccccacagcccagcgaggaacaggagagagccagaggaacccaaacaccaccccaaggcaacc

SEQ ID NO: 132683 - RNA, 84 nt, Homo sapiens
acggaaaagaaggaccgagacgagacaaggagggcacagacgggacaaggaccgaaacgaccagcaagcgcgaaaggcggccgg

SEQ ID NO: 132684 - RNA, 92 nt, Homo sapiens
agaaacccccaacagaccaccgacacgccgaccgcagcagaacgaaaacaaacggaagagagggcagcaagaaagaacaagaaagcgaacgg

SEQ ID NO: 132685 - RNA, 66 nt, Homo sapiens
caagggcacggacgagaggcacagaacagcagaccgaagcggcagccaaaaccgggcaccgagagc

SEQ ID NO: 132686 - RNA, 67 nt, Homo sapiens
gcaccgcaggcagacaaaagggccaaagaagggagagagcaggccaagagacgaagcccgaacaacc

SEQ ID NO: 132687 - RNA, 67 nt, Homo sapiens
cagagaccaaacgaaacgagccagagaccaagagcccagagaacagagcgccccaccgaagagcccc

SEQ ID NO: 132688 - RNA, 76 nt, Homo sapiens
ccaggacgcaggcgacaaggccggaagcccacccaagaacgggccccccgccaccgcaaggacagaggccggagcc

SEQ ID NO: 132689 - RNA, 81 nt, Homo sapiens
acggcagccgccaccagcgcaaggggcagaccaacaccacccagcaaaaaccccgacgaacgcgccagggagcgccagaca

SEQ ID NO: 132690 - RNA, 76 nt, Homo sapiens
cgggagcgcgagggagcgccaagggcacgggaagaccggaggggacgaagaacggaaacagaccacccccaaacgg

SEQ ID NO: 132691 - RNA, 86 nt, Homo sapiens
cgggagggaggagcagccccggcaggccagccagcccaccccaagccccaggcacgcggagacgacaccaggagagaggagcacgg

SEQ ID NO: 132692 - RNA, 75 nt, Homo sapiens
ggggccccggaccaggaaaccccacgaaagcagaccacgcagaagcaacagcagaaggagacagaaagggaagag

SEQ ID NO: 132693 - RNA, 79 nt, Homo sapiens
acgaccaagccagagaacagcccccacgcagcccagaagaacccaggagaaacgagagggacagcaaggaagacgccag

SEQ ID NO: 132694 - RNA, 80 nt, Homo sapiens
gaagggaccagccagaagaaacaaccgacaaccccagccaagagaacggaagccagagaaaaggaagagagagcaagaga

SEQ ID NO: 132695 - RNA, 73 nt, Homo sapiens
cgaggcgggcgggccggcgagcgcagcgcgaccgggaggcccaggggggaaccgaagagcaaggaaaagaaaa

SEQ ID NO: 132696 - RNA, 72 nt, Homo sapiens
gcaggcacaaaaggcgcccacagccacgggaccggcgcagagagcgcaagcagaacaaggggagagcccgac

SEQ ID NO: 132697 - RNA, 58 nt, Homo sapiens
acacgcccgggcgggacaagcggcaaggcaaccacggcgacaggaacggcccggccca

SEQ ID NO: 132698 - RNA, 77 nt, Homo sapiens
acccacgacgccgggaccggccaagggcccacacaccaagaccaaggcgccaagcccacgggcgcaccaacggagag

SEQ ID NO: 132699 - RNA, 49 nt, Homo sapiens
aaaaagcaagcagcggaaaacccacaggccgagaaggcaccggggacac

SEQ ID NO: 132700 - RNA, 82 nt, Homo sapiens
caacaaaggacacacacaaggacgcccccagggaaggagaacagaacccagaggcccaagacaggcgagcaaagagacaagc

SEQ ID NO: 132701 - RNA, 83 nt, Homo sapiens
ccaccgagcccgcaaaaccagccaaaccaggaaaggacagacaccacccaaacgccggcgaccccaagaggaagcccaaccgc

SEQ ID NO: 132702 - RNA, 51 nt, Homo sapiens
ggagggggaagaagaaaaggccacccggagcagagaccagggcgacgcggg

SEQ ID NO: 132703 - RNA, 79 nt, Homo sapiens
gcggaaggcggcccaccgaggcgagcgacgcaggacccacaggaacagcagagaacaaaggaccgcaaacgaagacggc

SEQ ID NO: 132704 - RNA, 54 nt, Homo sapiens
aaacagaaaaacagggagggcagcccagggacccgaagcgggacagcaagggag

SEQ ID NO: 132705 - RNA, 69 nt, Homo sapiens
cagcaaggcaacccagacccacaggcagacgccgcaggaaagaaaacggagaagcgcacacacgacaaa

SEQ ID NO: 132706 - RNA, 80 nt, Homo sapiens
cagagagccccggaccacaaggcagggagagggaggggggaagacagggcccagcaccacaggacgggccgggaagccgc

SEQ ID NO: 132707 - RNA, 81 nt, Homo sapiens
acagaaggcgaaacagaaggcggaggcagaacgaaagagacacggaagagacccaaagaaaagagaagaaagggaccgcag

SEQ ID NO: 132708 - RNA, 69 nt, Homo sapiens
cgacacacagccaggcccacgggaaaagaaaagggcacagaaagccaggagcgaacacacagaacccgc

SEQ ID NO: 132709 - RNA, 73 nt, Homo sapiens
aaaaggagcccaggagagccaaggacaaggaaggaaggcggaacaagacagcggccagcaaagccagggccag

SEQ ID NO: 132710 - RNA, 91 nt, Homo sapiens
gaggcccagcgggagcgcggaacagcaggcccgagcccaccgcgccgggccccggacgccgcgcggaaaagacacgagaggcgagggacga

SEQ ID NO: 132711 - RNA, 66 nt, Homo sapiens
acaaaacacgggacgcaaggcaggacagcgaaagcaaggaagcacgagcaggccacaacaccgaaa

SEQ ID NO: 132712 - RNA, 96 nt, Homo sapiens
cgaggggccaaccagcgaagagcgacaagccgcggcagccgcggaccaccgccgccaggggacaagagaaaaaaagggcgggcgaacaaaaagagc

SEQ ID NO: 132713 - RNA, 65 nt, Homo sapiens
ccgaaacaggcgaacggcgcgcagggcgccaacggggagaaggaggcacaagaaggaccccggac

SEQ ID NO: 132714 - RNA, 80 nt, Homo sapiens
ccaggaagagggacggaaccaccagaagccagcccccaggcggaacgcccgccccgcagagagcaggagcaggacccaag

SEQ ID NO: 132715 - RNA, 81 nt, Homo sapiens
aacagagaagacagagcaccaacgaggagccgaggccagagcagaaaccagcccaggaacccagcgccccccacgaccggg

SEQ ID NO: 132716 - RNA, 75 nt, Homo sapiens
gccagaggcccaaagaggcgcaagagagaggagggggcaccgagcaacgagggcaggcacaaggcacaaagcagg

SEQ ID NO: 132717 - RNA, 54 nt, Homo sapiens
acggccgaccgcgccgagcaggaaaaccgccgccggggccagcaagaacaaaaa

SEQ ID NO: 132718 - RNA, 77 nt, Homo sapiens
acaacacagcacaaagaagcagacagaggcgggaagcgcgggagaaggggccaagaccaccaagcaacaacaagaaa

SEQ ID NO: 132719 - RNA, 76 nt, Homo sapiens
ggccagccaggcgagaaaccggagagacaccaaagggaccaaccaacaccaaaccccgacagcccgcagaaagaga

SEQ ID NO: 132720 - RNA, 58 nt, Homo sapiens
cagagccgaacagggggccaaaaacagaaggcgaggcaaggagaaacgccgccccaag

SEQ ID NO: 132721 - RNA, 82 nt, Homo sapiens
ggaggagaaaacagaaagcaccacgcgccgagaggaaggagaaaaggccggcgcggaagaggccggcggcgggacggcccca

SEQ ID NO: 132722 - RNA, 74 nt, Homo sapiens
cggggcacgcgcccacaggcccagaggagcagccaagaagccccccaggggcccgcagaccaacaacaagccac

SEQ ID NO: 132723 - RNA, 75 nt, Homo sapiens
caaaggcaccaggccaccacagaaacaaaagcaacaaagaggaaccggagcgggaaaaaggccagaacgaagaaa

SEQ ID NO: 132724 - RNA, 66 nt, Homo sapiens
cgcagaccacgaaggaaccgaaaggacgcaaaggcaccggaacagacccacaagcgaaacggcagc

SEQ ID NO: 132725 - RNA, 82 nt, Homo sapiens
aaaacgcccccaacccagcgcaaaggaagaggaaggaaagggagaagaggacagaaaaagaccagacgcggaaaaagaagcg

SEQ ID NO: 132726 - RNA, 76 nt, Homo sapiens
aggggcgcgggcccgggggccaggggaggagcacagcaaaagaagcggaccacacggaaaacaaaggagaagaacc

SEQ ID NO: 132727 - RNA, 68 nt, Homo sapiens
gccccaccggccccacaggcgcagggagcaggagaagcggagcgaaggggcgggcaggcagaggcggc

SEQ ID NO: 132728 - RNA, 78 nt, Homo sapiens
ccagcccgacagacagaggagacgcgcgcacggccacgccaacggcccagaggcaccagcggggacagagcaaggccg

SEQ ID NO: 132729 - RNA, 60 nt, Homo sapiens
cggggcccaggacgccaaaagcgggacagcaagggaggcagcagacgggaagaagagaga

SEQ ID NO: 132730 - RNA, 111 nt, Homo sapiens
cgcccggggggaccccaccagaggacagccagccggaccccagcccaagaacgaaaaggcgaggagggacgcgacagaaccgccccccccccaccccgggggcccgcagag

SEQ ID NO: 132731 - RNA, 82 nt, Homo sapiens
gaaaaagcgggaacgcaggacccaaagcagcaccggccagaacaagccaaggagccaagacgagagggacacacggacaaac

SEQ ID NO: 132732 - RNA, 58 nt, Homo sapiens
gaccagaagcagcaagcagcaacaccagcaaacagggggggcgcagagaaagcaaagc

SEQ ID NO: 132733 - RNA, 78 nt, Homo sapiens
aggcccacaagggcgggcaaccgcgggccgagacgccaagaggccagggagccagacgcagagacggcgagcaaagcc

SEQ ID NO: 132734 - RNA, 58 nt, Homo sapiens
aaccgaacaaaggagaacggcagccaccccccccacgcgcaccaccacgacacagacc

SEQ ID NO: 132735 - RNA, 81 nt, Homo sapiens
aaggaccgcaccgaccccgcgggccacacacggccccccgagagcggaagagacccccagcacggggagcgggccccagac

SEQ ID NO: 132736 - RNA, 73 nt, Homo sapiens
gcaggcggaagcgccagaggagccaccagggaaggcgccagacacagaaaagaaagagagcaaccacccacaa

SEQ ID NO: 132737 - RNA, 75 nt, Homo sapiens
gagggagaagaaacagaacgccccacgaggcggcgccgcgaaagaccagccagggaggagcccagaacaagccac

SEQ ID NO: 132738 - RNA, 69 nt, Homo sapiens
ggacgcggaggcccaaccgaagaaaacaagagccaaagcagacccccaagcgagcggagcggaaggagc

SEQ ID NO: 132739 - RNA, 71 nt, Homo sapiens
accacagcaaaaaaaacagggagcacggagagaagggccgcagacccaggagagaacaccgaccgcagaac

SEQ ID NO: 132740 - RNA, 68 nt, Homo sapiens
cagaagcggcgggaaaagaggaaggggaccagcgggacaaggagaaccagggccaccacccagcgaga

SEQ ID NO: 132741 - RNA, 102 nt, Homo sapiens
acgacggccggggcgcgacagccccggaggggaccggccaaggaggacggaccacccagaaaaagacaccaaacaagaacagaagaaggaaacagacaaagc

SEQ ID NO: 132742 - RNA, 51 nt, Homo sapiens
caaccagacagaccaggacaccccgaaacggaacagcccagcaacagagag

SEQ ID NO: 132743 - RNA, 45 nt, Homo sapiens
gggcggccaccagagaccacggggacaccgcccaaaggcaggccc

SEQ ID NO: 132744 - RNA, 52 nt, Homo sapiens
caccgaccgacagagcaggagacacaggacccaaagagaagagaagggcgcc

SEQ ID NO: 132745 - RNA, 72 nt, Homo sapiens
agaaaagcacaacaacagggacccaaggggagccagaaaaacacagcgggaccggcaagcacccccccgagc

SEQ ID NO: 132746 - RNA, 68 nt, Homo sapiens
cgagaacccgccgggaacgcggccggcacaaaggccaaggagaaggcgaagagacaacagccacaagg

SEQ ID NO: 132747 - RNA, 72 nt, Homo sapiens
acaacaggaacccagacagcgcggcacagaagaaaggcagaaagaaaaaggacacagcagaaggagaagggg

SEQ ID NO: 132748 - RNA, 42 nt, Homo sapiens
aaaagcccaaaccagaagcgagaacggaaagggcaccccgca

SEQ ID NO: 132749 - RNA, 73 nt, Homo sapiens
ccccagacggacagagaacaggcaaaaacaaggcaaaggcccaggacagaaaagacccacggaaaagaaacag

SEQ ID NO: 132750 - RNA, 44 nt, Homo sapiens
ccggcccgggccgccagggcaggaccggaagccaccaagcggag

SEQ ID NO: 132751 - RNA, 85 nt, Homo sapiens
ccacagggagaaaaggagcagacacaggagagcgcccccacccccaggcccgagggacaggagcagggaccagaggcccgcacac

SEQ ID NO: 132752 - RNA, 79 nt, Homo sapiens
gggaccgcaggggcgcgcgaaggagcggaagaaggcaggccaaaccaccgaccagaaaaggaagcacggagaaaaggag

SEQ ID NO: 132753 - RNA, 67 nt, Homo sapiens
acgcaccaagcacccaccagaaaaaagaaaaaagagaagaacacagcccgcaccgagacaaccaagc

SEQ ID NO: 132754 - RNA, 75 nt, Homo sapiens
cagcaagaaccacagaagccagcagacccagcacgggacagagaacgaaaagggcggcagagaggaggaacagag

SEQ ID NO: 132755 - RNA, 76 nt, Homo sapiens
gccggggggaagccccgcgccggccgcccggccaaaccagaaaggggacagcggcgggcagggagcacggaaggaa

SEQ ID NO: 132756 - RNA, 74 nt, Homo sapiens
ggagaagccccgcacagcagagagcaacccgaaaaggggcagccgcacaagacccccaggaacgcccaccagcc

SEQ ID NO: 132757 - RNA, 87 nt, Homo sapiens
gcagacgcagggcacccggaggaaagcgacacacgacggggaccaaaagaacccagccaacccgcagagggaggggaggggcgagcg

SEQ ID NO: 132758 - RNA, 73 nt, Homo sapiens
gaagacaccggggacagacaggccccaaggcacaaaagaggaggaaagaagagcagcagagagaccgaaagaa

SEQ ID NO: 132759 - RNA, 76 nt, Homo sapiens
ccacccaggaccgccccccaagcgagccagcaacagcaggacagcacgacaggaagacagagagacgggggccagg

SEQ ID NO: 132760 - RNA, 84 nt, Homo sapiens
cccggcgaagggagccgaccgggcccgggcggaggaaaaccccacgggaacagcaaagaaaagaccgcacagagccccagaaga

SEQ ID NO: 132761 - RNA, 77 nt, Homo sapiens
ccagcagaagcccaccagagagcgcggcgggagcgaggccgccgcgcaagaagccagaccaagaagccaggcgggca

SEQ ID NO: 132762 - RNA, 73 nt, Homo sapiens
aggcacccccagggacaagcaaggaacacggacgggcggcccaggagagcagacacagcagccccagagacac

SEQ ID NO: 132763 - RNA, 79 nt, Homo sapiens
caggcacaagggaggcgacagagacagcagcaggggaagggcaggcgcccagccaaagagaacagagagcggaaaccaa

SEQ ID NO: 132764 - RNA, 89 nt, Homo sapiens
aacaccccggccaccgacccacaaggagcggaggacaccccggagaggacgggaggacggcagcacagggaaccacagaacaggaacac

SEQ ID NO: 132765 - RNA, 77 nt, Homo sapiens
cccaccagaccccggccgccgaccgcggccccgccggccgccggccgcgcggggggacagacaagcagacggggccg

SEQ ID NO: 132766 - RNA, 72 nt, Homo sapiens
cccccagagaacccacacagccgcacgcccggccagcccgggaaaccaccaacagacagacgagaacaaggc

SEQ ID NO: 132767 - RNA, 75 nt, Homo sapiens
gagaaagacaacagcacagagccacgggcccaggcgaagcagcccaaacccgggccaagcccccgcccaggcccc

SEQ ID NO: 132768 - RNA, 74 nt, Homo sapiens
accaaggcggaaagcaaaagaggagcacggcagccaggaggccgacccgacccggaccgcccgccggcccaaag

SEQ ID NO: 132769 - RNA, 80 nt, Homo sapiens
agcgcccaccagaggagcgaaagagagaggcagacgcggccagccaccagacacaccgcaagggaccgacgaacagacgg

SEQ ID NO: 132770 - RNA, 71 nt, Homo sapiens
caacaccaaccaccaacaggagacggagagcgggggggcacgaccgggagaaaggacgccagccggaagag

SEQ ID NO: 132771 - RNA, 78 nt, Homo sapiens
cagaaaaggcaccgcccggcaaaagagccaacacccaggccaggccgcccggaaggaggccgccacgccccgccgccc

SEQ ID NO: 132772 - RNA, 66 nt, Homo sapiens
gcgaacaaaaagcagcaaaccggaccaccccgaagaaagcacaggcgggagggcccccaagaccca

SEQ ID NO: 132773 - RNA, 65 nt, Homo sapiens
gaagaggaagcaaagcggaagaccgcgggaggccgaagacacaggcccggagcgggaaaaaaaag

SEQ ID NO: 132774 - RNA, 76 nt, Homo sapiens
cggcgccccggcccccgccccagcccgccggcggcggcggaaccaaaggcaagaaccggagcaggagaaaagccgg

SEQ ID NO: 132775 - RNA, 30 nt, Homo sapiens
acacaccggcgcgaaccaaaagcaaacgac

SEQ ID NO: 132776 - RNA, 65 nt, Homo sapiens
cacacggggagagccaggagcgaccagaggagagacgccgacccgagagcgcgccagaagggacc

SEQ ID NO: 132777 - RNA, 56 nt, Homo sapiens
cggcagacggaaacgacagaagcagaggcagaagagacaacacagaaaccagggcg

SEQ ID NO: 132778 - RNA, 59 nt, Homo sapiens
aaggccaaaagggaggacgaaggagggccacagggaacagaaagcaccgcaaggcagag

SEQ ID NO: 132779 - RNA, 82 nt, Homo sapiens
gaaaccccgaagaccggggagggacagccccaggagccggggccgcagccaccaggacgcaaaggagggggccccacagggg

SEQ ID NO: 132780 - RNA, 71 nt, Homo sapiens
gaccagcgggaggccagaggaaggccgccagggagaaaagacgaggaagcccaaaaaccgcaagaaaggca

SEQ ID NO: 132781 - RNA, 89 nt, Homo sapiens
caaaagggcgcggcaagggggcagggggaggagcagaaacacagcaggacaggaacgagcgggaacgggccacccagggagaaaacggc

SEQ ID NO: 132782 - RNA, 87 nt, Homo sapiens
gagccaccgcccagcccaaaccaggagagcgagggagcgagcgggcagcgcgggcggagaacggaaaagcaccaggaagcagagagg

SEQ ID NO: 132783 - RNA, 73 nt, Homo sapiens
gacagcggcccagagggaccacagggaggagagggagaacaaaaaagccgcaaaccaagaaagagaacgcagc

SEQ ID NO: 132784 - RNA, 75 nt, Homo sapiens
caagacgcaaaccagagggagcgcaagccggcagccagccgagacggccaccccccggacccacacaggagcaag

SEQ ID NO: 132785 - RNA, 81 nt, Homo sapiens
caacacgcgggcagcgaacaagcgggagcaaggagggcgaagagcgaggagagaaagggacaaagcaaggaccaaccccaa

SEQ ID NO: 132786 - RNA, 81 nt, Homo sapiens
gagacagagaagacgcagggaccaagaaaggcccagggaccaaagcccggacaaggcccgagcaccaggaccgcagaaggc

SEQ ID NO: 132787 - RNA, 81 nt, Homo sapiens
cccacaggccaaaggagcggaagcagccagggagcaagaaacagccaagagcgggaacagaaccggagcccagagcggaag

SEQ ID NO: 132788 - RNA, 129 nt, Homo sapiens
aagcacacaaacgagagcaacaaaaaaaggaagaaaagaaaaggagagcagcagcagccgacccaagaggaccaaaggggaaccccggaagaacggcggaaaaaccaggagaaggcgaaggaaaagggc

SEQ ID NO: 132789 - RNA, 74 nt, Homo sapiens
ggagcgagcgggcagcgcgggccagaaagacaagcaggacgcacgggcgcgcaaaacaggcaccaggaagcaac

SEQ ID NO: 132790 - RNA, 77 nt, Homo sapiens
gggccacgagacacggggccacgacgggggagccacagggagaagcagacacacagcgcgagacggcgacgacgcac

SEQ ID NO: 132791 - RNA, 77 nt, Homo sapiens
caggaagagaggccccccaaagcaccgcgcaggagacacgcggacacgggaagggcgccgcaggggccaccgccggg

SEQ ID NO: 132792 - RNA, 69 nt, Homo sapiens
ggcgcccggacacagaagaggacagccgccagggagaaaagacgaggaagcccaaaaaccgcaagaaag

SEQ ID NO: 132793 - RNA, 71 nt, Homo sapiens
ccccccgccccacggggcgggcgggacacggaaacggagaaaccaagggaaagaaacgaaggaaacagaaa

SEQ ID NO: 132794 - RNA, 77 nt, Homo sapiens
gaaagccccagaagaaagacggaggaaaggacaagcaggccacgagaaccgaaggggacaccaaaaggagcacgcaa

SEQ ID NO: 132795 - RNA, 71 nt, Homo sapiens
aaggggacagagaggagcaaggacaagagacggcacacacgaccaggaacccaacgacaccccgcacaacc

SEQ ID NO: 132796 - RNA, 86 nt, Homo sapiens
cgccgcgccggcccccgagcacgccggccccgcgcgcgcccgaggccgagcaagaaacggcgaggaaagagaggagccccggaaag

SEQ ID NO: 132797 - RNA, 73 nt, Homo sapiens
caccgaagcacaaaacacacccaaagcaaagaaccggagaagcacaagggggccagcccaggagagggcccag

SEQ ID NO: 132798 - RNA, 59 nt, Homo sapiens
agaaccaaaaggagacgaaccaagaaacagaagagagaagcgaaagaaagaaccggaag

SEQ ID NO: 132799 - RNA, 66 nt, Homo sapiens
ggcggcggggagcagcagggggcacagccacccggggacacggcaccaggcggccagcgcaagacc

SEQ ID NO: 132800 - RNA, 57 nt, Homo sapiens
caggagaaagcacaggacagagcgcaccccggaagccaaccaggggaaccggcgccg

SEQ ID NO: 132801 - RNA, 77 nt, Homo sapiens
gcacggggcaggagaaaagcgaaggagggcccgcccaccggggaggagaggaaggaagagccgagcgccggaaacca

SEQ ID NO: 132802 - RNA, 67 nt, Homo sapiens
aaagccacacagggagggccagaccaaaggaaccagagcaggagaaaacgaggggcgagcgaaacac

SEQ ID NO: 132803 - RNA, 68 nt, Homo sapiens
ccggcagggccccagacacgcgacggaacagcgaaacgcgaaggcccacgcccaggagcagaacccgg

SEQ ID NO: 132804 - RNA, 80 nt, Homo sapiens
cacaaaaaccacgagagcccgcccaacaaacagaggacaggccgggacaaccagaggcgaagagcccacccgccaaccgg

SEQ ID NO: 132805 - RNA, 83 nt, Homo sapiens
cgaaacccccgcaccggggggccgccgggcgcggcaagggaagacaggagagcggaggcagaaaacaggaaaagaagaaccga

SEQ ID NO: 132806 - RNA, 78 nt, Homo sapiens
agcagagggaaagggaaggagaaggagggacgcaggcgcaggccagaaagcagggcgcaggcgaaaccgggccccaac

SEQ ID NO: 132807 - RNA, 81 nt, Homo sapiens
ggaaaaccgaagggaaggccagcagcgcgcggagaagaacggggagccagaccagagccacgcgcccaggcgcaggcaggg

SEQ ID NO: 132808 - RNA, 73 nt, Homo sapiens
caaaaaagaacagcacgcccaagcagggcggagaacggaaaagcaccaggaagcagagaggaccgcagaaggg

SEQ ID NO: 132809 - RNA, 50 nt, Homo sapiens
accaagaaccaggacacagaaccagggggggcgaccaagggaacgagcca

SEQ ID NO: 132810 - RNA, 73 nt, Homo sapiens
agaaaccacccgccacccgcccagcaaagaacagacaacgaagagaggaaagaagcggaaaggagggagcaca

SEQ ID NO: 132811 - RNA, 65 nt, Homo sapiens
gaagcacaaacaggacccgccccggcaaggaagcgaccgcgagaaggccagcagaaacacccgcc

SEQ ID NO: 132812 - RNA, 71 nt, Homo sapiens
agcacggcgaacaaagccgaagagggaaaacaaagaaccaagcacacggccgagcgacggggcaagcaagg

SEQ ID NO: 132813 - RNA, 72 nt, Homo sapiens
aggacaacggcaggacggaaggcagacggaacagccccaagccggaaacccaggaacggaaacagaacggaa

SEQ ID NO: 132814 - RNA, 83 nt, Homo sapiens
cgccggcgcgcggcgcggacaggcccaaacgggccgagaacacggggcgggccagaacacacggacgcgggggggcccccccg

SEQ ID NO: 132815 - RNA, 75 nt, Homo sapiens
gaaacccagaggagcgagcagcgagcagacaagaagcaagcaagagcaagcacccaagagaccagggaggcagag

SEQ ID NO: 132816 - RNA, 63 nt, Homo sapiens
gcagaggcacggcgaagaagcaaacacacagaggaccgaaacagcaacaaccgcaacgagcgg

SEQ ID NO: 132817 - RNA, 75 nt, Homo sapiens
ggagagcgagagaggggagcagggaaacacaaagaagacaccagaagggccagcaccacgacaacacggcgacag

SEQ ID NO: 132818 - RNA, 78 nt, Homo sapiens
ggaccaggagccgcaggccggagaaagaggagaagaggaacccgcaggaacgaggcacgaaggaggcacaccagaagg

SEQ ID NO: 132819 - RNA, 77 nt, Homo sapiens
gagagcgagcagagaaccacccgaaggaagccgggagaggacggaaggcccacgccccgaagacaaaggaagcgcca

SEQ ID NO: 132820 - RNA, 69 nt, Homo sapiens
gcggccggagcccagccgcagcacccacagagcgcgagacgaaaaaaggccaaaagggaggacgaagga

SEQ ID NO: 132821 - RNA, 73 nt, Homo sapiens
gaaaaggagcccggaagagagggccccccgccccccccccccacgcggggggaccggcacaagaccgcagcac

SEQ ID NO: 132822 - RNA, 66 nt, Homo sapiens
aagcagggaacaccggccaagaagaacgcggcagaacggaggcaggcagcacgagacacaccacaa

SEQ ID NO: 132823 - RNA, 77 nt, Homo sapiens
agaaggaagacaaggagaaaagaagaagggggaggagaagacaaaggccagaagaggacgggaagaagcaagaagaa

SEQ ID NO: 132824 - RNA, 53 nt, Homo sapiens
accggcaagccagcggaggggaggccgccgcacccaggcggagacaggcacaa

SEQ ID NO: 132825 - RNA, 77 nt, Homo sapiens
ggccaggccagacccgaaggccaggagacccgaccccaaggccgccaaggcgagaagacaaacacaaggagggccgg

SEQ ID NO: 132826 - RNA, 77 nt, Homo sapiens
agggggaggagcggccgaagcaggcagcggcaccaacggacagggacaagaagaagcggacgcccccaacgaccgga

SEQ ID NO: 132827 - RNA, 73 nt, Homo sapiens
gacgaggaggccggagagcggccgcaccgccagccgcccggcggggcaagcagaggaaagggcagcggaggca

SEQ ID NO: 132828 - RNA, 61 nt, Homo sapiens
agaagcgaccgagggacgggagcgaggaggagcggagagacgaggagcagagaaggagaca

SEQ ID NO: 132829 - RNA, 68 nt, Homo sapiens
gagaccaccagccgaccagagaggagacccaccagcaggcagcgcccaccaagccaaaccacggagga

SEQ ID NO: 132830 - RNA, 71 nt, Homo sapiens
gacgcagggcgcccccgagaccccgcagaggccagagaggacaggccagaccccagcacggagcaagcgcg

SEQ ID NO: 132831 - RNA, 84 nt, Homo sapiens
cgagcgaggggaggcaggcgcggcagacggcgacagggcggcggcgccaggcagggcgcaggccccgggaccaaggacacgcag

SEQ ID NO: 132832 - RNA, 92 nt, Homo sapiens
cagcacagcaaacccgccgggacaaaggaccagcggcagcaggaaaggaaggcagaggaagccacggccacggacccggcgagggccaagga

SEQ ID NO: 132833 - RNA, 37 nt, Homo sapiens
gcccccgagagcggggacaggaggagcaagcgaacaa

SEQ ID NO: 132834 - RNA, 81 nt, Homo sapiens
aggaaagagcggaaaagcaccagagacgagcgcccacacgcgcagggcaaggccagagaaggcgggagaaagacacgaacc

SEQ ID NO: 132835 - RNA, 61 nt, Homo sapiens
ggaggcccccagccagggaaccaggcaacaggaagaagaacccacaggggccaacagagga

SEQ ID NO: 132836 - RNA, 77 nt, Homo sapiens
agcgccccaggagaaacaaaccggaaggccaaaacaagggaagcaaaggaaacggagagacagaagaaggagaagcg

SEQ ID NO: 132837 - RNA, 45 nt, Homo sapiens
gagacgcagcgccacgaagaggaggaccaggcccaaggacaaagc

SEQ ID NO: 132838 - RNA, 77 nt, Homo sapiens
ggccccccaggggcccccgcggcggccagaagccagcccaccccaagccccaggcacgcggagacgacaccaggaga

SEQ ID NO: 132839 - RNA, 54 nt, Homo sapiens
acagcggacgccccagcacccccagcgggcagggaaggaggagacgcgaaggaa

SEQ ID NO: 132840 - RNA, 76 nt, Homo sapiens
caacgcccgcaaaacgcgaccacagagagccaccggggagaagcccaacaaggacggaagaagagagggcgaagga

SEQ ID NO: 132841 - RNA, 67 nt, Homo sapiens
aaaggcagagaagaggagcaacaaggggaaaacagcaacaggaagaaggagaaagacaaagccccga

SEQ ID NO: 132842 - RNA, 66 nt, Homo sapiens
ggaaaacgagaggaacaagccaagcaggacagcccaggccaagacagcagccacgaggaaaaagaa

SEQ ID NO: 132843 - RNA, 68 nt, Homo sapiens
gagcccgaggaagggcggaccaaccacggcaaaccaacaagcgcccgaagacaacaaacacagcacac

SEQ ID NO: 132844 - RNA, 68 nt, Homo sapiens
gacaagccgggagcagacaagaggcaaccagacacacaaccaccagaaggagagaagaacagaagcca

SEQ ID NO: 132845 - RNA, 65 nt, Homo sapiens
cgcggagaccccgcggcccggcagggggaacgggagggggggcggaaacagggagggccacagcc

SEQ ID NO: 132846 - RNA, 72 nt, Homo sapiens
ggagccacccacgagaaagacagggcccaccggcacccaagaacaagccccgccgcgacccacccaggaccc

SEQ ID NO: 132847 - RNA, 65 nt, Homo sapiens
agcagacagcacccggccagaggagacgccaaacgacgcccgggggccccaaggacacccagccc

SEQ ID NO: 132848 - RNA, 78 nt, Homo sapiens
cgcccagccgcggccccgggagacccggccccaaacgcggccacgcgcgcgcagaccagaagggcagagcacgggaac

SEQ ID NO: 132849 - RNA, 66 nt, Homo sapiens
gcaaaccaaaagagcaacggcagagggaaaagaaagcaggccgggacacagcccccggacaaggag

SEQ ID NO: 132850 - RNA, 59 nt, Homo sapiens
agaaagccacagaccccagggcggcgacggcggcgcgaggaccgaccgggcccgcggac

SEQ ID NO: 132851 - RNA, 111 nt, Homo sapiens
gccaccaaccacggcagacacaaggaccagaacagaaaacaagggaccagagaaaggcagcggccagcaaaccgcaaacaccaagcccagaccgacaccaccaggcccagg

SEQ ID NO: 132852 - RNA, 76 nt, Homo sapiens
cccggcaggccgcccccggcaaggccaagaacccaaagcaaggcgagacaaggggccaaccagccagggccaacaa

SEQ ID NO: 132853 - RNA, 77 nt, Homo sapiens
gaagggaggaaaagggcagggacagcgcaggcagcagaaaagccaagcacaccaccaccccagccacagcaggcagg

SEQ ID NO: 132854 - RNA, 59 nt, Homo sapiens
acagagggacccagccccaccaggaggggcagcagcaggacagggaacccgggagacag

SEQ ID NO: 132855 - RNA, 73 nt, Homo sapiens
aaggaaagcagaagacaagcaggccaagaagggacccagacacgacccggagaaaaagccagaccagcgccac

SEQ ID NO: 132856 - RNA, 82 nt, Homo sapiens
gaagacccccacaacaaagcagcaacaagaaagcagaggaagcagaaaggaaggaggcacccggaagcacgccagcaagcca

SEQ ID NO: 132857 - RNA, 78 nt, Homo sapiens
acgaaggccgcaaagacggagaagagcagaagacaaaggaccagggaagaaccggggagaaacgaagaaggcccagaa

SEQ ID NO: 132858 - RNA, 39 nt, Homo sapiens
cgaggacgggcccgagcgcggggacaaagcaaaaaacca

SEQ ID NO: 132859 - RNA, 57 nt, Homo sapiens
ggaggaacggcccggaaacaggaggacggacagagagccgaaagccgggcaagggga

SEQ ID NO: 132860 - RNA, 64 nt, Homo sapiens
gaggaagcggagagaaggcgcacaaaagagcacaaaagcaccaaggcgcacaacagcgacaaca

SEQ ID NO: 132861 - RNA, 77 nt, Homo sapiens
agaaaagaagcaagaaagagagagaacggcagcagcagggcacgaaaggcggagacagcaaaggcaaaaagcagcaa

SEQ ID NO: 132862 - RNA, 81 nt, Homo sapiens
ccacgcggcccaaacccgggccaaggaccccgcccagcccccgagaccgagaagcccagaaacccgagaggagcaggagca

SEQ ID NO: 132863 - RNA, 77 nt, Homo sapiens
gcagcccggcagcaggccggcgagggggcagggccaccagagagagagggcccagcagaaaggcacacaaggaagcg

SEQ ID NO: 132864 - RNA, 69 nt, Homo sapiens
gggggggcagggccccacggccagacaggaaacgccgccccgaccgcccacaggaaccaacccccacgc

SEQ ID NO: 132865 - RNA, 77 nt, Homo sapiens
caagaccgccccgaccgcgcagagacggggagggaggggagagaaaagaacaaaccgcagagaacaaccagcagcaa

SEQ ID NO: 132866 - RNA, 86 nt, Homo sapiens
acggacaccggcggccccaccagcagacgcagccgagacaccagcccgaaacaccaccaaggggacggcaaaacagaacagaaagg

SEQ ID NO: 132867 - RNA, 77 nt, Homo sapiens
cccaaccgaggacacagcagcggaagaggcaaagccgggcccgagaaacagccagagcaaccagccagagagggcgg

SEQ ID NO: 132868 - RNA, 72 nt, Homo sapiens
acggaacgacaagccaagcaacagcgcacaacacagaaagaaaaacagagacgaaaaacggcaaaaccacag

SEQ ID NO: 132869 - RNA, 74 nt, Homo sapiens
accgaaacaggccggggcacagcacagcgccggcgcaagggggacacggaaagcacaaggagaaaaaaggccag

SEQ ID NO: 132870 - RNA, 51 nt, Homo sapiens
ggaaccacacacaccacaggaagccacaagaggcacggagcccaggcgccg

SEQ ID NO: 132871 - RNA, 71 nt, Homo sapiens
aggaacaaaagcccacagaaaagagcagagaaccaagagaagcgacagaagagggaaaggagaaaaacagg

SEQ ID NO: 132872 - RNA, 78 nt, Homo sapiens
aaacgcgaaacccgggccaaaggcagaaggaacacaggacaggaaaacaggaggcagaggaacaaaaaaagacaccac

SEQ ID NO: 132873 - RNA, 59 nt, Homo sapiens
agacagcaaggaaagagcgcccaaaacagcccaagcaaggcgagaacgggaagcgcaca

SEQ ID NO: 132874 - RNA, 61 nt, Homo sapiens
cagaccggaagaacgggaacccccgcagacaagagagggcggcagaaggaacaccgagaaa

SEQ ID NO: 132875 - RNA, 84 nt, Homo sapiens
aaaagaacacccccaggcagacggagaggagcggcggagcgaggcaacagaggcaccaagccaccaggacgaaggacagagagg

SEQ ID NO: 132876 - RNA, 79 nt, Homo sapiens
cccggagcggccgccccagcaaaagcaaaccaagccgcccccaggcggagcaagaagacccaccaagcacgcgccaccc

SEQ ID NO: 132877 - RNA, 75 nt, Homo sapiens
caggggacggggcaggcacggccaccaaccacaaggcccgcccaccaccagacggagccgggggagaggagagca

SEQ ID NO: 132878 - RNA, 74 nt, Homo sapiens
ggcacgcccacccagaagagcaggaaaggagggcaccaaccacaaaggagccaaggaccaagagaacgaaccag

SEQ ID NO: 132879 - RNA, 69 nt, Homo sapiens
gcacaacaacaggaacccagacagcgcggaaccaacccagacaaagacccacaccagagagaaagcaga

SEQ ID NO: 132880 - RNA, 59 nt, Homo sapiens
gccagagaaggggaaggaggggcagcgaccagaggggaggccgcgagcccggggagccc

SEQ ID NO: 132881 - RNA, 65 nt, Homo sapiens
cccggcgagccgcgacggcgccgcccacggcgagggaagggacgcaaaaaggaagccccacaagg

SEQ ID NO: 132882 - RNA, 83 nt, Homo sapiens
gcaccgcagccgcgagagaggcaagccggggcacccaccaaggcccggaggccccacaacaggggcagacacccaaaggaaac

SEQ ID NO: 132883 - RNA, 83 nt, Homo sapiens
ggcaaggagagacgcgcgaggggcgccgaagcgagggaggcagaggaggggacacggggacgcccggcggcccgcagagggcg

SEQ ID NO: 132884 - RNA, 72 nt, Homo sapiens
agaagcccaagaggagagagccacagggagagagccagaacagccaacaccgaccaagcccgaccaagaacc

SEQ ID NO: 132885 - RNA, 53 nt, Homo sapiens
caccaccggccgccccgaggcgcaagccccggggcagagacacaggacaccca

SEQ ID NO: 132886 - RNA, 70 nt, Homo sapiens
gcgcacacagcaagcacgaggccccccagagaagcccgagaccaggacaggaaaaacgggaagagagacc

SEQ ID NO: 132887 - RNA, 77 nt, Homo sapiens
aggaggaacaaggagacagagcggaagaggcagaggacagaaggaacagagaccgccaggggaaagccccgcgaagg

SEQ ID NO: 132888 - RNA, 66 nt, Homo sapiens
gcgcgccgggcccgccggcccccccaggaaaccacgaaagccggaaccagaaaaaccagcaaccaa

SEQ ID NO: 132889 - RNA, 66 nt, Homo sapiens
gcaagcggggaacgcgggcggcgagacggcggcaggacggcggcaggaaggaaccagaaaaaagag

SEQ ID NO: 132890 - RNA, 86 nt, Homo sapiens
ccacccccgcccgggccgggggccgccgggacccggccaccagcaagccgaaccaagaaggagcgagggaggagcagcgagacagc

SEQ ID NO: 132891 - RNA, 85 nt, Homo sapiens
gagaagaagcccaccggaggccccgggcgacaagccagcccccacgaccagccacacgacggaaaccgggagaagccggccaggc

SEQ ID NO: 132892 - RNA, 72 nt, Homo sapiens
cagcagagagagagcggaacgggagaaagcacgggaggagagacgggaagaccccagaaaaagaaagagcac

SEQ ID NO: 132893 - RNA, 39 nt, Homo sapiens
ccccaagaagagcaaaggagcgcacaaaaaccaaaccca

SEQ ID NO: 132894 - RNA, 82 nt, Homo sapiens
gcggccccgccgccccagcccgccccccgggccggcacgccgcccgcacgagcagagccaaaaaaggggagccgaagcagaa

SEQ ID NO: 132895 - RNA, 86 nt, Homo sapiens
ggagaggaaggaggcagaggaaagcgagaagaaggccaaacacagcacgacggcaccgagcgagcgagcacaaagcggacgacccc

SEQ ID NO: 132896 - RNA, 52 nt, Homo sapiens
aagaaggaacggaaacaaagagccggagcgacgcgccacgccggccgggaag

SEQ ID NO: 132897 - RNA, 77 nt, Homo sapiens
acaccgcggcgcccggccccccaggggcccccgcggcggccagaaggaccgcgaagaggagaggggagccaggggcc

SEQ ID NO: 132898 - RNA, 95 nt, Homo sapiens
aggacagcaaccagggacgaaagacaaaaggaggccaccagaggagcagaaagccgcgagacaagaagaaacggcagaaggaaaccgcaggacgg

SEQ ID NO: 132899 - RNA, 75 nt, Homo sapiens
acacaacggaggacagccagaacccgccccacacaccggaagccccccacaagggcagcggaacgcgccgacgcc

SEQ ID NO: 132900 - RNA, 58 nt, Homo sapiens
cagaaggacaggcggggcgaagaacagaccggagaggcccagaacaacgcaccgggag

SEQ ID NO: 132901 - RNA, 67 nt, Homo sapiens
aaaacagagcgcaaaaacagacccaaagagaagacgaaacggacggcacgggaaaaacaggaaaccc

SEQ ID NO: 132902 - RNA, 70 nt, Homo sapiens
aacaccagaagggaaagaaaccaggcgaaaggacgacacgagggaggcggacacgagcgaaccgaaaaga

SEQ ID NO: 132903 - RNA, 75 nt, Homo sapiens
aagccccacacggacaggagcggacaagagaaaaaggccaggagaagagaagaagcagccacaagagccaaacca

SEQ ID NO: 132904 - RNA, 85 nt, Homo sapiens
agcgcgcagagccggaggggcgcgggacacacccccaggaggcccggcagagcaggagacacagcaggccccacagaggaaggcc

SEQ ID NO: 132905 - RNA, 70 nt, Homo sapiens
gagggggaccaccccaggaagaagacaacaggaagccgcggaagccgagcaaagaggggaacaagcccaa

SEQ ID NO: 132906 - RNA, 67 nt, Homo sapiens
ggcaggacgaaacaaagagaaacacaccagaggaaaggcagcacagcaggcgacaagaaccaaaccc

SEQ ID NO: 132907 - RNA, 75 nt, Homo sapiens
gggcagaccgccaagagcccgaccaacaccgggaacagccaggagggacgcgagccgcccgaccggagcaaaggg

SEQ ID NO: 132908 - RNA, 83 nt, Homo sapiens
cacagcagaagaacccccagggcccagagccagggcacccccgagaggacaacaggcacggaaggccccgccaccggggcacg

SEQ ID NO: 132909 - RNA, 106 nt, Homo sapiens
caggaagagccagagagaaacagcgaccaccgaggagacaagcggagcgagcgagaaaaccaggaagaaaggcaacggaaagcacagggcgaaaaccagggcaaac

SEQ ID NO: 132910 - RNA, 87 nt, Homo sapiens
cagcgacggcagcggcggcggcggacaaacaggcaccgcagagcaccaaacaggggggaaggaagacaaacagagccaagcagacag

SEQ ID NO: 132911 - RNA, 74 nt, Homo sapiens
ggacagggacagagaaaccagaaacccagcgccacaagggcagaacagccaaaccagagcacagggacccaagg

SEQ ID NO: 132912 - RNA, 82 nt, Homo sapiens
cgccgcccacgcagacccccggcagacaggcccggcaccaccaccaccgccggaagggcaaagaccaccacaaagagaagaa

SEQ ID NO: 132913 - RNA, 82 nt, Homo sapiens
cggcgcccggccgaggggcgcgaggccccgcccggccaggcccagccgggcccggacaggggggaccgcggggccaaaaagg

SEQ ID NO: 132914 - RNA, 73 nt, Homo sapiens
ccagaaaaaacggaaaaacagaagaagaagagagggccgaaagaaaaaaggggcgaccacgaccgaagagcca

SEQ ID NO: 132915 - RNA, 76 nt, Homo sapiens
gcaacaagagagacaagaagcgccgcagacggcgaccaacaaagccacaaaagacccagcacaggcccagaacacg

SEQ ID NO: 132916 - RNA, 81 nt, Homo sapiens
gcggaggaggagcgcagcaagcgggagaccaggagcccccaccaggccaaagaccggcaaaaaaacaccagcagcccagca

SEQ ID NO: 132917 - RNA, 72 nt, Homo sapiens
gcgcaggggaccgcaacaggaacggaggcgggcggccaggggaaaaagaaaagggcgaagacccgaagcagc

SEQ ID NO: 132918 - RNA, 71 nt, Homo sapiens
aagaaacccacgaaccaaaagggacggacaaaggaacaggaccagggacgaggaaacaccaacaccaaacc

SEQ ID NO: 132919 - RNA, 84 nt, Homo sapiens
gcagggcaccgcgcgaagcggccaaagccgcccagacggccaccggcgggaggaacaaaagcccggaagcaggagacaaagacc

SEQ ID NO: 132920 - RNA, 67 nt, Homo sapiens
gaggcaacagaaaaaggaaacaaagcagaacaggcacaagcaggacaagagggcaggaaagacaacc

SEQ ID NO: 132921 - RNA, 72 nt, Homo sapiens
accacccaccggacagagagccagaaacgaagaacgcaagcacaggaccagaaacgaaaggcagcagaagag

SEQ ID NO: 132922 - RNA, 72 nt, Homo sapiens
gaagagagaagccaccagcaaaacaaccccggggaagcgggacagaagacacgaaagaaacagaaaacagag

SEQ ID NO: 132923 - RNA, 98 nt, Homo sapiens
cagaggcgggaggggccgggaggcagaggggcagggcgcggaaaaggaacagaagaggaaccgaaacccaagaaaaaccacccagcaaagaagcaagc

SEQ ID NO: 132924 - RNA, 83 nt, Homo sapiens
aaaagaaggcgccaacaggcccgggcggcgggggcgcggcgcccccggagggggccaacaacggggacgacgccgagcgcggc

SEQ ID NO: 132925 - RNA, 85 nt, Homo sapiens
cagcggcaaggagagacgcgcgaggggcgccgaagcgagggagccggggccggacgagaaagccgaaggagacgacggaggagac

SEQ ID NO: 132926 - RNA, 72 nt, Homo sapiens
gcacgacacgagacgggcacaacgggcgaagggagagggcccaggacggacccacccaggaggcagaaacac

SEQ ID NO: 132927 - RNA, 60 nt, Homo sapiens
cgcacagaggcgcagcgggccagcaggacgcagcaggcccgacaacaagccaaaacgcac

SEQ ID NO: 132928 - RNA, 100 nt, Homo sapiens
gcccgcggaggccggggagcagccgaccaggagccccagagggagacaacaacaagccgaagaggcgaggagccagcacaggggaacacagcaacggaga

SEQ ID NO: 132929 - RNA, 79 nt, Homo sapiens
cagagacaaagcgccagccaaggacaccagagggggcgcaggcgagcacccggccccgccggagcgacccggccggccg

SEQ ID NO: 132930 - RNA, 78 nt, Homo sapiens
cgcgaggagcagcgaaaacggggagagccggaccccaggcagacgggagcgggccgagaaaaaccacagagacacacg

SEQ ID NO: 132931 - RNA, 80 nt, Homo sapiens
ccagcgaagagagagacaaaagacggcggccaaacagagcagagacgaaacgcgagcaaacgcagaaaaagccagcagga

SEQ ID NO: 132932 - RNA, 71 nt, Homo sapiens
cccccgcccccccgggcaggaagacaaaaacagagagaacaacaggggggagaggagagaaccagaagaga

SEQ ID NO: 132933 - RNA, 58 nt, Homo sapiens
acacacccaggaaaagaccaggacggacaagcacagccggaagaccgaaacaaggacc

SEQ ID NO: 132934 - RNA, 73 nt, Homo sapiens
agcagcaccaaaaccccacgccaccccaagcaccggcacagcaaaagaagggaaagaggaaaacccggggaac

SEQ ID NO: 132935 - RNA, 78 nt, Homo sapiens
caggagcgggcagaggagcagggaggccacaggggccgaaacacagagcaagggaagcccagaggcacggggcagaac

SEQ ID NO: 132936 - RNA, 69 nt, Homo sapiens
caaggaagagaaaaaacgaccacgaagaagacaagaaagaaaacaccgggaaaggcccaaaccggcgaa

SEQ ID NO: 132937 - RNA, 74 nt, Homo sapiens
caaacggcaagagccagaagcccggcggaaggcccaaaggcaaagaaaccagagagccacgaagaggcaagaaa

SEQ ID NO: 132938 - RNA, 54 nt, Homo sapiens
aaacgagaaaagaagagcacagaaggaggagccaaggcgagcgcaacagcaggg

SEQ ID NO: 132939 - RNA, 74 nt, Homo sapiens
ggacagcgcacacggcaaggacaaccacaccgaaggccaccccaagaagaggggacagaaagacagacagaaga

SEQ ID NO: 132940 - RNA, 75 nt, Homo sapiens
cgagcccgcccccgaggcgcagaagggagagccagcaggacaggcacacccgggcagccccagcccgcagaagcc

SEQ ID NO: 132941 - RNA, 72 nt, Homo sapiens
gcgccgcgcagcccaggacgcggccgcacccgagagaggagccccccaaagcaggacggcgggaccccacca

SEQ ID NO: 132942 - RNA, 76 nt, Homo sapiens
cccacaggcccccgccgagcaccgaggggaagcgaaccacggaaggccaaagacagacgggcccagcacacaggga

SEQ ID NO: 132943 - RNA, 76 nt, Homo sapiens
gccgggaacccacagggaggaaggagagagccaacaacagcaaggcaagagacggacgagacggagaaagcgaccc

SEQ ID NO: 132944 - RNA, 72 nt, Homo sapiens
gaaggggcacacaaaaaccaaagcgaggccaggaacgacacaaggggaagcgaaaccggagaaggacaccgg

SEQ ID NO: 132945 - RNA, 75 nt, Homo sapiens
acgaagaaaagagaaggaaaaacagaacggcaaaccggaaaaaaacgggagaccaagaaaaagcaagcagggcaa

SEQ ID NO: 132946 - RNA, 71 nt, Homo sapiens
gaagcaaacagccggccacggcccaaacacacccaggcccaggaagaagcaaccacgacggcagagacagg

SEQ ID NO: 132947 - RNA, 83 nt, Homo sapiens
cagaacaagaacgcaccgggcggagaagccgcaagccgggccgagccagggcccccagaggagagaaggagggaccgccgggc

SEQ ID NO: 132948 - RNA, 71 nt, Homo sapiens
gggcagcaccgccgcccccgcgcgcgacaccacccccagaggggagagacacacagacagggcggagcaac

SEQ ID NO: 132949 - RNA, 81 nt, Homo sapiens
cccagccaaacaaaaaggaaaggagacaagcagagacgaaccaggcaaaggaaaacgggccacaacacaacccccacacca

SEQ ID NO: 132950 - RNA, 71 nt, Homo sapiens
accgaccaagccacgcggccaccagaagggcggagaacggaaaagcaccaggaagcagagaggaccgcaga

SEQ ID NO: 132951 - RNA, 92 nt, Homo sapiens
cgcgggcgggaggcccggggccccgggcgaacagaggcgcggcccagcgcagcccagcaggggcgcgcagcagcagcagcaacagcagcagc

SEQ ID NO: 132952 - RNA, 39 nt, Homo sapiens
ccacacccccacggccgccgccagacaaaacagaggaga

SEQ ID NO: 132953 - RNA, 71 nt, Homo sapiens
cgcgacgagcggagggaggcagccagcggggggcagggaaaggccaacaggagggcggaggcccggagcgg

SEQ ID NO: 132954 - RNA, 78 nt, Homo sapiens
gccagagagcccagaagcaaaagagacccacagaggagagaacgagccagacaaacgggcgaaaaacgaagaaggaag

SEQ ID NO: 132955 - RNA, 39 nt, Homo sapiens
agcgacgcgccaccaccggcagccaccggggaccgcaag

SEQ ID NO: 132956 - RNA, 72 nt, Homo sapiens
aaagagggccggaaaccggaggcaggaaacgcagcaaagccacgggggagaagggggagccacggaccaggg

SEQ ID NO: 132957 - RNA, 74 nt, Homo sapiens
cacccacgggccgaccacagccaaaacgacagcgagacgcgagggaaccaaaacaggcccgacacgcgacagga

SEQ ID NO: 132958 - RNA, 84 nt, Homo sapiens
ccccaccaccaccacccacacccaccaacaacaccacaaaaccacagccaagggaccagaccccacaagaaaacacacaaccac

SEQ ID NO: 132959 - RNA, 91 nt, Homo sapiens
gagacggacccacccacagcacacccaggacaacgaaaggccagcaccagggcgcaggagaaggcagagcgacccaggcacagaagccaag

SEQ ID NO: 132960 - RNA, 54 nt, Homo sapiens
aggaacggcaaaccccggccggggagaagccaaaacaggaacgaagagaacgga

SEQ ID NO: 132961 - RNA, 65 nt, Homo sapiens
gccccccccggcgggcgccaggcagcagccgagaagaaaccgcaagaaagaaagcgggcacaaca

SEQ ID NO: 132962 - RNA, 52 nt, Homo sapiens
cacagaacgaagagaagaagcgaggcagagaggacaccaccgccggagaaac

SEQ ID NO: 132963 - RNA, 50 nt, Homo sapiens
gggacaaaaaccagaccagaagaagggagcgggggagcgccgcacgaaac

SEQ ID NO: 132964 - RNA, 100 nt, Homo sapiens
cccgagccagcgagccagcgagccgccgacccgccgagcaaaaggccccagggaaaggaccgaggcaggaaagaggccagacgcagggaccggcaccgac

SEQ ID NO: 132965 - RNA, 70 nt, Homo sapiens
ccggacagaccaaccgcaggcgcaaaacggggagacagccaaggaaacggaagacccagcccggcccacc

SEQ ID NO: 132966 - RNA, 84 nt, Homo sapiens
aaaagcccgggcaggagaaaaaagagaaggcacaaagcggagcagagaggcgaaacacggggggcagcagaagccaagaagaga

SEQ ID NO: 132967 - RNA, 75 nt, Homo sapiens
gaacggcccggggggaaccggccgccggcagaccccagcccgaccccgaggaaccagcgacagaccgggcaccca

SEQ ID NO: 132968 - RNA, 68 nt, Homo sapiens
ggaaaaagacaccaccaacggaaaacaacacagacccgcaggcgcccgaaagggcaacaaggggcagg

SEQ ID NO: 132969 - RNA, 75 nt, Homo sapiens
ggaccccaagagggggagcgggggagagccagaccgccacgagcgggaagaagagcggcaccccacagacaacca

SEQ ID NO: 132970 - RNA, 67 nt, Homo sapiens
gagaggagaaagcaggcacacaacgcaaggaagaaaggaaccagcccgacgcgccgcgcgcacaaga

SEQ ID NO: 132971 - RNA, 77 nt, Homo sapiens
cggaggccgccggcgagccgccaagaggcggcgcagccaccccgcgggaacgcccagcgcggccaaagagccccagg

SEQ ID NO: 132972 - RNA, 87 nt, Homo sapiens
aagaaagagccaaaagaaagcaaagcgcagaaagggagaagggacgaaccgcggcgccgagcgccggccgagcagcggcggcgcgag

SEQ ID NO: 132973 - RNA, 80 nt, Homo sapiens
ggaccgaccaggacgacacgaaggaggaagaagagacgaagagacagcggagaacacccacaaaagcgaaaagccagaca

SEQ ID NO: 132974 - RNA, 71 nt, Homo sapiens
agcacaaccaccagaagaacgacagagaggagggagaacaagcaacggcgggcgcggcaagacacaggccc

SEQ ID NO: 132975 - RNA, 80 nt, Homo sapiens
gggaacagcacgcaagaagccgggagagcgcacaagaacccaggagaaacgagagggacagcaaggaagacgccagagag

SEQ ID NO: 132976 - RNA, 65 nt, Homo sapiens
agacaaaagggccaaagaagggagagagccgggacagggccagaagcgagcaccaaagcaaagac

SEQ ID NO: 132977 - RNA, 74 nt, Homo sapiens
aaccagaggaccggcaacaacccgaggacgaaccaccccgcgccagcagcacagcacgacagaagacaggagcc

SEQ ID NO: 132978 - RNA, 77 nt, Homo sapiens
cagcaaccagagggccagagggaaggacaggagagcacgcgcaagggaccaccaccgcacgaccagaaagaccgggc

SEQ ID NO: 132979 - RNA, 75 nt, Homo sapiens
gaggaggaaaggaggacgagggcccacgggggacagaagaccgggagcgggccaagaacgcgagaacccagaaga

SEQ ID NO: 132980 - RNA, 76 nt, Homo sapiens
agccgccccccagcagggccagggccaaaagggcggggaacggaccaccagccccaacgcacgcgccggagacagg

SEQ ID NO: 132981 - RNA, 74 nt, Homo sapiens
accgcacaaccccagaagcgcgcccgggaggaaaaggcccaagagccccaacgccccacgcaccaaccgaccaa

SEQ ID NO: 132982 - RNA, 78 nt, Homo sapiens
ggccgaggaggaggaggagcgcccccacacggaaggccccggagccgcagaaccaggcgaggccagcagcaagacacg

SEQ ID NO: 132983 - RNA, 116 nt, Homo sapiens
agaacaggccagggcccagcaaagcaacagccaagccagagccgggccccaacaacccggcggagaagcggaggagaccaaggaggccaccaccacagaaggagcggcacggagcg

SEQ ID NO: 132984 - RNA, 77 nt, Homo sapiens
gccgcgacgacccccagagagaacccaccgcaagagaccaaaggccaagagcaccgcagccaccagcccggaacccg

SEQ ID NO: 132985 - RNA, 62 nt, Homo sapiens
ggagacggggcgagcgggcgacggcgcccggcaaggacaagaaaaccagacgagagacagaa

SEQ ID NO: 132986 - RNA, 71 nt, Homo sapiens
gcaaaaaaaaccgccccgccagcagaaggaggggcagagccggccgcgaccgccgggcccaacgcgcccac

SEQ ID NO: 132987 - RNA, 79 nt, Homo sapiens
acggggccacagccgcgggggccaccacacggcccaaaaccgcagcccccggagcggccagaagaagcacggcaaaccg

SEQ ID NO: 132988 - RNA, 80 nt, Homo sapiens
caaggccacacaacggaccacacaagcaggccacgggaaggaagggcggcaggccagcaccccaaagggcacacaccgcg

SEQ ID NO: 132989 - RNA, 73 nt, Homo sapiens
agaaccgggcgaagcgaggggaaagaaaaagagcccaccaaaaggaacagacggccccaggcggacaacgcac

SEQ ID NO: 132990 - RNA, 70 nt, Homo sapiens
agacagaacgaaaagaaaaggcagcgagagaagccaggagaacgccgacggccaaccaggcacggagaga

SEQ ID NO: 132991 - RNA, 86 nt, Homo sapiens
cccagcggacccggccaggccaggcccggagccgccccagccacagcacgagccagggagccgccgggaccggcccgggagacgac

SEQ ID NO: 132992 - RNA, 80 nt, Homo sapiens
caaacaacgaccgagaggcgcggcgcagacgagcagggggaggaacaaagcgaggaagggaagggaaggcgacaggcagc

SEQ ID NO: 132993 - RNA, 66 nt, Homo sapiens
ggggagaggggccgggggcaacccaaccaccagacaccagcgccgggaagccagggccgggccaag

SEQ ID NO: 132994 - RNA, 72 nt, Homo sapiens
cgccgagagcaccggaaagaaagccgggccggggaacgggccagcggaaggagcaaagccggaaaagagcaa

SEQ ID NO: 132995 - RNA, 61 nt, Homo sapiens
gagaacccagcgggagggagcgggagggccggacgggacccagcaccagcgggggagcagc

SEQ ID NO: 132996 - RNA, 68 nt, Homo sapiens
caaaaggaagcaacccagaagagcgaaggacccagcgaggaggacagaaggcgcgggagaaaagccac

SEQ ID NO: 132997 - RNA, 86 nt, Homo sapiens
ccgaaccccagcccaagccgcgcccggaaccacggaaggagggggcgacacacaagcaggggggaccgacgagcaggcgagaagga

SEQ ID NO: 132998 - RNA, 90 nt, Homo sapiens
ccgcacagcggccagcgcgggcgcggccggagaccgggggcccccgggccgccccccggccccgacaagggaccgggcgggccccgcagg

SEQ ID NO: 132999 - RNA, 71 nt, Homo sapiens
agacccgcccaacagaaaaagagaggagggagaacacagaaacccgccccggggcccagaccaagccccac

SEQ ID NO: 133000 - RNA, 77 nt, Homo sapiens
aaacacggaacacgagggaaacagcccggaccggcagacccagcaaaagcgccacaggcacagaacacaccagaggc

SEQ ID NO: 133001 - RNA, 37 nt, Homo sapiens
ccgccgcaccagcaagcgcggggagcccagaccgaga

SEQ ID NO: 133002 - RNA, 83 nt, Homo sapiens
gccccacaggagccggacacgcagacagcaaggcaagggcgaaggggggggccaccgggggaccggggacagcgggccagacg

SEQ ID NO: 133003 - RNA, 74 nt, Homo sapiens
acccgcgggacccgcagccccgcgcgggcaccaggagagggacggcaagcacccgagcgccgcccacaccgcag

SEQ ID NO: 133004 - RNA, 61 nt, Homo sapiens
ggcgaccccagccgggcccgcgaaggcggaagccgcgcacaaaagaggagaaaccccaaaa

SEQ ID NO: 133005 - RNA, 100 nt, Homo sapiens
cggcggggaagagcagcgagagcgcggagcgggcggagcggcgagagcccccacgggaggagacacacagccccagacgggaggaaaaaaggaaggaccg

SEQ ID NO: 133006 - RNA, 75 nt, Homo sapiens
cgccgacaggacaccggggagaaggggaaaagcacccaccaccggcacagcaggaaagaaaaggcacacacaccc

SEQ ID NO: 133007 - RNA, 80 nt, Homo sapiens
ggcaaagggaggcagccgaacgggaccaggacgcggaagcaggaagacagcccagccgcgggggcgcgggaggggaccgg

SEQ ID NO: 133008 - RNA, 85 nt, Homo sapiens
aaacacacacgacagcccgaaaaagaacggaaccagaagcgcagaagaagcccggagaaggaccaaaagacagagcgcgaaaaga

SEQ ID NO: 133009 - RNA, 78 nt, Homo sapiens
cgggacgcgcgcgggcacccacggagccccggggcgggcaacgacaggggaaccccagggaccagcggacaggacagg

SEQ ID NO: 133010 - RNA, 61 nt, Homo sapiens
cgggcgccacacccgccccggagccgggcagcacgaggagacagcaaaaccgccggagcga

SEQ ID NO: 133011 - RNA, 71 nt, Homo sapiens
gaccgccgagccgcagccgccccgcggccaacagagccgggggagggcgcccgcccaacgacaaagacaga

SEQ ID NO: 133012 - RNA, 72 nt, Homo sapiens
caggacgcagcccaaacgggggacgaagagcgcaccggacgaggaggcccacgaggaaaggcccagacaaac

SEQ ID NO: 133013 - RNA, 83 nt, Homo sapiens
caggacccgagcgcacccggaccccaaccagccccgcaacccggaccagcagaaaccagaggaggacagcagcggacggccgg

SEQ ID NO: 133014 - RNA, 88 nt, Homo sapiens
gaacccccacggcgaagccagcggacgggcagggcccagagcaaacgagacggaagaaaaaaccgacggcccgaaccacagccaacaa

SEQ ID NO: 133015 - RNA, 84 nt, Homo sapiens
agacaaagcacccggcggccaaaggccaggacaccaacgggaccagaaggggaaaagaaacaaacaacaagaagaaggacaagg

SEQ ID NO: 133016 - RNA, 78 nt, Homo sapiens
ccgaacccccagcccaaacccggaaacccagcggcccagccggggggagccagacgaccagggaaggcggcagacccg

SEQ ID NO: 133017 - RNA, 86 nt, Homo sapiens
ccccaagcccgggcgccaccgcgccaccccgcgagaacgccaaaagacgaacacaaagggaaagaggagaggcacccgaaagccag

SEQ ID NO: 133018 - RNA, 76 nt, Homo sapiens
caggacgccaaaccaagccgcagggggaaggcccagagggaggcacaacagcgaggacaccaccgagcccccaccg

SEQ ID NO: 133019 - RNA, 73 nt, Homo sapiens
ggcccggcccccaagacagcgacgaagccagaaccgaagcccgcaccaagagggccacacgcggacccggagg

SEQ ID NO: 133020 - RNA, 78 nt, Homo sapiens
aggccaaggaaccaggcgacacaacccaagagaaaaccccccaaacgaaccacagagcaaccccccaaaccggagaca

SEQ ID NO: 133021 - RNA, 78 nt, Homo sapiens
aaaacaggcgcgcccggagcagcggaacaggccgacagcccagccaaggccaagccgacgccagcgggcgccacccaa

SEQ ID NO: 133022 - RNA, 70 nt, Homo sapiens
gcggaggggcaggggagcgcgcggaccagaccccaggcggagggaaggccaggacaggggaacaggcaca

SEQ ID NO: 133023 - RNA, 76 nt, Homo sapiens
gcccagggaggcaggggcagaaacagagaaggaacaggaaacggaggggagcgacaacgaaccgaaccacaaacgg

SEQ ID NO: 133024 - RNA, 63 nt, Homo sapiens
gccccacccaggggggacagccggcggaagaggaccaagaagggggcagcgcgggaaccagcg

SEQ ID NO: 133025 - RNA, 76 nt, Homo sapiens
cccccccaacaggcggcccaggccccagcagccgagcggaacaacaagcccggaaggaaagaaaacaaagacacag

SEQ ID NO: 133026 - RNA, 73 nt, Homo sapiens
acggcagccagccaaaggagaaagacagcaaagaaaaggagaagaaaggaaaaaaacaaccccgggcaccccg

SEQ ID NO: 133027 - RNA, 75 nt, Homo sapiens
aggggcaccccccaggaggaagccagccacgagacgcggcaccggagcgcacccacaccacggcggagcgcggcg

SEQ ID NO: 133028 - RNA, 80 nt, Homo sapiens
ccgccgccgccaccacccacccggacacagaacccaggagaaacgagagggacagcaaggaagacgccagagagcggcac

SEQ ID NO: 133029 - RNA, 72 nt, Homo sapiens
gaaaggcaaaccggcaccccacacgggacacagcagacccggcagccaggagccccaggccaccagggcaag

SEQ ID NO: 133030 - RNA, 36 nt, Homo sapiens
acagacagcaaggcagcggaaagcgggaaagaaaag

SEQ ID NO: 133031 - RNA, 75 nt, Homo sapiens
agcagcagaagagccaaggaaaaacagcaagaacccaaaagggaaacacaaaaggcaaacagaagcaccgaacag

SEQ ID NO: 133032 - RNA, 68 nt, Homo sapiens
aaagggcagggacagcgcaggcagcagcacccagaggccccacaggcgcagagcccaaagcaagggca

SEQ ID NO: 133033 - RNA, 53 nt, Homo sapiens
gagagagagggcaaccaggggacaccagcagcgccgccggaccaccgggcagc

SEQ ID NO: 133034 - RNA, 64 nt, Homo sapiens
cgaagagaagaagcaacagacaaaagggccacagcggaaaaaagcggcaccaagccaaggaggg

SEQ ID NO: 133035 - RNA, 35 nt, Homo sapiens
ggacaagaacagaagcaccaagcacccaccaagaa

SEQ ID NO: 133036 - RNA, 80 nt, Homo sapiens
agaaaagcccgggagcagaagggaggcccaagacccacaacaaaaggggaccggaagggaccaccagaaggacaaaaacc

SEQ ID NO: 133037 - RNA, 79 nt, Homo sapiens
agaacaaagaaaacaagggcagagaaagaacagagacaaaggaccaaaggccaaagagggcgaaaaaaaggagccaagg

SEQ ID NO: 133038 - RNA, 79 nt, Homo sapiens
gaggaagacgagccgggaggaacggcccggaaacaggaggacgggacccgggagacacaccaaccgcggccgacggcac

SEQ ID NO: 133039 - RNA, 73 nt, Homo sapiens
gccgggcgccagccaggaggaccggcaggaccgacgagcccgggaggcgaggggaagccagagccagggccaa

SEQ ID NO: 133040 - RNA, 75 nt, Homo sapiens
gcaaggagaaacccaagagcagcggcagagacccacgaggcaaaggcaggggggagccaccaagcagccccgggg

SEQ ID NO: 133041 - RNA, 78 nt, Homo sapiens
aggaacgcgcaaggcaaagcaccgggaaccagcggaaaaaggggaagaacaaggcgaaggggccaagaggaaggagag

SEQ ID NO: 133042 - RNA, 84 nt, Homo sapiens
agcacggggcagacaccgcccgaacacacaccgacggaacgccgcagaaagaagaaggggcaagaacagccacagcagagacaa

SEQ ID NO: 133043 - RNA, 83 nt, Homo sapiens
gcgagagcagcccccggaaaaagcaagcgaagacacaagaagaccgagcaaagagaccccggaacacaagcagaccggaagac

SEQ ID NO: 133044 - RNA, 84 nt, Homo sapiens
cacagcgcagcgacgagaggggccccgagccccggccccaaagacccaaaacagagacaccccccagcccccgcgccccgaaaa

SEQ ID NO: 133045 - RNA, 72 nt, Homo sapiens
cgacgaggcgcgggcgcgcacccgagccgcaagagcaccagcaaggaaacgaagaccgagaccaaacaaggc

SEQ ID NO: 133046 - RNA, 67 nt, Homo sapiens
gagaagccggggcaaggaagcgaggaaagaccacaggggaaacaagagacagaacggccaaagccaa

SEQ ID NO: 133047 - RNA, 66 nt, Homo sapiens
ccccaggaccccaagcaggagagcaagcgagacacgcccgacggccagccaacggggccagcccgg

SEQ ID NO: 133048 - RNA, 74 nt, Homo sapiens
cacagagagacacacagccaaggcagaagcccagcaaggggccggcagggacagcagaaacgcccggaaacacc

SEQ ID NO: 133049 - RNA, 53 nt, Homo sapiens
cggcgggggcaaggccgcaaacgcggagaggggccacagccaaggacgcaagg

SEQ ID NO: 133050 - RNA, 104 nt, Homo sapiens
ccggagcgcccagccgcggccccgggagacccggccccaaacgcggccacgcgcgcgcagggccccgcacaggcggagagcagggcggacagggccacgcagcc

SEQ ID NO: 133051 - RNA, 87 nt, Homo sapiens
cccaaggagcgccggcccccacaaagacaccccgagcgggaagaagccgcagcaagccgcagcggcgcgcaccgggcggcccaggac

SEQ ID NO: 133052 - RNA, 75 nt, Homo sapiens
cacccacagcagcccgcgagaacagccagcaaagacaagagcagaccagcagccgcagcgcgacagccaaaaacg

SEQ ID NO: 133053 - RNA, 41 nt, Homo sapiens
ggggaaacacagaacgcaggggaagaaggaggcagcagccg

SEQ ID NO: 133054 - RNA, 68 nt, Homo sapiens
gacagcaggcaacgaaagaggcaggaacaaaggcagagggggacggaagaagaagcccagggagacgg

SEQ ID NO: 133055 - RNA, 63 nt, Homo sapiens
gcgcgccacggcggccggacggggagaacagagaggaccacccgcacccaggggacgcacggc

SEQ ID NO: 133056 - RNA, 56 nt, Homo sapiens
cccacaccaccgcgaccaagccagcaacaacaagggaggcgaggacggacaaaagg

SEQ ID NO: 133057 - RNA, 73 nt, Homo sapiens
gccgaaggagaaacggagaacacagccagccagcacaccaccaggagcagaacggaaagaggccaggagcaca

SEQ ID NO: 133058 - RNA, 69 nt, Homo sapiens
gagaaaagggaaggaagcaaacaagaaaagccaacgccggggagacaaagacaaggcaaaaggagacca

SEQ ID NO: 133059 - RNA, 80 nt, Homo sapiens
aagaaacggcagcggccaaacgcacccacagcccgcacagcggacgcaaagaaaaagacggcaaaagaaaagcagccggg

SEQ ID NO: 133060 - RNA, 78 nt, Homo sapiens
gcggcccggagcgcggcccgaggcccgcccagagccacccgaagggccccccaagcccagggaccgcagaggacgggg

SEQ ID NO: 133061 - RNA, 48 nt, Homo sapiens
accacccgacccagagcccccgcccggcaagagggagaagacagcgac

SEQ ID NO: 133062 - RNA, 54 nt, Homo sapiens
caaccaagcagacaaagggagccaccaagccaaacggggccaccgaaaacgcca

SEQ ID NO: 133063 - RNA, 77 nt, Homo sapiens
gaccaggaggggacacagaccagcaaggaaagggcaagggcgcagcacgcagacccgcaagccccaagcagaggacg

SEQ ID NO: 133064 - RNA, 68 nt, Homo sapiens
agaaacaggcaaaagcggaacaagaaagcaggacaaaccggcgaccacacacggggacgacggggaag

SEQ ID NO: 133065 - RNA, 78 nt, Homo sapiens
cgcgcagggcagccaccagggcacagcacgaggcgccaaaagccaaaagccgagaacgacgaagacggccaacaaggc

SEQ ID NO: 133066 - RNA, 60 nt, Homo sapiens
agcggggccacgggagggagacacaggacccgcgggacgggccggcggggaagcgaccag

SEQ ID NO: 133067 - RNA, 90 nt, Homo sapiens
ggggcagcggagcaggagagcgccggaggcgggagcagccaggacgcaccgccaccgcggaccgaggagccgcccaggaggagcggggca

SEQ ID NO: 133068 - RNA, 39 nt, Homo sapiens
aaaggaagcgaaagaaacaaaggaagacgcgcgacccgc

SEQ ID NO: 133069 - RNA, 50 nt, Homo sapiens
cacagaaccagcccaagggaagccgaaaggcaagccgacaggaacacccg

SEQ ID NO: 133070 - RNA, 55 nt, Homo sapiens
acggcaaaagaccaagagcacagcagaagaaggagcggcaaacagcccgacgccc

SEQ ID NO: 133071 - RNA, 66 nt, Homo sapiens
gcgaaagagagagagccaacaagagccagacaaacaggcggagcaggagcaaaggagcaagaaacc

SEQ ID NO: 133072 - RNA, 40 nt, Homo sapiens
aaccaaacacccgacacaggggaaagggagagacaggaaa

SEQ ID NO: 133073 - RNA, 72 nt, Homo sapiens
ggaccagaccgaccaccaaaagccggcagcagcacccagagcaccaacagcgagggggaacaaccccggggg

SEQ ID NO: 133074 - RNA, 111 nt, Homo sapiens
aaaaagagaaaacaggcggaccgaacccggaagccgcggaacacccggcagccccacgacggcaggcgcacggaacagcgaggccagcaggagacggagccacggagcagg

SEQ ID NO: 133075 - RNA, 66 nt, Homo sapiens
ggagcgcgaaaccaggcccgccgcagagaggagaaagcagcgcaagccccggggcagagacacagg

SEQ ID NO: 133076 - RNA, 68 nt, Homo sapiens
cacgacaggaggaggaagaggcggaggcgaggcggccggcgcgaggccgaaccgggccgaagacgaag

SEQ ID NO: 133077 - RNA, 68 nt, Homo sapiens
gaccgaaggcgccggccaaaagaggaacagagccgacaggcacgaagaaaaggaaaacccacgcgggg

SEQ ID NO: 133078 - RNA, 65 nt, Homo sapiens
caggcagacaaaagggccaaagaagggagagagcaacccacaggcgcaccgaggagaccacaaac

SEQ ID NO: 133079 - RNA, 77 nt, Homo sapiens
gagcaacaaggagggaaaacggcaagaaagcccgacaaaaagagacacccccaaccaggggaagagcagcgacacac

SEQ ID NO: 133080 - RNA, 48 nt, Homo sapiens
caaaaagacgaaggcaagaaaagaacggcggagagaccaaccaaagcg

SEQ ID NO: 133081 - RNA, 53 nt, Homo sapiens
gagggagagccagaaccaacagagccaacacaagcaccaggagacggcccacc

SEQ ID NO: 133082 - RNA, 61 nt, Homo sapiens
cgaggacgaaagaaagagagcggaaccgcaggggaagccccagaagccgacagcacagaga

SEQ ID NO: 133083 - RNA, 90 nt, Homo sapiens
ggcgggacagcggggcggcggcgccgggggccggggagcgccaggggaccaaaagaacccagccaacccgcagagggaggggaggggcga

SEQ ID NO: 133084 - RNA, 39 nt, Homo sapiens
acaacaagagcccaaagaaacccgcgccagagagccaag

SEQ ID NO: 133085 - RNA, 76 nt, Homo sapiens
ggagaccagaaaagaggacagagcgcccagccaccaacaagcgacagaagcaaccggaaacacaaaccaagggaag

SEQ ID NO: 133086 - RNA, 75 nt, Homo sapiens
cgcgcacacggcacaggcaccagcccgggcagcgagcgcaaaagcacccaagaacgaggccgcagaggacccaca

SEQ ID NO: 133087 - RNA, 79 nt, Homo sapiens
ccgccaaaaggaaagcacagcagaaacacaaagcagcccaaccaaaggcccacaagagagggaaggagaaaggcagacg

SEQ ID NO: 133088 - RNA, 73 nt, Homo sapiens
cgcacgggagaagcgcccaagagccagaccaccacggaaacaaggacgggcgggcagcccgccggccacacgc

SEQ ID NO: 133089 - RNA, 98 nt, Homo sapiens
aagaacgccccaggagagagaaccgccaacggaccccgaggacaggaaaaacaggcaaggaacacaagcggcggcacaaagggggaccaaggccccag

SEQ ID NO: 133090 - RNA, 68 nt, Homo sapiens
gaaaagcgacgaggagcaaccagggcccagcgagcagaggccacgggcgggcaccaaccgaccgaaga

SEQ ID NO: 133091 - RNA, 68 nt, Homo sapiens
gcgagccccaagaaccggccaccggccccacacgaccgacagagcaaaccgccacccgggacaaccca

SEQ ID NO: 133092 - RNA, 80 nt, Homo sapiens
ggccacacgcgacccccgagcggaaaaacgaaaccccccaggcaagaggcgcaggaccgggaagaccaacaaacgcaccg

SEQ ID NO: 133093 - RNA, 74 nt, Homo sapiens
cgagcaccgcgccggcccagcaccccgagaaccgcaggagccagagaacacgaagcaaaggggaacaaaagaga

SEQ ID NO: 133094 - RNA, 76 nt, Homo sapiens
gggaagcgacacaaacaaaccgaaagaagaagaggagaagaaaagaccagacggcggagaacggaaaagcaccagg

SEQ ID NO: 133095 - RNA, 64 nt, Homo sapiens
cccaggcgaagaagcgcagccgcaccggccaaggacgggcccgggacacccagacagagagagc

SEQ ID NO: 133096 - RNA, 58 nt, Homo sapiens
gcaagcacaaaaggaggaaggacgcgcgcaggcgaggacgacgggcagacgccagcca

SEQ ID NO: 133097 - RNA, 79 nt, Homo sapiens
agccgacgcccaccagcgaacccggcccccgacggccgcagaacgggaccagccgcggaggccacccaacacagcgcca

SEQ ID NO: 133098 - RNA, 81 nt, Homo sapiens
gcgcccggaccaggagggaagcccaacccgcgcaggacgcgaacccgccacgcggccgcggaaagggcaccccgcaaaaca

SEQ ID NO: 133099 - RNA, 75 nt, Homo sapiens
aaagaaccagaagcgagagaaaagcccccaaaagcagcacaggacgaacgacaccgggccccccccggcgaggac

SEQ ID NO: 133100 - RNA, 81 nt, Homo sapiens
cgccgccgcggccggcgcggacaagcagaccggaagaccgacggaagaccacaccccgagggagcccaggacaccacgaga

SEQ ID NO: 133101 - RNA, 76 nt, Homo sapiens
ccaacccgagcgcggagaacccgcccagaagccagaccccaggcccaccaagccgagaacaccaggaaacagccca

SEQ ID NO: 133102 - RNA, 67 nt, Homo sapiens
agcggaccagagacaggcaccacacccagaccaccaaaacaaagggccaggaagaaagccacagagg

SEQ ID NO: 133103 - RNA, 85 nt, Homo sapiens
ggaggcaaagggaggaggaggaccggaggaaagggccgagaaagaagagaggaagaagaggaggaggaggaagaggaggaagacg

SEQ ID NO: 133104 - RNA, 82 nt, Homo sapiens
aaagcagcagccagccccgaacggagcgggacccggggcaccagaggaccgagagagaaaagagaagcaccaacacacacac

SEQ ID NO: 133105 - RNA, 66 nt, Homo sapiens
gcggacggcgcgcgcccgaggcgaggaggagcgcggcgcgcggaaaaacaagccagaagaagggag

SEQ ID NO: 133106 - RNA, 85 nt, Homo sapiens
aaagaacccagaaccgggcacaaaacgacaagaacagaaaaagccagggcaccaaggccaacaagaagagcccacaagaagggga

SEQ ID NO: 133107 - RNA, 78 nt, Homo sapiens
gcgggaagcggccagccgagcaagcggaggaccacgccggccgggaagaaaacaccggagcccaagacaccaaaacag

SEQ ID NO: 133108 - RNA, 49 nt, Homo sapiens
aaaggcaggagagagaacacagaaaccggcggccccagaaacaagcgac

SEQ ID NO: 133109 - RNA, 88 nt, Homo sapiens
cggaaggccgaagaggacggagcgcgcggggccggaggcgggcgaggaaggaaaccaccccacccaacccccgacacagaagaggaga

SEQ ID NO: 133110 - RNA, 50 nt, Homo sapiens
cgccacgccaccgaacagcccacaaggcagccagccacagagcccggcag

SEQ ID NO: 133111 - RNA, 68 nt, Homo sapiens
cccaaccgagcacagaaggcccacgaggccgagaacaccaggcgggggagcaagagacgaggaagaac

SEQ ID NO: 133112 - RNA, 88 nt, Homo sapiens
cgccaccgccgccgccggggccgggccccccgccgcgccccgggaaggagggaaccacggagaccagaccgcgccacaggacaagaag

SEQ ID NO: 133113 - RNA, 84 nt, Homo sapiens
agcggggcaccgagccggagacaccaggcgccgagaaggccagcagagaaacaggcaggagaggcccacaggcgcggacgggag

SEQ ID NO: 133114 - RNA, 76 nt, Homo sapiens
acccaacggaggccacaaacgcaaggaaagggagcagcaccggccacacccacagcacgaccggaacccagcgacc

SEQ ID NO: 133115 - RNA, 61 nt, Homo sapiens
ccaggcaagagcccgcgagaaggcagggaagcaaagagcacccgagcccagcaggcaagca

SEQ ID NO: 133116 - RNA, 74 nt, Homo sapiens
caggaaggcccccccagccccgcgggaccgaagcggcgggcgacacggaaggagaaaccaacacaaggccgagc

SEQ ID NO: 133117 - RNA, 78 nt, Homo sapiens
ccaccacccgagacccaaccgagacaaccgcgcagaagcaacaagagagacaagcccggggaggccacgcacgggacg

SEQ ID NO: 133118 - RNA, 77 nt, Homo sapiens
cgccacggcggaggccggcgggagcgcaggagcccggcgcagaagcacaccgacccccaacgggccccaggggaagc

SEQ ID NO: 133119 - RNA, 85 nt, Homo sapiens
gcgacccgaccccgcgcgacgacccgccgccgccgggcggagcaggaggcaaagggaccccaagaaaccaaagggcaagagccgc

SEQ ID NO: 133120 - RNA, 53 nt, Homo sapiens
cacccagccacaccggaaccgcgggagccgaaggggcggcagaccgcaaggac

SEQ ID NO: 133121 - RNA, 83 nt, Homo sapiens
gaagagccaacagacacgagccccgaaacagacccaggagcacccccgcaggcgccagccccaacagccagaggggacggcgg

SEQ ID NO: 133122 - RNA, 79 nt, Homo sapiens
cgggaacccccacgcggccagcgaaaacgcccaggacacgaggaggggacggcccgccacaggcacagacgaggaggga

SEQ ID NO: 133123 - RNA, 72 nt, Homo sapiens
aagagcaagagcagggaacagcccggacgaggggcaggaccggggacacacgacgcgggacgagcccgccgc

SEQ ID NO: 133124 - RNA, 69 nt, Homo sapiens
gagaagggaaagccaagcgaagacaaagcgacccgcccaccgccgaaagagaggaacccagaaacggca

SEQ ID NO: 133125 - RNA, 75 nt, Homo sapiens
aaacaggcaggaaaaacaggggagacagcggcgaaaggaagcaagcagaagacacgagcagacaggcagcaaaga

SEQ ID NO: 133126 - RNA, 72 nt, Homo sapiens
ggcaggacacaccacagcaggcgcaaacaccaagagagacgcccggagcgggaggcgcagccacaagcccga

SEQ ID NO: 133127 - RNA, 87 nt, Homo sapiens
acccgagcagcaccccccagcaaccaggccagcgcacaagaggccagaggggacagccggcgagacccccagcgggcaccccaaccc

SEQ ID NO: 133128 - RNA, 74 nt, Homo sapiens
gcagcagggacacgaagcgagcgccgagggagccccagcggaagccgcgagccagcccagaaacaccccagaca

SEQ ID NO: 133129 - RNA, 72 nt, Homo sapiens
aacccccagcccaaacccggaaacccagcggcccagccggcaagcccgagaagcaagaccgccccaaaaagc

SEQ ID NO: 133130 - RNA, 42 nt, Homo sapiens
acacgcaggccccgcgccaggagacaccaggcgccgagaagg

SEQ ID NO: 133131 - RNA, 71 nt, Homo sapiens
cgggacgggaggcgagacaagcaaaaagagcaccggccagcagaaccagccggggccggcaagccccgccc

SEQ ID NO: 133132 - RNA, 71 nt, Homo sapiens
aggaacaaagcaaaaaagagcgacacgacacacggccgcccgccgggacccaccaagggcccccacgacgc

SEQ ID NO: 133133 - RNA, 80 nt, Homo sapiens
ggcgcgcgcgggaccacccgacacgggaggggaggacccgggacaccgcacagccgggaaagagagaaaaggaacagccg

SEQ ID NO: 133134 - RNA, 66 nt, Homo sapiens
ccaagacacacaaaaagaagcagagagcgggaccagaggggagagagcccccgagaaaacaaaaca

SEQ ID NO: 133135 - RNA, 98 nt, Homo sapiens
cacccccacaccccgcgcccgcaacccagaccaagggcacaaggagcgcaagggccacacggggagcgcgcaagaacggacaggcgcgagcaccgggc

SEQ ID NO: 133136 - RNA, 73 nt, Homo sapiens
aggcaccagcgcaacagccaaccaacaaaaacaggaccaaaacccagagagggacgggcaccaaaaaaggcac

SEQ ID NO: 133137 - RNA, 71 nt, Homo sapiens
gcagggggcgaggccaggaacaaggagcgccagggcccgagggaccgccaacaagcggcccgcaccgggcc

SEQ ID NO: 133138 - RNA, 74 nt, Homo sapiens
accgcccccggcaggggaaaaccaaggggcaaaccaggccacagaccccaccagcacgaagggacacgggggca

SEQ ID NO: 133139 - RNA, 41 nt, Homo sapiens
cccccgagggcgggaacagggaaggcacaggcggaagacaa

SEQ ID NO: 133140 - RNA, 75 nt, Homo sapiens
ggggcggacagaggggaagcaagaggaaaaaaagaaggggagcgcgagaaggaaagcgccgcccagccagcggcg

SEQ ID NO: 133141 - RNA, 81 nt, Homo sapiens
accagagacacccgcccgcagaggcagaagcccccaagaaagcggggcagccccgcaggcacagaggagccgccgcgccca

SEQ ID NO: 133142 - RNA, 76 nt, Homo sapiens
gaacagaaagagaagcgcaccaggaagaagaggcggaagaaacaacaagcgcaaggagcgcccaaaccaccgacag

SEQ ID NO: 133143 - RNA, 78 nt, Homo sapiens
cgccgcagcgcggagccgcggccaagggagaggacgcagacggaaccgaccgagcagggcacaagagagccacagcca

SEQ ID NO: 133144 - RNA, 73 nt, Homo sapiens
cgggaagagagggaacacgcaggagggaaagagacaaccaaccgggcaagcgcccaccggacccaggacccgc

SEQ ID NO: 133145 - RNA, 115 nt, Homo sapiens
gcggccaccgccccgggacccgcgccgcgcccccggcccgcgggcggcccacggcgagcccaaaaggaaaaagaagaggaaaggaacaagagcgagagaagcgcagcaaccggaa

SEQ ID NO: 133146 - RNA, 67 nt, Homo sapiens
caccgcacgcgcacggacggcacagcccgccgaacccgaaaggaggagcgacccgagcggcaggaag

SEQ ID NO: 133147 - RNA, 86 nt, Homo sapiens
gcccaggccagcgccccaggccaagagggacccacccggcgggggaaaggaagggacgacgaacaacccccggcagaccgacagca

SEQ ID NO: 133148 - RNA, 78 nt, Homo sapiens
cagacgcagggcgcccccgggagcagaaacgggagaaaggaaagaagaaggcaacaagcaaggaagacgaccagagag

SEQ ID NO: 133149 - RNA, 81 nt, Homo sapiens
gaagacgaggagagcggaaaaaccccaagacaagccgagaccaccaggagcagagcggaggcaaccagccaaaacaacgga

SEQ ID NO: 133150 - RNA, 83 nt, Homo sapiens
cggccccgccgcgccccccccaccccggccgcgcccaagcgcaggggccccgggccagggaagcggaaagaaacacccaccac

SEQ ID NO: 133151 - RNA, 87 nt, Homo sapiens
gccagggccgccgccccgcccggggcacgcagacgcagcaggagggaagcgcgcagacgggcaggcgcgcggggggcgaccgacggc

SEQ ID NO: 133152 - RNA, 72 nt, Homo sapiens
ggaggggccaagcacagaaagagccaagagaacaaagggcagggcgaggaaaggagacggcaccaaccaaag

SEQ ID NO: 133153 - RNA, 77 nt, Homo sapiens
cagcaaccggaaagcaagggagcggcacagccagaagaccgaagcgcgacggaagaagaaaaagcagcacgaaggcg

SEQ ID NO: 133154 - RNA, 81 nt, Homo sapiens
gaaccgaacccaaaacgagaaaaggcgacggcggagacagaagagaggagagcccacaaacggcaacagccagggacagga

SEQ ID NO: 133155 - RNA, 89 nt, Homo sapiens
cgccggggacgacccccagagcggggagcgccccagagaggggaaccccacgcagaacgcagccggcacagccacaccgagaagaccgg

SEQ ID NO: 133156 - RNA, 76 nt, Homo sapiens
caaagcgaacgaagagcaccgggagcggcgaagaggcaccggaggaggaaaccccccaggcaagaggcgcaggacc

SEQ ID NO: 133157 - RNA, 48 nt, Homo sapiens
gacaaccccgcccaacacccaccgagaagcacagcagggacgcaccaa

SEQ ID NO: 133158 - RNA, 73 nt, Homo sapiens
gcagaagcgcggcagggagcgcgggggcccgcgcagcagcgaccacggggaggagaggccagaaagaacacgc

SEQ ID NO: 133159 - RNA, 77 nt, Homo sapiens
ggggacaccagcaagcgcggaagaggaccggaggccggaggaagccaggaggccgggaaccggggccccaggacccg

SEQ ID NO: 133160 - RNA, 94 nt, Homo sapiens
ccccaacccaccgaacgaacacacgggacaaccagcgacgccggagcagcccaacccaggcgccggaccgaaggcgcgaccacgacgagaagcg

SEQ ID NO: 133161 - RNA, 81 nt, Homo sapiens
gagaggagggggccggccgggacgcggcccggagccgggaccggcgcggcagaggaagaagaaggcgcaaagcgccgaagg

SEQ ID NO: 133162 - RNA, 42 nt, Homo sapiens
cgccgggacaccggaagccgagaaagcgacaccggccaaggg

SEQ ID NO: 133163 - RNA, 67 nt, Homo sapiens
gccaccaacacgaacccagagggacagggggcaacgggccaccacagccagaaagcccggaaacacc

SEQ ID NO: 133164 - RNA, 78 nt, Homo sapiens
cgccagccaccacgcaccccccccgcaagccacacccagaggacagcagcggacggccggaccaagaggcgccgcccc

SEQ ID NO: 133165 - RNA, 79 nt, Homo sapiens
gggcggaccaccggcggggaggagaccaggcgacaccgcgacaccccaacaaacaccagcgcgggggagggacacgcca

SEQ ID NO: 133166 - RNA, 79 nt, Homo sapiens
ggccgggcgagggaagagcgggcgccccacgcccccaccaaagcccagaaggagcgagcaaagacgaagacaggcaccg

SEQ ID NO: 133167 - RNA, 68 nt, Homo sapiens
gcaagacaccacccaacacagcagccagcaccagaggaaaaaccggacaaccagccacccgcacaaac

SEQ ID NO: 133168 - RNA, 82 nt, Homo sapiens
ggggcgggaaagacccaggagaagccgcccaaagaacgccacaacacagcagcccccaggagagcaggaaaagccggagaag

SEQ ID NO: 133169 - RNA, 87 nt, Homo sapiens
cgggcggcgggaccggccggggagcgcgcagcaggcagccgaaccaggcaagacgagccagcaacggggcccacaaggagcgaccgg

SEQ ID NO: 133170 - RNA, 68 nt, Homo sapiens
gagcggggaagggggaaaggcaccaggacaagcaaaggccacgaccagagacgccaccgccccaccca

SEQ ID NO: 133171 - RNA, 75 nt, Homo sapiens
ggaacaagagagcaggagggagccccaccaaggcgcgggcaacaccgccagccacacagggggaccgaccaacac

SEQ ID NO: 133172 - RNA, 72 nt, Homo sapiens
cgcgccaacaccaccggaccaaggcggaggagagaggacgcgagaaaaacgaagagaccggccgacgaaaag

SEQ ID NO: 133173 - RNA, 81 nt, Homo sapiens
cccgaggagggggaccgaagacgaccgacccgcccagcacgaccagccagcaggcaaagaaaccccaaagccagcaagacc

SEQ ID NO: 133174 - RNA, 54 nt, Homo sapiens
cgcccggggacgaagagcgcagcccccggcggggaccaggcagacgaccaagga

SEQ ID NO: 133175 - RNA, 70 nt, Homo sapiens
gcacgaggaaggaaccaaggaagagaagaaggaacggaaacaaagagccggaaaaacgggccgagaaagc

SEQ ID NO: 133176 - RNA, 69 nt, Homo sapiens
agaccggagcgccacggccacgccccccgcaacaacccacaagaacccaaaggcggcggcaaaacggac

SEQ ID NO: 133177 - RNA, 40 nt, Homo sapiens
ccacagcgcacccccaggcacgcacgcacccggcaaagaa

SEQ ID NO: 133178 - RNA, 56 nt, Homo sapiens
acccgcagagaccacggcgcgccccggccggagcgacaccggaacaagcccgcaca

SEQ ID NO: 133179 - RNA, 54 nt, Homo sapiens
ccccaaaccgccaggagaaaaaaggggcccgcgaccggaccacacccacaaaaa

SEQ ID NO: 133180 - RNA, 75 nt, Homo sapiens
ggaaccacaccaccacgaccacacgacagcagcagccacaggaaaaggccgagacaggcaaccagacggagggaa

SEQ ID NO: 133181 - RNA, 73 nt, Homo sapiens
gccggaagggggcggccacgaccaagaagaagcgcggaccccgcggaggccaccggcgagccgcggagaaagg

SEQ ID NO: 133182 - RNA, 59 nt, Homo sapiens
gaagcacacaacaggaaaacaaaagaggagaaaggagacgacaccaagaggaaaaacca

SEQ ID NO: 133183 - RNA, 90 nt, Homo sapiens
ccgggcgccccgcaggacacaagaccccaagaagaagcggaagaggagccgcggaaccaagacacaaggaacagaagacaggaccaggaa

SEQ ID NO: 133184 - RNA, 76 nt, Homo sapiens
agccgagcaaagaagcaaccagccagacagggcgggaccaccaggagcagagcggaggccaccagcccaacaccac

SEQ ID NO: 133185 - RNA, 83 nt, Homo sapiens
agcccacgccagacgaccccacccgcgccgcgacccgcgggacagaaagaacaacccggagcccggaaccgccgagccccaag

SEQ ID NO: 133186 - RNA, 72 nt, Homo sapiens
ggaccaagaaccagggggcggggcggccgggcgccgggggagcacgcaccacacgcggagcgaggaggcccc

SEQ ID NO: 133187 - RNA, 72 nt, Homo sapiens
ccgcgaccccggccggaagcacacaacagagcgaggcgacgcggcgcccggcaacccgaagcgccgggcacc

SEQ ID NO: 133188 - RNA, 85 nt, Homo sapiens
caccccccgcgggccgcaggggccagcagccgccaagaaagcgcaccaaaggggacgaggccccccggccagaagcggccccggg

SEQ ID NO: 133189 - RNA, 66 nt, Homo sapiens
gccgcaccaggagcgaagagcgccgacaagacggacgggggggcagggacgcacaagggaagcaag

SEQ ID NO: 133190 - RNA, 83 nt, Homo sapiens
aaagaaaaaaccaggacaccccaaggggcaagcagcccggccagggacagcgcacagcagggaaccacgaacgcgagacaacc

SEQ ID NO: 133191 - RNA, 100 nt, Homo sapiens
cggaccccacgcggggggggccaagagacagggcacaccaaacccacgggggagagccagcaaccggaagcaggagaagaggagggaaacaggcaccggg

SEQ ID NO: 133192 - RNA, 57 nt, Homo sapiens
gaaacaacggcgaaaacggcaaaacaaagaggcaaaagcagaccggaaaacccaccg

SEQ ID NO: 133193 - RNA, 77 nt, Homo sapiens
acgccgcacaggccgcgaacggggcaaaggaggccagaaaagggcggggcaccggcgacagcggccgccaaacgcgg

SEQ ID NO: 133194 - RNA, 64 nt, Homo sapiens
ccagaggaggagcgaccaggagacaagaggagcagcagcggcaccgcccccacccggagggccg

SEQ ID NO: 133195 - RNA, 77 nt, Homo sapiens
cagagcgccggaaggccagaagcagggccgagcaacacaggggcgcgacaagcccacgagacgaacccccagccagc

SEQ ID NO: 133196 - RNA, 83 nt, Homo sapiens
gaggcgggaggggccgggaggcagaggggcagggggacaagcaaggggccaaggagccaaggaggaaacccacaacagaggac

SEQ ID NO: 133197 - RNA, 67 nt, Homo sapiens
cagggaccagcaaaacccaaaccccacggagcgcgccccaccgcggccgccggggacacagagcccc

SEQ ID NO: 133198 - RNA, 73 nt, Homo sapiens
caaggggcgggacccagcaacccagaaaaagcggggaaggggggcaaaaaaaagaagcaagcgaagcaccgag

SEQ ID NO: 133199 - RNA, 41 nt, Homo sapiens
gcggagcaggccaaaggaagaagcacagaagagcaacaagc

SEQ ID NO: 133200 - RNA, 32 nt, Homo sapiens
cacgcgagcagacgagaccagacaaaacgagc

SEQ ID NO: 133201 - RNA, 70 nt, Homo sapiens
gagaccggaccgagagcggaccgagagcgcgaaacgcacgagaagacaccgccagaagcaccaggacagc

SEQ ID NO: 133202 - RNA, 56 nt, Homo sapiens
caaaaaaccacgaaggaaaaaggggcgagagagagaccaggggaggcaagcagggg

SEQ ID NO: 133203 - RNA, 74 nt, Homo sapiens
agggggcggagcggaaggaccaaaacagggaaggaagaaccaggagggaaaaccccagcgggcagaccaaagag

SEQ ID NO: 133204 - RNA, 76 nt, Homo sapiens
caccccacacggacacccccaagagaggccacaggggggacaaagcgaacaaaccgggagacacacaggagaacgg

SEQ ID NO: 133205 - RNA, 80 nt, Homo sapiens
aaacgaagagacggaggaaaccacaggaaggaagcacaggggccaccggagcgcccgagaaacacagcaggaagagaaca

SEQ ID NO: 133206 - RNA, 85 nt, Homo sapiens
ccgacaccgccggggggcccacccccgaaacgaaggaggcccaaccacaaaaggagccgacggaacccagacggagaacaaaagg

SEQ ID NO: 133207 - RNA, 81 nt, Homo sapiens
cagacgaggaagacccggaaacaggggccacggagccacggccacggccgcaagaacccgcccagagccagcgcccccgcg

SEQ ID NO: 133208 - RNA, 74 nt, Homo sapiens
aagacacaagaggagagaaggacaaggagcagaagaccacaagccgaaaaaaggaagcgaaccccagacaggac

SEQ ID NO: 133209 - RNA, 93 nt, Homo sapiens
cgccagcagaggcggagcccgcagaccgcagaaggccggagacaccagcagggcagcgcaagaccccgcacggaagcagcaagcacaggcagc

SEQ ID NO: 133210 - RNA, 80 nt, Homo sapiens
gcccgaggacagagaggcgagcgcccggaggggagagagcggaggacagccgagaggaggcgaaggggagcaagggagaa

SEQ ID NO: 133211 - RNA, 75 nt, Homo sapiens
ggcaacacccgcgaggcagaagccaagaccggcccgaggcggccgccacacacgggacaccaggacgggggaaga

SEQ ID NO: 133212 - RNA, 94 nt, Homo sapiens
ccaggcgcaacaaggagaagagccaggaaacaggaggaagaacccaagccaaagcccagggacaggcgagggaggacggggccaccaagaggag

SEQ ID NO: 133213 - RNA, 81 nt, Homo sapiens
gccaccacaggcaccggggcgcaggggcacagcgacgccgggcccccggaccccgcggcggcgggcgggagggcgccaccc

SEQ ID NO: 133214 - RNA, 98 nt, Homo sapiens
gccgccgccgcgccggcccccgagcacgccggccccgcgcgcgcccgaggccgagcaaggaaccgacagaagccaggaccccagagagggccaagccc

SEQ ID NO: 133215 - RNA, 68 nt, Homo sapiens
agaagaagaaagacgaacaaggacacagaagagggagcccaaagagaaaaaggagagagccagaccag

SEQ ID NO: 133216 - RNA, 85 nt, Homo sapiens
ccgccaaaccagaggagggaaaacgccgaagaaggccccgagccccggccccaaagacccaaaacagagacaccccccagccccc

SEQ ID NO: 133217 - RNA, 82 nt, Homo sapiens
gccgacacggcgaggagggggcccggacggcgacccggggaggcgaagcgagaccggacgcgggacacaagaaaaaacccgg

SEQ ID NO: 133218 - RNA, 89 nt, Homo sapiens
cagcacgggacagccaccgcgcaaggaccccagccaggccacggggacaacaggcagcagcgcagcgcacagaggagaaaaagcaaagc

SEQ ID NO: 133219 - RNA, 76 nt, Homo sapiens
cgcgcagcccagacacgagagccgccacaagaaaagacaggacccaggaaacagacacaagccgaagacacaacac

SEQ ID NO: 133220 - RNA, 75 nt, Homo sapiens
ccccccaggcccacaaccagcccagcagcagcaagcagggccaggccgccacgaaaacaagaaagaaccccacag

SEQ ID NO: 133221 - RNA, 74 nt, Homo sapiens
ccgaagagaaaggaggagacaagaagcggcgaacaacaagaagacgaagccagaaaacagggaaaaagcagggg

SEQ ID NO: 133222 - RNA, 71 nt, Homo sapiens
aaacggcccgcgcccgccagccaggccaccccgggaacacagaagaaagggagcccccaagaacagcgagc

SEQ ID NO: 133223 - RNA, 51 nt, Homo sapiens
gcccgagcgccagccgaaaagcgaacgagacagaggcacaaaaggagaaag

SEQ ID NO: 133224 - RNA, 70 nt, Homo sapiens
ggaaggccggggggagaaaaacgggagaacacaagacgacagaagaaaaccaccaaaggaaaagccgaca

SEQ ID NO: 133225 - RNA, 40 nt, Homo sapiens
gcaagacagcagccacacccagaggcagacgccagcagac

SEQ ID NO: 133226 - RNA, 79 nt, Homo sapiens
gcacaaccaggaggcggggccacggccaaggccacgcgcaccccccggaggcggccgagcccacgcgacgaagaacagg

SEQ ID NO: 133227 - RNA, 70 nt, Homo sapiens
aaaccagcaggccagcgcagaccgagagccaagagccgaggcaaaccgacaccagcgacacaagcgcgag

SEQ ID NO: 133228 - RNA, 79 nt, Homo sapiens
aaaagcccacggcagacagccaccagcaccagaagaacacagacacgacagccagaaggcaaacacagcagaccaggca

SEQ ID NO: 133229 - RNA, 66 nt, Homo sapiens
cgccgagggccccagcgcaggagccgcgcccggacccaggagcaagcgaagaagagggaaaagccc

SEQ ID NO: 133230 - RNA, 52 nt, Homo sapiens
acagagagagaggaaggagaaaagaaagccagaaggaaggaagcaacgaacc

SEQ ID NO: 133231 - RNA, 78 nt, Homo sapiens
gccgagcccagagcacccgcaagggagacaacaagaaacaggagaagggaggccgaaaagacagagaggggaaacccc

SEQ ID NO: 133232 - RNA, 83 nt, Homo sapiens
gggcaagagaaagcccaccacaagaagcggaagagagggggcgcccagcgccaacaccaagaggaaaggcaagggcagaaaag

SEQ ID NO: 133233 - RNA, 40 nt, Homo sapiens
caagcaccagcacgccggcaagccccagccccagccaaac

SEQ ID NO: 133234 - RNA, 72 nt, Homo sapiens
ggacgccaaaccaagccgcagggggaagcacccgagggagagcgcaccaccccacgcgccaggcgagacccc

SEQ ID NO: 133235 - RNA, 59 nt, Homo sapiens
cgcccgcccccaggaaaccaaggacggagccccacgcgagaacaacaagcggaccgcag

SEQ ID NO: 133236 - RNA, 66 nt, Homo sapiens
ggaccggcgggaccagggcgccagggaggagacaagaagccgacaagaagaaagaggacgacccac

SEQ ID NO: 133237 - RNA, 69 nt, Homo sapiens
aaaagcaggcccagaaggggaaagaggagcacccacaagaggaagaagacacggaccgacggacgggaa

SEQ ID NO: 133238 - RNA, 78 nt, Homo sapiens
gggccccgcggaccaccgccggggacaccaccaggaaaagcccggaaaagcagccaagcggaagacagagccgcaaag

SEQ ID NO: 133239 - RNA, 84 nt, Homo sapiens
gagccgggacacgccagcgcgggcccagaaaggggagcaagaagaaagagcagggaggagggagcgacaggaagaaagaaaccc

SEQ ID NO: 133240 - RNA, 79 nt, Homo sapiens
agccccaggagaaaggcaccgcaagacagagagacagccccccaagcgccgggcggaacgaaaggagcgacgagagccg

SEQ ID NO: 133241 - RNA, 83 nt, Homo sapiens
ccgcgccggccccacagccgcgccgggccgacgcccgccgcggccggggaacaggccacagccaggagcgcacacaggagccc

SEQ ID NO: 133242 - RNA, 80 nt, Homo sapiens
caccacaacaaagaagaccacacacgggaaacacaaaacgacaagcacgaccgaggggaacgggagcagcccagccacac

SEQ ID NO: 133243 - RNA, 75 nt, Homo sapiens
ccagcaagacccgagaccggaagcagcaggcgccaaggagaagggcaccacagaacagccgaagcaggccaccag

SEQ ID NO: 133244 - RNA, 67 nt, Homo sapiens
cagccagaaaggggggccgacaggcgcccacacccaagcaggggaacacccagaggaacgcgagaaa

SEQ ID NO: 133245 - RNA, 76 nt, Homo sapiens
gcaaagaagcgaaaccgagcaggcagagagcagaagaacacagacagcggaagagggagacacccacagagcccca

SEQ ID NO: 133246 - RNA, 76 nt, Homo sapiens
gcaggcgggagacaccgaaagccggacccaagccagaagcccgcaaagcccccagaccgcagaaacagacaacgcc

SEQ ID NO: 133247 - RNA, 75 nt, Homo sapiens
accgcaggacccagcagcgcagcagccaaggagacaccccagacaacaggcacaaagagagaaggaacacccaca

SEQ ID NO: 133248 - RNA, 74 nt, Homo sapiens
cacaacccaagaaacggagacagaaagagaaaagggacagagcgaggaaaaggcacagggaagcacgcaggcgg

SEQ ID NO: 133249 - RNA, 73 nt, Homo sapiens
gggaaggcaccgagacgaaggcgcacagcagaggggaaagaagagccagcaggaaaggaagaagccaaaagca

SEQ ID NO: 133250 - RNA, 67 nt, Homo sapiens
aacaggcgaacagaacaagaaccaaagaaaacaaaaggggacagcgggcaaggagaggggcaaagga

SEQ ID NO: 133251 - RNA, 70 nt, Homo sapiens
ccagccgcgcccgggagagcaagggaaacacaaagaagacaccagaagggccagcaccacgacaacacgg

SEQ ID NO: 133252 - RNA, 54 nt, Homo sapiens
ggggccaggcacacggggagacgcacgaccagcgcaaaccaacgggacacaaag

SEQ ID NO: 133253 - RNA, 73 nt, Homo sapiens
ccaaggaagcgacagccaggaccaggcacccgggaaggaacgaacacagagaggagcccagaagaaaccaagc

SEQ ID NO: 133254 - RNA, 79 nt, Homo sapiens
aaagggaagcgaagccgaaaaaggcagcagcgaagggaacccagccccggcggaagcaacagagacccccacgaagaag

SEQ ID NO: 133255 - RNA, 111 nt, Homo sapiens
agaaaaagagaagccccagagcaccgagggcggagaaccagaagacgagaggcccgcaaaagaaaccccacagcggagaaaaaggagaaacccccaagacaaaccacggac

SEQ ID NO: 133256 - RNA, 73 nt, Homo sapiens
caacaaccagacgaacccgcccccgggccgggagcaaccagaggcaagagcccgagccagaagagagcgacac

SEQ ID NO: 133257 - RNA, 79 nt, Homo sapiens
cccccggggagagcgacgaggacgagacgcagaccacagcgacgaggacgacgccgggcggaagcagcagagggagggg

SEQ ID NO: 133258 - RNA, 78 nt, Homo sapiens
caaggcagaaggaagcaccacacagagacccggagaggcaacccagacgcgcccgggacacagaaggaaggcagggcc

SEQ ID NO: 133259 - RNA, 52 nt, Homo sapiens
gcgcaccccggacaccccgggaggaggaggaacgagaccgaaaaaaggaaac

SEQ ID NO: 133260 - RNA, 77 nt, Homo sapiens
cagcggccacggagggaagagcccggaacgccagagcggaaaggaagagaacgccggaagcgcaacaccaagacaca

SEQ ID NO: 133261 - RNA, 76 nt, Homo sapiens
gcccagcgggaggccaggaaagacagcaaagaagaaggggcgcaaggcccgaagaagcagaggggaggaggaggag

SEQ ID NO: 133262 - RNA, 75 nt, Homo sapiens
caccgaccagggaacgcaacaaagacccgccccgccacgagaacacacccccaggcggagaaaaaagagaagcca

SEQ ID NO: 133263 - RNA, 94 nt, Homo sapiens
cggagcagacgacaccccacacgacaaggaggggcaaacagccgcagcacaagcgcacacagagaaaaaaagggaacaaaacacagcaagcaga

SEQ ID NO: 133264 - RNA, 83 nt, Homo sapiens
gaaaggccccacccccacaccgaccagaaccacagcgacgcccccgcgaagaaaagcgacaacaaccagcgagaaaaagcccg

SEQ ID NO: 133265 - RNA, 75 nt, Homo sapiens
cccgaggacggacaggagcgccgacaaccagccaaccaggaccccaggaccccagccagacccagacccgccaga

SEQ ID NO: 133266 - RNA, 79 nt, Homo sapiens
gaacccaggacagcaccaggcccaggacagcacgagaacaccagcaggaaaaaagagcggcagaaggccaaacggccga

SEQ ID NO: 133267 - RNA, 74 nt, Homo sapiens
accgccgaccccaggcagccccgcacgagcggcaaccgaaagccagcagcggaggcaagaggcccaccaacaac

SEQ ID NO: 133268 - RNA, 74 nt, Homo sapiens
cggcaggaggagcaaagcccacaggacacgggggggaaacaagcacgggcgagccaggacacgaccacaacaca

SEQ ID NO: 133269 - RNA, 84 nt, Homo sapiens
cacgccaccgcagggaagaacccgagcgaagcgggaagaggcgcagacaagccgcagggagaaaaacgacaaacagagcgaaaa

SEQ ID NO: 133270 - RNA, 74 nt, Homo sapiens
gcccgacaaccagaagcccacccagagagagaagaacaaggcggccaaaccaagaccaacaaccacccagaaac

SEQ ID NO: 133271 - RNA, 76 nt, Homo sapiens
aaaccgaggcaacaggcacaaagaagagccagcccgcccggcggaccaaaggacacagcaggagccaagccccccc

SEQ ID NO: 133272 - RNA, 56 nt, Homo sapiens
ggagcgcccaccagaggagcgaaagagagaggaaacgacaaccccgcagagacagc

SEQ ID NO: 133273 - RNA, 87 nt, Homo sapiens
aagcagcggacgcgcccccaagaaaggcgaggaccggcccagccaggcccggggcagcggcgaccagagcagcccccgaccccagcc

SEQ ID NO: 133274 - RNA, 84 nt, Homo sapiens
agcgggaagaagcacaagaaaaagaggggccccaaaaagcccccccacaccccaaccacagaagaacaggacaccaggccgagc

SEQ ID NO: 133275 - RNA, 61 nt, Homo sapiens
gaggccagggggcgccagagagacacagacaaagcccagaagaaaaaccacaccaacaagc

SEQ ID NO: 133276 - RNA, 52 nt, Homo sapiens
ggaaccgccgcccaggcgcaacccaaccagggcagaaccgcacgcagcaccc

SEQ ID NO: 133277 - RNA, 61 nt, Homo sapiens
ggcgcagcgcccacccgcgccagagaccagaaaacccagaaagaagcagacagcgacggca

SEQ ID NO: 133278 - RNA, 72 nt, Homo sapiens
cggagcgccagggccacggcccaccacccggccagaacacagcagaaaggggggaccaacagaagcaaaaag

SEQ ID NO: 133279 - RNA, 66 nt, Homo sapiens
gaaggccacccaacacacagcagcaaagaggcgaccgaagcaaaacacagggacagagcggccacc

SEQ ID NO: 133280 - RNA, 85 nt, Homo sapiens
ggggcgcagcggagaccgagagcagggggaggggcagaggacgaggaggggcgaagccgacgagcccgaacagacgcaccagcgg

SEQ ID NO: 133281 - RNA, 80 nt, Homo sapiens
gccgaaccgggagccggaccgggaccaggaccgggccccacccaggggcggagcggcgaagaaagagcacagacgaagca

SEQ ID NO: 133282 - RNA, 67 nt, Homo sapiens
acagggcagaccaaccaccgagaagaaaccgcaagaaagaaagcgggcacaacaacccaaaaccacc

SEQ ID NO: 133283 - RNA, 78 nt, Homo sapiens
cgacgacggcgcgaggaggacgagcggcgagggacggaaaacagggcgggaccaccaggagcagagcggaggccacca

SEQ ID NO: 133284 - RNA, 105 nt, Homo sapiens
ccgcgccggggccacggacacaacgaggccacgggagacgcgaaggacgagaacccccgcgaaccagaggaacccagcgagcgagagcggaccagaggacggaag

SEQ ID NO: 133285 - RNA, 75 nt, Homo sapiens
gaccaccgacagaaccccagcccgaccccacccaccaaagccagaggacggaggggcgcgagacaaccaccgggg

SEQ ID NO: 133286 - RNA, 83 nt, Homo sapiens
cgccagaggggcgcagagccgcagagcagagcgaaaggcgagaaaaccccaaaaaagcgaaggaacacacacacaaaagcgga

SEQ ID NO: 133287 - RNA, 74 nt, Homo sapiens
ggacgaagcggcgaacggaggacggaaggaggacccagaaagcagagaacgaccacggcccgggagagaggaag

SEQ ID NO: 133288 - RNA, 62 nt, Homo sapiens
cccaccgcggagcgggagagacgcggagcaggccgcagagacgggaagcacgccccaaagcg

SEQ ID NO: 133289 - RNA, 72 nt, Homo sapiens
aggaggcgcggaggacgccccaccgccgacgcccccagccaccagcaaaagcggcaggcgacagaggcggcc

SEQ ID NO: 133290 - RNA, 81 nt, Homo sapiens
gcaggaagagaaaccagcccgccccccaaagcgaagccaaagcgaaggcaaaggccaagaaggcagggaaagggccacagc

SEQ ID NO: 133291 - RNA, 81 nt, Homo sapiens
cagccgggacgccgagaaggaggcccagcagcccaggggaaaggaacacccccagcggccagcaaaccagccagcacgggg

SEQ ID NO: 133292 - RNA, 81 nt, Homo sapiens
aaagcgaaagcacaccaagggcagaccacggccccggagaccgggcggaagaaaaagcaagagacgaagcgcccacaacga

SEQ ID NO: 133293 - RNA, 81 nt, Homo sapiens
ggccccccgcgcccgcggcaggcgcggaggggccgcgggagcccgaaagcgaggggccagagaacaagcccagacagcaag

SEQ ID NO: 133294 - RNA, 58 nt, Homo sapiens
gaaggacaacagcaaggacagcaccaagaaacgggagagaccaaagacggccccagga

SEQ ID NO: 133295 - RNA, 76 nt, Homo sapiens
aacaacagaagaggagagaggaacccgaagaagaaaggacgacagccagagaggagcagaagacagagggaggagg

SEQ ID NO: 133296 - RNA, 77 nt, Homo sapiens
gggaggcccgaggaggggacggaggcaacggggacacgcacgagagggaaccccagacagaagacccaggacaacac

SEQ ID NO: 133297 - RNA, 70 nt, Homo sapiens
aaggagcaggcgaacaagggagggaagccggaagcggcaacagcaaagggaaaagaggagacgaagcaca

SEQ ID NO: 133298 - RNA, 76 nt, Homo sapiens
aaaaccagcaagggaccaacgaaagcaccgcacagaccccgcgagcaaaggaggaggaccacaccaaaagagcaca

SEQ ID NO: 133299 - RNA, 60 nt, Homo sapiens
acgggacagcgcgagcccaaaccaagcgcgacaagaaagaagggccaggagggccggccc

SEQ ID NO: 133300 - RNA, 70 nt, Homo sapiens
ccaaaagaaggcccgggaaagcacaaagcaagagacagcgaggacagaaggaaggagacagggaaacgaa

SEQ ID NO: 133301 - RNA, 76 nt, Homo sapiens
ccaagagaaaggagccccccaagaggacgcgggagaaggagaagaagaaaaagaacaccaaacacaacaagacaca

SEQ ID NO: 133302 - RNA, 81 nt, Homo sapiens
cagacagccacgcagacggaaacaaggcaacagaaagagcaacagcagggcaacaggcacagccgccagggcgcggcccaa

SEQ ID NO: 133303 - RNA, 59 nt, Homo sapiens
gcgcacgccccccaccggacggccacagacgggacgggccgagggcgggaaaccagacc

SEQ ID NO: 133304 - RNA, 74 nt, Homo sapiens
cgccgcccgccgcccgccgcaggccacccgggaacggaggaggggaaggagggccccggagcagccacaccacc

SEQ ID NO: 133305 - RNA, 77 nt, Homo sapiens
cggaggaaagaggaagacaccaggcgcggaggagggacagcaaggacacccccccaaaagaaacaggaaggaaaaag

SEQ ID NO: 133306 - RNA, 78 nt, Homo sapiens
ggcgcaggcggggggcgggcacacaccccaagccagagggccagagcggaggaacagccccggggggccaccacacac

SEQ ID NO: 133307 - RNA, 35 nt, Homo sapiens
accgaccaccaaaagcaccgacagcacagcagaaa

SEQ ID NO: 133308 - RNA, 76 nt, Homo sapiens
cccccaaaaccacaaacgccacgcagaacagccaccaagggggcaccgggaaagaaacggagaaaaagaccagccg

SEQ ID NO: 133309 - RNA, 82 nt, Homo sapiens
agcacaacaccggcgcgaggccgacgagggcggagggggcagggcagaaggaccaggggcgacgaggcccagagcaagagag

SEQ ID NO: 133310 - RNA, 54 nt, Homo sapiens
ccagcagacggggacgagggagcaccgaggccggcagaaaccaccacccgaaag

SEQ ID NO: 133311 - RNA, 68 nt, Homo sapiens
agccgccgcggccacaagagggaaaagaggacgaggcgcgaaaaggcaaaggcaagaaagagaaagga

SEQ ID NO: 133312 - RNA, 74 nt, Homo sapiens
gaaaaccaccaccaaacaaacaggagcaggacagacacacaccccaggcaacccgccaagagacaaagcccaag

SEQ ID NO: 133313 - RNA, 67 nt, Homo sapiens
ccaggggaacagcgagcagacaaagggcagaaaagcccggccggagggacggcgcagacaccacccg

SEQ ID NO: 133314 - RNA, 58 nt, Homo sapiens
cacacccggcccccggacgcccggccccccagaaaggacgccccccgcgaagaaagcc

SEQ ID NO: 133315 - RNA, 54 nt, Homo sapiens
agcgccaaaggaggcaacaagggagaagcagcaacgacccgggccagccgccgg

SEQ ID NO: 133316 - RNA, 49 nt, Homo sapiens
aggaccaagaaccagaccgccagagccgaggcacccgacgcgacaggcg

SEQ ID NO: 133317 - RNA, 76 nt, Homo sapiens
aagaaacagaccacagaaggagcaaaacccaccaaacacagcaaggcaacagaacagcgaacccccagagggaaca

SEQ ID NO: 133318 - RNA, 80 nt, Homo sapiens
gcgcgcaccaggcagcaccgcggaggcccagcagggacgagaaaggcccgcagaggagaggagagaggaggcggcagaac

SEQ ID NO: 133319 - RNA, 73 nt, Homo sapiens
gacaccgggaagcgacaagggaggcgaggacggacaaaaggaaacggacgggaggccagccagcagaaggagg

SEQ ID NO: 133320 - RNA, 84 nt, Homo sapiens
cggcgggcggcgcccgaaaggagcggcccggaaggggagggcgaagaaaacaccagcacgacgacaccaaaaagaagagacagc

SEQ ID NO: 133321 - RNA, 86 nt, Homo sapiens
ggaggggcccggagagggggaagggcccaaagccagaagccacaggaaggaggggcaggaacagcagaggagacggcacacagagg

SEQ ID NO: 133322 - RNA, 34 nt, Homo sapiens
cgagggcaccaaaaacaagaacaggccgcgagca

SEQ ID NO: 133323 - RNA, 69 nt, Homo sapiens
accaagccagagcacggaggagaacaagcggagaaaacgaagaccagaacaagagagaacgaaaccaga

SEQ ID NO: 133324 - RNA, 74 nt, Homo sapiens
agacacaagggaaaagggggaggaagagaagacaacgcacaacagggagaacggaaaaaacaaagcgaaacagc

SEQ ID NO: 133325 - RNA, 34 nt, Homo sapiens
ccaacacgagaaacaaaggagcagcagaacggag

SEQ ID NO: 133326 - RNA, 70 nt, Homo sapiens
ggaggcgaacaggaaggggcacgacacagccaccaggggagacagggcagaggacagccgagccaggaca

SEQ ID NO: 133327 - RNA, 90 nt, Homo sapiens
ccggggcacggcagaaaggagccccgcgagggcgcgccggggaagcaccacaggcggacagcgacagaggcgcgcccagcacagccgagc

SEQ ID NO: 133328 - RNA, 86 nt, Homo sapiens
cgcggaccccaagcccgccacgccgcccagcccggccccgcccgcgccggaagagccacgccgaaggagaggccagggagacgaaa

SEQ ID NO: 133329 - RNA, 71 nt, Homo sapiens
gcgcaggccggcacgagagaggagggcaccggcgcacccgggacgaacgccaggacgagccccagaagcgc

SEQ ID NO: 133330 - RNA, 65 nt, Homo sapiens
gaccagccaaaaaggcacccgaagaagcagggcagagaaaaaaaccagagggcagacccagccag

SEQ ID NO: 133331 - RNA, 36 nt, Homo sapiens
caggagcaaccaggacccaggggaaaaacccggaca

SEQ ID NO: 133332 - RNA, 75 nt, Homo sapiens
gggacccccccgcggcaggaacgcacccggcggccccacgcagccacccaaaaacaggcggaagcagggcggacc

SEQ ID NO: 133333 - RNA, 74 nt, Homo sapiens
gaccgcaggaagaagcgaagagggaaacccagacgacaaggaaggccaagggacccacgaccaaccaagaaaac

SEQ ID NO: 133334 - RNA, 73 nt, Homo sapiens
ccgggagagcaggaccgaggcccagaggaagaaaagagccgcaacggaaaacaaagcccggaaaagaccgagc

SEQ ID NO: 133335 - RNA, 62 nt, Homo sapiens
cgacaagcacacacaggcgcgaaacggaaaaaggggaaaaagaaaagggcgaagacccgaag

SEQ ID NO: 133336 - RNA, 72 nt, Homo sapiens
caacagagaagagcccaaaggggcaacgaggaacaggccaagaaacaacacagccaaggccagcgccacggc

SEQ ID NO: 133337 - RNA, 64 nt, Homo sapiens
gaaggacggcccgacggaaggaacgcccacgaccagcaccaccgcaaccaggccaaacgccgcc

SEQ ID NO: 133338 - RNA, 92 nt, Homo sapiens
acgcggaaggcgacacaggggcgagggaaggacaacggaaacacgagacaggggacacgaacccgaaacaggaacaccggaccccagaacca

SEQ ID NO: 133339 - RNA, 77 nt, Homo sapiens
gaaaaacccgcggcccaacccacggcacaggccaggacacgccacccaaccagacccagccaccccaccaccggacg

SEQ ID NO: 133340 - RNA, 72 nt, Homo sapiens
caccgcccagaccagagggagaaaaaaaaaacccagaggcaaggccacgcgcagagcgaacaccaccgcgaa

SEQ ID NO: 133341 - RNA, 78 nt, Homo sapiens
agcacaaacggggcggggccggggaacacacagagagaaccgagccaccgcaacggaggcgaaccggcaggagaaagg

SEQ ID NO: 133342 - RNA, 79 nt, Homo sapiens
agaagagcgcgagaggacgggacagacggcggaaaacccgaagcagaagcccgacacaggcacaagaccgagcaggcac

SEQ ID NO: 133343 - RNA, 58 nt, Homo sapiens
gaagcagaaagaaaagacgcccagagaagagacacaaggcagaagcccccggggagag

SEQ ID NO: 133344 - RNA, 58 nt, Homo sapiens
ccccgccccaccggagcacggacaccagaagaccagcagggagagacggggcgacggg

SEQ ID NO: 133345 - RNA, 55 nt, Homo sapiens
acaaaacaacaagcaaaagaggccggacccagcagggcccccggaacaaacccgg

SEQ ID NO: 133346 - RNA, 78 nt, Homo sapiens
cgagaggaggaaacagcgcggagaccccagacccccagcgcggcacaagcccacccagagagagaagaacaaggcggc

SEQ ID NO: 133347 - RNA, 66 nt, Homo sapiens
ccaccagaaaagggagcccaccacgaaagcagcaacaggcacgacagcgagccagacgaaacagcg

SEQ ID NO: 133348 - RNA, 66 nt, Homo sapiens
cgccgcgcagcgccaggagggcaaaggagaacgagaccaacgagaaagcaaggaagcaggaaaacc

SEQ ID NO: 133349 - RNA, 76 nt, Homo sapiens
gcacaggcccgggcgaaggggccacgcgaggagagggcgaaacggggcgggcacgcaggagcagcacggcgaagga

SEQ ID NO: 133350 - RNA, 73 nt, Homo sapiens
aacgacacggcggaaacgacgcaggaggcccgggaggagcggggacacgaggaccccccaaaggccccaacca

SEQ ID NO: 133351 - RNA, 79 nt, Homo sapiens
gccgcagaagagcggccggagcgaggggcggaccgcgggcgcccacgaccaggacaaaacgcagaaacagagccccagc

SEQ ID NO: 133352 - RNA, 79 nt, Homo sapiens
gcaccggaacagacgcaggaagggaaagggagcagcaccggccacacccacagcacgaccggaacccagcgaccgacgc

SEQ ID NO: 133353 - RNA, 81 nt, Homo sapiens
ccaggagccaaacaggcccaccaggaagaccaggaccacaagagaaacaccaggccacagcccgaagagagaacacaggga

SEQ ID NO: 133354 - RNA, 63 nt, Homo sapiens
cacgaggcgcacaccgccagcccaagaaaaaggaggagagcaaaagacaacacccagaaacag

SEQ ID NO: 133355 - RNA, 76 nt, Homo sapiens
caaacacgggacaaaaaccagaccagagagcggaagccggcagaagaagacccaccaaggggcaacccaccgcccg

SEQ ID NO: 133356 - RNA, 81 nt, Homo sapiens
ccggcccggcacagggagccccccaagagaacccagggggagccacgccggagcgggcaccggcgcggacccaccggagcc

SEQ ID NO: 133357 - RNA, 74 nt, Homo sapiens
cgaggaccagcagaggccagcacgagaacccaggggacgaagggaacccgccgggcggcccggcacccagcccc

SEQ ID NO: 133358 - RNA, 73 nt, Homo sapiens
ggaacccagacccggaccagcgggaccagagccaagaaagggagggggaaacagccaaggccgaggagagaag

SEQ ID NO: 133359 - RNA, 105 nt, Homo sapiens
ggacaccagcgaaggccagcagcgggcgcaggaaggccaccgacaggaagacacgagaggcgagggacgacagagcaagcggcagagggcaagcgggaaaaagac

SEQ ID NO: 133360 - RNA, 76 nt, Homo sapiens
gcagaccaaagaagacagcggaagaacgacccaaacaggacacagaaacaaggaaggacaccaaaaacgcacagaa

SEQ ID NO: 133361 - RNA, 66 nt, Homo sapiens
aaacgacaaaaacgacgcaaggccagcacaaagcccagccacaggcaacgaaaacaacgagccaca

SEQ ID NO: 133362 - RNA, 92 nt, Homo sapiens
acagcgcgagcccaaaccaagcgcgacaagaaaggcaagagccgcagagaaagcgcgcgacggacacccaaggaggacagcgcgggagcccg

SEQ ID NO: 133363 - RNA, 64 nt, Homo sapiens
cccaagagcaggacaaggaacaggcagggccaggaacaacgacaccagaggacgcccggcagaa

SEQ ID NO: 133364 - RNA, 85 nt, Homo sapiens
ccgagccccgaggaggcagagcacaaggagaggagaaagaccacagcaagaccacgcccccagccgggggaccaggccgaacgac

SEQ ID NO: 133365 - RNA, 80 nt, Homo sapiens
aaagagcaacgcaaagagaagccgaggcacggcaaaacacaagacaagcaggagaaggaagcgcgaagaaccaagaaaag

SEQ ID NO: 133366 - RNA, 75 nt, Homo sapiens
cacggaaaggaggaagaagacaccggggacagacagggggagaacacacgccgacacacaagaaggggagagaaa

SEQ ID NO: 133367 - RNA, 61 nt, Homo sapiens
gaacgaaagcacacgaagacgaaggagacgcaggagggagagcagccagaggaagaagagg

SEQ ID NO: 133368 - RNA, 62 nt, Homo sapiens
accagcccgaaaaagggaaagccaggaacaaggcagcagaaacgggagaccaaaagaaaggg

SEQ ID NO: 133369 - RNA, 83 nt, Homo sapiens
gaggaaggaggaggcacccacaggcgcgggaggagagcaaagccacagaaaagaagaccaacgaccgcgcgggagaccacagg

SEQ ID NO: 133370 - RNA, 82 nt, Homo sapiens
agaacaccacagaaagaccgaagacaaaaaccagaagacaagcagcgggaaaagcacagggccaggaagcagagggacagcc

SEQ ID NO: 133371 - RNA, 57 nt, Homo sapiens
cagcagcaaacggacccagaagcagaaagagcagggaagaacaggcagcacaggcac

SEQ ID NO: 133372 - RNA, 72 nt, Homo sapiens
aaccgggaaagcccggggcagggaggggcagcagcaggacagggaacccgggagacagcaacagacggagga

SEQ ID NO: 133373 - RNA, 72 nt, Homo sapiens
gaggaaacaaagcccgccaacggaggacccaagcagggcacaggaacagacacagaggaaaaagacaaacca

SEQ ID NO: 133374 - RNA, 80 nt, Homo sapiens
cccggaacccccccgaacgcgagggagcgcaaccaccaaggaccagaggagaaccagccacccagcaagcagggaagcca

SEQ ID NO: 133375 - RNA, 55 nt, Homo sapiens
agacaagcacgccggagggaagagcgagggagaggcgaccggcccgaggaccgcc

SEQ ID NO: 133376 - RNA, 72 nt, Homo sapiens
gcagaacacacaaaggcccccccagggaagaaccacagcccggggggacaacaccaacaggaagcgccagag

SEQ ID NO: 133377 - RNA, 71 nt, Homo sapiens
aaggaagccaagaagaaggagcacaaacgcaagaaccacccggcaccaccacccccagccggacaagcagc

SEQ ID NO: 133378 - RNA, 78 nt, Homo sapiens
gggaagaaccgccaaagaggaaaccaaggcacagggagaggaagagaaagcagccggaaagagacagcagacccaaga

SEQ ID NO: 133379 - RNA, 76 nt, Homo sapiens
gcaaccgggcaaccgagggagccagggccgagaagacagcacgacgcccaggaaaaaacggaacgggaagggacag

SEQ ID NO: 133380 - RNA, 56 nt, Homo sapiens
ggacccccccaccacccccaacgaaaggagggaagcggacacacaggacgagaaac

SEQ ID NO: 133381 - RNA, 80 nt, Homo sapiens
ggcagccgccgcacgcccccgggagcgcgggcaaaagacaggacccagcgagccagggaaacaacgaaaccgcagaggcc

SEQ ID NO: 133382 - RNA, 82 nt, Homo sapiens
gcggcgagccggagcgcggagcccggccccgcaccaggaggaggacgacagcacggcgaagccggccacagccacccaggcc

SEQ ID NO: 133383 - RNA, 78 nt, Homo sapiens
ccaacgaggccaggacagagagccagcaagccccagaacaaccacccaaaccgccaggacacgacgaccgaaacaaga

SEQ ID NO: 133384 - RNA, 59 nt, Homo sapiens
cgggccggcccccaccagagaccggccaccagcagccaacagaggaaggaccacaccca

SEQ ID NO: 133385 - RNA, 80 nt, Homo sapiens
gcgggcggagacaggaccgcggcgagcaagaaaaacacggggacgagaagagcgagccagcaccaccacgagccacggcc

SEQ ID NO: 133386 - RNA, 75 nt, Homo sapiens
gcaaggccaacacacgccccggcgccgaccagacggaaggcacccacaaagggcagagccacgccgcaaaaccac

SEQ ID NO: 133387 - RNA, 74 nt, Homo sapiens
gaggaggcgccgcgcaggagcacagagcgggaagaggcccgaaagaaacccgaaaacccaagggccccggcaaa

SEQ ID NO: 133388 - RNA, 63 nt, Homo sapiens
ccggcccacaaagcaaaaggaaggaaaagaaagaaggaccccaaggaaaggggaaacgggagc

SEQ ID NO: 133389 - RNA, 71 nt, Homo sapiens
ggaggggaggcaaagggaggaggaggaccggaggaggcgccgcccgggggacccacagcggaccccaggag

SEQ ID NO: 133390 - RNA, 108 nt, Homo sapiens
caacacgggaggaacggaggaggaggggcgaagacgaaagagcgaagggggcagggaaaagagcccagagcacaagcagaaaaaggaaaagaccacagaagcagaaag

SEQ ID NO: 133391 - RNA, 81 nt, Homo sapiens
cgcggacagagcagacagaacagacaaggggacacgcaccagaagaaaggagagagccgaaagagaaaagcgcgcgcaaaa

SEQ ID NO: 133392 - RNA, 40 nt, Homo sapiens
ggaaacgacagaagcagagaacaaaaaggggaggcccccc

SEQ ID NO: 133393 - RNA, 84 nt, Homo sapiens
cccgccggggggcagggccacgcgcagagcccggccaggagggggccacaccgaacccagccgggaggccaaggccagggagcg

SEQ ID NO: 133394 - RNA, 79 nt, Homo sapiens
ccaagaggagccccggggaacccgcagcacaccagggggcaggcccggacaagaagagcaccccggggaaacaaagccc

SEQ ID NO: 133395 - RNA, 82 nt, Homo sapiens
gccacggcagacacacaacccgacccgacgaaggggcaaggggagaaaccacagaaaggaaacaaaggacagaacgggaaga

SEQ ID NO: 133396 - RNA, 55 nt, Homo sapiens
aagcacaccgccaaacccaggccagagcacagaccgcccacaggaaccaaccccc

SEQ ID NO: 133397 - RNA, 73 nt, Homo sapiens
cagcggcgcagcgcccgccgcggcccgggcccccccgccggaaacaggaaggaagcagccaccccgccaggcc

SEQ ID NO: 133398 - RNA, 84 nt, Homo sapiens
cggcgccgcgcgccgccgccgcccgggcgggagccaggagcgacgcaccgccaggcaggcacaaagggaggaaacacaaccgac

SEQ ID NO: 133399 - RNA, 70 nt, Homo sapiens
gcacaacaggcagacagacaacagagcaaggggagacaaagaccaccaaaaaagcaagagaccacccaga

SEQ ID NO: 133400 - RNA, 61 nt, Homo sapiens
agaggcgcagcccaaggaggaggaggccagcagaaagcccgcgccgaccccgccgcccccc

SEQ ID NO: 133401 - RNA, 77 nt, Homo sapiens
cagggcccacgacacaaacggaacgccgcgcgaggacgcgggagggccaaaaccaggcgagaaccaggagaagcggg

SEQ ID NO: 133402 - RNA, 76 nt, Homo sapiens
accacgagcccgacccacgggcggcggaggcaaccgcccagcgacagagcgaagagggagacgcgcacggaccgga

SEQ ID NO: 133403 - RNA, 77 nt, Homo sapiens
cacccggagaaccccacggagaaccagaggacccaaagacaggaccacgcaccagcagagaaggaaagcaaaccgaa

SEQ ID NO: 133404 - RNA, 40 nt, Homo sapiens
ggcaagcccccgggcccggacccaggagaaggaccagacg

SEQ ID NO: 133405 - RNA, 71 nt, Homo sapiens
caagcccaggccggcagccggggcgaccacacgccgaggcgccagacgcagaaaagaaaagaaccaaggac

SEQ ID NO: 133406 - RNA, 89 nt, Homo sapiens
gcaggacccgcgaacccgacccaggagccgaaggaggccgcccaggccagccgcacgcgggcaggccagaagcggacccagaagagggg

SEQ ID NO: 133407 - RNA, 78 nt, Homo sapiens
cgagagcggaccgagagcgcgaaacgcacgagaaggcacgcggaaaaaagagcacagaaacacgagagcaaaagacga

SEQ ID NO: 133408 - RNA, 59 nt, Homo sapiens
caagccagcccgggaccgagaaaaagccgagagaagaacagggaggaaaaggccacaca

SEQ ID NO: 133409 - RNA, 71 nt, Homo sapiens
gcacacaccggcagccacagcccgaagcggcaagaaggccacccagaggagaaggccaccccgccggaggc

SEQ ID NO: 133410 - RNA, 59 nt, Homo sapiens
gaccaagcaggagaaccgaccgggcggagaacggaaaagcaccaggaagcagagaggac

SEQ ID NO: 133411 - RNA, 81 nt, Homo sapiens
ccagaagggagaggaaagccacagagccaagaagagagaagcgagagcgccaagaaacgaaaagagacagcagggcaaaac

SEQ ID NO: 133412 - RNA, 81 nt, Homo sapiens
accgaaggggccagacccacccggaagaagcaggcccagcacaaaacacagacaaagaacgcacgcagaaccagccgagcc

SEQ ID NO: 133413 - RNA, 70 nt, Homo sapiens
agccgccgcacaccggccccacgcacgacgagagggacagcacggagcacccgaagaagacaagacaggg

SEQ ID NO: 133414 - RNA, 81 nt, Homo sapiens
ggacgggggaccaaggccgagagccggaacaaacgagggcccgggaggaccgacgcagccagacaacaggagcgggacgga

SEQ ID NO: 133415 - RNA, 75 nt, Homo sapiens
cgccacggaccgcgggacaagaaaacagcggaaagaccacagcaagaccacgcccccagccgggggaccaggccg

SEQ ID NO: 133416 - RNA, 75 nt, Homo sapiens
gagaggagggagaaacagcaaccggcaaggaaaccaccaaaccaaaaccagccagcggagcgaggggaagcgccc

SEQ ID NO: 133417 - RNA, 75 nt, Homo sapiens
ggcggggcggagcgccgggccgcgcagcgccgaacgacgggccacagggaggcgggacaccaggacacaggaagg

SEQ ID NO: 133418 - RNA, 80 nt, Homo sapiens
gggagcccggcgcccgcggccagccgcaagacccgccacaagcaacgcgggaagagaagccagacacaagcccggagacg

SEQ ID NO: 133419 - RNA, 100 nt, Homo sapiens
gagaacacaggaaccgccccgagaggaaacacccccagaagagaggaaaccagcagcagacggacccgcgaaggggagagaagcccgagaccgcggcccc

SEQ ID NO: 133420 - RNA, 70 nt, Homo sapiens
gagacagaaaaggcaaaggacagccagccgccaccccggcagagcaggcgagaggacacagaagagacag

SEQ ID NO: 133421 - RNA, 105 nt, Homo sapiens
gcggggcagacaagaagcggaggcaacgaggccgagcgcgcggcgccgcaacaaagcagacaccagggcaagcggccagcaaagaacacagccacgggcaaaccc

SEQ ID NO: 133422 - RNA, 80 nt, Homo sapiens
gcgacaagccgcggcagccgcggaccaccgccgccaggacacgagaggcgagggacgacagagcaagcggcagagggcaa

SEQ ID NO: 133423 - RNA, 71 nt, Homo sapiens
cccaaggagccacgcccgagagcccgagccacgcagggcggagaacggaaaagcaccaggaagcagagagg

SEQ ID NO: 133424 - RNA, 85 nt, Homo sapiens
gcaagacccaagaagaagaaggcgaaggaccccaacggggaggccaacggaagaacacgagagacaaggaggggcgcgccgccca

SEQ ID NO: 133425 - RNA, 81 nt, Homo sapiens
ggccgcggacgaagaggcgaccgccagacggagcacacggacaagcggggcccgagggaaaggacacagaggcgcgagccg

SEQ ID NO: 133426 - RNA, 74 nt, Homo sapiens
ggcagaaaccaggcaggcacacgaaggcgcccggccaggagagggaccagagggagcggaagcccgagagccaa

SEQ ID NO: 133427 - RNA, 76 nt, Homo sapiens
gagggcagacgccccggcaaaaaaagcgaaaccggaccaagaaaaaacaaaagcaaaaaagaagcaacacaacagg

SEQ ID NO: 133428 - RNA, 77 nt, Homo sapiens
gacgacaggcgaggaagggacacgccagacccaaggacaacaggaggacagagaagcagcgcacgaacaagagaaca

SEQ ID NO: 133429 - RNA, 81 nt, Homo sapiens
ccaagcccgggcaaacgaccaagcccaaacccaagaggggggaaggcagaagaaacacaaccaggaaccagcaaggacgaa

SEQ ID NO: 133430 - RNA, 77 nt, Homo sapiens
ggcggcgacgggggggacgagcggagcccgggacaggaggcacgaagacagccccaacagacgagaagcaaggaagg

SEQ ID NO: 133431 - RNA, 69 nt, Homo sapiens
ggcagcgggccggcgccggcgcggcgcgggacaaccaacacaaccaaagagaagaaaacgcaaagaaca

SEQ ID NO: 133432 - RNA, 97 nt, Homo sapiens
gagcggcgagggaaaagcgaggcaaggcaggcgggggcgaaagacggaaaggcccagaggacgaccgccgaagccacgacaaccaggcaacaaagcc

SEQ ID NO: 133433 - RNA, 79 nt, Homo sapiens
caccagcggcagagcgcggaggagccgcgagcgcgaggggaggccgggagccgaggggaccaccacacgaaaccaagga

SEQ ID NO: 133434 - RNA, 78 nt, Homo sapiens
cgccagaccccggagacagccccacagccccgagaccggacgcccagacaggcgcccagggaccagagacgaaaccac

SEQ ID NO: 133435 - RNA, 76 nt, Homo sapiens
caaccgagagaaacacaaagaaaacgagggaggagcaaaaagaaaaaaaagaacgcaaaacacaaaacgcggaaag

SEQ ID NO: 133436 - RNA, 113 nt, Homo sapiens
cagcaggaggggggagcggccaacccaagggccccagcccgggcccccaacgagcacaccgacagagaacccaggccaacacacagacagaggcagccaccccagacgaaccg

SEQ ID NO: 133437 - RNA, 81 nt, Homo sapiens
ggcgcgggggacgggagcggcagccccggcaaccagggaccaggaggaaggagcggagaggcaggcggagcgacgaaaaag

SEQ ID NO: 133438 - RNA, 80 nt, Homo sapiens
ggcagggggcggaacaaggagccggagcggggcaaaggcgaacaaggaaaggcgcgagaagaggaacaaggagaccagaa

SEQ ID NO: 133439 - RNA, 75 nt, Homo sapiens
cccaaggggcggaggcagagccgcggggcggagaacggaaaagcaccaggaagcagagaggaccgcagaagggaa

SEQ ID NO: 133440 - RNA, 47 nt, Homo sapiens
gcacgaaaacggaaagggaaggggggaaggaagggccccacaccaaa

SEQ ID NO: 133441 - RNA, 74 nt, Homo sapiens
ccgcgggagcaacccacaaggaagaagagcagagcggagaagccccaacaaagaccagcaacaggcgcacgagg

SEQ ID NO: 133442 - RNA, 77 nt, Homo sapiens
acggagacaagcagaggggaaccccgccagacagccagacaggaggaacaggaggaccgcagccagcagagacagcc

SEQ ID NO: 133443 - RNA, 76 nt, Homo sapiens
cccaaaccacaggaagggacccacacggcgcggacaccagccgggaggcggcaagcggcccagccacagggcccca

SEQ ID NO: 133444 - RNA, 75 nt, Homo sapiens
ggaggggcccgcaggaaggacggaccaggggcagcggccggaccccagaagcgagccccggggcggggcaggccg

SEQ ID NO: 133445 - RNA, 69 nt, Homo sapiens
gcggagcgacgccgacggggaaaacagaagaccccgcgcaaagggaaaaaacggaggaaaagaacaaag

SEQ ID NO: 133446 - RNA, 103 nt, Homo sapiens
cacgacgggcaaagaggccacagaggcagccaaggaaccgcggcagaaaaggggggcggccccacgggaaacaaaaagaacaccagacaaacccaggccagca

SEQ ID NO: 133447 - RNA, 84 nt, Homo sapiens
cgagcgaggaggccgaggccgggaggccggcccggagggccacacaggaacggccccagaaacaacaaaacacaaaaggagagg

SEQ ID NO: 133448 - RNA, 73 nt, Homo sapiens
acacccaaaacacaggaagaagggcgccaggcggccagacaccccacacaggcggaggcagggcaagaccggc

SEQ ID NO: 133449 - RNA, 67 nt, Homo sapiens
agccaccgaccacaccgcccggggccgggcagcgagcccacacaggccacgaacgacgcacggaggc

SEQ ID NO: 133450 - RNA, 78 nt, Homo sapiens
ccaccgccagggacccaccccgggggagcaagaaggaacaggacggacgagaagccaggacaggccaacaagaagggg

SEQ ID NO: 133451 - RNA, 90 nt, Homo sapiens
cgacgcaccgcaggcagacaaaagggccaaagaagggagagaggggacccggacaagcaagggggaaaaagcgcaagggcaaaaaacgac

SEQ ID NO: 133452 - RNA, 73 nt, Homo sapiens
cgcgagaggaacaagaccaaccaacgaggaagaagacagaagagcccgcgaacggaagcggagcggacccagc

SEQ ID NO: 133453 - RNA, 86 nt, Homo sapiens
accgggaacgggacggggaagcaggggaccgggagaagcacccacaaaacagcaccccggaggagccggaccccgccccccgaggc

SEQ ID NO: 133454 - RNA, 84 nt, Homo sapiens
gaaaacggaagcgcagggagaaggaagaggggaaaagggcaacccaacaacagccaccgggacacccgcaggccggggcagaca

SEQ ID NO: 133455 - RNA, 77 nt, Homo sapiens
gcacgcccagagcacccacgcccgacgcccgcgggccagaccagacacaagcaggacccaaagacaggaccacgcac

SEQ ID NO: 133456 - RNA, 61 nt, Homo sapiens
ggcacagggcaggggggacgacccgacggacgagcggccgaggaccgacgacgccgccacg

SEQ ID NO: 133457 - RNA, 79 nt, Homo sapiens
gcgaaccagaccaaaaacgcaacaacagacggggagcagcggaggaagccacaggacgccggggaccgacaggccacag

SEQ ID NO: 133458 - RNA, 79 nt, Homo sapiens
gagacccagagcccgggaacgggagaaaaacagcacacagccccgacaagggaccgggcgggccccgcaggaaaccccc

SEQ ID NO: 133459 - RNA, 65 nt, Homo sapiens
ggagaaacacccgccgagagaccggaacgaccaagcacaccacaggaagagcaagaaggaaggga

SEQ ID NO: 133460 - RNA, 77 nt, Homo sapiens
ccaggcaccacgaccaggaccaacaagcggccaaccgagaccgcgccaccccaaagaaggggccgcaacgcgcacac

SEQ ID NO: 133461 - RNA, 75 nt, Homo sapiens
gaggcccacagcagcacagcaacggacgaggagaacaggaacccggccgcacgcccgcgaaggccaacagagcgc

SEQ ID NO: 133462 - RNA, 77 nt, Homo sapiens
aggacgccggagaccggcgccggcgacgcccgcgaggagcaaccggacgaccaaggggccaacccgaaaaggccaaa

SEQ ID NO: 133463 - RNA, 75 nt, Homo sapiens
cacacaggagcacacccaggacagacagccccaggagaaacggcagacccaccgaccaacaaagaaacaacccaa

SEQ ID NO: 133464 - RNA, 77 nt, Homo sapiens
accagccacgcagaagagacaaggaccacagccgagcgagagcaggaagacggcgaacacagaagacggaccgcagg

SEQ ID NO: 133465 - RNA, 78 nt, Homo sapiens
ggacgcgggccgcagcgcggagcagaaagcagaacccgcagcaacggggcggcacacaaggagcgaagggcagggaga

SEQ ID NO: 133466 - RNA, 39 nt, Homo sapiens
ccagccgacccgaaacacccccccaggcagcagcagcag

SEQ ID NO: 133467 - RNA, 134 nt, Homo sapiens
gacaacgccgagacgagaagcagcgcggcgggacaagcgcgacgcccggcgcgagccaagcgcgcgccggagccccgcagaacaggaaggaggccaacccacaccccgacgccggcgcgcccccgagccaacgg

SEQ ID NO: 133468 - RNA, 81 nt, Homo sapiens
cggaggagacacggcccgcaggcgccgaagaagggaggaaccaaaagagaccggggacgcccagcaggggcgaaggaggcc

SEQ ID NO: 133469 - RNA, 90 nt, Homo sapiens
ggcaacagggggagacaagcggaacaggagccgacgacccggaccaagaaggggaggcccgcggcaggcaagcacgaggagcggcaggac

SEQ ID NO: 133470 - RNA, 96 nt, Homo sapiens
gggggcccgcggcgcccggcgcgaaggggaacaacagcaccaccaaccgacgccggggagggccgacagcaaccccagcagacgaccccgaccccg

SEQ ID NO: 133471 - RNA, 83 nt, Homo sapiens
gaaggcagacagcgagggcgacgagcagaaccggccacacccaggaccggaacacccccacagacccgagccaggaggggcgg

SEQ ID NO: 133472 - RNA, 68 nt, Homo sapiens
cccgggcacagcacgggagaagccccgcacagcagagagcaacccgaaaaggggaaaacaggggggac

SEQ ID NO: 133473 - RNA, 61 nt, Homo sapiens
gcaggaggagagcaagcgagcccggaaaaccaaggaaaaaagcagaggaggcacagagaga

SEQ ID NO: 133474 - RNA, 80 nt, Homo sapiens
gccccacacaaggccacgggggccccggcccacagcaacggggaggcgggccaacaagagagaggaccagaaccagaccg

SEQ ID NO: 133475 - RNA, 71 nt, Homo sapiens
caaccaaagcgccaaagaaaaggacggaagcaaagggcagccaccgaagacagcgaccagacaacagccag

SEQ ID NO: 133476 - RNA, 67 nt, Homo sapiens
aaaaccgacaaggccggaagaaaaacacgccacacgggcgcaagaacacgaaagaacccgaacaccc

SEQ ID NO: 133477 - RNA, 76 nt, Homo sapiens
cgcgcgccggagcaacagaaaccagccgccgccccggggaggagcgcacagcacagccaaaaacagaaaccacgcc

SEQ ID NO: 133478 - RNA, 77 nt, Homo sapiens
aagacccgaccccgcaacccagaacccggcgaccacgaaggaggagcccagcaggcacgggaacaaagcagcgccag

SEQ ID NO: 133479 - RNA, 79 nt, Homo sapiens
cgggcgcgcaggagagcggcaacaccgggagaaacagaaggggaaggaagggaacacggacgacgagacacgaccaaca

SEQ ID NO: 133480 - RNA, 111 nt, Homo sapiens
ggaagcggaagacggcccaaaacacagcgcaccacacacagagggaaacggaaaggcacccccccacaacaaacaccgaccgggagaccccgcaccaagaccagccaccga

SEQ ID NO: 133481 - RNA, 83 nt, Homo sapiens
acaagcagaaaaagcggcagcgagaccgcaggggaaaggcaggccgccgccaccgcccacccccacgcgggcccggccccccc

SEQ ID NO: 133482 - RNA, 70 nt, Homo sapiens
ggaacacccaccccaaccccgcagaaaggccgacaaccccgaaaccaaagagaagcagcgaagacagaag

SEQ ID NO: 133483 - RNA, 82 nt, Homo sapiens
aggcgcgggagccgcaccaccaacgcggccgacaacagccggcgccgccacgcacacccgccgggcaaacggacccccgccc

SEQ ID NO: 133484 - RNA, 61 nt, Homo sapiens
cagagcagggacagcaaacgcgaaagagccaggggggacacaccaccgggaacaagccgcc

SEQ ID NO: 133485 - RNA, 81 nt, Homo sapiens
ccgcccgcacgaagagagcgcgaccaaagacgacaagacccagagcgcagaaagcagaagcaaagaaaaagaaaagagaaa

SEQ ID NO: 133486 - RNA, 117 nt, Homo sapiens
ggcccccgcccccacccacagggagcccccgccaggaccagggcgcgacggccagcggggcaggaggcgacgacgagagggaggaggagaagggcagagacggagaagccgaagagg

SEQ ID NO: 133487 - RNA, 61 nt, Homo sapiens
aaagggacgcaagaaacccaggacgagaacagcaacaggggagagcacaagcgaaaccagg

SEQ ID NO: 133488 - RNA, 79 nt, Homo sapiens
cccgagcagccagagcggaccggggcagaccaaacggcaaggacccccaaggaaggggagaggacgcccgagcgacaca

SEQ ID NO: 133489 - RNA, 61 nt, Homo sapiens
gagcgaggaggaacgcgcaaggcaaagcaccggcggagagaccaggccaggggcgccaaag

SEQ ID NO: 133490 - RNA, 75 nt, Homo sapiens
ccggagcgccagcgggcccgacagggaggagcggagaacagggaacgggcgggaacggccggggggcgagcgacc

SEQ ID NO: 133491 - RNA, 43 nt, Homo sapiens
cccgacgcgggcgaggccacggccccaaggacgccccccaagg

SEQ ID NO: 133492 - RNA, 75 nt, Homo sapiens
gggccggcgaaccggcccgacaacacagaagggaacaagcggacagaaaaagagaacaagccccggccagaaaga

SEQ ID NO: 133493 - RNA, 75 nt, Homo sapiens
accccggaacagcgccgaggcccaaggcagaggcgaggcggaagggcaccccacccggaccgacaagacggaaac

SEQ ID NO: 133494 - RNA, 58 nt, Homo sapiens
ggggcacccacaagcgcacgaccaccaaggcacagggggacgaaacgaacgacagaaa

SEQ ID NO: 133495 - RNA, 75 nt, Homo sapiens
gcccggggagggcagcgaacgcagcaccggaccgagcgaggcacagccaacccccaagagccacagaaaagaaca

SEQ ID NO: 133496 - RNA, 75 nt, Homo sapiens
cggaaagcaggagcacaggaacagagccgacaggcacgaagaaaaggaaaacccacgcgggggcgcgggagaggc

SEQ ID NO: 133497 - RNA, 74 nt, Homo sapiens
aagacccaggacaccccgaagccgagaaagcccaccacaaaccaaacgagcaagaaggagcgaggcagagccac

SEQ ID NO: 133498 - RNA, 55 nt, Homo sapiens
ccggcacccgccaccgaggagcagcgcaacgagacacagcggccccagcagaagg

SEQ ID NO: 133499 - RNA, 64 nt, Homo sapiens
ccgacaaaaaagcaggaggcaagaaaggggcccggaaaccaagccaacgggagcaccgacggag

SEQ ID NO: 133500 - RNA, 77 nt, Homo sapiens
gacgcgggcgcgcggccccgcgagcgccggagcagcaaaagagccaacacccaggccaggccgcccggaaggaggcc

SEQ ID NO: 133501 - RNA, 66 nt, Homo sapiens
accaacaggacccagaagagaaagagcaggagaggagagccagagaaggacagggaagcacaggac

SEQ ID NO: 133502 - RNA, 77 nt, Homo sapiens
cgcgcagcggccccggcggggcaagagcgggggcgggaccccgccgcggcgggagggaggaacgagagaagcgggca

SEQ ID NO: 133503 - RNA, 50 nt, Homo sapiens
acaggaaaggagggaagccagaggccaaaggcaggagaacaaagggcaaa

SEQ ID NO: 133504 - RNA, 66 nt, Homo sapiens
acagaaggagcagcgaaaaacccgaccccccaagcaggaaagcgggaacgaacaaggcgacccaca

SEQ ID NO: 133505 - RNA, 76 nt, Homo sapiens
ccccccgccgcgaagcacacgccgccccgacgcgagggcagccccgccagggcaggagagcgcagccacgaaaaag

SEQ ID NO: 133506 - RNA, 60 nt, Homo sapiens
caaacacacgcaaaggagaaaggaaccgacaggaaggcaggagccagcaaccaaacaaag

SEQ ID NO: 133507 - RNA, 86 nt, Homo sapiens
gaaaggccagggcagaggccccgaggacaaagccggaggcagaagcaggaaaccagagggagagccggcgcaggcggaggagcgca

SEQ ID NO: 133508 - RNA, 73 nt, Homo sapiens
gccgggaagcggccaccgacacgcagcagcggccagggagcgcgcaaggaagcgcgggggcaggccgggcgac

SEQ ID NO: 133509 - RNA, 68 nt, Homo sapiens
gggacaaggcggcgaccacacccagacagaacagaggggaagacccaaggaggagacgacaacaaaac

SEQ ID NO: 133510 - RNA, 70 nt, Homo sapiens
acgccggagaggaccaaggagggagcgggaaacgcacaacagagaacagaaaagacccgcagacaacggg

SEQ ID NO: 133511 - RNA, 72 nt, Homo sapiens
gaagagaaggaaccgggggaaaaacccacaaccggggaagacggcaaggaacgggccaggaaggaccagcca

SEQ ID NO: 133512 - RNA, 78 nt, Homo sapiens
caaggccgggcaggaccggccagggacaggcacgcagcggccgcaaccaagcgggcacccccggccccgcgcccagcc

SEQ ID NO: 133513 - RNA, 68 nt, Homo sapiens
ccaggccacagacgacccccgggcacaaccagccggaaggcacaggcaaaagaaggggagcaggggcg

SEQ ID NO: 133514 - RNA, 35 nt, Homo sapiens
agacagcaaagagaagaagccaaaagcagggacgc

SEQ ID NO: 133515 - RNA, 71 nt, Homo sapiens
gcagcgggaacagggccgcaccacacccggaggcccacccgacgcggagcgaccggcacgggcggccgaca

SEQ ID NO: 133516 - RNA, 40 nt, Homo sapiens
gggccagagggaaggacagggaaccaggagccgacaacaa

SEQ ID NO: 133517 - RNA, 80 nt, Homo sapiens
gcaaggccgggaaacaaagggaggaacggagccccgccagacgccccaaacaaacaaaagggagccccaacccacgaagc

SEQ ID NO: 133518 - RNA, 69 nt, Homo sapiens
ccccgagggccccagacaaaaagacccagacacacaagggggaagccaaaaccaaacaagaccaagaga

SEQ ID NO: 133519 - RNA, 66 nt, Homo sapiens
ggaaacaaaaggcgaaccggggagcccaggcgcggcaagccagagggggaaggcccagacagggcc

SEQ ID NO: 133520 - RNA, 65 nt, Homo sapiens
gcccccagggccacggcagcgggcgcggacgaacgaaccacggcaacagccggggagggcggacg

SEQ ID NO: 133521 - RNA, 72 nt, Homo sapiens
acgcggaaaggaggcgcgcccggcgccccaggacaggacgggggaaggagcgggacgagacgacaaggaaac

SEQ ID NO: 133522 - RNA, 75 nt, Homo sapiens
ccaaggccgagacacgaaacggcgagcccagaacgaagcggcccagcgggcccaccgggcgaaagagaggaagag

SEQ ID NO: 133523 - RNA, 71 nt, Homo sapiens
ggaaagacaccgcacaccgcagagaaggagggaggaacccacgccacccggagaagacgacacccagcccg

SEQ ID NO: 133524 - RNA, 74 nt, Homo sapiens
ccagggccggaaaagccaacgccggcgaagagccaccaaaaccggcaaaggccgcgaggaaccacgaagagaca

SEQ ID NO: 133525 - RNA, 88 nt, Homo sapiens
ccaaggaagccgccgaggccgagcagggaggcccccggcgggccggggaaggcgacggaagcgggaacggcagacagaacaagaaagg

SEQ ID NO: 133526 - RNA, 70 nt, Homo sapiens
agagaaccgccaaggccaccacggacacagccagaaagaagaagccaccggagaaggaagccaacaccgg

SEQ ID NO: 133527 - RNA, 62 nt, Homo sapiens
ccggggacaagccgcaccacgccaaggaaagaggaagacggggcccaaagaggaagggggaa

SEQ ID NO: 133528 - RNA, 75 nt, Homo sapiens
gaggagccaacagcaggaaggcaggcgggcaacacaacaaggcgcggacacccagacaagcgcgccaccggcccc

SEQ ID NO: 133529 - RNA, 78 nt, Homo sapiens
aaagccaagaggagccaagaaagggaccaagaaaggcccagggaccaaagcccggacaaggcccgagcaccaggaccg

SEQ ID NO: 133530 - RNA, 73 nt, Homo sapiens
ccgagagcccaccggcaaacgggccgcaacaaacacagagacgggaaagaagcgaaaaacagaaagaaccaga

SEQ ID NO: 133531 - RNA, 46 nt, Homo sapiens
gaaaacgaagagacgacacggggcaggggggcccccggggaccaac

SEQ ID NO: 133532 - RNA, 81 nt, Homo sapiens
gcaccccccgggagccgggccagggagacgacgaggggagaagcaccgaaaccacggaacggacagagaacagaagcagag

SEQ ID NO: 133533 - RNA, 85 nt, Homo sapiens
cggaaagcagcgcaggagccaagaccacagcagcacccaggagcgcagacggcccacagaggagggcaaggaagagggaaggacg

SEQ ID NO: 133534 - RNA, 79 nt, Homo sapiens
gcgcccggacagacaggcaggagcaggaggagaagaaaccccaagaccagagggcagcccagaaagagaaccccgaggg

SEQ ID NO: 133535 - RNA, 66 nt, Homo sapiens
aggacgaggacacagcggggccgacgaccaccaccacacaacacaggaacagccgcagggcggcag

SEQ ID NO: 133536 - RNA, 72 nt, Homo sapiens
acgccaccagggccaaaggcaacaaagaaacaccggccaccccccacgagcccggagaagacgaaccacaag

SEQ ID NO: 133537 - RNA, 75 nt, Homo sapiens
gaaaaggcggaagaccgccaaaaaggacacggagccagagccagcagaggccaaggcagcagcgaagaagaaagg

SEQ ID NO: 133538 - RNA, 75 nt, Homo sapiens
caccaccacccccccccaagagaagagagaagccacaggccacacaaccgaaaccaccacccgacaaaccaaaag

SEQ ID NO: 133539 - RNA, 75 nt, Homo sapiens
cgggaaagggacaagaagggcaaagccgaaccacagaaagcccgccccagacagggccccggcccgcccggaagc

SEQ ID NO: 133540 - RNA, 50 nt, Homo sapiens
gacgaaggacacgcaacccccagcacagagcaacggaagacagcccaaga

SEQ ID NO: 133541 - RNA, 68 nt, Homo sapiens
aagaaacaagcggcaagagaggcaccccgaagaggcgaggagcaacccacgagacgacgggaccgaag

SEQ ID NO: 133542 - RNA, 58 nt, Homo sapiens
acccagcccggggcgcacgccacccgggcaaccggggccgccggccggcggcgagccg

SEQ ID NO: 133543 - RNA, 59 nt, Homo sapiens
cagacccaccaaggaggaacgacggaccggaagaaagacgggaccaagcacaacgaggg

SEQ ID NO: 133544 - RNA, 74 nt, Homo sapiens
ggaaacaaccaaaaaaagggagcccaagcaggaacgaaggccgcagccaagccggaacaggagcggcgagccca

SEQ ID NO: 133545 - RNA, 85 nt, Homo sapiens
agcaggggcgccgggggccagagaggcggaagaggaggccgagggggccagcgagacagaccgaaacccaaagaaaaggagcgcg

SEQ ID NO: 133546 - RNA, 70 nt, Homo sapiens
aacacaggcgagcagggacagccaagaaccaaaaaggaccacgaagaaacgaaaaacagcagaaacggaa

SEQ ID NO: 133547 - RNA, 78 nt, Homo sapiens
gacccaggacgaagacagggaagaagcaccaaagaaccgaaaaaagcggcagcgcaacccagaagagggccacggaac

SEQ ID NO: 133548 - RNA, 76 nt, Homo sapiens
gagagccacaagagcagagaggaagaacagaggaccgaacccaacccgcaggaagcggacgggacaccgagggagc

SEQ ID NO: 133549 - RNA, 76 nt, Homo sapiens
agggacccaaaccccagaccccgcccaacacgacccagcagccagagagccaacagaaggcgcgggagaaaagcca

SEQ ID NO: 133550 - RNA, 68 nt, Homo sapiens
aacacgggaagaaaaaggaacgcgagcgaccgggccggcgaaaaagacaacgaagagaggaaagaagc

SEQ ID NO: 133551 - RNA, 80 nt, Homo sapiens
agagccggggcagccccccaccaggccaacaaagcccaagcaggggaaggcgaagcacgacagcacggccagaggaaccc

SEQ ID NO: 133552 - RNA, 87 nt, Homo sapiens
cagaaagcaggcgaacccgcggcgcaaaacggggcagagagaagagcacacagaaggccaggagcgacagagcggggaacacgagac

SEQ ID NO: 133553 - RNA, 70 nt, Homo sapiens
ccagacccgcccccgaaaggacccaaagacaggaccacgcaccagcagagaaggaaagcaaaccgaagca

SEQ ID NO: 133554 - RNA, 77 nt, Homo sapiens
agaccgcgaccgcacgccagcccaagccgacagccaagagagagggacccaacaggaagagaggcccagaagaggag

SEQ ID NO: 133555 - RNA, 74 nt, Homo sapiens
caagcaaccaccagcagcccccagagcggaacacagagaggaacaccgggccaggcggcggagccgaccaagcg

SEQ ID NO: 133556 - RNA, 73 nt, Homo sapiens
ccccaccccccgccccacggggcgggcggggcagcgcaagaccccgcacggaagcagcaagcacaggcagcgc

SEQ ID NO: 133557 - RNA, 80 nt, Homo sapiens
gagcgccaggaaagggagacgaccccaagccggaggcagcagaccagagacaaggccccgagggaggagcccgaaggcgc

SEQ ID NO: 133558 - RNA, 76 nt, Homo sapiens
ccacaagaagcagaggacaggaggccccgagaaaccggaaggcaaaaagccaaaaggacacccaacaacagcaagg

SEQ ID NO: 133559 - RNA, 76 nt, Homo sapiens
gaggcggcggcggcagcgacagggcgcccaagaagccaaaagggaagcacgagaagcaggcaccacagggagagag

SEQ ID NO: 133560 - RNA, 59 nt, Homo sapiens
aggcaagcgagaagagagacaggaacccacagccagaacacagcagcaagccacccaga

SEQ ID NO: 133561 - RNA, 82 nt, Homo sapiens
gggccaaagccaacgaagaaaagaggagcgccagagcgaaaagagaaggcaaacagcgaagcaccgggaaccccaagaggaa

SEQ ID NO: 133562 - RNA, 80 nt, Homo sapiens
ccagacccagacaacagcagaaacgcggaaggccagagcaaagagacccacccaacagcgaacaaaggcccaacaccaaa

SEQ ID NO: 133563 - RNA, 83 nt, Homo sapiens
aacagaaaacaagagaccacagaaggcgcaccccccgcgccggccccgccagcagaccccgcgagcgccccccccgcccggcc

SEQ ID NO: 133564 - RNA, 77 nt, Homo sapiens
caagacccacggaccggggcaggaaaggaaccaggagagagcagccagaggccagagacgcgcacgaaacgacgaag

SEQ ID NO: 133565 - RNA, 86 nt, Homo sapiens
gcagccccaaagcgagcgaagcagggcgccgccacgccgcaggaggcggaggcaaaagcagaccggaaaacccaccggcaagacca

SEQ ID NO: 133566 - RNA, 70 nt, Homo sapiens
aggaaaaggaacagcaaggacgcgggccagggaccggacggcagaacagacccccgccgacaaggagccc

SEQ ID NO: 133567 - RNA, 79 nt, Homo sapiens
caccggggagaacaagaaagccagcgggggagcacacgacgggacccacgagagcacaccagaaggagggaagagaaaa

SEQ ID NO: 133568 - RNA, 87 nt, Homo sapiens
cgcggggcggaacgccggggccagccaggccgcgcgggcccgaggccggaggaacccggacccggcgagcgagaggggcgccaggcg

SEQ ID NO: 133569 - RNA, 71 nt, Homo sapiens
ccccagaacaccgaccagggaacgcaacaaaggcagaggcagcgacagagaaaaccccggagcagggagag

SEQ ID NO: 133570 - RNA, 75 nt, Homo sapiens
accgcgcaagccacacagcaagacccggacgaagccacaaccaggagcaagacagcaacgcacacggaaggcagc

SEQ ID NO: 133571 - RNA, 70 nt, Homo sapiens
ccgccacccagagcgcacggcgacgccccaggggaaaacccccgggaccaggaggagcaaaaaacagaag

SEQ ID NO: 133572 - RNA, 77 nt, Homo sapiens
cacggacaacccagaggacaacgaaggcgagacagagccccagcaacggaaagccaagcaagcaaggagccagccca

SEQ ID NO: 133573 - RNA, 83 nt, Homo sapiens
ggggggggcaaacccgagagaacggcagacagggcaacggccacccaaccagcgcgccaggcacgggccaggggacacccacg

SEQ ID NO: 133574 - RNA, 55 nt, Homo sapiens
acagcacccggccaacaccacgccacccaaggccaggccgacgaggccggccaca

SEQ ID NO: 133575 - RNA, 85 nt, Homo sapiens
cagagccggagcgggggccgccggcgccgagagcgacgcggcaggcagcgagaggaaggggcccgcgaggcaaggcacagggcac

SEQ ID NO: 133576 - RNA, 70 nt, Homo sapiens
caaggagcaacacggcggaccacacaagcaaaagaccaggcccagggacaggcggcccgggcccggcagc

SEQ ID NO: 133577 - RNA, 56 nt, Homo sapiens
aagcgaaaggcaccgcaacaacgcccagcgagaagcagcgaacaagggaagaggaa

SEQ ID NO: 133578 - RNA, 69 nt, Homo sapiens
aaacaagaccaagcaaaacagaagaggaagaacccgggccacacacaacaggccaaggaagcacgggaa

SEQ ID NO: 133579 - RNA, 77 nt, Homo sapiens
ggcggagagcaaagcaaacgaaacggaggagcccaggaggaagaagaagcagccaaagaagagaaagaagaacgaga

SEQ ID NO: 133580 - RNA, 80 nt, Homo sapiens
cgggaggcaccacggccgagcccgaggggggcacgaacaacaagacaagcaaccaagaaagcgacaaggaccagacaaag

SEQ ID NO: 133581 - RNA, 74 nt, Homo sapiens
caaccaaagaagagacggccagcaggagggaaagagcgaaggccaaacgaagaaaggaggggaaagccagcgca

SEQ ID NO: 133582 - RNA, 81 nt, Homo sapiens
cgcacgcgcgcccgccgcccgaggagccccgcgcggcaacccagaggaagagcaaagaaaagagaagagcagcaagcccag

SEQ ID NO: 133583 - RNA, 69 nt, Homo sapiens
acggaagccacgcacgccagaaaaacaaacacagggaggaaggggcgagcaacaaggaacgaacccccg

SEQ ID NO: 133584 - RNA, 87 nt, Homo sapiens
acagacgggaacaaacacaagccccagcaccacgaacaggcagagaccaacagaccagcaacaggccggcagggcacagcagccgca

SEQ ID NO: 133585 - RNA, 71 nt, Homo sapiens
ccgagcagggggggggggaagccgcagcggaaagcaggagcacagacaaaggaaccggcgaacccgaaccc

SEQ ID NO: 133586 - RNA, 72 nt, Homo sapiens
gccccccgaccgcagaccccgacacaagggggagccgccagcgagcaggagggagaggggccaggacccacc

SEQ ID NO: 133587 - RNA, 40 nt, Homo sapiens
cccggagaccccgagaggcgcccaaggggcgcgacgagag

SEQ ID NO: 133588 - RNA, 34 nt, Homo sapiens
cccggagagcgggacacagagcacaggcccggca

SEQ ID NO: 133589 - RNA, 79 nt, Homo sapiens
aaggaaacgcccgaggcccgaaccgcgggagaggggaagagacaagaccagggacaagaacccaagaaacaggaaaaaa

SEQ ID NO: 133590 - RNA, 71 nt, Homo sapiens
accagggcagcaggcacgagcaaaggaacacaacgggccaaggcgaacaagaggcgccagcgggcgcgccg

SEQ ID NO: 133591 - RNA, 79 nt, Homo sapiens
ccaggcccgggcgaccccagcgcgaccccaaagaccccagcaggccccaaggagcggcaagaggaccggccgacgcaca

SEQ ID NO: 133592 - RNA, 66 nt, Homo sapiens
cagcccccagagcgggaccacagcccagagaagccgggacaccaagagaagcaaaagcgagcaccg

SEQ ID NO: 133593 - RNA, 73 nt, Homo sapiens
agccggagaagagggggcccggggggaggaggggcaggcccggcggacggaaaaaggacaaggaggaaagaaa

SEQ ID NO: 133594 - RNA, 83 nt, Homo sapiens
gcccagccaccagcaccgaccgggaggccccacgacaccccacccacgaaccagggaaggaagaacaggaaaaggaaaagagg

SEQ ID NO: 133595 - RNA, 74 nt, Homo sapiens
cggcccggagacccgccaacagaggagacaggccgagaccgagggccccgcaccccggagaagagccccgccga

SEQ ID NO: 133596 - RNA, 68 nt, Homo sapiens
agacagcgacaggaggagggagaaaagcggacgccggggaggccaaaaaggaagaggacacagcgcga

SEQ ID NO: 133597 - RNA, 52 nt, Homo sapiens
aaacggcagagcaggccgcggcgacccagcgaggaccgcacaggcgcaggcg

SEQ ID NO: 133598 - RNA, 33 nt, Homo sapiens
ggaaaagagcaaacgagcagagcggcagcggca

SEQ ID NO: 133599 - RNA, 70 nt, Homo sapiens
aggaccacgcaagggacacaggcaaaacggacaaagaccgcaaaaagacccgaacggaaagccaaaccgc

SEQ ID NO: 133600 - RNA, 82 nt, Homo sapiens
ccgagaaagaaggaggaggggggaggcgaacagccggcgcccggacgcgaggggggagggacagaacaccggacacgaaaaa

SEQ ID NO: 133601 - RNA, 83 nt, Homo sapiens
gcccgcccgcccgcgcccggggcgcgcccaccgcgccgcaccagcgagcccagccgcgggggcgcgggaggggaccggagacc

SEQ ID NO: 133602 - RNA, 76 nt, Homo sapiens
agggaaccagcaggccggagcaggaagcgcacacgccaaaggagagcgcggagaaccaaacccaggaacgccccac

SEQ ID NO: 133603 - RNA, 65 nt, Homo sapiens
ccacgcaggcgcccaaccgacacacgaaacaaccccgaccggccgcaggccccacaccacccccg

SEQ ID NO: 133604 - RNA, 85 nt, Homo sapiens
gaacagacgacagaggaccgcccgcagcaaccaaaacccacgcacagaggccacccccggcgaaagcaaggagaacacaaacgag

SEQ ID NO: 133605 - RNA, 85 nt, Homo sapiens
ccgggccggccagcgcccagccggagaaagcgccggaagacacacggcagaaacggaggcgcgcggagcccagcggcgcaaccag

SEQ ID NO: 133606 - RNA, 76 nt, Homo sapiens
aaagcaaaagaccggcaccagcacacaaaccccgacagaaacgccaagagggacgaggccggaaccaaacgcgcgc

SEQ ID NO: 133607 - RNA, 67 nt, Homo sapiens
gcacgcagcacagacagcaggcaagccgcagcggcgacccccaccccaggagcaacccagccccaag

SEQ ID NO: 133608 - RNA, 81 nt, Homo sapiens
agaccaagcaccaagaaaacgccaaggaacgacccccaggcaaaccgccccgcagcaccacccggcccggcaaccaggaaa

SEQ ID NO: 133609 - RNA, 78 nt, Homo sapiens
ggggagcggggccccacacccccccgggggggggagcagaagggcagcaaaccgaagagagaggccggagaaaagcga

SEQ ID NO: 133610 - RNA, 64 nt, Homo sapiens
gcgcacggagacccgccggcaggggccgggagcccagcagacgacgggacccccaggaagaccc

SEQ ID NO: 133611 - RNA, 69 nt, Homo sapiens
caaccaaccggagcggcgcgaggccggcagcgggcgcgggggacgcggaagagacagcagaacaagagc

SEQ ID NO: 133612 - RNA, 78 nt, Homo sapiens
agcggcgcgaagcgaaaccggggccaacagacagagacccaccaaggggggaaaaggacagcgacacagggaggacca

SEQ ID NO: 133613 - RNA, 81 nt, Homo sapiens
gagacccagcgaggcgccccagagcccagggcaggacaccgacaggaacagggaccacggggggaagcgaccgcccgcaca

SEQ ID NO: 133614 - RNA, 88 nt, Homo sapiens
cgccgagaaggaggcccagcagcccaggggaaaggaacacccccagcggccagaaagaaacccgaagacaacacacagagacacccgc

SEQ ID NO: 133615 - RNA, 67 nt, Homo sapiens
gggccccaaggcgaccggacacaagggaaaccggacgcagaaggccacacaccacacgacggccacc

SEQ ID NO: 133616 - RNA, 69 nt, Homo sapiens
caagcccggccaaaaagaagagggaaggacacgacagaagaacagaaggaaacacccgaggagcgacac

SEQ ID NO: 133617 - RNA, 70 nt, Homo sapiens
gacagcgagaacaggggaagaaccaaggaacccgccggcaggagggggaaagccggggccccggggaccc

SEQ ID NO: 133618 - RNA, 56 nt, Homo sapiens
cggggcccggggaaggcccgccgcccgccccaggaggccaggagcacagaaacacc

SEQ ID NO: 133619 - RNA, 68 nt, Homo sapiens
accagcaccgacgacaagacccaaagacaggaccacgcaccagcagagaaggaaagcaaaccgaagca

SEQ ID NO: 133620 - RNA, 74 nt, Homo sapiens
ccacgggcccccgcgcgcagcggcggagaaaccaccacaaacacgaggccagcaacgaccaacaagacagaccc

SEQ ID NO: 133621 - RNA, 49 nt, Homo sapiens
gaaaaagcaggggaagcagcgcacgccagaccaccacaacccgcaacgc

SEQ ID NO: 133622 - RNA, 72 nt, Homo sapiens
cgcaccaaccccggagcaaacgagacccggcgaccaacccgggaacccagagaaggaaggaaaacccgccac

SEQ ID NO: 133623 - RNA, 79 nt, Homo sapiens
ggcccggaggccaagccgcagcggggcgcgaaaagaagaggcgcagagagacaagggcacccgaggcaaccaccggggc

SEQ ID NO: 133624 - RNA, 79 nt, Homo sapiens
gagccgaccgcgaggcgagagggggcaccggagggacaacaaaacaagacgcccggacaagaggcagagaaagcaagag

SEQ ID NO: 133625 - RNA, 70 nt, Homo sapiens
ccggaagggcggggggcgggccggaggggagacgggaggcaggcccagaaaaggcaaagcagaccaggac

SEQ ID NO: 133626 - RNA, 78 nt, Homo sapiens
acaacaccacaaaaccacagccaaggcccccacagagagcacacaaacaaagcgaaaccacggaagaaaagggcaaag

SEQ ID NO: 133627 - RNA, 61 nt, Homo sapiens
agaggacaacgagcccgaggcagcagaaggcgcgccaaggagagcaccgggagaaccggag

SEQ ID NO: 133628 - RNA, 73 nt, Homo sapiens
ggcccggccccccagaggaggaaccacaagagccagaagggagaccgaaggaccaccggcagcgggaaaaaac

SEQ ID NO: 133629 - RNA, 66 nt, Homo sapiens
gaaacggaggagcccgccgaagcaggagcgaaagcaagaccgaacccagaggaccgcaacccaccc

SEQ ID NO: 133630 - RNA, 106 nt, Homo sapiens
cgcaccgcaggcagacaaaagggccaaagaagggagagaggccagaaccgcccaaacgagcagaagcgggaagaaacaggagaccccagcaaaacaaaaggaaaaa

SEQ ID NO: 133631 - RNA, 80 nt, Homo sapiens
gcgccgcacagcccggcgaagccgcggagacagccagagaaggcgcgcccagacgcagcgagcggaagccccggggacga

SEQ ID NO: 133632 - RNA, 79 nt, Homo sapiens
ggaaaacgaaaggagagcccgcaagcggaaaaccacaagcaggccaaagagagaccggacacaagagggcaagaaaggc

SEQ ID NO: 133633 - RNA, 102 nt, Homo sapiens
gaaggggaaccgacgaaagaaaaccccgagggaaacaagaaaacacaaagaggcagcaaaggagcggagcggccaaaacaacaggcccaggacgagaaagga

SEQ ID NO: 133634 - RNA, 81 nt, Homo sapiens
agagcccacagaaccgagaaagagagacgggggagggaagcagccaagcgggcagaagaggaagccccagacacgagggcg

SEQ ID NO: 133635 - RNA, 73 nt, Homo sapiens
agcccccagcggggggacccgagagcggcagccgcaacccccaggccagcaggaaacggccaaccaccccgac

SEQ ID NO: 133636 - RNA, 81 nt, Homo sapiens
ccccccgcggagagggagccagaacagggaagaacggacacacaggaggcgcagaagacgcagcacaggagacgaggaagg

SEQ ID NO: 133637 - RNA, 72 nt, Homo sapiens
cgaccaacccgcggaggcaaccacgggagggagaagggagccacaacgaccgagcggacaggagacagccag

SEQ ID NO: 133638 - RNA, 79 nt, Homo sapiens
accggggaacacagacggaagaacaggcacagggcgcacacgggaggagcaggcagaggaaacaaagccagaccgccga

SEQ ID NO: 133639 - RNA, 35 nt, Homo sapiens
cagggccgagcacgggaaggccgcaacaagcccgg

SEQ ID NO: 133640 - RNA, 71 nt, Homo sapiens
aagagccgccacaaaagaggcaacaccgcagagcacgggcagagacagccacaaaccagaggggaccagca

SEQ ID NO: 133641 - RNA, 71 nt, Homo sapiens
gccgggaggggagagccccgcaccccccccagaaacagaacacggccccagggccacccagcagacagagg

SEQ ID NO: 133642 - RNA, 70 nt, Homo sapiens
cggcgcagaaaggggaggccgggaggacgaagccggaaccaaaaagaagccccagagccggggccaggag

SEQ ID NO: 133643 - RNA, 76 nt, Homo sapiens
caggacaggaaaaaaagagaggccggaagagcgggagcgggagccaggcagaaggccaaccaaccccaggaaaagc

SEQ ID NO: 133644 - RNA, 72 nt, Homo sapiens
cgcgaaggacccagacccacagagaacacgaacagacgaagggagggaaggaaggaagagccaaaggacagg

SEQ ID NO: 133645 - RNA, 82 nt, Homo sapiens
agagggcggcaacacgaggccgacaccacgggcagagcaagcgcggaggcacagacacgaagcagaggagccagacccaaag

SEQ ID NO: 133646 - RNA, 78 nt, Homo sapiens
agaggccgcgcccagcggccagacagcgggcgcggggcgggcacggcgggccggggagcaagacagcacccgggccag

SEQ ID NO: 133647 - RNA, 71 nt, Homo sapiens
cgagacaaaggcaccaggccaccacagaaacaaaagcaacaaagaggagacaaaaccaaaggaggaaggcc

SEQ ID NO: 133648 - RNA, 71 nt, Homo sapiens
gcaccgggcagcgagacgaaaaacaaagagccgcagacgcacagcaaccaccggacccgaaggccaccacc

SEQ ID NO: 133649 - RNA, 72 nt, Homo sapiens
aaacccgacccccaaaccgcgaagaacagggaggcacagggagaggaccaaaaaggagcgccgcgcccaggc

SEQ ID NO: 133650 - RNA, 76 nt, Homo sapiens
gccccggaggcgccaccgcaccaggaggaggaccccccacgaagcgagcaaagcggaggagaagggaaagggagga

SEQ ID NO: 133651 - RNA, 110 nt, Homo sapiens
ccccccgcgcccccaccgcgcgcgagacgcgccacgcaagggaaacgggggacggaaagagagccgcagcgcagaacaagggaaaaaagggcaaaaagggcaaaaaagac

SEQ ID NO: 133652 - RNA, 64 nt, Homo sapiens
gcagaagagcgcaggagcaaccaccagggacacaggagcgaggacacacaggagggacaaaggg

SEQ ID NO: 133653 - RNA, 57 nt, Homo sapiens
gagcagaaagaacagaccacccgaaagaacgaaagcggcacggagaagaaggaaaag

SEQ ID NO: 133654 - RNA, 65 nt, Homo sapiens
ggcacccccgccgcgagacggagaaaccgccggcacagcagaaacacacaaaccaagggagacaa

SEQ ID NO: 133655 - RNA, 58 nt, Homo sapiens
gcagcgcccagcagcgcagggccaaccgccccccagcagcaggcacgggcgaaccccg

SEQ ID NO: 133656 - RNA, 62 nt, Homo sapiens
cagacgacggagaacggagagggaccaagccaccccagaagagcgcaccgaacaagagcaga

SEQ ID NO: 133657 - RNA, 75 nt, Homo sapiens
ccgacggcaggagccccacgaggaggagcgcaccgcgcaagccaacacggggaacagagacagacccgggggccc

SEQ ID NO: 133658 - RNA, 53 nt, Homo sapiens
cgcagggcgcccccgccccacaccaggagaagcacagcaccggaacgcgagaa

SEQ ID NO: 133659 - RNA, 81 nt, Homo sapiens
gccccggacagagcaagcccccgacagccagccagacccccaggcagagccaccggggaccgcaaggccgcggggcccaac

SEQ ID NO: 133660 - RNA, 70 nt, Homo sapiens
ggcagagcacgcgcgcagcgaagcccagggaggccaccagaacggcaacgaaaagagacacgacgcaaac

SEQ ID NO: 133661 - RNA, 73 nt, Homo sapiens
gaagcagcaacccccggcgaccaacccgaccggcgggacggcaggccaggggcccccagggagagaggaaagg

SEQ ID NO: 133662 - RNA, 75 nt, Homo sapiens
ccccccacggccaccacgagccgggccacccaagggcccagcgaccgcgcacaccagagcggaaagggccaaagg

SEQ ID NO: 133663 - RNA, 49 nt, Homo sapiens
cgcaccgacgcgacgaaagggaccggcacacgaaggagggaacccccaa

SEQ ID NO: 133664 - RNA, 80 nt, Homo sapiens
cacacaacgaaagggcacagccaagacagagccaggagggccagacaaggggaacacaagaggagagaaggggaccgcag

SEQ ID NO: 133665 - RNA, 77 nt, Homo sapiens
ggacacgcccagccccgggcacggaaagagcacacagcaacaagggaagaagaagcaagaaacgacagagaccagaa

SEQ ID NO: 133666 - RNA, 72 nt, Homo sapiens
gggggagcccgggagagccaccaggacacccggaaagaacaggccaggcccagaccggccaccaggcaacac

SEQ ID NO: 133667 - RNA, 71 nt, Homo sapiens
ggaccccgagacaaggaagccgcgcgcccgcccccgaacaccccaccagaccacccagcaagcccacaaaa

SEQ ID NO: 133668 - RNA, 57 nt, Homo sapiens
acgagaccacaccagccccacgcgggaggagggacagacgagagacaacagaaacag

SEQ ID NO: 133669 - RNA, 86 nt, Homo sapiens
cgaggagccgcccgcggcccaggagggcgcaggagcgggacgagagcgccggaggccgagcggagggcccagcgagagccagccgg

SEQ ID NO: 133670 - RNA, 67 nt, Homo sapiens
ccaccgaaagcggcgcaacgagggccgccagcgccagcagaaaagacgccgaaagacacacaggaag

SEQ ID NO: 133671 - RNA, 68 nt, Homo sapiens
ggcgccggccgagaaggcagaggcgaggaccacccgcacccaggggacgcacggcccaaccccgagca

SEQ ID NO: 133672 - RNA, 74 nt, Homo sapiens
caccgaaacggaaaggacaggcgaaggggcgccgaaccgagcccgaagggaagggccggcgggccaacacaaga

SEQ ID NO: 133673 - RNA, 76 nt, Homo sapiens
agcagccgcccgccaaccccaggggaccagaggaaccagcccgagcgaaggagaagaggcccgaaaagagcagaag

SEQ ID NO: 133674 - RNA, 82 nt, Homo sapiens
cgggaccgcggccacggacggaacccggagggcggaccacaagccagaacgagagagccaaaagcaaacgcccccacgaaag

SEQ ID NO: 133675 - RNA, 83 nt, Homo sapiens
gggaggagcgccggaacgccgaggcccagaaagccaacaggcagaccagagacagcgccacgcacccggggagcagaccacgc

SEQ ID NO: 133676 - RNA, 62 nt, Homo sapiens
ggccaccaagggaagagcaaccaggacacaaaggagaacagacagcacgggggaggacaccc

SEQ ID NO: 133677 - RNA, 37 nt, Homo sapiens
aggagaaaacggaacaaaaccaccgcacccaggcgga

SEQ ID NO: 133678 - RNA, 87 nt, Homo sapiens
ccggagccagccaacgagcggagacagggaaacgaaaaccaccgggcaccacgagcccacgagagaggacagccccaggaaggcagg

SEQ ID NO: 133679 - RNA, 83 nt, Homo sapiens
aagagcccccccgcggaaagcgcccgggcgcgccaggcacagccaagagcggaccggcagcggccagcgcagcggccggagca

SEQ ID NO: 133680 - RNA, 74 nt, Homo sapiens
gacaaacacgaaaagggaagaagacgcggcggcagcgggggcacaggcacaaggggggggaaacacaccaccgc

SEQ ID NO: 133681 - RNA, 56 nt, Homo sapiens
ccgcgagaaaaggccagggcccacgcaagagcccaaggacccagaacccaaaaaga

SEQ ID NO: 133682 - RNA, 82 nt, Homo sapiens
caggccgaccgcaacacgagcaggcaggccccgcaggccacccaggcccggaggcagcgcagccaccaggcaggcaaccagc

SEQ ID NO: 133683 - RNA, 52 nt, Homo sapiens
accgaagagagggagacgcagggcacccagccgcagcaaagccggcaagacc

SEQ ID NO: 133684 - RNA, 74 nt, Homo sapiens
gacccgagcaccccaacgggcaggggagagggcacggaaagaccaaggaggcgcccaggaagaaagacacagga

SEQ ID NO: 133685 - RNA, 80 nt, Homo sapiens
cgagaagagagacgagagagaagaggagagagaagaggacacacaggaagggcccaaggaccacgcagccaacgacaccg

SEQ ID NO: 133686 - RNA, 81 nt, Homo sapiens
cagaggaccggcagagacacacagacacggaggcacgcgcggaccagccgggcccgcagccgcacccagggcagggggcaa

SEQ ID NO: 133687 - RNA, 106 nt, Homo sapiens
gggggaaaaaggaaggccgccggacagcgcagagccaagacggagaaacaaaaaacccggacaaccagcggggcacaacaagggcacaacagagccaccccaccac

SEQ ID NO: 133688 - RNA, 58 nt, Homo sapiens
cccgcggcagcaggacacaagcgccgcaaggggacacaggcaaaacggacaaagaccg

SEQ ID NO: 133689 - RNA, 69 nt, Homo sapiens
accggcgcggacacgcaggcgccagcgacggcgaaggccacgcacccggggaaaggccagacagcgcag

SEQ ID NO: 133690 - RNA, 82 nt, Homo sapiens
cgcggcgcgggacgcgcgcgggcacccacggagccccggggcgggagaaagagagagcgcgaaagagagaggagccccagac

SEQ ID NO: 133691 - RNA, 66 nt, Homo sapiens
cagaagcggcagcaaagggcgcacagacggagaccgagaggccgaacacagcagcggcgcccggga

SEQ ID NO: 133692 - RNA, 70 nt, Homo sapiens
gcaggaagccggggcaggcccaagaagccaaaaggaacgaaacccacgaagccggagaaaacgcgcaagc

SEQ ID NO: 133693 - RNA, 74 nt, Homo sapiens
gggacggaacaggagacccaagaaggaagggaccccgacggagagacaaagaagacggagggggggccagccac

SEQ ID NO: 133694 - RNA, 51 nt, Homo sapiens
agaaccaaagaagcaaaacacgagaccgacccccaaaccggaccaagagca

SEQ ID NO: 133695 - RNA, 87 nt, Homo sapiens
gccgccgcgccgcgcagaaggccggggccggccagaagcgggcggcgcgggggagagggggcccgaaggcaccgcagaacggggcgg

SEQ ID NO: 133696 - RNA, 63 nt, Homo sapiens
gggaaagcacaagccaggaaaggacgcgcgaagcgcgggcggcagaggagcaccggcccaggc

SEQ ID NO: 133697 - RNA, 72 nt, Homo sapiens
aggaggccagagggcgaccggaggagcagagaaccggcccaacccgcggcaaggacggggaaccaccaaccg

SEQ ID NO: 133698 - RNA, 68 nt, Homo sapiens
caccccgcacgcacgcgggcaggagccccaccagcacggaaaaacggagcaccccccgaagagcgacc

SEQ ID NO: 133699 - RNA, 52 nt, Homo sapiens
caaaccaacgaaaggcagaccaagaagcaagagagaccacgacggaagaaag

SEQ ID NO: 133700 - RNA, 67 nt, Homo sapiens
agaagacagacaaaggaacaagcgccaaaaagagccacaaggacagcaacgccgaccgagaagcccg

SEQ ID NO: 133701 - RNA, 59 nt, Homo sapiens
agaacacaggaaccggagcggggaacagggcgagacgaacaacgcgcgcaggagaccac

SEQ ID NO: 133702 - RNA, 65 nt, Homo sapiens
aggggagagggccacagaaggcacagaaaaggacggcccacacccacagggaaggggaacaggac

SEQ ID NO: 133703 - RNA, 75 nt, Homo sapiens
gccgcgggggaagccacgcacaccagccacagccagcaggccgcccacgcggagccgccagggaccagcggggac

SEQ ID NO: 133704 - RNA, 76 nt, Homo sapiens
acagcgggccgagaaagcaaacagaaaggccaaaacccccaagaaaggaaggaaggcaagaaggcccagagaagga

SEQ ID NO: 133705 - RNA, 56 nt, Homo sapiens
caaaaggagccaggagaaaaaggacaggcccgcacggcaaagcaaagaagagccgc

SEQ ID NO: 133706 - RNA, 70 nt, Homo sapiens
gggagcgaaggccaagagggcaaggaagcaccccagcaagccaagcaacgccacaacaacgaggcgaagc

SEQ ID NO: 133707 - RNA, 40 nt, Homo sapiens
gcccccgagggcgggaacagacacaaaagcgcagccaggc

SEQ ID NO: 133708 - RNA, 86 nt, Homo sapiens
gggggggagcgaggccaagcagagaaacgacaaggggccgcaaggccaggcgcgcagaggcacccaacggcacagaccccacacac

SEQ ID NO: 133709 - RNA, 81 nt, Homo sapiens
ccgcgaggccacaacccaccccgcggaggccccgggggacagccgaccgcaaaagccagggcccacacggaaacggagacc

SEQ ID NO: 133710 - RNA, 88 nt, Homo sapiens
ccggaaggaaagaagaagaggcccgcaagccaggcgggcaccacggcaggggcgagcaccccaggaagggagaggaccgaccggacac

SEQ ID NO: 133711 - RNA, 84 nt, Homo sapiens
cagccggggccgggcggaaggagcggggccgccggggccgggccccgccccagcagcggaggcgggaggggacggcaaagggcg

SEQ ID NO: 133712 - RNA, 83 nt, Homo sapiens
gcacacggacagacaccaagcgagcaggaaaagccaagaaagacccaaaagaccccagaccagaaagaggcgccaagcgagaa

SEQ ID NO: 133713 - RNA, 76 nt, Homo sapiens
gagcgcgaaacgcacgagaagggcaggcgaagagagcgaagaagagaagacacaggaggcccagcccacagcccac

SEQ ID NO: 133714 - RNA, 80 nt, Homo sapiens
ccaccggcccaaagacaaccgggcacagaccagccgacagcgaccaaggccagagcgaaaggccacggccagccgccggc

SEQ ID NO: 133715 - RNA, 75 nt, Homo sapiens
acccaaacgccaacagaaacgcaccaccaagaaaaagcagagagacgcaagagagaaaagccagaccagaagaac

SEQ ID NO: 133716 - RNA, 73 nt, Homo sapiens
cagacacgaaaccacccagaccaaaggcaaaacccgaaagaggggggaaaagccacggcaggacaaggggcag

SEQ ID NO: 133717 - RNA, 57 nt, Homo sapiens
agcaaagaaaaagaacccaaacaagacgcaagacagaagaaccaggacaagaacgcg

SEQ ID NO: 133718 - RNA, 49 nt, Homo sapiens
ccccgagcagcgggaacaggacggaggggggaggagcaggcccccaccg

SEQ ID NO: 133719 - RNA, 72 nt, Homo sapiens
ccgggagagccgcggcgcaagcgaagcaccgggagccccccggaccgagcgcccagaaacagcgggagaaga

SEQ ID NO: 133720 - RNA, 72 nt, Homo sapiens
ggaagcaagaaaggcggacaccagcagaaacaccagaagggaggaagacgggcaaaggagccgaagcaacac

SEQ ID NO: 133721 - RNA, 87 nt, Homo sapiens
ccgcggagcccagaccacccgggcgaagcgggcgagcggggggacgccggcggagacgcgggcgagagcggggcccggcgcacccac

SEQ ID NO: 133722 - RNA, 73 nt, Homo sapiens
gcggaaaacaagggaaacaacgaacgagcaaggaagggccaaggcagaccccacaccggagaacgcaaccaga

SEQ ID NO: 133723 - RNA, 43 nt, Homo sapiens
caggccggcgggcgcaggcacaggcaggagacgagaccaccgg

SEQ ID NO: 133724 - RNA, 75 nt, Homo sapiens
aacacgacggacagagcgaagcgaccaagcagaaggagggaaaaccccgaccaaaagaagcaggacacaggagaa

SEQ ID NO: 133725 - RNA, 83 nt, Homo sapiens
aagcccaaggaacaccgggcaacagaaaggcaaggcgaccgaaaagcccaccagaggcgaggggaggaggaagcgagcgaaaa

SEQ ID NO: 133726 - RNA, 64 nt, Homo sapiens
gcccggccgccggcccccaacagcgccgacaaggcccacaagaagacaccagaggcagcagacg

SEQ ID NO: 133727 - RNA, 75 nt, Homo sapiens
gcccagcggcccggcggaaccgggaaggggagccaggccgcccggcggggcggagaacggaaaagcaccaggaag

SEQ ID NO: 133728 - RNA, 81 nt, Homo sapiens
aaaagccggaacccgggccgacagcggaagaccaaagaggagagaaggacgacaagcccaccgaggcaaaagacgcgggca

SEQ ID NO: 133729 - RNA, 70 nt, Homo sapiens
ggaaaaaagcagcaaacacgggacaaaaaccagaccaggcaaaccgacaccagcgacacaagcgcgaggg

SEQ ID NO: 133730 - RNA, 76 nt, Homo sapiens
ggcgcgcggagacagcgggaccccaggaggacggaccacccacgcacgaccgcaagagccgcccccagcagcgagc

SEQ ID NO: 133731 - RNA, 84 nt, Homo sapiens
aaaccacggagccggcagcggcgcgggaggccggcggccaaagcaaacagagcagaccaaccagcagccaagcaacccagcagc

SEQ ID NO: 133732 - RNA, 81 nt, Homo sapiens
ccaggccaaggggggcccggaccagaccaagaggagggcacgggcacccggaccacgcagcagagcgacgggagaaggcca

SEQ ID NO: 133733 - RNA, 82 nt, Homo sapiens
gcgaccccggccgcggggccaggaagcggaggagccccggaggcagagcggcgccaggaggaggccggacaagccgaagaaa

SEQ ID NO: 133734 - RNA, 61 nt, Homo sapiens
aaacgaaagaaacgcggcaggaacgccgacgagagaccagggaagcaaggaccagaagcgc

SEQ ID NO: 133735 - RNA, 72 nt, Homo sapiens
cccaccccccggggcgcgccccgagagaacgaggaggagccccacccgcgcaggccaggcaagacccgcccg

SEQ ID NO: 133736 - RNA, 37 nt, Homo sapiens
cagaccgaccaccccccagaccccgaaggggacagga

SEQ ID NO: 133737 - RNA, 74 nt, Homo sapiens
ccaccggcaagacccacccgccacggcaccagagcggcgaaaagggacgcccccgaacagacaacccaaaggga

SEQ ID NO: 133738 - RNA, 59 nt, Homo sapiens
aaccagcgacacaccgggccaacagacgggaaaggcccggcaacacagaacaaaaaggc

SEQ ID NO: 133739 - RNA, 32 nt, Homo sapiens
agccaaagggccggaggagacgccaccgaaaa

SEQ ID NO: 133740 - RNA, 89 nt, Homo sapiens
ccgcaacccgcgccgcgccgcgccgcgccgaaacgaaggaggcccaaccacaaaaggagccgacggaacccagacggagaacaaaagga

SEQ ID NO: 133741 - RNA, 57 nt, Homo sapiens
aaaagcacagaagagagaaaacccggacaaccagcggggcacaacaagggcacaaca

SEQ ID NO: 133742 - RNA, 54 nt, Homo sapiens
accaagaaccaggggcccccagccaggccgagaaccgacaacaaggggacaggg

SEQ ID NO: 133743 - RNA, 76 nt, Homo sapiens
cccgagaccccgacccagacagccagaaacggcggcgggccggacccggcaggccgggcacaaccacaacgggaca

SEQ ID NO: 133744 - RNA, 63 nt, Homo sapiens
caccagcgcccaccccaggaccccggcaccagcagcagccgcccgcaacccaggaccgagaag

SEQ ID NO: 133745 - RNA, 82 nt, Homo sapiens
cccgcgcccaaaacccacccagggacaggaccccgccgaagccaccaaaaccaccaggcgggaacacaagcggacggaagcg

SEQ ID NO: 133746 - RNA, 75 nt, Homo sapiens
cccaaggcacagccaggccgcagagggaaccaagacaggcgcccagggcacaaaggggcgcgaagccggccaacg

SEQ ID NO: 133747 - RNA, 80 nt, Homo sapiens
ccggagagccgcagggaggcggagggcagggccaggaggaacagagaacgggccagcggggcgagcagagcgcgcgaagg

SEQ ID NO: 133748 - RNA, 78 nt, Homo sapiens
agcccagaaccagggaacggggagcgccaggcggcagagcaggaaaccgggccagcagcgggccaaggcaaggaacgg

SEQ ID NO: 133749 - RNA, 93 nt, Homo sapiens
cggcaagcagcggccggagccagccgacaccgcgcccagaacccagcgcgccgaacaggcgcgccgggggcccgggccagcggccgccgcaag

SEQ ID NO: 133750 - RNA, 38 nt, Homo sapiens
gccagcgcccacccaagcgcaaccaggagccgcgaccc

SEQ ID NO: 133751 - RNA, 77 nt, Homo sapiens
gaagagaaggcgggacacacagcagggaccacccccagcacccccgcggaagcccgcgggccccgcagaagcagccg

SEQ ID NO: 133752 - RNA, 46 nt, Homo sapiens
gccgagacaccccagccccccagacccacagagaagagccccaacg

SEQ ID NO: 133753 - RNA, 80 nt, Homo sapiens
gcagggagcagcagcccccacgcgcacagaggcagccggcgcaggagcagcagcgcagggaggacggaggcacaggagga

SEQ ID NO: 133754 - RNA, 76 nt, Homo sapiens
gcaaaaacagggaaggccaccagcccagaaaagagaagaggaaaagcaacggcgcaagaggcggggcgggcagagg

SEQ ID NO: 133755 - RNA, 80 nt, Homo sapiens
cgccgagcccccgcgacccaccgaaggccggggggccagaacccgggagcacagaacgggaagagagcgagccccagagc

SEQ ID NO: 133756 - RNA, 73 nt, Homo sapiens
gaagaacgcagaaagagacacaccgacgaaaaagaaaggaagaggaagggaaggcagacaaagaacaggcaaa

SEQ ID NO: 133757 - RNA, 49 nt, Homo sapiens
gccaaaacagaacgacggcccgggagaggcgaagacgcggcggaaggcg

SEQ ID NO: 133758 - RNA, 81 nt, Homo sapiens
gaccgccagcaaaggaagacgaggagaagaagaaagccagccgaaagaagcagcccaccgggacaagaggccgggcccggg

SEQ ID NO: 133759 - RNA, 74 nt, Homo sapiens
ggacaaaaacaccacgggcaccgccgaggcagacccgaagccagaaacgcacccaaggcaagggggggaagaac

SEQ ID NO: 133760 - RNA, 98 nt, Homo sapiens
ccccagaggcgggaaacaggggagccaccaacccaaccagagaacagcccaccaccacccgagcgcagcccagagaccccaacaccaagaagaacgga

SEQ ID NO: 133761 - RNA, 82 nt, Homo sapiens
gcacacagcaccgggcgaaaaggaggaaaagaagccagaccgagggaagagacagcgagcagagaccaggagaagagaagag

SEQ ID NO: 133762 - RNA, 84 nt, Homo sapiens
aacaaggaggacaagggcaccccaggacagaaaaggggaagcgagagaagcagcaacgcggagcaagagaaagaaacccggaaa

SEQ ID NO: 133763 - RNA, 79 nt, Homo sapiens
gagaggccccacaacaccccgggcccgagaaaggaggagaaacaagcagcaccgcaggaggcagcagcaagcagcaaca

SEQ ID NO: 133764 - RNA, 72 nt, Homo sapiens
ggacagcccaggaggacggcacacggccacgaggccagggaaagcggccaaaacaggcggagaagggaagag

SEQ ID NO: 133765 - RNA, 62 nt, Homo sapiens
ccgcgccgcaggaggccggcgaggagcgccgcgcccgcccggaacccggcaccagccgggca

SEQ ID NO: 133766 - RNA, 70 nt, Homo sapiens
aacccaagcagggcgaagggaacgcaaggcccccgaccacacgcccgcgcgagcgggggcaaccgaaaga

SEQ ID NO: 133767 - RNA, 78 nt, Homo sapiens
ggcgccaaaccccaaaggcaaaaacgccaccccaacaggagaccgaaggcagaacgacagacaggaagaaaggcaaag

SEQ ID NO: 133768 - RNA, 51 nt, Homo sapiens
gcgggcccacagaaaagcagcccaacgaaaaccgcaacaggagagagcagc

SEQ ID NO: 133769 - RNA, 82 nt, Homo sapiens
gccgggaccacccgaggggggaacaaagagaagacacaccaccacgccaaggagacgagcgccaaagacagaagcaagcaga

SEQ ID NO: 133770 - RNA, 81 nt, Homo sapiens
aaccgaaggggagccaggcggcgacagcgggaggagaaagacaaagggagccaaaggaaaaaagaccccagacccgcagaa

SEQ ID NO: 133771 - RNA, 81 nt, Homo sapiens
ggccgcccgcccagcgccgcccccggagggcccacgcagcgccggacaaaaaccccaccacgcggcaggggccgccgagga

SEQ ID NO: 133772 - RNA, 54 nt, Homo sapiens
ggcagggacagcgcaggcagcagacaaaacagaggagaccagaccagaagcccc

SEQ ID NO: 133773 - RNA, 72 nt, Homo sapiens
ggagacggagcgaaggccggagacacgaaaacacaaagagaagaccgaaggcggcgcaccgcgcaagcaagg

SEQ ID NO: 133774 - RNA, 72 nt, Homo sapiens
gcaagagccaacccaaaaccaaggcggagaacggaaaagcaccaggaagcagagaggaccgcagaagggaag

SEQ ID NO: 133775 - RNA, 70 nt, Homo sapiens
aaggaggggcaaaaacccggccaggaggaggcagcacggcaggagacgaggagaggacagcaggacaccc

SEQ ID NO: 133776 - RNA, 75 nt, Homo sapiens
aggaagacagggacagggcggaggcacgcacaggaccacaggagcaaagaagggcagagacacggagcaacaagc

SEQ ID NO: 133777 - RNA, 73 nt, Homo sapiens
acaaagggaaagaggagaggcacccgaaagccaggccagaaaacaggacaccccccaggcacagccacacccc

SEQ ID NO: 133778 - RNA, 41 nt, Homo sapiens
gaacgccgaaaaagaaacgggaaccaggagccgacaacaac

SEQ ID NO: 133779 - RNA, 80 nt, Homo sapiens
ggcaaagcacggacgggaccaagacaccggccaacgaagggacgggccaaaaggaagcccacgacaagagaccaggcaag

SEQ ID NO: 133780 - RNA, 58 nt, Homo sapiens
ggaagcgcgggcaacgagaagaaaaccagacgagagacagaagacgaaagggcaagaa

SEQ ID NO: 133781 - RNA, 71 nt, Homo sapiens
ccacacaccggccgaaggaccccgcccagagagaccgagcccagcggacccaaaggacccccgcgagagcc

SEQ ID NO: 133782 - RNA, 56 nt, Homo sapiens
gaagcaaccaaggcaagaggggacgagcaagagagagacacgcaggaccagcccgc

SEQ ID NO: 133783 - RNA, 96 nt, Homo sapiens
ggccccgcagaccgcgcggaagaagagcgcacgggaacgggggacagcgcccaagcgggacagacccaccgaaccagcagacagccaccagaccca

SEQ ID NO: 133784 - RNA, 80 nt, Homo sapiens
ggaggccgcggaacgcccggcgccaggaccgcggcaaagcccaggcccgggcggccagggacagaccagaccggcaccga

SEQ ID NO: 133785 - RNA, 80 nt, Homo sapiens
cgacagagccagcgagcgaaccagaccaaaaacgcaacaacagacggagacagggaaacgaaaaccaccgggcaccacga

SEQ ID NO: 133786 - RNA, 62 nt, Homo sapiens
cagagggagccaggcagagggcgaagaagagcagagcagccgaagcggggacgacacgaggc

SEQ ID NO: 133787 - RNA, 77 nt, Homo sapiens
aacacccgcagaagcgcaaaagggaagacgagggcagaaaccacccaccgaaggaggagagccgaaagcgcaaacac

SEQ ID NO: 133788 - RNA, 76 nt, Homo sapiens
cacaccccacaggaccccagagcgacagcccgggacaccaagaaagaacgacccaccccgaggagggcggaaccac

SEQ ID NO: 133789 - RNA, 71 nt, Homo sapiens
gcagagcaaagggggcccccagggaggccgcacggcccacgcgaggggcacggggaagaaagccgagggcc

SEQ ID NO: 133790 - RNA, 85 nt, Homo sapiens
gcccagacacaggcgaggcggaggccgaggacccggggccgaggagcgggaagaggcggggccacccaccccaccagagccggac

SEQ ID NO: 133791 - RNA, 80 nt, Homo sapiens
ggagagccacagcaaacgggaaaggggccacacgggaagcaagcgccgccgaaccaagacacaggccaggaagagggggg

SEQ ID NO: 133792 - RNA, 65 nt, Homo sapiens
ccaggagcccgagagagaaggcccaacaaagaaaggacagcaagaagacaggacacacaagaagc

SEQ ID NO: 133793 - RNA, 72 nt, Homo sapiens
caccgccgagcagccagcccaagccaggggaggcgcggcccgccacgaagaagagcaacggaccacgcccgg

SEQ ID NO: 133794 - RNA, 82 nt, Homo sapiens
aacgagcaaaggcacgggcagccggaaggacaccaagagcggaccgggccccggagaccgaggagcccaggaggaggaaccc

SEQ ID NO: 133795 - RNA, 80 nt, Homo sapiens
aacaggagagaggcccccagcccaagggcaccgccgaccgaaaccgcaaacacacgacagaggcaaggcaaacacgaaga

SEQ ID NO: 133796 - RNA, 69 nt, Homo sapiens
ccaaaggcaggaacaggccgcggccgcaaaagagggaaggggaccaccccaggggaaagagaagaaggg

SEQ ID NO: 133797 - RNA, 87 nt, Homo sapiens
gggcacagcagagaccaaaggcagggcaaggaaacggccacaaggaacgaacacaaaccccaggccccaggacacaggaagccagaa

SEQ ID NO: 133798 - RNA, 82 nt, Homo sapiens
ggagaaacgcggccgggccggagggcccccgaggaccgaaccccggagaagaggaggacggcaaggaaggcaccccaagacc

SEQ ID NO: 133799 - RNA, 79 nt, Homo sapiens
gggaggggcggcggcgaaaagaccagacacaacagccaagcggagcgacaagagcgggaccgacaaagaaaggaggacg

SEQ ID NO: 133800 - RNA, 59 nt, Homo sapiens
gccgaggggacccgcacaagaaaacccacgaagggaacacggacacagacggaagggag

SEQ ID NO: 133801 - RNA, 84 nt, Homo sapiens
accaggacacaaaggcccaccggcgaaaccaaaagaagggcagcagagacgacaagaaagagcaagcccgggaaccggaaacaa

SEQ ID NO: 133802 - RNA, 68 nt, Homo sapiens
aaaggagagccgaccaagcgaacagagagaagggcgggagaaaccaaggaaagagaaaagcgggaggc

SEQ ID NO: 133803 - RNA, 91 nt, Homo sapiens
gcggagcgaggcgcggagccgcggccggggcaccgaccagcccacggcaaggaaccaggaccaaagaagggacaggaggagcggaagccaa

SEQ ID NO: 133804 - RNA, 73 nt, Homo sapiens
cgggccaggccaggaggagggccaaccaaaacgaagccgagccacccaggaccgaagaacccagggaaaacga

SEQ ID NO: 133805 - RNA, 57 nt, Homo sapiens
ggcaagagggaagagagccaacggcacgacaagagaaaggagcaagaaccaacgaac

SEQ ID NO: 133806 - RNA, 36 nt, Homo sapiens
ccagagcggagacagacggaggaaaagcgggcgcag

SEQ ID NO: 133807 - RNA, 71 nt, Homo sapiens
agacagcccaagcccagaagggaggagaacaccaggacacagcaggggccagacaaccagacccgggaggc

SEQ ID NO: 133808 - RNA, 66 nt, Homo sapiens
aagcacgcgcgcagcccggcagccaggcccccacggaccacggcacgaacaggacaggcgccaacc

SEQ ID NO: 133809 - RNA, 82 nt, Homo sapiens
ccggaaggaagggaaaccgggggccccggacaacccgagcagaaagccaccccacccggggccccagcaccagccgacggcc

SEQ ID NO: 133810 - RNA, 61 nt, Homo sapiens
caaagcccccacgccaccacagacgaaccgcaacaagagccaccacgagggcgcccggccg

SEQ ID NO: 133811 - RNA, 74 nt, Homo sapiens
aacaaacgagcagaccgcagccaaggaaggagggccccggagcagccacaccaccgaggccccacccagcacga

SEQ ID NO: 133812 - RNA, 80 nt, Homo sapiens
cgggagcaaggagggcgaagagcgaggagggacagagcgaagaaccccccaagaagacgaaacccccgggccacaagaag

SEQ ID NO: 133813 - RNA, 83 nt, Homo sapiens
gcagagcgggaaagggcagcacaagaggaacagccaggaccaagcgaaaaacaggaacgcaagcacaggaccagaaacgaaag

SEQ ID NO: 133814 - RNA, 79 nt, Homo sapiens
gaggacaagaacggaggaaaaggcgcccgcgcaccagggccggagacagaccagaggaacccgagcaggaacaccccag

SEQ ID NO: 133815 - RNA, 81 nt, Homo sapiens
cagagcgacagcccgggacaccaagaaagaacggcagcggaacgcgccgacgccgcaaccagcaccccgaggagcggaacc

SEQ ID NO: 133816 - RNA, 58 nt, Homo sapiens
cggaccggaccacggcgcggagcgccgccagaggagaagacaccacgccacccaagag

SEQ ID NO: 133817 - RNA, 54 nt, Homo sapiens
gccaaagcagcagccccgacagccacggaacagggacagacaaacagcggaaag

SEQ ID NO: 133818 - RNA, 55 nt, Homo sapiens
gcacggaggccggacacgcacaccaacacaccccagaccaaaccgcacaaacaaa

SEQ ID NO: 133819 - RNA, 75 nt, Homo sapiens
cgacccagagggagcggaggaggagagggcggcgcacaccaagggagacccaccaggagcaccgagggcaggggc

SEQ ID NO: 133820 - RNA, 66 nt, Homo sapiens
cgggccagacaagccaagacacagaagggacaggcccaccaagccgagaacaccaggaaacagccc

SEQ ID NO: 133821 - RNA, 68 nt, Homo sapiens
gggcgagcacaaacggggcggggccggggaacacacagggaaacccagacgacaaggaaggccaaggg

SEQ ID NO: 133822 - RNA, 77 nt, Homo sapiens
cgcagaagaagcacccagcaagcgagggaccgggacgccacagccaggcgagagcacagacaaaacaacaaccagaa

SEQ ID NO: 133823 - RNA, 82 nt, Homo sapiens
aaaagaggaagggcacccgacccccccagaagccgagagcaggaaaagaaagggggcccgagcagcaagaagaacagcccca

SEQ ID NO: 133824 - RNA, 85 nt, Homo sapiens
aagcagcggagcagccggaggacgcggagcccaagaaacgggcagccaggcccccacagcccgcagcacccggaggagaagaggc

SEQ ID NO: 133825 - RNA, 73 nt, Homo sapiens
cgcacgagaaagcaaaacaggaggccagggggagaggaccaggaaaggcagagaggaacagaggagcacggag

SEQ ID NO: 133826 - RNA, 71 nt, Homo sapiens
caaggggcagaccacaaggagagaagagagggagccacaaggagccaccacccgccaggacggagagcagg

SEQ ID NO: 133827 - RNA, 82 nt, Homo sapiens
ccagaaaaccgcagaccgggccgggccgccacaggcaaagcgcaaaacggccagagacacagagaaaaaagacaaaagaccc

SEQ ID NO: 133828 - RNA, 75 nt, Homo sapiens
aggagacgcggaggacagcccgcagggcggagaacggaaaagcaccaggaagcagagaggaccgcagaagggaag

SEQ ID NO: 133829 - RNA, 71 nt, Homo sapiens
ccgaacccaggaagcagacacaagaggagaaacggaaacccgagagccaggagacgcacagagggcaaccc

SEQ ID NO: 133830 - RNA, 38 nt, Homo sapiens
caccggcgggaggaacaaaagcgagcaggcgacccaaa

SEQ ID NO: 133831 - RNA, 63 nt, Homo sapiens
ggcggccacaaggccgcccagccgcacgcgacgacagggcgccggccgagcccgggaaaacga

SEQ ID NO: 133832 - RNA, 63 nt, Homo sapiens
cgccagcccaggaaaggcgccgaagagggaccggagggccaagcccaaccacgcccagcacga

SEQ ID NO: 133833 - RNA, 74 nt, Homo sapiens
ccgggaccaggcccgggggcggcggccacgccaaggacggcacccccggcgaggaaaagcgcaacaccggcaga

SEQ ID NO: 133834 - RNA, 72 nt, Homo sapiens
agcacagaagcagaccggagagcgaaagcacacgccagcacagcgacgagaagaggcgaacggaagcaacac

SEQ ID NO: 133835 - RNA, 51 nt, Homo sapiens
gagagacagggcgcccagggggagaacaaaacgcggagccgagggcagacc

SEQ ID NO: 133836 - RNA, 64 nt, Homo sapiens
gaaagccaacacacaaaagggacaccacgcaccccagcagacaagagagaccaggcaagggagc

SEQ ID NO: 133837 - RNA, 77 nt, Homo sapiens
aggccgcacccccagaggccagaagcccaggaagcacacacaaggccacgccagcgggggcgccaaaaaagagcacg

SEQ ID NO: 133838 - RNA, 57 nt, Homo sapiens
ccgagacgccccggaagaccgcccccagaagggcaggcgaagacgcggcggaaggcg

SEQ ID NO: 133839 - RNA, 78 nt, Homo sapiens
gcgagccccggaccaccagccagcgcggaccagaccggaacgcccaagccccaccgcgagaaaaaaaaggcgcggaga

SEQ ID NO: 133840 - RNA, 79 nt, Homo sapiens
cggccagagaagcacacaaccagcgaaacaaaggcgaaagaaccccaaagaacggggggcagaagaaaaagcaggacaa

SEQ ID NO: 133841 - RNA, 74 nt, Homo sapiens
gcccaaccgccgccagcaccaggccagcaccaccggaaacaaagccagaccgccgaggggggacgaacccagga

SEQ ID NO: 133842 - RNA, 75 nt, Homo sapiens
gcaaggcccaaaagcggaacaggcaggccagcaagcacaccaggccacgacaggggagcaggcgaagcgagccag

SEQ ID NO: 133843 - RNA, 80 nt, Homo sapiens
ggcgagcgaacaacaacccaaccaacggaaacaggaacacgaaagaggaaaaacgcacaagaaaccgaagccaaggagga

SEQ ID NO: 133844 - RNA, 74 nt, Homo sapiens
gccacagaaaccagaccagaaagaaaacccaggaaacacaagggaggaacccaacaggcccacaggggcagcgg

SEQ ID NO: 133845 - RNA, 74 nt, Homo sapiens
cagagcaccggacacgaggagaaacagcagaaacgcaccaggccaaagaaagagaaacggaccggcacgcggcc

SEQ ID NO: 133846 - RNA, 80 nt, Homo sapiens
caggcagagccggcgggaggacaagaggagacaagcgcaagcagccagagcccgggcgcaaagaaccaggcccggaccag

SEQ ID NO: 133847 - RNA, 75 nt, Homo sapiens
agagaccgcgacacccccgccggagcagacgcaggacgggaaacgacggcaacagggaaacacaaagaagacacc

SEQ ID NO: 133848 - RNA, 104 nt, Homo sapiens
gccccgcacgggacccgcgggccccggcccagcaaccgacaacgcggcccggagaagacccccaagaaaagagggacccaagagcacgagaaagcgcacagaca

SEQ ID NO: 133849 - RNA, 59 nt, Homo sapiens
gagaacgggccaggcaggaaggcaccagacccggaggagcagcaccccggcaggcagac

SEQ ID NO: 133850 - RNA, 69 nt, Homo sapiens
gaaaaggcccgaagccaaaaagaggaccaaggggcgaggcggccacgaggcaagagacgccccgaggcc

SEQ ID NO: 133851 - RNA, 65 nt, Homo sapiens
aacacagccgcagagcccgcagagagcaaggcacccacgaagagaaggacccggcgggggcaagg

SEQ ID NO: 133852 - RNA, 65 nt, Homo sapiens
agaggaacaggcggcgggcgagccaggcccacgcggaccggcagcgccaccggaccaccagacaa

SEQ ID NO: 133853 - RNA, 61 nt, Homo sapiens
gagccagagcgcagaaagccggcacaagacaacaggaccccccagaaacccaggacgcaca

SEQ ID NO: 133854 - RNA, 71 nt, Homo sapiens
ggagaaggaccaagaaccagcaggagaaggaccaaaaggaacgagacggaagagggagcgcggccagcaga

SEQ ID NO: 133855 - RNA, 76 nt, Homo sapiens
gaaagcagagcgacgcgcgccgcacggaggcaagaagaaacccaccgcaaagaggcaccggacgaagaaagaacca

SEQ ID NO: 133856 - RNA, 78 nt, Homo sapiens
caggcgcagcagcggcgccccggggggcgagcaaggaccgaagaggggcgccggagaggagacgagccacgagaggac

SEQ ID NO: 133857 - RNA, 54 nt, Homo sapiens
gggggccgccgggacccggccaccagcaagccgagaaggaaggcccgcccgccg

SEQ ID NO: 133858 - RNA, 82 nt, Homo sapiens
ggcgcccggagcggccgccccagcggagcccacccagaggcagggggcgacccgaacccaaaggaggaaacagcggcaagcc

SEQ ID NO: 133859 - RNA, 56 nt, Homo sapiens
agcgcggacgccacccgggggcacagcaaggagcgacgccgacaaaggaggaaaag

SEQ ID NO: 133860 - RNA, 74 nt, Homo sapiens
gacaagaaaaaaaagcgcggagacaaggaagcagccaacaggcaggaaacgcaaccggacagaagaggaggcaa

SEQ ID NO: 133861 - RNA, 68 nt, Homo sapiens
aacagaggaaaaacagagccaagaaaggaagaaaagccagaggaagagaagacgcccgaacagcaggc

SEQ ID NO: 133862 - RNA, 86 nt, Homo sapiens
aaacagagagccagagacacagaaaaagaagaagcggaaacaacgccccgcaaaagaacaaaccgaaggcaacggcacaaaacaga

SEQ ID NO: 133863 - RNA, 57 nt, Homo sapiens
aagccgccgcaccccggccagggcggagaacggaaaagcaccaggaagcagagagga

SEQ ID NO: 133864 - RNA, 63 nt, Homo sapiens
acaacgaacagaagcacaaccagagccggccccgccaccagaaggacccgggaacggacgcgg

SEQ ID NO: 133865 - RNA, 78 nt, Homo sapiens
acaaccaaccagcgcccaggcaagcagcgcgcaggagcccagacaaaaacaccacacaggaagaccacacagaggaag

SEQ ID NO: 133866 - RNA, 80 nt, Homo sapiens
caacacccaaccaacggacaccaccaggggacggcacggacgacagaagcgacgggagaccgccgcggagaaccgaacca

SEQ ID NO: 133867 - RNA, 75 nt, Homo sapiens
gccgaccggacaggagcaggcagaccaccccaggcaagcgacacaaccagaacagaggcaggcagaaggaccagg

SEQ ID NO: 133868 - RNA, 84 nt, Homo sapiens
gggagggcgggccaaggccggcagacgggagaggacccccaaccccggcgcagagccccagcaagaccggcacccagccaccaa

SEQ ID NO: 133869 - RNA, 76 nt, Homo sapiens
gcgagcaggagggccaagacccaggagggggcccagaccggagaaggcacaccaaccaggaaaccagccggcaggc

SEQ ID NO: 133870 - RNA, 57 nt, Homo sapiens
cacgagcagcagccgcgggacaaagcgcagggagcaaacgaagaggaccccacccgg

SEQ ID NO: 133871 - RNA, 59 nt, Homo sapiens
gcaacaagcccacccgaaaccacaaggccgaccggcaggcgcccgagcacgccaacccc

SEQ ID NO: 133872 - RNA, 105 nt, Homo sapiens
ggccgcaacgccacgacagaaggcgccaggcgggaaaccggcccagcggcacaagcccagcagagcgagggacccgaaccggagggaagcgcaccaaaccagcag

SEQ ID NO: 133873 - RNA, 79 nt, Homo sapiens
gggcgcgcaagacgagggccggaggggcccacgaggagccaacacaccagcaggagccaacgaacaaggaccccaaacc

SEQ ID NO: 133874 - RNA, 57 nt, Homo sapiens
aacgcgaaaaggaagcggaagggcaccaaccagcggacacacggaaaagggacggga

SEQ ID NO: 133875 - RNA, 53 nt, Homo sapiens
gaacccaaaagccgacaaccccagaaacaggggacaagggaaaacaacaggga

SEQ ID NO: 133876 - RNA, 74 nt, Homo sapiens
ggaggggcaggaaacgaaggcggaacccaggcaggcccgccgcaacgccccaagagccccccaggcgagcgcca

SEQ ID NO: 133877 - RNA, 60 nt, Homo sapiens
cccggaggaggcgaagcgagaggacagccccaggaccgccacgaggagcacgcagcggga

SEQ ID NO: 133878 - RNA, 75 nt, Homo sapiens
aggggacggccaacgcgaggagccacgggcagaagcgacaccgaggcagaaccgcaaggagggacggagagaccg

SEQ ID NO: 133879 - RNA, 67 nt, Homo sapiens
gggggaaaaggagcgcaaagcgcaaagaagccggcagcacagccagaaggcagagaggagacaagag

SEQ ID NO: 133880 - RNA, 70 nt, Homo sapiens
aggcgagaacaacagaaggagaaaaggaacaggcacaaggacgaacgagaccagagggagagggcaacaa

SEQ ID NO: 133881 - RNA, 72 nt, Homo sapiens
gaggagccacgagcgggcaccagaggggaaggggcccggccaccaggggaacaacggaagaccacagaaaaa

SEQ ID NO: 133882 - RNA, 75 nt, Homo sapiens
ggggacagaaaaacagaccaaagaaccggagagccggaaacagaaggccaggaaaaaaaggcacagaacaaggca

SEQ ID NO: 133883 - RNA, 77 nt, Homo sapiens
gcacggcccccaacaagccccgggcggcccagcaggcccccacagacaggaaagggggaggaaaaggggcagacaga

SEQ ID NO: 133884 - RNA, 83 nt, Homo sapiens
gcagcgcccccccgaaccgcgccaaccacgcggggagggggcgcgccaacccagaggcgccgggggccaggaccccgcccgcc

SEQ ID NO: 133885 - RNA, 66 nt, Homo sapiens
ccaggagccagcgggcgacaggcacaagaagaggcaagcagggagcaaaagagacaggacacaacg

SEQ ID NO: 133886 - RNA, 85 nt, Homo sapiens
ggcggcggcaccgcgcagcggcgcccgcagccgcagcccccgcccggaggcgggcagaggggaccaaggagaagagaaggacgga

SEQ ID NO: 133887 - RNA, 77 nt, Homo sapiens
acaccccgcaccgcgagccgaccgcggacagcagaacaaccacagcagcaaacagagcaccacaggcggacagcgac

SEQ ID NO: 133888 - RNA, 68 nt, Homo sapiens
gagcgaggacgccggcagaacgccgaccaggacagcgcccaacccaagaggcaacacaaacacccagg

SEQ ID NO: 133889 - RNA, 79 nt, Homo sapiens
cccaggacccagaccggcgggcaaacccacccggcccaaccacgcagcgagaaggaagaaggggaggaagaaacgcagg

SEQ ID NO: 133890 - RNA, 41 nt, Homo sapiens
cgcacgagagcgacacggacaagcggaggcagcccaggacc

SEQ ID NO: 133891 - RNA, 78 nt, Homo sapiens
gcaccaaagcgcgccaagacaagaggcgcagaccgggagcgagcagcaggccgccgggggagccacgcgcaccgcccg

SEQ ID NO: 133892 - RNA, 67 nt, Homo sapiens
ccgcgccacagccaccagagccggcagcaaagagggaacagagaggaggcagagagccccgcgacga

SEQ ID NO: 133893 - RNA, 57 nt, Homo sapiens
cagcgagagccaagccgggggcacgccccccacccccagaagaagccacacccgaaa

SEQ ID NO: 133894 - RNA, 80 nt, Homo sapiens
gccgccgaccaagacagagcaaggccacgacccacgagacaggggcccaagaaaaagcaccggacaacaaccgccaggga

SEQ ID NO: 133895 - RNA, 44 nt, Homo sapiens
aagacccggcgcaagcacaggaagccccgccagagcgccacaga

SEQ ID NO: 133896 - RNA, 74 nt, Homo sapiens
cccaagcagcgccgccagaaggaagcaacagacgggaccgaaagacggaagaaaacgccagagaagcagagcag

SEQ ID NO: 133897 - RNA, 84 nt, Homo sapiens
gccccagagacccagcaacgggcagcgggcgcaggaccccgccccacgcccaggaagccacagagaggacaaacaacaaccccc

SEQ ID NO: 133898 - RNA, 72 nt, Homo sapiens
gacccaaaaagggcagaaagggcccgaaaacggccagcagccccgacgcaaaccccagcaccagcaggcgga

SEQ ID NO: 133899 - RNA, 63 nt, Homo sapiens
cgggggacaagcggcgccccagagcggacgaggagaaaagagccggaagcaaaccccaggacc

SEQ ID NO: 133900 - RNA, 77 nt, Homo sapiens
ggacaagcggacgaaagggaagcgggcgagagaagggagaaccacaagggcgagccaagaagagcgacgccggcagg

SEQ ID NO: 133901 - RNA, 72 nt, Homo sapiens
ggccgggggagggacaaaaggagcccaaaagaaacagggcgcaggaaaagacgagccaggaaaagcaacaaa

SEQ ID NO: 133902 - RNA, 87 nt, Homo sapiens
cccacgacgcagcgccccaccaggccgagagaagaaaaagacccaagaaagcaacgaaaggaacgcaagaacagaagaagaaagcag

SEQ ID NO: 133903 - RNA, 79 nt, Homo sapiens
ccgggccaaaaggaggccccagacccagagagacgggggccaccagcgcccccaggccgagagcggggagggagcagca

SEQ ID NO: 133904 - RNA, 76 nt, Homo sapiens
aaaaacaacaacacagcggccgaacccaagcggaccagccggggaacaccaaagccagaaacggagcacacaagca

SEQ ID NO: 133905 - RNA, 77 nt, Homo sapiens
gggggccagagaccaaggcgcgcccggcgggccggaccaagggggcagcacgccgaaggagagaccagacaacaggc

SEQ ID NO: 133906 - RNA, 97 nt, Homo sapiens
agcgccccggccggcccccgggcggccgcgggggcggcgcaggcgaaacgagcgcagggccacggcgagcggccaacagggacgaacggacagacaa

SEQ ID NO: 133907 - RNA, 69 nt, Homo sapiens
gagcacgcaccgaagcaaaaccaacgcaaccaccccaggcacacaaagagaaagggaaagaagaaagcc

SEQ ID NO: 133908 - RNA, 64 nt, Homo sapiens
gcacacagggaggcacgagcagaagaggcacagaggaagcgagaaacagagagacaggccaaag

SEQ ID NO: 133909 - RNA, 73 nt, Homo sapiens
ccaggaaagacaggaggccacccccaaagaaaagaagaaaggccagcaccagacaaaggcaaaagggcaagaa

SEQ ID NO: 133910 - RNA, 59 nt, Homo sapiens
agcgcagcgaccacaccgaagcggagcagcaccaggcgcgcacaggaacccgaggccgg

SEQ ID NO: 133911 - RNA, 74 nt, Homo sapiens
cgaccgagggaagaccacaaccacgaccacaaaccggcggagccacagaccagaggacaagacaaagggagcaa

SEQ ID NO: 133912 - RNA, 61 nt, Homo sapiens
gccagcgaaaacgcccaggaaacggccaagaagcggaaagagaccagagcagcacccgaca

SEQ ID NO: 133913 - RNA, 64 nt, Homo sapiens
gcacgcaggcccaacgacggcaggggaaaaacgaggccccccaaaggcaagacggacgagacgc

SEQ ID NO: 133914 - RNA, 72 nt, Homo sapiens
ggagcacacacacaccacagccagagaaggcagccaagcccggggaccccaacagaaagagcccaacgggaa

SEQ ID NO: 133915 - RNA, 75 nt, Homo sapiens
accgggagccggcgcgcgggcggggaggcgaggccggacgcacccggggggcccagagcagggacaaggaaggga

SEQ ID NO: 133916 - RNA, 62 nt, Homo sapiens
gacgaaaagaaaccacaggagaagagcacagggggcgacaagacaggaagaaagaagaggaa

SEQ ID NO: 133917 - RNA, 79 nt, Homo sapiens
cacacggagggccgcccgcggaggagccgccgcgcagcccacgccggacccgcagcacgagccaccagcacagaagaag

SEQ ID NO: 133918 - RNA, 78 nt, Homo sapiens
cgggcggggccgggaccggcgccacagcagggacgaggagcgccgccgccccgagcccggccaccccagagaagagga

SEQ ID NO: 133919 - RNA, 75 nt, Homo sapiens
aaaagacacagggaaccaccaggagacacgaaacgaacggagcagggccgagagccaggggaaaggccagcgcag

SEQ ID NO: 133920 - RNA, 92 nt, Homo sapiens
cgggagcagccgccgggcccgggccccgggccgcggaccccgcagggcagcagggcgacagcaagaagccaagaagaagaacaacaagaaaa

SEQ ID NO: 133921 - RNA, 77 nt, Homo sapiens
aagaagcacgaaagccccacccgccgcagcaagcagagggacaagcaaggggccaaggagccaaggaggaaacccac

SEQ ID NO: 133922 - RNA, 72 nt, Homo sapiens
caccggaagaaaagagccaacaccacacgagagaccaagagaagggacaacaaacccggagcccaaaaggga

SEQ ID NO: 133923 - RNA, 77 nt, Homo sapiens
agccagaagcaccgagaaggaagaggcaaggaaccagacaagagcgcccaagcggacagccccacccgacaccagcg

SEQ ID NO: 133924 - RNA, 80 nt, Homo sapiens
gaagggcggagacagagcaagaaaagcccgggagcagaagggaggcccaagacccacaacaaaagcacagacagggaccc

SEQ ID NO: 133925 - RNA, 69 nt, Homo sapiens
ccgcgcaccgacccgacgcgccggcccacgcgcggccaaggaaagaaaggcacccccagcaacacgcaa

SEQ ID NO: 133926 - RNA, 75 nt, Homo sapiens
caagaggcggagcgaaaaacccaggagagaaacacgcaaaacaaggaaaggcacaagcgcgacccgccaaaaccg

SEQ ID NO: 133927 - RNA, 82 nt, Homo sapiens
cggcgcgggcgggaacggagggcgcagcgcccacccgcgccagagaccagaaaagccgaagaaaggcccacgcccacaaacc

SEQ ID NO: 133928 - RNA, 78 nt, Homo sapiens
cagcagaaaacgaaggaagaggaggacccgcgccgaagcgacccccgggcaggccgggagggcggagcggcgccgcgc

SEQ ID NO: 133929 - RNA, 79 nt, Homo sapiens
aggccaagacaaaggcggcccgccgcagagagccggcgcagggcgcgcgcagcaggcagcacccgcaggccaggaggaa

SEQ ID NO: 133930 - RNA, 77 nt, Homo sapiens
ggaagcggccaccgacacgcagcagcggccagaaacgccgaagggaccaggcagacgggaagaacccagaaagaaag

SEQ ID NO: 133931 - RNA, 100 nt, Homo sapiens
aaaccgaaccagaagacgagagccaacgcaaccaggcgcaggacacacagagaggcggacaacaaaacaccagggccacccagccgagggggagacggcc

SEQ ID NO: 133932 - RNA, 76 nt, Homo sapiens
agcggacccgcgggagaggcgcagcggaggcggaagcaggaccggggcacggccaccggggacaggagaggagagc

SEQ ID NO: 133933 - RNA, 73 nt, Homo sapiens
aagggagaagaaggaggccgggagcccacggccgcagacaggcccacagaagccggcaaaccccgacggcaga

SEQ ID NO: 133934 - RNA, 74 nt, Homo sapiens
ggaggagcggaccgagggcaacaggcaaaagcagaccggaaaacccaccggcaagaccacacccgaggggagcc

SEQ ID NO: 133935 - RNA, 81 nt, Homo sapiens
ccagggagacaccgaaaagaagagaaaccagcgcggggaagaaggaacaagcagaaagcacgaacaacgagaacaagacac

SEQ ID NO: 133936 - RNA, 56 nt, Homo sapiens
aggcagcaccccaacaacaccgcgagacgagaccgccagaaaacaaagacagagag

SEQ ID NO: 133937 - RNA, 79 nt, Homo sapiens
ccgaaccgagccaagcgaccgcccacccggccacccaaaaggggaacagggagaggcaagcaaccccggggaagaggcc

SEQ ID NO: 133938 - RNA, 76 nt, Homo sapiens
ccaaacggaagaagaccgaggcagggaagagagcggacgggcacaggagaacggccggacgaccagccagaacggc

SEQ ID NO: 133939 - RNA, 71 nt, Homo sapiens
gaccaggagcggaagcagacacaggaggagaaaaagaccgcggagaaccgacccagaccgccccacccaga

SEQ ID NO: 133940 - RNA, 38 nt, Homo sapiens
gcgacacaaggacggccaggcaccaggggcccaggcaa

SEQ ID NO: 133941 - RNA, 64 nt, Homo sapiens
agaggcgcggcaagacacacgacgggaaagggagcagcaccggccacacccacagcacgaccgg

SEQ ID NO: 133942 - RNA, 66 nt, Homo sapiens
ccaacccaggaggaccgcagagcaccacacgagcgagacggcaaggaaccggagcaaacgacccga

SEQ ID NO: 133943 - RNA, 76 nt, Homo sapiens
ggcgcggggcaaggaccggccccaggggggccagaagccgaaccgcgaggcggaagaaacggacaccaccagagca

SEQ ID NO: 133944 - RNA, 55 nt, Homo sapiens
ggaagcccaagaagggggaccggcccaaaaaggggcaaaaggaaaaaggaaaccg

SEQ ID NO: 133945 - RNA, 76 nt, Homo sapiens
ccgcgccccgcaccgcggcaaagagaggacgcagcgagaaaggcacgcagcacgggggcaggggccgacccagaac

SEQ ID NO: 133946 - RNA, 71 nt, Homo sapiens
aacaggcacaagcaggacaagccaagacgcaggcagagacgacaacccggcccaagcgggggagcgccggc

SEQ ID NO: 133947 - RNA, 83 nt, Homo sapiens
gcgagagaggagagggcagacggacaagagcgcggaacaggacgccccgagcccccacaacccgggcagccgggaaaacacgg

SEQ ID NO: 133948 - RNA, 60 nt, Homo sapiens
ccagaaaccaagaaagcagaggagcagacaggacaaaccccccccccgggcggacccccc

SEQ ID NO: 133949 - RNA, 56 nt, Homo sapiens
ggagagacgcagaggggcggcgggggggacgccagaggggaagccgcacgagggag

SEQ ID NO: 133950 - RNA, 80 nt, Homo sapiens
gccaaccgcaaccagacgccagcgggacgaggaccgagaccgcggccgggaccgagggcacgggagcgcggggaccgaga

SEQ ID NO: 133951 - RNA, 68 nt, Homo sapiens
ggacgggccaccgcggcgcgcagaggcaaggcggcagcaaaacgggcgcccgggcagaagcaagagaa

SEQ ID NO: 133952 - RNA, 70 nt, Homo sapiens
ggacgcggagacaagagacacacaccacgccaagaaccggaccccaaaggcacagaggccccacgaagaa

SEQ ID NO: 133953 - RNA, 81 nt, Homo sapiens
cccgggcggccgcaccgccagcaacccagacacacggaccacaacaaaacagcaccgacccagcaccaggcaccacaggca

SEQ ID NO: 133954 - RNA, 77 nt, Homo sapiens
gacgaaacacaagacagcgggggacccacggccaagacaaggcggaaacggacagcgaggccgaacgaccggaccgg

SEQ ID NO: 133955 - RNA, 76 nt, Homo sapiens
gggaagaaaaggaggcggcagacagccaaagacagagcggccaacaggcagcgccagcagcccgcagaacacagca

SEQ ID NO: 133956 - RNA, 70 nt, Homo sapiens
ccccgagaacgggaacagggaaagaccaggagaaggcggggaggaagacgacaacagggcagcaggcagg

SEQ ID NO: 133957 - RNA, 42 nt, Homo sapiens
gagcggaggaaaagggccagggagaccccacgcagggcagag

SEQ ID NO: 133958 - RNA, 88 nt, Homo sapiens
gggaaccacagaggacaggcgagggggcaggagagaccacacagggcaggccagcaacagaagaaagcaagcaccggggaaagcggcc

SEQ ID NO: 133959 - RNA, 71 nt, Homo sapiens
gacgcagggcgcccccgagcagaaccagaaaggaacaaagaaaggcggaaacaaagaagccaaagaagagc

SEQ ID NO: 133960 - RNA, 78 nt, Homo sapiens
gagcggaaaggcaaaaggacaggcaagagaggaagaggcagaggaggggcccaggccaacgacacagcccgcgacagc

SEQ ID NO: 133961 - RNA, 80 nt, Homo sapiens
ccaccgaaccggccggggacccaaaagccaacacaccgccaccccgggccaggacggcaagaagaagcgaaaaccgccca

SEQ ID NO: 133962 - RNA, 73 nt, Homo sapiens
gcaagacaggaccgggcaaaacagaccgaagcagacacgcgcagcgacgccgcaagcgccaaagcggaggacg

SEQ ID NO: 133963 - RNA, 81 nt, Homo sapiens
cccaaagggagagcacggaaacccaggccgcagcccacagaggcgcaggggagccagaaaaacacagcgggaccggcaagc

SEQ ID NO: 133964 - RNA, 75 nt, Homo sapiens
gcgagcagccgggagacaccgccaccgccagggcagcaccccagaacacgggcggccagaaccgggcggacccaa

SEQ ID NO: 133965 - RNA, 78 nt, Homo sapiens
aggcccgcccccgagggccagcggagccgcccagagggcggagaacggaaaagcaccaggaagcagagaggaccgcag

SEQ ID NO: 133966 - RNA, 66 nt, Homo sapiens
ggggagacccggggacccccgacgccaggcagcgcccccaaacgacaacgaagagaggaaagaagc

SEQ ID NO: 133967 - RNA, 69 nt, Homo sapiens
gacaggcgacaagcaaggggaggagcagcagcgcggcagagcagggggggccaaagcacggaggcaacg

SEQ ID NO: 133968 - RNA, 71 nt, Homo sapiens
gccgcaggaggaccaaacccaaagcaggcaagaggcagagaaagggaggccgaacccaaacccgaacgacc

SEQ ID NO: 133969 - RNA, 82 nt, Homo sapiens
cgccagagcgagcgccccgcccagggaaagggaaagagacagagcagagagaccacaacagccaacggaagaacagaccaac

SEQ ID NO: 133970 - RNA, 73 nt, Homo sapiens
agaaagaacagaacagaacaaagagaagcggcaggaaagcgaaaccccaccacgcggcaggggccgccgagga

SEQ ID NO: 133971 - RNA, 73 nt, Homo sapiens
ccgcgggcaggggaaccggcgagcgcaggcccggcagcgccgcgacgcccagggcgagagaagccacaccagg

SEQ ID NO: 133972 - RNA, 32 nt, Homo sapiens
cgggagaagccggaagacggagccaccgcacc

SEQ ID NO: 133973 - RNA, 82 nt, Homo sapiens
cggcggagggagaccacagaggggccggcccaaaagccccaggaccccaacaacaggagagagcaagcgagcagggagaaag

SEQ ID NO: 133974 - RNA, 56 nt, Homo sapiens
gcagcccaggagaaaggacccgcacgccgcgggacaagggcagcagggacgcacca

SEQ ID NO: 133975 - RNA, 79 nt, Homo sapiens
ccgcaccgagcaggcagccccgacggaaggagcgggggccccacccccccgcgggaacgcggaggcagggcacagcggc

SEQ ID NO: 133976 - RNA, 74 nt, Homo sapiens
cgaagaaaaggaccaaaaacacaacaaaagaaaccaacaccgcagcagccggcacccgcacaacccagggggcc

SEQ ID NO: 133977 - RNA, 88 nt, Homo sapiens
cagggcaaccacccggccggcgcggcgggaaaaacaaccaccagcgagcaaaaaggcaaagaccaagaccaccaagaagcgccccagc

SEQ ID NO: 133978 - RNA, 70 nt, Homo sapiens
cagcggcacacgggggagccggaacacaaccccaagagggaaaacacccagaaccaccaccccagaaggc

SEQ ID NO: 133979 - RNA, 50 nt, Homo sapiens
gagggaggaggaaccgcaagcagcagcagccgcccaaaacacaaaccaaa

SEQ ID NO: 133980 - RNA, 69 nt, Homo sapiens
gcaggcgagaagagaagcgaacgcagagcaagggcgcaggccgggcaccgccccacggggcgacgaggc

SEQ ID NO: 133981 - RNA, 79 nt, Homo sapiens
ccacccaggcccaagaagagaagccgcagaggccagcgcagggcacaccagaagagccagcacacggagcacagaaaga

SEQ ID NO: 133982 - RNA, 76 nt, Homo sapiens
cgacaccggccggcgcaggagaacgaaccgggcagcaaagacaccacagagcccgaacaaagccggaagcgccccc

SEQ ID NO: 133983 - RNA, 73 nt, Homo sapiens
cacacgggagcaacggccggccaaggacaccgcagacgcagggagggaccagacaccaaggcagagcacgaaa

SEQ ID NO: 133984 - RNA, 71 nt, Homo sapiens
ccgcccgagagggagcccgcggacgcagccaagaagccagcccagaaagggaaaacgacaccagggaaaaa

SEQ ID NO: 133985 - RNA, 64 nt, Homo sapiens
gggcgaaggaggaggacaaagagcccccacgagcccgcaaggccgagaccgggaggaagcggag

SEQ ID NO: 133986 - RNA, 75 nt, Homo sapiens
agaccacaaaacgaaaagaaccaaaacaagagaggcgcaagccgcagcgggccccgcggaccggaagcccaagac

SEQ ID NO: 133987 - RNA, 79 nt, Homo sapiens
gggcggcgcaggaggagccgaggcgagccaacagcacgacacaggaacgccacaagaaacaacagcaaggcgagggcca

SEQ ID NO: 133988 - RNA, 76 nt, Homo sapiens
acgagcggccgcggccaggcgacgccacccaagacacaaacggcgacacagaacacggagcagagaagaaagaacg

SEQ ID NO: 133989 - RNA, 72 nt, Homo sapiens
gaggagaggaccgagaagacagggacaaacgacagaacaacaaagagaccagggggacacacaaaaagcggc

SEQ ID NO: 133990 - RNA, 56 nt, Homo sapiens
accccagaccgagcccagaagggcagaaagggaaacggccgagaggacaggacggc

SEQ ID NO: 133991 - RNA, 52 nt, Homo sapiens
ccagagagccaggaaagaagagacaaagcagagcaagggagaacaagcagcc

SEQ ID NO: 133992 - RNA, 85 nt, Homo sapiens
accacgccccggggcagcaggcgaccagcgccacggcaaaaggagcagaacggcacgcagcccccgcagagagagagggagggca

SEQ ID NO: 133993 - RNA, 101 nt, Homo sapiens
cccccgcaacgcccccggcccgcagcccccgccggccgcccaacaccgaacaccaagaggcggccacccacgagccgacggcaaacgccagggagccacca

SEQ ID NO: 133994 - RNA, 42 nt, Homo sapiens
gcggcgcggggacccgcgagcacggaacggaagccgccccca

SEQ ID NO: 133995 - RNA, 80 nt, Homo sapiens
gaagaagcaggagaacgaaacggagccagagaaggcagaagggaaacacacagaagaccgcagaccaagggagcagggcg

SEQ ID NO: 133996 - RNA, 82 nt, Homo sapiens
ggagccaccccgggcgcagaggccacacccacagagaacccagacaacaggacgccgccaagggggagaggcaccagcaaca

SEQ ID NO: 133997 - RNA, 65 nt, Homo sapiens
cgcgaagacggaacccgggacgacggagagaagcaagcagaaggcccggaggagaacaagaccag

SEQ ID NO: 133998 - RNA, 72 nt, Homo sapiens
cacgacacagagaggaagacagagcgaagcagcagggcgaaccggcaaccaccaccaggagccagcacgagg

SEQ ID NO: 133999 - RNA, 40 nt, Homo sapiens
acgaaagaagcaggaagaccaggacccgcacagcggccgc

SEQ ID NO: 134000 - RNA, 86 nt, Homo sapiens
agaccaaaaagcgccccggccacaagaggaagacagaagcagcaaagaaggaaacgaaggcccggcagccaccgggcagcccgccc

SEQ ID NO: 134001 - RNA, 63 nt, Homo sapiens
gcggacgccgaggcaccgaggcaccagaggagccaccaggagagaacgccgcgccgcgcgaca

SEQ ID NO: 134002 - RNA, 74 nt, Homo sapiens
aaagcaccgagaccgcccaccccagcacaccggacaacacagaacgaacccacaaaagagcaacgcacgaacaa

SEQ ID NO: 134003 - RNA, 86 nt, Homo sapiens
gcaggcggccgagccggccgggccgcgccacaccggcaccaaggcccgacaacaagccaaaacgcaccaaaggcagaggacagcaa

SEQ ID NO: 134004 - RNA, 60 nt, Homo sapiens
agagcacgagcacgggaaggccacgaagacggcaaggaggaaaggaagaggaagacggca

SEQ ID NO: 134005 - RNA, 72 nt, Homo sapiens
ccccaggaaagccaccacgccacacaccaaacggacgagaacaaaagaaccgagcgaagaaggccacgggaa

SEQ ID NO: 134006 - RNA, 74 nt, Homo sapiens
gaacaacagcacgggagaaagcgcccacgcacgaaagcccaggccaaaaagaggccgaacggccccccccaaag

SEQ ID NO: 134007 - RNA, 72 nt, Homo sapiens
ggagacgggagcaagggggccgcgcacccaacccagggcgccccggcaaggccaccgcagaagccacaggag

SEQ ID NO: 134008 - RNA, 77 nt, Homo sapiens
cccaaccccccacacgaaccaggaacacaagcccccgcaaaccagggccccagcaccgggaagacccagacacacac

SEQ ID NO: 134009 - RNA, 78 nt, Homo sapiens
agggccggaaagaaagcacaccaaaagaaacaacccaagaggacgggagaacagaagagcagacagagccgagccagg

SEQ ID NO: 134010 - RNA, 83 nt, Homo sapiens
ggcacggaggaagcaggaaggaccacccaagcaggcccaggggaagaaaaggccaccagcgaggagaagaaggaagagaaacg

SEQ ID NO: 134011 - RNA, 51 nt, Homo sapiens
cgcagggcgcccccgccggccccacacaccaaaaagcaccacaacacgccg

SEQ ID NO: 134012 - RNA, 68 nt, Homo sapiens
cgccaccacagagacaaggggaggagagaaaaaccacaagagcaaccggagacgccggcaggcaagcg

SEQ ID NO: 134013 - RNA, 75 nt, Homo sapiens
aacggaacaacaggagggcaacccagaacacaaaaacaccccacagaacaggggcgacgcgaaaccaggacgacc

SEQ ID NO: 134014 - RNA, 72 nt, Homo sapiens
cccaaaccaaccccagaccggagccagacagcagccaagcaacagccagacgccgcacgccagcccagccca

SEQ ID NO: 134015 - RNA, 77 nt, Homo sapiens
ccggccccggcccgccgcaggacaagcccaggagacacgacgcaccgagccggcaggcagagcagcgagcagggccc

SEQ ID NO: 134016 - RNA, 75 nt, Homo sapiens
gaagaagaagcgcaaagaagcaacacaaaggccacggagaagaagacagagcagaaagccaaaaacacagaacga

SEQ ID NO: 134017 - RNA, 85 nt, Homo sapiens
cgcgccccggcgcaccgacggaccgggaaggagcacccaggaccaccagaacggagggagcaacaacaaggagcaagcacagcgc

SEQ ID NO: 134018 - RNA, 63 nt, Homo sapiens
cagggcccaggagcacgggcagggggaaacccgcccagggcgggagaccgccaagaaacacca

SEQ ID NO: 134019 - RNA, 79 nt, Homo sapiens
gagaagagcaaaaccacccccgagggaggagcaaaagcgggcggaaacaccgacccgcacagaaaacgcgcggccggag

SEQ ID NO: 134020 - RNA, 70 nt, Homo sapiens
ggaaccacccccgaaaccccaggccgcggaggaggagaacaccgacaacagcggaacagggcacaacacg

SEQ ID NO: 134021 - RNA, 85 nt, Homo sapiens
caccgacacgcaccgaagcaacagcccacgggggcccgaaggcaccgcagaacggggcgggacgacaggagccaagaccagccag

SEQ ID NO: 134022 - RNA, 56 nt, Homo sapiens
cgggcccgggccccgggccgcggaccccgcagcccgacggagaagacacggaaacc

SEQ ID NO: 134023 - RNA, 74 nt, Homo sapiens
aggcggagcccagggaagccaccacagagaagacggcaggaaggccgcagacacaagcacagggcccaacaaaa

SEQ ID NO: 134024 - RNA, 53 nt, Homo sapiens
gcacacccggcgccgggggggaccacacgccaaaggcacggggcaagccacag

SEQ ID NO: 134025 - RNA, 74 nt, Homo sapiens
acggaggaagcgagcggacccgccacacgcggcccacaacagccgcgggcaacccaggagcaaacaaacacagc

SEQ ID NO: 134026 - RNA, 81 nt, Homo sapiens
ccccgacggacaggaggaggagcaggaagcgccggggaaggcgagagcggagcaccaggcccggaaagagcaggcacccgg

SEQ ID NO: 134027 - RNA, 84 nt, Homo sapiens
ggggcaagcgggccacgcacccgcaccaaggccaagaaaaggcacacacacccgcaggagagcgccggagaaaggaagaaccca

SEQ ID NO: 134028 - RNA, 55 nt, Homo sapiens
caggacagagcaaggggaggagcaaccaccgagacagaagcaaaagcccccaccc

SEQ ID NO: 134029 - RNA, 58 nt, Homo sapiens
gaaaaagccgcccgcagaggcacacacggagcaggagaggcggccgagcccaagcaga

SEQ ID NO: 134030 - RNA, 56 nt, Homo sapiens
gccccgagagcgggaacaggccggagggaagaaccacggacacgcagacaggcagc

SEQ ID NO: 134031 - RNA, 89 nt, Homo sapiens
cgacgcccgggaagagggggagcggccagcgagagccagggcccaaagaaccgaaaaacacgcgcgccgagccagaggagaccccagac

SEQ ID NO: 134032 - RNA, 52 nt, Homo sapiens
aggcaccaccccaaagaccaagcccccggaaaccacccgccaggccgcagca

SEQ ID NO: 134033 - RNA, 33 nt, Homo sapiens
gaggagaggggaagagccagaaaaagacccgca

SEQ ID NO: 134034 - RNA, 72 nt, Homo sapiens
aaacagcagggagaagagacaacaagacaggaaccagcaccagacagaagacgcagaagagcagcgaagagc

SEQ ID NO: 134035 - RNA, 93 nt, Homo sapiens
ggagcggagaggacgagagcccaggagaaaaccggaagagaaaggccgggaagcaggaaagaaaaaaacaacagaggagaagaggaggaagaa

SEQ ID NO: 134036 - RNA, 81 nt, Homo sapiens
caacggcggcacccacgcagacaccagccgcgccaggcccgcgagccccagcccgggagaccgccgaaggcgggaagggaa

SEQ ID NO: 134037 - RNA, 76 nt, Homo sapiens
acggaccgaaccgcccgagagggagcccgcggacgcagccaagaaacccgcaaagaagcgagccagcaaagaaacg

SEQ ID NO: 134038 - RNA, 62 nt, Homo sapiens
caaacccccgcgcgcagagggcagccgggaaagccgcaaagccaaccagacgaaaccgggcc

SEQ ID NO: 134039 - RNA, 83 nt, Homo sapiens
acaaggaggacacaagggaagaccgggccgaaaagcagaagacaaccaaaacaaacgcaccccacccaacagcgggaacaaga

SEQ ID NO: 134040 - RNA, 76 nt, Homo sapiens
aaaagacagagaggggaaaccccgaaaggggggcagggagagaaggggaaggaacaaagcagagaaaccaaaaggc

SEQ ID NO: 134041 - RNA, 64 nt, Homo sapiens
ggggcagaaacagagaaggaacagggggagaggcaccagcaacagaccaaccgcagcaagcaca

SEQ ID NO: 134042 - RNA, 73 nt, Homo sapiens
cacgccggcgcgagcacagaggcgaacgggagccaaagggccccgggggcgaaagacaagacaccgccaaaaa

SEQ ID NO: 134043 - RNA, 73 nt, Homo sapiens
aggaaaacagcaagaacggagaaccagccaccaggacccacccaagagccccgacccgaaggggacgccgaga

SEQ ID NO: 134044 - RNA, 63 nt, Homo sapiens
gggcgggacgggacggcacaccgaaaggaagaggagcaagcaagggagcgacaggagacaagg

SEQ ID NO: 134045 - RNA, 73 nt, Homo sapiens
acgagcaagggcccgggacaacgcgacgagcaacccagcgccgaaggagaaaagaagcagcccacgaaccccg

SEQ ID NO: 134046 - RNA, 70 nt, Homo sapiens
ccccaaaagcgggacacaggcaacgcagcgaacagcacaagcgcacagccggccaaccgaggaaacgaac

SEQ ID NO: 134047 - RNA, 84 nt, Homo sapiens
acgagccaaacaaccagcccaaccacacgcaacaaccagcagcacagagggaccaagaaaggcccagggaccaaagcccggaca

SEQ ID NO: 134048 - RNA, 84 nt, Homo sapiens
gcagacacgcccacgccgcccagccaagggaaggagcggcggagcccagcgaaccaagccaacggaaaggcaccgagcagaaaa

SEQ ID NO: 134049 - RNA, 82 nt, Homo sapiens
gcaaagaaggccgagggacgaggaccggaggagccgccacgcccgaccggacaccaaacaggggcacaaaaccaggggaaag

SEQ ID NO: 134050 - RNA, 78 nt, Homo sapiens
acccacgaacgcccaccccccgaacccagccgcaccgagacaaagcaggaggacacaagaagggaggaaaggcggacc

SEQ ID NO: 134051 - RNA, 51 nt, Homo sapiens
ggcggcgggcgagccagcagcaaggcgaaccggcgcggagcggccgggcca

SEQ ID NO: 134052 - RNA, 63 nt, Homo sapiens
ggacgccagccgcagaggaagacccggggaaacaagccggcgcgccacagcgggcacagaaac

SEQ ID NO: 134053 - RNA, 55 nt, Homo sapiens
gacaaaagggccaaagaagggagagacaccagcagccgcaacggcacacacgccc

SEQ ID NO: 134054 - RNA, 62 nt, Homo sapiens
cggagccccggccgcccgggcagagggcgccggccgagcccgggaaaacgacagcagcagca

SEQ ID NO: 134055 - RNA, 73 nt, Homo sapiens
ggcgcccgcgccggagagcgcagcaggagccgcaaagggcaagacaaaacggcaggaaaaaccagaacaaaca

SEQ ID NO: 134056 - RNA, 63 nt, Homo sapiens
ggccacccgcgccaggccaagcgccgccggcaagaacaccggccgcccccccgccggacggaa

SEQ ID NO: 134057 - RNA, 57 nt, Homo sapiens
cccgagagcgggacgcagagcgcagcggggcgaagagggaccggacacacaaagccg

SEQ ID NO: 134058 - RNA, 82 nt, Homo sapiens
aggaagaagagccacgcagagggccacgagccgacggcggaaacgaacaggagagcagccagcgggacagaaggaggaagag

SEQ ID NO: 134059 - RNA, 58 nt, Homo sapiens
gaagaacagccaccggaccgacacacaagggagaacaggggaagcagccaaggagaaa

SEQ ID NO: 134060 - RNA, 77 nt, Homo sapiens
agcgggaaccgggaaacagggaacaccagaaaaggcagaaaacaccaagacagaagcagacagaacaaagcggaccg

SEQ ID NO: 134061 - RNA, 77 nt, Homo sapiens
gagcacagaacgccaggaccaaaacagggagaaacacagccagaaggccaaaacagaagaggcaaagcccagccaca

SEQ ID NO: 134062 - RNA, 77 nt, Homo sapiens
gcccgccaggcgggagaagaaccccccgaaaggaccccccagggcaacacaacaaggcggaagaaagagcacagaaa

SEQ ID NO: 134063 - RNA, 62 nt, Homo sapiens
gcgccacgcgcggcgcacacgggcgcgggccggaggaacgagagaagcgggcaggaagagag

SEQ ID NO: 134064 - RNA, 87 nt, Homo sapiens
ccgcagagcggcaccgaaggacaggaggccggaggaggcagaggccaggagggagaggcccaagagccggaaagggcggccggcccc

SEQ ID NO: 134065 - RNA, 67 nt, Homo sapiens
ggccgcggccaagaacgccggcgccccaaccgcacaccgaaccccagaacagacagaggggacagca

SEQ ID NO: 134066 - RNA, 67 nt, Homo sapiens
gcccagccgaccaccccagcccgggcaggagcgccacccagacacgagaacgggagcccgccggaag

SEQ ID NO: 134067 - RNA, 72 nt, Homo sapiens
ggcccaaccgaagaaaacaagcgagaagaagaaaagaagagagcgaggagcggcaggagcaagccaagaaag

SEQ ID NO: 134068 - RNA, 80 nt, Homo sapiens
ggaaccacaagcagaccggaggccaagaggcggaaggagccaggcacgaccggcagcggcaacggggaccccggagccca

SEQ ID NO: 134069 - RNA, 82 nt, Homo sapiens
cgcgccgggagggggcccgagccccgcaacaccgcggcccacgggacccccaggagggacccgcagagaacccacacaacaa

SEQ ID NO: 134070 - RNA, 64 nt, Homo sapiens
ggggaaaccagcgcgcgccaaagggcgacggcacacagagagaccgagggaccgggagccacac

SEQ ID NO: 134071 - RNA, 80 nt, Homo sapiens
cgcccgggcggagacagaagaggcgccaggacgaaggcccacgggcaaggcaagagcgcccaacaccagaaggcgaagga

SEQ ID NO: 134072 - RNA, 74 nt, Homo sapiens
cggcacaaacggaccaccagaaagcaccccacaggggagcaaacaagaggacacgggaacagcacggccacaga

SEQ ID NO: 134073 - RNA, 76 nt, Homo sapiens
agggaaacccaggacaccgaacaaggaacaggggacaaagaagaagaaacaagacacaggcgcacaaagggaagac

SEQ ID NO: 134074 - RNA, 61 nt, Homo sapiens
aagcaaaggccgcaagggcggggagaaaggcggccagcagacccagaacagagccaccgaa

SEQ ID NO: 134075 - RNA, 80 nt, Homo sapiens
aagaagacagcggaagcggaggaggacaggagcaggagaagagggcaaagaaaaaggagcaagcgcgggaagaacccaga

SEQ ID NO: 134076 - RNA, 74 nt, Homo sapiens
gccagaggccaggacaacaaaagccaaaaccgagcaaggaagcgacaagcccagagaacaggaaagcaaaaccc

SEQ ID NO: 134077 - RNA, 57 nt, Homo sapiens
gaagccgaaaagcgcagcgagcggagccgccggaggcccccccgggcccaccaccaa

SEQ ID NO: 134078 - RNA, 69 nt, Homo sapiens
cgaacggggcgcccaggccgcccgacccaaagggaaaacagaaacagaacagcagaccagaggcccagg

SEQ ID NO: 134079 - RNA, 59 nt, Homo sapiens
cagcgaccagccgccagcaccaagaaagccaaaggcagaagaagaagagcggagaaccg

SEQ ID NO: 134080 - RNA, 76 nt, Homo sapiens
gaaacgccccgaaaagacgggcaacagacgcgcaggagaccaggcggagaaacagcaagcagccagcaaggaggag

SEQ ID NO: 134081 - RNA, 58 nt, Homo sapiens
cgcccagaagccagaccccagggggggccgaagaagccagggggaggaaagcagacag

SEQ ID NO: 134082 - RNA, 56 nt, Homo sapiens
cgccacggggcccgcgccccagggaggggcggccacggcaaagccaggcaagcgca

SEQ ID NO: 134083 - RNA, 76 nt, Homo sapiens
aaccaccacgcacccagcgggcagccagccaggcagcaaacaacagcagccgccaggagcaaggcagcgacccagg

SEQ ID NO: 134084 - RNA, 84 nt, Homo sapiens
gcacggagcaaccccaagcaccacaaaaaccacgagagcccgcccaacaaacagaggacaggacaacgaagagaggaaagaagc

SEQ ID NO: 134085 - RNA, 61 nt, Homo sapiens
gaagagggaagacacgcggaaacaggagacagacccagcacggaccccccccccagccggg

SEQ ID NO: 134086 - RNA, 72 nt, Homo sapiens
gaagaaccaaccccacaggacagaccccccagccgaacccgcagggaagcggcccgaggcgaggcgaggcag

SEQ ID NO: 134087 - RNA, 69 nt, Homo sapiens
ggaggaacgaagaccgccagaaaaggaaaccgagcagaggacaggagacaaggcaaccgcgcccagacc

SEQ ID NO: 134088 - RNA, 58 nt, Homo sapiens
gacgaccacaagaccgggcgccacgcagagccccgccaggaagacacgccggggaacg

SEQ ID NO: 134089 - RNA, 77 nt, Homo sapiens
agggacccgagcacgggaaaaagaccacacaggcagagaagaaagcgaaacacaagcaccaccacgagcaccaaggc

SEQ ID NO: 134090 - RNA, 68 nt, Homo sapiens
gcgaaggagaggacagaagaacgcaaacggaaccaaagccagccaagaggcagccaccaaccaggcca

SEQ ID NO: 134091 - RNA, 73 nt, Homo sapiens
gcagaagaacaccgaacaccagccgaaagggcccaccgcaaggacggagaagggaaccaaaccgaggaaggaa

SEQ ID NO: 134092 - RNA, 82 nt, Homo sapiens
agcggggagacggcgaagggacaccacaccgcccaccgggaacagggcaacacacaagcccaacaacaaggccaggcagacg

SEQ ID NO: 134093 - RNA, 77 nt, Homo sapiens
cagcagaacgaagacaacagggggagggagcgaaccggggacgggaaagaaccagacggagcgccgccccaggcgga

SEQ ID NO: 134094 - RNA, 70 nt, Homo sapiens
caagccaggcaccaaaaaggaagaggacgaacgacaagaggggaggcgcacacgaggagcgaaaaccgga

SEQ ID NO: 134095 - RNA, 54 nt, Homo sapiens
cggggggagccaccgggagagccgagcagccccagcaggaaaagaaaagccaac

SEQ ID NO: 134096 - RNA, 71 nt, Homo sapiens
cgggacagaccccacacaacacagccccgaagccaccgcaagggcacacacacgcgagagggcagaaggag

SEQ ID NO: 134097 - RNA, 95 nt, Homo sapiens
ccaccacggccacagccgccgcagacccagcagccaagagggaagcagacgagagcaaggaacaccaccccagagcaagcccaaggcacgaccgg

SEQ ID NO: 134098 - RNA, 75 nt, Homo sapiens
ggcgggagcagcaggacgcaccgccaccaggaccgaggccacaaagagcggccagaacggacgaaggccggggaa

SEQ ID NO: 134099 - RNA, 77 nt, Homo sapiens
aacagcgcgacaaccagaggccaaccggcgaagaacaaaacacaaagagcgcccgaaccagcaccgggagaggcggg

SEQ ID NO: 134100 - RNA, 47 nt, Homo sapiens
cccagaaggcaacgcgccgcaaaacagaacgcgacagggaggccgca

SEQ ID NO: 134101 - RNA, 84 nt, Homo sapiens
cgaaccgcgcggccgaacccccgacaagcagaccggaagaccgacggaagaccacaccccgagggagcccaggacaccacgaga

SEQ ID NO: 134102 - RNA, 75 nt, Homo sapiens
ccacgcgaagcaaagccagaccccgccacagagaaggggcacacccggggcggacagccccgggcggcagagcca

SEQ ID NO: 134103 - RNA, 78 nt, Homo sapiens
ggagagagcggaagaagcacccagcggggagcgggaaaccgaacaaggccgagcagcgggacccaccgggaagagggg

SEQ ID NO: 134104 - RNA, 72 nt, Homo sapiens
cacgaacgcagacgaaggccacagaagacgacggacagagagacacagaccgacaggacagcaccaaaaacg

SEQ ID NO: 134105 - RNA, 112 nt, Homo sapiens
ggcaacgagcgggaaaagaaaaaccagacaccacaccagacgagagagaccgagcgaggacacagaccgcccacccaccaccccagagggaggccaacacacaggcccagaa

SEQ ID NO: 134106 - RNA, 71 nt, Homo sapiens
aagaaaagaggggcacagaaaaagcgggccaaaggagaaacaagaaggagacaacaacggccaccgggcga

SEQ ID NO: 134107 - RNA, 79 nt, Homo sapiens
cagagacccaaggaccaggggaacgggagccaggacaggcaggagccagggcggagaggcagcagggggaagccaaaaa

SEQ ID NO: 134108 - RNA, 73 nt, Homo sapiens
agaccagcaccccgcccagccacccaagaagcgggaccacaggcaaaagacgcgggcaacgaaaagaagacga

SEQ ID NO: 134109 - RNA, 77 nt, Homo sapiens
gccgagggggaagaaagaaagcgagagggcaaaaccaaaggcggaaaaggggcaagggagccaggcaaacacggcaa

SEQ ID NO: 134110 - RNA, 74 nt, Homo sapiens
ggaaaggccgacccagagaaaagagcagccagagcccggaacagccaggaaggacgcgagcgacgcccggagcc

SEQ ID NO: 134111 - RNA, 68 nt, Homo sapiens
gggcggaggcaccgcgcgggggaaccgggcggggcggcccaaggggaagcgggcccggccccgcggga

SEQ ID NO: 134112 - RNA, 91 nt, Homo sapiens
gaagggccacccaggggcccccaccccgcgggcgcccggacggcgaaggagcaggggcgcgcagagggaccggaccagaacagccacacga

SEQ ID NO: 134113 - RNA, 68 nt, Homo sapiens
ggaaggcccacacagaggccacaggggagacaaccccaggacgggcgggacaaaggagacaggaccag

SEQ ID NO: 134114 - RNA, 75 nt, Homo sapiens
cgaaaacgcaaagccaggaacccaggacaaggcggagcggaggcagacacacacggggggagagggaggggggga

SEQ ID NO: 134115 - RNA, 79 nt, Homo sapiens
ccagaacacaggagaaagcgaagccaagcccgaagccaaggggccaagaggagaagaagacggagccgccgcacccagg

SEQ ID NO: 134116 - RNA, 77 nt, Homo sapiens
cggagaccccagggcaggacccgccacagacccaggccagcacccacccaccgggacagccaaggaagaagaaaaaa

SEQ ID NO: 134117 - RNA, 77 nt, Homo sapiens
acacgcacaagccacaaacccgccaaaagcgacaggagcaaaaggagcggcgcgaagaagaggcaggcaccccggga

SEQ ID NO: 134118 - RNA, 75 nt, Homo sapiens
agagacggcccagacgggggagaccaagaccggccggagaccaagcaagccagggaagaaccgaagacccagaac

SEQ ID NO: 134119 - RNA, 72 nt, Homo sapiens
cccgcgagacagggccaggaccggcaaagaacgcaacgcaggccagcgaagaagggcccccgagaccacgga

SEQ ID NO: 134120 - RNA, 56 nt, Homo sapiens
cgcgaagccaacgaggcggggaaggcccgccgaaggagaagggcaggaagacccag

SEQ ID NO: 134121 - RNA, 77 nt, Homo sapiens
ggaagaagcaagccggacccacgacggcaggaaaggaggccaggacggagagggagaaggacagcccgcccgcggag

SEQ ID NO: 134122 - RNA, 88 nt, Homo sapiens
gcggaggcgacggggcggcccggagccggcgcgaaccggcccccgcagcgggacccgggccggcaagaagccaacggagaaccaaggc

SEQ ID NO: 134123 - RNA, 95 nt, Homo sapiens
ccaaccgccacgccaaaaccagcacggcgcaacaggaccacagcaagacgacaagcacgcccgacggagcagcagcgccgggaaggaaagcacac

SEQ ID NO: 134124 - RNA, 90 nt, Homo sapiens
cggcccggccccggcgcagcccggaaagccggcaagacgagaaagcaggagaaagacagcaaagaaaaggagaagaaaggaaaaaaacaa

SEQ ID NO: 134125 - RNA, 76 nt, Homo sapiens
aagcgccgagagacgggccgcgccgcccgcaagcagaggcggagaaagcaaacaacgcccccggaaacaccccacc

SEQ ID NO: 134126 - RNA, 54 nt, Homo sapiens
acgagccaggaagcccgcaacagaagagcccgagcccgggaccacaagagcccc

SEQ ID NO: 134127 - RNA, 105 nt, Homo sapiens
gagaccggagcgccacggccacgccccccgcaacaacccacaagggccaaccgccccccagcagcaggcacgggcgaaccccgagccccgccccacgcccgccgg

SEQ ID NO: 134128 - RNA, 57 nt, Homo sapiens
aaagacacaggagaacgggaggcgcagaaagagaaacggcgaggaaagagaggagcc

SEQ ID NO: 134129 - RNA, 85 nt, Homo sapiens
caacgaggggggagacggggcgagcgggcgacggcgcccggcaaggacaaggggacgcggacgcaacagggaaaggagaccccaa

SEQ ID NO: 134130 - RNA, 75 nt, Homo sapiens
aagcccccaaagagagaaccggagagcacccaacaaaaacacccggaaaaaaagaaaacaccagagcagaccagc

SEQ ID NO: 134131 - RNA, 74 nt, Homo sapiens
gaaacacagcaagaaaggcaaggaaccgaaaggaacggcagacaaaaagcagagaaaacgagaggagcaccggc

SEQ ID NO: 134132 - RNA, 41 nt, Homo sapiens
acccaggggagagcaggaaagagcaagccgaaggcaaccca

SEQ ID NO: 134133 - RNA, 38 nt, Homo sapiens
gcgggcagcagccagaagaggacggccgaggaaggcgg

SEQ ID NO: 134134 - RNA, 74 nt, Homo sapiens
aagcggccgggcggacaggagaggaaacgcgcccggaggcgggcgcgcccgcccgggggccagccgcagacgcc

SEQ ID NO: 134135 - RNA, 74 nt, Homo sapiens
agccccccagacagagaaggccagaacgggcaagcccaccacagcacagaaggcccaggagggcgacggaagag

SEQ ID NO: 134136 - RNA, 62 nt, Homo sapiens
cggaagaccaggcccaacggaagcgaagagaagaaggggcccagacgggaggcggaagccca

SEQ ID NO: 134137 - RNA, 74 nt, Homo sapiens
gaaagaagcggcaaaggccaagcacggcaaagggcagcaaccaaaagccaggggaaagccggggccccggggac

SEQ ID NO: 134138 - RNA, 47 nt, Homo sapiens
agagaagaaccaaagaagcaaaacacgaggacagcagaccacagccc

SEQ ID NO: 134139 - RNA, 78 nt, Homo sapiens
cagcgggggaagaaggacaagaggccagggcagggggaaggaacaaagcagagaaaccaaaaggccagacgaacacga

SEQ ID NO: 134140 - RNA, 69 nt, Homo sapiens
aacacaagaacagaagaccagcacagccagagggacaccccagccggccggaagcaggcgacgcacaca

SEQ ID NO: 134141 - RNA, 53 nt, Homo sapiens
cagagcgccagcaacggaaaccagggcagacagaacgcagaggacggagaccg

SEQ ID NO: 134142 - RNA, 57 nt, Homo sapiens
ggaaggcgcgaggaggaaaggaggacgaggaagcagccagccaccaagggaggagag

SEQ ID NO: 134143 - RNA, 59 nt, Homo sapiens
gccacagcggccaccgccggcgggcaacagcaccacggagagggcagggaacccaggaa

SEQ ID NO: 134144 - RNA, 69 nt, Homo sapiens
cggagaacgccccgaaccccgcacacgaggaagaacgccccgaaccaaaaaaaccaagccgccccgaca

SEQ ID NO: 134145 - RNA, 69 nt, Homo sapiens
aaaaggaaccaggcgccccaggagaaggaccgaaggaagggcgcagaaaaaaaaggaagcagagcaaaa

SEQ ID NO: 134146 - RNA, 67 nt, Homo sapiens
ccaaaaggagcgcgaagccgccgcagaccacacgccgagccaaaggcagcgacagcccgcccggaac

SEQ ID NO: 134147 - RNA, 74 nt, Homo sapiens
gaaccgcaaaggcagaagaggcaacagaaaaaggaagcgaaagagggggcagaaagagaagacagaaaggaggg

SEQ ID NO: 134148 - RNA, 65 nt, Homo sapiens
gagaacaacccaccagaagaacaaccccacaagcgggcccgaaccagagaggacaaaacagccgg

SEQ ID NO: 134149 - RNA, 61 nt, Homo sapiens
agagaggaggcgcgagagcgggaagaggcggcagacagcgggaggacagcagcggacggcc

SEQ ID NO: 134150 - RNA, 78 nt, Homo sapiens
cgggagaggcgggacaagccaagggacaggggggccgggggaacgaggaagcgcccaagggggcacaggccagcaccg

SEQ ID NO: 134151 - RNA, 56 nt, Homo sapiens
gagcgagcaacgagacacacagacaggggccagcgccaccggaccgcacgcgcacg

SEQ ID NO: 134152 - RNA, 77 nt, Homo sapiens
gccaagcgcccaggaggaacaggcaccagcgcgcaggaggggcacgggagccagggcgcgaccccgagagacggcga

SEQ ID NO: 134153 - RNA, 64 nt, Homo sapiens
gaaacacgaaggcaggaagcgaagaaaaggacccagaaagcagagagaaagcggggaagccaag

SEQ ID NO: 134154 - RNA, 76 nt, Homo sapiens
gacccagaggcagagccgccccagcagcaggggcgccagggaacaagagccaacaaggccccaggcaggggggccg

SEQ ID NO: 134155 - RNA, 80 nt, Homo sapiens
agcgccagccagcggcccacccggggggcagcaacggcgacaccagcaaggcgaagaaagggaggcaccaggcacgggga

SEQ ID NO: 134156 - RNA, 73 nt, Homo sapiens
agcccaggagaccagcaaagaaccaggaacaccacccgcaggagcgccggggagggaacagaaggaacccaga

SEQ ID NO: 134157 - RNA, 69 nt, Homo sapiens
cggagagagcacgagcccacagaagaggaaaaggggagcaggaggcgacaagaggagacgaagaagagg

SEQ ID NO: 134158 - RNA, 93 nt, Homo sapiens
ccccaagccaaaagccgagcgccgaggccgaaacaagagcccagaggcccggaaggcgcaaaagggggagaacaacaccaccaaaccagaaac

SEQ ID NO: 134159 - RNA, 65 nt, Homo sapiens
cgcccccagaacacaacagggcaaaggccccgacagaaaccaaagagccaggcgacccccgcgcc

SEQ ID NO: 134160 - RNA, 72 nt, Homo sapiens
ggggggggaagccgcagcggaaagcaggagcacaggcggcacagggagaacacagggccccaccgcgcccca

SEQ ID NO: 134161 - RNA, 78 nt, Homo sapiens
gccaggccgacagccgcggccgggcccgagaacccaccaaaccaacacccagccaaggggcaggagagaagggagcga

SEQ ID NO: 134162 - RNA, 68 nt, Homo sapiens
aaaccgaccagggcaacaccaaaaacaaaacgaaccaggacggcaacgccaccaggcagaaggagggc

SEQ ID NO: 134163 - RNA, 57 nt, Homo sapiens
caaccacaggggcccgacaaggcagaaccgagaggcccccggaggcaccaagacggc

SEQ ID NO: 134164 - RNA, 72 nt, Homo sapiens
ggagggcaaggcacagcaggccgagagcaagcggagcagaccacaagggcacccacacaaggacacgggcga

SEQ ID NO: 134165 - RNA, 70 nt, Homo sapiens
cacggcgcgcccgaaaccagggcgaaggacgaggaccgaaaaagggcagaggacgaccagagcggggaaa

SEQ ID NO: 134166 - RNA, 101 nt, Homo sapiens
ccgcccagccgaccgaggcgccgccgcgagcgccacgccaaggaggggcaggggaaagacacagccccaacgggaacccccgaccccccgcacaacaaccc

SEQ ID NO: 134167 - RNA, 69 nt, Homo sapiens
ggggcgcggcagcgccgaccgagaccaaccgacgagaccggcccggggaacaaacgcccggggccgaag

SEQ ID NO: 134168 - RNA, 54 nt, Homo sapiens
aagaagggacacaccaagcaaaggaccaagaaaacggggaaaaacacagagaag

SEQ ID NO: 134169 - RNA, 81 nt, Homo sapiens
gggagccgcgcccgaaccccggcccgaacccagccgacaaccccggaacgcgggcaaaaggccccaggggaccgggggagg

SEQ ID NO: 134170 - RNA, 74 nt, Homo sapiens
gaagggaggggacccagacagcgaaaccgggagacacccggaaagagagaggagcgagaggaagcggaagaaaa

SEQ ID NO: 134171 - RNA, 68 nt, Homo sapiens
gagaaagcgagaacaaaaccagcgagcccccgaaaacacaagaaaagcacgcacagacagagccaaca

SEQ ID NO: 134172 - RNA, 76 nt, Homo sapiens
cgcggccgcggaggcccgcacaggggaggcggcggccccccaaaacccagcccaccggaagacaggaagaaagaac

SEQ ID NO: 134173 - RNA, 70 nt, Homo sapiens
gcccgcaccaaacagagcagcagcagcagagagaaacagcaggggcacaccccacggccaaggaaaccgg

SEQ ID NO: 134174 - RNA, 48 nt, Homo sapiens
gggaagaacaagcccagagcccaggacagagaggcgcaggcaagaccc

SEQ ID NO: 134175 - RNA, 61 nt, Homo sapiens
gccccgcgggcggcccgcagggaccaggaaccagagcgagcggacccagaacgccggagga

SEQ ID NO: 134176 - RNA, 72 nt, Homo sapiens
accggaaacggaaaacggagaaccagaccagaagcaccagaaacaggaagaaaaaaaggccacgggcacgaa

SEQ ID NO: 134177 - RNA, 77 nt, Homo sapiens
ggaaacaagaagcacggggccggaggaaaccaggaaaccacacaacaagaacgcgccagaagacccaccaaaggcac

SEQ ID NO: 134178 - RNA, 40 nt, Homo sapiens
aacggaagccccccggaaaaggacccacgaggaagcggcc

SEQ ID NO: 134179 - RNA, 74 nt, Homo sapiens
ccccggcgggcgccaggcagcaggaaaaccgccagaacagcccaagcccaagagagccccaaaacagaagaaag

SEQ ID NO: 134180 - RNA, 78 nt, Homo sapiens
cgccgccacccggcgcgaccgcccggcaccgggagaaccaccgccaccgccaccaggggagagacacagcccaagaac

SEQ ID NO: 134181 - RNA, 70 nt, Homo sapiens
cgcagacagaacccacgaggcaccagcaacgagccgagaaggaaaaagacggggcaaaggggaggccaag

SEQ ID NO: 134182 - RNA, 71 nt, Homo sapiens
gcggaaggcagcgcccagcagcgcagcgccaggagccgggacagagcgcgcccgggagacaacaagacacc

SEQ ID NO: 134183 - RNA, 71 nt, Homo sapiens
gcccccagcagcgcggaggccgccgcagcaagcccaaagagagcaacacacacaggcgggagcgcagagca

SEQ ID NO: 134184 - RNA, 82 nt, Homo sapiens
agcgccaaggacccgggacagggaccagcgggaaggcagacagcgagggcgacgaagcaaggggaacaaagcggcaaaagaa

SEQ ID NO: 134185 - RNA, 57 nt, Homo sapiens
aaggccgcggggggagaccccaccaccgcaagaaaggcagagaaggcagcaaacacc

SEQ ID NO: 134186 - RNA, 81 nt, Homo sapiens
ggacagcaccaggggcagccacaaccgaaacaacagcccgacggagcagcagcgccgggaaggaaagcacacaggacagaa

SEQ ID NO: 134187 - RNA, 79 nt, Homo sapiens
caagagagggaaaggaaaggcaaaccgacagaagccacccgagacccggcgacccagaagaccccgggcccgggacccg

SEQ ID NO: 134188 - RNA, 58 nt, Homo sapiens
aaaacacgaagaggaagccagccaggaggagaacacggaccagggaacgggacacaca

SEQ ID NO: 134189 - RNA, 68 nt, Homo sapiens
cacggaaacaacaggcgagaccggagaggaccggacgggcgagacccgacagcagacagcgggcccag

SEQ ID NO: 134190 - RNA, 55 nt, Homo sapiens
gggccggaggcaaaaaagccaaaaagagagaaaaaccagaaagaaaacagacggg

SEQ ID NO: 134191 - RNA, 80 nt, Homo sapiens
acaaaaccagagcggagacacccaggaggcagaagccagagcggggggagaaggcgcaaaggaagggagcagcccgaacg

SEQ ID NO: 134192 - RNA, 76 nt, Homo sapiens
gaccgaggcagcaccaccgaccagccacccagacaggcccgaggaggagaaacaaggccccgaacacagcgccgga

SEQ ID NO: 134193 - RNA, 81 nt, Homo sapiens
agagccaccagacaccaggaggaccagcagcaaaagaaggagggccccaggaaaggccaaaacagaagaggcaaagcccag

SEQ ID NO: 134194 - RNA, 68 nt, Homo sapiens
aagagaggcaggaggccgggaggaagaaaaaggaagaacagcccgcccgcagggcgaagcgagaaaca

SEQ ID NO: 134195 - RNA, 80 nt, Homo sapiens
aaaggagcaacaggcgacaaaaagcaagaggagacagccgacggaaggaaaggcacaaggaagaagcggaaggggcaggg

SEQ ID NO: 134196 - RNA, 79 nt, Homo sapiens
ccgcaagcgaggcagccagcacccgcgagaagagcgagcgcagacccaggggagcccaccagccagcaacaggcccgga

SEQ ID NO: 134197 - RNA, 77 nt, Homo sapiens
aggcaacgggaagagcgacagccccaggcccgggggggcggagcagaaaagcgaggcaagggcggcaggggggggcg

SEQ ID NO: 134198 - RNA, 53 nt, Homo sapiens
caaagccacccaggaaggcagacaggcgcagggagcaggagaagcggagcgaa

SEQ ID NO: 134199 - RNA, 83 nt, Homo sapiens
ggccgaggccgggacagcaccgcagcagagcgaaagcacacgcggagaacggccgagcgaccaggagaggagcccccgcccga

SEQ ID NO: 134200 - RNA, 65 nt, Homo sapiens
gcagagggcgaccgaccgagcagggcacacccgcgaggaaggggacccgaagcccgcgagaagga

SEQ ID NO: 134201 - RNA, 57 nt, Homo sapiens
gagacacaaaaacagaacagggacaccaggccagaagaggccgcccaggccccgcgg

SEQ ID NO: 134202 - RNA, 86 nt, Homo sapiens
gaaggaagccccagcgagcggcgcagcggggccggaggagcagccagcgggaggcggcggcgagcgggcggagaacggaaaagcac

SEQ ID NO: 134203 - RNA, 73 nt, Homo sapiens
gacacccgggcggggcagagcagcccccagccagccgcgagacgcggcgcgcaacgcaagccccaaccgcgag

SEQ ID NO: 134204 - RNA, 74 nt, Homo sapiens
agacgccacccacccacccccagggaggaccaaacggggggcaagcgacgaccaacggaagaagagacagagca

SEQ ID NO: 134205 - RNA, 82 nt, Homo sapiens
ggaacagacgcagggcagggccccgcccggcggggaagggagaagcccaccacgcaacgggacggcgcggcggaaggcgcgc

SEQ ID NO: 134206 - RNA, 86 nt, Homo sapiens
gcgcgaacgagcgacggcggaacccggggccgggacgcagcccggcggcagcagaaaacaagcgaccagaagaacgcacaaaaaga

SEQ ID NO: 134207 - RNA, 69 nt, Homo sapiens
agggaggagcccagaccgggaaggggaagcaggccaacccagaacacaccccagcggggaagaccaaca

SEQ ID NO: 134208 - RNA, 71 nt, Homo sapiens
gggagggggacacacaaccgcccagccggcgagggacgccgcaggaagaccgaggagcagggagcaaccac

SEQ ID NO: 134209 - RNA, 77 nt, Homo sapiens
cggacgggccaggcagcagaaccgccaaagcaaaccagaccgacacacgccagcacccagccaaacccaggcccgag

SEQ ID NO: 134210 - RNA, 60 nt, Homo sapiens
gacggagccggacccgccgcccccggagccggggccggacgagaaagccgaaggagacga

SEQ ID NO: 134211 - RNA, 61 nt, Homo sapiens
caacggggccccgaggccacggcccggacgaaggcccaccaccacgagcgcggccaccaac

SEQ ID NO: 134212 - RNA, 62 nt, Homo sapiens
ccgcaagaagaacagagacagcagccaaacccccagaggaaacggggacagccagacagaag

SEQ ID NO: 134213 - RNA, 76 nt, Homo sapiens
aacaaaacgaggcagcaaccccccaggcgccaaagcggcaccccacagcgcaacagcgggcccccacagccggcac

SEQ ID NO: 134214 - RNA, 75 nt, Homo sapiens
gcggagaggcaaaaacagcgcccgggaagcggccgccgggagcgagccaggcagacacggcccaaaggacagcaa

SEQ ID NO: 134215 - RNA, 70 nt, Homo sapiens
ggcaggacacggggaaagaagaacccaccaaaaggcccgagaagcaggggaaacagagcacagcggacag

SEQ ID NO: 134216 - RNA, 80 nt, Homo sapiens
acggacaaggcacccccaccaggcgccagccgaaacgacaagggcgcggggcgcgggggcccaggccggaggaaccaccg

SEQ ID NO: 134217 - RNA, 42 nt, Homo sapiens
gcacagcacccacaaagcaacggagcaaagaaggacgcagag

SEQ ID NO: 134218 - RNA, 68 nt, Homo sapiens
ggcaaaaaagcaaagaaagaagcaccgaagccggaaacacgggaaaaccccagacagaccagaaacca

SEQ ID NO: 134219 - RNA, 82 nt, Homo sapiens
aagaacggcagagcaggccgaagcaccgaagaggagaaagccggacagacacacagagagagaagaaacgcaacacagcagc

SEQ ID NO: 134220 - RNA, 77 nt, Homo sapiens
ccccgaacaagcagggcggcgggggacccaaagacaggaccacgcaccagcagagaaggaaagcaaaccgaagcagg

SEQ ID NO: 134221 - RNA, 83 nt, Homo sapiens
caggcgccaagcaaaggacagcaacggacacagaagaggcccaaagaaacaccgggccagcagcccacgaggacccaagccca

SEQ ID NO: 134222 - RNA, 68 nt, Homo sapiens
cagcgaggcggggaaagacaacagcacacaagaacacccagggaagaggaagaacgcgagaaaaaaac

SEQ ID NO: 134223 - RNA, 81 nt, Homo sapiens
cacagcaagaagcccacgacgaggaggaagacgggacaagccgaaacaggccggcaagaagccaacggagaaccaaggcca

SEQ ID NO: 134224 - RNA, 88 nt, Homo sapiens
ccaccagcagacgcagccgagacaccagcccgaaacaccaccaagcaggaggcaaagggaccccaagaaaccaaagggcaagagccgc

SEQ ID NO: 134225 - RNA, 80 nt, Homo sapiens
gcgcgagcgggagcgggcccgcgcgccgagggcgaggcggacgcgcggcgcgcagaccaaaccagagagaaagggaacca

SEQ ID NO: 134226 - RNA, 84 nt, Homo sapiens
gcaggaggagaagcgcaccaggaggaaaacaagccgcagaagagggaagaggaaaaaaaaaaaaacaaaaaagcaaacaagcgg

SEQ ID NO: 134227 - RNA, 75 nt, Homo sapiens
agaacagaaaaagacacccggaccggacagccagagccccaaagcaacccccgaaagagccggggccgcgccaca

SEQ ID NO: 134228 - RNA, 78 nt, Homo sapiens
gaaccggcgcggggagacacggggaaagcacgaagggagcccagcgacacaccagcagcagccaaagaccaaccagcc

SEQ ID NO: 134229 - RNA, 69 nt, Homo sapiens
gccgcccggcacccgggcagcggcggggcaaccaacaacgaggaccagagccaggggcaccagagcgga

SEQ ID NO: 134230 - RNA, 78 nt, Homo sapiens
cgacgcgccggcccacgcgcggccaagggccccgcaccaccccagcaaccaaacaccacccggacccgcgaccgcaca

SEQ ID NO: 134231 - RNA, 63 nt, Homo sapiens
gagcgggagcgagcggcgcggcccgagcccgcaggaagcacacccaggcggcagacaggagca

SEQ ID NO: 134232 - RNA, 58 nt, Homo sapiens
aaaaacaggaaaaacagaagaggcagggcaaaacgagggcgaccaacgacgaagagca

SEQ ID NO: 134233 - RNA, 57 nt, Homo sapiens
ggcggcgggggacgcggggccagcccagagcgaggaaaacgccacgacagacacaac

SEQ ID NO: 134234 - RNA, 107 nt, Homo sapiens
ccgagagccgcccgggccagcggccgcgcacccccggccggaggcaccagcccacgagagaagaaagaaaaagaaaccgccagcccagagacacgaaagggacagag

SEQ ID NO: 134235 - RNA, 87 nt, Homo sapiens
acggagccagcggcgaggaggggccccagcagcccccgaaggcccacaggacaggagagaaagacgacgagaaagaggagcccgaag

SEQ ID NO: 134236 - RNA, 79 nt, Homo sapiens
agcgccgaggaccggcaacagggcggcggggaaaaggagggccagacaaggggaacacaagaggagagaaggggaccgc

SEQ ID NO: 134237 - RNA, 74 nt, Homo sapiens
gacccccaagagcacagccggaagagaaaagcagagcaaagggagagaggaagggaagcaaacagaacggacgc

SEQ ID NO: 134238 - RNA, 67 nt, Homo sapiens
ggcggcggcggggcgggccgcgcgaggaaacggcgaaccaaaagaagagacacggacgcaaaaaaaa

SEQ ID NO: 134239 - RNA, 77 nt, Homo sapiens
ggagacagccccccgcggcggcagccacaggcaaaagcagaccggaaaacccaccggcaagaccacacccgagggga

SEQ ID NO: 134240 - RNA, 83 nt, Homo sapiens
gaaagaggcgcaaaagaaaagaaccaaaggaaaggaccagcgaagccaccaagaacaagccccgcagagcgagacgcaagaaa

SEQ ID NO: 134241 - RNA, 56 nt, Homo sapiens
cgacggcgggagccagcacgccggccgcgagaggagacgacgaagacccaaccgac

SEQ ID NO: 134242 - RNA, 81 nt, Homo sapiens
ggaggaggaggaggggcccggcggcggggaggcgccccagagccaccgccaagacccaccccagaagaccaccgaagacca

SEQ ID NO: 134243 - RNA, 81 nt, Homo sapiens
ggaggggaggcgaaagccaacggcgaggacgcccaaccagcaaccagccaagggaccgcagggagacggcaccaccaccgg

SEQ ID NO: 134244 - RNA, 77 nt, Homo sapiens
ggaggccccggcgggggcgcgggcggcgggcagcccgcgggcgcccagaggcagcggcggcccagccgaaggcggag

SEQ ID NO: 134245 - RNA, 77 nt, Homo sapiens
gcaggacgggagaccaagggaggacggcggaacacggaggcgggaaagaaacggcagacccaccgaccaacaaagaa

SEQ ID NO: 134246 - RNA, 75 nt, Homo sapiens
gagacgacccagcggcggccgcgacgcggggcagccgagcacagcacggggcagcccgccggaccaaaccggaag

SEQ ID NO: 134247 - RNA, 77 nt, Homo sapiens
aaaaaggaagcaaaacccaagggacacaaaaggcccgggaaaccgcaagaccgcacgcgccaaccaggaaacaggca

SEQ ID NO: 134248 - RNA, 87 nt, Homo sapiens
gcaccgccgcccacgagcgaagcaccgcagccgggcagacacacgacgagaaccggacgggaccccgaacaaccagcgagcgagacc

SEQ ID NO: 134249 - RNA, 73 nt, Homo sapiens
gggaccacaaaaggcaaagcaaaccaaaggagcgcccgaggaagaacgagagcccccaggagaccgcagcccc

SEQ ID NO: 134250 - RNA, 76 nt, Homo sapiens
gagaaaaggacagccccccaggaaacaggagaacgaggcacagcaagaccacaaaccaaaagaaagacgaacacag

SEQ ID NO: 134251 - RNA, 65 nt, Homo sapiens
cccccacagccccgcgccgccgaccccccggcgccgcgccggcggcggacaaaccggcgaccaca

SEQ ID NO: 134252 - RNA, 71 nt, Homo sapiens
acgcgaggccggccagaaaaggacgcaaggagcaggcgacaaaaagaacggccacggcacggagagacccc

SEQ ID NO: 134253 - RNA, 78 nt, Homo sapiens
gcgggcgggagaacggaaaaccccaacccgggaaaccagacgaaacaacagccaaagacaaacagcacaacaaacaac

SEQ ID NO: 134254 - RNA, 84 nt, Homo sapiens
cgacgaggaggaggcggccgccgcagccggggcccccgccgccgccggagcggccaaacacacaggaacgccagaccccagccg

SEQ ID NO: 134255 - RNA, 72 nt, Homo sapiens
cgcacagggcagaccgacagcgacagggaggagggacacacgacaggcccgagagggaacccacaccaaaac

SEQ ID NO: 134256 - RNA, 51 nt, Homo sapiens
acgggccaccgacccgcagaccacagagaagcaggcgaccaggcgcgcggg

SEQ ID NO: 134257 - RNA, 87 nt, Homo sapiens
cccgcgccgccgaccccccggcgccgcgccggcggcggcccccccagcgccgccgcccagccagccccagggaagagacccggccca

SEQ ID NO: 134258 - RNA, 68 nt, Homo sapiens
acgaaaaggaaccaggcgccccaggagaaggaccgaagcccggagccgccagaagggacgaacagcaa

SEQ ID NO: 134259 - RNA, 101 nt, Homo sapiens
ggaggggcaggagaagccaagagggggagggcagagagagcaaaaggcaaacgaacacgcgcagcgcagaggcccggcagccccaaggaacgcggccccga

SEQ ID NO: 134260 - RNA, 50 nt, Homo sapiens
caaccggaggaaggagccacaagaaggagagacgcagagccagacaagac

SEQ ID NO: 134261 - RNA, 80 nt, Homo sapiens
ccaaagaccagacggaggaagcagccagaagaggaaaggaaaggagccaggcaggcccccagagccgcacccgaaggacc

SEQ ID NO: 134262 - RNA, 68 nt, Homo sapiens
gaaaacaaaagaaacgcccacagaacaccgaggcccgagggcccggaaaggggagcacagaggcggaa

SEQ ID NO: 134263 - RNA, 72 nt, Homo sapiens
cgaccacaaggacagggcaacaccgaagaaagagccaaacgccaaggcggcaggagaccgggacaggaaacg

SEQ ID NO: 134264 - RNA, 88 nt, Homo sapiens
cagccagcacaccccgcgagcaagagaggaggcagagagccccgcgacgagagagacagagagaccacgccgagcgagaggaacggaa

SEQ ID NO: 134265 - RNA, 42 nt, Homo sapiens
ggcgcgaaacggaaaaagggccccgaaaagaaagaaggaaaa

SEQ ID NO: 134266 - RNA, 83 nt, Homo sapiens
cggcggccgggcgcgacgcgcacggaaagagcaggcggcggcggcggaacgccaggcagggaccgggagaggggacgaaggcg

SEQ ID NO: 134267 - RNA, 79 nt, Homo sapiens
ggacccgcggccaggcgggggcggcgccaagcgggggccccgaggacggcgacggagggggaacgcaagcacaggacca

SEQ ID NO: 134268 - RNA, 77 nt, Homo sapiens
agacaagccagacaaaaacaagggaaaccacaaggaccaaacaccaaaacaggccaaaacagaagaggcaaagccca

SEQ ID NO: 134269 - RNA, 76 nt, Homo sapiens
agacggacaagagcgcggaacaggacgccccgagaaggaagacccacaagagaccacgcagagacagcacccaacc

SEQ ID NO: 134270 - RNA, 96 nt, Homo sapiens
acacaagaaaagggaggaaaccagaaaagcgaagcgccagcccgacagagaaaggcacaacccagaccagagaagcgaccagacgcaccagagacg

SEQ ID NO: 134271 - RNA, 78 nt, Homo sapiens
agagccgcccagcaccggcacgaaaacggacaaaagcaccccggcccagaaagaagagaacgaaagccgaagccacgc

SEQ ID NO: 134272 - RNA, 85 nt, Homo sapiens
aacgaaacagaaaacacgggcccgacgacccaggccggcgcggaagaggccggcggcgggacggccccacgggacccgccccgac

SEQ ID NO: 134273 - RNA, 74 nt, Homo sapiens
cgacccggcgcgggcacgcccaccggcccgcgccgcccaggccccgcagaagacgaccccgacgcaggccagga

SEQ ID NO: 134274 - RNA, 85 nt, Homo sapiens
cagcgcccggcgcgcggcgcgccgcccggcgagcgggccggaggaaaagaaagaagccgccccggggcggcagccacgcagcccg

SEQ ID NO: 134275 - RNA, 82 nt, Homo sapiens
ggagcggcggcggagcgggcgccgcgggggggggcgcggagccggacgcgggcccgcccggacgagccacgggccaggcacg

SEQ ID NO: 134276 - RNA, 69 nt, Homo sapiens
ccaacacccgaggcggacgcagagacagggaaaacagaaggcaggagagaaagaagaaaccagaagcag

SEQ ID NO: 134277 - RNA, 71 nt, Homo sapiens
ggccgcggaggggcacgagcgccacaaccccagcccggaacagccgacaccagggcggagaccgaaaagcc

SEQ ID NO: 134278 - RNA, 76 nt, Homo sapiens
gggacacaccagcagagcacagaagaaaagcggccaggcgagaagacagaaggagccacagagaaccccagcaaag

SEQ ID NO: 134279 - RNA, 87 nt, Homo sapiens
cgcgaggaggcgcgggagggcgagaacgaccccgagacggcccgggcaggacggggcggggaccaggagaggcgccaccgcccggac

SEQ ID NO: 134280 - RNA, 75 nt, Homo sapiens
ggaccacgggacccgaggcgaagaaaagaagcgaaagcgcaagacaaacgagaggaggcaggggaagcacaaaag

SEQ ID NO: 134281 - RNA, 56 nt, Homo sapiens
cgggagaaaaaggaaaacgcggaaaaccgacacaacagacaggggcaaggccgagg

SEQ ID NO: 134282 - RNA, 82 nt, Homo sapiens
cgcaacccagaccacaaagaggaaaggacgccaggacacacggcacaagagccagccacagaaggagagagagaaacggaac

SEQ ID NO: 134283 - RNA, 75 nt, Homo sapiens
cgccgaccggcagagccgcaacaggcggagcgggcacggacacaagaacgagagccaaaggccagccacgcacag

SEQ ID NO: 134284 - RNA, 71 nt, Homo sapiens
cccccagccacagcaggcccagcgcgaacagaaacagacgcacgccgaaaaaaaacgaaccaggggagaaa

SEQ ID NO: 134285 - RNA, 81 nt, Homo sapiens
cgagcgcggaggaccgggaggccccgggcgcgggagaaggagggggcagagcacggcaggcagaaggggccaacccggggg

SEQ ID NO: 134286 - RNA, 70 nt, Homo sapiens
caaggagaagcgcccaagcggacggggagaggcagagaagaagcccgagccccagacccaagcccgggga

SEQ ID NO: 134287 - RNA, 78 nt, Homo sapiens
cgagaaagaggagcccgaaggccccagccgcggaggaggcgagaagaggaaaacaggccaaacagggacggagggaac

SEQ ID NO: 134288 - RNA, 83 nt, Homo sapiens
aacaaggcgacaacacaggaggaagccagcccgagcaggcccaggggaggaggggcaaccacagacccgccaggaagcgcccc

SEQ ID NO: 134289 - RNA, 81 nt, Homo sapiens
cagcccccgagagcgagaacagggcacacacgaaacgggcaaccggggccagggccagcaccagagagcagcaagaagcgg

SEQ ID NO: 134290 - RNA, 74 nt, Homo sapiens
ggcaggggcgcccccaggaccgagcaggaaccggagcaggcaaacgaagcggagcggacacggagcagggggag

SEQ ID NO: 134291 - RNA, 88 nt, Homo sapiens
cgggagaaccggaggaggaggccacacagaaggacggcccgacggaagggccccgcaccaccccagcaaccaaacaccacccggaccc

SEQ ID NO: 134292 - RNA, 78 nt, Homo sapiens
gggagacggagcacggcgccgcggcaagagccaggccggcccaagcccccaagaagcccgggacgaacaccaaggccc

SEQ ID NO: 134293 - RNA, 72 nt, Homo sapiens
gaaggaccaagaaccagacgaaagagggcccagaaaaagagagcgacgacaaacagaccacgagaaacccac

SEQ ID NO: 134294 - RNA, 73 nt, Homo sapiens
ggaggacgcagccacaaggaagaccgcaggaaagcaggaaggcaagaaagccaaggacgaaacccacacggag

SEQ ID NO: 134295 - RNA, 71 nt, Homo sapiens
caagcgcaaaccgccgaccggcggcgggcaagcgccgggacaagacagcgcagagacagggcgccaggacc

SEQ ID NO: 134296 - RNA, 66 nt, Homo sapiens
ggggaacaagaggcgaccgagacggggagcccaaagcaaaggggagcgaacaaggagcggggagga

SEQ ID NO: 134297 - RNA, 64 nt, Homo sapiens
aggaaacaccaggcgcggcggcccagccccgacacagacacgagaggcgagggacgacagagca

SEQ ID NO: 134298 - RNA, 73 nt, Homo sapiens
cccgacccacaagaaccccaaaagaggaaacacaccacaagccaaggggggacacaggacaacgagagaagcc

SEQ ID NO: 134299 - RNA, 83 nt, Homo sapiens
aggggcgggccggcgggggcggccccccgggccgcggcccacgcccgcggagcagccggaacaagacccccgaaaggaaccgg

SEQ ID NO: 134300 - RNA, 81 nt, Homo sapiens
cggcgcagcgcgcccagcggcccaggcgccgcggcgaggagcgagcgcgcgaggggcggccgagagcgccgccccaggcgg

SEQ ID NO: 134301 - RNA, 70 nt, Homo sapiens
cagaaaaacgccaaaggccaggacaaaaccaaagaacacggaacccagaccggggaaccagcaccccaga

SEQ ID NO: 134302 - RNA, 80 nt, Homo sapiens
cggaccggcagagcgcggaggccgaaccccgaaggaaacaccgcacccacaaagccaagagacaagcgacccgcagggag

SEQ ID NO: 134303 - RNA, 55 nt, Homo sapiens
caggaagggagccccaaaggcacagaagaagccaaaaacgggccagaaagaaacg

SEQ ID NO: 134304 - RNA, 72 nt, Homo sapiens
agggacccgcggcccgacccggggccccgccacggggaggacgaaccccaaaaacaccagacacaccaaaag

SEQ ID NO: 134305 - RNA, 77 nt, Homo sapiens
gaggccaggcgccggccggcgcgaagacgcgggggccgccccccgggagagagaacggggagaagcaacaccagagc

SEQ ID NO: 134306 - RNA, 81 nt, Homo sapiens
gccgccgcgaggccgggaagggaaggagaaaaggacgacggaaccaccacgaaaaaaagcacacccaagacacagaggcac

SEQ ID NO: 134307 - RNA, 72 nt, Homo sapiens
aaacgggggaagaaggagagaccagagccagagccgagacacccccggggacggcccccggcccaggccaca

SEQ ID NO: 134308 - RNA, 68 nt, Homo sapiens
cgcgcggcgagagcccacaggcccccacaggccacgcgcgcccaagcacaaggcccgacgcggaaaac

SEQ ID NO: 134309 - RNA, 72 nt, Homo sapiens
cgcgcggacgcacgccaggcgcaaggacacaccccccgggaagacacaaacgcaccaccagaaagccaagcg

SEQ ID NO: 134310 - RNA, 80 nt, Homo sapiens
ggcccacaagaagcagcggacccgcgggagaggcgcagcggaggcggaagcaggaccggggcacggaggagcgccgagcc

SEQ ID NO: 134311 - RNA, 57 nt, Homo sapiens
ggagcaggacagacccccagaaccggaaaaccaagcaacgagacacacggaaaacgc

SEQ ID NO: 134312 - RNA, 71 nt, Homo sapiens
ccccaaagaaggggagaaaagaaaaaaccagaacagagagaagcgagcagcaggagagaagaccgagccag

SEQ ID NO: 134313 - RNA, 68 nt, Homo sapiens
caagccccgcaagccacgaaggacggagaagaaacgagagagacaccaccagaaggggcggaggacaa

SEQ ID NO: 134314 - RNA, 76 nt, Homo sapiens
agagcggaccgagagcgcgaaacgcacgagaagagcacaacagggagaagacagcaagaccccgaaccgagcagac

SEQ ID NO: 134315 - RNA, 41 nt, Homo sapiens
ccgcccggcagcgaccggagggaagcgagaaccaggaacga

SEQ ID NO: 134316 - RNA, 77 nt, Homo sapiens
gaccagcaaaaggagaccccccgaaagccaaggacacgcaggacgaagaaggaggagagcccagaagaaaccaaagg

SEQ ID NO: 134317 - RNA, 72 nt, Homo sapiens
agcccgagcccaggcagcccagcccgcccccagaaaccaggcgaaacagaaagcaggcaggggagggagggc

SEQ ID NO: 134318 - RNA, 58 nt, Homo sapiens
cccaaaaccagggcggcaaaacgagcgggccagagagccgccgcccgggagccggacg

SEQ ID NO: 134319 - RNA, 80 nt, Homo sapiens
gcccgcccgccccccccgggcgcggcggcggggaggcgaggaaaccccacccaggaaagaaccacaggaaccagaggaac

SEQ ID NO: 134320 - RNA, 78 nt, Homo sapiens
agaaggaccaagaaccagccgggacaccacagcaagaggaacgggcacgccagaaaagaccaggagaagcagacgaag

SEQ ID NO: 134321 - RNA, 71 nt, Homo sapiens
cagcagaaacaaagaagcagcgcgaaaggagacaaagcggaccgaggagaaaaaggaggaaagaaaaacag

SEQ ID NO: 134322 - RNA, 81 nt, Homo sapiens
cagaaaccccggacaaggcacgccagacgggaaagggagcagcaccggccacacccacagcacgaccggaacccagcgacc

SEQ ID NO: 134323 - RNA, 78 nt, Homo sapiens
gcccccgccggcgcgcccgcgcggcgcggggaccgcggcccgcgcgggaaaaggaccccacgaaggggaaaagccaga

SEQ ID NO: 134324 - RNA, 71 nt, Homo sapiens
ggcaggaaccagaggaagagaggacaccgacagagcaccagggacagagcgaagaaccccccaagaagacg

SEQ ID NO: 134325 - RNA, 89 nt, Homo sapiens
cccacaagagaccggggggccggggggaaaggggcagcagaggcgagagaggcagagaagaagcggaggcaagcagcgagcaaggaagc

SEQ ID NO: 134326 - RNA, 69 nt, Homo sapiens
gacccccaccagaagaaggcccgggaggggaacggcacagggaggggacagaccaaccggcagccaacc

SEQ ID NO: 134327 - RNA, 83 nt, Homo sapiens
agccccccgccccgccagagccccccgccgagggccccggccccggagcacagccccggcgcgggcgggggcggagggcaaga

SEQ ID NO: 134328 - RNA, 56 nt, Homo sapiens
agcagccagcccaggagaggccacaaccccaggccggcagacccaacccgcgggac

SEQ ID NO: 134329 - RNA, 36 nt, Homo sapiens
caggaagagaaaccagggcgacccagcaacgcggcc

SEQ ID NO: 134330 - RNA, 69 nt, Homo sapiens
ccagaacacaacagggcaaaggccccgacagcgcggaggccaaagaagcgccaggaaccgaccagaaaa

SEQ ID NO: 134331 - RNA, 84 nt, Homo sapiens
gaaagcaaccaggaggcagaaaccagcgccggacagagaagcccccaaggagcgcaggaagagaggagggagcaccggacaaaa

SEQ ID NO: 134332 - RNA, 61 nt, Homo sapiens
gggcaccaaaccggaggaggaagaacggcaaaacggaggagcagagcgaaacggaagagaa

SEQ ID NO: 134333 - RNA, 69 nt, Homo sapiens
aaagcgaggaaagcgacaacaggaaggacacggacacaggaagggccggccccggacaaagaacagggc

SEQ ID NO: 134334 - RNA, 78 nt, Homo sapiens
aaagagggggcagagggaagagcggcaggagccaggcccaaggagagaacaaggagcaggccaacggccagaagaacg

SEQ ID NO: 134335 - RNA, 84 nt, Homo sapiens
gaggcgccgcggggcggccgccagcacaagcgcacccgcacaggaaggaagcagccacagaaaagccgagacggaagcggggaa

SEQ ID NO: 134336 - RNA, 77 nt, Homo sapiens
acccgccgcgcaggccccaagagcagcaccagcccagcagaagaggagagaaagaacccacgcaggacgacagaaga

SEQ ID NO: 134337 - RNA, 62 nt, Homo sapiens
ggagggcggaagaaagcgacacacaggcacggggccaaaaaggcacgagggaacgggaaaga

SEQ ID NO: 134338 - RNA, 56 nt, Homo sapiens
ccccaggggaccaggggacgaagggaacagaacaacacacaagcggaagcccccaa

SEQ ID NO: 134339 - RNA, 73 nt, Homo sapiens
aacaaaaaagcagaaaagggccagaaaaagaaaaagggaaagcgaaaagagcgaggccaagaccaaagaaaaa

SEQ ID NO: 134340 - RNA, 82 nt, Homo sapiens
cagagccaaggccgggacaccaggacaccacaccagccgcccaggaccggcgcaaccccaccccggagagcgacagcgccgg

SEQ ID NO: 134341 - RNA, 82 nt, Homo sapiens
ggcgggaccggcgccaccgcagcccggcccaggccccgagcggagggaggaaaaccccgcagcacagcccccggaggcaggg

SEQ ID NO: 134342 - RNA, 73 nt, Homo sapiens
agccgccgaggcacagagaacggaccagaacgcagcaacaaagagaaagacgaccgccaaccagggagaacac

SEQ ID NO: 134343 - RNA, 70 nt, Homo sapiens
cagacggaaaaaccaggacgaaaagagaggcggagagggagagacggaaagcccgccagcgccagaccgg

SEQ ID NO: 134344 - RNA, 69 nt, Homo sapiens
caacccaaaggaccgaagccgcgaggaaagaggagccaggaagagacaagcaacgaggaaaagaaacaa

SEQ ID NO: 134345 - RNA, 62 nt, Homo sapiens
ggcgcccccccagagagccagaaagaagcaggaacagaaaacacccaagaagaagaaggaga

SEQ ID NO: 134346 - RNA, 78 nt, Homo sapiens
ccagaaggcgagaccagagacgagaagagcaccaagaaagcaaggacagacaagaccaaagaccggaaacgcaagcag

SEQ ID NO: 134347 - RNA, 78 nt, Homo sapiens
cgccgggacacagacggggggagcccaggaacggccggaggacagagagaagccagcgaaacgaaacaaagcacgcgg

SEQ ID NO: 134348 - RNA, 74 nt, Homo sapiens
gaagccacccagggaccccaagcgacgcacccgaagagcagagggcgaaccgccccacgagaccaaacgccaac

SEQ ID NO: 134349 - RNA, 68 nt, Homo sapiens
gaacaagcaagcggcccacgaggccagacgccagagaaaaagaaggaaagacaacagaaacaagacag

SEQ ID NO: 134350 - RNA, 74 nt, Homo sapiens
gcccagaggggggagggcgcggcccgccaccagcacacagggacaaccaaagccaagcaacgaaggacaggacc

SEQ ID NO: 134351 - RNA, 62 nt, Homo sapiens
gcggagccgcagagcgggcaccagaaccgcccgggggcgggaacgggccgccaagcgaccca

SEQ ID NO: 134352 - RNA, 84 nt, Homo sapiens
gcggcgggacgacgcggacagcgggcggagccgacgagcggcggacggaacgacaagagagagggaccaagagacacgagaaaa

SEQ ID NO: 134353 - RNA, 84 nt, Homo sapiens
ccaaacagcggcgcacggggcacaacagggaggggggaagacagggcccagcaccacaggacgggccgggaagccgccagcagg

SEQ ID NO: 134354 - RNA, 58 nt, Homo sapiens
aagagaacacacagagaaaacccaacgagcgaagcgcgaaagaggcagaagaaggggg

SEQ ID NO: 134355 - RNA, 65 nt, Homo sapiens
caggaggccagggggcgccaggaaagaaacgcggcaagaaagcgacccgagggccaggaacagaa

SEQ ID NO: 134356 - RNA, 78 nt, Homo sapiens
agcgacaacagcaccagccgccagccgagaagaggcacacaggccccaaaccagaagacgcagccgccacaccaagca

SEQ ID NO: 134357 - RNA, 84 nt, Homo sapiens
acggcgccgcacccggcgcccgcggccgacgacgcgggagagccgcccccaggcggagaaggagggggcagagcacggcaggca

SEQ ID NO: 134358 - RNA, 58 nt, Homo sapiens
cggccgaccagggaccgcccgccgcggcgcccgggggcggcagggggaccagccagca

SEQ ID NO: 134359 - RNA, 77 nt, Homo sapiens
caaggaggggcccaccagcagggcacacaggaaggaacaggaggaaaccacagaggccacccaccccaccagagccg

SEQ ID NO: 134360 - RNA, 52 nt, Homo sapiens
gcaccagcaagcggcaggcgcggcgggcgcggacggcaggggcgccggggaa

SEQ ID NO: 134361 - RNA, 72 nt, Homo sapiens
aaggaaccagacagcgggggccccgacggcaggcgcacacaacagaaaccaccgacaccacccgcgaagcgc

SEQ ID NO: 134362 - RNA, 79 nt, Homo sapiens
aagagacgacacgcaagcaggcaaccgaaacaggaaggaggcgccagggagcgggaaaggccgagccgacaccccacag

SEQ ID NO: 134363 - RNA, 84 nt, Homo sapiens
cgggggcaggcgcccgcccccaggcgcgcccagccccgcagccagggcgaacccccgcagaccaaagagaacccgacagaagaa

SEQ ID NO: 134364 - RNA, 53 nt, Homo sapiens
caaccacagagggcgagcagagcccggaagcggcaccgagagaaggcagaaag

SEQ ID NO: 134365 - RNA, 73 nt, Homo sapiens
gcacgccaagccggacacgcggacagagccccgaagccagggacaacacacgggagagcacaaaccgaacaca

SEQ ID NO: 134366 - RNA, 68 nt, Homo sapiens
gagaccagccgcgaacgagcagagacccagggaacgccaacaacgccagccgcgcccaaggaaagaaa

SEQ ID NO: 134367 - RNA, 77 nt, Homo sapiens
gggacagaagaagaacagagagcagaggaggaaggacgaccacgagcagagcgagaaaagaccagaagacacaagac

SEQ ID NO: 134368 - RNA, 82 nt, Homo sapiens
ggcggaggccccagggaagcgcagaaagcaggcgaacccgcggcgcaaaacggccgggcagaaacaaccacagcaagcccca

SEQ ID NO: 134369 - RNA, 42 nt, Homo sapiens
agacagcccaggccgggaaaggaagaaaaaaagcagggagga

SEQ ID NO: 134370 - RNA, 74 nt, Homo sapiens
gcggggccccccccccggggcccgcgaggagacccgggcgaggacaccacgggaagcgaggccccgacgacgac

SEQ ID NO: 134371 - RNA, 33 nt, Homo sapiens
gcagggcgcccccgaagcagcggcccccagggg

SEQ ID NO: 134372 - RNA, 78 nt, Homo sapiens
ccgcacagacccacggagacaaccaccaccggcacaccaaggaagggagcagaggagcacaaaggacagagacccgaa

SEQ ID NO: 134373 - RNA, 91 nt, Homo sapiens
aaagaacgccacagcacaccagggagcagccgggaacaacaagaaggagaaagacacaacgacagaagaaaaaacacaagaaaagacaagc

SEQ ID NO: 134374 - RNA, 79 nt, Homo sapiens
agcggcaaaccaaaagagcaacggagacaggaagcaccggacccagaacgccccaacccgagaccaccaggcacaaaga

SEQ ID NO: 134375 - RNA, 77 nt, Homo sapiens
gcaaaagaccaagaccaggggaacccagcacaagagaaagaccaagaccaagaaacgcagcgcccacggacaggcag

SEQ ID NO: 134376 - RNA, 98 nt, Homo sapiens
ggaacggcggcgacaaggggcccgaacagaggggccaagaagggacccagacacgacccggagaaaaagccagaccagcgccacaagaaggagaacga

SEQ ID NO: 134377 - RNA, 86 nt, Homo sapiens
gaacaagcaacaaacaccccacgagaaagggagagcaagaggaaaacccggaggcccggccgaggcccaccgcgcgaccccaaacg

SEQ ID NO: 134378 - RNA, 93 nt, Homo sapiens
gccccggagggaagcgcccggggccggccgccgcgggaccgaggaaaagccgcaccaggagcaacgcacgaaaacgcacgaggagcacagaaa

SEQ ID NO: 134379 - RNA, 72 nt, Homo sapiens
cccaagaccagaaagcgcgaacaaggcgggggagggcagcacagcggccagacaagggaaaaaagcagcgga

SEQ ID NO: 134380 - RNA, 69 nt, Homo sapiens
cagcagccgcccacccagccagcacacacgaaagacaggaaggaacgcaaagcggagccaaagaaaaaa

SEQ ID NO: 134381 - RNA, 80 nt, Homo sapiens
gccaagggaagaggccaccaaaggagacccagaccccgccacgcacagcgaaggcaggaagggccacgggaacaaaagag

SEQ ID NO: 134382 - RNA, 83 nt, Homo sapiens
gggaccgcacacccaagggcgcccgcgccggcagaggaggcgagcacccgccagggagaggaacccccgcgcacccagcgcag

SEQ ID NO: 134383 - RNA, 56 nt, Homo sapiens
gagaaaggaaggaaaaccgacgaggcacacaaagcgggaaagggaaagccccaaag

SEQ ID NO: 134384 - RNA, 69 nt, Homo sapiens
agcaaacccggaccccagagcgggaccccgacggagagacaaagaagacggagggggggccagccaccg

SEQ ID NO: 134385 - RNA, 82 nt, Homo sapiens
gcgccaggcccaggagacccgcggacaccaggcccggcccaccgcagcagagaacggcagcagggacaagcaaggggccaag

SEQ ID NO: 134386 - RNA, 71 nt, Homo sapiens
accgcggggcaccagcgcgcccagggcgacacggcacaagcggacacccaaggcgacagcgaaaaacagag

SEQ ID NO: 134387 - RNA, 64 nt, Homo sapiens
gagacaacggaaacagaacgaacccaccggccaaccaacgggagaccgaagaagcggcaccaag

SEQ ID NO: 134388 - RNA, 68 nt, Homo sapiens
gggagcaggagccacggaccagcgaaccccaagcccgacggggacccaccccccgacagggaaaacac

SEQ ID NO: 134389 - RNA, 66 nt, Homo sapiens
caccaaaacaccacagacagaaacaacgcccccgcaacgaaacagacgcaggcccagcaggccgac

SEQ ID NO: 134390 - RNA, 85 nt, Homo sapiens
gccaaccgcaaccagacgccagcgggacgaggaccgagaccgcggccgggaccgaggagcggcgggaggggaaggagcagccacc

SEQ ID NO: 134391 - RNA, 88 nt, Homo sapiens
ggcggcggggcggcggacgaccggagagccggcagaggagcccaggagcagccaggacaggcggaagcagggcgccaggaggaggaca

SEQ ID NO: 134392 - RNA, 70 nt, Homo sapiens
cgcgcagcccggccgccggcccccaacagcgccggccagccaaccccagcaccccagggcagcagagacc

SEQ ID NO: 134393 - RNA, 73 nt, Homo sapiens
aggaggccaaagggaaacaggcaccagcggcccgagaaaccccgcgggggcgagaggaccccgcccccaggcc

SEQ ID NO: 134394 - RNA, 79 nt, Homo sapiens
gaaaggacacgacggaacccccgaaaacgaaggcgaagagacgcgcagcagcgcgagaccgcacagcaaggaaagcacc

SEQ ID NO: 134395 - RNA, 80 nt, Homo sapiens
ggacggcgcgcgcccgaggcgaggaggagcgcggcggaagaagggcaccgaaggagaccccaagaaaaggaaaaagagag

SEQ ID NO: 134396 - RNA, 106 nt, Homo sapiens
gcacccaacagcgcgcggcgccagccgcaccggcaccaccgccggcgcggacgccgcccccgccgccgaaaaggaaaagagccgcaggcgccgcgacccggacaga

SEQ ID NO: 134397 - RNA, 91 nt, Homo sapiens
cacacaccaccacagcccaggggggcggcaagacagagcaccaagaggaggcaacccaggcaagacaaaacagcaaaacgcaagcaaacac

SEQ ID NO: 134398 - RNA, 62 nt, Homo sapiens
ccggaccaagagccgaggcagcacacgcgcggaacaagagaaccacagagaccaacggacag

SEQ ID NO: 134399 - RNA, 89 nt, Homo sapiens
ccccggcccgcgcgcccgcacccggccgccggggccgcccagggcgaccaggagagaagaggaaaaggacaggagagggagagaaacca

SEQ ID NO: 134400 - RNA, 74 nt, Homo sapiens
cagcagcgaacggaagcccggaggcagaggccccacacaggaacccgagccggaccagcgagcaggggagccag

SEQ ID NO: 134401 - RNA, 89 nt, Homo sapiens
caggaaccggagacccagccccgagcaccgcgacacacaccccgaaaccgaaacgaaccagcggaagaaacagaaacaccaacagccag

SEQ ID NO: 134402 - RNA, 86 nt, Homo sapiens
caccgggaccccagcgacccggagaagacccgagggcgaagcggccaggcccgggcggacgcagagccagagcgccccagaggagc

SEQ ID NO: 134403 - RNA, 61 nt, Homo sapiens
gacgacagacgaccacacagaacccggcaacggaaaaacacgccaagcacccaagcaaccc

SEQ ID NO: 134404 - RNA, 77 nt, Homo sapiens
gaaagcgccaaaaacaacaccaaaaagccgcagggggcggagaacggaaaagcaccaggaagcagagaggaccgcag

SEQ ID NO: 134405 - RNA, 83 nt, Homo sapiens
aagaacccgacgacccgaggagccagggcggacaacaagcggagaagaagcaggcgccccccaccagccacagacacagacga

SEQ ID NO: 134406 - RNA, 69 nt, Homo sapiens
agagggcgacaaggaaagaaacagcacccaggacacccaaagagcggaaccaaagaaacccagcggagc

SEQ ID NO: 134407 - RNA, 38 nt, Homo sapiens
gcccccaggagcgggaacagcccccaggaaggaacacg

SEQ ID NO: 134408 - RNA, 70 nt, Homo sapiens
cgcacagacaccgggccaggcggaggaaacaaaacagcccaccgcgcagcaaagaagagccacgcaggcc

SEQ ID NO: 134409 - RNA, 71 nt, Homo sapiens
cagcccccaacccaagggccgacgagggggcggggcggcagaacagcaccaacccagcccaggagccggaa

SEQ ID NO: 134410 - RNA, 82 nt, Homo sapiens
gagggagcccagcgggggaggaccccccacagagcgccccaggaggggaaagccgccgcccacaaggaggaggagcagcgcc

SEQ ID NO: 134411 - RNA, 76 nt, Homo sapiens
acccgcgcgagccccaaagaaggccaaggagggaccccaagaaagcaagcaagaggagaacacggggaagacacca

SEQ ID NO: 134412 - RNA, 64 nt, Homo sapiens
caccacccagcacacgcaggaaaaaagacggaaagagcagaagcgaggaagcgaaggcccgcgc

SEQ ID NO: 134413 - RNA, 77 nt, Homo sapiens
aacaccagagggccaggccagaagagccgaccacaaggggaggacaaccgcccgggaccagcgagcagggggcagag

SEQ ID NO: 134414 - RNA, 68 nt, Homo sapiens
agccgccagccagccgaccgggacagcacccggccgagggcagggacggagagaacaaggagcaggcc

SEQ ID NO: 134415 - RNA, 77 nt, Homo sapiens
ggagcagaaaaaaggcagaaaggagaaaccagggcgaaggacgaggaccgaaaaagggcagaggacgaccagagcgg

SEQ ID NO: 134416 - RNA, 80 nt, Homo sapiens
ggaagcagggagggcgggcccagagaccaagacacgaaagaaagccgacagcaaggcggacccggacgacaccaaagaga

SEQ ID NO: 134417 - RNA, 86 nt, Homo sapiens
gcggggccccgcagcccacacggcacggcccagcccagcgccaaggcccggccaacgcaacagggagcccacgcaagaggggccgg

SEQ ID NO: 134418 - RNA, 78 nt, Homo sapiens
ggaggccccccagccacgggaaccccgagaaaggaggagaaacaagcagcaccgcaggaggcagcagcaagcagcaac

SEQ ID NO: 134419 - RNA, 80 nt, Homo sapiens
cggagccacggacaggaaagccggagcgaagccaacccccgagcaggacagcccgcagaggaagagcaggggaggcaaac

SEQ ID NO: 134420 - RNA, 85 nt, Homo sapiens
acaagaagagggcggagcggagacgggagaagaaaagacgagccagagaccaagagcccagagaacagagcgccccaccgaagag

SEQ ID NO: 134421 - RNA, 58 nt, Homo sapiens
aaccccacagacaagccaagcccaagaacacacaagcgacaccgaacagcgagcacac

SEQ ID NO: 134422 - RNA, 52 nt, Homo sapiens
caacacgaccaaggagggaacaggggaccgacaagacggaaaccgggagggg

SEQ ID NO: 134423 - RNA, 54 nt, Homo sapiens
acacacagaaccgggcggggagacaaccccccccaagaagcgagggacaagcac

SEQ ID NO: 134424 - RNA, 79 nt, Homo sapiens
cccccaggcccagccacgccccgacagggggcaagagaaccaccgaggggaggcaagcaggggggcaaaggaaagaagg

SEQ ID NO: 134425 - RNA, 82 nt, Homo sapiens
cggccgcacagccggggcggccgaagagagcccggggccagaacccagagagcggaccgccgcgggagacaccggagggacc

SEQ ID NO: 134426 - RNA, 81 nt, Homo sapiens
cggcccagggacgagaggggcgccgacagaccaagcgacacccgccgcaagccacgccacgcgggagagagcggcagccac

SEQ ID NO: 134427 - RNA, 85 nt, Homo sapiens
gcgcccggggcacgggggacgcgggcgcgcagggaagacgggggcgcaggcgcgcaggcccagcaacggccacccaaagaacacc

SEQ ID NO: 134428 - RNA, 74 nt, Homo sapiens
cggaaggaacggaggccccggacggagaaaaagaggcggccaaggaacaagacacagaaggaagaaggagccca

SEQ ID NO: 134429 - RNA, 73 nt, Homo sapiens
gcgacaaggagggcccggcggggacccacccaccgaggcagacccggaccagccgacagcgaccaaggccaga

SEQ ID NO: 134430 - RNA, 72 nt, Homo sapiens
gggcacgcccccacacgggaggagccaaggggagcgcgcggcgggcagagccgacgacccccggagcagagg

SEQ ID NO: 134431 - RNA, 79 nt, Homo sapiens
gccggaacccgccagggccagggccaggccagcgcccggcggcccagggcacacaccccaggagggggaggggggaggg

SEQ ID NO: 134432 - RNA, 72 nt, Homo sapiens
cacaaaaaagagacccacagccagcaacaccggcagacacaaggaacagccagccaggagaaaaacgaaccc

SEQ ID NO: 134433 - RNA, 75 nt, Homo sapiens
ggaacagacacgggaagagcgagaagaaacaggaaaacagacagaggagacaggcaaagcaccaagggaaaggaa

SEQ ID NO: 134434 - RNA, 81 nt, Homo sapiens
cgaccgcaggagggagaccacagcaagacgccaggacccacggaagccagaaagagaaaggaaagggcggcaggaagacag

SEQ ID NO: 134435 - RNA, 70 nt, Homo sapiens
gcgcggcgcaaggccccaacgcaccggaaccagagacccaagaggcgccacgcagagccccgccaggaag

SEQ ID NO: 134436 - RNA, 78 nt, Homo sapiens
gcaaggcgcacgcgcccgaagccgggccacacggcagcgccagcccggcccacgacccggagaagccaccgaagggcg

SEQ ID NO: 134437 - RNA, 80 nt, Homo sapiens
aacacagccagccccaggcaggcacgaagacgaaaaagcaaagcggaggaacggaagccacagacaagcaagggcccgag

SEQ ID NO: 134438 - RNA, 70 nt, Homo sapiens
gcagggggggggggaagccgcagcggaaagcaggagcacagccaagggaagagaggggagggaaaaacaa

SEQ ID NO: 134439 - RNA, 76 nt, Homo sapiens
aaccgggcggagccagccgggccagccccgcgacggcccacgagccaagcccaggggggagcaaagcgggaaagac

SEQ ID NO: 134440 - RNA, 42 nt, Homo sapiens
gagcaacacaggagccggagaaccgcaaggcgcccagaccga

SEQ ID NO: 134441 - RNA, 52 nt, Homo sapiens
gacgaggcgcgggcgcgcacccgagccgcaagacgggacggcagggcaaaaa

SEQ ID NO: 134442 - RNA, 92 nt, Homo sapiens
gacccgcccagcagaagaagagaggagggagaacacagaaaccggccccagggaccaggcagacgaccaaggagcaggcggggcaggcccaa

SEQ ID NO: 134443 - RNA, 74 nt, Homo sapiens
aaccgaaaccaccaagagcaaggaagagaccaagcaccaagaaaacgccaaggaacgaagaaaggagccaaagc

SEQ ID NO: 134444 - RNA, 82 nt, Homo sapiens
ccgcaggccgggaggagccgcagcgccgggcgaccccgcccgggcccgggcacacagagaaaaaaagggaacaaaacacagc

SEQ ID NO: 134445 - RNA, 74 nt, Homo sapiens
cagcagacgaaccacaaccagagcggcgaaacagcagcggaacccgaaaagcaaacgaccgggcaaaagacgag

SEQ ID NO: 134446 - RNA, 67 nt, Homo sapiens
gggcagaacaggcccgggccaaaacagcaacccaaacacagaagggaccagaggagacaacaaagaa

SEQ ID NO: 134447 - RNA, 70 nt, Homo sapiens
cgaaaacggaaacacaagagaccagaggccggaaaggaaaaacaccagaacggaaacagaaggacacacc

SEQ ID NO: 134448 - RNA, 73 nt, Homo sapiens
cgcgcagcgcagcgggggcgggaggcggagggcgagcgcaagaggacaacagccgagggaaggccaggacagg

SEQ ID NO: 134449 - RNA, 79 nt, Homo sapiens
aacaaccgacaagaggaagcgacaagcgaaacagaaagcaagacaggcagcaccaggcacgcagaagggagcaccggga

SEQ ID NO: 134450 - RNA, 85 nt, Homo sapiens
caggacccggcgccgggcacgagcaccgccaccaggggaagggggacccaccccggcacccccccggagacacccgacacgaccc

SEQ ID NO: 134451 - RNA, 70 nt, Homo sapiens
gagcccagggagagaacacagggcggagaacggaaaagcaccaggaagcagagaggaccgcagaagggaa

SEQ ID NO: 134452 - RNA, 64 nt, Homo sapiens
cgaggaaaagacagggagacggcgagggggaggaggaagaacggcaaaacggaggagcagagcg

SEQ ID NO: 134453 - RNA, 70 nt, Homo sapiens
cggcgcggcgggcgcgcagacggagggccgcgccacaagcagcaggccaaggccccgggggcgccgaggg

SEQ ID NO: 134454 - RNA, 61 nt, Homo sapiens
cccgacaccccccgcagggcggggcccacagcccagcagggcaacccaacaacagccaccg

SEQ ID NO: 134455 - RNA, 74 nt, Homo sapiens
gcagggaggcaaagagaaacagcacaaggagaaacggcaaagccgcgaaaccaagagagggcccgcggcgcacc

SEQ ID NO: 134456 - RNA, 74 nt, Homo sapiens
cgggcgggccggcgcccggcagccagaaaccacgaagaggcccgaaagcggagccacggcaaaaaaccccagca

SEQ ID NO: 134457 - RNA, 94 nt, Homo sapiens
caaccagcgaagagcgacaagccgcggcagccgcggaccaccgccgccagggagaagacagaggagccagaccaagagacagcacaggcgagcg

SEQ ID NO: 134458 - RNA, 81 nt, Homo sapiens
gcaaacacaccaacagggaagaaaacccagaaagcaacacagagaccggagagcacacgagacggccagcccaacagaaaa

SEQ ID NO: 134459 - RNA, 75 nt, Homo sapiens
agacgggccaagagcagaccgggcgaagggagaggacagcagggaggcgggacgcggaggccggaagagcgggag

SEQ ID NO: 134460 - RNA, 64 nt, Homo sapiens
cgaaccgcccggccgggagccgccgcgggcaggacgcgcgcgcagaacagccagcaaagacaag

SEQ ID NO: 134461 - RNA, 86 nt, Homo sapiens
cggcccgcgggcgaagcggacgcagccgcgagcccggaggcggcgggaggaggcggcggccgagcggggcccggcgcacccaccac

SEQ ID NO: 134462 - RNA, 71 nt, Homo sapiens
acaaaacaacaaccagaaaaaacaagggagcaagccgccaggagacagaccgacagcaacaagaaagaaac

SEQ ID NO: 134463 - RNA, 40 nt, Homo sapiens
acgacgcgcgggcaccgcgcgagccagagaagaggcagaa

SEQ ID NO: 134464 - RNA, 76 nt, Homo sapiens
agcccgccaagcaccgggaagaccccaggcgaccccgagcagcagcagcacagaagagaggagcacccagcacccg

SEQ ID NO: 134465 - RNA, 64 nt, Homo sapiens
gagaccgaggcaacggggccccgaggccacggcccgggacggaaggcgaccacaccaccccaga

SEQ ID NO: 134466 - RNA, 84 nt, Homo sapiens
agagcgggcgggcggccgggagacccacaggcgagcaacacaacagcagagccacaggcaaccaaaaagcccaaaacaggaccc

SEQ ID NO: 134467 - RNA, 76 nt, Homo sapiens
gagcgagaccaggaaagaagggggcagaagagggaagaagccacacacagaagacccaaagagaacacaggagagg

SEQ ID NO: 134468 - RNA, 63 nt, Homo sapiens
gaacaccacgcaccgcagccgcgagagaggcaagccggggcagaccagccagccccaagcagc

SEQ ID NO: 134469 - RNA, 69 nt, Homo sapiens
aggcaaccggggcgaaccaaccgcaaagcccaaagcgagaaaaggaacagggagagaaggcagaaaaag

SEQ ID NO: 134470 - RNA, 80 nt, Homo sapiens
aagcgccacggccgcacccgcgcggcaccaggcggcaagaccacccagagaggggggaagcgcggcaggaggcccggggg

SEQ ID NO: 134471 - RNA, 67 nt, Homo sapiens
cccagggaaaggagacaaggaccgaaacagaaacggaacaccaaggccaccggggccagcgcgcccg

SEQ ID NO: 134472 - RNA, 85 nt, Homo sapiens
cgagccaggcgccgagcggccccaacaggcccgccgcgccgggccagcggcgccgccgaaggaccgaccagcgggcagcacgcac

SEQ ID NO: 134473 - RNA, 72 nt, Homo sapiens
cgagagcgcgaaacgcacgagaaggccaaagagcacagggacagaaaaacagcgcagacgagccgcaaggac

SEQ ID NO: 134474 - RNA, 70 nt, Homo sapiens
gagagcaggaagacgggggagccagcgccccagaacagcacgggcagaggaaggccagcccagaacaacc

SEQ ID NO: 134475 - RNA, 78 nt, Homo sapiens
ggagcagaccggaggaggcgggggcgccggcagaggaccaggcaccaccggccccggaagaggccgggaagaaggagg

SEQ ID NO: 134476 - RNA, 69 nt, Homo sapiens
cgggagggcgcagcggggacgcggacgcacgaaacgagaagacacaccgcgaggcgcccacaaaccaca

SEQ ID NO: 134477 - RNA, 79 nt, Homo sapiens
acggagcggacaggaggcaacagcgaacacccacccccggacgccgcacaaaaggaacgccacacagaccagaccccaa

SEQ ID NO: 134478 - RNA, 77 nt, Homo sapiens
caaaagcggagaacaagaaggaagggccaggagagagacagcaggaggaccaggacacaccccagaagaagcccaca

SEQ ID NO: 134479 - RNA, 76 nt, Homo sapiens
gagaggggccagggcaaggcagaaaccacaaacagcccgcagggcaacggaagcagacaaaaaagggcagcaaaaa

SEQ ID NO: 134480 - RNA, 61 nt, Homo sapiens
gaccgccgaacaacgccacggagggccggaaccaggggacggcaaaacagaacagaaaggc

SEQ ID NO: 134481 - RNA, 82 nt, Homo sapiens
cggcgaggaggggccccagcagcccccgaaggcccacaggacaggagagaaagacgcgggcgcccgcacacacccgccaccc

SEQ ID NO: 134482 - RNA, 75 nt, Homo sapiens
cacccagagccgccaccagggggagaccgaagagcgcaaaaaccgaaaccgcccacggagcccgaaacggagagg

SEQ ID NO: 134483 - RNA, 72 nt, Homo sapiens
acaagcaaaggaacgacaccccaggcaggaaagaaaaggaccaagaagagaaagagacgccagcagcagaga

SEQ ID NO: 134484 - RNA, 63 nt, Homo sapiens
agaggagcagcaagagaagggaaagaccagccaggaagaggacgaggaagaagagagaaacca

SEQ ID NO: 134485 - RNA, 77 nt, Homo sapiens
ccgcggacgccaggggccagacccaccccccacacggggagaaagaaagaaaacaagacaaaacccaaagaaaccaa

SEQ ID NO: 134486 - RNA, 92 nt, Homo sapiens
gggcggcccggagccggcgcgaaccggcccccgcagcgggacccggagagcagcaccagcagaagagggcccgaccacggcaacccagaggc

SEQ ID NO: 134487 - RNA, 80 nt, Homo sapiens
ccccggccgcgccccaccacacgccgggggcacccgaggaggaagagggcagggcccacggaaagaagggaaacccgggg

SEQ ID NO: 134488 - RNA, 78 nt, Homo sapiens
ggaaggcgcccacccgcagaaggagaacacaaggcggacacaaccagagggaagcacgcccgggcacagcggaagaga

SEQ ID NO: 134489 - RNA, 75 nt, Homo sapiens
gacgcgaaaaaacaggggcagaagaacaaggaagcggagaggcaagagagagcgcccagaacaccagcgaagacg

SEQ ID NO: 134490 - RNA, 73 nt, Homo sapiens
gagacacccaggaggcagaagccagaaggaacggcccaggaccggaccgcagcagaaggggggcagcggagca

SEQ ID NO: 134491 - RNA, 68 nt, Homo sapiens
cggggcgcccggcgccggccgagaaggcagaggcgccgaggacagagcagaagccggccgagagggag

SEQ ID NO: 134492 - RNA, 72 nt, Homo sapiens
gaaaacgcgaggacagagccacggggaaggcaacacaagaacgacaaagcggccaaggaccacccccaaaaa

SEQ ID NO: 134493 - RNA, 72 nt, Homo sapiens
cagcaccgaggcacccgcccgagcgcagcgggcccggccccccccagggcccacgggggacagaagaccggg

SEQ ID NO: 134494 - RNA, 73 nt, Homo sapiens
gcggccggcccacgccggacaaagcggcgcacgcacggagacgacgggaggagcgagaccacccggccaacag

SEQ ID NO: 134495 - RNA, 75 nt, Homo sapiens
acaccagccaagcagcggaacgacagaggagagaagggagggcccaaccccagccggaagccagacaagagcccg

SEQ ID NO: 134496 - RNA, 81 nt, Homo sapiens
gcacgggaacaaggccacaggcccaccacaaagagacagagaccagggcccgggcccgcggcaacccccagccacaacgcg

SEQ ID NO: 134497 - RNA, 75 nt, Homo sapiens
gcacggcaggagcacagagagagagccagccgaggaaccgccaaggccgcaggaaaggagaacagcagaccggag

SEQ ID NO: 134498 - RNA, 46 nt, Homo sapiens
agaggcagcacacaaccacaacaggacacgagcgagggcgaccagg

SEQ ID NO: 134499 - RNA, 75 nt, Homo sapiens
gccagacccggggaggcgcacacacaccaaaggaccaaagacagagacaagcggggaagaacggcggagcacacc

SEQ ID NO: 134500 - RNA, 48 nt, Homo sapiens
cccacaggcaagggaaacggacccgggccagccgccggaacccgaacg

SEQ ID NO: 134501 - RNA, 79 nt, Homo sapiens
agaaggcacccccggacaggcccccacaagaaaccccagagaaaccggcgccagaaccccgcaacagccaaccagaaaa

SEQ ID NO: 134502 - RNA, 60 nt, Homo sapiens
ccgaagcgggcgggcccccccacccagagaaggaggggagaaagaagagaccggacacac

SEQ ID NO: 134503 - RNA, 69 nt, Homo sapiens
ccaggagacacgaaacgaacgggaagagcgagacaagagccaaggacagggcccgccaccagaaggacc

SEQ ID NO: 134504 - RNA, 73 nt, Homo sapiens
cgccggacgcggcaacggagaagaagcacagcccgacagaccgaagaaaagagaaacacaagaggacagacaa

SEQ ID NO: 134505 - RNA, 77 nt, Homo sapiens
gagccagaggagccgccgcgaggcgacggcgcgcggccgcaagaaaaggacagacgcaacacaggaaacaagagcac

SEQ ID NO: 134506 - RNA, 80 nt, Homo sapiens
ggcgacacgacggcggaacggggaacgacggcccagcaggcggggaagagaaagggccgagaaacagacaacccacagaa

SEQ ID NO: 134507 - RNA, 69 nt, Homo sapiens
ggacgaacaagaacagaaagggaacacagcagagggggaaaaaaacaggaggcgaagaggaggaggacg

SEQ ID NO: 134508 - RNA, 55 nt, Homo sapiens
cagccccccaacaaaccccaacgcaaaaacaaccccagccggaaaccagagccca

SEQ ID NO: 134509 - RNA, 74 nt, Homo sapiens
gaacaaacaacgcagacccccggccagaaaaagcacacaaagaggcagccggggcaggcccaaaaacacacagg

SEQ ID NO: 134510 - RNA, 90 nt, Homo sapiens
ggcgcagaagaaacccgcggcgaccacagccaaagcgggcaggaacccgaggagcggcccgaggaaggcaagcagcgccgccgccgcagc

SEQ ID NO: 134511 - RNA, 79 nt, Homo sapiens
caacccacaacagggcgcaagaagacagacgaaaaggaccgagaacccgcaggggaaaaagaaaagggcgaagacccga

SEQ ID NO: 134512 - RNA, 73 nt, Homo sapiens
gcacgggcggagcgaacggaagccaggccacagcgcggcagaccgcagaaggagagggccggggcccaggccc

SEQ ID NO: 134513 - RNA, 75 nt, Homo sapiens
cgagccggcgcccgggccggccaggacgacccgaaaagccgcaacaacgggaacgacaagacaagcaaagagggg

SEQ ID NO: 134514 - RNA, 83 nt, Homo sapiens
gaagacgccccaccacgaggccagcacgggaacgcgaagcgccaaagccagacaagagcgggaaggagaccacgccacacgac

SEQ ID NO: 134515 - RNA, 78 nt, Homo sapiens
cccggccggggaccagacaacaagacaacggacgagaacccccgcgaaccagaggaacccagcgagcgagagcggacc

SEQ ID NO: 134516 - RNA, 80 nt, Homo sapiens
gccaccggccgccgcccgggcggaaaacaccccaaaagccaaaagggaaaggaaaagaccaacaacagcgcaggacacga

SEQ ID NO: 134517 - RNA, 69 nt, Homo sapiens
cccccggcaccaggccgaaaacgaagcagaggaacaacaaggagcgaggagcaagagaacccagaacga

SEQ ID NO: 134518 - RNA, 61 nt, Homo sapiens
accccggaacagacaaagcccagcagagcaaaggcccgagaagcgggcccaccaccaagcc

SEQ ID NO: 134519 - RNA, 67 nt, Homo sapiens
agagaggggcaccccggggacaagccgcaccacgccaaggaaaggacacaggaacgccacaagaaac

SEQ ID NO: 134520 - RNA, 87 nt, Homo sapiens
cggggcgaagaagcagcacaaggcgagccagggaaccgagcaagggggcgagaggggaacgccaccggagggagaagagcccacgac

SEQ ID NO: 134521 - RNA, 70 nt, Homo sapiens
gcaaagggcaccgggaggaagccacacaaagaacaaagcagggagcggagaagagagcggaaagagcaac

SEQ ID NO: 134522 - RNA, 82 nt, Homo sapiens
gacagcgaccacgggagcacagagcaaggcacagccaccaacagaggaagagaccgagcaaaagagggagaccaagacacag

SEQ ID NO: 134523 - RNA, 74 nt, Homo sapiens
gcgaacccgcgggccccagcaccccgcgcacccgcggcggggagggggcggagaacggaaaagcaccaggaagc

SEQ ID NO: 134524 - RNA, 69 nt, Homo sapiens
ccgccaagggccccaagagggcacacagcacacaccgacaggggcaaggaggacgacccgggcagaaca

SEQ ID NO: 134525 - RNA, 72 nt, Homo sapiens
caaggagcgcgcagagggacccggaaacgcccagaggggaggccacaccgaaggggaccaacagggcggaac

SEQ ID NO: 134526 - RNA, 83 nt, Homo sapiens
gaaagaagagaggagaaccagccagcacacgacagacaacaacaggcaggaccccaggaaggccagcgcccagagaacgcaca

SEQ ID NO: 134527 - RNA, 92 nt, Homo sapiens
cacgggcaccggcacccgcggacggcagcaggcgcgcacagccgagagggcggagaacggaaaagcaccaggaagcagagaggaccgcagaa

SEQ ID NO: 134528 - RNA, 54 nt, Homo sapiens
aacaccgacaaaccgaccgaccaggagccacaggacacccagagcaacaaaccc

SEQ ID NO: 134529 - RNA, 73 nt, Homo sapiens
ccaccagcggggcagcaaccaggacacccgggaagccggccccgggcgaagagccggccgccgcgcgcccgac

SEQ ID NO: 134530 - RNA, 75 nt, Homo sapiens
gccgggcaagcaagcacggcaagaggcgccaaggggcccgggaccgacggaagaagcggacggagcgcagccgcc

SEQ ID NO: 134531 - RNA, 56 nt, Homo sapiens
gaaaacccaagggaaccaccgccacaaacgcaggccacaaagaggagcgccgcgcc

SEQ ID NO: 134532 - RNA, 66 nt, Homo sapiens
agcaggaggagacaacaacacaaagaagcaaacgcagggaagagcaccagagcaccgccccgggac

SEQ ID NO: 134533 - RNA, 80 nt, Homo sapiens
ggacgggagaagggacgacgggcgccggaggagcgaccgcggcaggaccgaaaagacgcggccccaaaggaaacacccga

SEQ ID NO: 134534 - RNA, 84 nt, Homo sapiens
gcgcaggacagcgagcaggcaccacgagagcgagaggaggcggcacgggagaccgcagagccacacagaggcacacccagaagc

SEQ ID NO: 134535 - RNA, 77 nt, Homo sapiens
ccgcggcgccccagcgcgaagcccgggaccacgcccacgggccggacccgcggccgcgcggaaaagaagacggaacg

SEQ ID NO: 134536 - RNA, 79 nt, Homo sapiens
gccgggccgccgaaaacccgacccccaggcggcgcccagacccacacccagcaagaaacccaccagagaaggcgcggcc

SEQ ID NO: 134537 - RNA, 72 nt, Homo sapiens
gccaccaagccacaacaccggagacgagagagaaaggagacaacgagaagagagaagcgaaaacgaaacgag

SEQ ID NO: 134538 - RNA, 64 nt, Homo sapiens
cagcgggaacaagaccagcgggagcaggaagcgagaaacagagagacaggccaaagccccaagg

SEQ ID NO: 134539 - RNA, 77 nt, Homo sapiens
caccgcaggcgaggacggcggaccccgcggcgggaggagccgccccgaggccagaaaggaggcccacagccgaccga

SEQ ID NO: 134540 - RNA, 68 nt, Homo sapiens
cacgcccggccgaaggcgggggaggagacccacccaaacaggcacccacagaaggagaacaagcagag

SEQ ID NO: 134541 - RNA, 68 nt, Homo sapiens
accggcagggagcgcggacgcagagaggggcaggcagacaaacgagcgagacagcccaggaaacgaga

SEQ ID NO: 134542 - RNA, 73 nt, Homo sapiens
gcccgaaccggcacaagcagggacagagaaccggcaaacgacagaggccgaggacaccaaccacacacaacgc

SEQ ID NO: 134543 - RNA, 95 nt, Homo sapiens
gccccgaccccgccacccccggggcccagggccaccccccaagccgggaaggccagccaggagcccggaccgcaaaccacagaaaagcgaaaaac

SEQ ID NO: 134544 - RNA, 80 nt, Homo sapiens
cgaggacaagagaagggccccgcagcggacaagaaggacagcaagaagacgggaagggcagcagcccggacccggaaaga

SEQ ID NO: 134545 - RNA, 99 nt, Homo sapiens
gagcgggccagcccaccgcaaagaacaccagaccgcgagggagcgcagagagcaccggaccagcccgccgagaccgcaaccgcacaaggacaggagccc

SEQ ID NO: 134546 - RNA, 80 nt, Homo sapiens
cccccgcgcggaggacaccaggaaacacacacggaagaggggaaagggaacagaacgaaggcccggagagggaaagcacg

SEQ ID NO: 134547 - RNA, 73 nt, Homo sapiens
cgggcgcacaccacgccggaccaaaacagggcagaagccaggaggacgacgaccaaaagggaaaggacaacgg

SEQ ID NO: 134548 - RNA, 70 nt, Homo sapiens
ccaggagcccaagagcacaggggaagaagcacagccacgagccaacacaggggcagccaccacagcaccc

SEQ ID NO: 134549 - RNA, 65 nt, Homo sapiens
cagggccaaccccagggcaaaggggacggaaacaagcagcacccacgccaacacgaaccagacaa

SEQ ID NO: 134550 - RNA, 76 nt, Homo sapiens
aacaaaggacggagaaggcaggaagaagaccacacgaggggccgccggggcaggcggcgaaagagaacgcgaagca

SEQ ID NO: 134551 - RNA, 76 nt, Homo sapiens
ccgacgcgccggcgcaaagaagcccaagccaggacggaccccaagcaagccggcccggccaacgcaacagggagcc

SEQ ID NO: 134552 - RNA, 77 nt, Homo sapiens
gccggagcggcgcggagccgggcgccccgcccaaggcggggcgcgcccgggaacagccagcaaagacaagagcagac

SEQ ID NO: 134553 - RNA, 74 nt, Homo sapiens
gcacgcaagggaggaggcaagcaagagagcaagacaaaagccggggggggcacagagccccggaagacagcccc

SEQ ID NO: 134554 - RNA, 76 nt, Homo sapiens
ccacaccaagcgggagacacaccacgccaaggggaggggcacaacgggagccacacccgcacacggacagaacacc

SEQ ID NO: 134555 - RNA, 88 nt, Homo sapiens
cggaccgcggagcgagaccacccgaacgacgcgggcgagcggggcggacgccggggagacgcaggcgaggcgcagaacaacgcaagaa

SEQ ID NO: 134556 - RNA, 69 nt, Homo sapiens
cgacaccgcacgcgcacggacggcacagcccgccgaacccgaaaggagagagcagagcgacacgaaaag

SEQ ID NO: 134557 - RNA, 80 nt, Homo sapiens
ccggaccgagagcggaccgagagcgcgaaacgcacgagaagaaaggagcgaggggacggcgcggccggccccgaggccac

SEQ ID NO: 134558 - RNA, 82 nt, Homo sapiens
cagaggcggccaacaagaaaggagaaagagagccaaaacggagacagagaggccaaacgccagggcgaaggaaccacagcac

SEQ ID NO: 134559 - RNA, 54 nt, Homo sapiens
acccacaagaaccgagaggaccaacaccgcagacgaagggagaagaaaaagcag

SEQ ID NO: 134560 - RNA, 70 nt, Homo sapiens
cggccgagacaaaggcaccaggccaccacagaaacaaaagcaacaaagaggaggagccaccgcgcccagg

SEQ ID NO: 134561 - RNA, 55 nt, Homo sapiens
cgccagcccccacccagcagcacacccgggggagagagacgcgggaaccgccagc

SEQ ID NO: 134562 - RNA, 70 nt, Homo sapiens
ccagccagcacacggcaagcaaacagaagaagccagcagccacaccagaccagagaggacaaccaaaagc

SEQ ID NO: 134563 - RNA, 39 nt, Homo sapiens
gaagggaaagaaggaagagcacaccaggcccaggaaagc

SEQ ID NO: 134564 - RNA, 77 nt, Homo sapiens
cggagaacccaagacgccccaaaggaagagggaaacccccggaggacaggccaggcacgaacgagacccaccagaac

SEQ ID NO: 134565 - RNA, 62 nt, Homo sapiens
gaggccggaaccgcccagccccggggaccaaaagaacccagccaacccgcagagggagggga

SEQ ID NO: 134566 - RNA, 42 nt, Homo sapiens
aacaaacacagggaggaagccgcggcccaggagcccgccggc

SEQ ID NO: 134567 - RNA, 81 nt, Homo sapiens
gaacgaccaaccaccccagaggaaagccaggcccgcggggcccacccccccccagacgcgagaacggacacccacccaaga

SEQ ID NO: 134568 - RNA, 64 nt, Homo sapiens
agagaagcgcggagccccaagggggggccgcccgcccaaggcaggaagaggggccgcaaagaag

SEQ ID NO: 134569 - RNA, 81 nt, Homo sapiens
ccagcagccccacgcaggggcccggaacgcccgaccgcacacggccacccgaggccaggaaaggcgaacaccccaggccgc

SEQ ID NO: 134570 - RNA, 78 nt, Homo sapiens
ggcacccgcgccgggcaccgaggaccagccaagacagacaagcagaccggaagaccgacggaagaccacaccccgagg

SEQ ID NO: 134571 - RNA, 60 nt, Homo sapiens
ccaggagcccgagagagaagggaggacgaaaaagagaagacggggagacccagcgcagag

SEQ ID NO: 134572 - RNA, 121 nt, Homo sapiens
gcaggcccaccagagcggggccaggcgaaggacacgaggaaggggaaggggcaaagcagagcaacgcaagagagccagcaaaaccaaaacaacgcacgagagcggcacaacgcaggccccg

SEQ ID NO: 134573 - RNA, 75 nt, Homo sapiens
agaaggggagcggggggaagcgggcccgcgcaccgcccagccccaaaaggcaaaaaggaccacggaccccgccca

SEQ ID NO: 134574 - RNA, 76 nt, Homo sapiens
agagaacgcccggaaagagcccaggacaacacaggcaaagcccgagagacccagaccagagacaaaggggcagcgg

SEQ ID NO: 134575 - RNA, 86 nt, Homo sapiens
ggcgaggcggaggccgaggacccggggccgaggagcgggaagaggcgggggagggggaaggccagggccagacgcagcgccccaga

SEQ ID NO: 134576 - RNA, 78 nt, Homo sapiens
cgccccgaaaagacgggcaacagacacgagaggcgagggacgacagagcaagcggcagagggcaagcgggaaaaagac

SEQ ID NO: 134577 - RNA, 70 nt, Homo sapiens
agccagggagcccgagaaccaccaggggacccaggccaccaccgcccagcaacagcccagaagaccagca

SEQ ID NO: 134578 - RNA, 75 nt, Homo sapiens
ccgaggaggaagacgaacgaaacacgaaagggcaggcagccgccgcaaagggacgacgaagggacagccagaagg

SEQ ID NO: 134579 - RNA, 82 nt, Homo sapiens
aacagcagacaagaaaccagccaagaccgggccgaggaagccggcccccccgcccacagcccgaccccgaacacggacaagc

SEQ ID NO: 134580 - RNA, 36 nt, Homo sapiens
cgcaacccaacccggcaggccggaggagagagacgg

SEQ ID NO: 134581 - RNA, 81 nt, Homo sapiens
agaccagaagaaaacaagccaggaacgcaaggcggggaaaaaaaggcagcacacagacgcagcaacgggcacgcaaccaag

SEQ ID NO: 134582 - RNA, 41 nt, Homo sapiens
gcaccccgcggacgccacagcgcgccgggcaaaaagggaaa

SEQ ID NO: 134583 - RNA, 79 nt, Homo sapiens
cgccgagcaaaaaaagagcccggaaggaagagacagagacagagcaaaaccagaggccgccaaccgagcacaaaacggc

SEQ ID NO: 134584 - RNA, 59 nt, Homo sapiens
gggcggcagcgcggacacccagccccaggagggcacgagacaaagaagggacccaggac

SEQ ID NO: 134585 - RNA, 79 nt, Homo sapiens
cgcagcgcgacgcgcgaccagaccggcccccccgaggcagaggccaaagagggacaaggaagccaggcagggaccacag

SEQ ID NO: 134586 - RNA, 72 nt, Homo sapiens
gccggacccgccgcccccggcagaaacggggggggagggggacccggaagaggagaaacagaagacgaagcc

SEQ ID NO: 134587 - RNA, 83 nt, Homo sapiens
cgccgccgccgccgcccagagacgcgagcccgccgccgccgccaccacccacccggacacagacaccacgccacccaagagag

SEQ ID NO: 134588 - RNA, 76 nt, Homo sapiens
gcagagcagagaaacacgccccaccaagccgacaaaacgcccccagaagaagagcacaagcaccaccacaggagcc

SEQ ID NO: 134589 - RNA, 73 nt, Homo sapiens
aaggcacgccgcggcgcaggacacacgaagccgagaggccaaaacagaagaggcaaagcccagccacagcagc

SEQ ID NO: 134590 - RNA, 80 nt, Homo sapiens
aggacgaagagcgggacccgagcccgggacagggaagggaaacaggagacgggacccccaaaaaggaggaggaaagcccg

SEQ ID NO: 134591 - RNA, 51 nt, Homo sapiens
cggagaaccccgacagaagccaaagggcagcggcaaaagaacgacaaaagc

SEQ ID NO: 134592 - RNA, 78 nt, Homo sapiens
ccggagcgaggggcggaccgcgggcgcccacgaccagacgacgcagccagagcagcaagaggccaaggggacgacggc

SEQ ID NO: 134593 - RNA, 86 nt, Homo sapiens
ccgccgcccagagacgcgagcccgccgccgccgccaccacccacccggacacaggcgcggggaggcccagcccgccgcagggccac

SEQ ID NO: 134594 - RNA, 102 nt, Homo sapiens
cgcagccccggcgcccccggccgcaccgccagggcgcaggcacagcccgagaaaccgcagcacacacagagccaacggaccacaacagagaaccaaggacgg

SEQ ID NO: 134595 - RNA, 76 nt, Homo sapiens
ccggcaggaccgggcagaacaacgaacagaagcacaaccagagccggccccgggggggacgagagggaaacaggac

SEQ ID NO: 134596 - RNA, 30 nt, Homo sapiens
ggagagcacccaacaagaccacacacaaaa

SEQ ID NO: 134597 - RNA, 67 nt, Homo sapiens
gcacccgcaccggccacccccccggagcccggagcaaggacgacgggggacagaagaggaaaacacc

SEQ ID NO: 134598 - RNA, 87 nt, Homo sapiens
agaacccaggcccacggaggaagagccgggcagcccggagcgggccaggcgcggggaggcccagcccgccgcagggccaccccgcgg

SEQ ID NO: 134599 - RNA, 76 nt, Homo sapiens
aacagacgggaagcgagaaaacagacagagcagaagaaaccaagacggcagagaaaagaaccagaaggacgcacac

SEQ ID NO: 134600 - RNA, 80 nt, Homo sapiens
gaaagacaaggcaaacggggaccccaggagagcgccggcagcaaaaagaaaacagccaacgcccggaaccgcaaagcgac

SEQ ID NO: 134601 - RNA, 78 nt, Homo sapiens
ggacaggccgcagccgccggggcaggagaagacagaggagccagaccaagagacagcacaggcgagcgagcagagaca

SEQ ID NO: 134602 - RNA, 71 nt, Homo sapiens
gcacagacaggagaaagaagacagccacagaaaggcaaaaacggacgcgccggcacaagcgacgacaagga

SEQ ID NO: 134603 - RNA, 82 nt, Homo sapiens
cagggggccagccggaccagcaccccaccacgacacgggaggacgccagccagacgccaggacccaccccgcaaaagaccag

SEQ ID NO: 134604 - RNA, 85 nt, Homo sapiens
cggggaagcgcaaaaacaagacggggcgccccacagaggggcgacggcagggaacggggacaggagaaaggagaagagcacccgg

SEQ ID NO: 134605 - RNA, 71 nt, Homo sapiens
gagagagcaggcgaagaggaacgaaccgcaaaccagccagcacgggggcccagccagccagcagcgagggg

SEQ ID NO: 134606 - RNA, 74 nt, Homo sapiens
aagcaaagaagggcaggccgagacaaaaaaagaccacagcgccaaagagaagagaaggagccaagacacgcaca

SEQ ID NO: 134607 - RNA, 78 nt, Homo sapiens
ggcaaacaggacaagagggaaagacagagacacgggggaaagcagccgcggacgggcgcccgccaagcgcgggaccgc

SEQ ID NO: 134608 - RNA, 79 nt, Homo sapiens
agacagcccccagaacagcaccagcaaagccgagaagaagaaacaagccggggacgagaacaagaaaaaggccacagca

SEQ ID NO: 134609 - RNA, 73 nt, Homo sapiens
accccggcccggaaggagcagcaccacaaaacgccgaagggaccaggcagacgggaagaacccagaaagaaag

SEQ ID NO: 134610 - RNA, 82 nt, Homo sapiens
gccgcggcggcagcagcaggagaggagggccccaaggaccgagagccccagagcagagccaggcaagaggcccgcacaaccg

SEQ ID NO: 134611 - RNA, 88 nt, Homo sapiens
caccagggccgcaccaggacagcggagacgggcacgagagccaccaccagcaagggaaagcagcaagcaggaggccagcagaagaccg

SEQ ID NO: 134612 - RNA, 44 nt, Homo sapiens
agcggggcggagcgaccccgcggggcgcgggcaacgaggagccc

SEQ ID NO: 134613 - RNA, 78 nt, Homo sapiens
gggcaggacaagagaagcacaaaacagcagacccaagagcagcggaaaagaccagcacagagcggggcccggcgcacc

SEQ ID NO: 134614 - RNA, 64 nt, Homo sapiens
ggcaaggagcggcggcgcggacaaagggaggaaaaaggccgggacagaacaacacgcaaaccag

SEQ ID NO: 134615 - RNA, 82 nt, Homo sapiens
ggcgccgggccccgaggacacacgcgagcaccgacgcccgccggcacgaagccgagccaaagaggagcccaagggggcacaa

SEQ ID NO: 134616 - RNA, 84 nt, Homo sapiens
ccaacgcaaagaacagaccgcagaaacaacaggggagaagcgcagccacaagaacggaagcagaagcacgcaagcagagacaga

SEQ ID NO: 134617 - RNA, 73 nt, Homo sapiens
cgcggcgcccggggaaagccgggccccgagggcggaccgaggcgcagagacaaggaagggaagcggagaaaag

SEQ ID NO: 134618 - RNA, 70 nt, Homo sapiens
ggagagccaaagaagcaacaaaggcacagaagcacggcaaaaggaaagcagaaccacagaagcagggaac

SEQ ID NO: 134619 - RNA, 55 nt, Homo sapiens
aggacccgggcccaccaagccggggcccccaaacaccgagcagaggcaaccaaag

SEQ ID NO: 134620 - RNA, 84 nt, Homo sapiens
ccaggcacagggcgcagcccaggagcccaaggcggcccggcgggcgacggacggccggacagagcggaaccagcaaagaagaaa

SEQ ID NO: 134621 - RNA, 84 nt, Homo sapiens
cggcggcggcgccaggacaggagccgagaacacgggccaaccgcgcgcgaaagcgcgcaagggccacgggaccaaggccaacca

SEQ ID NO: 134622 - RNA, 78 nt, Homo sapiens
accagaaacgagccaaaaagacaagcgaaaaagggcagaccaaggaacgggaggagaaagcacaggaggcacaacaag

SEQ ID NO: 134623 - RNA, 69 nt, Homo sapiens
aaaccccaagcaccaccaccaccccggaaaccagggcaccaggcgcaccggacccacaaggacaaaaac

SEQ ID NO: 134624 - RNA, 70 nt, Homo sapiens
ccccaagaaccggccaccggccccacacgaccggggaaacgggagcggcgaaagaaaaacaggaccgcgc

SEQ ID NO: 134625 - RNA, 58 nt, Homo sapiens
gcacaaagccaaagcaggaacgaaagcggcacggagaagaaggaaaagaacggcccag

SEQ ID NO: 134626 - RNA, 77 nt, Homo sapiens
caggcagccaggacaacaagcgacggccacgccgggacaagcgcagagccgggaggagcggcgggagcgcacaggac

SEQ ID NO: 134627 - RNA, 90 nt, Homo sapiens
agaagccacggagaaaaacggccaagaggcagaccaggaaaggcccccccccccccggaccccggccccgagaggggaggaccagagacc

SEQ ID NO: 134628 - RNA, 77 nt, Homo sapiens
acgagacggggccggagccaagccccccaggagaagacagcagcggaagaaagggagaaggaaggagacaaaaagga

SEQ ID NO: 134629 - RNA, 59 nt, Homo sapiens
agccgcgcgcgcgccaggccccggaccgagcgcaaagccccacagagcaggggccaagc

SEQ ID NO: 134630 - RNA, 68 nt, Homo sapiens
aaccgacgcaaccccgcaccaccagagccaccagaggaagaacacccaaaggagggcggacgggccac

SEQ ID NO: 134631 - RNA, 75 nt, Homo sapiens
cgccaccccacgaacccaccgcgacccggccacgccgccccaagggcggaaagaagaggaaagaaacagaaaaag

SEQ ID NO: 134632 - RNA, 70 nt, Homo sapiens
agccggagggaacagcagggcaaagcaacagccaaaaaacagaggggagagagcggagccgaaaccaagc

SEQ ID NO: 134633 - RNA, 80 nt, Homo sapiens
gggagaccagccgagcaacacacaggaagaaccggacccggcgaaccggaagggaccagacccaggacaagggggcccca

SEQ ID NO: 134634 - RNA, 77 nt, Homo sapiens
gacaggaaaagaagaaaaagaaccagaccccgaaccggccagagggggcgaccgggacaaacggcggaggcagaaga

SEQ ID NO: 134635 - RNA, 83 nt, Homo sapiens
gcgggcggacgcgccggcgggaagagagcggcggccgccacaacagcacagccggcgacggcgcgggaacggacgcgacaccc

SEQ ID NO: 134636 - RNA, 78 nt, Homo sapiens
cgcccgcggccagccgcaagacccgccacaagcaacgcgggaagagaagaggagaaggcagagcccccccaggcagaa

SEQ ID NO: 134637 - RNA, 73 nt, Homo sapiens
gagaggacacgggagagccgaaccagaagagaaagccaaacagaggaaagagcggagcccgccagaaacagac

SEQ ID NO: 134638 - RNA, 82 nt, Homo sapiens
caccccgcggccgcacccccgccccaggagaaggaagcgccggccaaacgagcacagcaaacgcgaaagagcggaggcgcgc

SEQ ID NO: 134639 - RNA, 76 nt, Homo sapiens
ggagggaaagggaagacacgaaaaaagagaaagggccaacgggacagacaaggagagaacgagacgacacacggaa

SEQ ID NO: 134640 - RNA, 68 nt, Homo sapiens
cagggaaccggagggaaagagcccgagagagacgcagcgcaaggccgggggaggccacaaaacaaagc

SEQ ID NO: 134641 - RNA, 84 nt, Homo sapiens
ggcggccgggccggggacgacccagcgccggacaccaggggggaaaaaccacacaggcaaagaacgcgcaaaacaggacgaaaa

SEQ ID NO: 134642 - RNA, 79 nt, Homo sapiens
ggacgacagcagccagaaggccaccacgcgagcaaaaccacaaagggaccaccgagccaccgccagccaagcgagcaaa

SEQ ID NO: 134643 - RNA, 86 nt, Homo sapiens
gcagcaagacgcaagaccaaggccggaccgagccacaagaaggacgcggggaccggggccacgaggaagcagaccagcccacacag

SEQ ID NO: 134644 - RNA, 58 nt, Homo sapiens
ggcaacaaagaaagaacacaaacgacacagggggggccgcccgcccaaggcaggaaga

SEQ ID NO: 134645 - RNA, 82 nt, Homo sapiens
gcgacaccgcgacaccccaacaaacaccagcgcggagcaaggcaccggcaccggaccaacacgaaggagaaccgcaggcccc

SEQ ID NO: 134646 - RNA, 75 nt, Homo sapiens
aaccagcaaaggcggagaagccagggcgacaacaagccagcaccaaccaagcaccacgccacacacgacagcagg

SEQ ID NO: 134647 - RNA, 83 nt, Homo sapiens
caggggggcacgcgacgcacagaggaacacgccggggcccaaccacaagacgaccaaaggaggaaggcggagaaggggcagca

SEQ ID NO: 134648 - RNA, 80 nt, Homo sapiens
gcaggccagacagacaggacaggcaacaccaaggaggcaccagacaagaacaccagcaggaaaaaagagcggcagaaggc

SEQ ID NO: 134649 - RNA, 80 nt, Homo sapiens
cgcccccgccgccgggccggggccccgcagcgacaacaggaggccggaagacccaaagcgagggacaagagaaaaaaagg

SEQ ID NO: 134650 - RNA, 70 nt, Homo sapiens
gcccgggcccccccaaccacgagggacacaaagaggagagggggagcccggagggggcaagaggaaaagc

SEQ ID NO: 134651 - RNA, 84 nt, Homo sapiens
accgacgccaacaggcggcgcccagggcgccaccgccgccgcagaggaaacgcggacaagggcaaagaccgaacaagcggagcc

SEQ ID NO: 134652 - RNA, 75 nt, Homo sapiens
gacaaaagagcaacccaagcggcgggccccaacaagcaaacagagaccgaggccaaaagaaaggaagaaaacccc

SEQ ID NO: 134653 - RNA, 80 nt, Homo sapiens
caggagacagaaacggcagaggacgccaccaggaagggcccgcccgagaggacgaagggacaggacaggaccaggaagag

SEQ ID NO: 134654 - RNA, 71 nt, Homo sapiens
gggaagggagagggcaccgcacgggccgcgcaacaggaacggggggccacgacgggccaaagcggagaaga

SEQ ID NO: 134655 - RNA, 57 nt, Homo sapiens
acaaccaggacccaggcaccagggacgcaggacacaagagagacagggcgccggggc

SEQ ID NO: 134656 - RNA, 67 nt, Homo sapiens
acgccaggccacaaaagaaagaaaccgcgaggcagggaaagaagggagcggcgagcgggcacggaag

SEQ ID NO: 134657 - RNA, 80 nt, Homo sapiens
cgggcgccgggagccgcggcgagcgccccagccaggccgcgccggcaccccgaggaacagaagaggggccacaaagaaac

SEQ ID NO: 134658 - RNA, 81 nt, Homo sapiens
ggagaggcgcacggcgaggcggagaccgagggggagccccgcgcgcggcgcggccgccacccggaaaaaaacacaagaaag

SEQ ID NO: 134659 - RNA, 57 nt, Homo sapiens
aaccgagagaaagccaaaagagccacagaaacagacacccaggccccagaaccgaac

SEQ ID NO: 134660 - RNA, 30 nt, Homo sapiens
ggcgacgaaacaacagagcagaaaaccaag

SEQ ID NO: 134661 - RNA, 80 nt, Homo sapiens
ccgagcggaccgacccaaaaccagagaaagacagcaaagaaaaggagaagaaaggaaaaaaacaaccccgggcaccccgc

SEQ ID NO: 134662 - RNA, 70 nt, Homo sapiens
agaaggccaacaaccccgggggcgagaggggggcagacacccggaaaacaggcgaggggcccgcgagcaa

SEQ ID NO: 134663 - RNA, 68 nt, Homo sapiens
ccacaagcagggcggagggacagcccgaggcacggaacgaaacaagcaggacagcagaccacagcccg

SEQ ID NO: 134664 - RNA, 43 nt, Homo sapiens
aagacaccgagcgaaagagaaagaggaaaagagggaagagcag

SEQ ID NO: 134665 - RNA, 56 nt, Homo sapiens
cagacgcagggcgcccccgcaccgccggccaggaggagagcgcaccaccaaaaagg

SEQ ID NO: 134666 - RNA, 46 nt, Homo sapiens
aaccacacggccaggaaacggaaaagcaagagacaaggccagaacg

SEQ ID NO: 134667 - RNA, 67 nt, Homo sapiens
caacccgccacggagcacaccaaccaaccaagacaggagcggggcaacaagacggaggaagaagcag

SEQ ID NO: 134668 - RNA, 77 nt, Homo sapiens
acgccaaccagcccgcgagcgcccgaggaaagcacgcagaaccggccaccgagccgagagcaacgaagggcccacgg

SEQ ID NO: 134669 - RNA, 95 nt, Homo sapiens
caaggcgcgggagaagacgggagaacaaaccgaaaccaccccccaaaaagggcgaaggcgggaagaaaggcgaaggagggaagcgaacagaaccc

SEQ ID NO: 134670 - RNA, 76 nt, Homo sapiens
ccccccggcgcccaagcggaaggaagcgcggcgcagccagacgcaaaaaggagccaccaaggaaaaagagaagacc

SEQ ID NO: 134671 - RNA, 58 nt, Homo sapiens
cacgccgggggcgaggagacaaaaaagcccaagaggagacccacagacacggcagggc

SEQ ID NO: 134672 - RNA, 84 nt, Homo sapiens
acgacggcggaacggggaacgacggcccagcaggcggggaagagaaaggggcgcgaaaaaggagaccaaggaagagaagggaag

SEQ ID NO: 134673 - RNA, 74 nt, Homo sapiens
acacagcgcagaggggcaaagaagacgagaccaacgcgcgggagcgccaaaagcaccaccaccaaaccagagag

SEQ ID NO: 134674 - RNA, 86 nt, Homo sapiens
gacgccgcacggccgcgcgccaccccaaggaggacggcggacacggccagcgaggacagccagaagaggaccacagcaaaaaaaaa

SEQ ID NO: 134675 - RNA, 55 nt, Homo sapiens
ccaaggcaagccagagaacacccgccgcgcaaaagagaccgaagaaaaggcaagc

SEQ ID NO: 134676 - RNA, 81 nt, Homo sapiens
aagaaaagagagccaaggcggcaaaacccaaaaccagggccaagcggccaccacgcccacaagaaaacaaaacacgagcac

SEQ ID NO: 134677 - RNA, 81 nt, Homo sapiens
gccacaggaagagaaagaggggagaaaaagggaggagagaagcccggagaagcaaggcccacgcggacgaagcccagcccc

SEQ ID NO: 134678 - RNA, 80 nt, Homo sapiens
gcagcccgccccgccgggggagacgacccccgccaggcaaacgaacacgcgcagcgcagaggcccggcagccccaaggaa

SEQ ID NO: 134679 - RNA, 75 nt, Homo sapiens
ccagcgccggaggaggagcggcggacaacacacgacccggggaaggaggcgaaacacggagccaaagagaaccac

SEQ ID NO: 134680 - RNA, 76 nt, Homo sapiens
cccaaaggagacaaacaggggaaacagaccgacagacgggaaaccacaccaccacgaagaaccacggcgggcagac

SEQ ID NO: 134681 - RNA, 80 nt, Homo sapiens
gccgcggagacccagcgcacgggagcagccagaaacaagaaccagaggacaacccagaagcccagaacagcggagaccag

SEQ ID NO: 134682 - RNA, 71 nt, Homo sapiens
caggcggagggaaaacaggaagagccagcggggagggggccacgcgcccgccgcagggcccacggccggcc

SEQ ID NO: 134683 - RNA, 75 nt, Homo sapiens
aacaccagccgggagccgcccgcccccacacgccagcgcacaccggggccaccccaaagaccgagcaccgagaca

SEQ ID NO: 134684 - RNA, 85 nt, Homo sapiens
ggaggaacagaagcggaacagccacagcagcccccaaggagcgcaagggcgaggaaaaccaccacacaggggaaacacccagaca

SEQ ID NO: 134685 - RNA, 77 nt, Homo sapiens
gaaaaaccgggagggaagagagaaacggccccacccgcacaacaagaaagccaacccagcgaaggaacaagcaaacc

SEQ ID NO: 134686 - RNA, 69 nt, Homo sapiens
ccaaagcagcaggagcgcagcacgaaaacggaaagggaaggaaggcagcgggggcacagcgagggggca

SEQ ID NO: 134687 - RNA, 113 nt, Homo sapiens
ggacaggagaaagcagaaagccgcaaggacgagaggagacccgccggagaagaacaaaccagcgaaggcaagggaccggccacgcaacccgcccccaggcaagcgacccgcgg

SEQ ID NO: 134688 - RNA, 83 nt, Homo sapiens
accaaaggggaaacagaaacaagccggcaaggagggagacggcgagcagaggcgccccaccacgccacccccaacccgcggag

SEQ ID NO: 134689 - RNA, 48 nt, Homo sapiens
cagcacgaacacgaaggcagacgaccccggagaaaaggccccaaaccg

SEQ ID NO: 134690 - RNA, 63 nt, Homo sapiens
gagcaaggggaacgccacggacgggaaacccgagaggagcaggagcaaccgacaggcgggccg

SEQ ID NO: 134691 - RNA, 71 nt, Homo sapiens
cccacagggcaaagagagcagacccgaggagcccgcaggcccaaagcccagccaaggacccgaaaaacgag

SEQ ID NO: 134692 - RNA, 60 nt, Homo sapiens
gcggaaggaagaacagaaacacgaccaaacaacggcaagcggagaagagcaaggccgaac

SEQ ID NO: 134693 - RNA, 74 nt, Homo sapiens
gcaaaggaaaaggacagagagcacaaaagggggagaagcaaagcgaaagaacaaaaacagaaaaagagcagacc

SEQ ID NO: 134694 - RNA, 78 nt, Homo sapiens
cagaaggagccaaaaccccaccagcggagacgcgcacgggaacccacaggccgcgcggaacggccagaggagacggaa

SEQ ID NO: 134695 - RNA, 81 nt, Homo sapiens
gccacccaagaggagccccggggaacccgcagcacaccagggggcaggcccggcacagcaagcaacccggccgaggggggc

SEQ ID NO: 134696 - RNA, 77 nt, Homo sapiens
caggagcgcaaagagaaagaacaagaacacgcagcacgacgcaaagccccgagcccaaaacagcccacgcagcccgc

SEQ ID NO: 134697 - RNA, 82 nt, Homo sapiens
gcaggaaccccaggaaacggccaggaccaggccaaccggagcgcacccacgccacaagccggacggcggcagcgcggccggg

SEQ ID NO: 134698 - RNA, 80 nt, Homo sapiens
cgccgagcccgcgcgccaggccgcggcccgaggcgcagcagcaggaggaggaccgcagcaaggccacgagggcacagaac

SEQ ID NO: 134699 - RNA, 83 nt, Homo sapiens
cagccgccgccaccccgcggccgcacccccgccccaggacacgagacagggacaggggcggaggagcccacacaccccacagc

SEQ ID NO: 134700 - RNA, 78 nt, Homo sapiens
gcggaggcagagaagggaacgcccggcccagccccaaacacggcaccgggggcggaaaagcagaaaggaaagggaaga

SEQ ID NO: 134701 - RNA, 55 nt, Homo sapiens
agcggaaaagagaacaggcagagaccgaacaaaccagaggagacgccaggcccca

SEQ ID NO: 134702 - RNA, 78 nt, Homo sapiens
agcccgccgccccgaaaccaccgcgagcggaagccgaggcgccagaggaggaagggaagaaacagagcgggcgaaacc

SEQ ID NO: 134703 - RNA, 80 nt, Homo sapiens
gacccggagcccagggaagcagccgaccagccgcggagccgggggcaggacgagacaagggcaacgagacacccagcggc

SEQ ID NO: 134704 - RNA, 85 nt, Homo sapiens
ccggggccccgcggcgcaggaggcggggagcgcagagcgggcgagcgcgggcaagggcgcagcacgcagacccgcaagccccaag

SEQ ID NO: 134705 - RNA, 73 nt, Homo sapiens
acagggagcgacgcacccccaaggccaaccaaggacacgagcaggagaccgaggacgcaaacagcaaagaggc

SEQ ID NO: 134706 - RNA, 78 nt, Homo sapiens
gcccagccgggaacccccacgcggccagcgaaaacgcccagcccggacgaggggcaggaccggggacacacgacgcgg

SEQ ID NO: 134707 - RNA, 66 nt, Homo sapiens
accgagggggccagcccaagaacccgaggaacaccgacgacacgaggaggcggggaggaggaaggg

SEQ ID NO: 134708 - RNA, 86 nt, Homo sapiens
gaagcagaaagcaaggaaacgagcagaagacgacgcagccagagcagcaagaggccaaggggacgacggccacgggcccgggaagc

SEQ ID NO: 134709 - RNA, 82 nt, Homo sapiens
ggacaggaaaaaggaaaacaggcaagggaggagaacaccaaacagaggaacaggcggacagccaaggagacaaagaagagaa

SEQ ID NO: 134710 - RNA, 54 nt, Homo sapiens
caggccacccgggaacggaggagggaggcccacgcggaccggcagcgccaccgg

SEQ ID NO: 134711 - RNA, 70 nt, Homo sapiens
cgaaggcgagccaagcgaagaggagcgccagaggggaggaaacacaagaagcacggggccaaaaaggcac

SEQ ID NO: 134712 - RNA, 74 nt, Homo sapiens
ccgccgcagccagcggccaccaggaccgaaaagacgcggccccaaaggaaacacccgaagaacacagcgccagc

SEQ ID NO: 134713 - RNA, 76 nt, Homo sapiens
aggacaccacagccccgacgaacacggggacaccaacaggacccggaggcagcacggcaggagacgaggagaggac

SEQ ID NO: 134714 - RNA, 86 nt, Homo sapiens
cggccgaaggcccgagcgcccgaggcgcgggaggggggaccgggagccggaccagaccgccggagcacgccgagaccaccgaggac

SEQ ID NO: 134715 - RNA, 57 nt, Homo sapiens
gccggggccgggagacagcggggcagccaccagggaccaaccaccccggacccacca

SEQ ID NO: 134716 - RNA, 83 nt, Homo sapiens
aacgaaaagcgccagaaaggagaggccacagaacacagacacgcagggagaaggcagccgggaaggagcggagacagaggagg

SEQ ID NO: 134717 - RNA, 83 nt, Homo sapiens
gcggggcgagagggggcaggggcagccgccagcccaaacaggcggcacaggaagaccggcaaacgcaggggcacgagcaaggg

SEQ ID NO: 134718 - RNA, 79 nt, Homo sapiens
aaaaaacggagccagccgccagggaggggaggagaagcggaccggcccaggaccgaaccccgccagcacgacaaaggca

SEQ ID NO: 134719 - RNA, 75 nt, Homo sapiens
gggaagcggcgccgaaggcccggaccgccgggcgcgcggggccccgggccgaggaaagacggaaagaggggggag

SEQ ID NO: 134720 - RNA, 82 nt, Homo sapiens
ccagagaagccgcaggacagcagccccgagcacgggccgaggcccaccgcgacacaccgccagggacgaacagcggggacgc

SEQ ID NO: 134721 - RNA, 82 nt, Homo sapiens
agcgcgggagccacgcagaggacgccggaacacccggaagccgagaaagggagaacacaaaacaggccaaaagggcagaaaa

SEQ ID NO: 134722 - RNA, 79 nt, Homo sapiens
gggacacgcgagggggggagagaagcacaagcgggggaaaccagaggcagaagaggccggaccggcgcacacagaccca

SEQ ID NO: 134723 - RNA, 81 nt, Homo sapiens
ggcccaggcgccgcggcgaggagcgagcgcgcgaggggcggccgaggggcacaacagcaggacgcccagaacagcgcaccg

SEQ ID NO: 134724 - RNA, 55 nt, Homo sapiens
cagcccaccgaaaggagagaagcagacgagaagaggcgaacggaagcaacacccg

SEQ ID NO: 134725 - RNA, 64 nt, Homo sapiens
gcgccccggcagcggcccggagaccacgacacaacaagcgcgccccagaccaccggcagggaac

SEQ ID NO: 134726 - RNA, 80 nt, Homo sapiens
cccacaccaaccagaacaaaacagacccagggaggaggaggagaggaaaaagcacacgaagacgagagaagaagaaggga

SEQ ID NO: 134727 - RNA, 59 nt, Homo sapiens
cggcgccggaaaggcagccaaagggccaaggccaagagcagacgagacggagagaagac

SEQ ID NO: 134728 - RNA, 53 nt, Homo sapiens
cgaccagcaggaacgaacgaaaacaaacggaagagagggcagcaagaaagaac

SEQ ID NO: 134729 - RNA, 77 nt, Homo sapiens
cacaggggcaagaagccaggcaggagaggaggagggcccgccccggcggccacaggcaagccccccacgcggggaag

SEQ ID NO: 134730 - RNA, 76 nt, Homo sapiens
acaagaaagccgacccccaaggacccaaagacaggaccacgcaccagcagagaaggaaagcaaaccgaagcaggcg

SEQ ID NO: 134731 - RNA, 72 nt, Homo sapiens
gacccagccagagaagccgaaaagagcagaggagaaaggaaaccggccacggagagccaggaacaaaagggg

SEQ ID NO: 134732 - RNA, 78 nt, Homo sapiens
ccaccgacaaggccagagaaagaacaccaaccaaagcgccaaagaaagcgcgagccggcacgaaacaaaggagcgaga

SEQ ID NO: 134733 - RNA, 77 nt, Homo sapiens
gcaaaggaaagaacaggagcaaggcaaggcaaagaaaaagacaaaaggaagagaagacaagggcaacaaaccgagac

SEQ ID NO: 134734 - RNA, 62 nt, Homo sapiens
gcggcggcgccaggagcgcggccccgccggcccgggcgcacagcagagacaaccaggcccca

SEQ ID NO: 134735 - RNA, 80 nt, Homo sapiens
cagaggagggaggaaaacaaccgagggcagagaggaacagcacagcagcgggccggaaaagcgagcgcaagaggaagaga

SEQ ID NO: 134736 - RNA, 72 nt, Homo sapiens
gagacccaaacgccaacagaaacgcaccaccaagggcagggaggccaccagggcggaggcacccgccaaagg

SEQ ID NO: 134737 - RNA, 67 nt, Homo sapiens
ggcacgcgggacgaacaccgcacaggcaggaggcaggccaagaaaccccaaggcgcagacaccgacg

SEQ ID NO: 134738 - RNA, 80 nt, Homo sapiens
gggaaaacaggaaggaaccagccaaaaagcaaggagcagcgcccgagaccccaggagcagcagagagggaaagcagaaga

SEQ ID NO: 134739 - RNA, 114 nt, Homo sapiens
aacccccacaacagaggccagaagaaaagccgacaccccaggcacccggcgcaaagaaagggggcccggggaccagcagggcaccagaagagcgaaaaaaggcaagacaaggag

SEQ ID NO: 134740 - RNA, 99 nt, Homo sapiens
gcgggccacggaagccaccgacaggcccgagggcccgagagcaccgcgccagacagggggcagcacgccgaaggagagaccagacaacaggccagggaa

SEQ ID NO: 134741 - RNA, 82 nt, Homo sapiens
gaaacccaaaacaaccaaaagaaccaaggagaccaaagagaaaacggaacgagagaccgccaggccaggccgggacggacga

SEQ ID NO: 134742 - RNA, 92 nt, Homo sapiens
gccaacgagacacggacaccaggagcacagcacacagagggggggagagacaaccagagcggaaagggagaaaagcccccagaaaggaggca

SEQ ID NO: 134743 - RNA, 80 nt, Homo sapiens
ggcgagacacaagcgccgagcagaagggaccgcccgggccagaagccccggcagaccaaggaggccgcacccgcagcacc

SEQ ID NO: 134744 - RNA, 78 nt, Homo sapiens
gaccccagaaacgggcaagcgcgcaaacccagaagaacaagggacaaaccaaagaccaaccaagaggccagagagcaa

SEQ ID NO: 134745 - RNA, 75 nt, Homo sapiens
ggaggagagaagagaagaaaggaggaagggaaagcagcaacacaaccaggggaaccaccaagggaaaaaccagca

SEQ ID NO: 134746 - RNA, 68 nt, Homo sapiens
gaccgaaagcaagacagaagaggaggcgagcagaagcaaaggaacaagcgcgagaaggaacaaaccag

SEQ ID NO: 134747 - RNA, 72 nt, Homo sapiens
ggcacggaaccaaaaccaacgacaagaggggaaaaccgaccaaccaacgagagaagaccaaacggacaagga

SEQ ID NO: 134748 - RNA, 89 nt, Homo sapiens
gcgaggagaccggcaccacggcagcggcccaacgccaagaacaaccggccggagcgggacggaaggggacacaggcaagaccacacgga

SEQ ID NO: 134749 - RNA, 81 nt, Homo sapiens
gaaaaaagaaagaggagcaaaaccaccccgaaaccgacacacgacagcaagagaccccccgacaggagacaagacccccaa

SEQ ID NO: 134750 - RNA, 84 nt, Homo sapiens
aggcaacggccaaccggcaagaccagacgggaacgggagacaagcgcagcgagggcggagaacggaaaagcaccaggaagcaga

SEQ ID NO: 134751 - RNA, 81 nt, Homo sapiens
ccccgcggcaccacccggcaccagggcaggagaaacccagcgggcccagagacgcagcgggaaaaccaaggcaagccaggc

SEQ ID NO: 134752 - RNA, 67 nt, Homo sapiens
gccggggccacgaggaaaggaagacgggcggagcgccacagccaggagacacggcccaccaagccga

SEQ ID NO: 134753 - RNA, 70 nt, Homo sapiens
caaacgagaaaggagagagaagcggaggaaagagaagaaagaaccgaaccaacgaaagaaggcgccgcaa

SEQ ID NO: 134754 - RNA, 73 nt, Homo sapiens
ccacggccccgccagcaaggcggcgcgcccaggaggcaccagaaggccagcggacaaccgacgaggcccacaa

SEQ ID NO: 134755 - RNA, 69 nt, Homo sapiens
gaggaacaaaggcggaaacgaaggggaggacacagaaggagcagccggccacaccgcaggagaaagaag

SEQ ID NO: 134756 - RNA, 73 nt, Homo sapiens
ggcaagcccagccgccacaccccgccgggcaggaccagccgacagcgaccaaggccagagcgaaaggccacgg

SEQ ID NO: 134757 - RNA, 72 nt, Homo sapiens
ccggagaaagaagaagaacacagaagagaacccgaacacagcaggagcaagcgggggcaggagccaaagagg

SEQ ID NO: 134758 - RNA, 74 nt, Homo sapiens
cggcgccgcgccggcggcgcgggaggcgggcggcggggcggcacggcggccgccacacaggggagccgccacgc

SEQ ID NO: 134759 - RNA, 81 nt, Homo sapiens
caccgggaaggcggggaggaggccccaaagggcgagaaaaaaccagaggaggagaagagccgcagggcccagcgggggcga

SEQ ID NO: 134760 - RNA, 73 nt, Homo sapiens
caacggagcgcgaggcgggcgcggagaagcgcggaggaacaagcagaaagcacgaacaacgagaacaagacac

SEQ ID NO: 134761 - RNA, 89 nt, Homo sapiens
gaaacaggaaagaagcgaccacgcgaggagaagccaacggccacaaaaccaaagcaaccgggggcgacccggaagcggaccccagccgg

SEQ ID NO: 134762 - RNA, 80 nt, Homo sapiens
ccacagggagaaaccccacccccaagaaccaacccccaaaggcgggacaggagaaccaacagaggcaaaagcagagacaa

SEQ ID NO: 134763 - RNA, 76 nt, Homo sapiens
ccaccagcgggagaccccgcgacccgagacagccccaagacaaccccaccagcaccacagaaggacagcaaaagga

SEQ ID NO: 134764 - RNA, 75 nt, Homo sapiens
gcagccacggaccgcccaaccgcgacgccgaggccgcagccaagccggaacaggagcggcgagcccaaacgcaag

SEQ ID NO: 134765 - RNA, 74 nt, Homo sapiens
aaacaccacagccgaaggccggaccaaagaaacacggacaacaaaaaccggacaagcccccacgaggaaaaccc

SEQ ID NO: 134766 - RNA, 71 nt, Homo sapiens
agcgcgggaacggcgcggaagggaagaacgcacgagggggagggaggaaaaaaacagaaaaccgaaaaccc

SEQ ID NO: 134767 - RNA, 79 nt, Homo sapiens
acgcgcgggagggccgccgcaacccagcagagagcaggagaaaaaggcagccccggagacgaaaagacaaagcaccacc

SEQ ID NO: 134768 - RNA, 79 nt, Homo sapiens
gccggggggcgcgccgcgaccgcccgccgggaccaagaacgcccagcccgcgggcaccggcagaaaggaggaggaaaac

SEQ ID NO: 134769 - RNA, 71 nt, Homo sapiens
gaacgacccgcccggggcagcaggcgcagacgcacggggccgcaagaacagacaaccgcagccccagggaa

SEQ ID NO: 134770 - RNA, 73 nt, Homo sapiens
gccaccgaagaagccacaaacaagcagcaccgacggccagcgcccaaggagagggaagagcaagggacaacag

SEQ ID NO: 134771 - RNA, 68 nt, Homo sapiens
cgccggacccggccgacaggcccagaagcggacaaccagccgaacaaaacacggcaagggagggccga

SEQ ID NO: 134772 - RNA, 50 nt, Homo sapiens
gagaagaagcaccccaccccacgcgcaagaggaaagcgaacgcgaaaaga

SEQ ID NO: 134773 - RNA, 55 nt, Homo sapiens
ccgcacagccagggacgccacggaacaaacgaaaaaggcgggacagaagaaaacc

SEQ ID NO: 134774 - RNA, 72 nt, Homo sapiens
cgccgaccccaggcagccccgcacgagcggcaaccgaaagccagcagcggggaagaagaaacacgagcacac

SEQ ID NO: 134775 - RNA, 59 nt, Homo sapiens
ggagaaccaggacgcaggcaaaagcagaccggaaaacccaccggcaagaccacacccga

SEQ ID NO: 134776 - RNA, 64 nt, Homo sapiens
aagaagcggaaccagggcccacacccgccgggaaagcgccccgaaggacggaggcgaaggcaca

SEQ ID NO: 134777 - RNA, 82 nt, Homo sapiens
ccgcgcgagcaggacaggcgaccacaacagcagggaaacagaagacagccgaaccaagggcgacaaccagagacaagcaggc

SEQ ID NO: 134778 - RNA, 105 nt, Homo sapiens
agggcagacaggcgcgggaagggacaagggaaacacgaagggaaaggccgacagcaaaagcagccgagaggaacaagagacaaccacacaaccacaacgcagcag

SEQ ID NO: 134779 - RNA, 66 nt, Homo sapiens
cgggggaagccaggcaccccccacagaaagggcgcacaaacgccagaagacaacacaaggacaaaa

SEQ ID NO: 134780 - RNA, 70 nt, Homo sapiens
ggagggaaccagcaacaagccagggcccaaccaagaccgaacccaagccagggaaacacgcacggcccag

SEQ ID NO: 134781 - RNA, 72 nt, Homo sapiens
agccggcaggagccgagccaggccaggacaagccgaggcaccgcaggcccacacaagcaaagccggggccaa

SEQ ID NO: 134782 - RNA, 38 nt, Homo sapiens
aaggaccaagaaccagaggggaaagaaaaagagcccac

SEQ ID NO: 134783 - RNA, 108 nt, Homo sapiens
gccagccagcccgcgaccgcccgcgccggcaccggggcggccggccaaagccagggggaccagccaaaacggaaacaaagcccaaccacgccagccccgaacagacaa

SEQ ID NO: 134784 - RNA, 38 nt, Homo sapiens
ccggggaccgccaccggacccaacagccaagaaaaaga

SEQ ID NO: 134785 - RNA, 78 nt, Homo sapiens
aagggacgccaaagacagcaagagcaccacggccaccaggccagcacggaagccccaaccggcgccaaggaaaccgga

SEQ ID NO: 134786 - RNA, 78 nt, Homo sapiens
caaaaagcaagggggacaacccaagggacaagaaaggaccagcccaggcgcaggagccaaagaacgaaccgccgaggc

SEQ ID NO: 134787 - RNA, 79 nt, Homo sapiens
gagcccagaccgggcgacccgccgacacagggaacacacggcggagaacgacgccggcggcgcacgccccgagagacga

SEQ ID NO: 134788 - RNA, 83 nt, Homo sapiens
cacgagaaggagccgccgcccacgccgacggggccagaggaggcggccagcgggcaggggcagagggaggccaacagacccaa

SEQ ID NO: 134789 - RNA, 75 nt, Homo sapiens
agaaggagcacgaacagggagagcaggacaccagcacaccgcggaggcgcccagcccccacagcacagcaggagg

SEQ ID NO: 134790 - RNA, 78 nt, Homo sapiens
aaggagacgcagagcggagcggagaggaggagccaagagagggagggaccaagcgccagaacgaccaacgaccacaac

SEQ ID NO: 134791 - RNA, 78 nt, Homo sapiens
gaaggggagagcccaggcacgagcacgcaccagcccaagacccaaagggagccgccaccggacaccaaccagaagaga

SEQ ID NO: 134792 - RNA, 76 nt, Homo sapiens
aggaagacacagaaagaaaaacagaacgacaaaaagcaaaagaacagaagagggagagcaaaaaccaaaggcagca

SEQ ID NO: 134793 - RNA, 84 nt, Homo sapiens
gcggcggaaaaccccaaaaggacaaaggcggaggcaaagcggaaaggacaggggaaggccaaggcaaggcagaccgccacagag

SEQ ID NO: 134794 - RNA, 84 nt, Homo sapiens
gcgccgcccacggcgaggagccagggacagccggccgacaggaccgggccgaccggcagcggagccccggcacaaaggaagaag

SEQ ID NO: 134795 - RNA, 36 nt, Homo sapiens
aaaaaagccgcacaggaaaggggaaaaggaacaacc

SEQ ID NO: 134796 - RNA, 75 nt, Homo sapiens
gaacggcccgccaccggagacaacgagaggagccgacaaccccggaacgcgggcaaaaggccccaggggaccggg

SEQ ID NO: 134797 - RNA, 59 nt, Homo sapiens
caagaacacagaagcaagggaagcagaaacaggcagccaaagaacaagcgcgacaggac

SEQ ID NO: 134798 - RNA, 74 nt, Homo sapiens
aagcacgaacccagaacaacgccaagacacagaaagaacgaacaaaggagaagaaggcgcaaggccaaacacag

SEQ ID NO: 134799 - RNA, 66 nt, Homo sapiens
acacgcccaagacacagagcaggccgcggcagagccaaccaccggccccccaacaggaggcacccc

SEQ ID NO: 134800 - RNA, 80 nt, Homo sapiens
cccccgacgccccagggcgacggacacccgaggggcaccgccaagaccagcacggccgaacgaggcggggggcccgagac

SEQ ID NO: 134801 - RNA, 56 nt, Homo sapiens
acgaggacacgcagccggccgaggaccccccaggagcggggacccccaggagaaaa

SEQ ID NO: 134802 - RNA, 90 nt, Homo sapiens
aaacgagcccgcccgcagacagaaagaggccccccggaggggcggaccggcgcccagaagccccgggagaaccgagcgaagcgccaggaa

SEQ ID NO: 134803 - RNA, 86 nt, Homo sapiens
cgcggaggcggagcggaggcgcggcgccgggagcgagacggcaaagacaaacagagcacagacacagggaccagaaagggcaaccc

SEQ ID NO: 134804 - RNA, 72 nt, Homo sapiens
cgaagaagagggcgggccgcaaaagagaagcaaagcagcgagaggacacgggaccacacaaaaagaaagacg

SEQ ID NO: 134805 - RNA, 72 nt, Homo sapiens
caagggaccggccgacacccgcgcggaggggaggggggcccacgcggaggacgcagaacacggcgggcggcc

SEQ ID NO: 134806 - RNA, 59 nt, Homo sapiens
ggcgcggagagggggcgcgagcggggaaacagcaagagaacacgcacagaaggaaccag

SEQ ID NO: 134807 - RNA, 35 nt, Homo sapiens
gggaaccagccaaaagaaaagaggagaccccaagg

SEQ ID NO: 134808 - RNA, 72 nt, Homo sapiens
cagcaagagccaacacagcacaagggcagcaccagaaagcagaaacaacggcagaaagagagcccggccaac

SEQ ID NO: 134809 - RNA, 57 nt, Homo sapiens
gccaagagggacccacccggcgagagggccgaggcagacaagggaaaggccgcgcag

SEQ ID NO: 134810 - RNA, 78 nt, Homo sapiens
agagcgaaccccgggacacgcaggaacggcccagcacaagaccgcgacaggagaagacagacgcgcggaccgggaaga

SEQ ID NO: 134811 - RNA, 71 nt, Homo sapiens
gcggcggccggacggccaaccacggacagagggacacagcgggggcccgaagaagagaaggacaagcccgc

SEQ ID NO: 134812 - RNA, 75 nt, Homo sapiens
aaaggagagaagaccacagccaggacccgaaaagccagcaagcgagaccaacaccaacacgagggcggcggaaaa

SEQ ID NO: 134813 - RNA, 70 nt, Homo sapiens
ggggcaagagcgggggcgggaccccgccgcggcgggagggagaagacagaggagccagaccaagagacag

SEQ ID NO: 134814 - RNA, 76 nt, Homo sapiens
ggaaaaaagcagagcccaggagaaaccggacgcgacggggcccgaagcagagaccacgagagcaaagaaacaaccg

SEQ ID NO: 134815 - RNA, 53 nt, Homo sapiens
caaaggcggggaagagagcgccgagccagacccaggagccacgcagggacgca

SEQ ID NO: 134816 - RNA, 74 nt, Homo sapiens
ccgaaaaggcgaccgccccaaggaaccacggcggaggaacagaaggcgaagaagaggcccccggccagaaaccg

SEQ ID NO: 134817 - RNA, 70 nt, Homo sapiens
ggcgcacaggacggagaacgccccgaaccccgcacacgaggaagagggaaggacccgaaggagcgaagcc

SEQ ID NO: 134818 - RNA, 86 nt, Homo sapiens
gggggcccggggggaggaggggcaggcccggcggcaaaagcagaccggaaaacccaccggcaagaccacacccgaggggagcccag

SEQ ID NO: 134819 - RNA, 86 nt, Homo sapiens
ggagccccccgcagcgaccggaagacgaggcggcgggggacaagcggcgccccagagcggacgaggcaaagaggaccgagggccag

SEQ ID NO: 134820 - RNA, 37 nt, Homo sapiens
gcaaaaggagcagaacagcagggggaccagccaaaac

SEQ ID NO: 134821 - RNA, 67 nt, Homo sapiens
gcccaagccccagcccccgggcgaggcacaccccggagccaggaggcaccacgccacgggaaggcag

SEQ ID NO: 134822 - RNA, 80 nt, Homo sapiens
ccggcggcggcgcgggcgagcggcgagccgaaaagcgagcgcgaggaaaaggcggcgggagaagagcccggaacgccaga

SEQ ID NO: 134823 - RNA, 80 nt, Homo sapiens
gcccccgaaggcgggaacagggacaaggacacagaaaacaagagaaaaagagagagccaacgaaaaccaagaaacaggag

SEQ ID NO: 134824 - RNA, 58 nt, Homo sapiens
cacaaaccaacaaaaccagcaacaccccaacaggggcaggacgaaaaccgagagaaga

SEQ ID NO: 134825 - RNA, 81 nt, Homo sapiens
aaccagagccacccgggagaggaagagcgaggaggaacgcgcaaggcaaagcaccggccggaggaggcggaggccagccga

SEQ ID NO: 134826 - RNA, 77 nt, Homo sapiens
acgaagaacccacagaggaaacaaacagaagcgcacgagaacccaggccgcaaggaacgaaacccaacagagcgcca

SEQ ID NO: 134827 - RNA, 78 nt, Homo sapiens
gaagaaggcacaaaaaggaacaagccccaggagggccggaagccagaacaacccccgaagcccgcccgaacgaaacaa

SEQ ID NO: 134828 - RNA, 76 nt, Homo sapiens
gaaacagcggccccccagaaaagcaaaccagcagcggggaacagaggccgaaagaggaccagggacagaagagaag

SEQ ID NO: 134829 - RNA, 73 nt, Homo sapiens
cccccgggccccagcggccccggggcgcgcgaggaagaaagagggccacggacagaggcgcagcagaggaacc

SEQ ID NO: 134830 - RNA, 79 nt, Homo sapiens
gcccacacccggcgcggagggcccccggaacgccacccaacccacgcccccgcccgccgacagagagggaggaggaagg

SEQ ID NO: 134831 - RNA, 75 nt, Homo sapiens
aaaagagacaaaaggggccaccccaccgaggaagccaaggggcccagaggccagaaggagcagagccgagacgac

SEQ ID NO: 134832 - RNA, 34 nt, Homo sapiens
aaaagcagcaaaaagaagccagcagggagaagcg

SEQ ID NO: 134833 - RNA, 83 nt, Homo sapiens
gccgccgccgcagcgggaccgcgcgaccggcgcccgcccgcggcgaagcgcgaaagaggcagaagaagggggagagccaaaga

SEQ ID NO: 134834 - RNA, 68 nt, Homo sapiens
gggggggcaaacccgagagaacggcagagaacgccgaagcccggcagaaggagagaccccggcaagcc

SEQ ID NO: 134835 - RNA, 46 nt, Homo sapiens
cccggccggggaagcaaccggagaaccggcagggaaagcacgacgg

SEQ ID NO: 134836 - RNA, 82 nt, Homo sapiens
cagcgccgagcccaggcaagagcccgcgagaaggaaagcgcacggcagcagcaaaaccacagagaaacggcccaagagaaca

SEQ ID NO: 134837 - RNA, 82 nt, Homo sapiens
ggccacgcgaagagcaccgacgcagccgcaccgaccccggggacagccagcggcagcgagccggggaaaaccccagggcaaa

SEQ ID NO: 134838 - RNA, 51 nt, Homo sapiens
ccgcgagcggcgcacgggccgaccagccacggccgcggcgcccgcggcacc

SEQ ID NO: 134839 - RNA, 68 nt, Homo sapiens
cggagccgaagcaaggcaacgccaaagaaaggaaaaccaaagagaagaaacaaagacgaacaaaacac

SEQ ID NO: 134840 - RNA, 73 nt, Homo sapiens
agaaagcaacccaagcaagaccagcagagaggaaaaacacaacccaagaaacggaccggaagccaccggcagc

SEQ ID NO: 134841 - RNA, 74 nt, Homo sapiens
caggggggcccgaggcgaagcgaaggccgcgccggaggaaggagcccgcacgaacagaagcaacggggcggcac

SEQ ID NO: 134842 - RNA, 51 nt, Homo sapiens
gggacgggggaacccggggccagagggggcggccaggcaggcaaacaccag

SEQ ID NO: 134843 - RNA, 71 nt, Homo sapiens
cagcagcagcaggaaaccaacagccacaccagagcacccacgggagaccggggggcaagaaaaggaagaag

SEQ ID NO: 134844 - RNA, 52 nt, Homo sapiens
cagcaacagaacacggaaggagagagcacgaccaccgccgagagacccacag

SEQ ID NO: 134845 - RNA, 37 nt, Homo sapiens
agacggagcagaaccgagagcacagagaccgaaggga

SEQ ID NO: 134846 - RNA, 64 nt, Homo sapiens
gggaccaccgggggaacacacgcacagacaacgggagcagcgagacgacgggaccgaaggaccc

SEQ ID NO: 134847 - RNA, 70 nt, Homo sapiens
ccacgcgccagacaccacggccccagggacaaagccgcgaaaaggaacccacaaacaccacacaagagga

SEQ ID NO: 134848 - RNA, 71 nt, Homo sapiens
cgacgaagacagcgccccagcagccaccaaggcaggaaagaccaagaaggcagggaacagccgggcgaaag

SEQ ID NO: 134849 - RNA, 76 nt, Homo sapiens
gaccccagcagaccaggcaaccaaaggcgggacgagcggaacgggaagccaagacagggcccgccccggaccgaac

SEQ ID NO: 134850 - RNA, 55 nt, Homo sapiens
ggagagccagccgaaggccaagacccggcgcggcagaccagggaaggggaaagac

SEQ ID NO: 134851 - RNA, 53 nt, Homo sapiens
cgagcgcccccgcgcgcacccggagcaccgcggcagcaccacggggcgggaac

SEQ ID NO: 134852 - RNA, 54 nt, Homo sapiens
agcccagaaccaaagcgcccgagccgggcaggggcagaaagaaagcaggaccag

SEQ ID NO: 134853 - RNA, 98 nt, Homo sapiens
cgagagggaggaggagaagggcagagacggagaagccgaagaggacaacccccaagaaagggagcccagaacgaaacaacccagcagagacccacaaa

SEQ ID NO: 134854 - RNA, 58 nt, Homo sapiens
ggcaggggcaaccagacgggccaagggggagaagagggagacccgaacgaagacgcag

SEQ ID NO: 134855 - RNA, 53 nt, Homo sapiens
agggaagaaagccaaaggaagccaggccacgaaaggcgccaggagaacgaaca

SEQ ID NO: 134856 - RNA, 69 nt, Homo sapiens
gaccccgaccccgaggcgagacggaaaggaggccacaccggcccgcagaggaggaaggcccgcacacac

SEQ ID NO: 134857 - RNA, 76 nt, Homo sapiens
gccaaaccgcaggaaagccccgaaacgcggcgaccacaggaacacacaacggagccagaagagcaaaaaaacagaa

SEQ ID NO: 134858 - RNA, 38 nt, Homo sapiens
cagggacgagccaccagagaggagaaaggagcaaagaa

SEQ ID NO: 134859 - RNA, 83 nt, Homo sapiens
ccgacaggcggaggcccccgggcaagaggcgcaaacaagccaacccaggaggaaaaacgacagagaaaccggggaaacagcca

SEQ ID NO: 134860 - RNA, 57 nt, Homo sapiens
gggagggccacaggaggcggcgggccccgcccgccgaaggaacaaaccaggggaggg

SEQ ID NO: 134861 - RNA, 74 nt, Homo sapiens
cgccggacaaccgccccgagggaagggaggcggcggccccaaaaaggcgagggcgccggcaccagggcgcaacc

SEQ ID NO: 134862 - RNA, 82 nt, Homo sapiens
agaagcagggaaggaggccgagccgggaccaggcccgggggcggcggccacgccaaggacgggagagagagagggcccaaga

SEQ ID NO: 134863 - RNA, 77 nt, Homo sapiens
cgacaccccggggaggcgaggagagaggaaccaacgcagagccccagaacaaaagaacacagaggaaccagaacaga

SEQ ID NO: 134864 - RNA, 82 nt, Homo sapiens
gccgacccgggccggaccgaccccaggcggcgaggcccacgcggaccggcagcgccaccggaccaccagacaaggacacggc

SEQ ID NO: 134865 - RNA, 72 nt, Homo sapiens
ccgcccaggaggcaaaaagggaagaccaaagcaagggaggagaagccagccccgcggcgggcgggaaggaga

SEQ ID NO: 134866 - RNA, 76 nt, Homo sapiens
aggaagcgcaccacagcacaaaagggcccggaggcggagccgcacgagccccgaaagacccgagaccccagcgcca

SEQ ID NO: 134867 - RNA, 77 nt, Homo sapiens
cgggcgagggggcgccggcgccggcggcgcgagccaggcgacggccccagccgccggagcgcgccgcagccggggca

SEQ ID NO: 134868 - RNA, 80 nt, Homo sapiens
ccaggcgacacacagaggaggagacccaccgccgggcgcccacaggagagaccgccaggccacggaggacccccagagcg

SEQ ID NO: 134869 - RNA, 70 nt, Homo sapiens
aggacaccacagaccacacgcgcacagggcgcgcccaggccaaagaccaaaacaccagaaccgccggaag

SEQ ID NO: 134870 - RNA, 57 nt, Homo sapiens
aggcaaagacaccaccacaacaacaggagacagcgccggcccaggcgaggcagggca

SEQ ID NO: 134871 - RNA, 80 nt, Homo sapiens
cgggaccgcaaagaacaggagcccacagaaggcagaggcagaaccacagaggagagaaggcgaggaagcccaagcacaaa

SEQ ID NO: 134872 - RNA, 79 nt, Homo sapiens
ggagcagccgaaggcgaccaagacgcggcccaagggcccggcggcgcgagcaggaaggaccgggcagccgcaagagccc

SEQ ID NO: 134873 - RNA, 76 nt, Homo sapiens
ggcgaacagaacaagaaccaaagaaaacaaaaggggacagcgaaggggcaccgcgaagcggaaccggacaagaaaa

SEQ ID NO: 134874 - RNA, 72 nt, Homo sapiens
gggggccagaaaccccggccaggcacagcaagcaacccggccgaggggggcaccccgggaggaagcaacggg

SEQ ID NO: 134875 - RNA, 39 nt, Homo sapiens
cgcgcgcacgaagcccagccgcacaaacacgcagaggca

SEQ ID NO: 134876 - RNA, 53 nt, Homo sapiens
aagcaccacaaaggaacgccacacgcgaaaaacgaaccgacaccgggaaggca

SEQ ID NO: 134877 - RNA, 82 nt, Homo sapiens
cccgcgcgggggcggggggccgagcaaccagaaccggagcaggaggcgcacaacacccagcccccgggaccgggccgccgcc

SEQ ID NO: 134878 - RNA, 68 nt, Homo sapiens
ccaccgagaaacacaaagaaccaagagcggacgggcaaccaaacgggcgaacaaaaccagccacggag

SEQ ID NO: 134879 - RNA, 89 nt, Homo sapiens
aaccgagcgccaggaaagaaggaaccccgaccgcagcccccgggcacgaccccggacacgggcaggcagaggaggcgcggaggaggagg

SEQ ID NO: 134880 - RNA, 70 nt, Homo sapiens
caaggagacggaacaaggaaacgaaaggaaaaccccccaggaagaagagagggcgaaggaggccacacag

SEQ ID NO: 134881 - RNA, 64 nt, Homo sapiens
gccgggcaggagcaggcagaaacccaacacaagaaagcccacgccaggaggcaggcgccaccgg

SEQ ID NO: 134882 - RNA, 88 nt, Homo sapiens
aaaagcaggccccggagcagaggagacaagcacaggcccggccaacgcaacagggagcccacgcaagaggggccggggaccgcccagc

SEQ ID NO: 134883 - RNA, 69 nt, Homo sapiens
ggcagccacccgcccacaacacaagaaggcacgacgagggagaccaacaggagacaggcgagcccaggc

SEQ ID NO: 134884 - RNA, 60 nt, Homo sapiens
cgagaagaagcaaaagcccaggcacgccagggaaaaacggcagcgcgaagcacgacgggc

SEQ ID NO: 134885 - RNA, 76 nt, Homo sapiens
caaagccagcaaaaacagacaagaagaccagagaaggacccaacaggccacagccacagccccccaccccgaaacg

SEQ ID NO: 134886 - RNA, 103 nt, Homo sapiens
gcagaagagcaggagcagccgagcaggcagcacaagggagcaacaaaaaaacggcggcgggagaggaaggaaaggaaacaaagagcaagcaacagaagaaaag

SEQ ID NO: 134887 - RNA, 63 nt, Homo sapiens
gcgcggaccaggggaggcagccgaaggcaacagcaggagaccgaagcggcagccaaaaccggg

SEQ ID NO: 134888 - RNA, 77 nt, Homo sapiens
acaaggagaaaaccacagccagagacgcgcacgaaacgacgaagaggcccgaggacagaggagcaaaggagggacgg

SEQ ID NO: 134889 - RNA, 63 nt, Homo sapiens
ccagagagcaaaaagcacccacccagcacgcaccccaagaaaccagagacgggacgccaggcc

SEQ ID NO: 134890 - RNA, 67 nt, Homo sapiens
ggcggccgccgcccgacgcgcagcacagccagggcgcccgcgccggcagaggaggcgagcacccgcc

SEQ ID NO: 134891 - RNA, 78 nt, Homo sapiens
gaaggagagagagaccccccacacagagcccagcgagcaaaacggaaaaaaaagaccgcgcccgggaaaagaacccgc

SEQ ID NO: 134892 - RNA, 81 nt, Homo sapiens
acgaccaagaggggcgacgcagagccgagcgaagcgccagcgcgggccgccagcggcggccaccacagcgccgcagcccag

SEQ ID NO: 134893 - RNA, 71 nt, Homo sapiens
ccaccgcaaccggaggcaagcaccaagggcacagccggggaggagaggggaagcaaggggacaagaggaca

SEQ ID NO: 134894 - RNA, 73 nt, Homo sapiens
agccggaccagaccgggcacagcaaagcgaggaccagaccggccgcaagaacgagcaaagcaggccgggccgg

SEQ ID NO: 134895 - RNA, 84 nt, Homo sapiens
ggggccagcgccgcgcccggggccggcgcccgggccaccggccgcaggaccacgaagccagaaaaacgaccacagcggcaacaa

SEQ ID NO: 134896 - RNA, 79 nt, Homo sapiens
gaggacgccggaacacccggaagccgagaaagaggccggaagagcgggagcgggagccaggcagaaggccaaccaaccc

SEQ ID NO: 134897 - RNA, 67 nt, Homo sapiens
ggcgaacccggccaagcaacccccaccggccccagaggcggggacagaaaagagcagggggaaacag

SEQ ID NO: 134898 - RNA, 39 nt, Homo sapiens
accccccccaagacccacgaggcccagcagcccgggagc

SEQ ID NO: 134899 - RNA, 71 nt, Homo sapiens
cgcagaagagacaaagccaagagaaaaagcgaagcgaaccccacaaacgggcgcggcagccccaaaaagag

SEQ ID NO: 134900 - RNA, 61 nt, Homo sapiens
cacaaacccacagaccaagccagaggagcaacaggacagcgacagcagacaagcaacacaa

SEQ ID NO: 134901 - RNA, 79 nt, Homo sapiens
gaaagaagccccagcgcccaccagcagacaacgccggacagcacccagcaggggaacggaccgcccggcccccagaaaa

SEQ ID NO: 134902 - RNA, 68 nt, Homo sapiens
ccgcgcggagggaagcgaaggacgcggaccccggacaggggacccgaaccacgcaacgcccgccggac

SEQ ID NO: 134903 - RNA, 81 nt, Homo sapiens
gcccggggaaaaaaaagagggggacaaaacaagaagggaccaagcagaggacgcacagggaggaagccaaacagggccagc

SEQ ID NO: 134904 - RNA, 75 nt, Homo sapiens
gagcaccagcccggcagcgcacccaggcggagacagggcacgacacagccacgcaccccaaccccaggccaggga

SEQ ID NO: 134905 - RNA, 84 nt, Homo sapiens
cggcgagagcagcccccggaaaaagcaagcgaagacacaagaagaccgagcaaagagaccccggaacgggaacccaccgagggc

SEQ ID NO: 134906 - RNA, 68 nt, Homo sapiens
ccgagaggggagacaagaggaacagagacagacccgggggcccccaaggagagggaagaagccaggca

SEQ ID NO: 134907 - RNA, 71 nt, Homo sapiens
agagaagaggaaccgagcgcccagccagcccagcaaggcccgacaagagaggcggagccacccccacaacg

SEQ ID NO: 134908 - RNA, 80 nt, Homo sapiens
gcagagaacccacaaagaggcgcaaggagagagggaaaaaaggagagcaccaaaacggacgaaaaaccggcccaccggac

SEQ ID NO: 134909 - RNA, 79 nt, Homo sapiens
acacagggaaaaaaccgggaaaccagggccaacaggcgaagggagacgagaccggaagcgagaggcgagaccacccaga

SEQ ID NO: 134910 - RNA, 88 nt, Homo sapiens
cgcagcgcagccagggcagccaggcagagcgcacccgcgccccagccaaagcccggcccaggccccgagcggagggaggaaaaccccg

SEQ ID NO: 134911 - RNA, 75 nt, Homo sapiens
ggcccgcagcacgacaccggacaacgacagcgcagagcaccacacgcccaggcccccgacagcgcccgggagccg

SEQ ID NO: 134912 - RNA, 92 nt, Homo sapiens
cacgcaccgacagcgccgccaccgagccgggcccaccccccaccaaggaagggggagaaggagaagcacgaagacgggggaagggagacagc

SEQ ID NO: 134913 - RNA, 69 nt, Homo sapiens
caagcccagagaagcccggcccaaacacgacccaacgaacaaggacccccagacaacaaaacagagaga

SEQ ID NO: 134914 - RNA, 81 nt, Homo sapiens
ggcccccagcaccacagcccgcagccccgccagccacccccaggccggagcgcgaagacgcagggaaagcggcacacgaaa

SEQ ID NO: 134915 - RNA, 77 nt, Homo sapiens
ggaaagggaagcggacgagaaaaaagggcacaccgagcccagaaggagggagccaaccacagcaccaccgaggaaaa

SEQ ID NO: 134916 - RNA, 76 nt, Homo sapiens
cgcgcggaaggcagcgcccagcagcgcagcacccacaaaagcgaaaagccagacaggaacaccagacagaagaacg

SEQ ID NO: 134917 - RNA, 77 nt, Homo sapiens
cccgaggaagaagcccccgacgcgcccagaacccacccaaaacaggaaacagaggagagaaggcgaggaagcccaag

SEQ ID NO: 134918 - RNA, 67 nt, Homo sapiens
aaagcacacaccacgcaacggccagacacgcagaggagaggaaggacaccccgaagagggcggcgag

SEQ ID NO: 134919 - RNA, 80 nt, Homo sapiens
gggcgaagggagaggacagcagggaggcgggacgcgggggacaaagcgaggccggcgaccaagaaaggacccgcgaagac

SEQ ID NO: 134920 - RNA, 84 nt, Homo sapiens
aaagccaagaggaggacagcgcacacagcaagcacgagcgcacagaagagacacagaaggagcggaaagaaaggcaacagaaaa

SEQ ID NO: 134921 - RNA, 77 nt, Homo sapiens
gggcacagacgcgccagcacgccgccgccaggacggcccaccggcggaaagagcgggaggccacagagaaggcgggc

SEQ ID NO: 134922 - RNA, 70 nt, Homo sapiens
gaagcacgaacagcaggccaaagaccagagagcccagcaaaaagaggagaagcacccccccagaagaaaa

SEQ ID NO: 134923 - RNA, 81 nt, Homo sapiens
ccgggggcgccgcgacgcggggacagcaacggagcgggagagcggcaagggaacaggccaggggccgcacagacacagccg

SEQ ID NO: 134924 - RNA, 78 nt, Homo sapiens
ggaaacaggaacaggacgacccaggagacgcaggccaaggagaaagcaggagcaggggaaggagacgggcaggagcga

SEQ ID NO: 134925 - RNA, 83 nt, Homo sapiens
gagacccaaacgccaacagaaacgcaccaccaaggggacacggaacccaaggagacgaagcgaagcaggagaaggaggggaaa

SEQ ID NO: 134926 - RNA, 75 nt, Homo sapiens
gcaaacggcagagcaggccgcggcgacccagcgagcgaccgggcagccagaacagcacacagcaccggacggcac

SEQ ID NO: 134927 - RNA, 43 nt, Homo sapiens
ccggacccgcagcaggcacaagggggagcgggccggagagaag

SEQ ID NO: 134928 - RNA, 87 nt, Homo sapiens
agcagcccacaggggggccgacacaagagcgcgagaccaacagagcgaagaagcaggggagaggccgagcgaagaaccagcggccaa

SEQ ID NO: 134929 - RNA, 91 nt, Homo sapiens
cccagcgccaccaccacgccagccgcaccagccgcccaagccgcacagccgcggcggcagcagcaggagagcgagcagcgagcagcgacag

SEQ ID NO: 134930 - RNA, 80 nt, Homo sapiens
gaccaacaggcagcagcgggccccgccaccggcacaccgaaggaaagggcagcaagacacgaagccgagaaagagcagcg

SEQ ID NO: 134931 - RNA, 36 nt, Homo sapiens
agacaggcaggaaaagacagcaaaggagagccagag

SEQ ID NO: 134932 - RNA, 72 nt, Homo sapiens
cagcgccccccgaagcaggccagggggagaagggcagaacaccgggaaccggcgggagcggaaaggacgaag

SEQ ID NO: 134933 - RNA, 73 nt, Homo sapiens
ccagaagaaggaccggaagcacacaacaggaaaacaaaagaggagaaagcaggcacagccgagagcagccggg

SEQ ID NO: 134934 - RNA, 51 nt, Homo sapiens
cgcgcccgcaggcgcccggggcgcgcgaccgcgaaacaagcgaggaccccc

SEQ ID NO: 134935 - RNA, 74 nt, Homo sapiens
gaccccggccgccgaccgcggccccgccggccgccggccgcgcgggggcacccagcaccgccaggaaacaacga

SEQ ID NO: 134936 - RNA, 77 nt, Homo sapiens
ccggagggagcagaagaccgcagagagaaagaaaaaccgacaagacaacagaaaagacaagcaacgaaagcccagcc

SEQ ID NO: 134937 - RNA, 78 nt, Homo sapiens
acgcacacggaagagcgagagcacagggaggagggagaagagacagacccgaacgcaggaaagaggccggggaagaca

SEQ ID NO: 134938 - RNA, 60 nt, Homo sapiens
ggcagaaaagcacacgggggacaccgggaagaagaacggaccgaagccaaagaacaagag

SEQ ID NO: 134939 - RNA, 70 nt, Homo sapiens
gcccaacccccggcacccaagaggaacagcaaccgggcgcgaaaaaaaaccggggaaaaaagagaaagcg

SEQ ID NO: 134940 - RNA, 36 nt, Homo sapiens
cggcgggaaaacaacagccggaaacaaagccagacc

SEQ ID NO: 134941 - RNA, 82 nt, Homo sapiens
ggggcccgagccccgcaacaccgcggcccacgggacccccaggagggacccgcagggggcacaaaggcgaggaagcagaacc

SEQ ID NO: 134942 - RNA, 50 nt, Homo sapiens
cccccaaaggaggaacaggacgcggcgcagcaacaaacagcggcgacaaa

SEQ ID NO: 134943 - RNA, 75 nt, Homo sapiens
agcaagcccagagaacccacagaaaccaaggggggacggaaaaacaaaggaacagccaggacaaccggggcggac

SEQ ID NO: 134944 - RNA, 82 nt, Homo sapiens
cgccccccggccccggccccgcccggccggcgcgccccggagggcgcggcgcgcgaggagcaggaaaagagcccaaaagcaa

SEQ ID NO: 134945 - RNA, 46 nt, Homo sapiens
caccccgccggacacgaacgaaaagagcgcagggaaggggaacgga

SEQ ID NO: 134946 - RNA, 54 nt, Homo sapiens
cgcggccgccgcggcacggggaacgcagggcagggggacacagccagggcgcag

SEQ ID NO: 134947 - RNA, 53 nt, Homo sapiens
ggaacggaaaagggcagccgcacggggaagcaaggaccagaagcgccaacgca

SEQ ID NO: 134948 - RNA, 39 nt, Homo sapiens
cgagggaggggaccgccgcgaaagccaaggacacgcagg

SEQ ID NO: 134949 - RNA, 92 nt, Homo sapiens
ccaggacggacagcccaggaggacggcacacggccacgaggccagggccccgggccgagggagaccaggagagaggggcacccggagaagga

SEQ ID NO: 134950 - RNA, 80 nt, Homo sapiens
aaagagcccacacaggggaaccgcccaccgcgcccccagaacagggcggagaacggaaaagcaccaggaagcagagagga

SEQ ID NO: 134951 - RNA, 99 nt, Homo sapiens
gggcagcgcaccaccagcgcaggcgagcgcgcgcagggcccgccgacggaggagcgcccgccggggacgcagcgccccggccccgccgcagccgcgcac

SEQ ID NO: 134952 - RNA, 59 nt, Homo sapiens
aaggaccaagaaccaggacccggacacgaagacgaaaccagagggagggcccgcaggac

SEQ ID NO: 134953 - RNA, 67 nt, Homo sapiens
acccccagcagaagccaggcccagcagggcgcaagcaggggcaccgaggcacccggcaggagcccca

SEQ ID NO: 134954 - RNA, 79 nt, Homo sapiens
ggcgcgcgcccagcgccgccccgcgcgcgcccgccacggcgccgagccgcggccgaccagagccaagccggagaccgag

SEQ ID NO: 134955 - RNA, 83 nt, Homo sapiens
ccaggagagagagcaccaccggcgcggacgaccggagacccgccacaccagggcgcacccacgacgcgcacaccaccggcaga

SEQ ID NO: 134956 - RNA, 71 nt, Homo sapiens
aagcgcgggaacggcgcggaagggaaagacaaggagccgggccgagaaaccgaaccagagaccagagaaga

SEQ ID NO: 134957 - RNA, 79 nt, Homo sapiens
gcgccccagagcccagggcaggacaccgacaggaacagggaccacgggggacaacaacccgagaagacaacaccacaag

SEQ ID NO: 134958 - RNA, 74 nt, Homo sapiens
ccacgggagcagcggaaggggcccagcagacgcaaagacgcaaaaccgcggcgcccggcgaggacacgacccga

SEQ ID NO: 134959 - RNA, 69 nt, Homo sapiens
agggaaggggggaccacagcgcggccgccagggaaaagagcaaacgaggggacagcccagaccaaaccc

SEQ ID NO: 134960 - RNA, 78 nt, Homo sapiens
gagccccaaaagagacacaaacaaggagggcgagagagacagggaggaagcggaagggaggaacaggcaccacaagag

SEQ ID NO: 134961 - RNA, 77 nt, Homo sapiens
aaagaagcgaggacacagaccgaacagaaaaagaccacacaggcagagaagaaagcgaaacacaagcaccaccacga

SEQ ID NO: 134962 - RNA, 69 nt, Homo sapiens
gagcgcaaaagccaggaaccaggacccagaccagaaaaagagcagcccagcgggggcaggggacaagac

SEQ ID NO: 134963 - RNA, 53 nt, Homo sapiens
ccgacagccgcagaacggagcacggcccaggcagccaagaaggcagagagaca

SEQ ID NO: 134964 - RNA, 81 nt, Homo sapiens
cgaaggcggagcgggcggggacgggggcgagaggaacgacaacccgggggagccagaccccaaaggaaacgagagagagac

SEQ ID NO: 134965 - RNA, 67 nt, Homo sapiens
ccgcacgcaggccagcggggcggcccgaagcgggaaggcgagagccaaccagaccccgagaaaaaga

SEQ ID NO: 134966 - RNA, 81 nt, Homo sapiens
agccgaccaagcgcgcggcgggcggccacaccacaacaagcacaaacacagcccacagggcggagaacggaaaagcaccag

SEQ ID NO: 134967 - RNA, 53 nt, Homo sapiens
aacccaagggccccagcccgggcccccaacgaggcgcgacgagaaaccaaaga

SEQ ID NO: 134968 - RNA, 72 nt, Homo sapiens
caggaaaaggaaacgggcaagaaagaagaaacaaccaccacaaacacaccagggaggcaggacaaccccacc

SEQ ID NO: 134969 - RNA, 58 nt, Homo sapiens
cgcccgcgcggcgcggggaccgcggcccggacaaccagagggaaaaaacaaaggcagc

SEQ ID NO: 134970 - RNA, 72 nt, Homo sapiens
ggcgagacgacacggaaccagagggggacgggccgaaggaggaaccgacagaagccaggaccccagagaggg

SEQ ID NO: 134971 - RNA, 72 nt, Homo sapiens
aacacgcacaaacagaaggccgcgcggcccacccaagacccacaggaccgcgaacaaggaggccacaaaaca

SEQ ID NO: 134972 - RNA, 78 nt, Homo sapiens
cggcccgcggccccccagccgcggagaaggagaacgacggcaccggaagaggcggagaagaacccaaccaaaaccagg

SEQ ID NO: 134973 - RNA, 59 nt, Homo sapiens
ggacagacacccgcaacccagccagccaccaggggagagagcgccccaaacccaagaag

SEQ ID NO: 134974 - RNA, 81 nt, Homo sapiens
ccgacgccgcggggcagcgggccggcgccggcgcgggaggcacccaagacagaggaaggaaaggaggacaaaacacagcaa

SEQ ID NO: 134975 - RNA, 76 nt, Homo sapiens
ccgggcgggaccccgacagccgcgacacaagaaggggaacaaaggccgacaaagaacacaaggggaaagagaaaag

SEQ ID NO: 134976 - RNA, 72 nt, Homo sapiens
gagacccggcgggaaggcaggcaaagccggcgacccgcacagccgcaccccaacccccagaggagcgcagca

SEQ ID NO: 134977 - RNA, 73 nt, Homo sapiens
caacgcgagccaccgggaaccagcgagaaggggggccaccccaacgccaccaagaaacagaccgcacaccgag

SEQ ID NO: 134978 - RNA, 70 nt, Homo sapiens
cggcagcgaacgggggcgaacggggcgagccggaggagcacccaaccccgcgaaggccccaagagcaacg

SEQ ID NO: 134979 - RNA, 76 nt, Homo sapiens
cccccaccacccggaggagcagcccgccccgccgggggagacgacccccgccagggccaaggccgcggcaagccac

SEQ ID NO: 134980 - RNA, 66 nt, Homo sapiens
ggagcgacacgcaaaacgcccaagccggccccagaccaaaccgcacaaacaaagccaaggaacaaa

SEQ ID NO: 134981 - RNA, 74 nt, Homo sapiens
cagaacagggacgccagccgcagaggaagacccgaaggggcagaccaacaccacccagcaaaaaccccgacgaa

SEQ ID NO: 134982 - RNA, 73 nt, Homo sapiens
gcgccgccgaccccccggcgccgcgccggcggcggggagaaccgccagcgacgggaaggcaggacccacgcac

SEQ ID NO: 134983 - RNA, 86 nt, Homo sapiens
agcgccgcaacgaaacagcagcgggagaagaggacaagagaaagccgggcgacggccaccaccgcccagaaacagacaaggaggac

SEQ ID NO: 134984 - RNA, 65 nt, Homo sapiens
cagccgagcaggcgagcgacagcaaagcacaagcagaagacggccacacagacccggccggaaaa

SEQ ID NO: 134985 - RNA, 73 nt, Homo sapiens
aaaggagaacaggaggacgcaggccaaacaaaacgagcaccgaacccagaccagacgcgaacccaagggacac

SEQ ID NO: 134986 - RNA, 84 nt, Homo sapiens
ggaaaaggcggacgggaaggcgggagacgagaagccgaaaagcgcagcgagcggagccgccggagagaaggacggagaagcgaa

SEQ ID NO: 134987 - RNA, 93 nt, Homo sapiens
gcgaaacaaccggggacgacagcagcccacccgcagcgggaacaggaaggagaaaagacagcaaaacaaaagaaggaacgggaccagcggcag

SEQ ID NO: 134988 - RNA, 80 nt, Homo sapiens
caggaccaccacgcccagccaaagccagacgagcagccagggacccgggagaggaagaaaacccagcccggaacaaagac

SEQ ID NO: 134989 - RNA, 125 nt, Homo sapiens
ccaggcgccggcgggaaggcggggcgacccggggggcgcgcccagagccccgcgcagcccagggaaggcagaagcaaaaagacgaggagcaagagcggagaagagagaaaagcagcaagaggggg

SEQ ID NO: 134990 - RNA, 76 nt, Homo sapiens
caacaagccagccaggagggcaaagcaaccgaaaaggagagccgggaacccccaccaccagagagacaagagggag

SEQ ID NO: 134991 - RNA, 67 nt, Homo sapiens
agacccccagcgcggcacgacggggggcccgggcgaaaccggaccgggcccggaggagcgaacaagg

SEQ ID NO: 134992 - RNA, 71 nt, Homo sapiens
gaaagagacacgagcgaacggagcgcagcaggaccaaggggagcgaagaagacacacgaagaaggagcaag

SEQ ID NO: 134993 - RNA, 39 nt, Homo sapiens
gagcaacccaggccagccagcacgccgggcgcccgcgaa

SEQ ID NO: 134994 - RNA, 91 nt, Homo sapiens
agcagcaggcggaggaaacagccagaccgagagcagccgccggggcggagggaaccagacagcaccaccgaccccccagcaagccggggga

SEQ ID NO: 134995 - RNA, 72 nt, Homo sapiens
gggggagcgcccgaggccgaccccgaaggaaacggggcccacgggaacgcacaggagagagaaccacgagag

SEQ ID NO: 134996 - RNA, 75 nt, Homo sapiens
ccgccaaccgaggcggccgggagcacagagaggaccaggggaccgaagggcccacagcaaccgcacccgcagaag

SEQ ID NO: 134997 - RNA, 96 nt, Homo sapiens
agaggccgccacaaccgccagacaaccggagccacgccccacgaccgccaggagccgaggccagagcagaaaccagcccaggaacccagcgccccc

SEQ ID NO: 134998 - RNA, 39 nt, Homo sapiens
agggaccccaggcccgcgggaaccaggcggccagggcga

SEQ ID NO: 134999 - RNA, 67 nt, Homo sapiens
ccagaggagacgcaaggagccaccagcacggaccaggaggcgagcaacaggggcagcagggaccagg

SEQ ID NO: 135000 - RNA, 77 nt, Homo sapiens
acaccggcccgacagaggcgagcagcgaggggaagacaacaggcacaaagagagaaggaacacccacagggcagaca

SEQ ID NO: 135001 - RNA, 74 nt, Homo sapiens
acgagaagaaaagcgcaaacgcgaaggaacaagcgcccgacccccccggggaagggccagggcaagcacgggag

SEQ ID NO: 135002 - RNA, 74 nt, Homo sapiens
acaaagaccaagagagacgagagcggacagcccaaggcgcggacagcccggcccccacgggaccaagcaacagg

SEQ ID NO: 135003 - RNA, 38 nt, Homo sapiens
agaacacaaagacaggagaaaacgaaggaaggaggacc

SEQ ID NO: 135004 - RNA, 60 nt, Homo sapiens
gcggccaagaacagaggaaggggccgcggccgcgggagaaaacgagggggaaggacagga

SEQ ID NO: 135005 - RNA, 72 nt, Homo sapiens
aaaaacaagagcacgaagccacaggcaaggccagagaaggcgggagaaagacacgaaccacagaacgcaaca

SEQ ID NO: 135006 - RNA, 74 nt, Homo sapiens
cggaacaggccaaaagcaagaggcacaaaaagaacaaccagaaggaacgcagagaccgacggagagcagccaca

SEQ ID NO: 135007 - RNA, 57 nt, Homo sapiens
cggccggagcagcgaggagacacagcaggcccacccagggaacaaaagaaagagagc

SEQ ID NO: 135008 - RNA, 77 nt, Homo sapiens
cgacacgaaaacccggacccgcaccgcagcgaaagaaaagcaaggcgaggaaaaaaggaagacgaagaaaagaagac

SEQ ID NO: 135009 - RNA, 72 nt, Homo sapiens
agcgaaagagaggacaaaagaacgacgacgccggaaaccccagacagccagcagcaggccgggaccagcagg

SEQ ID NO: 135010 - RNA, 60 nt, Homo sapiens
ggggaggcaaagggaggaggaggaccggaggaggaggagaacggggcgaggaggaagaag

SEQ ID NO: 135011 - RNA, 69 nt, Homo sapiens
cagaaaccaagaaccaacaaccaaagaaaacagaacagaaaaggagaaacaccggcgcacacacaaggc

SEQ ID NO: 135012 - RNA, 36 nt, Homo sapiens
acggccagaagcaccgagacaacaggcacaaagaga

SEQ ID NO: 135013 - RNA, 82 nt, Homo sapiens
gccggccgaacagcccacgccaaggcgaagggagagacgccgagcccaggaggcaaggcacaggagccggacgcaccacgca

SEQ ID NO: 135014 - RNA, 61 nt, Homo sapiens
accgaacacacaaaaggagcgggggacaacgaccacggccagcagggcaaggcacgaccac

SEQ ID NO: 135015 - RNA, 53 nt, Homo sapiens
ccggccgggccggccagcgccggaaaccaacaaggcaccgagaagggcggcac

SEQ ID NO: 135016 - RNA, 84 nt, Homo sapiens
cccgccccggcgccgccggcccgcgggaccgacagccgggcagaggaaacccagcggcggcagaaccagccggcacaaagccga

SEQ ID NO: 135017 - RNA, 73 nt, Homo sapiens
acaccgagcccaagaaaaagaacgaccaggacacagagcggcccaagagacaaaaagcgggggagcaggagaa

SEQ ID NO: 135018 - RNA, 80 nt, Homo sapiens
aggcgaccgagacggggagcccaaagcaaaggacggaccccgggaacacccgagaccagcccccgaagcacagagcaagg

SEQ ID NO: 135019 - RNA, 78 nt, Homo sapiens
gcccacccagggccggaaaagccaacgccggcgaagacaaccgagcacaaaaaaggcacccggagaacagacagacca

SEQ ID NO: 135020 - RNA, 59 nt, Homo sapiens
gggcgagcaggccgcccgcgagaaccgccgccgacccgcgcagcggggagaagaccgcg

SEQ ID NO: 135021 - RNA, 80 nt, Homo sapiens
cgcccgcagcgacacaccaagcggaggggacgccacgcaacgccgggaccgaaggaaacaaaagaaagggcagaagaaaa

SEQ ID NO: 135022 - RNA, 60 nt, Homo sapiens
ggagaaccagagaaagaggcccacaaaaccaaacaaggccggaccacggaaagaccccac

SEQ ID NO: 135023 - RNA, 57 nt, Homo sapiens
agcaggaagggagagccacccaagagacaagcagggcgaaaagacaggagggaggaa

SEQ ID NO: 135024 - RNA, 80 nt, Homo sapiens
ggcaggcaggcgcgagaaggacgcgcagccaccccaggcaaagggagggaacaaccgaaaaggaaccggaagcagcagag

SEQ ID NO: 135025 - RNA, 81 nt, Homo sapiens
gaggagcggcgggcggcggcgcgcggacccaggcgcggaggcgaggccagcagaaggagagaacggggacaaggcaagaca

SEQ ID NO: 135026 - RNA, 55 nt, Homo sapiens
agcggagcagggcgggaggagaccgggaagcggggcggccacaccagcaaggaga

SEQ ID NO: 135027 - RNA, 77 nt, Homo sapiens
cggaacagagaaggacgaaaaaagaaacaacacagagagagccaaaggagcgcagacaacaacagcggccagaccgc

SEQ ID NO: 135028 - RNA, 67 nt, Homo sapiens
ccccaggagccagggaaccggaacagaagcccagacgaagcagccggagacccaggaagccacccgc

SEQ ID NO: 135029 - RNA, 59 nt, Homo sapiens
caaggagacccgccaaagccgccgggcaagggcccgaccgagaagacagaggaagaaac

SEQ ID NO: 135030 - RNA, 72 nt, Homo sapiens
accaaggaagcaggccagaggacacaaaaggagacgacacgagaaagcggacaggaacggcaagaaaaggag

SEQ ID NO: 135031 - RNA, 58 nt, Homo sapiens
gagagaacagcaaaaaaaagagacgacaccccaccggcaacccgcccagaagaggcac

SEQ ID NO: 135032 - RNA, 79 nt, Homo sapiens
gcggcggcggcggcagcgggcgggccccgagagcagcagcgagacagagccccagcaacggaaagccaagcaagcaagg

SEQ ID NO: 135033 - RNA, 76 nt, Homo sapiens
ggagaggagcggaggcacccaccgacagaaagagaaccggccaacagggcgaagcagcaaaacacacagccccccg

SEQ ID NO: 135034 - RNA, 79 nt, Homo sapiens
gcagcaaacacacggagcgaacgccgcagcagaaagccaagaaccagcggaccagaagcaccagcaccaagaccagcca

SEQ ID NO: 135035 - RNA, 79 nt, Homo sapiens
cagccccgccgccggccccgggcgcccggccgccgcacccccagggaaggcagaccgacagcaacagccccccagcaga

SEQ ID NO: 135036 - RNA, 78 nt, Homo sapiens
gaaaggcccggaaagccggaccccacagaacccaagaggcaggaggcagcagagaaagccacagaacacgcggcccag

SEQ ID NO: 135037 - RNA, 76 nt, Homo sapiens
cgagacgagacccagacccacgagcggaggaggagaaccgccaggggagaagggccggagagcagagaccaaaacg

SEQ ID NO: 135038 - RNA, 70 nt, Homo sapiens
gccaggggcagagccacgcggccgcggaggaaagccagacaccacccggccaggggaggaccgcaaaagg

SEQ ID NO: 135039 - RNA, 69 nt, Homo sapiens
gcacccgcgagcgcaacccaagagggaaaagaggacgaggcgcgaaaaggcaaaggcaagaaagagaaa

SEQ ID NO: 135040 - RNA, 73 nt, Homo sapiens
gggcgaggcgagacccccgcccacgcaaacccaaagaccccgccggagacgagagggcggagaacggaaaagc

SEQ ID NO: 135041 - RNA, 58 nt, Homo sapiens
ccgaaaaaaacccaggcggcccagggacccaggaagccacccgcagaggggcaaggag

SEQ ID NO: 135042 - RNA, 75 nt, Homo sapiens
cgcaacgacccgggcccaagaagcccccagcgccccggaagggccccccggcgacgcgcaggagcggacacccca

SEQ ID NO: 135043 - RNA, 75 nt, Homo sapiens
gccagggcaccagacgggcgggaaagagaggcccggacgaaggacaggcgggcgggacccccaggcgccacagag

SEQ ID NO: 135044 - RNA, 75 nt, Homo sapiens
caagaggcccgagaagacccaggagacgaaccgaccgggcgacccagaagcccgagagagagacggggcaccaga

SEQ ID NO: 135045 - RNA, 77 nt, Homo sapiens
gccggagcagaaacgagcggaccacggagcccgggagggggaaacacaaagaagacaccagaagggccagcaccacg

SEQ ID NO: 135046 - RNA, 86 nt, Homo sapiens
caacagaagcaccggccagggcaccggggcccggcgcccgggcccgccccggaggacaggacgacccggacaaccacccacaagcg

SEQ ID NO: 135047 - RNA, 40 nt, Homo sapiens
cacaaggggacaggcagagagagcccaagaagagccaagc

SEQ ID NO: 135048 - RNA, 76 nt, Homo sapiens
ccgaccgagagaaccagcgccaggcaggccaggacacacaagcaacacggaaaccgaccacacgaacgaaaaagaa

SEQ ID NO: 135049 - RNA, 76 nt, Homo sapiens
cggaaggcggcccaccgaggcgagcgacgcaggacccacaggagaacacccacgaagcaccgccccacgccgagcc

SEQ ID NO: 135050 - RNA, 79 nt, Homo sapiens
agggacgcgccagccccgccgcggagccgggggcccggcagcccgcaggaggcaaacgcaaacagcagacggaagaccc

SEQ ID NO: 135051 - RNA, 77 nt, Homo sapiens
cccgccggccccagcccagccccgcagcccaccgaccagaagcccagagaaagcacagaagacccagaagggaacac

SEQ ID NO: 135052 - RNA, 38 nt, Homo sapiens
aaacagaaaccaccaacaaaggagagagaaggcccaaa

SEQ ID NO: 135053 - RNA, 92 nt, Homo sapiens
cacggaaccggcagagcgagagcccagaagccgagaccagccgcacacacggggcccgaggaagaggggggaagaaaacagacagaaacaga

SEQ ID NO: 135054 - RNA, 66 nt, Homo sapiens
gagaccgcggccgggaccgagggaaccacccgaggcggaaaccacagccacgagacccgaaaccca

SEQ ID NO: 135055 - RNA, 57 nt, Homo sapiens
gcacccgcagaacaggagaggaaacgggagagaccaaagacggccccaggaagcaga

SEQ ID NO: 135056 - RNA, 100 nt, Homo sapiens
gggaagcagcggagcagccggaggacgcggagcccaagaaacgggcagccaggcccccacagcccgcagagacgccggggcccggcgccaccaccgggga

SEQ ID NO: 135057 - RNA, 81 nt, Homo sapiens
gcggcccgggcagcagggcggcagcgcccgagagagagagcacaggagcacgggagcaggggcagacacgggacaccacgg

SEQ ID NO: 135058 - RNA, 65 nt, Homo sapiens
aaggcagacggacagacccacaacaccaggcgccaggcacgagaggaagccgaacccggaggaag

SEQ ID NO: 135059 - RNA, 65 nt, Homo sapiens
caacaccaaaaacaaaacgaaccaggacggcaacggagcaacaccccgcaccgggaaccgcggaa

SEQ ID NO: 135060 - RNA, 74 nt, Homo sapiens
gagagaggcccgcagaggaggagaccagagaaccaacggacccaaaaaacaaggaggaaaggccccaagaaacc

SEQ ID NO: 135061 - RNA, 75 nt, Homo sapiens
gccggcgcggccggcacacgaggaggccagccccagggcaccagagcccccagaggaggacacagcgacaaaaac

SEQ ID NO: 135062 - RNA, 51 nt, Homo sapiens
acaccaggagacacaaggcggagaaaagagggaaaaacaacaggaaagaag

SEQ ID NO: 135063 - RNA, 67 nt, Homo sapiens
gacaagggcagagggaacaggcagcaggaagcacggcgggcgaaacaggagccaaggacgcccgaac

SEQ ID NO: 135064 - RNA, 86 nt, Homo sapiens
cgggaccaaggcggccggccaaggaacagcacgccaggaggcgacccgccgcgggccccgagccccggccccaaagacccaaaaca

SEQ ID NO: 135065 - RNA, 56 nt, Homo sapiens
cacagagaaagaagcccaggccggggggggcacagagccccggaagacagccccca

SEQ ID NO: 135066 - RNA, 73 nt, Homo sapiens
cccgaagggacaagaagccgccgccaagacagacccaaagaggagccacgggacgaagacggaaacaggggac

SEQ ID NO: 135067 - RNA, 87 nt, Homo sapiens
cagacgggcaggaagcaaggagggaaaaggcagaaggagaaaaggcagccaaacggacggccacccacggaccgcacgcgggacaca

SEQ ID NO: 135068 - RNA, 74 nt, Homo sapiens
gggcaaagcacagacaggagaaagaagacagccacagaaaggggcacaagaccgaaagagcaggcaagcaaaag

SEQ ID NO: 135069 - RNA, 59 nt, Homo sapiens
agggacagcgcaggcagcagagcccagcaacacaacagcccggcagcaaaccgaagccg

SEQ ID NO: 135070 - RNA, 84 nt, Homo sapiens
aaaggaaaacaagaggccccagagggaaaagaagcccaaagaaagagaccagaagcgagaagggagcacgagcggaggaacaag

SEQ ID NO: 135071 - RNA, 69 nt, Homo sapiens
gcagaggaagcaaaagcagcgcagggcgaaccaaagaaggaaggcgacccaaaaccacgaagcacaggc

SEQ ID NO: 135072 - RNA, 82 nt, Homo sapiens
acggagcaaggaggaaaacacacgcaaacggggacagcgccgaccggaacagggaccacggaagcccaggaccagccccgac

SEQ ID NO: 135073 - RNA, 74 nt, Homo sapiens
aacggcaaccagggaccgaaagcaaaggcgcgacgagaaaccaaagaaaaaggaaacaaaggaacacagccacg

SEQ ID NO: 135074 - RNA, 59 nt, Homo sapiens
cggccgggaagacgaccacaccccccccgcagagggagagccggcccagccgacaccca

SEQ ID NO: 135075 - RNA, 74 nt, Homo sapiens
caaaaacagacagcaaaacaaagaccagccagcaacccacagaaggagcaaacagcaagagggaaacagaaaaa

SEQ ID NO: 135076 - RNA, 83 nt, Homo sapiens
cagcccccaagagcgggaacagagaggcccaagggaccagaggagaacagagcaaccacacgaagcagaacgcagcgccccga

SEQ ID NO: 135077 - RNA, 79 nt, Homo sapiens
agggcaggaaaggacaggagcgagacagaagacgaaaccagcggacacccccgccccaggcaaagagccccagcgcccg

SEQ ID NO: 135078 - RNA, 57 nt, Homo sapiens
gaacgaggacacgaccccgccccacgcccaggagcaggggacaaagccgcgaaaagg

SEQ ID NO: 135079 - RNA, 84 nt, Homo sapiens
cggccccgcagccggcgcgcggccaggagaccaggcaccggagagagaagcggccagcggaaaggccacaaccgcgaagaagaa

SEQ ID NO: 135080 - RNA, 78 nt, Homo sapiens
gcaccccccgccgacaaggaggaacagagagaagggcgggagaaaccaaggaaagagaaaagcgggaggcgagggaac

SEQ ID NO: 135081 - RNA, 80 nt, Homo sapiens
cacaaacagcaaccccagaagaaggggaaaaaggagcccacaggcgacgcccccaagcggcgggcggggaggccacgggg

SEQ ID NO: 135082 - RNA, 63 nt, Homo sapiens
caaaggcccgaaaaaagacagagaaacagggacacagaaggaaggaggaggcccggggaccag

SEQ ID NO: 135083 - RNA, 84 nt, Homo sapiens
ggaggccaacggcagaagccaccacaaaagcgaaagggcacaccacagcgggacgagccggagggaaggaggagaagcgaaccg

SEQ ID NO: 135084 - RNA, 83 nt, Homo sapiens
cagggagaaggaacgacacgggggagggacaaaacaagagaagcacagggcaaagacacgcaaacccaagaacaagaaggaag

SEQ ID NO: 135085 - RNA, 36 nt, Homo sapiens
aagggaaggcggagcaacggaccgggagcgccagag

SEQ ID NO: 135086 - RNA, 81 nt, Homo sapiens
ggcccagcaccccgagaaccgcaggagccagagcagaaaaaaggccaggagacaaccagaccccggggcccagcggagcac

SEQ ID NO: 135087 - RNA, 67 nt, Homo sapiens
gcaaacaaggaaggcgcgggacagcaagggccaaaccacgaaacagagccgaagccaagcgaaagcc

SEQ ID NO: 135088 - RNA, 81 nt, Homo sapiens
acggaaccacacagggccgccaccaacagagaagacagagcaccaacgagccgccgccagcgcgcacgcaaggaggcggcg

SEQ ID NO: 135089 - RNA, 61 nt, Homo sapiens
cggagccgggggaacaagaccgacccacaaggccgcacaccagcacccacagcaggaccca

SEQ ID NO: 135090 - RNA, 67 nt, Homo sapiens
agaccgaaaacacgagcagcagaagagccaagcaagcaaaacccgggcccaaggccacaggaacgag

SEQ ID NO: 135091 - RNA, 74 nt, Homo sapiens
cacacgccgccgcggcgcagccagggaaccaagaccaggacaaagaagacccggagagacaagccggaggacgc

SEQ ID NO: 135092 - RNA, 53 nt, Homo sapiens
gcacagccggccgaggggggaaaagggcccaaaccgggagaaggagagacgaa

SEQ ID NO: 135093 - RNA, 66 nt, Homo sapiens
ggccagcgacgcaccgagaaaggaaggaaaaccgacgaacccgggccagccgccggaacccgaacg

SEQ ID NO: 135094 - RNA, 60 nt, Homo sapiens
ggcggccagagaccgcggaagcagcagccgcccaaaacacaaaccaaagaagaaacccga

SEQ ID NO: 135095 - RNA, 60 nt, Homo sapiens
gggacacccccaaaaagagagaagaacgagagccaaaggaccgcagacaggaaagcaaca

SEQ ID NO: 135096 - RNA, 62 nt, Homo sapiens
gagaccagacgcggagccaggccgaggggcggacgcggccgagaaggagggggcagagcacg

SEQ ID NO: 135097 - RNA, 76 nt, Homo sapiens
agccaaagcagcgaagaagaggcccaacccccaccccgcccaaggaggcccagcgacggaccggcacgcggccaca

SEQ ID NO: 135098 - RNA, 81 nt, Homo sapiens
gaggaaggcgcccacccgcagaaggagaacacaaggcggccgaggaccaagacaaaggacgggcagaggcggaccgcaaag

SEQ ID NO: 135099 - RNA, 66 nt, Homo sapiens
accaacccacaccagaaaggacacacagggggaaacccgcccagggcgggagaccgccaagaaaca

SEQ ID NO: 135100 - RNA, 94 nt, Homo sapiens
gggcggagggggaggaagcaggggaaagcccgggccaagcgggaggcgccagggacggaaacagacgacgacacggacaggacggcggacaggg

SEQ ID NO: 135101 - RNA, 68 nt, Homo sapiens
aagcaagacacacacaacccaaagaaccacacggcgcacagcaacccggagagaacacaaaccacacc

SEQ ID NO: 135102 - RNA, 88 nt, Homo sapiens
cgcgcgggcacccacggagccccggggcggcaagagcgggagcggggcgccagcccccgggagagacgcaggcggggcggccgaccag

SEQ ID NO: 135103 - RNA, 47 nt, Homo sapiens
acaaacgaaggacagaacaggaaccaaagggaccccaccacgccggg

SEQ ID NO: 135104 - RNA, 83 nt, Homo sapiens
agggcgggaacgccaccccgcgcgccccccggggaccagggcggcccccaggaggagcgaccaagacacccaggagaaagaca

SEQ ID NO: 135105 - RNA, 33 nt, Homo sapiens
gacgccgcggacggaggaacaaggcagcagaaa

SEQ ID NO: 135106 - RNA, 72 nt, Homo sapiens
gagcaggcggccccgcagggcacaacacggagcacaagccccccagaagggacaagagaaaaaaagggcggg

SEQ ID NO: 135107 - RNA, 77 nt, Homo sapiens
caaagccagcgaagaaaagcggggcacaaaaagacacaacagaaagaggagcaaacagcaagagggaaacagaaaaa

SEQ ID NO: 135108 - RNA, 66 nt, Homo sapiens
cggcgcaccggcgggcgacgaggcccggcgaaaagacagcgacggcgcaaaaaagaagaggaagag

SEQ ID NO: 135109 - RNA, 76 nt, Homo sapiens
ggcaaggcccacccccacaaggagggcaaggcccaagaaaagccaccaaccccaaccgccaggaggacgggaaaca

SEQ ID NO: 135110 - RNA, 79 nt, Homo sapiens
aaggacaacaggaggaagcagagccaaagcagccgaaggaagaaaggacacgagaagagcaggcaagagaaggagcgac

SEQ ID NO: 135111 - RNA, 74 nt, Homo sapiens
aggaacacccaagccagcggaggcggcagaaaaagaaggaaaacccaaaacgaaggccagaagaggagaaaaga

SEQ ID NO: 135112 - RNA, 73 nt, Homo sapiens
aggaaaccaagcccggcggaggcaaggcagcaacagcgcaagagcaccagccgcaaggagcacggacgagaag

SEQ ID NO: 135113 - RNA, 71 nt, Homo sapiens
ggggggcgagaccggcgcgacccgaccacccagaaaaggggaagaaggccaaccgggggccaagggggaag

SEQ ID NO: 135114 - RNA, 75 nt, Homo sapiens
gaccggaacgggggaagcagacccgggaagcgcggaaaaagggacaaaggggaagaacaggcagcacaggcaccc

SEQ ID NO: 135115 - RNA, 55 nt, Homo sapiens
agagcacgccccaagaccgggcggcaccaggacgccgaaaagcgaccggacgcag

SEQ ID NO: 135116 - RNA, 72 nt, Homo sapiens
gcggaaaaccccaaaaggacaaagaggcccacgcggaccggcagcgccaccggaccaccagacaaggacacg

SEQ ID NO: 135117 - RNA, 76 nt, Homo sapiens
aagaccaggcagcaacaggcaagacgggggggccaaacacgggacaggacaaaggaggcaccccccagacacacca

SEQ ID NO: 135118 - RNA, 79 nt, Homo sapiens
cgcacaaagaaggagccaccgccaagcgaagggcggaaggcacccaaaaaaaaaagggcacaacagaccagaaacaaca

SEQ ID NO: 135119 - RNA, 75 nt, Homo sapiens
gccacgaggccggcacggaacgagggccccagagacgggggccgggaccaggaccggaggcagcaccaacaaaca

SEQ ID NO: 135120 - RNA, 78 nt, Homo sapiens
cacgcgcggaaggcagcgcccagcagcgcagcacacaggacaggccccccagccaccagcggggcccacaggagggca

SEQ ID NO: 135121 - RNA, 62 nt, Homo sapiens
cggaccgagagcgcgaaacgcacgagaaggggcaaagaaaaaggagagaaaaagaggcaaaa

SEQ ID NO: 135122 - RNA, 73 nt, Homo sapiens
aagggggccgggggcgggagcgagggaccgaagcagacgaaagaagccacaagccaccacacccaaacaagaa

SEQ ID NO: 135123 - RNA, 65 nt, Homo sapiens
cacccagccccggaacccaaccagaaaagcgagcgaccgggacccccccccggacacacagaaca

SEQ ID NO: 135124 - RNA, 34 nt, Homo sapiens
aagagcggaggacagcagagaaaaacgccacaac

SEQ ID NO: 135125 - RNA, 33 nt, Homo sapiens
cagccgaacaacacaccgacaacgaagagagga

SEQ ID NO: 135126 - RNA, 81 nt, Homo sapiens
agaacaagacccaagaaggaagaaagagaaagaaggaagaaccaggcgcaggagacacaggcccaacagcgcccggaaccg

SEQ ID NO: 135127 - RNA, 80 nt, Homo sapiens
ggcaacccaccagacaccagccgggcccaggacagaaggcgggcaaggagcgccccccgagcaccccccacagcccacgc

SEQ ID NO: 135128 - RNA, 71 nt, Homo sapiens
aacaaccggaacccagcaggggggaaagagcggcaagcaaggcacagggcgggcagccccaggcccagaga

SEQ ID NO: 135129 - RNA, 77 nt, Homo sapiens
aggccaacagagaccagaaccggaggccagacaaggaggaccgcacgacagcggcccgcggagacagagggaagaaa

SEQ ID NO: 135130 - RNA, 58 nt, Homo sapiens
gaccgaaacaccagggcaccacacggcaacaggcgacgggcggccaacacacagacgc

SEQ ID NO: 135131 - RNA, 53 nt, Homo sapiens
cgacggccccacccccgagcccagcaccgcgggaaggccagggcgacagacaa

SEQ ID NO: 135132 - RNA, 84 nt, Homo sapiens
cgcgccgccccccgccgcgcagccgccgcgcggccccgccccggcgcaccggagccagaggagcaccggcccaggcggaggcaa

SEQ ID NO: 135133 - RNA, 83 nt, Homo sapiens
cccgagagagcccgcggccaccccgagaacagccaccgcggggccgcccaaaacggacaagccaaggcacgagccaaagaaac

SEQ ID NO: 135134 - RNA, 56 nt, Homo sapiens
gcgcgcggcgccggcggcgcgcgacccccgcgcaggcggggccggggagcccgggc

SEQ ID NO: 135135 - RNA, 37 nt, Homo sapiens
gcaaaacaagggcgagagcgaacagcaagagaaccca

SEQ ID NO: 135136 - RNA, 80 nt, Homo sapiens
aaggggacaaagacaacagacgcgaaagaccccgaaaagaaagaaagcgagccagccaaaggaaaaacccagaaagcccg

SEQ ID NO: 135137 - RNA, 52 nt, Homo sapiens
ggcgccaaccgaacgcaacaaccaaggccgaaaggagcgaaggcaaaccaga

SEQ ID NO: 135138 - RNA, 72 nt, Homo sapiens
caaacgagacgagaaacagaaacagacagggcagaccgccagcagcacagcaagccacagagagggccggca

SEQ ID NO: 135139 - RNA, 59 nt, Homo sapiens
acgggaggagcgcggcaccgccgcccaggcaacccccagccacaacgcgaaccgggcgg

SEQ ID NO: 135140 - RNA, 126 nt, Homo sapiens
aaggcacagccccagcagcggcagaagaagcaacacgcaaacgagagcgaggcaagaaaaacaggcacagccaggaaacggcaggaaccgccccccggcacaacacaagagcgaacgggacagaag

SEQ ID NO: 135141 - RNA, 74 nt, Homo sapiens
ggaaaccaagacagcccaaacgccccacgaccagccacgcgcgcaaaaggacacgggaagcccagggcagaaca

SEQ ID NO: 135142 - RNA, 82 nt, Homo sapiens
gaaagcggcacgcgccccagagaaggggcagaccaacaccacccagcaaaaaccccgacgaacgcgccagggagcgccagac

SEQ ID NO: 135143 - RNA, 84 nt, Homo sapiens
agaggagccaggaggagagcccacagggcaaagagagcagacccgaggagcccgcagaaggccgggacagcagaaaacagccag

SEQ ID NO: 135144 - RNA, 74 nt, Homo sapiens
gcagacaagaaaccagccaaggaaagagaagaaggaggagcgaagcccccagagggcccgccaaaaggcagcgg

SEQ ID NO: 135145 - RNA, 81 nt, Homo sapiens
gccagacaacaccgaagaggaagacggggcggaagaccaagacacgagagacagggcagaggacgggcggaggggggcaca

SEQ ID NO: 135146 - RNA, 77 nt, Homo sapiens
cacaacaaggagcaaaaggaggagaggaggacagacaaaaggaggcaaggacaggcacccaccccagacaaaaggag

SEQ ID NO: 135147 - RNA, 76 nt, Homo sapiens
aaggcagcgacggccaccacgagcacggcccgcgcacgcccggagagagccacaacagcagccagaccccgagccg

SEQ ID NO: 135148 - RNA, 80 nt, Homo sapiens
gacgcgcccggcccccacaggacccaaggagcaggcaagaaaggacaaaggaacggaaaagcgggaaccggggagggggg

SEQ ID NO: 135149 - RNA, 75 nt, Homo sapiens
gaccgcggcgcgcaaagcggccaaggccacgggcaacccaaggagacggcgcgggggcggagagggaaagagagc

SEQ ID NO: 135150 - RNA, 74 nt, Homo sapiens
cacccggcagcagagcagcacgaccgcagccaccgaaaaggcaaaaagagcccagccacagagcgagaaggaaa

SEQ ID NO: 135151 - RNA, 84 nt, Homo sapiens
aaggaacagaccccggaggagagaacacaaggaacgaaaggaagggaagaagcagaaccaagacaaaagaagacccccagcaaa

SEQ ID NO: 135152 - RNA, 78 nt, Homo sapiens
gaagacaggagcaaaacgcacaggaagcaaagggggagccgccaccaaaagcagacggaaaacccacggggaagacca

SEQ ID NO: 135153 - RNA, 47 nt, Homo sapiens
acgacacggccgcacgggcccacgccagcccaaggaaaggcccaggc

SEQ ID NO: 135154 - RNA, 72 nt, Homo sapiens
gagcgccacgcgcggaaggcagcgcccagcagcgcagggcagaagcccaggagaaaccagaaaaaccaaaag

SEQ ID NO: 135155 - RNA, 75 nt, Homo sapiens
ccggcagagagagcccagagcacaacccgcaaccccccaaaagcgaggaaagggcacagcagccgcgaagcagcc

SEQ ID NO: 135156 - RNA, 85 nt, Homo sapiens
agaccagccccgcggccgccaaagccgggagacgacggagcccggaagcgcagaagcgcccccaaaggaaagccgaccaagacgg

SEQ ID NO: 135157 - RNA, 80 nt, Homo sapiens
gggccgaaggcccggcccacacgggaagcgcgggaagggaaaaaaaacacgcgcgccgagccagaggagaccccagaccc

SEQ ID NO: 135158 - RNA, 75 nt, Homo sapiens
cgcggggccaccgcggcggagcccgaggggccagagaaaaccggcaggaagcagagccccgccgcccgaaaacaa

SEQ ID NO: 135159 - RNA, 73 nt, Homo sapiens
cagcggaggcccaaagacagaaacagagcacgagcacaaacagcaggaacccacagaggagcgccgcgcccag

SEQ ID NO: 135160 - RNA, 78 nt, Homo sapiens
ccagccaagccccggaccagcggaaaggacacaaaccccagcggcaggagaaagacagcaaagaaaaggagaagaaag

SEQ ID NO: 135161 - RNA, 75 nt, Homo sapiens
acaagaggcgacgcgaaccgagagcgaaccaggggagcggagacaccacgggcagcgcaaaagcaaagaccagga

SEQ ID NO: 135162 - RNA, 86 nt, Homo sapiens
accggcacaacggcaaagaagcaaaaaccagcagcaagcgcccgcaaggccaagccggcgaagcccgcgcgcagccccaaaagcag

SEQ ID NO: 135163 - RNA, 67 nt, Homo sapiens
gccacccaaagcaccaagaaagaggcccaaccaaagacagaacgcgaacggaaaagaagggccccca

SEQ ID NO: 135164 - RNA, 77 nt, Homo sapiens
caagcgaaaacagaccgcgagcccagagggaaacacaaagaagacaccagaagggccagcaccacgacaacacggcg

SEQ ID NO: 135165 - RNA, 71 nt, Homo sapiens
agagaggcgggccgggcggggagccaggcagccgaacccccggagggaggggaaggcagcgaaaccagagg

SEQ ID NO: 135166 - RNA, 76 nt, Homo sapiens
gggggcggggccggagcgcccccgcaggccagcaggcacagagccggaggacgcgaacagagccgacaggcacgaa

SEQ ID NO: 135167 - RNA, 70 nt, Homo sapiens
cgaccagcgggaggccagaggaaggacaagcaggaacacagaaccgccaccacagaaaagggaaagaaac

SEQ ID NO: 135168 - RNA, 62 nt, Homo sapiens
cgcaaacaagccaacccaggaggaaaaacgaacgccagaacaaacagcgagaaaaccgaccc

SEQ ID NO: 135169 - RNA, 82 nt, Homo sapiens
ccgccagccccgcggcgaagggaagaggcccagccggcccgcgggggagccccgggagccgcacgcggaagaagaacaagaa

SEQ ID NO: 135170 - RNA, 71 nt, Homo sapiens
ggacaggagccgccgccgccaacagccagaacggaagaccaaccagaagacacacaaagcaggggaagaga

SEQ ID NO: 135171 - RNA, 79 nt, Homo sapiens
cgcgcaagggcgcagcacccgaagcgaggggaagacgaaagggaagagaaaaaaacaagagcgcaagagagcgagaaac

SEQ ID NO: 135172 - RNA, 74 nt, Homo sapiens
ccggagagaagcagacgcaccggcacggaccaccccaacaccgggggagaaccgggcccaccagggacacgggc

SEQ ID NO: 135173 - RNA, 87 nt, Homo sapiens
cgccgcagggcgcccggccgccaggccagcgaacggccggggggcgagcgaccgaaagacagaaacagagaaaccaacggaccccag

SEQ ID NO: 135174 - RNA, 82 nt, Homo sapiens
ccggggacgacaaggaggacggacggaaaaaggacaaggaggaaagaaacgcaccacacggacagcccggggaagcggagcg

SEQ ID NO: 135175 - RNA, 64 nt, Homo sapiens
cagccagcaacaccagagaagcgcagggaaacggccaaacccggcccaaggaccccaccacagc

SEQ ID NO: 135176 - RNA, 36 nt, Homo sapiens
gaggagccccgcagaagcggacaggcggaaccacac

SEQ ID NO: 135177 - RNA, 74 nt, Homo sapiens
acaagggagcaaaggggccagggcacgggaggagcagccccagagcgcacaccagggaaagcgccaggcgcggc

SEQ ID NO: 135178 - RNA, 70 nt, Homo sapiens
caacgaaagaaaacacacacacacaaacggcacagccccaggggcgggccacgcgcggggcggcgccagg

SEQ ID NO: 135179 - RNA, 80 nt, Homo sapiens
cgggacccggggcgccacgggggccagaagcagccaagcaggcaccaagcagccaccaagcacagcagccgccaacccac

SEQ ID NO: 135180 - RNA, 50 nt, Homo sapiens
accgggagcggcgaagaggcaccggaggagaagcaaacacaccacgggag

SEQ ID NO: 135181 - RNA, 77 nt, Homo sapiens
agggagaacagagagaagccgacgaacaacaggcaggagagcccaaaccaacagaccaaaaccggaaacaagaggcc

SEQ ID NO: 135182 - RNA, 73 nt, Homo sapiens
accgccccagggagaggagcccaaaccagccgcaggcccggggggcggggaacaaaaaccgaaccggggaagc

SEQ ID NO: 135183 - RNA, 82 nt, Homo sapiens
ggagaggaaagagacccgcagagccacagggcaggccccagcccaagcggaagggaagaaccagcggagcaggccccccgag

SEQ ID NO: 135184 - RNA, 95 nt, Homo sapiens
gcggcgaaggggcgagcagggagcagcgcagcgcgcgcagagcgcgccaggggccaaggggaaacgcaggaagaagccaaaaaaaagaagccagg

SEQ ID NO: 135185 - RNA, 81 nt, Homo sapiens
ccgggggacgggagaagcggaggaaccccccaagcacaccgaggggcccggccgcggggcacagcagagggagcggcagaa

SEQ ID NO: 135186 - RNA, 59 nt, Homo sapiens
cgcgcgcccgccacggcgccgagccgcggccgagggagcccccgagcgcccgcgacgca

SEQ ID NO: 135187 - RNA, 78 nt, Homo sapiens
gcagagccaagagaacaggcaacacagggacgcccagaaggaacgcagggaggagccaagagggcccgaggaaaaagg

SEQ ID NO: 135188 - RNA, 77 nt, Homo sapiens
acgggacgcgcggcgggcagcaaaccaccggaccaggcaaagaagacgacccggacgaagaggacgccaaagaaggg

SEQ ID NO: 135189 - RNA, 68 nt, Homo sapiens
acagacggacagaaccccacccacaagagcagcacaaaaccagcgcacgggaccgccgccccagcggg

SEQ ID NO: 135190 - RNA, 84 nt, Homo sapiens
agcaagggaaaaaggaggaccccgccaagggccccaagagggcacacagcacacaccgacagccagacaacacagggacacaac

SEQ ID NO: 135191 - RNA, 108 nt, Homo sapiens
cggcgcggggcccccagaaggacgccagcggagaacgcggcaaagcgaggccagagaaggacaagaagccaagccgaaaggacagccagccacccaaggggggcgcaa

SEQ ID NO: 135192 - RNA, 72 nt, Homo sapiens
gagcgaacccgcgggcggaccaagcaggccaagagcccaaggcagggcaagaacccgccacacaaggcgaac

SEQ ID NO: 135193 - RNA, 83 nt, Homo sapiens
gacggacacggacggcgcgccgcgaccccagccggcgccgagggcggaaccgagcgggaaaaggacagaaaccaagcaaaaaa

SEQ ID NO: 135194 - RNA, 66 nt, Homo sapiens
ggggaaccgacgcaaaccagagggcaaccccgaaagggacggcgacgggcggagggcagggcagac

SEQ ID NO: 135195 - RNA, 61 nt, Homo sapiens
gaaacaggggccacggagccacggccacggccgcaaggggacgcacgacgagcgcgaaggg

SEQ ID NO: 135196 - RNA, 75 nt, Homo sapiens
agcaaaaaaggaaaggaccacgcagaacgcccaaccaggccaaggccagccagggcagcagcaaggagaacacca

SEQ ID NO: 135197 - RNA, 75 nt, Homo sapiens
accagaacagaagcacagagcgcagaacaggaaagaccacagcaagaccacgcccccagccgggggaccaggccg

SEQ ID NO: 135198 - RNA, 80 nt, Homo sapiens
agacacagaacgcgcccagcaaagcgaagagaagggaaaggacggaaccgggcgaccggaacgggccacgacacgccccc

SEQ ID NO: 135199 - RNA, 78 nt, Homo sapiens
gcaccaagcccccagacaaaccgaaggcgacagagacagaaagcaccgggaggaaagagagccacacgaagaacacgg

SEQ ID NO: 135200 - RNA, 114 nt, Homo sapiens
caggcgcaacaaggagaagagccaggaaacaggaggaagaacccaagccaaagcccaggcgagggagaaacgaccagaaaaacaggcccgacccgaccccaaaagagacggacg

SEQ ID NO: 135201 - RNA, 76 nt, Homo sapiens
ccagaccaaggagggacccaacagggacaggcacccacccgcgagacccccaagagacaaaagaagggagaacgga

SEQ ID NO: 135202 - RNA, 70 nt, Homo sapiens
gacaagggcagagggaacaggcagcaggaagcacggcgggcgaaacagaacaaccacacagagaagaaac

SEQ ID NO: 135203 - RNA, 73 nt, Homo sapiens
acgcgggcccgggggcccgcgcagcgcggcaggagacagaagagcagaagacagagaaggaaaagaaaggaac

SEQ ID NO: 135204 - RNA, 68 nt, Homo sapiens
ggccccaccgggcccgaaggcgcggcgggacaagggcgcaccggggcgcagcgagggaggacaacggg

SEQ ID NO: 135205 - RNA, 72 nt, Homo sapiens
aacgcagagccccacccccaaaaaacagaaggagcaaggaagaaagggagcggcaggggaggcgaagaagag

SEQ ID NO: 135206 - RNA, 71 nt, Homo sapiens
ccccggcccgccggagaaacagcgccaggcagccacgcggagacaagcgagaagcaagagcgccggagcac

SEQ ID NO: 135207 - RNA, 80 nt, Homo sapiens
ggcgggggccgggcgcgcacagaccgggcggaaaacaccccaaaagccaaaagggaaaggaaaagaccaacaacagcgca

SEQ ID NO: 135208 - RNA, 54 nt, Homo sapiens
aacgagacaagaagcaacagccacgggagcaagaacggccgacaggagggaaga

SEQ ID NO: 135209 - RNA, 105 nt, Homo sapiens
cgccccccgggggcagagggcagcaagaggcgcgcagagggcgcaggaaaaaggcgcaggcacacaggacggcccacccccacgacagggaaagaggacagccca

SEQ ID NO: 135210 - RNA, 91 nt, Homo sapiens
ccggccgcaggccgccccagcgccgcgggagagcgcgggggaccgcggcccccagcagagcccgccgcccggcacggaacagccccaagcc

SEQ ID NO: 135211 - RNA, 70 nt, Homo sapiens
ggagacccgagcaccccaacgggcagacacagaaaagggagccacggaccaaaccagagaaccagcaacc

SEQ ID NO: 135212 - RNA, 71 nt, Homo sapiens
acgaagaagccacagccgcacggacccccagagcagcaagcggcaagagccacagagaaacaaccaaggca

SEQ ID NO: 135213 - RNA, 70 nt, Homo sapiens
gccagcccgggcccccagcggcaaaggacgacgcagcacagagaggaaacgaggaaacgaccaccggagg

SEQ ID NO: 135214 - RNA, 53 nt, Homo sapiens
aaaagcaaagcccgggacaggacagcgcaagcagagaagggaaaggacggaac

SEQ ID NO: 135215 - RNA, 65 nt, Homo sapiens
ccgaggaagccaggaagaaggcacgaagcggggccaaaaaggggccgaagagcaaggagaccagg

SEQ ID NO: 135216 - RNA, 78 nt, Homo sapiens
agccaaggaaggccgagaagaagcaaagggcaaccagggaaacaggagagggcagcggggaagaagaaaaggaaccga

SEQ ID NO: 135217 - RNA, 63 nt, Homo sapiens
aaagcgcagagccaaaaggagaagaaacggacagagaacgcagggaggcaggggcagaacccg

SEQ ID NO: 135218 - RNA, 74 nt, Homo sapiens
ccagagaagagaagcacgggccagcccaaggaaagaccacagcaagaccacgcccccagccgggggaccaggcc

SEQ ID NO: 135219 - RNA, 59 nt, Homo sapiens
gcccccaggcgaagaagcgcagccgcaccggccaaggggaaaaagacacagcaaagccc

SEQ ID NO: 135220 - RNA, 81 nt, Homo sapiens
aaaacacggcacgggcacacccaaaagacccagcccccgggagggaggcggaaaggcgcggaagccagacgaaacggccca

SEQ ID NO: 135221 - RNA, 77 nt, Homo sapiens
gggagccagaagcacaggcccgggcgaaggggccacgcgagccacagaaaagaagacccgaagaaagcaggagaaac

SEQ ID NO: 135222 - RNA, 75 nt, Homo sapiens
aaggaacgcagaaacacaggaccccccccaacgagaacgcggaaccccagagaggacagaagccaacgcaaccag

SEQ ID NO: 135223 - RNA, 82 nt, Homo sapiens
cgagagcgcacaggaggcacgggcggagaaggacccgcagagacagacgagcgaaggacgcgcggcggcccccagaggccaa

SEQ ID NO: 135224 - RNA, 76 nt, Homo sapiens
aggggccgacaacacagagcaagacaacaggcacaaagagagaaggaacacccacagggcagacagagaaagaaca

SEQ ID NO: 135225 - RNA, 78 nt, Homo sapiens
ggggagggggggaccacgaaaggagcaagagcaagacaccggacaccgagggcccccaaaaggaaggccaaggggcac

SEQ ID NO: 135226 - RNA, 66 nt, Homo sapiens
ggcgccggcgccgacaccacgcgcaccggagccaagcggccggaacaaggggagaagaagcccagc

SEQ ID NO: 135227 - RNA, 62 nt, Homo sapiens
cggaaaggaacagcaccaggccaagaccgacaagcccgccaagcgcccccgggcacgagagc

SEQ ID NO: 135228 - RNA, 43 nt, Homo sapiens
ccccgagggcgggacacagcccaaaccaacagccacaaggggc

SEQ ID NO: 135229 - RNA, 79 nt, Homo sapiens
agagcaaccccacagaggaaaccagacccggaggaacggaccagagagaccccggagagagaacgaaagaggcgaaaag

SEQ ID NO: 135230 - RNA, 76 nt, Homo sapiens
gggccacgagcaccgcgccggcccagcaccccgagaaccgcaggagccagagaagggccccgcccagagcaccacc

SEQ ID NO: 135231 - RNA, 61 nt, Homo sapiens
aaaaaagcagaggccagggcgccgaagccaaagaaacgccaaccgcccaaaaacccagagc

SEQ ID NO: 135232 - RNA, 61 nt, Homo sapiens
ggcaaacaagccgaccggaaaaagaacgaaaacaaacggaagagagggcagcaagaaagaa

SEQ ID NO: 135233 - RNA, 79 nt, Homo sapiens
ggaagacgcaccgcggacgcccgcgagcggcgcacgggccgaccaggacccccagaggaccccaacacccacccccgcc

SEQ ID NO: 135234 - RNA, 70 nt, Homo sapiens
gcacccaccggaccgagccaggccccccagccccagcgcgcgcgccaggaggcagacgccacgaggaaac

SEQ ID NO: 135235 - RNA, 35 nt, Homo sapiens
gaggcggcaacacgggcgagaagggccaccgcgcc

SEQ ID NO: 135236 - RNA, 94 nt, Homo sapiens
ccagcacccagaaaaagcaccccgaggaggaagacgaacgaaacacgaaagggcagggcggagaacggaaaagcaccaggaagcagagaggacc

SEQ ID NO: 135237 - RNA, 75 nt, Homo sapiens
gcgggaggccacgggagggccgcgcgccggagaccgaaggacggagcggaaccgccagaccacaagaaaagcaga

SEQ ID NO: 135238 - RNA, 59 nt, Homo sapiens
caaggggagggaagaagggaagacggccgcccgggcacaaaggcccagccccccccgcc

SEQ ID NO: 135239 - RNA, 76 nt, Homo sapiens
caacacaacaaaaggcaccagcagcaagcacagagagaccaccacaaagacaagaagagaagaaaagaaacaaacc

SEQ ID NO: 135240 - RNA, 70 nt, Homo sapiens
aagaaagcagacaccacccaacaagcccggaccaggacagccaggggcaccaccacgaggcgaggggcca

SEQ ID NO: 135241 - RNA, 83 nt, Homo sapiens
ccggacccacgccgccagacccacgcggccggaagccgggccggcgcggaagaggccggcggcgggacggccccacgggaccc

SEQ ID NO: 135242 - RNA, 71 nt, Homo sapiens
cgcgccagggcgcggggccgcggccgcgcgagcagcgccgcgggaacaacggggaagcgagagaccgaaac

SEQ ID NO: 135243 - RNA, 80 nt, Homo sapiens
agaccagacggaggaggagccggacgggccagagaagagaagggcagcaagagcaccccggagccagaacccagccaggc

SEQ ID NO: 135244 - RNA, 61 nt, Homo sapiens
aacgaacaacaggaaaaagaccccacgcagaggggcaaaccgaccacgcagaaaagacggc

SEQ ID NO: 135245 - RNA, 73 nt, Homo sapiens
gcccccgacgcagcgcaccagaaaggccccaacgagcaaccgagacaaaaagaaggagaagaaaaggcaagac

SEQ ID NO: 135246 - RNA, 58 nt, Homo sapiens
aagaacccacgcgcgacgaaaaggagacgcgccccgggccagaccggccagacagagg

SEQ ID NO: 135247 - RNA, 80 nt, Homo sapiens
gagacgggagcccggagcgcgggccaacccgagggccggcccaggccaggggcacaccaagaaccgcaacgggcgacacc

SEQ ID NO: 135248 - RNA, 77 nt, Homo sapiens
ccgggaggcagaccccaggaaggaaccgaggagcaaggaccgggagaaacgagaccaaggaagacacagagggagac

SEQ ID NO: 135249 - RNA, 81 nt, Homo sapiens
aagacgagcccagcgcaaccccaagcgcccaaagggacggaacggagagggggaccaacacagcgagggaggcagccgggg

SEQ ID NO: 135250 - RNA, 80 nt, Homo sapiens
gaaaaggcaaaaacccacaccgcaacccagcgagagaaagggcccggccaggccccaccgccacaagcaggggaacaccg

SEQ ID NO: 135251 - RNA, 71 nt, Homo sapiens
aagacaccccaagccgagcagaaagcggacggggaaccgaaggcccaccaagcaggcaccaagcagccacc

SEQ ID NO: 135252 - RNA, 89 nt, Homo sapiens
gcggggggccaccgaacgcgcacgccggcagcccgagcgggaagaagccgcagcaagccgcagcggcgcgcaccgggcggcccaggacc

SEQ ID NO: 135253 - RNA, 86 nt, Homo sapiens
cagaggggacagggcaaagaccaccaaaacccacgggcacaacggagcaagcaaccccgacaagcccggaacaacaagcgaagacc

SEQ ID NO: 135254 - RNA, 78 nt, Homo sapiens
cggacggcgggaccacaagacaacgcggagcggcgaagagcaaccagggccggcccgcggacccgaccgggcccggcc

SEQ ID NO: 135255 - RNA, 73 nt, Homo sapiens
gcagcggaagaagagaagggagggcagaaggaacaaaacgaaaggagcagggacggggggaaaagcgcacccg

SEQ ID NO: 135256 - RNA, 69 nt, Homo sapiens
ggagcggaccgagggcaacagagacgagaaagccagaagagagcagaaaaaccagcagcaaggcacggc

SEQ ID NO: 135257 - RNA, 70 nt, Homo sapiens
aggcaggggcaggaagaacccacgggcagcacacacgaaagagaagccccggagaacgcccaacccgaca

SEQ ID NO: 135258 - RNA, 67 nt, Homo sapiens
aagaaaccccagaaagcaaacccacagccgcgcgcgccggcgcggccccgggaggcacaacagggag

SEQ ID NO: 135259 - RNA, 76 nt, Homo sapiens
gcgggagcagaggggagagcggccgccgccgcgccgcccaccacaggggaccccgggcccgggcgggggagaagac

SEQ ID NO: 135260 - RNA, 73 nt, Homo sapiens
cccgagagcgggagcagaaaccaacacacaggaaaagcacagcagccacccggaagccggcaaagggaaacca

SEQ ID NO: 135261 - RNA, 61 nt, Homo sapiens
ggccgggagcgcggcggagacgagccgagacagagcacgcccgggggccgcaaggccaggc

SEQ ID NO: 135262 - RNA, 85 nt, Homo sapiens
cgcccggcgcagcggggaccggcggcggcgcccaggcacccggcccgggccagcgggagcccccgaccccaggagggcaagacca

SEQ ID NO: 135263 - RNA, 71 nt, Homo sapiens
agacagccccaagacaaccccaccagcaccacagaagaacggcacaagcccggcggcggcccccagacagc

SEQ ID NO: 135264 - RNA, 86 nt, Homo sapiens
cagagacaaccgaagaccagggaaaggcaagagaaagcagacgagcccccacagccagaaaaaagacagaccgagcggggaggcaa

SEQ ID NO: 135265 - RNA, 62 nt, Homo sapiens
cagacgaagggaggccggcgaagacgcggaggcaaccaagggcagaccgcacaagcagcccc

SEQ ID NO: 135266 - RNA, 36 nt, Homo sapiens
gcccaacggagaacgaaacggaggagagaggacagg

SEQ ID NO: 135267 - RNA, 77 nt, Homo sapiens
aagcgggaaggaaagcgggggcgagaacgacagacacgaaggaacagaaggcccacaaggagaccagcaggaaacag

SEQ ID NO: 135268 - RNA, 77 nt, Homo sapiens
ccagcaacaagccgagggcaaaacagagcgagaaaaaggcacgggccagcaccgcaaaggcccaagccaccggaagg

SEQ ID NO: 135269 - RNA, 82 nt, Homo sapiens
ggaacagcgagaaacgagaagcgcagaaccaacgaggggccgaaccccaggaacaagaaaccagcccgagcaaaggggcgag

SEQ ID NO: 135270 - RNA, 46 nt, Homo sapiens
aacaaaagcaacaaagaggcgaaccccaagcccgacggggacccac

SEQ ID NO: 135271 - RNA, 91 nt, Homo sapiens
accgagcccaggggccaggaaaggaagaggagagaaggcgaaggccagacaaagcagagcccacagacaaggccaaaggcaaagcgcacag

SEQ ID NO: 135272 - RNA, 74 nt, Homo sapiens
gcaaaagcacaaagacagagaagaaccaggcgaaacggaagagaaaaagaagaaaaaagacaccgagacaaagc

SEQ ID NO: 135273 - RNA, 81 nt, Homo sapiens
gcagaccgagacccggacagggcaggaaacagggaaagcaacggcgcaagcggcggcggcgggcagaggacacacagagca

SEQ ID NO: 135274 - RNA, 70 nt, Homo sapiens
cgaggaggcgcgcagaaccagaccgggagcacgcacccacgaggggagaaaaggcccgccaaagagcaca

SEQ ID NO: 135275 - RNA, 77 nt, Homo sapiens
ggagaacggaaccacaagcaaaagccagagaagcaagaggcagcacggggaaaaggaaggagaaaaagcaacaaaag

SEQ ID NO: 135276 - RNA, 57 nt, Homo sapiens
ggcacccagccacaccgagcagaagacagagggaggagggccacggacaaacacggg

SEQ ID NO: 135277 - RNA, 60 nt, Homo sapiens
accggacacaaaagcaggacaagggcgaaccaaagaaggaaggcgacccaaaaccacgaa

SEQ ID NO: 135278 - RNA, 79 nt, Homo sapiens
ccgccacgcagcaggagcaggggacgaagaaagacagaaccagagaaggagcggggaagaaagggagcacaagaacgga

SEQ ID NO: 135279 - RNA, 79 nt, Homo sapiens
gcgaggggaggcaggcgcggcagacggcgacagggcggcggcgccaggcagggcgcaggcgagaacgcggacaagcaaa

SEQ ID NO: 135280 - RNA, 75 nt, Homo sapiens
aacagggcagcacagacccaggcccacacgacagaccacaacacaagagaccgaaccaacggccggaagcggaca

SEQ ID NO: 135281 - RNA, 73 nt, Homo sapiens
gaaggcaaaccgagccaaggacagggagacacccaaaccgacaaggggaacccagcgggcagggggaggcagg

SEQ ID NO: 135282 - RNA, 54 nt, Homo sapiens
cgggccaggcacagccacaccagcggaagagcgagaacgccaacggcaagaaag

SEQ ID NO: 135283 - RNA, 77 nt, Homo sapiens
agccgggggaagcagcacggcacccagcccaggccgcccggacgggaggggggccaagccgacgccagcgggcgcca

SEQ ID NO: 135284 - RNA, 79 nt, Homo sapiens
ggggaccagccagccccccaggaccacagccccgaccgagagaaccagcgccagggccgcggacacgcgggcccgccga

SEQ ID NO: 135285 - RNA, 77 nt, Homo sapiens
agaaaagagcagaacgaagaaacccgcagaccaagaggggggagaccggaggacccccaaacaacccggagaggcaa

SEQ ID NO: 135286 - RNA, 72 nt, Homo sapiens
acaaccggcgaaagcaccgagcagccagcaggaggaagccggcggaaacagggaacacaaaaacagagagca

SEQ ID NO: 135287 - RNA, 77 nt, Homo sapiens
aagcaggcgaacccgcggcgcaaaacggaagcagggcaaaaggcaaccggccagccgacaggccagaaaggaggaag

SEQ ID NO: 135288 - RNA, 78 nt, Homo sapiens
gggaaagaaagagcgccgggacagggggaggaaagcaccgaggcacaacagaacggggagacagccaaggaaacggaa

SEQ ID NO: 135289 - RNA, 70 nt, Homo sapiens
gggggcggccgggccggcggcacagccaagggcgggggcggagggcaagacgacgacaggagaacaacaa

SEQ ID NO: 135290 - RNA, 42 nt, Homo sapiens
aaggcgaggacaccaccacagagcgggaagacacaccagaac

SEQ ID NO: 135291 - RNA, 70 nt, Homo sapiens
ccccagaagcacggaaaagcccccggccaaaggagaacgacaagggaacagcccgcagcccgacaagaaa

SEQ ID NO: 135292 - RNA, 99 nt, Homo sapiens
ggcgacgcccggagaagccaccagccgaagcaccaccaagaagcgcaaaccgggaaccagacaggccaggcccagccaggagcacggggaccgcccccg

SEQ ID NO: 135293 - RNA, 82 nt, Homo sapiens
ccaagagcaacagacacggcaacacaagaggcaccgaaagcgaaggaagcccgcccccaaagccgaagccaaagcgaaggca

SEQ ID NO: 135294 - RNA, 75 nt, Homo sapiens
ggagcaaggcgggccagagagaggcgcagccaagacagcccgcagaagcaggcggaggcgggaagccaagacaag

SEQ ID NO: 135295 - RNA, 78 nt, Homo sapiens
cggagcgaggcacacaagcgcaccagccaaccgagacccaaagacaggaccacgcaccagcagagaaggaaagcaaac

SEQ ID NO: 135296 - RNA, 100 nt, Homo sapiens
ccgccccgacgaggacgaccaacaggcagcagcgggccccgccaccggcacaccgaagggggcccaccacgaggacaacgaggcaacacacacagagacc

SEQ ID NO: 135297 - RNA, 81 nt, Homo sapiens
cggaccccagagccaccaacaacccaccagcagccaccaaggccaacggaccacaccaaaagccaccaaaggaacacgcca

SEQ ID NO: 135298 - RNA, 58 nt, Homo sapiens
gcggcggagcaggacgcggaacacccagaggccagcacaacagcgggcaacacaacaa

SEQ ID NO: 135299 - RNA, 68 nt, Homo sapiens
gaccagagcaaccagcaggacccaggcgagcggaaggaggagaaaaaggcggcgccccgcccgaggag

SEQ ID NO: 135300 - RNA, 97 nt, Homo sapiens
gggaaagagaaggcgaggaaccagcaaccagcagcaccgagagaacccccacagcggccacgccccgccaacccccacaccggcggacccgccgacg

SEQ ID NO: 135301 - RNA, 68 nt, Homo sapiens
aaagaacaccaacggaggaagcagaaccaaccaccaaagaccaaggacagggcagaccgccagcagca

SEQ ID NO: 135302 - RNA, 58 nt, Homo sapiens
gcgaacccgagggaggagcccgcgccaaagaagagacccaggagacgacaaggcgggc

SEQ ID NO: 135303 - RNA, 67 nt, Homo sapiens
ccacccgcccccgcgggcgccgggccaggacgggacccacccaggaggcagaaacacgccgcgcgcc

SEQ ID NO: 135304 - RNA, 70 nt, Homo sapiens
agagcccggcagacagggaggacaagcgccggcacgcgaccgaacgcaaagggaacgcaagaagagagcc

SEQ ID NO: 135305 - RNA, 72 nt, Homo sapiens
agcaccaacagccccaacccagaaagcagaggccagagcggagacagacgaaacgcaggccaacaaaacgag

SEQ ID NO: 135306 - RNA, 66 nt, Homo sapiens
ccgagacaggcggcagggaaccagacagcccacaacaggcgcgggacaaccaacacaaccaaagag

SEQ ID NO: 135307 - RNA, 82 nt, Homo sapiens
accccaccggaggcccgcggccagcaacccccagggcccgagggccggggacaaccacagcagcggggagaggcggggcgca

SEQ ID NO: 135308 - RNA, 91 nt, Homo sapiens
agggggacacccgggcggggcagagcagcccccagccagccgcgaggggaggcaggaaaaagacacaagacagcaggaccgggaccagccc

SEQ ID NO: 135309 - RNA, 70 nt, Homo sapiens
ccgagggacaagagacgcaggcccgaggagacccaagggacagccaaagaccggagcggagagagaagaa

SEQ ID NO: 135310 - RNA, 77 nt, Homo sapiens
gagcaacgcaccaggcagccaacggaggccggggcacccgcaggccaacccccgagaccagagagcggccagccgga

SEQ ID NO: 135311 - RNA, 53 nt, Homo sapiens
gagacccacacgccagagcacaacaaacaacggagaagcagaaaaggacggcc

SEQ ID NO: 135312 - RNA, 82 nt, Homo sapiens
gacccaggcaacgggagaggcagacaagcccaagagcaagggcggcccaagccggacacgggagacaaaggacaggcagaaa

SEQ ID NO: 135313 - RNA, 77 nt, Homo sapiens
agagaacagccccacaccggggaccgcggaagggaaggaaaaaccgagggaaccaccgacaggaaaacaggaggcag

SEQ ID NO: 135314 - RNA, 72 nt, Homo sapiens
agcacggaccaggaggcgagcaacaggaaaccagaaccgcacagcaagccccgggggaaaagagcgcccgcg

SEQ ID NO: 135315 - RNA, 72 nt, Homo sapiens
gagagacaagaaacccagagaacgcccccgacaccacaagccccagaaccccgaaaagagaaacaaccaccc

SEQ ID NO: 135316 - RNA, 72 nt, Homo sapiens
acacaggaggggaccaagcaggcacagaaacagggggacgaggaggcagagcgaaaccacggacgaagcaac

SEQ ID NO: 135317 - RNA, 62 nt, Homo sapiens
gcaagcgaagccgaaaaagcgcccgagacgggcccgccgaaaggaccgcgcgaagcggccaa

SEQ ID NO: 135318 - RNA, 69 nt, Homo sapiens
gcacaccggaccaggaaacggaggcggggaaccggggacccaggaaggggaaaaagagagaaagcagga

SEQ ID NO: 135319 - RNA, 85 nt, Homo sapiens
gcaccacgacggcgccacaccgagcgcgaggcgcggagagcaacgccgggacagcgcaaggaaagaagagaccccccaaacccaa

SEQ ID NO: 135320 - RNA, 59 nt, Homo sapiens
ccccccaccggacacccgcggacagccccagcgccccaggagaccaacaccccacagcc

SEQ ID NO: 135321 - RNA, 58 nt, Homo sapiens
ccaccccgggaggcagaagccagacaacgaagagaggaaagaagcggaaaggagggag

SEQ ID NO: 135322 - RNA, 75 nt, Homo sapiens
gaaacccaggacgagaacagcaacaggacgcacaaggaccggcacggcagaagccgccacgccgcaggcagaaac

SEQ ID NO: 135323 - RNA, 81 nt, Homo sapiens
gaaacgccagcccacgagagccaagacagagacgcggccaaaagcggccggaggcagcaggccacccagacccaggcacca

SEQ ID NO: 135324 - RNA, 77 nt, Homo sapiens
gccgggcaggcagcagcccagcggggacagggagccgccgcccacccacaggccacgccgggccagaaaaggggaag

SEQ ID NO: 135325 - RNA, 64 nt, Homo sapiens
caaggagggacccaacagggacaggggaccccacaccacaaaccgaggaaagaagggacagcag

SEQ ID NO: 135326 - RNA, 64 nt, Homo sapiens
cgcggacagcgggcggagccgacgagcggcggagaaggaacgagacacagagggagacgcaaag

SEQ ID NO: 135327 - RNA, 62 nt, Homo sapiens
cacccacgggagagcgcgcagccagcggcccccagggcccgcagacagcccaccgaggaaga

SEQ ID NO: 135328 - RNA, 82 nt, Homo sapiens
gcggcggcgcagccggaacccgccagggccagggccaggccagcgcccggcggcccagggaggaggacacaccaagcgagcc

SEQ ID NO: 135329 - RNA, 83 nt, Homo sapiens
aaaacaaaacaggacagcacaggcacagaaggccaaaaaggcaaccacagagagagagagggagggagaggagccagccacac

SEQ ID NO: 135330 - RNA, 75 nt, Homo sapiens
gcccggcccggcccacggccggccgcgcgcgaacccggccgcagggacccgcaggggcccgggacgagcggccca

SEQ ID NO: 135331 - RNA, 83 nt, Homo sapiens
ggcagcggagagccgagcccaaggcaagacccaaggcgacgaccgacaggggggaaagggcgggccgaggagaacgggacccg

SEQ ID NO: 135332 - RNA, 78 nt, Homo sapiens
ccgccggggccaagcaggcccggcgcggccccaggaaacgaaaagagacagcagggcaaaacgggccacacacagggc

SEQ ID NO: 135333 - RNA, 83 nt, Homo sapiens
cagaagaaggaccggaagcacacaacaggaaaacaaaagaggagaaagaacacgcgcaagcacgcaaggagcggagccccaac

SEQ ID NO: 135334 - RNA, 77 nt, Homo sapiens
cacaaacgagggagcaaggacaccaccagggagccaggagaggggacccacgagcagccaaaaaaagaagcaaaaga

SEQ ID NO: 135335 - RNA, 75 nt, Homo sapiens
cccccggacggaccacgagcagaggaggagccgcccagcaaaacccaacgggaacccgccggaaaacggagagca

SEQ ID NO: 135336 - RNA, 75 nt, Homo sapiens
gcgaggcgagacccccgcccacgcaaacccaaagaccccgccggagacgagaggacagcccagagcaagcacacg

SEQ ID NO: 135337 - RNA, 71 nt, Homo sapiens
aaccccccagcagcagcagaccaagcgcccacacccggaggcccggcgagcaaaacacccagccacccgca

SEQ ID NO: 135338 - RNA, 76 nt, Homo sapiens
gacagaaagccaaaaaggagaaagcagaccgaaaagggcggaaaaggaccaaggcccgcaaaagggcgcgaacaac

SEQ ID NO: 135339 - RNA, 81 nt, Homo sapiens
acgaacagagacagaaaagagcagagaagcaaccaacgcccagcgcgcagcagggacgcggcggcgacacccacacagacg

SEQ ID NO: 135340 - RNA, 103 nt, Homo sapiens
ggcacagcagcggcccgagacaggcccaccagggacacgcggaggaaggagcgggcggggcagccagcccgcgggggcgaccccggcgcaggaaggcagggca

SEQ ID NO: 135341 - RNA, 71 nt, Homo sapiens
ggccagaaaccacccaggccagagaggaccgagaggacgaagccccaggacccggaagagagggaaagaga

SEQ ID NO: 135342 - RNA, 73 nt, Homo sapiens
gaccccgaaagaccaaggcagccccgcacaggccccacgacgacagccagccgccaggagcaaggcagcgacc

SEQ ID NO: 135343 - RNA, 81 nt, Homo sapiens
caggcccagcgaccaccccgcgcagccaccggacgccgcaggagaggaccccaccacaaacagacccacacagccccggaa

SEQ ID NO: 135344 - RNA, 62 nt, Homo sapiens
gcggcccgccggcccggcgggcgcgggacgcgagaagacgaccccgacgcaggccaggagcc

SEQ ID NO: 135345 - RNA, 81 nt, Homo sapiens
agcccccgacgaaggaaggcggagaacaccgcaggcgacagggagacaacagcaaaacaagagaagagagcagaaccgacg

SEQ ID NO: 135346 - RNA, 85 nt, Homo sapiens
gagcccaaccgcaacccgcgccgcgccgcgccgcgccgcaggaggcaaagggaccccaagaaaccaaagggcaagagccgcagcc

SEQ ID NO: 135347 - RNA, 76 nt, Homo sapiens
ccacacggggccggcacagcacgcccggcaccccgaccagcaagcccggagaaaacaggacccggaaggaaacggc

SEQ ID NO: 135348 - RNA, 78 nt, Homo sapiens
cagagccaggcagcgcgaggcgcggggcgggagacgcgggagagcccaacacggggcgagcggaccggcggacaaaac

SEQ ID NO: 135349 - RNA, 99 nt, Homo sapiens
cggggggcgcgcaggccgcgacgagggcgcgagcaaacggggacagcgccgaccggaacagggaccacggaagcccaggaccagccccgacaagcccaa

SEQ ID NO: 135350 - RNA, 85 nt, Homo sapiens
gcgccggcggcagaccgacacgccggggcgcccgcgcgcggggaccccacgggcagccacagaagaccgggcccagacacggaca

SEQ ID NO: 135351 - RNA, 74 nt, Homo sapiens
cgaaaggaagcaagcagaagacacgaggagcagaagacagagggaggagggccacggacaaacacgggcccggc

SEQ ID NO: 135352 - RNA, 78 nt, Homo sapiens
cgacggacagagaagacgaacccccaaagagaaaaagaaagagcaagaacagaagagaaggcagaaacaaaaaaggga

SEQ ID NO: 135353 - RNA, 104 nt, Homo sapiens
gacgagaagccgaaaagcgcagcgagcggagccgccggagagagaggaccagaaccagaccggaaagcaccaggcaaagaaaaaaacaggagccaagaaggcca

SEQ ID NO: 135354 - RNA, 78 nt, Homo sapiens
gacagccaggaaggaacaagccaagaggacccgaagccacagccccaagacgagcgagaagcaccacaggggagagga

SEQ ID NO: 135355 - RNA, 63 nt, Homo sapiens
agggagaaaagcggacgccggggaggccaaaaagggagaaggcgcagacgggaaacgcgacaa

SEQ ID NO: 135356 - RNA, 110 nt, Homo sapiens
gagggcacaagaccgcaagcccagccgaaagaaggcaaccacgcgaacgccccacccgccggccggacacacgccccccccgccccacccccgcggaccgcagcccgcgg

SEQ ID NO: 135357 - RNA, 72 nt, Homo sapiens
gcgccccccacccaagggccaggggaaccaaagacccaaacgacccaggcagccgcaaagccagagacccac

SEQ ID NO: 135358 - RNA, 80 nt, Homo sapiens
ggggcgcgcccagagccccgcgcagcccagggaagcgaagcacaagaggacccccgcgacagaaacgggaagcggaggac

SEQ ID NO: 135359 - RNA, 73 nt, Homo sapiens
ggacggcgcgagggagagggacaagccaaggccgcgaggaaaacagcaagagagcagacgccaaagagacggc

SEQ ID NO: 135360 - RNA, 73 nt, Homo sapiens
gggcggggcagagcagcccccagccagccgcgaggaacacgaggacccaaagaacaaacccggagagaagaaa

SEQ ID NO: 135361 - RNA, 73 nt, Homo sapiens
aggaacagggaccacggggccacaaaagaagacccaaagcaccaacaaaaagcaacgagaacaaggacaaagg

SEQ ID NO: 135362 - RNA, 72 nt, Homo sapiens
acacgcaagaaagaccaaggggcagccaaggaacgaacgacgcccaagacccagacagccacgggaaccccg

SEQ ID NO: 135363 - RNA, 78 nt, Homo sapiens
gccggagcagacgcccgaagcagcgcacagggaggagagggcacacgacccgaaggaaacaggaagaggaacgccgga

SEQ ID NO: 135364 - RNA, 82 nt, Homo sapiens
cagaggggggcccgcgcccaggacaggcccaggagaggcgggagagagcagcaccgaagagccgaagcgacccagccagcac

SEQ ID NO: 135365 - RNA, 82 nt, Homo sapiens
cacgaagacggaccgacaagcgcagggagcgcgcgcccaccggaaaacacccgccggacgacccacaaagaccccaaaccaa

SEQ ID NO: 135366 - RNA, 56 nt, Homo sapiens
gcccccggagacagcggcacagagggccgccaggaggcagccaccagcaggaggaa

SEQ ID NO: 135367 - RNA, 75 nt, Homo sapiens
aggggacggacgcccccacgaccaagaagagaggaaaccaaaagaagacggaaaaaggccaaggaacacaaaaag

SEQ ID NO: 135368 - RNA, 80 nt, Homo sapiens
ggaagaggagggggaaagggggaccaggacgccggggaagggaaagaaaggagaaaggggcaaccggcccaccggacagg

SEQ ID NO: 135369 - RNA, 86 nt, Homo sapiens
agggcaaggcggcggacggcgcgcgcccgaggcgaggaggagcgcggcgggaaaaggacggaggccaagcaacagaggagaaaagc

SEQ ID NO: 135370 - RNA, 111 nt, Homo sapiens
agacagaaacggacacgaccaccaggccaacaacacagcagaaccgccagagaagaggaccagcaagacagaagacgacaaccggaacgggacaacccagaagccacagcc

SEQ ID NO: 135371 - RNA, 71 nt, Homo sapiens
gaccccacaagcccacagagaaaacaaaaaccaggccccaaggaaagaaggccaacagacagagcagcaca

SEQ ID NO: 135372 - RNA, 85 nt, Homo sapiens
gggccggcgcagacggccaaaggacgggacaaagggacaagaacccaagaaacaggaaaaaacccaaaacaccaaaaggaccagc

SEQ ID NO: 135373 - RNA, 54 nt, Homo sapiens
ccacaggaagccgagcaggacgcggcagaaacaggggcacgggcaagcgggaga

SEQ ID NO: 135374 - RNA, 37 nt, Homo sapiens
gacacccccaaaccaccaaggagaagccccggggaaa

SEQ ID NO: 135375 - RNA, 80 nt, Homo sapiens
gaagcccacggcggacgcaagaaccccggggacacggcccagacacgaagcaacgaacgccagagaagcaggaagaccag

SEQ ID NO: 135376 - RNA, 82 nt, Homo sapiens
cggcggcaagcggagaccccgcgagcggcgcgagcggcagcaggacaccccgggacgccaacaaggagagcagcaagacccc

SEQ ID NO: 135377 - RNA, 56 nt, Homo sapiens
aacagaggggaacgaaggggaaagcagcagacaaaggaggggggaaagcaaaggaa

SEQ ID NO: 135378 - RNA, 93 nt, Homo sapiens
gcaagagccaaaagacgcagagccccagggcggacagcagcccggggcaaccggagccccccaggaggacagacgaaacaaggaagcgcaaga

SEQ ID NO: 135379 - RNA, 77 nt, Homo sapiens
ggaggcaagcgccccgacccgcaggccagacccagagaaaggccacgcgagccaggcagggagccccagagagacaa

SEQ ID NO: 135380 - RNA, 61 nt, Homo sapiens
caaaaagccgaagcacagaaagccaccagggagaagaggagaccaccccacaggacaacgg

SEQ ID NO: 135381 - RNA, 55 nt, Homo sapiens
gcggggcccggacgaggaggaaacaaagaagaggcccgccaagcgcccccgggca

SEQ ID NO: 135382 - RNA, 77 nt, Homo sapiens
agacacacaacccgacccgacgagggggccgcacagagccagagagcacgaccagcaaacgggcaacgaaaccagca

SEQ ID NO: 135383 - RNA, 54 nt, Homo sapiens
ggccaggagcccacccgccgagcagcagacaggagcgcgaaaggggaacccaca

SEQ ID NO: 135384 - RNA, 71 nt, Homo sapiens
agccccgagagcgggaacaggagcccagaccgagaaccgggggaacgcgggcgccggaacgaccgggccga

SEQ ID NO: 135385 - RNA, 87 nt, Homo sapiens
ggaagcggccccagcaccccagcgcgcagggccgccaggggcgccggaaaccccccaggcaagaggcgcaggaccgggaagaccaac

SEQ ID NO: 135386 - RNA, 54 nt, Homo sapiens
ggggggcgagaccggcgcgacccgaccacccagcccgagagagacgcagcgcaa

SEQ ID NO: 135387 - RNA, 70 nt, Homo sapiens
gggacaacacagacccaccagcagaggaccagaccccacaagaaaacacacaaccacaggcccaagcaaa

SEQ ID NO: 135388 - RNA, 74 nt, Homo sapiens
gggcaaacccgccacgcgccgacgccccaaccaggccccccgcccagccacgcagcgaggacagcaggaaacac

SEQ ID NO: 135389 - RNA, 73 nt, Homo sapiens
gagaacagccagagaggagcggcagcccacaagcaggaagaccagccccaggagggaaacagagcacccaccc

SEQ ID NO: 135390 - RNA, 61 nt, Homo sapiens
agaccacgccaccgacaggcccgacagccggaagaagccagcgagaagaccgagaggccgc

SEQ ID NO: 135391 - RNA, 83 nt, Homo sapiens
ggcgcggcggcgccgcgcgcgcagggccgccggcccgcagccgccaccacccaggaccagaaggcggaggcaaggcacgaccg

SEQ ID NO: 135392 - RNA, 84 nt, Homo sapiens
ggcgacccggggaccggcccgcggcggcgcgccacccgccccgcagccacgacgccaccacacaaccgcagaagcaccacccga

SEQ ID NO: 135393 - RNA, 55 nt, Homo sapiens
agacgcgaaggacgccggccaaacccaggacaagagggaaagggccccaagagcc

SEQ ID NO: 135394 - RNA, 78 nt, Homo sapiens
acccccgaacccccagcccaaacccggaaacccagcggcccagccggacacggaacacgaccagccaccagggacccg

SEQ ID NO: 135395 - RNA, 86 nt, Homo sapiens
caggcagcgggccgccacggaggagccaggcccgcgagccagaaagaacggcgggggcacacagaaccaaaagccaggggaaggca

SEQ ID NO: 135396 - RNA, 69 nt, Homo sapiens
gaccgggacagaaggcagccgggacaggacgacaaggacccagcaggggcgaaaaaccccacaagggac

SEQ ID NO: 135397 - RNA, 61 nt, Homo sapiens
cgagcccagaaggcggcgaccgggcgcgggcaaggcgggaaacccagacgacaaggaaggc

SEQ ID NO: 135398 - RNA, 81 nt, Homo sapiens
cgaccgagcaggggcgggccaagccgaacaccggccccagcccacccgaggggccaaccagggcgcgagcggccaggcgcg

SEQ ID NO: 135399 - RNA, 66 nt, Homo sapiens
cccaacccaccggaagcgcacaccacaacagcacaggcgacagaaaccaagcggaagaggcgggcc

SEQ ID NO: 135400 - RNA, 73 nt, Homo sapiens
gcagcccgcaggacagcggagcggcaacgcccacaaagagggaccgcaggggaaaccaaaaccagagaagccg

SEQ ID NO: 135401 - RNA, 78 nt, Homo sapiens
gcgacccagagcggccacgaccagggacaacaccgccaacggaggggacgggaaaccagcaacggggcggggacacag

SEQ ID NO: 135402 - RNA, 85 nt, Homo sapiens
aaacagcagcacccgagcaaaccccagcaagagcggaggcgcccggcggagcagaggaaccacacgcgacagaaagccagacaca

SEQ ID NO: 135403 - RNA, 73 nt, Homo sapiens
gacgacaaaccccaccagccaggagcgcacccagcgcaggcccccacagagagcacacaaacaaagcgaaacc

SEQ ID NO: 135404 - RNA, 83 nt, Homo sapiens
ggggcggagaccaggagaccccacggagcgggcgacgagcgacccgggagacacgacgcagcaggaggaccaggacacacccc

SEQ ID NO: 135405 - RNA, 54 nt, Homo sapiens
cagaacccccaggaggaaggaacggccaggagaacaaccagcaccgggacccaa

SEQ ID NO: 135406 - RNA, 80 nt, Homo sapiens
ggaacgggggagcccacaggagccagggcccgggaggaagccagaaagcgaagacgcggaggacccgaccagaggagagg

SEQ ID NO: 135407 - RNA, 73 nt, Homo sapiens
gcagaacaaacaagcacaccgcaacaaaaacaccagacccgccgccaggaagggacgacaccagaccaccaag

SEQ ID NO: 135408 - RNA, 72 nt, Homo sapiens
aggagaccaagaaacagcagagggagagccaggagaagaagccaagaaggaagggcagcacgagaggaccaa

SEQ ID NO: 135409 - RNA, 122 nt, Homo sapiens
ccaaggaaaagaaagcagaggggaaacagagcaaaggagacaggaagccagaagagcccgaggagagacaggaaggccgaaggagagaaaaaaaccgaggcgccagagaagcggaagaagca

SEQ ID NO: 135410 - RNA, 73 nt, Homo sapiens
gaagaaccaccaagaaaacgcgaccgccagaagcagcgcgacggagagccaagcccggggaagaagcacacaa

SEQ ID NO: 135411 - RNA, 72 nt, Homo sapiens
agagaggaacggaacggacccaccaggaaagcgagaaccccgaacagaggagccaacagaacgacacgcaag

SEQ ID NO: 135412 - RNA, 90 nt, Homo sapiens
gagccgcagcccgagcccagaaggcggcgaccgggcgcgggcaaggcgcgacccccaggaaagcagcggaaaacaagagcaggaaggaag

SEQ ID NO: 135413 - RNA, 60 nt, Homo sapiens
agaaagaagagaaggcccccccccagcccgagaccccggggggaccgaccccggacggga

SEQ ID NO: 135414 - RNA, 68 nt, Homo sapiens
cgacgacacggggccgagagacggaaggacgcccagcacacagaccaggagagagagaaacaccgaaa

SEQ ID NO: 135415 - RNA, 77 nt, Homo sapiens
gcgacaggaggagacaggcgagagaggaggacacgaccgaaccaagccgccacagggagaaaagagcagaggccgac

SEQ ID NO: 135416 - RNA, 76 nt, Homo sapiens
aacggccacagaggaagccaaaagcggcccgaaggacccgcaacaggcacgcagcagcacacgagaagccaaggca

SEQ ID NO: 135417 - RNA, 77 nt, Homo sapiens
gcgccaacgaggagagcaagcccaggcaccaccgagaaccagccaagacgaccagggcgaaagagaggacacaggca

SEQ ID NO: 135418 - RNA, 71 nt, Homo sapiens
aggagaagaaaggagaagaagaccgagaggaacaaagacaggcggaccggcgacccaacggagaaacgccc

SEQ ID NO: 135419 - RNA, 69 nt, Homo sapiens
cagcccgggggagggaggagagaagcgaagacacacgcgcgaaggagaaggacggaaaagaacccagaa

SEQ ID NO: 135420 - RNA, 75 nt, Homo sapiens
agcagaaacacaaagcagcccaaccaaagggccggaccgcccagcggcccgcgccaaccccgcccccaggaccga

SEQ ID NO: 135421 - RNA, 75 nt, Homo sapiens
aaggcacagcagagggggaaccgcggcgaaccggcgggaccccaaggcggagaacggaaaagcaccaggaagcag

SEQ ID NO: 135422 - RNA, 71 nt, Homo sapiens
gcgagcagggacagccaagaaccaaaaaggaccacgaagccgggaccagcggagaacaccaccaaacaaac

SEQ ID NO: 135423 - RNA, 86 nt, Homo sapiens
agaaagaccgacgaaaagaagaaagaaccgcaaacacgcagaacagcccgaggcaagagaagaaaggaaagaggagcaagcaacag

SEQ ID NO: 135424 - RNA, 71 nt, Homo sapiens
caagcaagaccagcagagaggaaaaacacaacccaagaaacggagaggcccgaagagaggaagggcaaggg

SEQ ID NO: 135425 - RNA, 35 nt, Homo sapiens
ggaaccagcaacaagccagagccgccgacccaggc

SEQ ID NO: 135426 - RNA, 73 nt, Homo sapiens
gaccaagcccagagaagagaagcacgggccagcccaaggcacgacaaaacgagaaacagacaggcccgccccc

SEQ ID NO: 135427 - RNA, 79 nt, Homo sapiens
gacacaggaccacgcgaaggggagccacaaacgagagaaaggagaaaagaggcgcggaccaggggaaggcaaaaggccc

SEQ ID NO: 135428 - RNA, 87 nt, Homo sapiens
cgcccagggccgcgccccccaggcccacaaccagcccagcagcagcaagcaggagggccagacaaggggaacacaagaggagagaag

SEQ ID NO: 135429 - RNA, 68 nt, Homo sapiens
gcaacggagaagagagaagaaaacgcaagaccgaaaaaaaacggcaggagccaagaaccgaagcaagc

SEQ ID NO: 135430 - RNA, 69 nt, Homo sapiens
cagcggggcagggagcaaacgagcgccaacggagaaaaaaaggagaggcgagacgaccagaaaaggcag

SEQ ID NO: 135431 - RNA, 49 nt, Homo sapiens
agggcaagaaccaggcccgcccaaggcaggacacaaccaggaagaaacc

SEQ ID NO: 135432 - RNA, 77 nt, Homo sapiens
cagggaagaccagaaagccccggagagaaaaggcgagcggaagaagacagcaaggccgccagcaaccaaagaagaga

SEQ ID NO: 135433 - RNA, 79 nt, Homo sapiens
gggagcccaccacgcagcccgcgggcacgacccagccgaaaaaggaagagccaccccaagaggggccgagcgaaggcaa

SEQ ID NO: 135434 - RNA, 55 nt, Homo sapiens
gacaccacaagaagggcgccaggacgaaggacagagagggacgggcagacgcccc

SEQ ID NO: 135435 - RNA, 86 nt, Homo sapiens
cgggcacaaagcacgaggacgagaccaaagaagcccagaggcccaccccacgggaggaaggcgaggccaagaccccggaagagagg

SEQ ID NO: 135436 - RNA, 71 nt, Homo sapiens
cggcccaacaagaggacggcggacacagagcagcaggagaacaaggagcggcccagagcaaaacagaggaa

SEQ ID NO: 135437 - RNA, 62 nt, Homo sapiens
gcgcacagccacccgggcggcgccccccaccgcacggcacagacagccgcccaagcacaggg

SEQ ID NO: 135438 - RNA, 67 nt, Homo sapiens
acaggaaaaacccagccagacgagcaagaagacaaacaagggaaggccgcacaggccaaggaggaca

SEQ ID NO: 135439 - RNA, 77 nt, Homo sapiens
cggcgccagagccgagcaggcacagagacgaagacccggagcccagggaggcgccccccgaagcgccacgcccagcg

SEQ ID NO: 135440 - RNA, 73 nt, Homo sapiens
agaggccacagcccggacccacgaccccccggccagacagcgacaggaagggaggagcccacgcagaccagag

SEQ ID NO: 135441 - RNA, 82 nt, Homo sapiens
cagagcaccagcaccagcagagaaccacggagcaggacccaggcagaggaggccggagcccaccacagaccccacgccggag

SEQ ID NO: 135442 - RNA, 80 nt, Homo sapiens
gcgccagaaaggaaacaaacacgacggaggggcgagagaagaagagccaaagcccaggacggggaaacagcagagagcag

SEQ ID NO: 135443 - RNA, 73 nt, Homo sapiens
gcagggccacgagcaccgcgccggcccagcaccccgagaaccgcaggagccagagcggggggcccgggcacac

SEQ ID NO: 135444 - RNA, 77 nt, Homo sapiens
cccgaagaaaagggaaaacgcgcgggccaagggaagcgggagaggccacccgcccacgagcggaagaaccagcagaa

SEQ ID NO: 135445 - RNA, 79 nt, Homo sapiens
agaacaaaaagaggcgaaaaagcaagggagcaacaagaagcaacaggaagaggcacagacagcccagaagaaaagaggg

SEQ ID NO: 135446 - RNA, 63 nt, Homo sapiens
gacaccgagggcccccaaaaggaccccgagacagacaagcacacagaggaccagagcccgaca

SEQ ID NO: 135447 - RNA, 94 nt, Homo sapiens
ggaagcgaaaacgaccgggaccggcaagccgaggccacaagaggaagcgaagaagaggacgccgccagcgagccagcagggagccagcaacgag

SEQ ID NO: 135448 - RNA, 75 nt, Homo sapiens
ggacggcccaaggccagcccgcagagaagacccagggcccccagccggaaaacgaggccgaaagacggggaagca

SEQ ID NO: 135449 - RNA, 81 nt, Homo sapiens
caccgccccaggacagcaccagcgggccggaggagccagagcgcagaaagacacgaagacgagagaagaagaagggaaaac

SEQ ID NO: 135450 - RNA, 57 nt, Homo sapiens
agacgacgcgcgggccgcgagcggggcgacccgaggcaaaccgacaccagcgacaca

SEQ ID NO: 135451 - RNA, 65 nt, Homo sapiens
ggaggcgagagcaggagccgccaccagcgcacaaggagaaacaggcgccaaacgacagagacccc

SEQ ID NO: 135452 - RNA, 63 nt, Homo sapiens
gcgcggccgccgcccccgcccaggacccaaggccagccagccccaggcaccagcggacaggac

SEQ ID NO: 135453 - RNA, 52 nt, Homo sapiens
gcggagcccgggaacggccaccccggcgggagccagcaggccaagggaaaag

SEQ ID NO: 135454 - RNA, 74 nt, Homo sapiens
agcccacacaaccccaacgcagggccgggcggagaaaggaaggccacaccaggccccccacgcaacaagccccc

SEQ ID NO: 135455 - RNA, 82 nt, Homo sapiens
cgaacgcaaacgaacacagcaccgggagccgcagaccggcggcgcggaacccggacgagacagcagccgggcagaacaccag

SEQ ID NO: 135456 - RNA, 72 nt, Homo sapiens
aagagcccccagcgcacaagaccaaaggaacgggcacaaccacggggcagggccccacagccacgagaagcg

SEQ ID NO: 135457 - RNA, 69 nt, Homo sapiens
gccaacacagccgccagggaacacaccacacagagggacacaacccgccacgcggagcacgccaaagga

SEQ ID NO: 135458 - RNA, 75 nt, Homo sapiens
gacagacggacaacagcccaacaacacccaggcagagcggcgggaaaccaccaacaacacccccaaaccaaaaca

SEQ ID NO: 135459 - RNA, 84 nt, Homo sapiens
gccgaggcccaagcccgcggagcacccgccggccagagaagagaacagacccagcgggaggaagaagaggccgccagcagcaga

SEQ ID NO: 135460 - RNA, 36 nt, Homo sapiens
cgagacgcggcggaccgacaaccgagagaccaagac

SEQ ID NO: 135461 - RNA, 84 nt, Homo sapiens
gcggcaaggaccgagcagccccgccacccggacaccacccggagcgagcggaccaggaggcacacgccgaagagacgcgggccc

SEQ ID NO: 135462 - RNA, 79 nt, Homo sapiens
ggggacggccgccccgcggccaacccgccgaaaaagcgacaaggagagggacaaggggagcggagaaggaggaagccag

SEQ ID NO: 135463 - RNA, 56 nt, Homo sapiens
gcgagcgaggcggagaagggacacggcaggcgccagacccaggggagccacaaaaa

SEQ ID NO: 135464 - RNA, 67 nt, Homo sapiens
agcggagaacacacagcggggggggcacagagaggggagaagagcgagacgagaaagaagaggaaga

SEQ ID NO: 135465 - RNA, 65 nt, Homo sapiens
cccggcgaaaggcagacaaggcaaccagccagagggcaccggcaacccacaggccggcgcaacag

SEQ ID NO: 135466 - RNA, 67 nt, Homo sapiens
aaaggcaaagaaaagaaggaaaggaaaaaagggccagggaacccccgcaaacggaggaagagccccc

SEQ ID NO: 135467 - RNA, 52 nt, Homo sapiens
acagaggggcgacggcagggaggagaaagagccaagaaaaagaaaggaaagc

SEQ ID NO: 135468 - RNA, 84 nt, Homo sapiens
ggagacggccagacaggaacaagacccggacaccaggccacagccgggaagcagagggagaaagggggcaggaggggaagagag

SEQ ID NO: 135469 - RNA, 41 nt, Homo sapiens
ccggacaacgcggcccacgacgacgcagccagagcagcaag

SEQ ID NO: 135470 - RNA, 80 nt, Homo sapiens
ccgagccacgcaccggccagcagcccgccaggcccagcgagcgacggcaaaagcaggcaacaacggccagcccagggaga

SEQ ID NO: 135471 - RNA, 37 nt, Homo sapiens
agggaagggggcaggccccaccaggcggggaagagcc

SEQ ID NO: 135472 - RNA, 83 nt, Homo sapiens
caccgcaagcaggcaaagacggcaaaagcacaaggaccgcggacagagacaacaccgagagagaagccccccggacagccaga

SEQ ID NO: 135473 - RNA, 71 nt, Homo sapiens
cccaccacaggcagaccacacccacagaaggagagcaaaggagacaggccacccgcagccgcccagccgcc

SEQ ID NO: 135474 - RNA, 45 nt, Homo sapiens
cccggggcgaccgcgcgcaaaggcccacacgcagccacgcacagc

SEQ ID NO: 135475 - RNA, 85 nt, Homo sapiens
aagaagaccagcgacaaaagagaaacccggcagaaaacccgaggagagagcccaaaagagccaaagccagcgcaaacagccgaag

SEQ ID NO: 135476 - RNA, 72 nt, Homo sapiens
ggacagacaaaaaagaggggcagcgccgaggagcccagagggaacccaccagaaaacgacacacaaacgcag

SEQ ID NO: 135477 - RNA, 58 nt, Homo sapiens
agccacgacacaacacggagcaggaggcagcagaaaacaaagccacggaaaaacgccc

SEQ ID NO: 135478 - RNA, 72 nt, Homo sapiens
acaagaagagcagacaaaccccagaaaagagccagcagaggccaaggcagcagcgaagaagaaagggagcga

SEQ ID NO: 135479 - RNA, 76 nt, Homo sapiens
ggagggccgagggagggccgagccagccgcggccggaggagcccccaggccgcagacggacagacggggagaaggc

SEQ ID NO: 135480 - RNA, 77 nt, Homo sapiens
agggcaaaccagaaagacggcccgaaaagaaagcgaacacacaaaacaagaaaaggcacgcaaacccacaagaacgg

SEQ ID NO: 135481 - RNA, 82 nt, Homo sapiens
aggcggagcggggcccgacgaacagaaaggccccggagcagcgcgacccccaggaaacacgaggcagacggcggccaccacc

SEQ ID NO: 135482 - RNA, 81 nt, Homo sapiens
cgcgcgaccacgggcccggcgccggcccccgccgcccggcgaggaaaaccaccacacaggggaaacacccagacaacacac

SEQ ID NO: 135483 - RNA, 74 nt, Homo sapiens
gcgacggccccacccccgagcccagcaccgcgggaagagagacacaccaacaaaggcagcgcgacagagaaagc

SEQ ID NO: 135484 - RNA, 82 nt, Homo sapiens
acaccaggcagcccccagcagcagaccggaagaggccagcagcgaaaaaccacgcggaaaggaagagcggacggcgagcgac

SEQ ID NO: 135485 - RNA, 56 nt, Homo sapiens
ccagggcagccgaccggaccacagccagcagaaccgacagaggacgcggagacaca

SEQ ID NO: 135486 - RNA, 75 nt, Homo sapiens
caagcaggaccacccaccagccaccaggagagaacagaaagaccaagcagaagagaggacaaagcaccgggcagg

SEQ ID NO: 135487 - RNA, 84 nt, Homo sapiens
gcggaggccccagggaagcgcagaaagcaggcgaacccgcggcgcaaaacgcccgaaaccgggccgaagacgcacacggagcag

SEQ ID NO: 135488 - RNA, 73 nt, Homo sapiens
cggggaaccgcgcgaaacggcgacagaagcccccagaaggaggaggaggaagaagagagacaccagcagaaac

SEQ ID NO: 135489 - RNA, 80 nt, Homo sapiens
aacagccaggaggcgaaggggggcggggggaaagagccccagcaccgccccccggaagaaggaagagaccgagggagacg

SEQ ID NO: 135490 - RNA, 78 nt, Homo sapiens
cgacagcccgcccaggaagggacccgagcacggaagccccaaagccgccgaccggaaggaaacgcgcccgcagagagg

SEQ ID NO: 135491 - RNA, 78 nt, Homo sapiens
cgaagccacccagggaccccaagcgacgcacccgaagagcaccccggcacaaagcagaccgccccacgggcgcgcccg

SEQ ID NO: 135492 - RNA, 37 nt, Homo sapiens
cccccggcacgacaggacggcaaaagcagaccggaaa

SEQ ID NO: 135493 - RNA, 75 nt, Homo sapiens
caacaccaaggcacaccaccccagagccggaggaaaccacagagcagccagcagaagggagaaccaaaaggaaaa

SEQ ID NO: 135494 - RNA, 78 nt, Homo sapiens
ggcaggaaaccgacagccacacccgacagagccagaggacaaaacccagccggcacaaaccaggaaaggaagccggag

SEQ ID NO: 135495 - RNA, 84 nt, Homo sapiens
ccgccgcccgccacacccgccgccagggaacgaagcccaaaaggcagagacggaccgagacaggagagcaggggcccagccacc

SEQ ID NO: 135496 - RNA, 81 nt, Homo sapiens
gacgccagcgggacgaggaccgagaccgcggccgggaccgaggcgggaggccaccgccccaccagcaggcaacgccacaga

SEQ ID NO: 135497 - RNA, 73 nt, Homo sapiens
gcgaagaggaacaagggcggagaagacaagaaccaaaggggccgggaaccgcggcacagcggacagacaaggg

SEQ ID NO: 135498 - RNA, 66 nt, Homo sapiens
aggggacccgcagaaaggggccggaacgcccgacacacagggccaaaagggcaaaaagggagaaga

SEQ ID NO: 135499 - RNA, 78 nt, Homo sapiens
ccagccaaaacaacggaaaacagcgacagggcacccgagaggaacacagcagagaagcaggagacgaacaacggaacg

SEQ ID NO: 135500 - RNA, 78 nt, Homo sapiens
cgcgcaggcggagacagcgggccgcgcgccggccgggggccagagacgccaggaagacgaaaggcacgagcgagaccg

SEQ ID NO: 135501 - RNA, 76 nt, Homo sapiens
ccagaacagcgaaaccagcacgccccggaggacccccagcaccacggagcccaccgcggaaccccacacacggcgc

SEQ ID NO: 135502 - RNA, 87 nt, Homo sapiens
cacggaggaggacgccgcaaggaacagcgacaccaggccagccccaaagcggcggagaacccggacggagcacagaccagcgcgcga

SEQ ID NO: 135503 - RNA, 70 nt, Homo sapiens
aacgccaggacaaaaacaaagcgcgcagaaagggcgaccaccaaaaaaacgggcacccacagaaggagaa

SEQ ID NO: 135504 - RNA, 71 nt, Homo sapiens
agcgagcgagggggggcgcgccggaaaccggagcgcgcagcaggcaaaaccaggggaccagagcgaaagaa

SEQ ID NO: 135505 - RNA, 68 nt, Homo sapiens
ggaggcgcgcgccagcaaccaaagcggacagcaacgggcacaagacccgagaagcaaacggccgcggc

SEQ ID NO: 135506 - RNA, 56 nt, Homo sapiens
gccgcagcgcagaacaagggccaaaggcggagcacacaaaaaacagcgccgcccgg

SEQ ID NO: 135507 - RNA, 79 nt, Homo sapiens
cgccgcgccccgcgcgcgggaagcagcaccaagcacggccaacgccggcacaggcggaaacggcccagggggggccgaa

SEQ ID NO: 135508 - RNA, 72 nt, Homo sapiens
aaaccggaaggagaaggccaccgggggagcggggggacaggaaagcagaccacagagaagcaggcgaccagg

SEQ ID NO: 135509 - RNA, 64 nt, Homo sapiens
aaaagggaagcgaaaccaaccagaagccgagaaggccaagcaggggacagcacgagggcagcac

SEQ ID NO: 135510 - RNA, 78 nt, Homo sapiens
cgcagccaagcccggaagacgcgaccgggcaccggcgggaggagcaagaggggggggcccccccgaagaaaggaaccg

SEQ ID NO: 135511 - RNA, 76 nt, Homo sapiens
gacaagaaaaaaaagcacagcaaaaagcagagacaagccggagaacgcccagaccgaaaaccagaaaacgaaaaaa

SEQ ID NO: 135512 - RNA, 65 nt, Homo sapiens
ccgaacacggcgaccagcgaacagcccaacggggagacagaaccggacgaggacggggcacgcgg

SEQ ID NO: 135513 - RNA, 102 nt, Homo sapiens
aaaccgcagagcaacgcagcacaccccacggagaagccacaggaagcggggcgagagagcccccaccgaccagaagaggcgggggagcccgcagagcaagca

SEQ ID NO: 135514 - RNA, 84 nt, Homo sapiens
ggaagagaaagaccgaggcaaagaagcaggagcacacaaagaacagcggcagacggaggagaggcgaggggagaaagaagacag

SEQ ID NO: 135515 - RNA, 106 nt, Homo sapiens
ccgaccaagacagagcaaggccacgacccacgagacaggggcccaagaaaaagcaccggacgagaaggaagccaacaccggagccagaaagccgaacccacggcca

SEQ ID NO: 135516 - RNA, 51 nt, Homo sapiens
gcccccagcggcaggagaggggaagagggaaacagagaagggcaacccgca

SEQ ID NO: 135517 - RNA, 82 nt, Homo sapiens
gccgccgaccccccggcgccgcgccggcggcggcacacggcacagcaggagaccaacaagaccagcagccagcgccagcccg

SEQ ID NO: 135518 - RNA, 76 nt, Homo sapiens
aggggcggagccgcgccgagcgcgcggagaaccagagaagccgggggaagaaaacgccagagaagcagagcagccc

SEQ ID NO: 135519 - RNA, 63 nt, Homo sapiens
ccgcgccccagcccgagccagggcgagaccgggaaaaccggaggccagcccacccagagaggc

SEQ ID NO: 135520 - RNA, 69 nt, Homo sapiens
cagaaaggcgggaaaaaagcacggcagcgcgcgccacgggccaacaggaggagagcaaaagacaacacc

SEQ ID NO: 135521 - RNA, 80 nt, Homo sapiens
gggccagccgcagcgcaccccgcgcacaggggcagaacccccgagcggccccccagaccagcccgaccacggagaccgac

SEQ ID NO: 135522 - RNA, 63 nt, Homo sapiens
gaccccgggcagagcgaaagcaacagagcacagggcagaaaggacaggaagccaaacaggccc

SEQ ID NO: 135523 - RNA, 35 nt, Homo sapiens
agaaaccaaaagggccagacagcacagaacgggac

SEQ ID NO: 135524 - RNA, 99 nt, Homo sapiens
cggaacagagggccaaacaacagcaaaacccaaagagaaaacccacaggcacaccaaagggaaccaagaagggacccaaaaagacggacagcccacggg

SEQ ID NO: 135525 - RNA, 82 nt, Homo sapiens
cggggggacggggcagcggggacgcggggccgcggcgccggcagcagagaccaccagaaggaaagacccggaagcaagaaga

SEQ ID NO: 135526 - RNA, 85 nt, Homo sapiens
gagccccccggcgggagccccgcgacgcgcccggcccggagcccccagcgcagcggccgcggagcacccacgggaacagcccaga

SEQ ID NO: 135527 - RNA, 81 nt, Homo sapiens
cccagcggagacccgccgcaaacagcccgccagacacggcaggccaagaagcaccgagcggaagcgacaaaaccagcagcc

SEQ ID NO: 135528 - RNA, 83 nt, Homo sapiens
acgaggcggggccaggccagcagcagaacagaagaaaaacccaagccggaacacagcgagggagacgcacaccgaaagcgaag

SEQ ID NO: 135529 - RNA, 86 nt, Homo sapiens
agggccggaaaagccaacgccggcgaaggagacgggcagacaacgaacaagcgaagaaccagcagcaagacaacggagagaaaaga

SEQ ID NO: 135530 - RNA, 60 nt, Homo sapiens
gacggcggcgcggagaaggcaggagacagacccagcacggaccccccccccagccgggcg

SEQ ID NO: 135531 - RNA, 32 nt, Homo sapiens
ccgaggagaccaggccggacccgaaaacacaa

SEQ ID NO: 135532 - RNA, 83 nt, Homo sapiens
caggccgcggaaggagaccccgaaccagagcgaggaagaagaagagaggaggcgaggacgggagcccaacaaaccacagagaa

SEQ ID NO: 135533 - RNA, 71 nt, Homo sapiens
gcaccgccagggaagaaacggggacagccaaagaccggagcggagagagaagaaacaggccacagagaaca

SEQ ID NO: 135534 - RNA, 70 nt, Homo sapiens
ggaaaaaccaggacacaaccaaaccaccagccagccccaggcaggaggagaccggaagagcgaccacgcc

SEQ ID NO: 135535 - RNA, 67 nt, Homo sapiens
cagggcgcccagcccgcagaaacgaggcggaggaagaaggcgaaccgcgcgcacaaagagcacaacg

SEQ ID NO: 135536 - RNA, 87 nt, Homo sapiens
cgcagcccacccgggcagccccacccggcgacaaacgggccacaaagcacggaacgaaaacgagggaccacacaaagacagccacag

SEQ ID NO: 135537 - RNA, 77 nt, Homo sapiens
ccaagagcccacggacaccacccaacgggaggaacaggagcaccacgagagaggcaggaagacaaacagagagcgca

SEQ ID NO: 135538 - RNA, 80 nt, Homo sapiens
caaagcgaacgaagagcaccgggagcggcgaagaggcaccggaggaggacagaccacacgcggacaccaaggcgccaggc

SEQ ID NO: 135539 - RNA, 72 nt, Homo sapiens
ccggagagcaaacaacacgacggaacccagaaccgcgggcagcaagaaccaccaaacaaggacaggagggaa

SEQ ID NO: 135540 - RNA, 71 nt, Homo sapiens
aaacacccccgggaacaggaggaccggagcacgggggcacgccgcgaaagaccgaggccccacgagcggac

SEQ ID NO: 135541 - RNA, 78 nt, Homo sapiens
ccggccacaaagcgaacaaagaaagggaagagacacaagggaacgggaacagccagggccccaaagcaaaacgcggag

SEQ ID NO: 135542 - RNA, 79 nt, Homo sapiens
gccacagcccggacccacgaccccccggccagacagaccacggcagagagcccaaggacacacacccggagagcacagc

SEQ ID NO: 135543 - RNA, 78 nt, Homo sapiens
cgggaaggccccaaccgagagaccagcaaggaaccaaagcacacagagcaaggcaaccgaccagcgagaaacacacca

SEQ ID NO: 135544 - RNA, 72 nt, Homo sapiens
cgaggggcccgccccccgagcgacggaccgggaacaccgaggacaggagagacaacggaggcaagaaagacg

SEQ ID NO: 135545 - RNA, 77 nt, Homo sapiens
gcacagcacagaggggcagccggagagccgggaaaggaacagggaagagccaggccggcggggcacgcccgaacgga

SEQ ID NO: 135546 - RNA, 68 nt, Homo sapiens
acaggcacgccccaaaacagacgcaacgagaagcgggggacagagggcacaaacagacaaacagacaa

SEQ ID NO: 135547 - RNA, 62 nt, Homo sapiens
ccgccgccgccgccgcagcgggagggcgccaccacagggcggagaacggaaaagcaccagga

SEQ ID NO: 135548 - RNA, 86 nt, Homo sapiens
caagagcgacgccgccgggcccaacggcgggccccggcgaggcagcgcggccgcagcagcccgggagccacgaagcccccacccac

SEQ ID NO: 135549 - RNA, 75 nt, Homo sapiens
cggggcagccgaccacggacggggggggccgcacagaaccagagaaccccaaagacaaaagagcgaaaacaggca

SEQ ID NO: 135550 - RNA, 81 nt, Homo sapiens
cccgcccggcagccaccccacgggaacagaaggccagccagaagaaccaaagcacggaccaccagggaaggaccgccggac

SEQ ID NO: 135551 - RNA, 70 nt, Homo sapiens
acccgcccggggcagcaggacaaggcacgaggcgcggcgaccaccacagcagagcccggcgaaggaggag

SEQ ID NO: 135552 - RNA, 75 nt, Homo sapiens
agccaaggaggagaggaggagagcacagacgccaaaaaaaagagggagcacaggaggaggaagacccaaacacaa

SEQ ID NO: 135553 - RNA, 67 nt, Homo sapiens
ccagcagcaggaacaagacaacagaccccaaacaacccgcccagccgacacggccaccggcccgggg

SEQ ID NO: 135554 - RNA, 54 nt, Homo sapiens
agaggcggaagagaccagaagcgcaacaacaacggaggagggacacacgacagg

SEQ ID NO: 135555 - RNA, 85 nt, Homo sapiens
caggcaccggggggcaacacccgagaacggcgggaagagaagacacgagcacaaacggcccagcgagagccagccggaggaccca

SEQ ID NO: 135556 - RNA, 76 nt, Homo sapiens
cagaagcggaggagggaacacgaacccccggggaacgagggcacccaggacgcagacgaacccaagaggggcaccc

SEQ ID NO: 135557 - RNA, 72 nt, Homo sapiens
cacggggcgggcgggggaggcgggggagcgcgggcgagccaagcagcgggcggacgcccagccgggaacaga

SEQ ID NO: 135558 - RNA, 90 nt, Homo sapiens
ggagaaaaggccaagaaggcaggggcaaagaaaaaggagagaaaaagaggcaaaacaacaagaagaaaagagaaaaaagagagcgaagac

SEQ ID NO: 135559 - RNA, 80 nt, Homo sapiens
gcggggggccgagcaaccagaaccggagcaggaggcgcacaacacccagcgcgccgcgcgccgggagaggcccggggccc

SEQ ID NO: 135560 - RNA, 57 nt, Homo sapiens
cgcgacccagccccccacccaacgcggcagaaccagagaccacagaagaaggaaggg

SEQ ID NO: 135561 - RNA, 75 nt, Homo sapiens
cacacgccccaaggagggaccaagagaagacccagccccaccacacaagccagcagcagccgggggcagacaagg

SEQ ID NO: 135562 - RNA, 74 nt, Homo sapiens
cgaagggcagacgagcgggcggagcaggcgccgacaaccacacaccaaacgagcagagcaaacaaccaagacgc

SEQ ID NO: 135563 - RNA, 57 nt, Homo sapiens
ccaaacggaggagccagacccggggaggcgcacacacaccaaagaagagagaagaag

SEQ ID NO: 135564 - RNA, 71 nt, Homo sapiens
cggccaccaagcagaccggaaggcgcaaaggcccaggccacaccaacaagacaagaaccaaacagaaccca

SEQ ID NO: 135565 - RNA, 79 nt, Homo sapiens
gaaaacaaaagcgcacaggaagaacaaaggaacccgggcggggccggacggggggagaaggaaaagggacaaagcagcc

SEQ ID NO: 135566 - RNA, 71 nt, Homo sapiens
gccccggggacaccagcagccgcgcggagcgggaggaggaccgaaagcgcaccaccgggaaggcagccaga

SEQ ID NO: 135567 - RNA, 76 nt, Homo sapiens
caccgggaaggggagcgggggccgcggcgcgacaggaacggccagcaagggggcacacgggcaggacacgcacacg

SEQ ID NO: 135568 - RNA, 80 nt, Homo sapiens
gccaaggaaaaacgagcagaaagaagccaggagcacccgcccccacacgaacccgacacacagcaaagcgaaggagaacc

SEQ ID NO: 135569 - RNA, 85 nt, Homo sapiens
gcgcgccaccgcaaaggcccgcgcaccgccagggaagaaacggaacaacaggcggaagaggccgaaagcacaccgaaggacacgc

SEQ ID NO: 135570 - RNA, 84 nt, Homo sapiens
ggcaaggagagcccaaggccacaggaagccacagcaggccaccagccagaagacccaacagaggacgggcaccccacgaggacg

SEQ ID NO: 135571 - RNA, 71 nt, Homo sapiens
agacgcagggcgcccccggacacagacaccggaccgaggccaagcgcaagacacgggaaccagaagccaaa

SEQ ID NO: 135572 - RNA, 65 nt, Homo sapiens
acaagcggacccgcccaacacaggcccaacaagaaggggaccaggcggcggaaggcggaaaggac

SEQ ID NO: 135573 - RNA, 54 nt, Homo sapiens
cagggagacgcgcggcccggcccggcggggaaagggaagcggacggacaccccc

SEQ ID NO: 135574 - RNA, 36 nt, Homo sapiens
gccgaagcgagcgcgggaagagcaccgcgcccaggc

SEQ ID NO: 135575 - RNA, 77 nt, Homo sapiens
cccccggggcaacccagacggcaacaaaggcgaggcgggcaacacaacaaggcgcggacacccagacaagcgcgcca

SEQ ID NO: 135576 - RNA, 85 nt, Homo sapiens
gccagacgacaagcacacacaggcgcgaaacggaaaaagggcagaggccaagaccggcccaagaaggagaaaagaagcgaggcgg

SEQ ID NO: 135577 - RNA, 82 nt, Homo sapiens
ccagagcaagcacgacgcagccaccgcgggacgcggcaacgcacaagaaagccgacccccaagcaaaccggaccccacgagc

SEQ ID NO: 135578 - RNA, 77 nt, Homo sapiens
aggccggccgggacccgaggcgagaggcgcggcgaccagggaaagggagcagcaccggccacacccacagcacgacc

SEQ ID NO: 135579 - RNA, 68 nt, Homo sapiens
agacccgcacgcagaacgcaggaacagaggagcgcaaagcgggccagacacgaagaggccggcgaagg

SEQ ID NO: 135580 - RNA, 81 nt, Homo sapiens
ggagaaaccacccaaggcccaaaagcgcaaaccaccaaaaacaacacccagaaagaggggaccaaaacaaaacgagagcaa

SEQ ID NO: 135581 - RNA, 70 nt, Homo sapiens
acgcccccaccaccgcaaacacacacccgccgggcaaacggacccccgcccgaccgcccgcccggaaaag

SEQ ID NO: 135582 - RNA, 105 nt, Homo sapiens
ccaggaaaaagacagcccgcagcacgaccagcaggaacgcaacaccccaacaggccacccgccgcccgacggggcccgcaaccggaccagcaggagcgggaagca

SEQ ID NO: 135583 - RNA, 80 nt, Homo sapiens
ccccggaggcaccccagcccccgggaggcccacaggcacacggaggaaaaccgaacaaacgaccagcacgcccagaaccc

SEQ ID NO: 135584 - RNA, 75 nt, Homo sapiens
gcgggcccgaggagggggaccgaagacgaccgacccgcccagcacgaccagccagcagggccccgaagacaccgg

SEQ ID NO: 135585 - RNA, 49 nt, Homo sapiens
aaaccccagacgcgccggagggccagaggagaggagacgccggagcggg

SEQ ID NO: 135586 - RNA, 76 nt, Homo sapiens
cgcgcaggcgacaacagagcaacacagccgcccgggagcaagggaccgacgaggagggccaagaacccggaggaga

SEQ ID NO: 135587 - RNA, 66 nt, Homo sapiens
gaacccggcggggaaaagggaaggaaaagagacgcaggcaacaccgggcgcgcacagaagggacaa

SEQ ID NO: 135588 - RNA, 83 nt, Homo sapiens
caggaggagcaggggggcccgcggcgcaggacgcccaggaaggcagcgcgcccaggagaagaggcgcggcgggcagggcaggg

SEQ ID NO: 135589 - RNA, 78 nt, Homo sapiens
gaagaaagaggagcggcagagccgcggaaagccacaccaaaccagaaaagaacaaaacgacccggaagccgcggaaag

SEQ ID NO: 135590 - RNA, 74 nt, Homo sapiens
aaaggagcagccaaaacgggccaaaccgagcgccgccccggcaggccagccgacacacaacacgcgcaccgagg

SEQ ID NO: 135591 - RNA, 72 nt, Homo sapiens
aggaggcagagagccaccagacggagcggagaacgggacaacccccgggcaggaagagcggagagcagcccc

SEQ ID NO: 135592 - RNA, 79 nt, Homo sapiens
gcgccacgagccaggagaccaaggaccagccaccacggagaacacaccggaccccgcgcccacccaacaaggcaggcga

SEQ ID NO: 135593 - RNA, 74 nt, Homo sapiens
gcggcggcagcccggagagcggagcaccgcggacagccccaccaccagaaggccgaaaagcgagccagcagcac

SEQ ID NO: 135594 - RNA, 82 nt, Homo sapiens
ggagaggcgcagggacggcacgggaccacccgcaaggacccggaaggccggggggccgagacacgagaggcgagggacgaca

SEQ ID NO: 135595 - RNA, 86 nt, Homo sapiens
cggcaggccacgaccaccgcacacccgacacagcggagcgcccagaggcgagcccggggaggaagagagagaaaaggaacagccga

SEQ ID NO: 135596 - RNA, 95 nt, Homo sapiens
gggaaacaacgcagcggagcgagggaccgacaagagaaaaccaggaaacaacaaggaccaagcacccaaaaaccgagaagaaaagaaagcacagg

SEQ ID NO: 135597 - RNA, 81 nt, Homo sapiens
caagaaaaagaccgggcaaagaagcgaggaggagaggacaaggaagagaccgagcccccacaaaacagggagaaaagggca

SEQ ID NO: 135598 - RNA, 89 nt, Homo sapiens
acggccgcgggggggccgccaccggccgccgccgccgccgcccaggcgcagagagaggaaccagaaccaccacgaccaagaggccagaa

SEQ ID NO: 135599 - RNA, 84 nt, Homo sapiens
agaagaggggagcagcggccgcacaggagaagggagggcaagcagaaagcagaggaaaacgaacaacacccaaagccaaagaag

SEQ ID NO: 135600 - RNA, 77 nt, Homo sapiens
gcgggcggaggcagggaagggagagcgggccgggaccaggacggggcgaaccgagcaccaggcaaccgggacaaaac

SEQ ID NO: 135601 - RNA, 76 nt, Homo sapiens
gagaagaggagcccgagccccccgcaaagacagcaaggcaccacccagagggaacgcgcccggaaccacgggccgc

SEQ ID NO: 135602 - RNA, 57 nt, Homo sapiens
gcgaggcaccggaacagacgcaggaaggaagcagaacccaaagaagcgaagcagaaa

SEQ ID NO: 135603 - RNA, 80 nt, Homo sapiens
ccgagccggggaccggcccgcaggcggggagcgccggacacgcgggacgcgcgggggcagaagaaggaaccagcaaagcg

SEQ ID NO: 135604 - RNA, 84 nt, Homo sapiens
agccgccggagccagccaacgagcgggaaagggagcagcaccggccacacccacagcacgaccggaacccagcgaccgacgccg

SEQ ID NO: 135605 - RNA, 71 nt, Homo sapiens
ccgggccacccccccgcgccgccggcacgcggggcaacgaggaacaggccaagaaacaacacagccaaggc

SEQ ID NO: 135606 - RNA, 50 nt, Homo sapiens
acccacgagaggacagcccaggccacacaggaagaaaaccgaccagggca

SEQ ID NO: 135607 - RNA, 72 nt, Homo sapiens
gaggggaggggagggggcgcggggaacgggagcggagagagggcccagaggagacaggggaaccaggaggag

SEQ ID NO: 135608 - RNA, 55 nt, Homo sapiens
aacacgccagccaccacaggccccaggaaggcaaaaagcaggcaacagagagcag

SEQ ID NO: 135609 - RNA, 81 nt, Homo sapiens
gaagggaagcggccaaggcacggaggccgcggacagacaagcagacggggccgccacacgcccaaccagggcaccgcaagc

SEQ ID NO: 135610 - RNA, 74 nt, Homo sapiens
gggccacaagacagcacaaaaagaccgcagagccaagccccccaggaaacgaaagcaccggaagaagaaaagaa

SEQ ID NO: 135611 - RNA, 85 nt, Homo sapiens
gacccagcaccaagcagcaggagcagcccgcggcgaccaagacaggaaccgcccgcgccagcgccgagaccaggaggccccagca

SEQ ID NO: 135612 - RNA, 76 nt, Homo sapiens
gggcaagcgaaaaaacaacgacaggaccacggaaaacagagagcagccaagaaccgaagagagagcagcaaagaac

SEQ ID NO: 135613 - RNA, 39 nt, Homo sapiens
gacagccagaggagagagaacagcaggccagagagcccc

SEQ ID NO: 135614 - RNA, 75 nt, Homo sapiens
gcaggcggcgcggagagggggcgcgagcggggacccagggccaggacccagcacaacaccagcaacacgaacaag

SEQ ID NO: 135615 - RNA, 75 nt, Homo sapiens
agagggaaaccagaagcccaggacgacaggggccgcgaagcaggccagggcaaggagggacagacaagacacaac

SEQ ID NO: 135616 - RNA, 72 nt, Homo sapiens
agcgcaaaagcccagggccaaaccagggaaaaccaaacgaacgaagaaaacaaaaaaaagacagagcaagaa

SEQ ID NO: 135617 - RNA, 73 nt, Homo sapiens
ggcgcggcgagggagcagcaccagggaggacgccccgggcaaggcggggccggcagggagagccacggacaga

SEQ ID NO: 135618 - RNA, 80 nt, Homo sapiens
caccaaccgcgggggaggacaggccccgccgcagggcccaggacagaaggcgggcaaggagcgccccccgagcacccccc

SEQ ID NO: 135619 - RNA, 54 nt, Homo sapiens
gaacaagggaaccagccaaaagcgaggccaggggccaaaacaacgccggagccc

SEQ ID NO: 135620 - RNA, 97 nt, Homo sapiens
cccccgggcaaaggggcaggaggggcaagggcgaacgaaaaaaggaccaaagacagagacaagcggggaagaacggcggagcacaccgaccaaaaaa

SEQ ID NO: 135621 - RNA, 58 nt, Homo sapiens
gaagaaagggacaaagagaggagcagggagacaaaacaccgaagcgacccacagggga

SEQ ID NO: 135622 - RNA, 56 nt, Homo sapiens
ccggaaaggacgcgaggacagaaagccagaccaacgagcgagcacgcgccaaggaa

SEQ ID NO: 135623 - RNA, 75 nt, Homo sapiens
gcgcagaggggcgaacggggcggggggaagggcaaaggagaagaagaagcgagaagggcggagccccccgggcgg

SEQ ID NO: 135624 - RNA, 96 nt, Homo sapiens
cacaggagggccacgggccgggcgcggcaccacgcccgccccagcggagagaaccaagagaaaaggcccgaagaaagagcgcacaggcacgccggg

SEQ ID NO: 135625 - RNA, 82 nt, Homo sapiens
gaaaagcgcggcggcaagaccgccagagaacgaccgaaggagggagccggaaacaaagaagaggagaaaaagccaaggaaag

SEQ ID NO: 135626 - RNA, 73 nt, Homo sapiens
agggagcgcagcgagacaaggaaagggagacagccacaacgacccagggggagaaaacacaacgggcgaccag

SEQ ID NO: 135627 - RNA, 63 nt, Homo sapiens
agacaagacaccagaaagacagaggaaacggggacagccagacagaagagaagcaaggagggg

SEQ ID NO: 135628 - RNA, 78 nt, Homo sapiens
gggaaggcacgaaaagcacggagaggcaccgcgggcaacaggcccacaggccaggaagaagcaaaggaagacagaaaa

SEQ ID NO: 135629 - RNA, 79 nt, Homo sapiens
gcgcgcagacggagggccgcgccacaagcagcaggccaagggagggacccaccgagaaccaccgaaggagacacacaag

SEQ ID NO: 135630 - RNA, 70 nt, Homo sapiens
agaagagagaggcaagaagccagcgaagaaggagcacgacccccagcccaggacgcacacaaggaaacag

SEQ ID NO: 135631 - RNA, 68 nt, Homo sapiens
gagggaacaggcagcaggaagcacggcgggcgaaacaggcgcgggccccggggccgcggcgaaaggac

SEQ ID NO: 135632 - RNA, 74 nt, Homo sapiens
acagacacggggaagcgcaaaaacaagacggggcgccccacagaggggcgacgacagagagagcaaaacgacga

SEQ ID NO: 135633 - RNA, 82 nt, Homo sapiens
accgcagaccggcccccaacggcacggcaggagcacggcccagcgccgggcgcggccacggcagagacggggcgccagggcc

SEQ ID NO: 135634 - RNA, 68 nt, Homo sapiens
agaaggaggggacaggcgcacggagaagcccgggaaaaaggaacaagcgggaaacggagccaccaaca

SEQ ID NO: 135635 - RNA, 58 nt, Homo sapiens
gaagaaacgcaaaagaccaagaccaggggcggagaacggaaaagcaccaggaagcaga

SEQ ID NO: 135636 - RNA, 79 nt, Homo sapiens
gagaccaagcagcccagccacccggaaagcaaggacagggaaaagccagaggagaccgaagaagacggagaccaaacag

SEQ ID NO: 135637 - RNA, 72 nt, Homo sapiens
gcagcacacaacccgaaggcgaacacagaggaaaccgcaccgcccggagccccacagcaaccccacccaggg

SEQ ID NO: 135638 - RNA, 74 nt, Homo sapiens
aacacaaaacagagcccagggacacgaagagagaacacagagaacccagaggaaagggaccgacagcaagaaaa

SEQ ID NO: 135639 - RNA, 83 nt, Homo sapiens
aaagcccaccagcaaagcagaacagcccagcaggaagggaaccaagccccaacaacagagacaggccaaagagcaacagaaaa

SEQ ID NO: 135640 - RNA, 70 nt, Homo sapiens
gaaagcaagaccaacggaaggagacaagaacaggcacccaggaccgggcaacccagaccagaagaaacag

SEQ ID NO: 135641 - RNA, 84 nt, Homo sapiens
agcccaagcccaggacaccgcgcaggaaacgagagaaagccacagaggccccgcagagcgaggacgggccccaacaggagacgc

SEQ ID NO: 135642 - RNA, 73 nt, Homo sapiens
aggaaacgggggcggacaccaagaaaccagaaaaccacagagcagcggggcaccaaggacacgggcagcaggg

SEQ ID NO: 135643 - RNA, 74 nt, Homo sapiens
cacgacaccaaacaccgcgggaaacagaaaaaaggcagcggaaagaagaaaagaaacggcccacaagacccagc

SEQ ID NO: 135644 - RNA, 75 nt, Homo sapiens
agcgcggacccgcccggagagagggcggagaacggaaaagcaccaggaagcagagaggaccgcagaagggaagga

SEQ ID NO: 135645 - RNA, 53 nt, Homo sapiens
aagaagaaagagcgaagaccacacagccagacgagaaaggcggagacaacagc

SEQ ID NO: 135646 - RNA, 63 nt, Homo sapiens
cccccggacccagccccgggcaccaacccaggcgacaccccggggcgaccccgagacaagaac

SEQ ID NO: 135647 - RNA, 76 nt, Homo sapiens
cgagcacggggaaaagaaacacagcacacaaggcggagcaaaccaggggacagggaaagcagaaccgcgggaaaag

SEQ ID NO: 135648 - RNA, 79 nt, Homo sapiens
caaaacgcagggacgcggccccccccgggggaggagaaggaaagcgacagcaccgcccacggccacggcccacagagac

SEQ ID NO: 135649 - RNA, 69 nt, Homo sapiens
cccaagcagagcgcaggaaggccaacggagagacacaaacacagagcagcaagagagacagggaccgag

SEQ ID NO: 135650 - RNA, 85 nt, Homo sapiens
cggcggaggaggaggaggggaccgccgacaccggagagagagcacagaccagccaagaaaacgaaaagagcagccgacggaaacg

SEQ ID NO: 135651 - RNA, 58 nt, Homo sapiens
cgcagcgccccccccagcccgcgcggcgccgcagcacggagcgcacaagcaaggagag

SEQ ID NO: 135652 - RNA, 72 nt, Homo sapiens
caacaaagcgcgggccaaaggaaaaggaagagccgagaccgacgcacaagaagcacagaggggagcgaagac

SEQ ID NO: 135653 - RNA, 96 nt, Homo sapiens
accaaagaaagagcacgagggagagagagggaccgaaaccaccagaggcagcaggaggagccagagcagggcagaagacaagcaacgcagaacaaa

SEQ ID NO: 135654 - RNA, 72 nt, Homo sapiens
ccaccaaggaacgccaagagccaccaacaggaagagggccacagagcaaccaaaaaccggccgcaggcacaa

SEQ ID NO: 135655 - RNA, 77 nt, Homo sapiens
ggcgggcaggcggcggaggacacccgcgaccagaacgccaggagccagaaccccgaggaaaggggaaaagccgcaac

SEQ ID NO: 135656 - RNA, 82 nt, Homo sapiens
gaaagagagcgggggcagcgacagagccaaaacagagcggaaccgaggagagaggagcacagcgaacgcacagagcaagagc

SEQ ID NO: 135657 - RNA, 75 nt, Homo sapiens
ccgaaccaagacacaagaaaaggaaggggagaaaggacccagccacaggacaaggagggacgaagaggcggaccc

SEQ ID NO: 135658 - RNA, 69 nt, Homo sapiens
agagaacacccaccggcacaacacacaaaggggggaaggagacgcacacccacaccgggcaacaggcca

SEQ ID NO: 135659 - RNA, 85 nt, Homo sapiens
gagacggcaaaggcggaccgacaccacgacgacgggccacagcagccggcggcggcagagggcaaaagcagaccggaaaacccac

SEQ ID NO: 135660 - RNA, 80 nt, Homo sapiens
acgacggcggaacggggaacgacggcccagcaggcggggaagagaaaggggggcagaggaaagagggagcaccggcgaga

SEQ ID NO: 135661 - RNA, 87 nt, Homo sapiens
gacgggaccgagcgagcgaccgacgcgccacccgccgacgcccagccgcggggcccgcacggaccccaccagcaggagccaacaaga

SEQ ID NO: 135662 - RNA, 94 nt, Homo sapiens
agcacccgcagcggcacccgggacaaggcagacgggagcgcaaggcgccccaaggccagacaaaaccgcggagccagcgcccggcaaggagcga

SEQ ID NO: 135663 - RNA, 77 nt, Homo sapiens
agccgccccagcggcgcggcgccgcccacgggaaagacaaggagccgggccgagaaaccgaaccagagaccagagaa

SEQ ID NO: 135664 - RNA, 67 nt, Homo sapiens
accaagaaccagggcacaccaagccagaaggcgaggcgcacggcagaaagccaacaggcccacccag

SEQ ID NO: 135665 - RNA, 83 nt, Homo sapiens
aagcaacaaaaagaaaaaagaacaagggaagaagacaaagcaggaggacacaagaagggaggaaaggcggacccaggaaccac

SEQ ID NO: 135666 - RNA, 58 nt, Homo sapiens
gagcagaagaggggcccagagggcaggagagaaggcagcgggggcacagcgagggggc

SEQ ID NO: 135667 - RNA, 65 nt, Homo sapiens
caaacaccaccaccaagcggacaggcaagacaggccaccacgggcacgcggaagccgggccagcc

SEQ ID NO: 135668 - RNA, 35 nt, Homo sapiens
agacaccgcgccacaaaaggagcaccggcccaggc

SEQ ID NO: 135669 - RNA, 37 nt, Homo sapiens
gcggccggcggaccccacagccaagacaccaacgaag

SEQ ID NO: 135670 - RNA, 74 nt, Homo sapiens
agccacgagccaacccagccaacgccgcacgcaacagacaggaggacacacgcaagacagaagcggaaccccaa

SEQ ID NO: 135671 - RNA, 81 nt, Homo sapiens
ggccggggccggggcgccgccgggcggccgggcgcggcgagcccagggccagaaacacagggacaagcacggagggcaccc

SEQ ID NO: 135672 - RNA, 99 nt, Homo sapiens
gggggaagcgggaaacccacaggaggcaaccacacagagaccccaagaagaagcggaagaggagccgcggaaccaagacacaaggaacagaagacagga

SEQ ID NO: 135673 - RNA, 61 nt, Homo sapiens
ggcaacagaagacggggcacagacaccagaaacaacagacagcgggcaaggggccaggccc

SEQ ID NO: 135674 - RNA, 69 nt, Homo sapiens
cggggcgaggacccccgagccaggaccggacagaaaagcgaggagaaagcccgggagcgaccgccggac

SEQ ID NO: 135675 - RNA, 49 nt, Homo sapiens
cggaggggcggaggcggaagcccgaccagacaacggcaagcggagaaga

SEQ ID NO: 135676 - RNA, 81 nt, Homo sapiens
gcgcggacccaggcgcggaggcgaggccagcagacaagcagaccggaagaccgacggaagaccacaccccgagggagccca

SEQ ID NO: 135677 - RNA, 75 nt, Homo sapiens
acgggggcagcgccgaaccaggaccggacccggacccaaaggccagcaagaagagaaaaaccacggcgaggcggc

SEQ ID NO: 135678 - RNA, 75 nt, Homo sapiens
cggggcaccacgaaggaccgaagaggggagccgccaccaaaagcagacggaaaacccacggggaagaccacaccc

SEQ ID NO: 135679 - RNA, 76 nt, Homo sapiens
cggagcgcccggagaccggacgcagaggcccgcacggcggagaggcaagaacgacaggacccaggcccaggcggaa

SEQ ID NO: 135680 - RNA, 68 nt, Homo sapiens
acgcagacgcccacccggccagcgacacaggagagcacaaaagaagaagagccgaaacgcgcggccag

SEQ ID NO: 135681 - RNA, 76 nt, Homo sapiens
aagcggcccaagggggaaaaccagagacccagacacgcgaaggaacgaaaggccaaaaggcaaaagacgacggaaa

SEQ ID NO: 135682 - RNA, 70 nt, Homo sapiens
gcccagaagaaagagaagagcgacaggcaagcggaacagaagccaaacccggcaccgaggcacgaggaca

SEQ ID NO: 135683 - RNA, 66 nt, Homo sapiens
cagcagacggacagccagagcggagcccgcgacacacccagagcggccccccccccacccgacggg

SEQ ID NO: 135684 - RNA, 67 nt, Homo sapiens
cggggccggggaacacacaggccggcaagggacacgggaaaaacacaaaaacccccaaagccgaaca

SEQ ID NO: 135685 - RNA, 75 nt, Homo sapiens
caaccgccgacaaccccgagaggggaagaaggacagaagcaccaggcgagcagacagacgcagaggcaagaagag

SEQ ID NO: 135686 - RNA, 75 nt, Homo sapiens
gcagcaggacggaagggggcggccacgaccaagaagaagccgcagaccccggggcagaggacaacagcaaccaag

SEQ ID NO: 135687 - RNA, 57 nt, Homo sapiens
agacagaacagaacccaaaagccgacaaccccagaaacagccagggggacagacaca

SEQ ID NO: 135688 - RNA, 87 nt, Homo sapiens
ggccaaagaggagcggcacgacaaaagaagcagccaggaggcgaaacgaggaaccaggacagaaacccacagaaagagggggcccgg

SEQ ID NO: 135689 - RNA, 60 nt, Homo sapiens
gccggcccggcggcgcgcgcgcgacgcgcgcgcccggcccgggacgacccagaagagccc

SEQ ID NO: 135690 - RNA, 80 nt, Homo sapiens
ggaagaggacaacaccggagcacccagaaaaccccacaccagcgcacgcgcggagagggaaggagggcggggccaagacg

SEQ ID NO: 135691 - RNA, 62 nt, Homo sapiens
ccaccaggagcccgagagagaagggcccgaggccagaggggggggcaccggaaccccagcag

SEQ ID NO: 135692 - RNA, 80 nt, Homo sapiens
gggaccaggacgcggaagcaggaagacagccagcccgcgggagcgccacacagagcggaagaaccgaccgggacgagggc

SEQ ID NO: 135693 - RNA, 79 nt, Homo sapiens
cgccccaagccccaccacccgcagccggggaggcaacggagcgaaaccagcgacaggaagaagagagggcgaaggaggc

SEQ ID NO: 135694 - RNA, 81 nt, Homo sapiens
ccacaggggcggccggcggccgagcgcgagcacccgggacggaggcaggcagcaggggaaccgcgcgaaggacacaccacc

SEQ ID NO: 135695 - RNA, 86 nt, Homo sapiens
ccacagccaacccaacaagaggggcacaaaaacaccacgccgagaacccaggggaacccggaggcaagacacgaggagaggcgccc

SEQ ID NO: 135696 - RNA, 76 nt, Homo sapiens
aaacagcaagaaagaccacaagaccagcagaacagaagagcaaaccaggcgcgcacggagaaagaagagaaggccc

SEQ ID NO: 135697 - RNA, 84 nt, Homo sapiens
cgagggggcggcggcgacagccaggcccggaagcgagggcggccgcgccggcccagggggcaagcgcgagaagagcggcgccca

SEQ ID NO: 135698 - RNA, 40 nt, Homo sapiens
ccgccagcccagcgaccagcaggacccagaagaaccacgc

SEQ ID NO: 135699 - RNA, 61 nt, Homo sapiens
ggaaagcagaagacaagaggaaaaacgagcaccacgcacggagcacagaaaccggaaaacc

SEQ ID NO: 135700 - RNA, 47 nt, Homo sapiens
cgagcagaaacgagaaggaggcagggacccagcagaacaacccacag

SEQ ID NO: 135701 - RNA, 74 nt, Homo sapiens
aggcaagaccgccccgccgcccagaggacgcccaacaccacccacccaccacgggacaccagcacacacacacc

SEQ ID NO: 135702 - RNA, 71 nt, Homo sapiens
gaccacgggagaaacaaagaccacaccaggcccacaagacccggccccggccccacacaacggcaccccac

SEQ ID NO: 135703 - RNA, 79 nt, Homo sapiens
ggggggaggacccgaccaggaaggaaaacccccagcccagccgagacccagggaacccccgccccgaccccaagggccc

SEQ ID NO: 135704 - RNA, 82 nt, Homo sapiens
cggaccgcgaggccgcgggcggcggcggcccgcgccccggccgagaccccgcgcaccggccagagaaggagggggcagagca

SEQ ID NO: 135705 - RNA, 76 nt, Homo sapiens
cagaggaagacaggaaaggagggagaacacaggagcggacaggaacgccaaaagacgaacacaaagggaaagagga

SEQ ID NO: 135706 - RNA, 76 nt, Homo sapiens
ggaagaggcggccggcgaaaggagcgggccggcaagggaggggaagaaggaaaaaccaagaggggagaagcacagg

SEQ ID NO: 135707 - RNA, 72 nt, Homo sapiens
ggaagcaacgccgccgccgccccacccggggcaggggccagggccaggagcaacgcacgaaaacgcacgagg

SEQ ID NO: 135708 - RNA, 61 nt, Homo sapiens
gccgcaggaagacggcagccgccgcagcacacgggccagccaagcacggggaccggagaag

SEQ ID NO: 135709 - RNA, 75 nt, Homo sapiens
ccgggcgccagggccgccgccccgcccggcagggcagaaaagaacagacccagaagaagcgaaaggggagaaaga

SEQ ID NO: 135710 - RNA, 61 nt, Homo sapiens
gagggagaacacagaaacccgccccggccaggggcacagaagggaccacaaacgagggcca

SEQ ID NO: 135711 - RNA, 72 nt, Homo sapiens
gaagccccaccaagggacccacaccggaaccaggaagaaaagagcaagcaacccaaaaggcaaccaagcaac

SEQ ID NO: 135712 - RNA, 52 nt, Homo sapiens
aaaccaacacggggcaccacccggaagcaccgacccgcgagacacgcggacg

SEQ ID NO: 135713 - RNA, 85 nt, Homo sapiens
acggcgagcgagaagaaaacaagaagcgaaccaggcccgccgagcggcagcccagaaaccccgaaggccaccgccaccaccccca

SEQ ID NO: 135714 - RNA, 105 nt, Homo sapiens
aaagggaagaacccagaagaggaagaaagagccggcgcacgacaacagacaacagggcggacccgaccgaagaagggaagcgcgaaaagccaaggacacagaggg

SEQ ID NO: 135715 - RNA, 33 nt, Homo sapiens
gcagggagaagaggcacccaggccagcacacgg

SEQ ID NO: 135716 - RNA, 79 nt, Homo sapiens
gaaaaccaccagggagaaaagaagagggccgccgagacccaggaccgaggggaggccaccccacgaagagagccaacgc

SEQ ID NO: 135717 - RNA, 65 nt, Homo sapiens
cccgggaaacaggaacccccaccaacaccgaagaggggggcagcagccaggacgaaggaaaaagg

SEQ ID NO: 135718 - RNA, 70 nt, Homo sapiens
gcacaacaccagcaaaacagaaccccaaaccccaacaaggccgcggaggcccgagagcggccgcacaccg

SEQ ID NO: 135719 - RNA, 80 nt, Homo sapiens
gaaccacaagcaccagcacgccggcaagaggccagcagggggggagagaagaggacgagggccaggagacaggggacacc

SEQ ID NO: 135720 - RNA, 85 nt, Homo sapiens
ggacccaccgcgccccagcccgagccagggcgagaacaccccaccagaccacccagcaagcccacaaaaaaggcacaagcaggga

SEQ ID NO: 135721 - RNA, 86 nt, Homo sapiens
ccccgacccacgcgcgccgggggcaggagaacccggggaggaggcccaggccgcggagggccgaggggagaggacagaggccggag

SEQ ID NO: 135722 - RNA, 72 nt, Homo sapiens
aacgcgccgcaaaacagaacgcggccgagcggggacaacccccgacccagcagaccgagccaccgaaccaac

SEQ ID NO: 135723 - RNA, 65 nt, Homo sapiens
ggaccaggcgaagcggccgagcaggcgagcgaacgacggagaccccccggcgaagggccgccccg

SEQ ID NO: 135724 - RNA, 78 nt, Homo sapiens
cagaaacagcgcaccacccgcagagagacaagagagacaccccaaccgacaaagagcaccagacagccgggaacgacc

SEQ ID NO: 135725 - RNA, 82 nt, Homo sapiens
aaggaggagaaggagaaaagggggaaaagcccaggaggaagcaggagcagcccaagcgccccccacgcagaaaacagaccgc

SEQ ID NO: 135726 - RNA, 71 nt, Homo sapiens
gagaagaccgagagagcaccggcaccgcagaaacaaggaaagcaagcaagcagaaacacgacaaagagacc

SEQ ID NO: 135727 - RNA, 84 nt, Homo sapiens
acggcgcgagggagagggacaagccaaggccgcgagacccacggcagggcaaccccaccgcggaaggcaggcacacagacgaga

SEQ ID NO: 135728 - RNA, 79 nt, Homo sapiens
gcaaggagcggacccaccggccaccggcggagcgagggggcgcggggcagggcgcggggacaggggcccgacaggagcg

SEQ ID NO: 135729 - RNA, 81 nt, Homo sapiens
cagaagcccgaggcaccgggaggcacagccccccacagcagaaccccagccacccacgagaaaggacagggacaggaaaga

SEQ ID NO: 135730 - RNA, 67 nt, Homo sapiens
agggggccagcccaagaacccgaggaacaccggcaccccgcgcgccacagaagaaggacgggccccc

SEQ ID NO: 135731 - RNA, 71 nt, Homo sapiens
gggcccagaggaccccagccgcgcccgggagagcaagaggaaccaggacagaaacccacagaaagaggggg

SEQ ID NO: 135732 - RNA, 70 nt, Homo sapiens
gcaccagcggagagaagaccccaggggcgacaggccgcagcacacaaagcagcaggcgcaaaaacgaacc

SEQ ID NO: 135733 - RNA, 95 nt, Homo sapiens
ccaagagccgagcacgggccaggccaacggaggaccagcaccccaaccccgaagccaggcaggaggcaccaaggagacaacgaagacggggacca

SEQ ID NO: 135734 - RNA, 77 nt, Homo sapiens
aagaggcggacaccccggacgaaccacaggaagcgcggggcggcggcgaaaggacggcaagccgacaggaacacccg

SEQ ID NO: 135735 - RNA, 82 nt, Homo sapiens
agggagcacggccagaggaccaggcgaccagcaccagcccgaccaggaaacacagaggccaacagcaagagcaaccagggac

SEQ ID NO: 135736 - RNA, 64 nt, Homo sapiens
ggaaaagagacgcaaaccacgaggacagagaagagagaagccaccagcaaaaccaggggcagag

SEQ ID NO: 135737 - RNA, 49 nt, Homo sapiens
gcgaggccaggagcagagggggcagcaccagaaaaacaccgcccagaca

SEQ ID NO: 135738 - RNA, 76 nt, Homo sapiens
aggagcagccagagggccgggcccagcaccgaccccaaacagaggaaagagcggagcccgccagaaacagacacca

SEQ ID NO: 135739 - RNA, 129 nt, Homo sapiens
gagccaggggcccgagggcggggaccggcggcgcggaggagcgaggcagcgacaggacgggaacgggagaaccggggcaagagacggcagacaaacacagccgagagaaggcaggcgacgggcaaagag

SEQ ID NO: 135740 - RNA, 53 nt, Homo sapiens
ggggagccaggccgcccggcggccaaagaacacggcagaagcccccaagggaa

SEQ ID NO: 135741 - RNA, 81 nt, Homo sapiens
gagaccgagcgcaagggcggcaagcgaaagcacacagaggagaacagccagcccaaaggcccagaacccacgcggaccggc

SEQ ID NO: 135742 - RNA, 72 nt, Homo sapiens
gaaggaccaagaaccagggccaaagagcgcaggcgagaaaggagagacagggccccacagcaaggaccaaaa

SEQ ID NO: 135743 - RNA, 80 nt, Homo sapiens
cgggaccagcaagccgagaaagggaggcggaacaggaagggaaaaggccgaggcacagcgggaagaccgcaaagacgacc

SEQ ID NO: 135744 - RNA, 44 nt, Homo sapiens
aagaaacacccgaacagcgaccccacgacggcaggcgcacggaa

SEQ ID NO: 135745 - RNA, 52 nt, Homo sapiens
acccgcgagcaggaaccccaggaaacggccaggacgccagaaagagggcaac

SEQ ID NO: 135746 - RNA, 51 nt, Homo sapiens
accagaacaaagcccgcgacaggcgaaacggaaaaagcaggaccccaagcc

SEQ ID NO: 135747 - RNA, 61 nt, Homo sapiens
gcaagcgaagccgaaaaagcgcccgagacgggcccgccgaaaggcggaggacccacaggag

SEQ ID NO: 135748 - RNA, 55 nt, Homo sapiens
aagcaagacccaggacaccccgaagccgagaaaggcacgagaggaagccgaaccc

SEQ ID NO: 135749 - RNA, 74 nt, Homo sapiens
gcccccgagagcggaaacaggcccaggacacagccagcaaacaaaacagcggaagcaagacacacacaacccaa

SEQ ID NO: 135750 - RNA, 53 nt, Homo sapiens
ccccgccagaaaagcgccaagcacaacgaagagaggaaagaagcggaaaggag

SEQ ID NO: 135751 - RNA, 68 nt, Homo sapiens
cggcgagaagggaagggaaagcagaggaaggcagaagaaaaagaccgcagaccagggccccacgaccc

SEQ ID NO: 135752 - RNA, 80 nt, Homo sapiens
aagcggggacacgcggccccagcgcccggccccccaccggacacccgcgggcccaccagcgagcagcccgcgcacaagca

SEQ ID NO: 135753 - RNA, 80 nt, Homo sapiens
gggcggagggaccaccaagcagaaaccccacacaaggacaacaccaacccgcgaccacccagaccgccccggacagcacc

SEQ ID NO: 135754 - RNA, 88 nt, Homo sapiens
ggcaccggggccacccgccgcggggcacgcaacagaacagcccgggcccccacagcccagcccaaagccccaccccaagaacccccag

SEQ ID NO: 135755 - RNA, 87 nt, Homo sapiens
ggaaggaggcggcaccggaggggagggccgggcgcggcggcggcggcggggaggagccggagcaaagcacggaccgccggcaccggg

SEQ ID NO: 135756 - RNA, 53 nt, Homo sapiens
cgccccacgggagcgccgagggcagaggccccggccccgaccagcaccccgcc

SEQ ID NO: 135757 - RNA, 59 nt, Homo sapiens
gaccacagcacagccgggaaggggagccaccagcccccgggaggcaccgccccaacccc

SEQ ID NO: 135758 - RNA, 71 nt, Homo sapiens
ggggcgagaaggcgggaagccgaaggcagccacaggacagggggacagcagcaccagaaccaaaaagccac

SEQ ID NO: 135759 - RNA, 72 nt, Homo sapiens
aaaaggccagggcccacgcaagagagaggccgcagaagggcagaagaacaggccgggcacaaaaagccaacc

SEQ ID NO: 135760 - RNA, 75 nt, Homo sapiens
agaaagaaacaaccagaccccaaagaagccacagaacaggggaggcagccagaccaagacacccaggagaaagac

SEQ ID NO: 135761 - RNA, 64 nt, Homo sapiens
acccgaggggggaacaaagagaagacacaccaccacgccaagggggacacccaagacgccaggg

SEQ ID NO: 135762 - RNA, 71 nt, Homo sapiens
acgaggcaacgaacagaaggaacagaaaaacgaaacgccacacagagaaaaacgaaccacacaaacacacg

SEQ ID NO: 135763 - RNA, 72 nt, Homo sapiens
aaaccggcccccaacgacaaaaggaaagagcggaggacccggaccggacaacgcaacacaggacagaacccc

SEQ ID NO: 135764 - RNA, 72 nt, Homo sapiens
cacaacaggaggcggaggcgaaagcggaacgagaggaagagaaacaccaaggaaccacacaagaaaagaaag

SEQ ID NO: 135765 - RNA, 69 nt, Homo sapiens
cgcggagcacagaagaagcaacacgagaaccaccccgacacaacaccaccaaccaagaaccccacccag

SEQ ID NO: 135766 - RNA, 76 nt, Homo sapiens
acagcgaccacgagggcgaaccacccacagaccagccggaacaagagacccggcagggacggcgccaaccccccgg

SEQ ID NO: 135767 - RNA, 81 nt, Homo sapiens
cagccgcgaccagcgccagcgcagccgccagcgccgggcccccacagagagcacacaaacaaagcgaaaccacggaagaaa

SEQ ID NO: 135768 - RNA, 73 nt, Homo sapiens
gaaacaccccaggacagcgaggacgccaccagcgccagcagccgcccaccccacgccgagggcacgaccagag

SEQ ID NO: 135769 - RNA, 80 nt, Homo sapiens
ccagaagacccgcggcacacagacagaagaagacgcaaaacgggcggcaaaggcacccaagggaccgccaagggaagagg

SEQ ID NO: 135770 - RNA, 60 nt, Homo sapiens
aggaaccgcccaacaggcccggagcacgagagaaacagaggacgaccgggaggacaagaa

SEQ ID NO: 135771 - RNA, 49 nt, Homo sapiens
ggcagacgccccggcaaaagccgaggaaaggagacaccaaggaaaaagc

SEQ ID NO: 135772 - RNA, 59 nt, Homo sapiens
gaagagaggacccacagacgacacaaaacagggagagcaggaggagaccaaacaccaga

SEQ ID NO: 135773 - RNA, 77 nt, Homo sapiens
gaggacgaaggcagaagccacaacaccaggacaccgagcaccaggacgccgagggccccgggacagggaaacccccg

SEQ ID NO: 135774 - RNA, 54 nt, Homo sapiens
agggcgacgaaaagcgggcgccaacaagaagagcccggaacgccagagcggaaa

SEQ ID NO: 135775 - RNA, 66 nt, Homo sapiens
aagagacagagaagaagaggaccccccggccggagagacagaaagaagaaccaggagcagaagggg

SEQ ID NO: 135776 - RNA, 81 nt, Homo sapiens
ccacacgcgccaagcaggaggggccgaacagcaagcggcaggagaaggcggaggggccgaggggaccaagcggagagacca

SEQ ID NO: 135777 - RNA, 76 nt, Homo sapiens
gaaaagaagagaaaccagcgcggggaagaaggcaaagcaacaggccacaagccggaggaagcgcggcaaacacgaa

SEQ ID NO: 135778 - RNA, 107 nt, Homo sapiens
gccacgcgaggacagaaaacgcaagacaacaggagaggaaagcggaaagccaagggggcacggggaagaaagccgagggccgaaggcagccccggagaagcccccga

SEQ ID NO: 135779 - RNA, 89 nt, Homo sapiens
gacaccgccggcggggagagaagcggacccgccgagccccggccccaagaacgccgccgccccggagccgccaggaccaaagaggagca

SEQ ID NO: 135780 - RNA, 78 nt, Homo sapiens
ccagaggacgcgggccgaggagagcggaggaggggccccaagagacgacagaaaggcagagaaggaaaaaaggaccag

SEQ ID NO: 135781 - RNA, 42 nt, Homo sapiens
accacagccgggagcggaggagaaggggaacccgggaggcgg

SEQ ID NO: 135782 - RNA, 76 nt, Homo sapiens
gcccagccccccagagcgggaacagccaacagacaccccccaacgccccaagcaccaggaaaggcaaaagcagcac

SEQ ID NO: 135783 - RNA, 69 nt, Homo sapiens
agggagcacacacacaccacagccagagaaggcagccaagcccgggcagccaccccccccacgcgcacc

SEQ ID NO: 135784 - RNA, 75 nt, Homo sapiens
cgcaaagagcagcccccacaagcgaagagcaaaagcacagaaaggacacaaagagccgccccgaggccccggcgc

SEQ ID NO: 135785 - RNA, 69 nt, Homo sapiens
cccaaaaagcaccgcacaggcaggacaaggagaaggagagggggaacaaccgaggaaagagcaaaacca

SEQ ID NO: 135786 - RNA, 48 nt, Homo sapiens
acggaaccacagacaaaaacccaaagcaagccggaagaaaacagaagc

SEQ ID NO: 135787 - RNA, 78 nt, Homo sapiens
gcagaagagcgaaaaccagagacagcagggaaaagccgggccacagaagcaccaccacaagccacaccaacaaacgac

SEQ ID NO: 135788 - RNA, 57 nt, Homo sapiens
gcgagagaaggacccacggcgcgcgaagaccaggcagaaagagacaaggcaggcccg

SEQ ID NO: 135789 - RNA, 79 nt, Homo sapiens
cagacccccaagaaaccagacaccgccccgcgacgcggagcccccgaggaaccacgcagacgcggcgcaccgcccacaa

SEQ ID NO: 135790 - RNA, 84 nt, Homo sapiens
cgagcccggcgggaccagcaccagcaccggcccaggggccgggccaagcgacagagaagcgacggaacagaaggagggagaaga

SEQ ID NO: 135791 - RNA, 76 nt, Homo sapiens
aggcgggaggaaggaaacacaggcggggaccaagagaagagcagaggaccagcaccgccgagacacgcacacaccg

SEQ ID NO: 135792 - RNA, 70 nt, Homo sapiens
agcaaacaaggaggagcaggcgaaaacaggaagaacgggggcccacgcggaggacgcagaacacggcggg

SEQ ID NO: 135793 - RNA, 70 nt, Homo sapiens
aaaagcagccgggaaaggagccggccggcggcaaaggggccagaggagaacaaccccaggacagacagag

SEQ ID NO: 135794 - RNA, 53 nt, Homo sapiens
agagcagcaccaggccagagccagaacaccgagcgccggaaaccagcccggcc

SEQ ID NO: 135795 - RNA, 83 nt, Homo sapiens
acccaccaagaacgaggccaggcgaggagagcgaacaaccccagaagagaaacaggaaaggccagccagccaacagccggaaa

SEQ ID NO: 135796 - RNA, 80 nt, Homo sapiens
gcggcggggcgcggccagggacacggcacagggacgggccaagaaccccaggaggagggaaagcggacccgccagaggac

SEQ ID NO: 135797 - RNA, 40 nt, Homo sapiens
ggccagaggagcacgcgggggaggggggagaggagaggag

SEQ ID NO: 135798 - RNA, 68 nt, Homo sapiens
aagaaagaacgcacagccacgcacacagcacaacacgaaaggagaagaggacgggaggagaaaagccg

SEQ ID NO: 135799 - RNA, 64 nt, Homo sapiens
gacccaccaacaggaacggaaacaaggagcaaaggggagccgccaccaaaagcagacggaaaac

SEQ ID NO: 135800 - RNA, 76 nt, Homo sapiens
aggagagcgacggccagcccaccggaaccccaagaggaacgccaggagggcaggagaaaggagaaaaagaggcagg

SEQ ID NO: 135801 - RNA, 71 nt, Homo sapiens
caggggaaaccaagaagaggccagaaaccgcccggagcacgaccgaggcggccgaaagcagccagcaagaa

SEQ ID NO: 135802 - RNA, 78 nt, Homo sapiens
gaggcccccagccagcagaacgagcacacgcagacacagaaaagcaacgaagccacaacacaccagacaagaaaaaga

SEQ ID NO: 135803 - RNA, 73 nt, Homo sapiens
agccccggccgccccggcaagcgccagaaaccccgggaaggcccccagacccaaagcagaagcaaaaagacga

SEQ ID NO: 135804 - RNA, 73 nt, Homo sapiens
aggcagacaaacagaaacaagcagcaagccacaaggagaaagcaacacaggaaccaaagggaaaggacacaga

SEQ ID NO: 135805 - RNA, 70 nt, Homo sapiens
gcaagaagaacagagacagcagccaaacccccagcacaacacgaaaggagaagaggacgggaggagaaaa

SEQ ID NO: 135806 - RNA, 61 nt, Homo sapiens
cgcccggcgggaaacaggccccaagacccaagaaagaccacacagggaaacgaccagggag

SEQ ID NO: 135807 - RNA, 86 nt, Homo sapiens
gagaaccacaaccgaaccagcagcaggagaagcagaggccaaacacacaggaacgccagaccccagccgagggaggcaacagcaaa

SEQ ID NO: 135808 - RNA, 55 nt, Homo sapiens
aaggaaagcaaggaacacacagagaggggacagcagcaaggaacagcgaagcagc

SEQ ID NO: 135809 - RNA, 74 nt, Homo sapiens
agaccggaccgggggcaccggaccgagaaccaagaaggagcgagggaggagcagcgagacagcaagagacgacc

SEQ ID NO: 135810 - RNA, 79 nt, Homo sapiens
aggccgcgacgagggcgcgagcaagcacaaaacggagagcagaggcagagcacacaaccagaagccagggagaaggaag

SEQ ID NO: 135811 - RNA, 74 nt, Homo sapiens
caagccagagacgagagagaagagcgccgaggaaacagggggcaacggaaacgacgaagagagaaggaaggagg

SEQ ID NO: 135812 - RNA, 63 nt, Homo sapiens
cggcgaaggcagccacagcgcccagagagcacacagggggccaggggaaggaccgcccacagc

SEQ ID NO: 135813 - RNA, 78 nt, Homo sapiens
caacacagagagcaacaacgggaacaagcgagggaaaaagcgggaggaggcgggccagaacacgaccggggcacaggc

SEQ ID NO: 135814 - RNA, 75 nt, Homo sapiens
agagcgagcgagggggggcgcgccggaaaccggagcgcgcagcagaagagaccagagacccgccagaaccccccc

SEQ ID NO: 135815 - RNA, 45 nt, Homo sapiens
ggaagaaaagcaggcagagagcggcgaaagagaagagaagaaagg

SEQ ID NO: 135816 - RNA, 71 nt, Homo sapiens
gccaagaaaagaccaaaaaccagagaccgcgccagcgccacgagggagaaagaagggcaccaacgcaccag

SEQ ID NO: 135817 - RNA, 54 nt, Homo sapiens
agaagcaccgaaggaagccggccaagccggagacacaagcgcaggagacccaga

SEQ ID NO: 135818 - RNA, 70 nt, Homo sapiens
ggagcaacacaggagccggaggaacgcgaagagacccccaggccaaagcacccaaaaaccagcccaaacc

SEQ ID NO: 135819 - RNA, 82 nt, Homo sapiens
cacacagccagggccggggaggcgcagcaccccaacagcccccaggaacaagcccagcgccggggccccagcaccacgccac

SEQ ID NO: 135820 - RNA, 42 nt, Homo sapiens
acgcaagagcgccacccaccccacaggaagaaaaggccccca

SEQ ID NO: 135821 - RNA, 67 nt, Homo sapiens
gcaagcggcacaaaggaggaaacagaaacaggaagcacaaacaccagcccgaacgagacgagaaacc

SEQ ID NO: 135822 - RNA, 69 nt, Homo sapiens
ggacggcaaacggagccaggcacaagaaaaggggcagcacgccgaaggagagaccagacaacaggccag

SEQ ID NO: 135823 - RNA, 74 nt, Homo sapiens
ccgagaaccgcaggagccagagggcggagaacggaaaagcaccaggaagcagagaggaccgcagaagggaagga

SEQ ID NO: 135824 - RNA, 73 nt, Homo sapiens
aacccgaccagccaggggcccacaccagaaaagaaccgaaaggaacggcggagaagaccgccacagaagccag

SEQ ID NO: 135825 - RNA, 56 nt, Homo sapiens
acaaagagccgcgggggcgggacacaaggacaccaggcaaaagaagcggaagcaga

SEQ ID NO: 135826 - RNA, 78 nt, Homo sapiens
cagagagcagccaaggagcaccggagcgaggcagcggagcgacaccaggaacaccagcgaacccagcggacccgaagc

SEQ ID NO: 135827 - RNA, 53 nt, Homo sapiens
gagccggccgcgggcgcgaccggaggcagggaaccaaaaggaagaccaacggc

SEQ ID NO: 135828 - RNA, 76 nt, Homo sapiens
cgaagacagggggcccaaacgggagacaacccccgaaggaggcccgaccgccagggcccgccagcgacgcaaggac

SEQ ID NO: 135829 - RNA, 60 nt, Homo sapiens
gaaccgaggggagccgaccacggacgccaggggaagagcagggggaaggaagaccacggc

SEQ ID NO: 135830 - RNA, 101 nt, Homo sapiens
cagcggacaaccccagcggcccaagaaacaaaaaaaggaaacacacaaacgcagggccggggacacaagcaacagccagaacaagccgaagcacgaaacca

SEQ ID NO: 135831 - RNA, 63 nt, Homo sapiens
ggagggaggccggcaggaccggaggacgaggaggaggaacagcggagcggcacggagccagca

SEQ ID NO: 135832 - RNA, 82 nt, Homo sapiens
ggcgaagaagaagagaagagagaacagagcaggcggacaccgaccgcaggaaggaggaggaggagggagccaggcagaaaac

SEQ ID NO: 135833 - RNA, 37 nt, Homo sapiens
acagacccccaccaagcagaggacacccccacacgag

SEQ ID NO: 135834 - RNA, 77 nt, Homo sapiens
gcgacgacagagggccagaaaagggagccagcggaccggcgccaagaaccgcccagccaaaggagggccgaggcgca

SEQ ID NO: 135835 - RNA, 62 nt, Homo sapiens
agaacccagaaacccgacccaggccgcgcagcgcggaggaacgggcgcaccacgccaccccg

SEQ ID NO: 135836 - RNA, 70 nt, Homo sapiens
gcgccgaaggagaaaggggccacagaggccacgaggaagacgaagcagaaacgaaaaaacaccaccaaca

SEQ ID NO: 135837 - RNA, 54 nt, Homo sapiens
caacagcaaaagcacacaagcaccgggacccaggacggcaacggaccagacggc

SEQ ID NO: 135838 - RNA, 74 nt, Homo sapiens
cgcgagcaccagagcggcgaacacgccgacagggacgaagaaaaggggaggcccacgcggaccggcagcgccac

SEQ ID NO: 135839 - RNA, 60 nt, Homo sapiens
ccgccccagcccgccccccgggccgagggacgaggccacagcagaaaaaaccgggaggaa

SEQ ID NO: 135840 - RNA, 74 nt, Homo sapiens
gcaccagaagaagaaggccagaaaaacagcagcagaggaaaaaagagaccgagagaaagcagcagaaagggggg

SEQ ID NO: 135841 - RNA, 68 nt, Homo sapiens
gcaaggagcacccggcggagcagagccagggaagaaggagaaagggccaaccccgaagaagcaaacag

SEQ ID NO: 135842 - RNA, 75 nt, Homo sapiens
gaccggacacgccgagcgcagaagggaaaccccaaagaaccgaaaagagagcgcaaagcagagcacgcggcgcag

SEQ ID NO: 135843 - RNA, 75 nt, Homo sapiens
gaagcgacacaaggagaaaaggcgaagacaagagaaccaagacaaagggaggaggccggggccgaaccaggacca

SEQ ID NO: 135844 - RNA, 78 nt, Homo sapiens
agacccgaaaaacggaccaaaagacagaggagccacggaagggggaaaggcgacaaagcaagaagagacagaagcccc

SEQ ID NO: 135845 - RNA, 60 nt, Homo sapiens
gggcagagcggggcggccaagacacgcacgagacccaggcagggccaggccagcaggagg

SEQ ID NO: 135846 - RNA, 80 nt, Homo sapiens
agggccggccgggagggcggccgcagcaggagaccgcgcccagcccacaccagacaccccggggcaagcggacaacagcc

SEQ ID NO: 135847 - RNA, 76 nt, Homo sapiens
gaacgaccgaaacaccagccaaggcaggaaaggaaagagacaaagaaaggccgacagagcaaacggagggagacgg

SEQ ID NO: 135848 - RNA, 35 nt, Homo sapiens
acggcgaaccgaccagagcagccccaccggccaag

SEQ ID NO: 135849 - RNA, 77 nt, Homo sapiens
aaccggacagaccaagggggacccaccgcacacaggacaaaagcagaagaagaagagcggagaaccgaacaggcgca

SEQ ID NO: 135850 - RNA, 74 nt, Homo sapiens
ggaggagacccgaaggcccgggggacggaaagaggacggcgagagaaaaggcagacgaagaagaagcaagcgag

SEQ ID NO: 135851 - RNA, 76 nt, Homo sapiens
ccacacccccccggggggggcgaagagacgacgcgggggggaacccccacagccccgcaccggagcaaaggcaccc

SEQ ID NO: 135852 - RNA, 82 nt, Homo sapiens
caccacggacgagagacaaacgccgaagaggagcagccccagaagcacgaaacagcccacaggagaagagaggcaggcaggc

SEQ ID NO: 135853 - RNA, 38 nt, Homo sapiens
cccaaccgaccgaaaccaagaccacagccccggcggcc

SEQ ID NO: 135854 - RNA, 86 nt, Homo sapiens
cgcaagacacaccggaggcgacggccaggccacagagaccgaaggagcagacgaggcacgagcgccagcgcgagacagacggggcg

SEQ ID NO: 135855 - RNA, 81 nt, Homo sapiens
gccgcgcgccgcgccggaccggggcgggccagcccgggcgggccgcgcgggagagaagaaaggcacaacccgcgcagcagc

SEQ ID NO: 135856 - RNA, 80 nt, Homo sapiens
cgccccccccgccgcaccaggacacaaggcacgaggacgaagaggaaaggggccacgaggaagacgggagggagcccggc

SEQ ID NO: 135857 - RNA, 81 nt, Homo sapiens
accggggagggcaagcccccgccgggcgccaacaaggagcgggcgcacaaccggggcgacacgaggagcacagaccaagcc

SEQ ID NO: 135858 - RNA, 59 nt, Homo sapiens
cgcgaccggaccaacagcggagggccgagggaggaaggacaagaggacccgccggggag

SEQ ID NO: 135859 - RNA, 72 nt, Homo sapiens
ccgccgacgcccccagccaccagagcagccccagcaggaaaaccaaaccagacaacaggaggagacccgaac

SEQ ID NO: 135860 - RNA, 59 nt, Homo sapiens
gcgggagaggcgagccgcgagagggccggcaggcccgggaagggcaacgaggcacggga

SEQ ID NO: 135861 - RNA, 78 nt, Homo sapiens
ggcgagcggacacaacgcaggcaccgggaggccaaccgacggacgggccaccggagagaagacagggacgcaagggca

SEQ ID NO: 135862 - RNA, 75 nt, Homo sapiens
acccaaaaagggcaccaggggaacaaggcaagggggggcacaaaagcaacacggggacacagcaggccaggaaag

SEQ ID NO: 135863 - RNA, 67 nt, Homo sapiens
aaggcagaacggcgagagggaagcaagaccagcacagcacaagacacaggcggagggcagggcagac

SEQ ID NO: 135864 - RNA, 72 nt, Homo sapiens
ggaccagccaggaaacgggaaaaagggcccgcaagccacagaagacagccaaaccccgaaccccaaaaagaa

SEQ ID NO: 135865 - RNA, 83 nt, Homo sapiens
cggacccacacccagagcgccccggacgaccaggcaccgcgcgggcagaggaacagcgcccccgggcccccacgacaggggcc

SEQ ID NO: 135866 - RNA, 67 nt, Homo sapiens
gcaagagaggaagaagaacgacccgcccggggcagcagggggagcaggaaagagagaagcggcccgc

SEQ ID NO: 135867 - RNA, 69 nt, Homo sapiens
cgcacgacgcacggcccaggaccgcacaagcgcggggagcccccacccccaaaaacgcggaagacgggg

SEQ ID NO: 135868 - RNA, 73 nt, Homo sapiens
aagcccacaaacagaggcagggggagcgggacgggcggcgagcggaccgcgaggcccccaacccccccacagc

SEQ ID NO: 135869 - RNA, 78 nt, Homo sapiens
aggagcagcagcagagaagccccggaaaagaaggccggcccacagcccaaaaagaaacaggaccgaaagccagagcga

SEQ ID NO: 135870 - RNA, 72 nt, Homo sapiens
aaagaagccagaaacccgcgaggggcaaagcagaggaacaccgccccaacccgaaagcaccaccgggcagag

SEQ ID NO: 135871 - RNA, 50 nt, Homo sapiens
cgggacgcgcccacggcgccccggcgcgaaaaggaagcacggagaaaagg

SEQ ID NO: 135872 - RNA, 77 nt, Homo sapiens
gacaccggacaagccagcggggccccgggacgaggaccacccggccaaggagaggagggcagccacaccaaccagga

SEQ ID NO: 135873 - RNA, 76 nt, Homo sapiens
cggccgaaccacaacaacgagaaaagcaaacaaaacaccaccgcaggccacgacacagcaaaacaccagggaccgc

SEQ ID NO: 135874 - RNA, 71 nt, Homo sapiens
ccagaagacagcaaccagcaccacgcgacggacggaaaccccccacacgacaccccgaaagcggccgaagc

SEQ ID NO: 135875 - RNA, 72 nt, Homo sapiens
gcagaagccggaaccacagggagcggacccaacagacaacggcaagcggagaagagcaaggccgaaccgaga

SEQ ID NO: 135876 - RNA, 64 nt, Homo sapiens
gacggcgcggcagagccccgacgccacagaacggagccaccgaggccacccgagcaacgcacgc

SEQ ID NO: 135877 - RNA, 83 nt, Homo sapiens
ggggcaagggcgagaccggagagccgcaggacggcgcggcagagccccgacgccacagaacgggagagaagcaggccaagaaa

SEQ ID NO: 135878 - RNA, 66 nt, Homo sapiens
ggacggccccggggggcgcgcccgccgacgaaccggaggcacagaagacccggcgcgggagcagaa

SEQ ID NO: 135879 - RNA, 62 nt, Homo sapiens
ccacccggaccgagggacaagacagcggacaaggcaaaaccagcaagcggacccagacaaaa

SEQ ID NO: 135880 - RNA, 79 nt, Homo sapiens
agcaagccaaagaccaaggggggggcacccccacaacggggcaaagaaaaaggagagaaaaagaggcaaaacaacaaga

SEQ ID NO: 135881 - RNA, 81 nt, Homo sapiens
gcagacgggagcgcaaggcgccccaaggccagacaaaacaacccagcggggccgccccacccgaggcccaccccaacgagc

SEQ ID NO: 135882 - RNA, 81 nt, Homo sapiens
ccacgcgcccgggagcacgagagccaacggcacggggaggaacaaccaagcacggacggcaagaaaagaggagaaagaaca

SEQ ID NO: 135883 - RNA, 75 nt, Homo sapiens
ccgcaaacagacaacacaaaacccgcaaacacaagaacccaagggaagggacgcaaaaaggaagccccacaagga

SEQ ID NO: 135884 - RNA, 85 nt, Homo sapiens
ccaaggccagacaaaacgaccgcgggccgccagccagccgagggagcccaaggacgagcccccaaaccagcccaagcccgggggg

SEQ ID NO: 135885 - RNA, 69 nt, Homo sapiens
ggaaccggagccgggagagaccaaacccccaccccaacgcaaccggccaaaacagaagaggcaaagccc

SEQ ID NO: 135886 - RNA, 73 nt, Homo sapiens
acgggaccaacaagaaaagggaaaagccaggacgagcgaggaagcagcaacaggaacaaccgcagggaacaaa

SEQ ID NO: 135887 - RNA, 76 nt, Homo sapiens
cacagaaggggcaggcagagaacagacagcagagacaagaaaagggaaaagacaaagaacagccaaagcaacacac

SEQ ID NO: 135888 - RNA, 76 nt, Homo sapiens
gcgcccccgccgcgagacgccgccgacgccgcgcgggccgcgcgcgcgcgcccggaaaccgaacaagcaacagaca

SEQ ID NO: 135889 - RNA, 63 nt, Homo sapiens
gccacaccagggcccgcccgaccagcagacccgacagcgggaaagcacaaaaagaaacccgaa

SEQ ID NO: 135890 - RNA, 35 nt, Homo sapiens
ccaagcggaagaaaggagggacaaccacccccaag

SEQ ID NO: 135891 - RNA, 79 nt, Homo sapiens
gcgagagccgcaccgccaacccccgagcaagacgggccccaaacaggcgggacagggagcaacaccggagcgggcacgc

SEQ ID NO: 135892 - RNA, 67 nt, Homo sapiens
caggaggcggagcggacaaggcccggccgcgaggagagcaaagaccaggggacgaaggccgcagacg

SEQ ID NO: 135893 - RNA, 75 nt, Homo sapiens
ccaggcccggagccccagaaaggaggagaggcagacgcgccccgccaccaagacccccagagaaaaaaggagccc

SEQ ID NO: 135894 - RNA, 82 nt, Homo sapiens
agcaaaccaggagagcaaggaggagaccaggaaagcaggaccggcaagccgagcgacccggcggagcagggagaagagccag

SEQ ID NO: 135895 - RNA, 65 nt, Homo sapiens
cacaaaccggcccaacaaccacaaggaacgggaagaagaagaaggcgaagaagcacaacaccacc

SEQ ID NO: 135896 - RNA, 40 nt, Homo sapiens
agaccagcgacccgagacagacgaccgcccggaccggggc

SEQ ID NO: 135897 - RNA, 78 nt, Homo sapiens
cccccgcgcaccaccagccccgcccccggagagggaacagaagggaggaaacaaaagaagcagcagcacgcacagccg

SEQ ID NO: 135898 - RNA, 84 nt, Homo sapiens
ggcaagcgccggggaaccagaggaggggcggggcccagggcgggcgcagcaccagagcaggaggcaaagggaccccaagaaacc

SEQ ID NO: 135899 - RNA, 55 nt, Homo sapiens
cggacacaaaccaaaacaacacaaggaaagcacagcagacagaaccacacacggc

SEQ ID NO: 135900 - RNA, 106 nt, Homo sapiens
aggggccccggcagcagcccgacgcaaaccaaggacggggaccgcacacccaagggccggaaccaccaccagaaaccccgaggcgggcgaggccagaaaccagagc

SEQ ID NO: 135901 - RNA, 71 nt, Homo sapiens
accacagaagcagaaagccccagccggaaaccagagcccaccccgggccagacaccagcacccagccagaa

SEQ ID NO: 135902 - RNA, 83 nt, Homo sapiens
agcgagacgcggggggcgcggccgccgggggcccagagccgcaacaagcagcgaaggaagagccaggaaagcaaaagggcacc

SEQ ID NO: 135903 - RNA, 84 nt, Homo sapiens
gaaaacagacgcccagccaaacaaaaaggaaaggagacaagcagagacgaaccaggcaaagaggaggcgcggaggaggaggagg

SEQ ID NO: 135904 - RNA, 76 nt, Homo sapiens
agagggaccaagaagaacccccagaacggaccacagccaaagagccgaggaaggcaccaggagaggaggaggggag

SEQ ID NO: 135905 - RNA, 69 nt, Homo sapiens
aagagcacgacagacacagggacagacagcaggaaagcagcgaacacgccgagccaaagaggccagggg

SEQ ID NO: 135906 - RNA, 71 nt, Homo sapiens
cccgagcacggaccagcgacccggcccagcggcccagagcgaccgcgccagaaaaaaaaggggcaagaaca

SEQ ID NO: 135907 - RNA, 69 nt, Homo sapiens
aagagaagagcgcgaaaagagacacaagagcaggcaagaccaaagccacccgcaccgacaaaagccacg

SEQ ID NO: 135908 - RNA, 76 nt, Homo sapiens
gaaccagcagaaaggaagcaaaagcgagagaaaggcagaaggaacgacaccacagaagaaaagaagaaaagaacca

SEQ ID NO: 135909 - RNA, 82 nt, Homo sapiens
gaaaacccaggcagccagcaaagacaaacgccaaagcaccaccccaaacaaggaaggcgccaagccggcaagagaaagagag

SEQ ID NO: 135910 - RNA, 71 nt, Homo sapiens
aggaaccgggaccacaaacacggagggggaagcaacaaaagagggggcaccccagacaggagaacgggaca

SEQ ID NO: 135911 - RNA, 78 nt, Homo sapiens
cccaggaacccccaccacagcccaaaacgggacacagacggaccaacggaaaaacgagccagagccaaggagcaagag

SEQ ID NO: 135912 - RNA, 39 nt, Homo sapiens
cccaagacccacaacaaaaggacaggaggccagggcacg

SEQ ID NO: 135913 - RNA, 68 nt, Homo sapiens
cgagaacaaaggagagaggaccacccagaggagcaacgaagggccccacaccaaaccgccacgcaaca

SEQ ID NO: 135914 - RNA, 73 nt, Homo sapiens
gcagaagaaaggagaaacaagcacagaggccccgagcacacaaaacaggcaccggaaggcaaccaaccagccg

SEQ ID NO: 135915 - RNA, 78 nt, Homo sapiens
gggcaacacccacaaggacgcagccaaagcaggcacgacccacaggaccgcgaacaaggaggccacaaaacacccgga

SEQ ID NO: 135916 - RNA, 78 nt, Homo sapiens
gggacgccggcacgcgaagggccgcaccgcaaggccgccaggcacagagaaggcaaacgggagggcgaggacaccaag

SEQ ID NO: 135917 - RNA, 80 nt, Homo sapiens
cccccacaccgaggccccagccgcgaagacgcccagcccaaggcccgccgccccggggcacgccaggcaaccaagacaac

SEQ ID NO: 135918 - RNA, 80 nt, Homo sapiens
aagaccgaaaacagaaggaaagaaggaacggagaaggcaaagaaggggcaccaccgcacgggccaggaaaccaagcaccg

SEQ ID NO: 135919 - RNA, 79 nt, Homo sapiens
agcagggagagggcagggaagcgcggagaagcccccaacacagaacagccagcaaagacaagagcagaccagcagccgc

SEQ ID NO: 135920 - RNA, 75 nt, Homo sapiens
gaggccgcggggcggcagaccaggggcggaggcacccaccacgggccaggcgggccagaggcaagccgcgggagc

SEQ ID NO: 135921 - RNA, 78 nt, Homo sapiens
agaaccccagcaaagaagacagggacgacgcggaaccacgagaaagggcgcaaaaagaaagaaaacaaaagccagcca

SEQ ID NO: 135922 - RNA, 85 nt, Homo sapiens
ggagagcaccggccacggaaaagcaaaggaaccaggcgaccgaaaggccggacaaaaagcggacagcggaagagagcaacaggac

SEQ ID NO: 135923 - RNA, 40 nt, Homo sapiens
agcccccgagaagcgggaacaggccaggaacccaacgccc

SEQ ID NO: 135924 - RNA, 94 nt, Homo sapiens
gcagccccccgcccggccagccgccccgccgggaggagaacacgagacccgcacaaaaccccgccccccaggccacacaggggccgagacgggg

SEQ ID NO: 135925 - RNA, 71 nt, Homo sapiens
gagaaaaaggaaaacgcggaaaaccgacacaacagaacagcgcgagccacaaggcaaggaagcaggcggca

SEQ ID NO: 135926 - RNA, 72 nt, Homo sapiens
gcaggagaacccagggcacgggggacagggcgacgggccaggcggccgaccacagagaagcaggcgaccagg

SEQ ID NO: 135927 - RNA, 72 nt, Homo sapiens
gcgaggccgcaggggagcccggcagccgcccggcccacaacgacacgcaaagcccaagaaagcgagaaaaca

SEQ ID NO: 135928 - RNA, 70 nt, Homo sapiens
caaacccagagggcccacaccaccggacacagggccaggcgggcgggaaaaaccaagagcacagcgagcc

SEQ ID NO: 135929 - RNA, 86 nt, Homo sapiens
caagagcgacgccgccgggcccaacggcgggccccggcgaggcagcgcggccgcagcagccccaacgcagagcgcggaagcacagc

SEQ ID NO: 135930 - RNA, 81 nt, Homo sapiens
gagagcgccgaggcgagaacgcacaggccgcgcagagcgggaccacccgggcacagcaggcacggagccccgcacaaggca

SEQ ID NO: 135931 - RNA, 88 nt, Homo sapiens
gggaccgcgccaagaggcgaggccgagacaaacgaccagaggagcgagagcagcaagaaccacacccagcagcaagcagcggaaggga

SEQ ID NO: 135932 - RNA, 75 nt, Homo sapiens
ccaacccccaccccgcccaaggaggcccagcggaaagagcggaggacccggaccggacaacgcaacacaggacag

SEQ ID NO: 135933 - RNA, 73 nt, Homo sapiens
ccgaaagcgcccccggagcagaggagccaaagcagaacccagcaagcgagcgaggagcccggggccacgcccc

SEQ ID NO: 135934 - RNA, 55 nt, Homo sapiens
caaggggaggacaaccgcccgggaccagaaaccccaccacgcggcaggggccgcc

SEQ ID NO: 135935 - RNA, 78 nt, Homo sapiens
cagagaggccgaaagccaccgcggcggaccggggagacacaaaaaccggaagagcgagcaccaagacccgggaccgac

SEQ ID NO: 135936 - RNA, 88 nt, Homo sapiens
gcggaggcccccgggcaagaggcgcaaacaagccaacccaggaggaaaaacgcagaagaggcggccacccacgagccgacggcaaacg

SEQ ID NO: 135937 - RNA, 76 nt, Homo sapiens
cgacggcccgaacggccagacccggagacgacccgacgaagcccacgccgggacccagcgcaggggacacgcgccc

SEQ ID NO: 135938 - RNA, 66 nt, Homo sapiens
agacaaccaaccccaccgaggaggacagagacgcaaaaacagccacccagcgacgggccacgaaga

SEQ ID NO: 135939 - RNA, 70 nt, Homo sapiens
ccccccggagacgcaaccaaggaaccgaacaagacagaaagcgggacgcgcaaccccaggccagacccca

SEQ ID NO: 135940 - RNA, 75 nt, Homo sapiens
gaaggaaaaaacacaaaccccacagacgccgggaacacaagccgagaacagccgagcccagccccacagagccca

SEQ ID NO: 135941 - RNA, 79 nt, Homo sapiens
caacaaggcggacaagagaagccgccagcgggaggcgggcggcggggcggcacggcggccgccacacaggggagccgcc

SEQ ID NO: 135942 - RNA, 68 nt, Homo sapiens
ggggacccgacgcccgcacgaaagggaccgagggggacgaaagcggaaaaccgcaacagcaaagggaa

SEQ ID NO: 135943 - RNA, 78 nt, Homo sapiens
caccggaacagcacccaacaggccacccagaaacagccgcccagcgaacagcagcacggaccaacaacaggcacgaag

SEQ ID NO: 135944 - RNA, 83 nt, Homo sapiens
gagaggaggcaacgggcagggaaggacagggagcgagaccacccacccaccccacaccgaccggcggacaacacgagcgccca

SEQ ID NO: 135945 - RNA, 69 nt, Homo sapiens
aggccgggacgccgggccggcagccggacaccaggcgagcagaacaaggagaaagaccaagcacacgcc

SEQ ID NO: 135946 - RNA, 78 nt, Homo sapiens
acgcgaggggacaaaggcgcaagcgagaggaaacgggccccaaggcgaccgggcagaagccaagaccggcccgaggcg

SEQ ID NO: 135947 - RNA, 77 nt, Homo sapiens
gcgacaggggaacagacagaaggagcaggaaccaaagggagccaacgaaggaagccggaaagccacgagcagcccac

SEQ ID NO: 135948 - RNA, 79 nt, Homo sapiens
ccgagcacgcgcgggagcagcagaacggccgagcgaccaggagaggagcccccgcccgaagaccggggagggcccccca

SEQ ID NO: 135949 - RNA, 68 nt, Homo sapiens
gaagaagaaaacccgcaacccccacagccagggcagagggacaaaaaaaacaaaacacgaagcgcaac

SEQ ID NO: 135950 - RNA, 57 nt, Homo sapiens
gccgacccggcggacgcggcgcggggcgggcgcggggcgggggggaagaggaagaag

SEQ ID NO: 135951 - RNA, 62 nt, Homo sapiens
gcgccagcgcggggcaacagacagacaagagaagagaggaaaagaaacccgggggagaggcg

SEQ ID NO: 135952 - RNA, 69 nt, Homo sapiens
ccagaggaccagaacgccacaacccacgggggaccggacacaagcccccagagggcgcccgaacgggcc

SEQ ID NO: 135953 - RNA, 35 nt, Homo sapiens
aaaggccaagaaggcagagaggagcacggcagcca

SEQ ID NO: 135954 - RNA, 96 nt, Homo sapiens
cgccggagccgccgcacagacagcccggagaggggaaaaccacgccccggaccaagcccgggagcaaggcagaagccccagaggagcccgaaaccc

SEQ ID NO: 135955 - RNA, 75 nt, Homo sapiens
ggcaggagaggagccagcccccaccccacaggagacagcagacgacaccccgacaggagggccgccagcaccagg

SEQ ID NO: 135956 - RNA, 75 nt, Homo sapiens
gaaggaccagaaaaccgacaacccccagaaagccaagccgggaaacccaagaagaaacagacaaggaccagaagc

SEQ ID NO: 135957 - RNA, 64 nt, Homo sapiens
cccggggaaccaccccccaaaccgcagcgcccgaaagggggcggacaacacagcaacgcaacca

SEQ ID NO: 135958 - RNA, 58 nt, Homo sapiens
aggaaagggcagacagagacccagaaggggaagggagccagcggccggcgccggcgca

SEQ ID NO: 135959 - RNA, 61 nt, Homo sapiens
cagaccgccacaccagaaagagaagcccaagaaaagaggaggaggagagggaaccagagcg

SEQ ID NO: 135960 - RNA, 77 nt, Homo sapiens
cggagagaggcggagggacacgggcagcacgccaggggagcagccggcagcgaggacgggccaacgcacggcccggc

SEQ ID NO: 135961 - RNA, 73 nt, Homo sapiens
gccggggcccaaccacaagacgaccaaaggaggaaggcgaaacagaggcaggaagagaagaccagcaaccaga

SEQ ID NO: 135962 - RNA, 66 nt, Homo sapiens
ggacaccccgccaggcaaaagcgcagacaggaagccaggagagcagcaagggccccgccccaaaaa

SEQ ID NO: 135963 - RNA, 73 nt, Homo sapiens
gggaagaggagacaccccgggggccccgagcaaaccaggagccaaggaacgaacagggcgggcggaggcggga

SEQ ID NO: 135964 - RNA, 77 nt, Homo sapiens
gaacgagacacggaaaaacaaaggaacgcaagggcgagaaagaagagcgaagcacaacacggagaaccggaggacgg

SEQ ID NO: 135965 - RNA, 84 nt, Homo sapiens
cggagagagcggaggagggaggagaaggccggaaggaaacccaggacagccaacaagcacaagccaggagaggcagagaccagg

SEQ ID NO: 135966 - RNA, 71 nt, Homo sapiens
caaaacacaggaaccaagcgcagaaaaagccggacacgaccaagaaaggcggagacgccagcgacgaaccg

SEQ ID NO: 135967 - RNA, 82 nt, Homo sapiens
caagaggacaaccgggaggcaggacccagccgccgccccaccgacggagacggacgcccgggaggggagcagagccagaaac

SEQ ID NO: 135968 - RNA, 72 nt, Homo sapiens
acgcagggcgcccccgacacaaaagccaggaagacaagagcagaagaaacagaccgaaagacaacaagaaac

SEQ ID NO: 135969 - RNA, 73 nt, Homo sapiens
acccccaaggacaaggggcagaaacccaagacgcagagaacgaggaaacgaaggaaagaccacagcaagacca

SEQ ID NO: 135970 - RNA, 60 nt, Homo sapiens
cccagcgggccggacggggcggggggaacggagagagacgacagggagaggagaagagag

SEQ ID NO: 135971 - RNA, 81 nt, Homo sapiens
accaggcgagcggcccacgggaggccaaccacgaggaaagggagaagaggacagaaaaagaccagacgcggaaaaagaagc

SEQ ID NO: 135972 - RNA, 68 nt, Homo sapiens
gcagccgagacaccagcccgaaacaccaccaagcccgggaccgggagcccgggaccgggagccggggg

SEQ ID NO: 135973 - RNA, 71 nt, Homo sapiens
aggcccaggagaaagcacaggacagggagaacgcgaagagaagcaaaaaggcaaggaagccgaggaccaag

SEQ ID NO: 135974 - RNA, 69 nt, Homo sapiens
gacaaaaccaaccagacaagaaggaaaagaacagagagggcaacagagagcaggaaagaagaacagcgg

SEQ ID NO: 135975 - RNA, 81 nt, Homo sapiens
gcgccgcagcacggagcgcaccgcgccccagaccaccggcagggaacagccgagcagaccgaggaggcccaccagcagacg

SEQ ID NO: 135976 - RNA, 54 nt, Homo sapiens
aagcgcagcaggaccaacagggcgacagcaagagggcgcccggaagaggaaagg

SEQ ID NO: 135977 - RNA, 81 nt, Homo sapiens
agcgccgaggcccagcgggagccgaagaagaaccgcgagccgacaacgcccagcgccacgcagaccccagcgcacaggggc

SEQ ID NO: 135978 - RNA, 74 nt, Homo sapiens
ccaaacagacgacgcaaagacggcacgggaaacacgagaccggcgcagcagagcagaaacaacaccgcccgacg

SEQ ID NO: 135979 - RNA, 75 nt, Homo sapiens
gcggcaaaggccaagcacggcaaagggcagcaaccaaaagccaggccccaaaaaagcaggcccccggaccacacc

SEQ ID NO: 135980 - RNA, 86 nt, Homo sapiens
cccagacggccaccggcgggaggaacaaaaggaggaagcagagaccaggcagagcggagagacagaaagggagaaacacaacaggg

SEQ ID NO: 135981 - RNA, 73 nt, Homo sapiens
aacccaacagagcgcgaggagggaaacgcgagggcaccagcgaagcaaaccaacaccccccgggaacaagaag

SEQ ID NO: 135982 - RNA, 72 nt, Homo sapiens
cagcgcgcaagcaggggcaaaccacgccaggcaaaagacaggacccaggaaacagacacaagccgaagacac

SEQ ID NO: 135983 - RNA, 107 nt, Homo sapiens
cgcaaccagacgccagcgggacgaggaccgagaccgcggccgggaccgaggcaacggggcggcacacaaggagcgaagggcagggagaacgccaggcacagcacgac

SEQ ID NO: 135984 - RNA, 59 nt, Homo sapiens
gagagccaacggcacggcaggacccgaggcgccagcagcagcaagaccgggggaccagg

SEQ ID NO: 135985 - RNA, 81 nt, Homo sapiens
gcaccccgaggacacgggagcagaaggcagaaagcggggcagaaagcccacacggaggccgagcgaagccgggacaaggaa

SEQ ID NO: 135986 - RNA, 81 nt, Homo sapiens
gggcggcgcgccccccccaggcccgccgcccccgccaagcagacagggcaacggccacccaaccagcgcgccaggcacggg

SEQ ID NO: 135987 - RNA, 58 nt, Homo sapiens
gcccggccaccgggagcaacggagagggcgaagccaacccaccgccaccaccccacca

SEQ ID NO: 135988 - RNA, 87 nt, Homo sapiens
ggacacacgcagcgggagggcacgaagcccccggcaaaggggccgaaggggacagaaggagacggaacgcacagaggaacgagcgag

SEQ ID NO: 135989 - RNA, 75 nt, Homo sapiens
gcacggcaaaagaccaagagcacagcagaagggcggagggggagagccaacagacacgccacgcgaagcgcagga

SEQ ID NO: 135990 - RNA, 72 nt, Homo sapiens
ccaggagacacagggggaaacaggaagacgagggagaccggaagcagaagaccccccggagcgagggaaaac

SEQ ID NO: 135991 - RNA, 79 nt, Homo sapiens
cccgacccggagcgacgacggccgcgccaagcggaaagaagggaggaacaagccaccgcacgagggcccaagacccaag

SEQ ID NO: 135992 - RNA, 55 nt, Homo sapiens
caggcgcccgccaccagcccagcaaaacagcggaagagggaaaagggacaccggc

SEQ ID NO: 135993 - RNA, 65 nt, Homo sapiens
ggacgggcgccgacgccgacaagaggagagaaggaggccgacgaggaggggcagcaagccgccag

SEQ ID NO: 135994 - RNA, 83 nt, Homo sapiens
cagaccaggcggcacccgccccgaggaggggaccagacacaagcggcaccaaaagaaccacgccgagggaagcagagaaagcg

SEQ ID NO: 135995 - RNA, 82 nt, Homo sapiens
ccgcaccaggcacggacgagacagccgaggagcggaaaacccagcaggcgaagaagcagcagcccaagagcagacaggcagg

SEQ ID NO: 135996 - RNA, 76 nt, Homo sapiens
gaaggcgcgggcaggagccggcgaggagcaccccccgccggaaagaggaggccaacacgccaccacccggggccag

SEQ ID NO: 135997 - RNA, 72 nt, Homo sapiens
aaagcggcaaacgcgaagggaacgcccgccgagacgcagcacaccgacagagaacccaggccaacacacaga

SEQ ID NO: 135998 - RNA, 78 nt, Homo sapiens
ggggcgcgcgacggcggcccgaagccagcgccccaccggggcaagcaggggaaaggacaagggacagcagccgcagaa

SEQ ID NO: 135999 - RNA, 72 nt, Homo sapiens
acgcagaacccgggagaggagaccagaacgaacccccccccccgcccccgcccgagcagaagagcgggggaa

SEQ ID NO: 136000 - RNA, 66 nt, Homo sapiens
aacggcagcagaacagcaccacggccaccaggccagcacggaagccccaaccggcgccaaggaaac

SEQ ID NO: 136001 - RNA, 73 nt, Homo sapiens
gaaaaacaggaggaagacccgcagcgggacaagcgggcaagacaaagagcccccgaggaaagcacgcacaacg

SEQ ID NO: 136002 - RNA, 71 nt, Homo sapiens
aacaaccgcgggcacccacggaaaagaggggcacgacaacaccagaagggaagccgagagaaacacggcgg

SEQ ID NO: 136003 - RNA, 86 nt, Homo sapiens
gagcggcaagcagggcgcagacggagcggagcgaccgagagagaggagcacaaaggacagagacccgaagagcaggagcgggaaaa

SEQ ID NO: 136004 - RNA, 58 nt, Homo sapiens
aaaggccaaggccccccaaggcggccaagaggacgagagaggaggagggccggggcag

SEQ ID NO: 136005 - RNA, 46 nt, Homo sapiens
gggccggcgagcgcagcgcgaccgggaggcccagagccgcgcaaga

SEQ ID NO: 136006 - RNA, 78 nt, Homo sapiens
acagggaaggccaccagcccagaaaagagaagaggaagggaaaaggccgaggcacagcgggaagaccgcaaagacgac

SEQ ID NO: 136007 - RNA, 82 nt, Homo sapiens
cggaaggagcgacacaccgcgcccgcccaccagaaaaagcggggaaaacaaaaaaaagaaggagggaagagggggccaggac

SEQ ID NO: 136008 - RNA, 81 nt, Homo sapiens
aacacagaagccgacaaggcgcaagcgaaaacagaccgcgagcccagagaagggggcggaggacggaaccagggagcccaa

SEQ ID NO: 136009 - RNA, 56 nt, Homo sapiens
gaaaaagacagcccgcagcacgaccagcaggaacggacccaaggccagccagcccc

SEQ ID NO: 136010 - RNA, 75 nt, Homo sapiens
ggcaaaggaccagaccgagccagagggagcgaacgcaggggacaagagaaaaaaagggcgggcgaacaaaaagag

SEQ ID NO: 136011 - RNA, 72 nt, Homo sapiens
gaaaccggccagcccacggacggcaccagccccccgccgccagacgggaccgggccaagggagcaagcggaa

SEQ ID NO: 136012 - RNA, 79 nt, Homo sapiens
cagccacaggaacagagacagcgccgcgggcaaggaaacggcaaaacaggacaaagcagccagaccaaagcacagcgcc

SEQ ID NO: 136013 - RNA, 77 nt, Homo sapiens
cggccagagagcggcacagggcccgcgcaccgcccagaggaccaggaaagaaaaggagcagacgaaacccggaacca

SEQ ID NO: 136014 - RNA, 82 nt, Homo sapiens
ccggccagggccggcgcggcgagagaacaggccgaaagggccacaaacccaaggcccccccaacacagcccaagccagaaac

SEQ ID NO: 136015 - RNA, 85 nt, Homo sapiens
gccgagagcgagaaacaaagccacccagccaagaaggagacaagggcgggcccccggcagggacaaaggcgagacaccacccaag

SEQ ID NO: 136016 - RNA, 80 nt, Homo sapiens
gccgcacaaggagaggaccggcagcaacgagccaaggccccccgaaaaagccgaggaggagaggagaggccgagggaacc

SEQ ID NO: 136017 - RNA, 42 nt, Homo sapiens
gcgggagccgccgccggccacccgggccagcccgcgggagcg

SEQ ID NO: 136018 - RNA, 72 nt, Homo sapiens
cggaccagcccaaacacgcgccgcagcacacacacacgggcccccccgccccagccagccggcagacgcgcc

SEQ ID NO: 136019 - RNA, 44 nt, Homo sapiens
gacacccggcccagcaaggcagggcaagaaggacgaccccaagc

SEQ ID NO: 136020 - RNA, 65 nt, Homo sapiens
caccagcacagagaagggccagggcaaaggcacacaaagcaggacgcaagagacaaggcggggcg

SEQ ID NO: 136021 - RNA, 98 nt, Homo sapiens
gcagacagccaggaaggaacaagccaagaggacccgaagccacagccccaagaggcccaccacagagccccaacgcagcagcaccgacaaaggccaca

SEQ ID NO: 136022 - RNA, 68 nt, Homo sapiens
aaggggcgcggcgcaaggccccaacgcaccggaaccagagacccaagagggaccagaggaaggcgggg

SEQ ID NO: 136023 - RNA, 88 nt, Homo sapiens
gccagcacccggccgagacggcggcagcagcggcacagagcagcccaggaacaaaggggccgaacgacacgacccagacagagaccag

SEQ ID NO: 136024 - RNA, 77 nt, Homo sapiens
cgaagggcagaggaagcgccgccaggcccgcaggaccgccggagacagggcaaaacaagcaaagagcggcaggggcc

SEQ ID NO: 136025 - RNA, 75 nt, Homo sapiens
gcccccgaacacagccaacagaagcgcaagccgaagcaggacacaaagaaaagacgaaggaagcaacacaaggaa

SEQ ID NO: 136026 - RNA, 91 nt, Homo sapiens
ggaaaggaaacaaaacgagcaaacacaggaacccaacgagccaaagcccaggcagccgccccgaagaaacccacagacacacgggacacac

SEQ ID NO: 136027 - RNA, 66 nt, Homo sapiens
aagcgcggaaaacccagggggcgaacacggaaggccacaggcagaaggaaccgcggagagacgacg

SEQ ID NO: 136028 - RNA, 71 nt, Homo sapiens
agaagcaccacaaagaaagggaccgccaagaccggcgccgcgaggcccgaaaaaggaaagagccacgggcc

SEQ ID NO: 136029 - RNA, 74 nt, Homo sapiens
gaggaaagacaagccccaaaagcagccgggaaaggagccggccggcggcaaagagagaagagaaaacaacacac

SEQ ID NO: 136030 - RNA, 80 nt, Homo sapiens
ggaagagggacggaaccaccagaagccagcccccaggcggaacgcccgccccgcagagagcaccccgcccgaagacaaga

SEQ ID NO: 136031 - RNA, 83 nt, Homo sapiens
caggacagagggcaccacccgccccccggagaccgccaagagggcaagaagaggaacaccaggacccagaagaaccacgcgca

SEQ ID NO: 136032 - RNA, 78 nt, Homo sapiens
cgaccagacgcaaagccgaagccggagcggccacccgggagcagcggcagacccggagaagagcagggaccgaagacg

SEQ ID NO: 136033 - RNA, 79 nt, Homo sapiens
ggagccacaccggaccagaccccaggaaagacggcaggggggggcggaaacacacccagcccagggccagccccaagca

SEQ ID NO: 136034 - RNA, 83 nt, Homo sapiens
caaagacacaccagaacacagcaggacccgagcgaccagaaagccaacggcccacggccagaaggcccaaacgcaacgggagc

SEQ ID NO: 136035 - RNA, 73 nt, Homo sapiens
accagaaagaacggaccagaggagacgagcccagacaaaagagggcggagaacggaaaagcaccaggaagcag

SEQ ID NO: 136036 - RNA, 58 nt, Homo sapiens
gcacaaaggagacacaacacaggaagaggacacagcgcgaccaccgccacgcagcgga

SEQ ID NO: 136037 - RNA, 58 nt, Homo sapiens
ccacccagccagcacacacgaaagacagggagaagagccaaggagaccaaacccagca

SEQ ID NO: 136038 - RNA, 77 nt, Homo sapiens
cagcaagacaccgggaccccggaagccaaaaaggcgacaacaaaggagaggacaagcgggccaacacaagggagaga

SEQ ID NO: 136039 - RNA, 73 nt, Homo sapiens
gccaggcgcagaagaagcacccagcaagcgagggaccgggacgccacagccagccggacagcaaggaccagca

SEQ ID NO: 136040 - RNA, 76 nt, Homo sapiens
ggaagcggcccggaggagcagccggaccaagggagaccagcacgagccgggcgggacgccggaaggggcacaagac

SEQ ID NO: 136041 - RNA, 60 nt, Homo sapiens
cgggaggagaccgcacgcccagcgacagaacagaaacggcgaggaaagagaggagccccg

SEQ ID NO: 136042 - RNA, 75 nt, Homo sapiens
ggaaggagcaggaccgcgcccagaagcacagcgaggagaaaagaaagccagaaggaaggaagcaacgaaccaaga

SEQ ID NO: 136043 - RNA, 62 nt, Homo sapiens
gaccggaggcacacacaagaccgcacgacaggcacaggaagagaccgagaccaggaaccagg

SEQ ID NO: 136044 - RNA, 53 nt, Homo sapiens
cccgggccgccccccccacgggcagccggcgggaggccaccgccccaccagca

SEQ ID NO: 136045 - RNA, 78 nt, Homo sapiens
gccgccgcccggccgaccagggaccgcccgccgcggcgcccggacccacccagccaacaaacacccgaaggaccacac

SEQ ID NO: 136046 - RNA, 71 nt, Homo sapiens
caacgcagagggcgacgccaacaagaaggggaaaaacagcacagacaaaaagacacacgacacggagaaca

SEQ ID NO: 136047 - RNA, 72 nt, Homo sapiens
ggcaccacaacaacaagccacagggccggagaggggaaccagcagaagaacaccagcaggaaaaaagagcgg

SEQ ID NO: 136048 - RNA, 74 nt, Homo sapiens
cgggaggaagacccaaaaggggcagagacagagcagccaggcacaagaagcagcagaccaggaggcgcggcagg

SEQ ID NO: 136049 - RNA, 71 nt, Homo sapiens
acccccccccccccccaaggccaggggacaccagcaagcgcggaagaggaccggaggccggaggaagccag

SEQ ID NO: 136050 - RNA, 73 nt, Homo sapiens
ggcaccgcccacccaaaaagagcccaaaaccggcgcccagagcacggccccaagcggaggcaaggcgcgaccg

SEQ ID NO: 136051 - RNA, 92 nt, Homo sapiens
aaaacagacgcccagccaaacaaaaaggaaaggagacaagcagagacgaaccaggcaaagacgaaacaccgcacccagaagccgcagccgac

SEQ ID NO: 136052 - RNA, 59 nt, Homo sapiens
ccgcggccacggccccccgccagaagccagagcccccggggccacacgagcccagccca

SEQ ID NO: 136053 - RNA, 72 nt, Homo sapiens
ccagcaccagccagagccagacacggcagcgacaccagggaaaaccaaaagaggccgaacaacgggcaaccg

SEQ ID NO: 136054 - RNA, 85 nt, Homo sapiens
aggccgcgcgggcccgaggccggaggaacccggacccggcgagcgggcgagaagagacaaacagaaaacaacccaaacgcaaaca

SEQ ID NO: 136055 - RNA, 74 nt, Homo sapiens
gcggacaagaaaaggggcaaagaaacgaaacgccccagacccgaacagacagggcacagacaaaaacagccaca

SEQ ID NO: 136056 - RNA, 39 nt, Homo sapiens
accggaaggcagagaaaagcagggccccgagaaaggcag

SEQ ID NO: 136057 - RNA, 57 nt, Homo sapiens
gcccccccccagcccgccccaaaaggaccagaggacgcaccagaagacagggcaacc

SEQ ID NO: 136058 - RNA, 61 nt, Homo sapiens
aaaccaaacagacagaggagccaggcgggaaagaggagagccgacaagccacagagcagac

SEQ ID NO: 136059 - RNA, 75 nt, Homo sapiens
gcgggggaggggagcccgcgcccgccgcgggagagaggacccccccccccccccaaggcaagaacgccccggcaa

SEQ ID NO: 136060 - RNA, 50 nt, Homo sapiens
ccaaacagagcccaggacaaaaacaccacgcagaagggaacacccgcaca

SEQ ID NO: 136061 - RNA, 70 nt, Homo sapiens
aaaagaggaccggacagaaagccaaaaaggagaaagagggagaaagaagaagaaaggcgcaagacaggcc

SEQ ID NO: 136062 - RNA, 79 nt, Homo sapiens
gcaagcgcggagaagagcagaggaagagggcggaagggccgcacgaagacaggcaggaacacacgacccacagcacaac

SEQ ID NO: 136063 - RNA, 43 nt, Homo sapiens
agcgcggccaagaacagaggaagggagaaccagaaaccgagag

SEQ ID NO: 136064 - RNA, 71 nt, Homo sapiens
gcacaggaaaggcacagcaaccggagaagagaggaaggacaccagcaacggccagaggggccagaaaggac

SEQ ID NO: 136065 - RNA, 77 nt, Homo sapiens
ccccgggaacagcgcacgagcccccccccgaaagaaggagcaccccgaaacaaagcaaggcgccaccggaagaaacg

SEQ ID NO: 136066 - RNA, 82 nt, Homo sapiens
ggcccaccgcgaagggggcagagacaggagacaaaggacaggcagaaaccagaacaggcaaagggcccccagaccggcaaca

SEQ ID NO: 136067 - RNA, 79 nt, Homo sapiens
ccggcgcaggcggcgcggagagggggcgcgagcgggggacaaagcgcagggagcaaacgaagaggaccccacccgggga

SEQ ID NO: 136068 - RNA, 82 nt, Homo sapiens
cgagaacgccgcgcgcgcacccaacagcgaccgagcgaaacaagaagcagcagggaagccacccaaaccggagggaaacgga

SEQ ID NO: 136069 - RNA, 62 nt, Homo sapiens
acgaagaaaacaaacgaagaaaaaaaaccccccaaaggaaaacggccaggaaggaacaccag

SEQ ID NO: 136070 - RNA, 79 nt, Homo sapiens
agcagaagggaggcccaagacccacaacaaaaggaggacccgcagacacaacggaggcccgaccgagcggcccccacag

SEQ ID NO: 136071 - RNA, 57 nt, Homo sapiens
acggagccggacacgaaacgcggaggcacccaccacgggccaggcgggccagaggca

SEQ ID NO: 136072 - RNA, 48 nt, Homo sapiens
cccccagcgggcaggagccccggccccacaagaccaaggcgcaagcca

SEQ ID NO: 136073 - RNA, 71 nt, Homo sapiens
aagaccgagcccgaccgacccaccacacccaacggacccagggaaaggcaacaggccaccgagaccaacac

SEQ ID NO: 136074 - RNA, 59 nt, Homo sapiens
ccgcccccgcgcgccggagagccacacaaccacaaccccaaaagagccacgcgcggaac

SEQ ID NO: 136075 - RNA, 71 nt, Homo sapiens
ccgggcggagacagaagaggcgccaggacgaaggcccacgggcaagggccacggggggaccgaggaggacc

SEQ ID NO: 136076 - RNA, 85 nt, Homo sapiens
ggagccggacccagcgccggcccccaggcgaagaagcgcagccgcaccggccaagggaacggagcacaaggacacaagggcgcca

SEQ ID NO: 136077 - RNA, 77 nt, Homo sapiens
gagaaacgaacaagaggagccaagccgcaacagaaggagacacggaggcgagaagacgcggggccaagcggggccaa

SEQ ID NO: 136078 - RNA, 68 nt, Homo sapiens
agaacaggaaaccccggaaaaagccgcaccaacaggacgacaagggggaagaggagccggagggcaaa

SEQ ID NO: 136079 - RNA, 76 nt, Homo sapiens
cagagcgagaccaggaaagaagggggcagaagagggaccggagagggggcacgcaccagaacagacagccaggagc

SEQ ID NO: 136080 - RNA, 64 nt, Homo sapiens
cgaagcccagaaggcaacggacagaaagcgggacacaagcaggagcacagaccccgaaaaggga

SEQ ID NO: 136081 - RNA, 85 nt, Homo sapiens
gaggcggcggcacgacgacggccccagcccagccaccagagcaccaagcagacacgcagaagccagaggacaacagagcaaccag

SEQ ID NO: 136082 - RNA, 70 nt, Homo sapiens
accggcccaacaaccacaagggcacaacaaaagcaaaaagaccaagggagggcaacacggacaccccagc

SEQ ID NO: 136083 - RNA, 70 nt, Homo sapiens
agaggcgggaaaagcaccacgcaagaagaagacaacgggacgcagccacagagggacgcacccggggacg

SEQ ID NO: 136084 - RNA, 82 nt, Homo sapiens
ggagagcggcccccgcagaccacagcgacgagcggggcgcagaagaagcacgcacagaggcacagcggaggacacgcggccc

SEQ ID NO: 136085 - RNA, 75 nt, Homo sapiens
aagcccacggaacacccggcagaaggacgagacagaggcccggacgaggcaggcaaaagcagaccggaaaaccca

SEQ ID NO: 136086 - RNA, 55 nt, Homo sapiens
aaagggccaaagaagggagagagaaaaggagaacaaccccgccacgcccaagcac

SEQ ID NO: 136087 - RNA, 73 nt, Homo sapiens
aagaagagacaggcgagcgacccccggccgaagccggagaaaagacccggccgaggccaacccaacagcccac

SEQ ID NO: 136088 - RNA, 73 nt, Homo sapiens
gggacgcgcgggagacgggagacagaccgaaagaaagagggaccaaagaagacacggaagacaagccccgggg

SEQ ID NO: 136089 - RNA, 74 nt, Homo sapiens
ggggacgcacgagcccggcgccggcaggccccgggccggcgcacaaggcacgcagaaggagcagaagccagaag

SEQ ID NO: 136090 - RNA, 55 nt, Homo sapiens
aacagcccccccagaaccaggccggcggcagggaaggccccagcggaaacacgcg

SEQ ID NO: 136091 - RNA, 78 nt, Homo sapiens
gcgaaggaggcagaggcacagcgcagagccggaggagccaccaacagaagcaggagccaggaaaccaaaacccacaga

SEQ ID NO: 136092 - RNA, 85 nt, Homo sapiens
cgccagcaacccacccccccgggagcagggcagcacccccagccgcagcccccgcgcggaacgcaaaaacaagcaggcccagagc

SEQ ID NO: 136093 - RNA, 61 nt, Homo sapiens
ccagcagcgggcccgcacacgcgcggacagcccagagcaagcacacggaggcccgggagcc

SEQ ID NO: 136094 - RNA, 72 nt, Homo sapiens
agagaggacgggagaccagcaggagcggagaaaaaaaggcaggaaagagaaagaagcgaggacaacggcgag

SEQ ID NO: 136095 - RNA, 67 nt, Homo sapiens
cccaccaccccagcggccagacggccagcggcagcaagaacccggggcaaggaagcgcagaccccaa

SEQ ID NO: 136096 - RNA, 72 nt, Homo sapiens
gcgccgcaacaagcggcagcaagaggcggggcaccaggcccagacggcgaacccgagcaagcaaccaccgcc

SEQ ID NO: 136097 - RNA, 67 nt, Homo sapiens
aggagaaggaccgaagcgaacgcagagcaagggcgcaggccgggcaccgccccacggggcgacgagg

SEQ ID NO: 136098 - RNA, 70 nt, Homo sapiens
acggcagaggaccccggagagcaaggaagaaagcagcccagcggagaaaaagaaagcggcgcgccaacag

SEQ ID NO: 136099 - RNA, 75 nt, Homo sapiens
gagaaagagagagaaacgcccaccgagaggaaagagcagcccagaaggaaaagcagaacagcccgggcccccaca

SEQ ID NO: 136100 - RNA, 96 nt, Homo sapiens
cgggaacggcggcgggacggcggccccgcgcagcccccggccgcagcgcaggcagcccagcagagccaggccccggggccccagcggcaccagcgg

SEQ ID NO: 136101 - RNA, 73 nt, Homo sapiens
gagaggagaccaacacccacccagggcgagccacggcgggaagaagcaaacgaagggcaagaacaaaaaggag

SEQ ID NO: 136102 - RNA, 70 nt, Homo sapiens
cggagcagggaacacgaccccaaggggcccccaagccggcaggggaacgaggagggagcgcggagcggca

SEQ ID NO: 136103 - RNA, 70 nt, Homo sapiens
cccgcagacgggacacagcacaccggagagacgaggacaagaggaaaaagaggaagccaagaccccgcaa

SEQ ID NO: 136104 - RNA, 70 nt, Homo sapiens
cccgcccagcgccgcagcacgcggaccagggccggccaacaaaagcccgggcggacgcaaggccacggga

SEQ ID NO: 136105 - RNA, 70 nt, Homo sapiens
aaaggacgcgaggacagggggaaaaacagaccaagccaagagaaagaagagagaaaccacagcaacaagc

SEQ ID NO: 136106 - RNA, 77 nt, Homo sapiens
agcaaggccaccagaccggccacccagagacggggccgccgcgcagaagagagccgcccgggaggccccacggagac

SEQ ID NO: 136107 - RNA, 80 nt, Homo sapiens
cagaaacaaaagcaacaaagaggggcccgaaaaaaacccccggcggccagaggaagagagagacaggcaaccaaggccga

SEQ ID NO: 136108 - RNA, 76 nt, Homo sapiens
caggaagggcggaggaggcagaggccaacgcccgggcgcgcgaggccagagagggggaggggaacgcccgcggacg

SEQ ID NO: 136109 - RNA, 62 nt, Homo sapiens
cccccgacaagaggaaccacagaggcacagaaacaaagagcgacaggaaaccggaaggcagc

SEQ ID NO: 136110 - RNA, 78 nt, Homo sapiens
cgcaccacgcgcggaaagaaaaggaagcgaaaaaccaaaggcgcagccaaacggagcagggagacgagcccagggcca

SEQ ID NO: 136111 - RNA, 99 nt, Homo sapiens
gcaaaaaaaacaggagaaaaagacgaggcccccaagcggggaaaagacagaggcgagaccggacaggaaagcccccagagaccaaccgagcaccagcac

SEQ ID NO: 136112 - RNA, 81 nt, Homo sapiens
aggaccaaacccaaagcaggcaagaggcagagaaaggagacggaaagaacaggccaagaaaagccaaagaaagcaaaacca

SEQ ID NO: 136113 - RNA, 91 nt, Homo sapiens
ccagggccagacaccaaggagcgcagcagcgcgcagggcagccccagcgagcacccgaggaaggcccagcaggagaagacagacacggccg

SEQ ID NO: 136114 - RNA, 75 nt, Homo sapiens
cgacgggcggccgcgcccgcgcggcaggaggggacggccgggccggcgagaaggcgcccggagagcgaccaaaca

SEQ ID NO: 136115 - RNA, 114 nt, Homo sapiens
gcgcagcaggagggagaggggcaccaaccgccggacaggcgcagcggaggcacaaagggcccgagggccggggacaaccacagcagcggggagaggcggggcgcaggaacacca

SEQ ID NO: 136116 - RNA, 85 nt, Homo sapiens
aagcagaaccagcaaagaggagcgaagcggagcgcagggccgacacaagggaagggcacccaccccgccccaccacagcgaccgg

SEQ ID NO: 136117 - RNA, 83 nt, Homo sapiens
ggccccgaggccggcaacggagacccaagaacgacaccgaacaccgcacagaaagcagaccaaccgacaccagaggaaacaaa

SEQ ID NO: 136118 - RNA, 81 nt, Homo sapiens
accgaaacagaaacggaacaccaaggaaccccagggccgcacaggacgcggggcgcgggagcccagcgccggacccaacca

SEQ ID NO: 136119 - RNA, 65 nt, Homo sapiens
aagccggaaaaggggcgcaagaggaaacagaaggcaagaacgccccggcaaggacggaggcaggc

SEQ ID NO: 136120 - RNA, 85 nt, Homo sapiens
ggggaacggaccgcgaacaggacggcaaagagggccgcagaagaacagaccgccgaagaaacgaagcggcaagaggaggaacagg

SEQ ID NO: 136121 - RNA, 74 nt, Homo sapiens
agaccacaacacaaaaccaccaccggacaagaggaaaagggagaaccaacaaagagggcaccacgaaacaaagc

SEQ ID NO: 136122 - RNA, 82 nt, Homo sapiens
cagagacagacacacggggagacgaagaaggcagaaggagccaccaagaacaacaggacagggacccagacgcggcaaaccc

SEQ ID NO: 136123 - RNA, 54 nt, Homo sapiens
caacccaaaacagggaccagaggacggggaacaagcccgagaagacagcaccac

SEQ ID NO: 136124 - RNA, 88 nt, Homo sapiens
aaccggcccggggccccgaaacgggccgcccccacagcaccccgggcggcggagcacagagggccggagcggagagggccgggagcac

SEQ ID NO: 136125 - RNA, 65 nt, Homo sapiens
agcggccacccgacagcaagcaccggagggagaagacagcagaacgcgggaccgaaggacgaaca

SEQ ID NO: 136126 - RNA, 68 nt, Homo sapiens
ccgcacagcgaccagggcaaccgggaccagcgagcgacaggggacagaagggaccaacggccaaaagc

SEQ ID NO: 136127 - RNA, 86 nt, Homo sapiens
cggacgggaaggcgggagacgagaagccgaaaagcgcagcgagcggagccgccggagccaagacaggaacacagagagcaacagac

SEQ ID NO: 136128 - RNA, 84 nt, Homo sapiens
cgacaagccgcggcagccgcggaccaccgccgccagggaaggagggccccggagcagccacaccaccgaggccccacccagcac

SEQ ID NO: 136129 - RNA, 68 nt, Homo sapiens
cagagaggggcaccccggggacaagccgcaccacgccaaggaaaggagcaaaggagcagcaaaagggg

SEQ ID NO: 136130 - RNA, 82 nt, Homo sapiens
aaacggacgcccacagaaggaagcacaaaaagggacagcggacaacggaggaacaaaccaggggccggccaacagaacagca

SEQ ID NO: 136131 - RNA, 41 nt, Homo sapiens
cccgagaagcaaaaaacaggaaaagcagaggggcgaaacca

SEQ ID NO: 136132 - RNA, 81 nt, Homo sapiens
ggaaagaggagaaagaacacggaacagaacaacccagaacggaagccccccggaaaagaacagacacaccaacagcagcag

SEQ ID NO: 136133 - RNA, 75 nt, Homo sapiens
accgggcggagccagccgggccagccccgcgacggcccacgagccaagcccagcccggccagaagaacagaaacg

SEQ ID NO: 136134 - RNA, 72 nt, Homo sapiens
cgaaagaaaaacagcccagggacaggaaccaaccgaaagaaaacaccgggaaaggcccaaaccggcgaaaac

SEQ ID NO: 136135 - RNA, 78 nt, Homo sapiens
gcggacccggagagccccggaggagcggagagcgagcggcaacccggagacgaagagagaaaggcagggcaccccacc

SEQ ID NO: 136136 - RNA, 52 nt, Homo sapiens
cacaccgagacacaagcagcgagcggaaaccgaaagaaggacagcaaaggcg

SEQ ID NO: 136137 - RNA, 77 nt, Homo sapiens
gcaccgcagaggcaaggggccaccaggaggccagggggcgccagggggccgcagccggccaggggacccgaaggggg

SEQ ID NO: 136138 - RNA, 73 nt, Homo sapiens
aggacggagagcagggacaaaggagaaacagagacaccccagaaacagaggccagaagcaaggaaagagcagg

SEQ ID NO: 136139 - RNA, 85 nt, Homo sapiens
gagaggaagaacaaagaggcgccaaagagaggaaagacagccgaagggcacaggaccagcgcaccgcgccacggcccccccgcgc

SEQ ID NO: 136140 - RNA, 72 nt, Homo sapiens
aaacgagggacaacacagacccaccagcagaggaccgacgcaggcgggcccaagcgcgaaggaaaaacggaa

SEQ ID NO: 136141 - RNA, 64 nt, Homo sapiens
cggacccaacccaaaacaggacagagcgcgaccacacacaccagggccaagggcagggagaagg

SEQ ID NO: 136142 - RNA, 64 nt, Homo sapiens
caaagccaagccaccaaacgaagagccccagcaggaggaccacagcaaagggccaaggccagca

SEQ ID NO: 136143 - RNA, 72 nt, Homo sapiens
cagacggacccaagaggaggggcagaaagggagcgcgacgacaggccaagagagggaaaccccagaagcagc

SEQ ID NO: 136144 - RNA, 75 nt, Homo sapiens
gagaaccaccaccaccgaaaaaaaaagaaaaggaaggagagaagagagaccagaacacacaagaaccgggagaac

SEQ ID NO: 136145 - RNA, 82 nt, Homo sapiens
gaaccgaaacggaaagaagcaccggagagacagcacagcacccacaaagcaacggacagagcgggagccaccagcgccaaag

SEQ ID NO: 136146 - RNA, 78 nt, Homo sapiens
ccacagaaggacgggagaacaccccacagggaagaggaggcccagaacaggcaggcaacgcaacgcaggacgcggaac

SEQ ID NO: 136147 - RNA, 82 nt, Homo sapiens
ccgagagacaccaggagagcagcagaccaagcgaagaagaagcagcaacgggaacagagaggagagccagagcagacagcca

SEQ ID NO: 136148 - RNA, 35 nt, Homo sapiens
gggcacacgagacaaagggccggggacacaagcaa

SEQ ID NO: 136149 - RNA, 66 nt, Homo sapiens
gagcgacgcggaaccccgggcgccgggccccagcagacccgggggcacggaccgacccacgaggcg

SEQ ID NO: 136150 - RNA, 84 nt, Homo sapiens
ggggacggccagccaaccgccggcaaccccgggcggccgcaccgccagagaaccaggaggaacacggaggacccaaaccgaaca

SEQ ID NO: 136151 - RNA, 83 nt, Homo sapiens
ccggcccggccggagggcagcgccagaggcggcccaggaggaaggcccgcccgcaggcaacaccgggcgggcccgcgagcagc

SEQ ID NO: 136152 - RNA, 56 nt, Homo sapiens
agccaaaggaagccaggccacgaaacaccaggcacgcaacaggcccagaggcgagc

SEQ ID NO: 136153 - RNA, 33 nt, Homo sapiens
ccaggggacagaagaagaagaccggaaaccaac

SEQ ID NO: 136154 - RNA, 84 nt, Homo sapiens
ggacacggggcagcgacccgcccacgcccagcagcagcagcaacaggccaaagagaagaggaagcccggaggaggagagagaga

SEQ ID NO: 136155 - RNA, 73 nt, Homo sapiens
ggagcgaaagcgccggaagggcaagcccaggaaacccggcaccgaggaccaagcagcccgccagcagacagag

SEQ ID NO: 136156 - RNA, 71 nt, Homo sapiens
agccgggggaggcccaaccagagcaagccaggagcgaaaacgccacaacagagggggccagggcggggaag

SEQ ID NO: 136157 - RNA, 79 nt, Homo sapiens
aggcccaacggccccagaacaaacagggagcagaagggagaagggcagagcgggagcagacagaccaccaagcggcgac

SEQ ID NO: 136158 - RNA, 57 nt, Homo sapiens
gagaaggaccaagaaccaggggaaacaagccggcgcgccacagcgggcacagaaacg

SEQ ID NO: 136159 - RNA, 101 nt, Homo sapiens
ccaagaggaccagaggaagccaggcaaaaaggggcagacgcggcagaccgagccacaccgccggacaagacgcagagagccgacagaccccgaagggacag

SEQ ID NO: 136160 - RNA, 77 nt, Homo sapiens
gcaaacgaaaagccaagccgggcgcgccacaaggagggaaacgacaacaagcccccgaggaaagcacgcacaacgag

SEQ ID NO: 136161 - RNA, 81 nt, Homo sapiens
gaaaaacgaccggcccaccagacggccagaacaaccggccaggggcaaaggagaggaagaggaagaggaagaggcagcggc

SEQ ID NO: 136162 - RNA, 81 nt, Homo sapiens
agaaccagcaaacgggcccgggggcagaggccaaccccagagcgccgagcaaggagccgagaggaaaaagcccaggagcac

SEQ ID NO: 136163 - RNA, 83 nt, Homo sapiens
gagacagccgcccagagcgagcgggggaggcccaagccgcgcccgcgcccccagcgcaggacgcaaacagcagacggaagacc

SEQ ID NO: 136164 - RNA, 74 nt, Homo sapiens
cagagcacccccccccaccagaaaccgcgcaccccacccggcacacggcccgcgcagcccgcgcgccaggggcc

SEQ ID NO: 136165 - RNA, 66 nt, Homo sapiens
aggaccagacagcaagccacgacccggaggcggacgaacgagaaaaggggagcggcacgggaaacc

SEQ ID NO: 136166 - RNA, 95 nt, Homo sapiens
ccaccacgacccgggcccagaccaaccagcccaaggaacaccagaacaaacggcagaaaccgacaggacaaaggaaagaagccacagcaacgaga

SEQ ID NO: 136167 - RNA, 57 nt, Homo sapiens
gccgccagaggagcaggacgagacccagcaggcgaagaagcagcagcccaagagcag

SEQ ID NO: 136168 - RNA, 88 nt, Homo sapiens
cagccccccgcccggccagccgccccgccgggagggccaggaaggaaacgggagaaccggaagcccaggccggccaacaaccccaagc

SEQ ID NO: 136169 - RNA, 79 nt, Homo sapiens
gcgccagaggaggagccagaaacagaccagccccgggccccagcgcccacccaagacagacaagagaagagaggaaaag

SEQ ID NO: 136170 - RNA, 77 nt, Homo sapiens
acacgggaagagcgaccagccaagggcaacccccaggagaccagcaacgcaccgagcaagccacccgaggggacgcc

SEQ ID NO: 136171 - RNA, 34 nt, Homo sapiens
cagggggagggaccaagaaccaacaggccagcca

SEQ ID NO: 136172 - RNA, 76 nt, Homo sapiens
agcaggccagcgggccggcggacggagcacgcagacccgcaaagacagagcgccaaggccgcgggcaggcccggga

SEQ ID NO: 136173 - RNA, 80 nt, Homo sapiens
gcgacggcgcccggcaaggacaagagccggggccggggcccacggacagcccagccaagcgccgaccggcaaaagggccg

SEQ ID NO: 136174 - RNA, 78 nt, Homo sapiens
acgcgggccgcccgacggcggccaccggacgcggaggccagcacaccaggacgccgcgcgccaccagccaccgacccg

SEQ ID NO: 136175 - RNA, 78 nt, Homo sapiens
gccgcaacgcccaaccaggaggcagcagagaccacacggcggcgcagacgccccccgcagcgccccaggccgcaagag

SEQ ID NO: 136176 - RNA, 69 nt, Homo sapiens
aaaagagaaagaagagcccccccaccacgaaaaccggagaggaggaacaaagcaaagcagcggcaggga

SEQ ID NO: 136177 - RNA, 78 nt, Homo sapiens
ccaaaaaccggacagccaagcaacagcccagcaagggcccagcaggcgcagcagcaagagggaaaaaggcaacgggac

SEQ ID NO: 136178 - RNA, 51 nt, Homo sapiens
cccggcgccggccgagaaggcagaggcggagcgaagcagcaggggacgaga

SEQ ID NO: 136179 - RNA, 61 nt, Homo sapiens
aggcgacgcaaccaagcaccgaaacagcaggagccgcccagcaaaacccaacgggaacccg

SEQ ID NO: 136180 - RNA, 58 nt, Homo sapiens
ccacggagccaaccagaccaaggcagaagggaccaggccaacccccaccccggacccg

SEQ ID NO: 136181 - RNA, 87 nt, Homo sapiens
cagacggcaaaggcaagagaacagcagcgccgcccgccgacagccaggcccgggagaagcgccagccggaagcccgagggcagcgcc

SEQ ID NO: 136182 - RNA, 72 nt, Homo sapiens
cagagcaaagagagaaccacccgcacacagccacgagcaaagcagccaagaaccgagaagaccggacagaag

SEQ ID NO: 136183 - RNA, 82 nt, Homo sapiens
gcggaggggaccagagaccaaaaaaaaaacgcgaacaccgacggagccaggagcggccaagaggaccccggcaagcacccag

SEQ ID NO: 136184 - RNA, 76 nt, Homo sapiens
gcaagagccgaccccgagagggaagcacaccagccacacagccagccgggaagggacccccaaaagacaagggcaa

SEQ ID NO: 136185 - RNA, 84 nt, Homo sapiens
gagaagggaagcgcagacgggacacagcggggcaggagcgcccgcaccacaccccacccaccaccgcccagcgcgcccccccag

SEQ ID NO: 136186 - RNA, 54 nt, Homo sapiens
ccgcgcgggagaagccagggccgaaccgcgggcaaaagaaccccagcaccccac

SEQ ID NO: 136187 - RNA, 126 nt, Homo sapiens
caaggacagcaacaagcgacaaccagaaggggaacgaaagacagaagcagagcgaacagaggcccccgggcggggcgagcaagccccggaggaccgggggacagcggcccagggaccggggcgcag

SEQ ID NO: 136188 - RNA, 77 nt, Homo sapiens
cagagcccggagcaggaaaaacacagagacagacggcggcagaccacccaagaagaccaaggcccaaaaggacccaa

SEQ ID NO: 136189 - RNA, 76 nt, Homo sapiens
aaagaagaacaaaacccagggcccaccggccccgggccagcgccaggccgggccgccccaggaggagagcagcagc

SEQ ID NO: 136190 - RNA, 71 nt, Homo sapiens
ccaacaggagagcgcgaaacaggcggaccacacgaagaccacaaaacccaacaaaaacaaaagcacaaaga

SEQ ID NO: 136191 - RNA, 57 nt, Homo sapiens
ggcgggacaggcgcgccccccccggcccaccgaaggaaaccagaggaggaaggcaag

SEQ ID NO: 136192 - RNA, 84 nt, Homo sapiens
gacagaaagagagcgggggcagcgacagagccaaaacagagcggaaccgaggagagagccccccgggacccccaggcaggccaa

SEQ ID NO: 136193 - RNA, 81 nt, Homo sapiens
cacaaaagaagaaaccggaaagcaacaacagccgggcggagacaaagcaggaggacacaagaagggaggaaaggcggaccc

SEQ ID NO: 136194 - RNA, 70 nt, Homo sapiens
gccggaggagcacccaaccccgcgacacaagagagggaccgggaaaagaacacaggcaaaggaaacaagc

SEQ ID NO: 136195 - RNA, 65 nt, Homo sapiens
ccagcgcacccaggagggaacagcccaggagccagaggagacgggacgcgccagcccacaagaca

SEQ ID NO: 136196 - RNA, 83 nt, Homo sapiens
ggggagacccggggacccccgacgccaggcagcgcccccaaacgcacagcaaacgacaaggcaggagggggaaaaacgcgaag

SEQ ID NO: 136197 - RNA, 78 nt, Homo sapiens
caaggccgagggcagaaccggcggggagcggccggggcagagaccaacagaccagcaacaggccggcagggcacagca

SEQ ID NO: 136198 - RNA, 69 nt, Homo sapiens
cccccacgcggagcccgcacagacagacccaaagggcaggaaaagcacgaaacacaaagcaaaacggag

SEQ ID NO: 136199 - RNA, 77 nt, Homo sapiens
cgcgcccgccccccagcaccgggcggacggggcccggcgaacagccgaggaagcccggcaccagccaaagaagaaga

SEQ ID NO: 136200 - RNA, 84 nt, Homo sapiens
ccgcgccgcgccgccggccgggcagagagcgcagacaggacaccaaacaccgccgccggaacaacccgccaccggacgaggagc

SEQ ID NO: 136201 - RNA, 81 nt, Homo sapiens
ggcgacaaggggcccgaacagaggggccccgccaagacagccacacgaacacggacccccccaggcagagcagacagcaga

SEQ ID NO: 136202 - RNA, 71 nt, Homo sapiens
cccgcagccagggcgaacccccgcagagcgccgcgcccaggcggagacaggaggacccgacgcaaggacca

SEQ ID NO: 136203 - RNA, 76 nt, Homo sapiens
cgagaggaggaaggcggcaaaaggcggaccgcccccgccaacgaagaccgagaccagacggcccgcaggaaagaga

SEQ ID NO: 136204 - RNA, 79 nt, Homo sapiens
ggggacagggccgccgcaccccagacggagccgagccacgcggagcgccgggggcccagggacggcagggcgcggcaga

SEQ ID NO: 136205 - RNA, 83 nt, Homo sapiens
cgccgccacccccccccagcaggaggaaagagccaaccagacagccaggaagacccccgagaagacaaaaaaacaggaacgca

SEQ ID NO: 136206 - RNA, 74 nt, Homo sapiens
ggggcggcggccgggggcccagcccgggcggcgcggccaggccgaagggcaagagggcacagaagacggcgccc

SEQ ID NO: 136207 - RNA, 63 nt, Homo sapiens
ggcaaaacacgaccccaccagagacaaagcacggccagggcccggcgccagacgccgccgccg

SEQ ID NO: 136208 - RNA, 78 nt, Homo sapiens
agcagcgcgggagagcggaccccccgccaccgcccgagcccaggggacagagacgcgaagaggagacagagggaaaga

SEQ ID NO: 136209 - RNA, 75 nt, Homo sapiens
cgaaggcaacaggagcgggaaacggagaaaagaaagccagaaggaaggaagcaacgaaccaagaaaaaacggaac

SEQ ID NO: 136210 - RNA, 73 nt, Homo sapiens
cagcgagggaaagaacaaaccgcacgacacaggaaaggacaaaaccagaagcaggggaaagaagggcaagcga

SEQ ID NO: 136211 - RNA, 89 nt, Homo sapiens
gcggcggaggcgccaggacgacgaggaggagacgaccggccggaaaaccgcaagaccacagcagccacacccaccgcccgggcaggcca

SEQ ID NO: 136212 - RNA, 68 nt, Homo sapiens
ccccagaagaagaggggaacagggaagagcggccaagagagaaacacaagagaacaccaggcagcacc

SEQ ID NO: 136213 - RNA, 75 nt, Homo sapiens
ccgggccgacccggggcccgggagacgaagagcccgggcccgccacagaggggaacgaaccagcagaacaaccaa

SEQ ID NO: 136214 - RNA, 79 nt, Homo sapiens
ggggccgcgcccggccccgcgcgggcggacggcggaggcgcccccaggcgaaagggcgggggcgccgaggaagaaccgg

SEQ ID NO: 136215 - RNA, 74 nt, Homo sapiens
cggcagagaaaagagacaggcgaacacccaaacccaggagcggaccggcaccacacgggggccacccccggacg

SEQ ID NO: 136216 - RNA, 70 nt, Homo sapiens
gggacccaaaacagacccacaaacaggagacccaacaccacggacacagggaaagaccaccccagaacag

SEQ ID NO: 136217 - RNA, 64 nt, Homo sapiens
ccccacgcaccgcacaacaagaggccggcggggcgacagaaacccacagccgcgcgcgccggcg

SEQ ID NO: 136218 - RNA, 66 nt, Homo sapiens
aaacggaccagaccgaccaccaaaaacagagcggaagaccaaacccaagacacaacgaggggggac

SEQ ID NO: 136219 - RNA, 73 nt, Homo sapiens
ccacaccaaaccacaaaggcgaagagaggagccacgagacaaaggaccgacaggagcggacccgcggaggggc

SEQ ID NO: 136220 - RNA, 77 nt, Homo sapiens
gagaaggaccaagaaccagcaccgccggccaggaggagagcgcaccaccaaaaaggcaaacacaccagccccagagg

SEQ ID NO: 136221 - RNA, 69 nt, Homo sapiens
ggagcccgagagagaagggcagggcaagaacccgccacacaaggcgaacagagggcagcaggagcacag

SEQ ID NO: 136222 - RNA, 36 nt, Homo sapiens
gccgggagcggagccccggggccggggcagcagaag

SEQ ID NO: 136223 - RNA, 68 nt, Homo sapiens
acaacacagacccagaagagacgaaaaagacggcacaggcagcaagagcggaacacagaaagcaggga

SEQ ID NO: 136224 - RNA, 94 nt, Homo sapiens
ccgacaccagagagcggacgggagaggaagagagccgccggggcacaaggccaagacggccaagggagccacagggcccagagcacggaaccgg

SEQ ID NO: 136225 - RNA, 66 nt, Homo sapiens
gggacaggacagcgagcgaggacgaggaacggcggggaaccagaagaggccaaccagcacgaacgc

SEQ ID NO: 136226 - RNA, 86 nt, Homo sapiens
gcgggagcgagcgcagcaaagcgcccagccgccgcccgcgcccgcggccggggaaccacgaagcgcccgagacgccaccacgcggg

SEQ ID NO: 136227 - RNA, 37 nt, Homo sapiens
gggggggcacgggcccagaagacgcaaacagcagacg

SEQ ID NO: 136228 - RNA, 75 nt, Homo sapiens
ggaccgccagagacgagcaggagaaccgggggccgaaccgcagccaggcaggaaaaacccggcacaagagaccag

SEQ ID NO: 136229 - RNA, 83 nt, Homo sapiens
cccgccaggcggcaagggggcaccggcccgcaccaagagaagagccagcacaaagcgagaaggagggagaagggcgcgagaac

SEQ ID NO: 136230 - RNA, 80 nt, Homo sapiens
aggccggcagggaaaaacagagacccaagcccagaagccggaaagaaaaagccggaagcaggagacaccaaaggaaaaga

SEQ ID NO: 136231 - RNA, 86 nt, Homo sapiens
ggggcgagcccccccagaaaggaagccccgaaccggcccaaccccgcggcggccccccgcccgcccccacggcccagaggacaagg

SEQ ID NO: 136232 - RNA, 77 nt, Homo sapiens
gggcggccccccgggccgcggcccacgcccgcggagcagccggaaggaaaaaccacgcgcccggccacgggaggcgg

SEQ ID NO: 136233 - RNA, 74 nt, Homo sapiens
cccccaccaaaggaggaaacaccaccagaaaagggagcccaccacgaaagcagcaacagggcaaacagaagacg

SEQ ID NO: 136234 - RNA, 86 nt, Homo sapiens
cggcgccgagaggccggcgggacgcgggcgccaggaccggccgaacgcagagaacccaagccagacacgaaacccaaggggcaaag

SEQ ID NO: 136235 - RNA, 76 nt, Homo sapiens
cgacgaagaagacgggcccaagagggcgcgcaccggggagcggaaacacagagagaaagaaaagcagggccgacag

SEQ ID NO: 136236 - RNA, 81 nt, Homo sapiens
gagacagagcaagaaaagcccgggagcagaagggaggcccaagacccacaacaaaagaccccaagaagcccggcacggaaa

SEQ ID NO: 136237 - RNA, 115 nt, Homo sapiens
gcccgagaggccagaggcccgaccgcgaggagcggagaacgcacaaacgcgcggaggggacccaaggagggcggaccacccgggaggagggagacagcggaccggcccagaggac

SEQ ID NO: 136238 - RNA, 87 nt, Homo sapiens
agacgagaggacgggaccaggcgaagcggccgagcaggcgagcgaacgacgcccgggcgcgccaggcacagccaagagcggaccggc

SEQ ID NO: 136239 - RNA, 84 nt, Homo sapiens
ggggcgggcgaggcaccggagacccgagcaccccaacgggcaggaaaacaacggagcacgcaaagcaagccggcaacgggacaa

SEQ ID NO: 136240 - RNA, 75 nt, Homo sapiens
ccccaaacaaggcccacacgggaaagaacgccggacaacagcggcgaagaaggcaaaccgaaggcccacagagaa

SEQ ID NO: 136241 - RNA, 87 nt, Homo sapiens
caacaagaggacccaggagaaacgccccaaagccgccgccgccaggaaccagaggaggcccgcagggacagcacgagcagccgcagc

SEQ ID NO: 136242 - RNA, 72 nt, Homo sapiens
accgccggccccgggccagcccagggggaccgggggaacgcggggcagcagggagcgagcggagaagggacc

SEQ ID NO: 136243 - RNA, 80 nt, Homo sapiens
ggaggccgcccggcgcagcggggaccggcggcggcgcccaggcacccggcccggaacaggccaccagggggaaaaaccag

SEQ ID NO: 136244 - RNA, 60 nt, Homo sapiens
gcagaccccacaacggaccagcagccaccgaggaaagggagaacaggggacccaccgacc

SEQ ID NO: 136245 - RNA, 80 nt, Homo sapiens
agaggcagcccgaggaggaccacacgagagcaaaagagaaacgaccgaaagaagaaggagcccagccccaagcagcacaa

SEQ ID NO: 136246 - RNA, 53 nt, Homo sapiens
gccaacaacacgcccaggaaggcacaaccccagaaggaagggagcccaaaaca

SEQ ID NO: 136247 - RNA, 77 nt, Homo sapiens
aagaaagaaaagagaaaggaggcggaagaaaggagcgcagaccgggggaaggagaggagccccaagccaggcacaga

SEQ ID NO: 136248 - RNA, 77 nt, Homo sapiens
gaacacccacccggcccccagcacaggaaagcagcgggcaggaggggaaaccggcgaagcacaggggcccgggggca

SEQ ID NO: 136249 - RNA, 81 nt, Homo sapiens
ccggcgccccggagcggagcgcaggcgccgagacgacaacgcggcccacaggcaacagagagcaggaaagaagaacagcgg

SEQ ID NO: 136250 - RNA, 72 nt, Homo sapiens
cccggaccgcaaaccaacaacgcagaaaccgacggccaggacgcacgagccccggaaagcgaacgaagcgga

SEQ ID NO: 136251 - RNA, 72 nt, Homo sapiens
cggcagggaagaggcgagacagaagagagaggaagagggcgggaggcccagacccgcaggaagcacagacag

SEQ ID NO: 136252 - RNA, 79 nt, Homo sapiens
cagagcccggggacggcgaggccccagaccacacgagccaggcagcgagcgggagcagacagggaaccgaaggcagcag

SEQ ID NO: 136253 - RNA, 78 nt, Homo sapiens
ggaggggcagcggagaggggcaggaaagagcgagaggagacaaccaggaaccagccaagcacccaggaagaggcaccc

SEQ ID NO: 136254 - RNA, 75 nt, Homo sapiens
agaaaggaggagggcagaaggggacagggaaaagaaagagaccaaagaaggaaacccagacgacaaggaaggcca

SEQ ID NO: 136255 - RNA, 73 nt, Homo sapiens
gggagccagaagcacaggcccgggcgaaggggccacgcgagaggaagaaagacgcacacaccgaacagaggaa

SEQ ID NO: 136256 - RNA, 70 nt, Homo sapiens
aaacacaccgaagcaaaaagagaacagagcccgcgacaaaaaagaaccagggaaagaacggagaagcggc

SEQ ID NO: 136257 - RNA, 36 nt, Homo sapiens
gccgagacaccacgccagaaagcagaagccacccag

SEQ ID NO: 136258 - RNA, 112 nt, Homo sapiens
cccggagaggagccgcccaccacccgcacaccaggaggccccgcacccgggacacggagaaccacggggaccaagaagcgagcagcccaaacggacccgggaacaagagccg

SEQ ID NO: 136259 - RNA, 86 nt, Homo sapiens
gcgcagagggcccccggcgccgccgagcgcgcccgcgcccacaccccggacaccgcgccacacaaccgagccagcagaagagacac

SEQ ID NO: 136260 - RNA, 73 nt, Homo sapiens
acaacccaaacccccaagacggcgaagacaaacacccacagagggccacacaggaccaggcggacaagacggg

SEQ ID NO: 136261 - RNA, 63 nt, Homo sapiens
ggacgacgcggacagcgggcggagccgacgagcggcggacaaaacagaggagaccagaccaga

SEQ ID NO: 136262 - RNA, 76 nt, Homo sapiens
ggaagggcggggggcgggccggaggggagacgggaggcagcaagcccggagaaaacaggacccggaaggaaacggc

SEQ ID NO: 136263 - RNA, 86 nt, Homo sapiens
cacaggcgccacccagggcgggcaaagcgagaggcccggccagagaccgccgggggagcaaggcgaccgggcgcgcccgaaggggc

SEQ ID NO: 136264 - RNA, 74 nt, Homo sapiens
cccccggagcgacagaaacaagggaagaccgcaggaaagcaggaaggcaagaaagccaaggacgaaacccacac

SEQ ID NO: 136265 - RNA, 66 nt, Homo sapiens
ggaaaggccagaacaaccaggaggcacagcgagaagggaaggaagcccaggaggacacgaagaagg

SEQ ID NO: 136266 - RNA, 85 nt, Homo sapiens
gcgcccgccaggggggacacggcaaccgaccgccgaccaggcacgcccaaccccgcgaaggaaggggacccaagccgccaggacc

SEQ ID NO: 136267 - RNA, 62 nt, Homo sapiens
aacaagaggggacagaaaggcagccacgcagcaggaagccccggaagcccccgccccaccaa

SEQ ID NO: 136268 - RNA, 79 nt, Homo sapiens
gaaagaagaaggaggaacagggccagcagggagagacagagacgagaagcaaaggggaaaggccagacagcgcagcagc

SEQ ID NO: 136269 - RNA, 68 nt, Homo sapiens
agaccgaggggccgcccgcaggaaggcaaggacagccagccccaggaaacagccccccccacgccaac

SEQ ID NO: 136270 - RNA, 66 nt, Homo sapiens
gcagggaaacgcagacagccaggcccccacgcgaagcaccgagccagacccccaggcaaaccgccc

SEQ ID NO: 136271 - RNA, 91 nt, Homo sapiens
caggcggagcccaagccccagcccccgggcgaggcacaccccggagccaggaggaccccaagaagaagcggaagaggagccgcggaaccaa

SEQ ID NO: 136272 - RNA, 74 nt, Homo sapiens
caccaaccaagcccccggaagacggcccgccacgggccccgcagccgcgcccgagcgcccgagcagggacagcg

SEQ ID NO: 136273 - RNA, 81 nt, Homo sapiens
gcccaaaccccaggccaagcaaccaccagcagcccccagagcggaacacagcaggcaggagaagggcaccggggaggaccg

SEQ ID NO: 136274 - RNA, 71 nt, Homo sapiens
ggcagcgcccccaaacgaaaacccaaagacagcgccgaacgcaggaagcagccggaaagacagcaaagaac

SEQ ID NO: 136275 - RNA, 59 nt, Homo sapiens
ggacacccccgaacaaaagcaaaccagcagccgcgaggccaaggagcaggaaaagcagc

SEQ ID NO: 136276 - RNA, 77 nt, Homo sapiens
ccgggcgagcgcaaaggaaggcgccgggcccgacccgcgagaggagaaagacagcaaagaaaaggagaagaaaggaa

SEQ ID NO: 136277 - RNA, 39 nt, Homo sapiens
gccagacccacaccgccgggaaccggagaggacacagca

SEQ ID NO: 136278 - RNA, 68 nt, Homo sapiens
agcgacgcaccgagaaaggaaggaaaaccgacgaaacagccaggccgccgcggcagcgagaaagacca

SEQ ID NO: 136279 - RNA, 59 nt, Homo sapiens
caccgcaaggacccaaaggggagacggacaaagaccaaagaaaagcaaacccggggaac

SEQ ID NO: 136280 - RNA, 66 nt, Homo sapiens
cagacaagaggaaccgcgccccagaaggcagaggaacacaacagggggggagcagaacacgggaac

SEQ ID NO: 136281 - RNA, 82 nt, Homo sapiens
gaaacgacacacaaagaaagaggagccggggacaccgggggcggccgagcgacacccaagcgacaggccgggaggcccgggc

SEQ ID NO: 136282 - RNA, 55 nt, Homo sapiens
ggcaggaggcagagaacacaacaggaggcacagaaagcacgaggccaagggcggg

SEQ ID NO: 136283 - RNA, 82 nt, Homo sapiens
acccggggccggcccgcaaggcgcccccccagagagccagaaagaaaaacaagggacgaacaaaacaccgaggaaggacaca

SEQ ID NO: 136284 - RNA, 81 nt, Homo sapiens
gcggcggccgcagcgccacaaaccaggccgacgcagcagggcccagggcaaagagggcgcacgagagagggaagaggagcc

SEQ ID NO: 136285 - RNA, 70 nt, Homo sapiens
gcgggaagacagaaccagggccgggggccaggcccgccaagcgcccccgggcacgagagcggacgagcca

SEQ ID NO: 136286 - RNA, 87 nt, Homo sapiens
ccacaggcagagagagaaacaggggagcaagggcaagagccacaaagggaccgagaagcgaagacaaggggcgacgacccacgccgg

SEQ ID NO: 136287 - RNA, 72 nt, Homo sapiens
agggaagaagccgggaggaagaccacgcaccacagaagacccccgaccaaggaggggcgcaaaacgagaaca

SEQ ID NO: 136288 - RNA, 65 nt, Homo sapiens
gaggagaccagaacgaacccccccccccggagacagggaaagagaaggcacagggcagagcaaca

SEQ ID NO: 136289 - RNA, 78 nt, Homo sapiens
acgcgagagcaccaccagccacggggccaccaggacaagcgggcagaacagcgcggcagcacacggcggcggcgaagc

SEQ ID NO: 136290 - RNA, 54 nt, Homo sapiens
gagagcaaccacagcggagacagaccaaaaaaccaaggacgacgggaaaccgga

SEQ ID NO: 136291 - RNA, 61 nt, Homo sapiens
caacagacgcacaggaacagaggcgaaccgcgcgcacaaagagcacaacgccccacccgac

SEQ ID NO: 136292 - RNA, 71 nt, Homo sapiens
agagacaccagcacgcgccaccaccaaccagacgcggccggagcccccccagacacacgagggggacaccg

SEQ ID NO: 136293 - RNA, 88 nt, Homo sapiens
caaagccggcccagcacgggaagggaaaaagcaagcagggcccgaagaaagagaaggcagagagaaacaaacagaccagaagaggcac

SEQ ID NO: 136294 - RNA, 113 nt, Homo sapiens
cgcaccagcggcagcgggaagcggccagccgagcaagcggaggaccacgccggccggagggagggaagagaaaccaagaaacccaaaggaaaacaagaaaagacaccacaaca

SEQ ID NO: 136295 - RNA, 37 nt, Homo sapiens
ccagagcggccagccagggaggacacgggagccagag

SEQ ID NO: 136296 - RNA, 74 nt, Homo sapiens
gagaagcaggcaccagaagccggcccccaacaccagagggaacaccacaaccagaacagaccaagaaggggaga

SEQ ID NO: 136297 - RNA, 73 nt, Homo sapiens
acgccggagcggaccaaaagggggaccagccgagcaacgcccgcaggggccagcgggaagaccacacccccga

SEQ ID NO: 136298 - RNA, 88 nt, Homo sapiens
cccgccccggcacacgcgcagccccggccccggcccgccggagaaacagaccaacagagaggaagcggccacccgcacagccgcacgg

SEQ ID NO: 136299 - RNA, 73 nt, Homo sapiens
ccgcgccgggcggcggggcagccccaggagagaaagcccggaggagcggaaagacggaacgagggaaaccaag

SEQ ID NO: 136300 - RNA, 76 nt, Homo sapiens
gccacccaaagccgaaggagggccgccccaaccgggggagaaggcagaaaaacgcacggcagagccacagaaagga

SEQ ID NO: 136301 - RNA, 81 nt, Homo sapiens
ggcccccggccggcgcgcgagggcgcgggaacccaccgccaccagcgcgggcgcgggccaagcaagcagcaaccaagcaag

SEQ ID NO: 136302 - RNA, 71 nt, Homo sapiens
cccaccacggagggaaagaccaggcagggagccacagccccgacgaggaccaagggcccagggcagagcgc

SEQ ID NO: 136303 - RNA, 74 nt, Homo sapiens
ggaaacccaaaagagaccagagacagcgaagacccccggagacagaaaaaaccgccgcaccagaggaaaccgaa

SEQ ID NO: 136304 - RNA, 94 nt, Homo sapiens
agcgagggggggcgcgccggaaaccggagcgcgcagcagccgacaaccccggaacgcgggcaaaaggccccaggggaccgggggaggccccaga

SEQ ID NO: 136305 - RNA, 69 nt, Homo sapiens
caaacggcagaacgaagcccccggcaccaagaggaagcaagacaaggaacgaaaacgcagaacaaagcg

SEQ ID NO: 136306 - RNA, 67 nt, Homo sapiens
cggcccaggagcagaccagaagggagagaccaggacacagagaacagggggaggcacaggggcacac

SEQ ID NO: 136307 - RNA, 69 nt, Homo sapiens
gaggccggcaaacggaggagcaaacagcaagagggaaacagaaaaaggacaaggagcaagaccacacag

SEQ ID NO: 136308 - RNA, 90 nt, Homo sapiens
ggaccggccgagaggaagacgagccgggaggaacggcccggaaacaggaggacgaagcaagaggcccccaagaacacaccgaggaaaagg

SEQ ID NO: 136309 - RNA, 79 nt, Homo sapiens
agcacgagcacccgccccaacgagagacaggggccaggccaggggcaggggaagcacccaaccaacgagcgggccacac

SEQ ID NO: 136310 - RNA, 78 nt, Homo sapiens
gcagcgggacggacaggcagggaagcaacgcagaggacaaccagagggaaaaaacaaaggcagcacggccgagacaga

SEQ ID NO: 136311 - RNA, 76 nt, Homo sapiens
gaggagcgcggagggcggcgcaggccggggcgagcggcgggcccgcgggccaggccgggagagcccaagagacaca

SEQ ID NO: 136312 - RNA, 80 nt, Homo sapiens
gggccagccacacagacagagccacgaaaacgcaaaggaaggacagacccacccacaaaccagggccaacaaggcagcgc

SEQ ID NO: 136313 - RNA, 75 nt, Homo sapiens
gggccgcggcgcacggagcagcccacgaggggccggaccggccagaaaaaagcgaacagaccccccacgccccaa

SEQ ID NO: 136314 - RNA, 61 nt, Homo sapiens
ggggaaccgcagcgcaggacaggcagaaccccggcgcggcccggaaggaggcagaaaggga

SEQ ID NO: 136315 - RNA, 80 nt, Homo sapiens
cgaacgggaagcgggcagcacaaaacaaggccggacgaaagaaccagccaggaaaggagaggaaacggagaaaaaggagg

SEQ ID NO: 136316 - RNA, 65 nt, Homo sapiens
gccagaaaggaagaagcggggcgaccgagggcgcagaacacacaaagagagccaacggaccacaa

SEQ ID NO: 136317 - RNA, 54 nt, Homo sapiens
caaaagccaggcacaagaaagcgaaagggacggaccccggcacccaaacgcgac

SEQ ID NO: 136318 - RNA, 75 nt, Homo sapiens
ccccgcccccccgcaaccagagggaagccagcagaacggccaaggcacgggacaagccaccaggccccaccccca

SEQ ID NO: 136319 - RNA, 77 nt, Homo sapiens
cgccaaagcagggggaagccagagcaaacgaaggagaaaagaagcccagcaagcgagaaaagagccggcagagcagc

SEQ ID NO: 136320 - RNA, 89 nt, Homo sapiens
ggcggccccagcagacgcaggcagccccaaagccgaacaggcagggccagacccagcgcccgggcagccagaagcagaccaggaggacg

SEQ ID NO: 136321 - RNA, 52 nt, Homo sapiens
acagaagcgcggccaaggcccaaagaagccgcccccaagacaagggagagcg

SEQ ID NO: 136322 - RNA, 74 nt, Homo sapiens
cgccaccggagaagggaggaaaaccaacaagccaccgcaaggccagcgcacggaaaagcaaaggccagcccacc

SEQ ID NO: 136323 - RNA, 74 nt, Homo sapiens
gcaagaccgccgcaggggcacccccaacgagaaccgaacacacaaaagcaaaccgacaccagcgacacaagcgc

SEQ ID NO: 136324 - RNA, 83 nt, Homo sapiens
cggaccacacagcgcgggagccacgcagaggacgccggaacacccggaagccgagaaagcgaccgcgcgaacaaacccgaccc

SEQ ID NO: 136325 - RNA, 80 nt, Homo sapiens
ggcacagggcccgcccacaggcagcagcacggcacagcacgccgaccagccggcgccaaaggacagggacaagcgcacag

SEQ ID NO: 136326 - RNA, 83 nt, Homo sapiens
ggaaggcagaagaaagaagaggagaaggagcagccggccaagccagccccgagagcgcagacaggggggccaagccagagcca

SEQ ID NO: 136327 - RNA, 80 nt, Homo sapiens
aaaagcacgccacaccaacccagaagggccacagaaggcagaaacccccaaaccgaaggaaaaaccagaagagaaaaaac

SEQ ID NO: 136328 - RNA, 83 nt, Homo sapiens
gaggcggcgagagaggcaggcggagccgaccgggccagcaccccagaaccaaagcggaacacgcagaagccaaagagccagag

SEQ ID NO: 136329 - RNA, 69 nt, Homo sapiens
ccccaaacgggccagaaggcgcgaggcgggaacacgaagacagcaacggcaggcgaagagccaccagcg

SEQ ID NO: 136330 - RNA, 78 nt, Homo sapiens
agggccagacccgggccacgcgccccgcagcccggcagcgccggagcgcggcggagcaggccggggcccccacccagc

SEQ ID NO: 136331 - RNA, 66 nt, Homo sapiens
caggaccaggaacacggaaaagaagacagaacaggaaaagggaggcaaagacaaccagaaacccgc

SEQ ID NO: 136332 - RNA, 77 nt, Homo sapiens
agccacggacaccaggcaggccagagcagcaccaggccagagccagaacaaaggcgggggcgcaacacacagaggga

SEQ ID NO: 136333 - RNA, 74 nt, Homo sapiens
aaacaggagaaaacccagacagaacaccacggaaaacggacgagaacaagcggaaaacaggggcgaggggacaa

SEQ ID NO: 136334 - RNA, 81 nt, Homo sapiens
caccccggaacagcgccgaggcccaaggcagaggcgaggcggaagggcaccccacccggacaagaaggccaaacagccaca

SEQ ID NO: 136335 - RNA, 74 nt, Homo sapiens
agaagagcggagagaaaagaacaggggggccaaaacaagcacgacagggaagacccagaaaagaaacacaaaac

SEQ ID NO: 136336 - RNA, 79 nt, Homo sapiens
gaggcgaggagggcccaaccccaggacaccccgagagcccaaaaaaagcgccaaagaccaagcgcgcgccagcaggaca

SEQ ID NO: 136337 - RNA, 97 nt, Homo sapiens
ggccagccgcaagacccgccacaagcaacgcgggaagagaagacggggggggcggcaggagagagcgccgagcggagggggggcccacggagcagga

SEQ ID NO: 136338 - RNA, 82 nt, Homo sapiens
ccaccacgccagccgcaccagccgcccaagccgcacagccgcggcggcagcagcaggagaggcacccgccggcgccccccgg

SEQ ID NO: 136339 - RNA, 53 nt, Homo sapiens
ggccagcgacaacagcgcgccgggacggaaacagagacaccgaggcccggcac

SEQ ID NO: 136340 - RNA, 69 nt, Homo sapiens
gaaggaggggacaaccagccaagcgagacgacgggaccgaaggaccccgccagagacaaccgagcgcca

SEQ ID NO: 136341 - RNA, 79 nt, Homo sapiens
ggggcaccacagagagcggccgagggccggggagcaggcaggcccgggaagacgggacgggcaaacccgggagaagggc

SEQ ID NO: 136342 - RNA, 67 nt, Homo sapiens
agacccaccaacacaccagcagggagcaggaacgggccacgaacgacgcacggaggccacaacacca

SEQ ID NO: 136343 - RNA, 83 nt, Homo sapiens
acccaagaagaagaaggcgaaggaccccaacggggaggccaacggaagaaagaccgaaggagcagacgaggcacgagcgccag

SEQ ID NO: 136344 - RNA, 55 nt, Homo sapiens
aacagaacccaaaagccgacaaccccagaaacaggcaagaacgccccggcaagga

SEQ ID NO: 136345 - RNA, 58 nt, Homo sapiens
aacaagggaggcgaacagggagaagacagggcagacagaagccgggcccgggaggagc

SEQ ID NO: 136346 - RNA, 76 nt, Homo sapiens
gcgcccagcgcgcgcaggaccccggcggcgcgcggaccagggggcggcgccaggacaggagaagacacccgggcgg

SEQ ID NO: 136347 - RNA, 86 nt, Homo sapiens
aaccaagccaggcacacaggcaggacaaagaaggagagaaaggagcaacaaggaggagaaaaaagagcgacagggagaagaagaga

SEQ ID NO: 136348 - RNA, 80 nt, Homo sapiens
caaacagaagaagaaggcgcaacacagcagggcaaggagccagagaccaggagccccagagagcagagccccccacagaa

SEQ ID NO: 136349 - RNA, 81 nt, Homo sapiens
cgggagcggcgggaggacgggccggggagcagcccagaggcgggggagacaacagcccggcccggacgggggcacccaccg

SEQ ID NO: 136350 - RNA, 74 nt, Homo sapiens
ccaagaaaaaaaccacaaagcggccgaaacagaaaacaagagaccacagaaggcaccagaaaacagcgcaaacc

SEQ ID NO: 136351 - RNA, 70 nt, Homo sapiens
cgggagggaaccagcaacaagccgaggggcgcacccaacgcgcaccgagaagaacgagaggcacaggacc

SEQ ID NO: 136352 - RNA, 81 nt, Homo sapiens
acacaggacgaggccacgccccaggagaacagggaagagcagcggaggacaggagaaggcggggaaaaaaccagagaccac

SEQ ID NO: 136353 - RNA, 84 nt, Homo sapiens
cgggaccccggaagccaaaaagagacgaggacgcgcacaggaaaggacgcggaacaagcaggcagccaggcagcagaaggcagg

SEQ ID NO: 136354 - RNA, 71 nt, Homo sapiens
ggacccgcccagcagaagaagagaggagggagaacacagaaaccggccccagcacccaggaggggagagaa

SEQ ID NO: 136355 - RNA, 84 nt, Homo sapiens
ccgagaccaggaggaagacggcgaaggcccagcccccacagcccagccacaggagggagcacagcacggaacccggggccacgg

SEQ ID NO: 136356 - RNA, 79 nt, Homo sapiens
ccggagcgggaggcgggccagcgacaaaaagaggagccgcaagccagccaccaccacagacacggcagggaaaggaaaa

SEQ ID NO: 136357 - RNA, 73 nt, Homo sapiens
gccggcccgccacaccgcgcccacggccgggccacccacaggccgcaaagggggggccacgcgaacccagcac

SEQ ID NO: 136358 - RNA, 74 nt, Homo sapiens
ccgggggccgacacaccggacaggccacccgaccggggccaggagcaaaggaagagacgaaaaccacggcacgc

SEQ ID NO: 136359 - RNA, 83 nt, Homo sapiens
gggacagcgaccgaggccaacgagccccgcacgccacgcgcccaacacagagggcgaagacaggacggcccaggcagacacgg

SEQ ID NO: 136360 - RNA, 82 nt, Homo sapiens
cgggccaaggagggggagaaccgacgagaggagcgcaggccaacggcagcggcgaaggagaccgcccaaaccacccccccag

SEQ ID NO: 136361 - RNA, 78 nt, Homo sapiens
aaaaaaaaaaaccagagggaaacggcacaccaggcggcaggggcaaccagacgggccaagcaggcggacaccgaccgc

SEQ ID NO: 136362 - RNA, 82 nt, Homo sapiens
gcaaaggggaggacgcagcaaaccaccagaaggcagacccaacaccaacacgaggagaaggcagccccaggggcccagccag

SEQ ID NO: 136363 - RNA, 95 nt, Homo sapiens
ccgaacgagccccagccagggaacaaagaccaggaacggagccgagaaccagcagagggagagcagcgaacagaagcgaaaaccaacaaagacag

SEQ ID NO: 136364 - RNA, 74 nt, Homo sapiens
cagaccggacgggacgccccggacaggaaaagcaaccagcaaccaaaagaaagcccacgcccaccagcccagcg

SEQ ID NO: 136365 - RNA, 78 nt, Homo sapiens
gcggaccgcgggggagaacagcagcccgacggccaggaggcgaagagacgaggaagcccaggagcccgaacacaaaaa

SEQ ID NO: 136366 - RNA, 79 nt, Homo sapiens
gcaaggagcagcagccacaaaagaccaaaggagacagaacagacagaaaaaacaacaagaaacccacaaccaagagaac

SEQ ID NO: 136367 - RNA, 82 nt, Homo sapiens
ggggggcggaaccagccgcacgcgcggcccggggacagccgcgcgcccggccaggccgaaccggggcagcgcgcaaggagga

SEQ ID NO: 136368 - RNA, 82 nt, Homo sapiens
aagaacccgcccgcgccccgccgcggggcgcgcggcgccggcggcgcgcgacccccgcgcagagagcacaccccaaagccca

SEQ ID NO: 136369 - RNA, 79 nt, Homo sapiens
ccacaagacagcacaaaaagaccgcagagccaagccccacgacggaggcgccgcacgacgcggggacagaccccagcca

SEQ ID NO: 136370 - RNA, 74 nt, Homo sapiens
cccaggagaaaccggacgcgacgggagccaggcagcgagcgggagcagacagggaaccgaaggcagcagaaaag

SEQ ID NO: 136371 - RNA, 32 nt, Homo sapiens
aaacggaacccgcaccaagaggagcaccgacc

SEQ ID NO: 136372 - RNA, 101 nt, Homo sapiens
gggagcaccgacaccccgcagcggccccgccccgacgggcacaacccaaggccaaaaggcgcaagccaaggacacagcacacacacgggcgagcggaacac

SEQ ID NO: 136373 - RNA, 78 nt, Homo sapiens
gcagagggccaccagccacacggggccggggacacggggccgcggagcaccacccggaagcgcccggggccgaggcca

SEQ ID NO: 136374 - RNA, 64 nt, Homo sapiens
ggaccgcccggacacaagaaaaagagcgaaaaagacacgccgggacacagcaggagccaagccc

SEQ ID NO: 136375 - RNA, 86 nt, Homo sapiens
gccagcaacgcgggcagaggagcggagcggagaagccaaggacaggcaaaaagacagccgaaaaagggcggaaaagcagaagcccc

SEQ ID NO: 136376 - RNA, 82 nt, Homo sapiens
cgcacgacggcggggcggggcggagggccgcggccggacacgagaggcgagggacgacagagcaagcggcagagggcaagcg

SEQ ID NO: 136377 - RNA, 82 nt, Homo sapiens
gcagcagcccgccggggcgccgcagcccccggggcccacggccgcccgccaccagggggcaggggcccgcaccaaaccacgg

SEQ ID NO: 136378 - RNA, 71 nt, Homo sapiens
gggcaggggcggggcaacgcggaaggagcggagaaaaaaaggcaggaaagagaaagaagcgaggacaacgg

SEQ ID NO: 136379 - RNA, 78 nt, Homo sapiens
cgcgggaggaaagccaagcaggcccagaaccgggacaacccagcaaacaggccagacccgacaggagcgacaaacacg

SEQ ID NO: 136380 - RNA, 45 nt, Homo sapiens
gaaaaacaacgccccagaacacagagagcagagagcgaggcacag

SEQ ID NO: 136381 - RNA, 76 nt, Homo sapiens
gggagcaaaaggagaacaacaacccaagccccgggagagggaacacagggagaccaggcgcgacgcagaggaaaag

SEQ ID NO: 136382 - RNA, 69 nt, Homo sapiens
gggggggggaagccgcagcggaaagcaggagcacaggagaaaaccggaagagaaaggccgggaagcagg

SEQ ID NO: 136383 - RNA, 70 nt, Homo sapiens
ggacaggcggaggagggagcgagagccaccaaagaagaccagacaggggaaggagagacagagagggaag

SEQ ID NO: 136384 - RNA, 78 nt, Homo sapiens
gcccaggccagcgccccaggccaagagggacccacccggcgggcccggccaggccccaccgccacaagcaggggaaca

SEQ ID NO: 136385 - RNA, 88 nt, Homo sapiens
caacgaggacacgacccccgccggacgcaggacaacgcccaagggggaggcaacagcacccacccggagccggagccgggccagcgcc

SEQ ID NO: 136386 - RNA, 85 nt, Homo sapiens
gcgcgacggacgggggcgccgcccgcgcccgggaccgacccccgccgcggccgcgccgagaggaccgcccacaagggaggcagaa

SEQ ID NO: 136387 - RNA, 72 nt, Homo sapiens
aagacgggcggccccggggacacaggcgacaacacaccaacggcgagaggccaaggacgccggcgcagcaca

SEQ ID NO: 136388 - RNA, 73 nt, Homo sapiens
gcgccaagaccaacaagaaaaacccaggaggagcacccacgggagaccggggggcaagaaaaggaagaagaag

SEQ ID NO: 136389 - RNA, 69 nt, Homo sapiens
ggcagccggcaagaaaacgcgcaaacacaggacaaagagaaacaaaccgcaagaccgaaacagcaacaa

SEQ ID NO: 136390 - RNA, 75 nt, Homo sapiens
cgggcaaggaaggcgcggaagacccccaggcaaaccgccccgcagcaccacccggcccggcaaccaggaaagcaa

SEQ ID NO: 136391 - RNA, 55 nt, Homo sapiens
agccggcacccagaccaaccggaggagacacacaagccgagaccaccaggagcag

SEQ ID NO: 136392 - RNA, 72 nt, Homo sapiens
gaggaagggaaacagcagacagcgcaagcggcagcacaaagaggcaggagggaaaggagcggaaggcgaaaa

SEQ ID NO: 136393 - RNA, 73 nt, Homo sapiens
aacaggccggaaaaacagaagaacaaagaagccacagacaaagagggaggaacaaacaacaaaggaagggaac

SEQ ID NO: 136394 - RNA, 64 nt, Homo sapiens
agaacccccaagcaggaaggacgccgccagccaccggcgcgaagccagaccagaccagcagggg

SEQ ID NO: 136395 - RNA, 56 nt, Homo sapiens
cccgccaacgaagaccgagaccaggcagcgagaaggaagaaggggaggaagaaacg

SEQ ID NO: 136396 - RNA, 73 nt, Homo sapiens
ccaggccaaaaagaagagcgaccggcgaaaagagcaccggccagcagaaccagccggggccggcaagccccgc

SEQ ID NO: 136397 - RNA, 82 nt, Homo sapiens
gcggaccccagggccggcccggaggcgggacccagggcccaggcaaaagcagaccggaaaacccaccggcaagaccacaccc

SEQ ID NO: 136398 - RNA, 84 nt, Homo sapiens
cgaccacaaagacaccacagcaggccgggggaaaagccagaaagaggacacccgcccgggagccaggccgcaccccagaagcca

SEQ ID NO: 136399 - RNA, 70 nt, Homo sapiens
caggaaccggggggcccggcccccccgccacacgccagcaggacgcagggcccagcgcacccggacgacc

SEQ ID NO: 136400 - RNA, 59 nt, Homo sapiens
accacaagacccaggccacgccgagccgccaggcagcaggacggaagccaaacggggac

SEQ ID NO: 136401 - RNA, 66 nt, Homo sapiens
ggcgagccagcagaagaaaaggaaggaaccacaccaagaacaaccgccaagaacggcaaagggaca

SEQ ID NO: 136402 - RNA, 54 nt, Homo sapiens
cggaacagaaggcgcggccgaaaaagggaggagagagcgaggccacccagaagg

SEQ ID NO: 136403 - RNA, 76 nt, Homo sapiens
ggcgaagaaggcgcaacagacgacacccaaggaccaacagcaaaacaaaacgaagcaagacgagagcaacacgcaa

SEQ ID NO: 136404 - RNA, 69 nt, Homo sapiens
gcagaaccagcggcagggaacggaagagccaggcagagcgaagaaggcccagcaccccaacagagcggg

SEQ ID NO: 136405 - RNA, 65 nt, Homo sapiens
aagcaaaaaaagcagccaagccagccccgaaggccagagagaggggggaagaggaagaagcaaac

SEQ ID NO: 136406 - RNA, 81 nt, Homo sapiens
ggggcagcgccagcgccgagccacgcgcagcagaacacaaaggcacccgcgcaccccgccaccacaacacggcccgcgcca

SEQ ID NO: 136407 - RNA, 59 nt, Homo sapiens
ccaaaaaggcgcgggaagcaagagaggaccacagcaaagggccaaggccagcagacgag

SEQ ID NO: 136408 - RNA, 88 nt, Homo sapiens
gaccaaggcaacaaggacaacaagagacgggacaagacagggcaaaggacagaccagagaggagacgccggaggagagaaggcaaccc

SEQ ID NO: 136409 - RNA, 83 nt, Homo sapiens
ggaaccccgcggcgggagcgcggcggggccgcagagaccgccagagcggaacgaccccagagcgagcccgcagcagcccagaa

SEQ ID NO: 136410 - RNA, 75 nt, Homo sapiens
gggcacggacgagaggcacagaacagcaggggggaagaacacacgagagaaggaaggcaccggaacaagccagga

SEQ ID NO: 136411 - RNA, 75 nt, Homo sapiens
ggaggccccagggaagcgcagaaagcaggcgaacccgcggcgcaaaacggacaaggcacgaggcgcggcgaccac

SEQ ID NO: 136412 - RNA, 60 nt, Homo sapiens
ggaggcgcagcgccaagagaaggaaacccagcggcggcagaaccagccggcacaaagccg

SEQ ID NO: 136413 - RNA, 58 nt, Homo sapiens
ccaacgccggccggagcagcagcccgagggggggaagaaagaaggagaaggcggagga

SEQ ID NO: 136414 - RNA, 81 nt, Homo sapiens
accacgggaccgggcaagggaagaaaagaccaaagagaggcacaacacagaaaagggcccaaggaagaaagacaagaaaga

SEQ ID NO: 136415 - RNA, 90 nt, Homo sapiens
agcgcgagcccaaaccaagcgcgacaagaaaggggaccagccgcaggaggcggagccgaccacgccaagcagagaagcggacccgcggcc

SEQ ID NO: 136416 - RNA, 72 nt, Homo sapiens
gggagacagaagagagccggccggcaaagggacaaccccccaagcggaagaacaacaaagagggaagaaaga

SEQ ID NO: 136417 - RNA, 66 nt, Homo sapiens
ggaaggcccaaaaggaccacggaagagaggccaacagaccacagaaggaaaacccacacccaaagc

SEQ ID NO: 136418 - RNA, 46 nt, Homo sapiens
cacacggcagaaacggaccgagaaagggaaaaagaaaagggcgaag

SEQ ID NO: 136419 - RNA, 73 nt, Homo sapiens
aagcagcggacgcgcccccaagaaagggaaacacaaagaagacaccagaagggccagcaccacgacaacacgg

SEQ ID NO: 136420 - RNA, 76 nt, Homo sapiens
aggcggagccagaaggccggcgaccaagcgccacccgcaaaagagcaacgccacaagagccacagagccaagcgca

SEQ ID NO: 136421 - RNA, 61 nt, Homo sapiens
caacagaaagagcaacagcagggcaacagccccccgcaagaggaagcaggagccagcccag

SEQ ID NO: 136422 - RNA, 75 nt, Homo sapiens
cacgggccccaggcaccggcaagacgcacgagggaggcaaaagcagcaacaggcccacccccaccggagagaccg

SEQ ID NO: 136423 - RNA, 79 nt, Homo sapiens
caccaaagagacccccggagaaccgggcccagcagcacgggagcccgggccgggccccggcacaggccccgccggaagg

SEQ ID NO: 136424 - RNA, 81 nt, Homo sapiens
cacccccaaaggccgacaaagacacacggagaagcagacagcccaggcgcagcgaaccccggggaaggccgccggccgcgc

SEQ ID NO: 136425 - RNA, 72 nt, Homo sapiens
acacaacacaggggaagaccgggaggcaacgaggcaccagggcagagcaaacaaagcaaaaaacaaaaagaa

SEQ ID NO: 136426 - RNA, 76 nt, Homo sapiens
cccaggcgccgcggggagggcgggcccgggcagccgcgggcgcaaagacgcaggaagggaccaccacacgaaacca

SEQ ID NO: 136427 - RNA, 72 nt, Homo sapiens
cagcggccccggagaaagaggagccagccagccccagaacaggccagggcggaagaaggagagaaccaggag

SEQ ID NO: 136428 - RNA, 73 nt, Homo sapiens
gagaagacgaggagggcgccgacccagccgagcccaaccgggcgacaccgcaccaccacccggggccacgccg

SEQ ID NO: 136429 - RNA, 66 nt, Homo sapiens
acgcaccaccggggacaggacaaaccggcgaccacacacggggacgacggggaagccggacagcaa

SEQ ID NO: 136430 - RNA, 60 nt, Homo sapiens
caaaggcaccaggccaccacagaaacaaaagcaacaaagaggggcacccgagaggaacac

SEQ ID NO: 136431 - RNA, 78 nt, Homo sapiens
gaaagcgacgcgcccacacaacacgacagccgccaggaagcaacgcagcgcggaaaggcacaaccaaggacacgcagc

SEQ ID NO: 136432 - RNA, 73 nt, Homo sapiens
gcaggccaacaccacagaagacaggacacaaagcacgcgacaggaaccagcgccaaagaccaagcgcgcgcca

SEQ ID NO: 136433 - RNA, 75 nt, Homo sapiens
caagaccgcacaccgccaaccccgcaccggcaccagagcagagaggagaacgcagggaacacgagggaacccggc

SEQ ID NO: 136434 - RNA, 55 nt, Homo sapiens
cagaacacagggggaggacagcccaagaacaccggaaagaagaccgccaaagaga

SEQ ID NO: 136435 - RNA, 55 nt, Homo sapiens
ccccaggggcgacaggccgcagcacacaaaggacggaggggggaggagcaggccc

SEQ ID NO: 136436 - RNA, 69 nt, Homo sapiens
ccacgccaaaagcagccacagaaaggcggcaggaaagcagaacgcggagaggaccacccgggccagaaa

SEQ ID NO: 136437 - RNA, 80 nt, Homo sapiens
ggccagagcggagaccagcacccagaagagagaccgcaacgagaacaaagggccgggagcgaggagcgcacaccagaggg

SEQ ID NO: 136438 - RNA, 77 nt, Homo sapiens
ggaggagaaaggaaaaaggccccgagccccggccccaaagacccaaaacagagacaccccccagcccccgcgccccg

SEQ ID NO: 136439 - RNA, 78 nt, Homo sapiens
ccccggccaccccgcgcgcaaggagcccgggacggagaggccgcaggagcacagacccccacgaccagccaaaccaaa

SEQ ID NO: 136440 - RNA, 74 nt, Homo sapiens
cagagcaccaaggccccccagagacggggaggcaggaaaaagacacaagacagcaggaccgggaccagcccgaa

SEQ ID NO: 136441 - RNA, 73 nt, Homo sapiens
caccagagcccagcaggaggacagaaagaaggcgacgcacaacacaaggcgaccagacccggcaagacggaaa

SEQ ID NO: 136442 - RNA, 75 nt, Homo sapiens
agaaaacgcaccaaggggcaacaagcacaagaagaagagaaggcacccggagaaagccggcgcaaaggcaaggga

SEQ ID NO: 136443 - RNA, 72 nt, Homo sapiens
aggaaacacagcagaaacaaagaagcagcgcgaaagagggaagaaagagccaaacaggcgagaggaagaagc

SEQ ID NO: 136444 - RNA, 71 nt, Homo sapiens
cgcccaagcaaaagaagagaaagaaaaaaacccaccacagaaccagacaggaacagggccagcagacgaca

SEQ ID NO: 136445 - RNA, 81 nt, Homo sapiens
gcgggggggaggacacgacaccaggcgaaccggccacgcacccccgaagccggaaaggacagaagccacaaaacacggcac

SEQ ID NO: 136446 - RNA, 72 nt, Homo sapiens
aaacggaggaaacgacaaaacgggagacaagcgacagagaagaagagaaccgcacgcacaggaacccggaac

SEQ ID NO: 136447 - RNA, 62 nt, Homo sapiens
gaccgcacgaagaccaagacggacacggaaaaaaccaggagcgccaacccaaaaagggacac

SEQ ID NO: 136448 - RNA, 96 nt, Homo sapiens
aaacacaagaacacgaaaccgaaacacgcagaaagagagggaccaagaaaggcccagggaccaaagcccggacaaggcccgagcaccaggaccgca

SEQ ID NO: 136449 - RNA, 75 nt, Homo sapiens
gacaccccggccaaggacaccacagccccgacgaacacggggacaccaacaggacccggcaaggcacccacccgc

SEQ ID NO: 136450 - RNA, 79 nt, Homo sapiens
cggcgcggggcgcaaggcgccaggaggaccggggcgggagagcgacccgggccggcaggacccaaggccagccagcccc

SEQ ID NO: 136451 - RNA, 86 nt, Homo sapiens
gcgagggggccccccgcaccgcccagggccagggcgccgccaagaagaggggacccggagaagccacagcaggcagagaccgcgga

SEQ ID NO: 136452 - RNA, 84 nt, Homo sapiens
aaggaagccggcccccgccgcccgcgccagaccccacagagcagggccgccccgaggagagcgacgcccgggcgcgccccggca

SEQ ID NO: 136453 - RNA, 78 nt, Homo sapiens
cgaggggaagaggaagcaaagccaagaagccagaggacggacgagcaaaggacagaccagacgaaccagcaagggacc

SEQ ID NO: 136454 - RNA, 52 nt, Homo sapiens
ggaagaccaggaaggagccggggcggaaacaggaacacgaaagaggaaaaac

SEQ ID NO: 136455 - RNA, 71 nt, Homo sapiens
gcaacagggcagaaaaccagccccaggaggggacaaaaccccgaaaaaggcgaaccacccgaggcggaaac

SEQ ID NO: 136456 - RNA, 78 nt, Homo sapiens
caaggaacaaaccgaagaacagcgggaaagaaggcaaaacacgggcacaccggagcccgggaagaccaggaagagcag

SEQ ID NO: 136457 - RNA, 77 nt, Homo sapiens
aaccacggaggggcaaccgggaggagggaccagacggccaaggccgccgggagaagggaagcagagccccgggccgg

SEQ ID NO: 136458 - RNA, 58 nt, Homo sapiens
agaacaccaccacggaacgaggcaaggaggagaagacgaaagaggccaggaggagcga

SEQ ID NO: 136459 - RNA, 77 nt, Homo sapiens
gaagagcgccccaggagaaacaagacacggaaaaagagcggacaggaaggaaaccgaggcggcagccaaacaccaaa

SEQ ID NO: 136460 - RNA, 83 nt, Homo sapiens
ggggaccggcggcgcggaggagcgaggcagcgacaggacgggaacggcacagagaagaagaaaaaaagagcacaaaaacacag

SEQ ID NO: 136461 - RNA, 78 nt, Homo sapiens
gaggccccccagccacgggaacgcccggggaaaaacagagaaaacagaaggccacacacccccgcgcacaagccgggc

SEQ ID NO: 136462 - RNA, 67 nt, Homo sapiens
ggaaagcccgggccaagcgggaggcgcccgaccggacagaagacagaccgacagacgccaaaccacc

SEQ ID NO: 136463 - RNA, 59 nt, Homo sapiens
cagcaagggccaacggaagccagagaaaggagccccagcgagccagagggacagcacag

SEQ ID NO: 136464 - RNA, 83 nt, Homo sapiens
ggcgaggacggcggaccccgcggcgggaggagccgccccgagagcgacgcccaccggcccaccccaagccggacgccggcaaa

SEQ ID NO: 136465 - RNA, 66 nt, Homo sapiens
acaacagagccccgaccagagccacacaccagagggaccacaccggcaagcggcagccacacccgg

SEQ ID NO: 136466 - RNA, 78 nt, Homo sapiens
ggacgggagcaagcgacccggccggacccaccgaccagggggaagagggaggaagaacaaagcgccggaagcacgggc

SEQ ID NO: 136467 - RNA, 61 nt, Homo sapiens
cgaaacaaaggcagggcgaaaggaagaacggggcgaagcacaaacccgcacccgcagaaaa

SEQ ID NO: 136468 - RNA, 79 nt, Homo sapiens
aaagagaggagggagaacacagaaacccgccccggcacccgacaggaggacgcccgccaggggagcagacagaacaccc

SEQ ID NO: 136469 - RNA, 76 nt, Homo sapiens
agaggaagacgagccgggaggaacggcccggaaacaggaggacgcaccagaagcccccagcgggaaaagagcaccc

SEQ ID NO: 136470 - RNA, 76 nt, Homo sapiens
caggaacaagagagaaagagggacagccgcacggaggcgaaacacaaaggggcgccccggcaaaacaaaaaaagaa

SEQ ID NO: 136471 - RNA, 75 nt, Homo sapiens
cagcacaagcggaacacgccccgcaaagggaccagcacccccgggccagggagccaaacgggaccagcggcacgc

SEQ ID NO: 136472 - RNA, 74 nt, Homo sapiens
aagcggagaacaagaaggaagggccaggagagagaggagacaacagccacacaaagcagcaacaggagcaggga

SEQ ID NO: 136473 - RNA, 76 nt, Homo sapiens
gggaccgcgaccgcacgggggccgccgcgccccccggggcagggaacaacggaggagagccggaagaagaggaaag

SEQ ID NO: 136474 - RNA, 92 nt, Homo sapiens
aacgacgccagaacaggccccgcagcgaaaacccaacgagaccaaagaggcaaggccagcacagaggagcccaggaggaggaccccccgacc

SEQ ID NO: 136475 - RNA, 71 nt, Homo sapiens
aaccaagaaaaaccagaaaccaggaagagcaggagaagagaagaaaaggacagccgacgaggccgggagga

SEQ ID NO: 136476 - RNA, 75 nt, Homo sapiens
gcggcccacacacgaccgcagccagcaccagcgccaggacacagccacacgaaaacgacggcacccggggcgccg

SEQ ID NO: 136477 - RNA, 62 nt, Homo sapiens
gagcggagcggagaggaggagccaagagagggagccaaggagaccgggagagagacgaagga

SEQ ID NO: 136478 - RNA, 66 nt, Homo sapiens
acaggcgagcgacccccggccgaagccggagaaaagacccggccgaggacaccgaaaacgagaaac

SEQ ID NO: 136479 - RNA, 71 nt, Homo sapiens
cgaccagaacgaccccgggacaagaccccacgaagcgagccagaaaaacgggcaaacccccccgagcacgc

SEQ ID NO: 136480 - RNA, 71 nt, Homo sapiens
accgggcggggaccccggcccggcagcagcgacggacaaaccggcgaccacacacggggacgacggggaag

SEQ ID NO: 136481 - RNA, 73 nt, Homo sapiens
cccgccgaggacggcacccccggagaggaaccagaagacacaaaaagacaaggaaaggaaagaaagaacacca

SEQ ID NO: 136482 - RNA, 76 nt, Homo sapiens
gccacccacaaggcacaacaggaagaaggacacggaaacagagccccccacagagcacaagacaggacgaaccaca

SEQ ID NO: 136483 - RNA, 70 nt, Homo sapiens
ggaaccgacggccacgccgccgaccggcaaggacggaaaaggaacaagacaagcacaagcgggaccaccg

SEQ ID NO: 136484 - RNA, 75 nt, Homo sapiens
ggagcggagcacacgccgcggaggcccacaagccgcgccgagggaaggaagggaacacggacgacgagacacgac

SEQ ID NO: 136485 - RNA, 73 nt, Homo sapiens
cagaaccgaggagagaaggcagccagaacgcggcagaacggaggcaggcagcacgagacacaccacaagaggg

SEQ ID NO: 136486 - RNA, 67 nt, Homo sapiens
acacacggggacgagaagaagccacagccaccgaggaccggccgggaccgcgggccgcagcgcagac

SEQ ID NO: 136487 - RNA, 54 nt, Homo sapiens
gaaaaagccaaccagcaaccccaagagccaaaaccaaccaacaacaacgaccgg

SEQ ID NO: 136488 - RNA, 83 nt, Homo sapiens
gaaaaggggacacggcgggcaggaggcccagaagaaacaaggccaagccaggcggaggcacccaaaccagggagaaaaagagg

SEQ ID NO: 136489 - RNA, 72 nt, Homo sapiens
gcggacgcgcgcggggcaggagaagacagaggagccagaccaagagacagcacaggcgagcgagcagagaca

SEQ ID NO: 136490 - RNA, 64 nt, Homo sapiens
cacaaagaagccgagacaaacggcaccaagaggggaagaggaaacaagcccaggcgacggagcg

SEQ ID NO: 136491 - RNA, 71 nt, Homo sapiens
gaggaaagggagagacaagagaggagacccaacagacgaaagagccgcagacgcacagcaaccaccggacc

SEQ ID NO: 136492 - RNA, 68 nt, Homo sapiens
cccaccaccaaccaagccagaaccacagaaagccggaaacaagccaccgcgggagaggacgccccacg

SEQ ID NO: 136493 - RNA, 60 nt, Homo sapiens
gccaaagcagcaaggacggcaaggacaagcaccccagcgacaagcccccaacaaagggag

SEQ ID NO: 136494 - RNA, 72 nt, Homo sapiens
cagccaccgcggccaggccccacaggggagcagcccgacgaaagcccgagcggaccccgccaggcccacacc

SEQ ID NO: 136495 - RNA, 83 nt, Homo sapiens
aacaccgaccggccagcgccgcacagcacgcgcgagcgcagcccggaggagcgaggagcgacagcgaggccacgcagacagcc

SEQ ID NO: 136496 - RNA, 74 nt, Homo sapiens
gcggagccagaaggccggcgaccaagcgccacccggacaaaccggcgaccacacacggggacgacggggaagcc

SEQ ID NO: 136497 - RNA, 71 nt, Homo sapiens
aaaaaggaagaaccagagccgcagcaacggccaaggacacagcgcagccagaccaggcccggaagaaccag

SEQ ID NO: 136498 - RNA, 69 nt, Homo sapiens
cagaacaagcaacacacgcccaacaaccaaaaaaggagccacacacgaagaagggcacggcagaacgac

SEQ ID NO: 136499 - RNA, 79 nt, Homo sapiens
cccagaccgcagggcgggaaaaaaccaagcagcgagcaccaggaggcaaggaggccacggggccgaagacaccaaccgg

SEQ ID NO: 136500 - RNA, 80 nt, Homo sapiens
gccagaaggaccggggaaaaagagaaccacgcgcagaacccaggggaaaggcagcacccgaggagagcgacaccgccaca

SEQ ID NO: 136501 - RNA, 77 nt, Homo sapiens
gagggcgaggcggacgcgcggcgcgcaggcacgaacgagcaggagcagcaaccgaagcgaagggccgggacggagaa

SEQ ID NO: 136502 - RNA, 85 nt, Homo sapiens
cccccagaggcccaacgggacgaaccacagggcggccagagcacacaccaggcacggggcagggaaagacggaagagacgcggca

SEQ ID NO: 136503 - RNA, 68 nt, Homo sapiens
gggccagaggggaggacaggcgccacgaaccaaagaccgacacacaagggagaacaggggaagcagcc

SEQ ID NO: 136504 - RNA, 75 nt, Homo sapiens
cgacaggccgcccgcgacagaaccaccaccaaaaagccgggaacggaacgaagacacacacgaaaggccaaaagg

SEQ ID NO: 136505 - RNA, 51 nt, Homo sapiens
aaagcggaggggcggacaccaggggagccgccaccaaaagcagacggaaaa

SEQ ID NO: 136506 - RNA, 63 nt, Homo sapiens
gagagaaccagcgaggacgagaagcaagagagccacaggaacaccagccaacagagggacccc

SEQ ID NO: 136507 - RNA, 61 nt, Homo sapiens
gcaaagccggccgcgaaacgcggagacccaacaaaaaaggggaggagaaaggcaagaagaa

SEQ ID NO: 136508 - RNA, 69 nt, Homo sapiens
gggaaggggccggagggcagggggcagggcggcagaggggaagcaaaaggcacagacagaacagagaca

SEQ ID NO: 136509 - RNA, 68 nt, Homo sapiens
gcagaaaaagggcaaagacacggaccaagaagccaacaggaaacacacgccgagaagacggccccacg

SEQ ID NO: 136510 - RNA, 67 nt, Homo sapiens
acagaagaaagagagagacagacccggacgagagaggaggggaacaggcgagggcggcaccccggga

SEQ ID NO: 136511 - RNA, 76 nt, Homo sapiens
gcaacagaaagaaaaagggccaaccacggggaagacagggacaagcgcacagcggagaaagcagcgcggccaggag

SEQ ID NO: 136512 - RNA, 81 nt, Homo sapiens
caaaaacaggaagcaaagaagaaaaggacagcagaggcagaggaccacaccaagcgagagccagggaagaacaagccaccg

SEQ ID NO: 136513 - RNA, 83 nt, Homo sapiens
ggcgcgcacgcccggccgcggacccaaggccagccagccccaggcaccagcggacaggacagggaggacgaaggccccccccg

SEQ ID NO: 136514 - RNA, 53 nt, Homo sapiens
cgacgcaagaggcagccaccacgggccgggagggccgggcacgcccccgaggg

SEQ ID NO: 136515 - RNA, 77 nt, Homo sapiens
gggaagagcacccggagagcggcggagaaaccaccacaaacacgaggccagcaacgaccaacaagacagacccgccc

SEQ ID NO: 136516 - RNA, 107 nt, Homo sapiens
ccggcccggccgaccccggaagcgagcgcggacgccacccgggggcacagcaaggggagcggagaagaaaacacagagacaacagaggagacaaaaaacaagaagca

SEQ ID NO: 136517 - RNA, 81 nt, Homo sapiens
ggggcggaagaaaaacaaacacacgcaaaggagaaaggaaccgacagggcagaacaagaaagcaacaaccacagagaacaa

SEQ ID NO: 136518 - RNA, 70 nt, Homo sapiens
agcacgcgggaaaaagagagacagccaaaaacaagcgccaccccccccaaccgagacgccggcccaagag

SEQ ID NO: 136519 - RNA, 81 nt, Homo sapiens
gggcaccagagcgacgggcaggaaggagggggcgcacaaacgagagcggggcccggcgcacccaccaccgccgcccacggc

SEQ ID NO: 136520 - RNA, 77 nt, Homo sapiens
caacacgaaccagaggaccacggggccaagggcacagcacggacggaagcaacccagggccacccagaggaagaggc

SEQ ID NO: 136521 - RNA, 81 nt, Homo sapiens
cacgaccccgccgcggcccccgcaaaacaaggaagcagccacaaacagggggacaccggaccccgcccccccgccgggccg

SEQ ID NO: 136522 - RNA, 61 nt, Homo sapiens
aaaaaaaccgccccgccagcagaaggaggaaccaacagaggcaaaacccgacgcaaacgac

SEQ ID NO: 136523 - RNA, 68 nt, Homo sapiens
cccaggagccccacagaggaaaggccccgagaacgaaagcgaaggaccaaagggcagaccgagcccag

SEQ ID NO: 136524 - RNA, 80 nt, Homo sapiens
gccccggaccggagccccccggagcccccagcgaggacggccggaaggggggcgacgcggaaggcacaacacggcaacac

SEQ ID NO: 136525 - RNA, 43 nt, Homo sapiens
ggacggccaggggagaaagaccaggccccgccccagcccgggg

SEQ ID NO: 136526 - RNA, 55 nt, Homo sapiens
acagaagagccagacggaaaaggaagaggacacagcgcgaccaccgccacgcagc

SEQ ID NO: 136527 - RNA, 72 nt, Homo sapiens
gaacgagacagaacaggaaaaagggcacagaccccacaggccccggacacgggccacaccccgccccacacc

SEQ ID NO: 136528 - RNA, 61 nt, Homo sapiens
ggaccagagacacgccaagcagccagcccaggagagggaaagggagcagcaccggccacac

SEQ ID NO: 136529 - RNA, 68 nt, Homo sapiens
gaagcccagggaagaaggcgaggcaccggaacagacgcaggaagagccgcagaccgacagaagaacga

SEQ ID NO: 136530 - RNA, 86 nt, Homo sapiens
caaagagaacagggcagaggaaaagcaagaagacgaggagcaggcgcaaaaaaacggaagcccccaaagcagaaacacaagaggac

SEQ ID NO: 136531 - RNA, 77 nt, Homo sapiens
gaaccaaaagggacggacaaaggaacaggaccaggggaacgcagaaacggccaagaggagcgacaggcacgaaggag

SEQ ID NO: 136532 - RNA, 70 nt, Homo sapiens
cagggccagggagcaccaggagaacaacaagcccgccggagaacgaggaaaggcggagcagcggaaagaa

SEQ ID NO: 136533 - RNA, 72 nt, Homo sapiens
gggagcagaacgagagggacgccggaccacgccacaagaggaacgcaacaccagaggcacaggaaacagaca

SEQ ID NO: 136534 - RNA, 76 nt, Homo sapiens
cgcgcagcgcggggagcgccagggcacaccaagccagaaggcgaggcgcacggcagaaagccaacaggcccaccca

SEQ ID NO: 136535 - RNA, 85 nt, Homo sapiens
gagcgaggggaggcaggcgcggcagacggcgacagggcggcggcgccaggcagggcgcagacacgagaggcgagggacgacagag

SEQ ID NO: 136536 - RNA, 82 nt, Homo sapiens
aaaacaggacagcacaggcacagaaggccaaaaaggcaaccacagagagagagagggagggggagagagaaggcccaaaagc

SEQ ID NO: 136537 - RNA, 80 nt, Homo sapiens
gcccaggccagcgccccaggccaagagggacccacccggcggccggcgccacccccagacgccgcaggcccaaggcgacc

SEQ ID NO: 136538 - RNA, 78 nt, Homo sapiens
gcccccagcgcagcggccgcgggggcacccgaggaggaagagggcagggcccacggaaagaagggaaacccggggaga

SEQ ID NO: 136539 - RNA, 73 nt, Homo sapiens
aggagcagaaaccagccacgggccggaggcaaaaaacacgcagaggggcgggcacgcacgacagcgggcagag

SEQ ID NO: 136540 - RNA, 69 nt, Homo sapiens
ccaacgggagcccaagggcggcaaccacggaaacgagaggaccgaagaggggcgccggagaggagacga

SEQ ID NO: 136541 - RNA, 66 nt, Homo sapiens
ggacccggagcgacaagcgccccgacggagcgccaggacgggccgagcggaacgcagagagaaaaa

SEQ ID NO: 136542 - RNA, 74 nt, Homo sapiens
ggagagccgggagaaacacaaagagagcccgcgcgggacgcccagagcgggcccgaagaagacacccagaaggc

SEQ ID NO: 136543 - RNA, 78 nt, Homo sapiens
ggggaccgcaaagaaaaggacggaaaaacaaggggaggcaacaaggagccggccgagccgacacaggccacaaaggcg

SEQ ID NO: 136544 - RNA, 71 nt, Homo sapiens
ggcgccgcgcaggggagccaacaccgcccccacccccgcagaaaagagaacggagcagcgcaagagacaga

SEQ ID NO: 136545 - RNA, 56 nt, Homo sapiens
aaggggacgcgccgagccggaggcgcaggagggcccgacaagagaggcggagccac

SEQ ID NO: 136546 - RNA, 72 nt, Homo sapiens
ggaaagagggagagggcacagagggacccagaggaagagacaaagaacaggaaccagacacaagacgagaac

SEQ ID NO: 136547 - RNA, 53 nt, Homo sapiens
cccacagaggggcgacggaccagcccaggagaggaaccgagaacacgacaccc

SEQ ID NO: 136548 - RNA, 77 nt, Homo sapiens
cagcaaaagagcccagaagaggagcccccgcaaggggccggcacgggaaaacacccacaagacaaccgaagaacagg

SEQ ID NO: 136549 - RNA, 80 nt, Homo sapiens
cgagcggcgggcgggcgggagcgcccaagggggcggagagcggggggggggcggagaacggaaaagcaccaggaagcaga

SEQ ID NO: 136550 - RNA, 45 nt, Homo sapiens
aaacagcaggcacccaagcgggcggcagacggacaacaggaagcc

SEQ ID NO: 136551 - RNA, 87 nt, Homo sapiens
aagccgcggcagccgcggaccaccgccgccagggaagggaaaaggccgaggcacagcgggaagaccgcaaagacgacccgagacagg

SEQ ID NO: 136552 - RNA, 61 nt, Homo sapiens
cagcggaaaaaaaaaaacacgggcggacggaacggagaaaggagcaaccagggaaaagaag

SEQ ID NO: 136553 - RNA, 82 nt, Homo sapiens
gccggggagcagccgaccaggagccccagaggacccaggggaacaaacaagagggcacgccggagaagaacggaaaagagca

SEQ ID NO: 136554 - RNA, 88 nt, Homo sapiens
cacggagaaaaacggccagagacaccaaaagaaagaaccacagcagaaagccacaccccaagggcaaggaccgggaaaccaccaaaag

SEQ ID NO: 136555 - RNA, 83 nt, Homo sapiens
gaagaccaagcaaacccggaccccgagagccaagcgggaaacccaccagagaaggcgcggccacccaggacccgggggaggca

SEQ ID NO: 136556 - RNA, 73 nt, Homo sapiens
cggacgcggaggcccaaccgaagaaaacaagaaaggccccccgggaaagaccgaggaagaaaggggaccacag

SEQ ID NO: 136557 - RNA, 90 nt, Homo sapiens
ccccaacccaccaaaagcacagagaaccaggagccgccaaagggcaccaagggcggggagacccagggaaggccaggaggcggaagagag

SEQ ID NO: 136558 - RNA, 71 nt, Homo sapiens
gccaaggaccggcaagggagacacacagaagacgaaagacgaaagaagaacaaaagaaaaaacccgggagg

SEQ ID NO: 136559 - RNA, 78 nt, Homo sapiens
ggggacgcccgggccgggcgcgcccgccgcaggaaacacccaaggaaccaaagcaggccagcagaaaaccccgcgcac

SEQ ID NO: 136560 - RNA, 76 nt, Homo sapiens
agaagagaccaccaaccaggcaccgaggagaaagcgcccgaaagagaacggagccacgcaagaccgccgccagcac

SEQ ID NO: 136561 - RNA, 97 nt, Homo sapiens
ccgcaagcgacccgacagaggcacaaaaagcggggaccacaccacacagggaaggggggggccccaagaaacaggggaccagaggaagagaggaccc

SEQ ID NO: 136562 - RNA, 72 nt, Homo sapiens
gagcacagggagacacccaaaacccccagaaacaaggacccgaagaagacaagcgccgcggacccacgagcc

SEQ ID NO: 136563 - RNA, 57 nt, Homo sapiens
cgaagggcgacggcccaggcagggcacacaacgagcagaagagcggccacccgaggc

SEQ ID NO: 136564 - RNA, 78 nt, Homo sapiens
cgaggggaagccccgacaccaggggacacccagaagcggcgccgccggcaggagcccagaccgagaaccgggggaacg

SEQ ID NO: 136565 - RNA, 73 nt, Homo sapiens
aacaggacagaacaacaaaagaacagcagagaagggaacgcaacccgagcccggggccaagaggaaacagaag

SEQ ID NO: 136566 - RNA, 74 nt, Homo sapiens
ggcggggccggggaacacacagcaggcaggcagggccaacgggggcgacccgccaggaaccaaggcacgcgcga

SEQ ID NO: 136567 - RNA, 74 nt, Homo sapiens
gaaaacagcgaaagagagaaaccgcaggaaacacgacaccggaagcccggcacgcgggagcagaaaccacacgg

SEQ ID NO: 136568 - RNA, 86 nt, Homo sapiens
gcgcgggaccgcacaggccggagagagccgaggcaggaccccgggacacccggaagccaggaaaggaacgccacagaagagaccca

SEQ ID NO: 136569 - RNA, 76 nt, Homo sapiens
ccaaccggcacaaagaccaaggagaaacgacaacagaacaccccaccagaccacccagcaagcccacaaaaaaggc

SEQ ID NO: 136570 - RNA, 72 nt, Homo sapiens
caggcagcagaacgaggccccacccagcgcacacaccaccacacacggcaacgaggagccagcaaggaaccc

SEQ ID NO: 136571 - RNA, 109 nt, Homo sapiens
ggcggcacacgaggacgcggcggagagcggagggcgacgacgagaccaagagagcgccgcacacccaggcacgggaggccccgcagcccggcagccccagagacaggcc

SEQ ID NO: 136572 - RNA, 78 nt, Homo sapiens
agaaacaaggaaaggccacaacagcaagggaaagggagcagcaccggccacacccacagcacgaccggaacccagcga

SEQ ID NO: 136573 - RNA, 40 nt, Homo sapiens
caaaaaaggaagcgaaaagccgcagagcacacaacagacc

SEQ ID NO: 136574 - RNA, 71 nt, Homo sapiens
cgagcccaggagcgccacgcgcggaaggcagcgcccagcagcgcagcaacagagggcgggaccacggagca

SEQ ID NO: 136575 - RNA, 75 nt, Homo sapiens
gcggcgcaggccggggcgagcggcgggcccgcgggccaggccgggagcacaaaggagcccgcgccaagccgaaca

SEQ ID NO: 136576 - RNA, 70 nt, Homo sapiens
ccaccaaaaaagcggaggcgcgcaggagccaagaccaagcaaggaaccagcgagcaaacgcaaacacaac

SEQ ID NO: 136577 - RNA, 70 nt, Homo sapiens
cgcggagaaaacccagcgcacaggcacagcaagcaacccggccgaggggggcaccccgggaggaagcaac

SEQ ID NO: 136578 - RNA, 86 nt, Homo sapiens
ccggcagcgccccgcgagaaccccaggaccacggcgcccagagagacgaaggaggcaccaagggggccggcggcccccgcaagagc

SEQ ID NO: 136579 - RNA, 77 nt, Homo sapiens
agcagagaccccagacgccaccacaacccccagacgcaagccaagccacgaagaagcggcgccaaccgggaaggaaa

SEQ ID NO: 136580 - RNA, 85 nt, Homo sapiens
ggccccccgccgcgcccggccgccgccgcccgcggggccggccgggagggcccgggggacgacggacaagaaaggaccggcccaa

SEQ ID NO: 136581 - RNA, 83 nt, Homo sapiens
gacgacagggcagcgccgcaggggaggagaccggaggcaccaaggccaagaacacaagcagacggaacggggcgaccccggga

SEQ ID NO: 136582 - RNA, 77 nt, Homo sapiens
aaaagcgcccccccaccgaacagaaaacgcagacaagacgcaggagagagagacgccggaagaaagaaaggagacgg

SEQ ID NO: 136583 - RNA, 72 nt, Homo sapiens
gaggagccggacgggccaggcaccaagcagccgaagagaaacaagggacagcagacaagccccgcgcggaag

SEQ ID NO: 136584 - RNA, 88 nt, Homo sapiens
acgcacggcacccaggagaaagagacgcgccagaaaggaagaaggagaagcacaggagacacaaacacaaaaaacaaaagaagcaaag

SEQ ID NO: 136585 - RNA, 72 nt, Homo sapiens
cgagagccgcccgggccagcggccgcgcacccccggccggaggcaccagcgacaggaggccagggcacggga

SEQ ID NO: 136586 - RNA, 83 nt, Homo sapiens
gaggccccccagccagggaacacccagagagcccccccagcccagaggggcaggcggcgacggcccgggcagcaagggacgcg

SEQ ID NO: 136587 - RNA, 81 nt, Homo sapiens
caggcgaggcggcggcgcccggagggcagcgagccagagacgcgcacgaaacgacgaagaggcccgaggacagaggagcaa

SEQ ID NO: 136588 - RNA, 60 nt, Homo sapiens
ccaagagcggagacacacaagggcagccaaacgagaagagaagcccccaacccaccagcc

SEQ ID NO: 136589 - RNA, 59 nt, Homo sapiens
aggcccacccacagccccgccccccccacgggaaccacagaccaaagcgcgcgggcaca

SEQ ID NO: 136590 - RNA, 66 nt, Homo sapiens
aagccgcagacgccagaccaaccaacccaccagaacaggaagcagcaagccccggaccccggaacc

SEQ ID NO: 136591 - RNA, 78 nt, Homo sapiens
gagacaaggaaagagccggaaaaggagcagaccggacgaggcgccaccagcaaaaccagagaaacaggcagagaaaga

SEQ ID NO: 136592 - RNA, 50 nt, Homo sapiens
gccagcgccggaaaccaacaaaaggaaagaacccagccagggggaggaca

SEQ ID NO: 136593 - RNA, 78 nt, Homo sapiens
aagagccgggaagcagcaccaacccggcccaccaaaccccgcaaaagcagaccggaaaacccaccggcaagaccacac

SEQ ID NO: 136594 - RNA, 70 nt, Homo sapiens
gaacgaccgaaacaccaggcgcggagggcagccggggcgccgcaggcgccaccccggccccggcaggacc

SEQ ID NO: 136595 - RNA, 82 nt, Homo sapiens
gaaagagagacacacccaccgaaacagacacccggagaaaggacagacaaggaggagcaagcagagaacccagcacggaccc

SEQ ID NO: 136596 - RNA, 81 nt, Homo sapiens
gacgggggagggggcggccgggcggagagaaccagcgaggacgagcgccgcgccaggacggcagccagacgagcagggccg

SEQ ID NO: 136597 - RNA, 78 nt, Homo sapiens
caacgagcgaaggaaccgcggcgacaagacacgccaagcagggagaagacacggcggacgcgggcagaacagccaaac

SEQ ID NO: 136598 - RNA, 76 nt, Homo sapiens
gggacccgcggccccgccgcgagacgaagaggagcagaaccagaagggacacacaggacggcaggaaggccagcca

SEQ ID NO: 136599 - RNA, 85 nt, Homo sapiens
gaacgaaacggagccagagaaggcagaaggcccgcccgggagaagcccgccacacgcggcccacgcgagggccgcgcagcccccc

SEQ ID NO: 136600 - RNA, 45 nt, Homo sapiens
aaccccaaagcaaacgggcggaagagcgcgggaggggaggccacc

SEQ ID NO: 136601 - RNA, 80 nt, Homo sapiens
agagcacccgacccacaggccagagagaagcacagagggaaggagaaggagacacagaaggagcagcaggagacagccag

SEQ ID NO: 136602 - RNA, 81 nt, Homo sapiens
agaagccgcgaaaaaggggggccgagaggcacagggccaggcacacaacgagaccacggcccaaacaacagggcaaagagc

SEQ ID NO: 136603 - RNA, 52 nt, Homo sapiens
ggccggcggcaaagagaggacagagacgaggcgggcccaagggcaccaccgg

SEQ ID NO: 136604 - RNA, 82 nt, Homo sapiens
ggcgggggccgaccccggaaccagagacagaaaaggagacgaaaagagaaacaaaaagacccagaccagcaggacagaccca

SEQ ID NO: 136605 - RNA, 70 nt, Homo sapiens
gaagggcacacggccaacaccagcacgacggacaaggaagcgcaggcgcagcaacgccaaaaagaaaccg

SEQ ID NO: 136606 - RNA, 77 nt, Homo sapiens
ggacaaagagcagaaagcccgccaaacagcagccgaagaaaagacacagaacccgcccccagacccagagcaaccga

SEQ ID NO: 136607 - RNA, 82 nt, Homo sapiens
cgggcgagcggggcggacgccggggagacgcaggcgagagcgagaagcccagcgcgaaccaccggccggacgcgggagacca

SEQ ID NO: 136608 - RNA, 69 nt, Homo sapiens
gagcaagggaaacaccgaaagcgaggaaccgcaggccaagcaacaggcgcacgcggaggagggcgacga

SEQ ID NO: 136609 - RNA, 74 nt, Homo sapiens
ccaaaagaaacacacagggacaagcagagcgccaccagcaacccccagccacaacgcgaaccgggcggacgaag

SEQ ID NO: 136610 - RNA, 79 nt, Homo sapiens
aaaccccgcccacagcacgaggggccacggggaccaggcggggcaagagcaaccgcgcgcgccacccgcaacgagcaac

SEQ ID NO: 136611 - RNA, 67 nt, Homo sapiens
cggaaaagacagcccaccgaacaacgccagggacagacaagccaccccaggccaccagcaagaccac

SEQ ID NO: 136612 - RNA, 75 nt, Homo sapiens
gggaagcccgcggcgcgcgccccccggacccgcaggcaacggggcggcacacaaggagcgaagggcagggagaac

SEQ ID NO: 136613 - RNA, 80 nt, Homo sapiens
gcagcaccaggggaggaggagaccaccacagaagcccagagaaagggggccaggaagccaagacagggcagggagggagc

SEQ ID NO: 136614 - RNA, 81 nt, Homo sapiens
gcacaccaacaagccacgaccggggagcagacagccagcagcccccccaagggggacacagcaggcaccacaacagcaccg

SEQ ID NO: 136615 - RNA, 79 nt, Homo sapiens
cagcagccccgccgccgccaccgccgccccgccgcgcccaggagcggaacaacgcggcgagcggggggcaggaccggaa

SEQ ID NO: 136616 - RNA, 78 nt, Homo sapiens
ccgccagcagccgccggagccagccaacgagcggaccgcccgaaggcccccaaagacggaacaccaagcgcaacaaag

SEQ ID NO: 136617 - RNA, 88 nt, Homo sapiens
cggccgggaccacacgcagaacagccggcagcgagccggggccccgccggcccaggagagaagggagggcccaaccccagccggaagc

SEQ ID NO: 136618 - RNA, 56 nt, Homo sapiens
caaacgggccagacggcaggcaccccaagaggccagggagaccagggggcagggga

SEQ ID NO: 136619 - RNA, 74 nt, Homo sapiens
cacagaaggaggccaccagccacgccgcacgcgccgccaacggggacccagaccacaagacaggaggaccgccc

SEQ ID NO: 136620 - RNA, 71 nt, Homo sapiens
ccagacaggcgggcagaaccgaccggagaacacaggcgcaaaaaacaaacaggagccagacgaggagagag

SEQ ID NO: 136621 - RNA, 81 nt, Homo sapiens
cgagccacggaggcggagagagggagcaggcacaaaagcaacacacccaacaacaacgacaccggcccccgagaccgcacc

SEQ ID NO: 136622 - RNA, 88 nt, Homo sapiens
gacagcggcgaggcacggcgccccaaggagaccccagcagcccaacacccgccggcgccacggaggcagccagccggcagacagcagc

SEQ ID NO: 136623 - RNA, 86 nt, Homo sapiens
gcccaccaaaaaggaccaacgagccagagcaaaaccagcccagagaacaagaggcaaaaacacaagccggcgagccagcaaaaggc

SEQ ID NO: 136624 - RNA, 77 nt, Homo sapiens
aggcaaagacggcaaaagcacaaggaccgcggacagagacaacaccgagagagaaggacgaaaagacaagggaaaaa

SEQ ID NO: 136625 - RNA, 69 nt, Homo sapiens
acggaccccgaggacaggaaaaacagcaacagacaacgagcaaccagaagaaggacagaagagagacaa

SEQ ID NO: 136626 - RNA, 71 nt, Homo sapiens
cccgccaggccccagagacaccaggacaaacccgaggcgagaaccaagacaacaggcgaagaagggaaacg

SEQ ID NO: 136627 - RNA, 55 nt, Homo sapiens
acggggaaaacacagaccagaggacggcacaaaggagagcggcaaccaagccggg

SEQ ID NO: 136628 - RNA, 61 nt, Homo sapiens
ggcagccaagcaggaccacccaccagccaccaggccagccagaccaaggacagccaaggaa

SEQ ID NO: 136629 - RNA, 73 nt, Homo sapiens
acaacaaacaggggaaggacacaaaagaaagcgacaaggaacaagccagagaagaacagggaaaaccagcaaa

SEQ ID NO: 136630 - RNA, 82 nt, Homo sapiens
cccacgccaggccggcgcggaggaggacgcaaccacggaaaacgacgaaaccagcccccccaagccccggggccagccacaa

SEQ ID NO: 136631 - RNA, 68 nt, Homo sapiens
acacaaaccgcggaaggacaagcaggggcgcagacaaagaaggaccagcaagaaagaagggaagccac

SEQ ID NO: 136632 - RNA, 73 nt, Homo sapiens
gggcccacccaaacgacccagacagaccaaacagcggcgcacgaaaacagagcgaagacgacccaggccagga

SEQ ID NO: 136633 - RNA, 80 nt, Homo sapiens
aaccagaccgaagggcgaccaccacaacgccgcggacgaccgcacgggcaggaaaaaccaggggcagaacaaggagaggg

SEQ ID NO: 136634 - RNA, 43 nt, Homo sapiens
gccacgccggaccccgccacgggagacacggacggcagccgcc

SEQ ID NO: 136635 - RNA, 80 nt, Homo sapiens
aggcaccgggacggaccgagaccggaccgagagcggaccgagagcgcgaaacgcacgagaagcaaaggaaacaagcgacc

SEQ ID NO: 136636 - RNA, 106 nt, Homo sapiens
acggcggccggacaaacacgcaaggacccccccggccaagggcaagcaaggacagagcgggagccaccagcgccaaagggaagccaggagcccgggggcacgggga

SEQ ID NO: 136637 - RNA, 83 nt, Homo sapiens
cggaagaaagggaaccggagaagagagagaaagaccaaggggccgcggacagaccaggaagcggggcaaggccaacaagaggc

SEQ ID NO: 136638 - RNA, 38 nt, Homo sapiens
ccccaaaggcggaacagggagcggcccccaccgacagg

SEQ ID NO: 136639 - RNA, 75 nt, Homo sapiens
agcagaccacagcacggacccagcagggccggcccacgcccaggaggaggccggcaggggaagacgacaaggacg

SEQ ID NO: 136640 - RNA, 70 nt, Homo sapiens
caggacgagcagccgccgggacggccaggaacggggcgggccaagcagagaaccaagaccggcagcgggg

SEQ ID NO: 136641 - RNA, 80 nt, Homo sapiens
agaagacagggagcgagagcggagaagcgggaggagaccacccaaacgcggcacgggagcaccaagccaggagaagggag

SEQ ID NO: 136642 - RNA, 100 nt, Homo sapiens
aggggcgaaggagcgggccgggcccccaccagcccgagacacgcgcccgaccggagagcaaggggacccgcacacgcaacccgccccagggcaagggccc

SEQ ID NO: 136643 - RNA, 93 nt, Homo sapiens
gggccccacccggccccgccgagcgcgccggaccggcgcccggacaacccgacggagcccaaaagaaaggaagccgcacgaggagcagaagca

SEQ ID NO: 136644 - RNA, 78 nt, Homo sapiens
ccacccaggccaacagccaacacaggggaagaaggcggcaccacagaggggcgacccccagcggggaggaggcggagg

SEQ ID NO: 136645 - RNA, 63 nt, Homo sapiens
ccggccgcgcacgcacccgcagcgcagcaccagcaagaacacgagacacgacggcgagacgaa

SEQ ID NO: 136646 - RNA, 56 nt, Homo sapiens
gaccaacgcggaccccgaccccccccagagagaaggaccaaaacaacaagacagaa

SEQ ID NO: 136647 - RNA, 79 nt, Homo sapiens
cgccagaccagcgaagcgacaagccacggaagggaacaccgccccccagagcacagcgggcccgcgaagggcgcacaag

SEQ ID NO: 136648 - RNA, 74 nt, Homo sapiens
gccgagcccgagccgcagcacgagccaaaccgagaaacgcaaaaggccaagcgagaagagaccggaacgccgca

SEQ ID NO: 136649 - RNA, 81 nt, Homo sapiens
cccccgcggcaggaacgcacccggcggccccacgcagccacccaaaaacagggagaagagccaaggagaccaaacccagca

SEQ ID NO: 136650 - RNA, 79 nt, Homo sapiens
ggcaggcgagaccgcgcgcgaggagaggagcgcaacagcagcaccaggcgcacaagagcacaccaaccgggcacccgga

SEQ ID NO: 136651 - RNA, 83 nt, Homo sapiens
agcgaccgcgccggcagcgccgcgaaggcgggccgggccagcccccgccgcccgggaggacagcccaaggcggaaaagcgaag

SEQ ID NO: 136652 - RNA, 68 nt, Homo sapiens
gcaagagccccaaagccaccaggacccccagcagcggccacagacaggaggaagaagacgggaaggaa

SEQ ID NO: 136653 - RNA, 67 nt, Homo sapiens
cgggggggggaggcccgaggcagggccaaaggaaccgcgccacagcggggacgcggaaaggcagaag

SEQ ID NO: 136654 - RNA, 75 nt, Homo sapiens
gcagagagcaaagaaaggacagcaccggacccgccaccaccaaaaaaccaccccccagcaccaccacccacccgg

SEQ ID NO: 136655 - RNA, 78 nt, Homo sapiens
aggcggcccgccaaggcacggggaccgcgcccgcagaaaccacaaagagccacaaaacacggaacaacgaaggccccg

SEQ ID NO: 136656 - RNA, 52 nt, Homo sapiens
gagaaggcgcggccagggacgccgaaggacaagagcggggaggaccggggac

SEQ ID NO: 136657 - RNA, 69 nt, Homo sapiens
accaaaccgaggaaaggaaagaaagcacgagacaacgaggaaccagcaccagacagaagacgcagaaga

SEQ ID NO: 136658 - RNA, 78 nt, Homo sapiens
cgaacagcaggccaaagaccagaggacaagaaaagcgaaccccagcacgccgcagcaccggagagcagaaacagaacc

SEQ ID NO: 136659 - RNA, 52 nt, Homo sapiens
ggcgacggccccacccccgagcccagcaccgcgggaagggcagaagacccga

SEQ ID NO: 136660 - RNA, 71 nt, Homo sapiens
ccggggcgcccggcgccggccgagaaggcagaggcgaaaaaccgggacaccgacacccgacggaagaagga

SEQ ID NO: 136661 - RNA, 80 nt, Homo sapiens
cgaccgggagcacaccacaggcaagaccccaacgaaacgaagacaagacgaagaggagaggcacagagaagaagaggccg

SEQ ID NO: 136662 - RNA, 67 nt, Homo sapiens
ggaaaagggagagcccagggcggagaacggaaaagcaccaggaagcagagaggaccgcagaagggaa

SEQ ID NO: 136663 - RNA, 69 nt, Homo sapiens
cggaagagcgcagaagccggaagagagccaagccaggcccagcagccgccaccggaaagcacggacacc

SEQ ID NO: 136664 - RNA, 74 nt, Homo sapiens
acccggagcccagggaagcagccgaccagccgcggagccgggggcagggcagcgcaagaccccgcacggaagca

SEQ ID NO: 136665 - RNA, 66 nt, Homo sapiens
ccgggcgcagcgcaaggagcgggaaggcgcagcgcagggaagacagaggaagaggaagacaaaccg

SEQ ID NO: 136666 - RNA, 33 nt, Homo sapiens
ggaggggacgaagaacggccacccggccacacg

SEQ ID NO: 136667 - RNA, 74 nt, Homo sapiens
cagaagacaaggaggcggagaaacacaaagagcccggaacgccagagcggaaaggaagagaacgccggaagcgc

SEQ ID NO: 136668 - RNA, 68 nt, Homo sapiens
ggacaaaccagcaggccagcgcagaccgagagccaagagccgaggacaaaccggcgaccacacacggg

SEQ ID NO: 136669 - RNA, 73 nt, Homo sapiens
acacacccgacgaaccgagcacgaaacggaggagaaccgaaaaaagcagagaaaaggagccaggacgacacag

SEQ ID NO: 136670 - RNA, 79 nt, Homo sapiens
cccgccagacaacagacccggcgcggcgccccgggcccagcacgcggggcaggcggacagacacaccagaggaagaggc

SEQ ID NO: 136671 - RNA, 70 nt, Homo sapiens
ggcggcagcccgagaccgcagcagaacgccaaaaaccccgccacaacggggagcgaggagacccaagaag

SEQ ID NO: 136672 - RNA, 70 nt, Homo sapiens
aacaagggggggaaacccaccgggaaaaggcacgaaggagaacaggaagacacggaccgaagagaagaga

SEQ ID NO: 136673 - RNA, 106 nt, Homo sapiens
cggggaacgacgcggcgcgcgcggacgaagagccccccccccaacaccgcgacacgcagagaggagcgcaagccgagggaggaaggaggaaccggagggagcagag

SEQ ID NO: 136674 - RNA, 78 nt, Homo sapiens
aaccccaaagcccgaagaaccaccaaacccagaccaaaaacgccagaacacgacgagggccccgagaaaggcagagcc

SEQ ID NO: 136675 - RNA, 70 nt, Homo sapiens
caggcggcccagccggaagaagaacgggcccccggaagccgggcccaaccgacagggcacgacagagccg

SEQ ID NO: 136676 - RNA, 62 nt, Homo sapiens
aaggccgagagacccgagcccacagcccccaaagaacccccaccggagcaagcaggagcccc

SEQ ID NO: 136677 - RNA, 68 nt, Homo sapiens
gagccaaaccccaaaacccgcagccggccggcggccgaggaaagcgaacgcgaaaagaaaagccgaga

SEQ ID NO: 136678 - RNA, 56 nt, Homo sapiens
cgccacccagcaacaaaaagaccacagacaggccaaaacagaagaggcaaagccca

SEQ ID NO: 136679 - RNA, 120 nt, Homo sapiens
aaaagacacaacgcaacaagagagcgaccaagagaacagcagaggcaaagaagcagccgaagggccagcccgcaacccccggcgaccacgggcccggcaacagcgcagcggggacaccgg

SEQ ID NO: 136680 - RNA, 80 nt, Homo sapiens
gcccagaagcacgcggcccgggggaacccaacgccccgagccggaccgcccagcccccggccccgcgcccgggcagcccc

SEQ ID NO: 136681 - RNA, 82 nt, Homo sapiens
ccgagaccggaccgagagcggaccgagagcgcgaaacgcacgagaaggccgaccgggccgaggcgaaccagaagagagaaga

SEQ ID NO: 136682 - RNA, 76 nt, Homo sapiens
cacagccaaagaagaaagggagcagaaggagacagcaaagggacaaacaccgagaaaggaaaagggcagaagggga

SEQ ID NO: 136683 - RNA, 56 nt, Homo sapiens
caggccaccacagaaacaaaagcaacaaagagggagagagagcggagacaaggcca

SEQ ID NO: 136684 - RNA, 77 nt, Homo sapiens
caacaaggccaacgaggagccgcagcagcgaaggcagaaggcacagaccagcacagaccccgcgagcaagaagggga

SEQ ID NO: 136685 - RNA, 71 nt, Homo sapiens
gcaagaggacggaagcaggcgaagcgagaacaggaaggggcgaggcagacgagccacagcaagggacgaag

SEQ ID NO: 136686 - RNA, 72 nt, Homo sapiens
gccgggcgggggcgcgccccgcgcgcagggaccgcccgaccaggaggaggacgagaaggacacgacgggaga

SEQ ID NO: 136687 - RNA, 78 nt, Homo sapiens
aacagcagggacagaaacagcacagagggccaagccagaacaggggaaagccaaggcgagcaggagccaacagacacc

SEQ ID NO: 136688 - RNA, 63 nt, Homo sapiens
cccgcgccacagccaccagagccggcagcaaagagggaacaggcacgggagcgcggggaccga

SEQ ID NO: 136689 - RNA, 69 nt, Homo sapiens
agaaggcagggagggaggggaaagacccacaccaagaggaaagaccacagcaagaccacgcccccagcc

SEQ ID NO: 136690 - RNA, 76 nt, Homo sapiens
cgacccccggggagccagcgagcccccccgacacggccaaggcagaggccaagaaggaacgaaaaaccccggaagc

SEQ ID NO: 136691 - RNA, 40 nt, Homo sapiens
aggcggcccacggcagcgagggggggccccagcccggccg

SEQ ID NO: 136692 - RNA, 41 nt, Homo sapiens
acccagcaccgggaggccgaggagaagagaaaagggaaggc

SEQ ID NO: 136693 - RNA, 55 nt, Homo sapiens
caagcaaccaggaggacaaaaaaagaccaggccgccagaaggaggaacagaaaga

SEQ ID NO: 136694 - RNA, 84 nt, Homo sapiens
ggcccaagggaccaccgggggccgaagagagcgggaggagagaccggaggccgaggagccagggagaacgaagagacaaagagc

SEQ ID NO: 136695 - RNA, 38 nt, Homo sapiens
caagcaacggcggagacaaagcaggaggacacaagaag

SEQ ID NO: 136696 - RNA, 75 nt, Homo sapiens
gccaggccggccggccggacaagcccaggagccgaccagagagcaggcacacagagaaaaaaagggaacaaaaca

SEQ ID NO: 136697 - RNA, 68 nt, Homo sapiens
acaggcgcccgccaccacacccagaccccaaaggacgacacccgcgggccaggccaagagaaacaggg

SEQ ID NO: 136698 - RNA, 89 nt, Homo sapiens
agcccagcgcaaccccaagcgcccaaagagagcagcaccagcagaagagggcccgaccacggcaacccagaggcgaagcaggacacccg

SEQ ID NO: 136699 - RNA, 79 nt, Homo sapiens
cagcccagggccagggagcaggagccagggccgagcacgggaaccaaagacaccggcacgaggagaaggacccagagaa

SEQ ID NO: 136700 - RNA, 54 nt, Homo sapiens
aaggaccaagaaccaggaacagagccccaaagcagagacacaagagaacagggc

SEQ ID NO: 136701 - RNA, 38 nt, Homo sapiens
gcacagaggcagcgccacccgcgggggcggacagaaca

SEQ ID NO: 136702 - RNA, 75 nt, Homo sapiens
ggacaccaggaacccggccacagcaacggaggcgaacaggaaacaggacagggcagggaagggcaacaaaggggg

SEQ ID NO: 136703 - RNA, 77 nt, Homo sapiens
aaagggaaagagacggagaaaagaagaacacgcccaaaacgaacagggcacccaaaaagagaggcgagaacacggaa

SEQ ID NO: 136704 - RNA, 74 nt, Homo sapiens
cagccccaaccgaacccagacgcagaacagcgagcaagagccaagagaggacccgggacgaaccggcaaacccc

SEQ ID NO: 136705 - RNA, 72 nt, Homo sapiens
cacgaagcaggaaagaacgacgccagggagagcagcgaaagcggaccgagcgagcgagaagagcaacccagg

SEQ ID NO: 136706 - RNA, 70 nt, Homo sapiens
cgaggccagacagcaagagcacccgacccacaggccagagaggcgaacaagaggcgccagcgggcgcgcc

SEQ ID NO: 136707 - RNA, 69 nt, Homo sapiens
aggaggggcgagagggagccgcagcgagcaggaccccgcgggcacggcgggacgggacaagacaccaag

SEQ ID NO: 136708 - RNA, 63 nt, Homo sapiens
caaacgacgcagccacggagaggaaagccaggccagaagaaggaaggccggggaggggacagg

SEQ ID NO: 136709 - RNA, 49 nt, Homo sapiens
ccggaggagcccccaggccgcaggagacagagagaaagcaacagcaggc

SEQ ID NO: 136710 - RNA, 86 nt, Homo sapiens
cgagcagcgcccgggagccccacgagcccgaaccgaaaaaagcggcagcgcaacccagaagagggccacggaaccaaccagcggac

SEQ ID NO: 136711 - RNA, 40 nt, Homo sapiens
cccgcaggaccggaccgggggagagggcggagaaggaaca

SEQ ID NO: 136712 - RNA, 69 nt, Homo sapiens
cacacgcggggcggggcacccggccagcacagagagccagagcccagagaggaacgccggccgcgaggc

SEQ ID NO: 136713 - RNA, 64 nt, Homo sapiens
cccaggaagcagacaaggacaggagaagagcaagcaagggagcacagcgcggaagccccgaggc

SEQ ID NO: 136714 - RNA, 67 nt, Homo sapiens
acacgccgagagagaagccagggggcgggccccagacggacccaggacggggggccggagaacgggg

SEQ ID NO: 136715 - RNA, 97 nt, Homo sapiens
agaccggggaggagggaaagagggcccaccacaggaggccagccaggcgagaaaccggagggccgcggagggcgcacgggcccagagacgacgcagg

SEQ ID NO: 136716 - RNA, 75 nt, Homo sapiens
cccaggggcgagccacagcgaaagggccagcccgcaacccccggcgaccacgggcccggcaacagcgcagcgggg

SEQ ID NO: 136717 - RNA, 59 nt, Homo sapiens
caacacccgggaaaggaagcgcacaggaagccggaaacgacaggcccaaaccagaaacg

SEQ ID NO: 136718 - RNA, 78 nt, Homo sapiens
ggcagcgcaggcagaccgcaggcgcaaggccaggcgacccgacgggccaccgggagcacggcccaggcagccaagaag

SEQ ID NO: 136719 - RNA, 81 nt, Homo sapiens
gaaacgaaagaaacaggcaaggagcgcccagcaagagggagcacagcgcggaagccccgaggcagccccgcggaggagcag

SEQ ID NO: 136720 - RNA, 88 nt, Homo sapiens
gacacggaggacgcaaggaaccgcaagggcgaaaggagaggagccaaaaaagagacccccaagacgaccccggaaacccaaaacaaaa

SEQ ID NO: 136721 - RNA, 69 nt, Homo sapiens
ggaggaacgcggggaggaggaggacaggcagcccgccaaaaaggaaaagaccagagaaagaaggcagcg

SEQ ID NO: 136722 - RNA, 66 nt, Homo sapiens
accgaagcaggccagacccaaagacggcccccacagcagaaaggaaggacgagcccccgcggagac

SEQ ID NO: 136723 - RNA, 80 nt, Homo sapiens
gagggaagaccgccccacaaaaaaaggaaggcagaggaagccacggccacggacccggcgagggccaaggacacagacag

SEQ ID NO: 136724 - RNA, 77 nt, Homo sapiens
ccggcgcagcgagcgcggacggagaggaaagcggagggaagggcaacaacccaccgggggaaacaccagacgaagcc

SEQ ID NO: 136725 - RNA, 40 nt, Homo sapiens
agaagaggagacagacagaagacgaagaacggaagcgccc

SEQ ID NO: 136726 - RNA, 74 nt, Homo sapiens
cgaggaaacccacggacgcggacaacaaccgccgggcaacaggccacccaccgggccaacaagccgaggagagg

SEQ ID NO: 136727 - RNA, 68 nt, Homo sapiens
cggcacgaaaaacccgcaggcggggacccagcgggacccgggcgagggcaccaggcccaacgaaaggg

SEQ ID NO: 136728 - RNA, 70 nt, Homo sapiens
cgggagcggacacagcccagcggacaggcaagacaggccaccacgggcacgcggaagccgggccagccgg

SEQ ID NO: 136729 - RNA, 83 nt, Homo sapiens
acgcggaggcccaaccgaagaaaacaagaggcacaggcaccagccagacccccaaaccacgaccgcgcaggacgcaccagaaa

SEQ ID NO: 136730 - RNA, 55 nt, Homo sapiens
cacgccgcacaggccgcgaacggggcaaaggcggccaagggaggccgccagccga

SEQ ID NO: 136731 - RNA, 37 nt, Homo sapiens
gaggacaagcaggcaaagcgagagcagccgcaaccga

SEQ ID NO: 136732 - RNA, 91 nt, Homo sapiens
ggacagggcgggggacacgcaggagagccccgcgaccacggcacacgcgacagagacaaagcaggaggacacaagaagggaggaaaggcgg

SEQ ID NO: 136733 - RNA, 57 nt, Homo sapiens
agggcgcccccgaagggagaagagccagggaggaccgaggcagcccaacggcggcag

SEQ ID NO: 136734 - RNA, 80 nt, Homo sapiens
ccggcagccaccccgcgggaagaggggagagcaaacacgacggccagagaagaaaggaaggagccaagggagccaccaca

SEQ ID NO: 136735 - RNA, 78 nt, Homo sapiens
aggccggcccgcgcggacgcggcgccacggcccgccaccggaccggaagcgggcccagaccccaccaacaacgaacgc

SEQ ID NO: 136736 - RNA, 79 nt, Homo sapiens
ggcacccaacgagggagccacaccagacagagaagccccacaccggaggaccaccagagacaggacaggaccagcaagc

SEQ ID NO: 136737 - RNA, 79 nt, Homo sapiens
cgaaagacggagaacagggaagaaaaaaggccaggaagcaagaaaccaaaacaggagagcggaagaagcagcgagaaac

SEQ ID NO: 136738 - RNA, 85 nt, Homo sapiens
agcgcccggaccggccgagaggaagacgagccgggaggaacggcccggaaacaggaggacacagcgcgcgaagaaacacacggag

SEQ ID NO: 136739 - RNA, 54 nt, Homo sapiens
ggcacacggaccaacgggaaaacggccccccggacagccagagaaccaaaggca

SEQ ID NO: 136740 - RNA, 67 nt, Homo sapiens
ggagacgaccccgaggcccaagagaaacaggcacgccgcaccacccaccagcggaccggacaagggc

SEQ ID NO: 136741 - RNA, 84 nt, Homo sapiens
agcaaccggcccggcacgccacaaaccaagccaggaccaggaccgggcccgagcagccccgcccaacaggacccagacccccag

SEQ ID NO: 136742 - RNA, 60 nt, Homo sapiens
aagaggcggcgggcaagcccgaaggagaaccaccaccagaggaagcgagcagaagcagga

SEQ ID NO: 136743 - RNA, 77 nt, Homo sapiens
caagccggaggagaagcaagaaggcccggacacagcaaaccgggccacagggaacgaaagggagagaagcaagaaag

SEQ ID NO: 136744 - RNA, 79 nt, Homo sapiens
gggcgcagagaaggagccggaagaagccacgaggcgggcaccgagagacacacaaggcggcagggcccaaagcacaagc

SEQ ID NO: 136745 - RNA, 73 nt, Homo sapiens
gaacccagcccgcgcacagacacaggggagcagggcagcaccccccacgcgcgagaggcagaaaagcgaacag

SEQ ID NO: 136746 - RNA, 81 nt, Homo sapiens
gggccaagcacacgaccacgcacgggccagaaggcggcggcaggcaaggccagaggacccgagaggaagacacgaggcagc

SEQ ID NO: 136747 - RNA, 73 nt, Homo sapiens
cggagcggacggaaaggcacgccggcgcccccccacaccacagggacgaagcccggccgaggccgacccgagg

SEQ ID NO: 136748 - RNA, 52 nt, Homo sapiens
aagaaacaacgggccaacagcaggccaggaaggggcaagaccaacggagcca

SEQ ID NO: 136749 - RNA, 75 nt, Homo sapiens
cgcggcccgggcgagcccggagaagaggaaggacagggcagaccgccagcagcacagcaagccacagagagggcc

SEQ ID NO: 136750 - RNA, 56 nt, Homo sapiens
gccggccaagagacccaacccccgaggcacacgcagccagaagcaacaagagaagc

SEQ ID NO: 136751 - RNA, 84 nt, Homo sapiens
caacaaacccacagcccccccaccgaacacccagaagaaaacaaaacccagagcgacaaaaacaggccggcaggcagggaccag

SEQ ID NO: 136752 - RNA, 76 nt, Homo sapiens
gaggcaccagccacacaagacacacccacccgaaaagagagccagccaggaggaggcgggaacgaccaagagggag

SEQ ID NO: 136753 - RNA, 57 nt, Homo sapiens
gcgggaagcaggacgcgccgcgccccaagagccggcagcgcccgagggagcaaggag

SEQ ID NO: 136754 - RNA, 65 nt, Homo sapiens
gacgaggcgggacgcaggaagccgcgccaggcccagacacgcagaggagacccgaaccggcaaca

SEQ ID NO: 136755 - RNA, 59 nt, Homo sapiens
agggagcggccggccccgccagcaccggggggaccagccagaaggagacccaacacccc

SEQ ID NO: 136756 - RNA, 46 nt, Homo sapiens
acaccacaaacccgagagcaaccagacagaccagagaggaagaaga

SEQ ID NO: 136757 - RNA, 79 nt, Homo sapiens
acaagcaaggccgaaccagcggcaagagacagaccggaccggggagaagacagccccagcacagaggaaagagaaagag

SEQ ID NO: 136758 - RNA, 52 nt, Homo sapiens
aagaagcaagaaccaaccagccggccccagcaaaccagcaggagcgaccaca

SEQ ID NO: 136759 - RNA, 39 nt, Homo sapiens
gggccccgagccggcccgggcgagccagaacaccaacgc

SEQ ID NO: 136760 - RNA, 52 nt, Homo sapiens
agcacgggcagccccggacggggcaacgggcagaaggaccccaggaaacaag

SEQ ID NO: 136761 - RNA, 74 nt, Homo sapiens
cgaaagaaggggccgcagagcgcgcgaagcggggagacggccagaccagaaaggaacaggaggagcggaggcca

SEQ ID NO: 136762 - RNA, 81 nt, Homo sapiens
acgccgagcgggacccccgccgccccgggggccggacggcccaggcagcgcagacgaaacagcgcgcagaagccaacagac

SEQ ID NO: 136763 - RNA, 69 nt, Homo sapiens
ggagcaggagcacaggaccgccaggaagcgacgaaaagaaaccagacaagagcaggagacggaagcgca

SEQ ID NO: 136764 - RNA, 73 nt, Homo sapiens
gaagcgaaaagaaacccaagaagcaccacaagaagccaaaccgacaaaaagagaccgacacagaagcaggaga

SEQ ID NO: 136765 - RNA, 73 nt, Homo sapiens
caaggaaccacccgcggcagagagagccacaggccgcacaccccagagcccgaagggggccccgaccccgacc

SEQ ID NO: 136766 - RNA, 81 nt, Homo sapiens
ggaaagggccacagcagagacgcgaaggagaggcccagaaccgacccagaccggaacgggcacgacgcaccaaagaaaaag

SEQ ID NO: 136767 - RNA, 74 nt, Homo sapiens
cggggcgagggaaccaggcgaggagccgccgggggccggcaaggaaacccaaccccagagaaagggaagcgaga

SEQ ID NO: 136768 - RNA, 78 nt, Homo sapiens
cgggaacggaggaccggggaacggcaaagcaggagcgggaaaacacggagcagggggccgagcaaaccgcccagcccc

SEQ ID NO: 136769 - RNA, 71 nt, Homo sapiens
gagggcgcaacgcaccagcagaaaacgcagagaaacgcacagaaccaaggaaggcacggcgcaaacggcgc

SEQ ID NO: 136770 - RNA, 30 nt, Homo sapiens
gaccccacaagacgcaaggagcaccgcgcc

SEQ ID NO: 136771 - RNA, 71 nt, Homo sapiens
ggacgcgcgggcgcgcccgcccaaagacggggacgaagccccagagagacgaggcccaggcggcccgaacc

SEQ ID NO: 136772 - RNA, 76 nt, Homo sapiens
accagcaccgggacgcacagagaccggaagaccaagcaggagaaccgaccgggggggccgaagaagccagggggag

SEQ ID NO: 136773 - RNA, 63 nt, Homo sapiens
cgagggagaggaccaagaaggagcggaacagaggcaaaaagggagcgggaccacgcgggcgcc

SEQ ID NO: 136774 - RNA, 76 nt, Homo sapiens
agaggccagaagccagaagaacccaaggagggaccaaagccagaggaaaaggggcgccagaaagcagaaggaggcg

SEQ ID NO: 136775 - RNA, 61 nt, Homo sapiens
aagacaggagaaagcaggggaccgcaggcaggagaagggcaccggggaggaccgcgcgacg

SEQ ID NO: 136776 - RNA, 76 nt, Homo sapiens
agcgcgcggcgggcggccacaccacaacaagcacaaacacagcccacagagggagacggggggcggccccggacac

SEQ ID NO: 136777 - RNA, 68 nt, Homo sapiens
ggggcagcagacgcgaaggcggggcccggacgaggaggaaacaaagaagaggagcagaaaagcgaggc

SEQ ID NO: 136778 - RNA, 87 nt, Homo sapiens
ggaaaccggagggacccggcccggaggaagaaagccaaggaggaagaggccccaggaccggcgaggccccccccccagcagcaaagg

SEQ ID NO: 136779 - RNA, 52 nt, Homo sapiens
aagaggcaaagaaacaccaaaacaagccccgcagagcgagacgcaagaaaac

SEQ ID NO: 136780 - RNA, 59 nt, Homo sapiens
aagccaggcaccacgggggaccgcacaggggcaggaagcaggcacgagcggagcagcag

SEQ ID NO: 136781 - RNA, 58 nt, Homo sapiens
ccagaaggaacggagacaaaaacggcccggagaggagaaaaaagggacccaagaaagc

SEQ ID NO: 136782 - RNA, 91 nt, Homo sapiens
caccaccgaggaccagaaaccgccccagcgaggaagaggacaggagcggagagaagaggagaaaccggcaaagagaagcaacacaagaaga

SEQ ID NO: 136783 - RNA, 70 nt, Homo sapiens
aaagccccacccgccgcagcaagcagaggagcggagcgcaagaagaaggccgggggcacgccgcacgcaa

SEQ ID NO: 136784 - RNA, 55 nt, Homo sapiens
ggcgaagagacagagccgcaacaggagcggaaaagagacgcaggaagaagccgag

SEQ ID NO: 136785 - RNA, 76 nt, Homo sapiens
cagcagaccgccagcgagcaacggcagagggacagagcccggccaggacaaaaaggcagcaagaaaacacggcagg

SEQ ID NO: 136786 - RNA, 112 nt, Homo sapiens
gaagcaagacgcagagcgccaacagggggcgcgccggggaccagccagaaagcacgagagccgggcagcgacgacagcccgcgggggggcaccagccggcccggcaggcggg

SEQ ID NO: 136787 - RNA, 76 nt, Homo sapiens
gggcggccccgaggaagcaaggccgcggggggagaccccaccaccggagacccccgcaacggggcgagagaaaggg

SEQ ID NO: 136788 - RNA, 76 nt, Homo sapiens
cgagggagaaaggaggccacacccaaaaaagggaggcaagcggaaaaggaaaccagaaaaacggagccgaaccggg

SEQ ID NO: 136789 - RNA, 61 nt, Homo sapiens
gagcgggcagccccaggggacaggcccaagcgaaagaagacacaagaaccagaaagggaac

SEQ ID NO: 136790 - RNA, 96 nt, Homo sapiens
ccgagagggagagacgccgaacgacgccccgcacaccggagcgcccagcgcgaggagccaaaccagaaaggggacagcggcgggcagggagcacgg

SEQ ID NO: 136791 - RNA, 82 nt, Homo sapiens
cgagggagcagagccgccaggcagaaggccccccgaacagcaggcgccaccagcccggagagagcgggacgggcagaagaaa

SEQ ID NO: 136792 - RNA, 85 nt, Homo sapiens
gaaggagcccaagccagacgcagagacaaaacaagcccccaggaaccacggccaacggccgccaccaaaaagaagaagggaaagc

SEQ ID NO: 136793 - RNA, 42 nt, Homo sapiens
cgccaacagacagggcggagagaccggaggagccgaccgcga

SEQ ID NO: 136794 - RNA, 88 nt, Homo sapiens
ggaccaacacgcagcagccgcgccgccgccgcgggagccgcgcccgaaccccggcccgaacccaggggagaaaaagcccccacggaga

SEQ ID NO: 136795 - RNA, 80 nt, Homo sapiens
acagccacgccagggagcacggcacaagaacgccgaacaaacccagcagcagaaacgcaaaccagccggcgggcgccaca

SEQ ID NO: 136796 - RNA, 34 nt, Homo sapiens
agggacccggacaccaaggaaccacagacaaacc

SEQ ID NO: 136797 - RNA, 76 nt, Homo sapiens
acaagcccgagggcagccacagcgggaaaagaaagcaacgcgagcccgcacagcacagcaagcaacccggccgagg

SEQ ID NO: 136798 - RNA, 91 nt, Homo sapiens
ccaacccgaagaaagagagggaagaagcagggcagaggaccaggacgcggaggggaaaggacaaggaaggagcggggaacgacacagcaga

SEQ ID NO: 136799 - RNA, 82 nt, Homo sapiens
gcggccgcgcagaggcagcagcagccgcggagcagagccgccggggagggagccagaagcaacgagcaggagcgcagaagga

SEQ ID NO: 136800 - RNA, 69 nt, Homo sapiens
agcccaaacgccccacgaccagccacgccaaaaaaagggccgcggaacaaaaaggggcgcagcgaagca

SEQ ID NO: 136801 - RNA, 67 nt, Homo sapiens
gggggggcccgccaacgaaccacaggcgagaccgagacaagcaaaagggagaccacaacagccacca

SEQ ID NO: 136802 - RNA, 80 nt, Homo sapiens
cccccgccaggcggcgaaagacacgccccagaccaaggaagccacccggaggagaaggaggcaccagccccacagaagca

SEQ ID NO: 136803 - RNA, 75 nt, Homo sapiens
caagcaagagcgaccggaggcccgagaagaagacaagagacacagcaagacaagcggggccaaagccgcggacag

SEQ ID NO: 136804 - RNA, 57 nt, Homo sapiens
gaaacacgagcacgccggacaggaggaacccgaagaccgcaggaaagcaggaaggca

SEQ ID NO: 136805 - RNA, 75 nt, Homo sapiens
cgggccccaggcagacccgaccgaccagcggcgggagaggagagccgaaaagacgaggcgaggaggcgagacacc

SEQ ID NO: 136806 - RNA, 80 nt, Homo sapiens
gcggcagaagaaagcaagacccaggacaccccgaagccgagaaagaaccccaacaagcacaccccagacagagggacacc

SEQ ID NO: 136807 - RNA, 78 nt, Homo sapiens
aaaaaaaagcaaaggccagacggagccaaacagccacagaaggcccaacaaaagggagaggagaccggagacggcgag

SEQ ID NO: 136808 - RNA, 82 nt, Homo sapiens
ccccccaccagccccccaggggaggaggcgagagaccccaggaagaagaggagggagcaggggcgacgacccacgccgggag

SEQ ID NO: 136809 - RNA, 66 nt, Homo sapiens
cagagaagcaaagaagcaggcccaggcagcgcagacgaaacagcgcgcagaagccaacagaccccg

SEQ ID NO: 136810 - RNA, 69 nt, Homo sapiens
cgcggcgggcacgcgcgaccgcggccgcggcacgaagaccaaggggcaaggagaagaaggaacgccaca

SEQ ID NO: 136811 - RNA, 73 nt, Homo sapiens
acagcaggcagcagcaagagaacaggagacagcggagaaagagcccgggaagcacgaagccgagaccagccaa

SEQ ID NO: 136812 - RNA, 76 nt, Homo sapiens
gcaacccaggaacaacacagcaaccacccggcacagggagaagggcagggcccgacacagcgagaaggcccaaaga

SEQ ID NO: 136813 - RNA, 81 nt, Homo sapiens
ccagcccaagaaacaccaccaacaaaccgacaaacaggaagaagagagcaggagaaaaaacaccaacgaggcagaacaaaa

SEQ ID NO: 136814 - RNA, 83 nt, Homo sapiens
gccaggccacggggccacagccgcgggggccaccacacggcccaaaaccgcagccgggccagaacaggcgaaaaaagggggga

SEQ ID NO: 136815 - RNA, 77 nt, Homo sapiens
gagcgcagccgaagcccacagagaagaaagcgacagaggcgaccccaaagagaaagcagaaagaaccagagagagca

SEQ ID NO: 136816 - RNA, 77 nt, Homo sapiens
gagcaggacaagagaaaggaacccgcgacgccaacagaggagaagaggagaacagcaagcccaaaaaagagcacgca

SEQ ID NO: 136817 - RNA, 72 nt, Homo sapiens
gaaggaccaagaaccagcagacgacagagagagggggaagggccaaaagaggaagaggcgggaccaacgggc

SEQ ID NO: 136818 - RNA, 67 nt, Homo sapiens
cgagagcgccacccaaaaccacaggacagcccaccaaagccccccagcgggcggccggggccaggag

SEQ ID NO: 136819 - RNA, 78 nt, Homo sapiens
gaccccaaggaagccacggcagacacacaacccgacccgacgaggcagcagaccgcgcgccagacgccaaggacgccc

SEQ ID NO: 136820 - RNA, 70 nt, Homo sapiens
agaaccaaaaggacaaacggaccgaggggcgcaggaaaccagagaaacccaggccagcaaagacacaccc

SEQ ID NO: 136821 - RNA, 75 nt, Homo sapiens
cccagaggaaggagggggggccccgcaccgcacagcagaaccagagaacggccagagccgcaaagcagacagcga

SEQ ID NO: 136822 - RNA, 79 nt, Homo sapiens
gggacgccggcgacggccggacgcaacgcggcgggcgagacgccaggcagaggggaggagacacgaagcgacgcagagc

SEQ ID NO: 136823 - RNA, 71 nt, Homo sapiens
aacagcagagcaaggaaagccagacaccgaagacgagggagaccggaagcagaagaccccccggagcgagg

SEQ ID NO: 136824 - RNA, 74 nt, Homo sapiens
acacagagggagaagaggacggcgcggacggacagaaggaacccccaccccgcgaccgcacaagaaaaacaaag

SEQ ID NO: 136825 - RNA, 80 nt, Homo sapiens
aggaccagacacggccggacagggccacagagccgaacacagcagagggggacaagcccacggagacgggagcggcaggg

SEQ ID NO: 136826 - RNA, 84 nt, Homo sapiens
ccggaggaggcgggggcgccggcagaggaccaggcaccaccggccccggaagaggggggcgggccgagcacccgcaggccccgc

SEQ ID NO: 136827 - RNA, 76 nt, Homo sapiens
agccgcccggcacaggaggcccgcgcaggcgcaggggagaggcccacaccagggcggacaccccagggcgcagaca

SEQ ID NO: 136828 - RNA, 77 nt, Homo sapiens
cagggcgcaagaacggcagagcgaaacaccaaaaccagcggagcgacacagccaaaagccaccgcaggaagggaggc

SEQ ID NO: 136829 - RNA, 73 nt, Homo sapiens
gagcgaggggcggaccgcgggcgcccacgaccagcgccccccccaacccaacggcaccaaggaagagagaagg

SEQ ID NO: 136830 - RNA, 30 nt, Homo sapiens
aaaacagcaccacacacaggaacggccgaa

SEQ ID NO: 136831 - RNA, 78 nt, Homo sapiens
ccggggaccgcaggggcgcgcgaaggagcggaagaaggcaggccaaaccaccgaccagagaagacgcgcaagaccgag

SEQ ID NO: 136832 - RNA, 102 nt, Homo sapiens
cagaccacgggagcccaaccggaccacgccgagagcggccgaccccagcggccggagcgcacaagagaaggagaggcacaaacaaaacagaccgaagaagag

SEQ ID NO: 136833 - RNA, 122 nt, Homo sapiens
caaggaggggacacacaagaccaacaagaagggacagcaaggcggggcgaggggagacaggccgggagggagcacagcgggaagggcacaaagacccacacggaaaccaaacacaaagggaa

SEQ ID NO: 136834 - RNA, 73 nt, Homo sapiens
cgaagggagaggaaccagacaaagcagaaagggcggagaacggaaaagcaccaggaagcagagaggaccgcag

SEQ ID NO: 136835 - RNA, 71 nt, Homo sapiens
cggccaagaagggccaccccacagacgagccgcgagaaggggccagcaaagacggagcgggaagaaggggc

SEQ ID NO: 136836 - RNA, 86 nt, Homo sapiens
gccgggcgaccgggcaccagcaggacccgaggccaggagccaggggcccagaagccgggagaagaggcacaaggacaggcacagag

SEQ ID NO: 136837 - RNA, 78 nt, Homo sapiens
gcgggaccagcgcacgcgcggggcccgggcccagaaggcgagaccagagacgagaaggacgcaacaagcaaggcaaac

SEQ ID NO: 136838 - RNA, 85 nt, Homo sapiens
gaaaagaaggggaagaagacaaaacccaccagccccagggcagagagaacagacagagagggccccaacccgcgcaaggggcaac

SEQ ID NO: 136839 - RNA, 74 nt, Homo sapiens
gccccacaccggcacacagcgcacaaacagcagacaaaaggaaaaaggcgagggaacgaagaagcagcgacggc

SEQ ID NO: 136840 - RNA, 76 nt, Homo sapiens
ccacggcaagcacggcgaggagggggaaggagaacagagggaaaaagaccagagaaagggggggaggaagggcaga

SEQ ID NO: 136841 - RNA, 71 nt, Homo sapiens
agccccagagagcggaacacaggaccgggaagccagggaaggaggagaaagccggcggagaacggccagca

SEQ ID NO: 136842 - RNA, 37 nt, Homo sapiens
gccacgcgccaacaccgacccggacaggagagacaac

SEQ ID NO: 136843 - RNA, 74 nt, Homo sapiens
gccccgccagcaaggggacagccgccggggggggaaaaagggaccagggcgcgagccagaagcaaccagacagc

SEQ ID NO: 136844 - RNA, 80 nt, Homo sapiens
cagcggggcaccgggacgggccgagccggagacaaggacggcagcaagggacaacagggggcaacccgggcagggccaga

SEQ ID NO: 136845 - RNA, 79 nt, Homo sapiens
ggaaaaaagaaagaggagcaaaaccaccccgaaaccgacacacgacagcaaggaagcaaggaagaggaaccccccaagg

SEQ ID NO: 136846 - RNA, 76 nt, Homo sapiens
caccgcggagcaaggaagaaaaccgaccagaagagaaagagagaagccaaaccccagaaccaaaagagcagaagga

SEQ ID NO: 136847 - RNA, 76 nt, Homo sapiens
gagaacaagagggcaggcggcgacgagaaaggcgcaaagacaagcagaccggaagaccgacggaagaccacacccc

SEQ ID NO: 136848 - RNA, 80 nt, Homo sapiens
ggggcagacgagaagaggaagcgcgggagaagcggcgcccaccggcgggcaacacccgccgcagagaaacccgcgggaga

SEQ ID NO: 136849 - RNA, 104 nt, Homo sapiens
aaccacaaagggcagagcaaagacccagaacaccaagcaaagaagaggagcacaacaggggacccccaaaagacaagggcaaaacggaccagacacaaagagga

SEQ ID NO: 136850 - RNA, 38 nt, Homo sapiens
cacaccaaccacagaacaggcaaggacaagcccgcgca

SEQ ID NO: 136851 - RNA, 82 nt, Homo sapiens
ggaaccaaggccaccaagagacaaaagaagagaaagccccaagcgacaggggagggacccaggaagaacaagagcaggaaac

SEQ ID NO: 136852 - RNA, 64 nt, Homo sapiens
gggacaaccagcgacgccggagcagcccaacccagggaagagacagcgagcagagaccaggaga

SEQ ID NO: 136853 - RNA, 76 nt, Homo sapiens
aagccccgagcaccaaaacagacagacagcccaaggcggaaaagcgaaggaagccacaagcacagcccacacaaac

SEQ ID NO: 136854 - RNA, 58 nt, Homo sapiens
ggagagagaccagaccgcaagccgacacacagcagcgcaggggccggggagagcggac

SEQ ID NO: 136855 - RNA, 81 nt, Homo sapiens
gcaccgacgcaggcagaacagggccacaccaccgagagagaagccagaaaacagagcacccgcagcaccgcacaaacccgg

SEQ ID NO: 136856 - RNA, 59 nt, Homo sapiens
aaagaaccgagagaacgagcacccccgaagcacccagggcgaacacacacaaaagggac

SEQ ID NO: 136857 - RNA, 60 nt, Homo sapiens
gcccgggccacccccggaccccggagaagcagaggaaaagggaaagacaaggagccgggc

SEQ ID NO: 136858 - RNA, 81 nt, Homo sapiens
caaacagcaaagcacccaggaggagcaggcaccgcggaaccgagcagcaggagcggacggacggaagaagccagccaaggg

SEQ ID NO: 136859 - RNA, 69 nt, Homo sapiens
acgaaaccggcagaaggcacgcgcccggacagacaggcaggaggcagacgggcaaaaggaagcgaaaag

SEQ ID NO: 136860 - RNA, 88 nt, Homo sapiens
gaaccggaaccagcacgaccccaggagcgccaccaccccagccagccagcaggccccaacaggccaccccgaaaccagaaaggagaag

SEQ ID NO: 136861 - RNA, 80 nt, Homo sapiens
cggagacgggcggggacccaaacagggccacaagagaagagcaccccagcagcaccaagggagaccgcaacgagggcgag

SEQ ID NO: 136862 - RNA, 80 nt, Homo sapiens
gcccaagcaaacacaccaaccaagcaaaacccaagcaaaaccagagcagcagcagaagaggagaaacacaaaaccagcag

SEQ ID NO: 136863 - RNA, 79 nt, Homo sapiens
ccggcggagcgacagcggcaaagggcgaagaccacaacgcaccccggaggggaggcaccccggcgcagcccaggagcaa

SEQ ID NO: 136864 - RNA, 76 nt, Homo sapiens
agcgcgaaccgcccgcggaaccacagcccagcacggccgaaccgcccggaaccgggaggcgacaagaaagaaaacg

SEQ ID NO: 136865 - RNA, 80 nt, Homo sapiens
aggcacagccacccagcacacggaccagcacgccggagccgagagaaggcagaccagaacgaggcacagccaacccggcc

SEQ ID NO: 136866 - RNA, 78 nt, Homo sapiens
gagaagcagagagcagcgcacaggagcaaaaagaagcgacgcaggcagaaaaacgagaaaaaacgcggccacagaaag

SEQ ID NO: 136867 - RNA, 79 nt, Homo sapiens
ccgcccgccccgccggcccaccccggggagcaacaggacaaagggagccaaaggaaaaaagaccccagacccgcagaaa

SEQ ID NO: 136868 - RNA, 76 nt, Homo sapiens
acgccgacccggcccggcccgcggcagcaaacacgggaaagaacaaggggaagaacgaagcgcgcagaaaacacag

SEQ ID NO: 136869 - RNA, 108 nt, Homo sapiens
cagagcggaacacaaggaccggaccaagcaagaccccacccagcggccaccccccaagaaagaccagggacacagagagccacggcccaccaacgggacagcccggga

SEQ ID NO: 136870 - RNA, 53 nt, Homo sapiens
cggccgaagagagcgcacagccggaaacaaagagccccgggaaaagaaaaaaa

SEQ ID NO: 136871 - RNA, 82 nt, Homo sapiens
cccggggcgcccagcaggaggcggaacaggaaccaggagcgacgggaaacaacaggcagcaggaaaggggccacgagaccgc

SEQ ID NO: 136872 - RNA, 79 nt, Homo sapiens
gaccacagcacagccgggaaggggagccaccagccccccggggcaaagagaaccaggagaccccaccaccacagaaaaa

SEQ ID NO: 136873 - RNA, 53 nt, Homo sapiens
gcgcgcggaacagggccgccaggggcccccccagaggagaaggagaaacggag

SEQ ID NO: 136874 - RNA, 78 nt, Homo sapiens
ccgcggagaaaaggcgacagcccgccaagacaggaagacagcccgcgaaagacacggaaacaacggaaaggaacaaga

SEQ ID NO: 136875 - RNA, 81 nt, Homo sapiens
cgccggcggcagagaggaacgggcgggggaggagcgcgagcccggcagggcagaggacaacagcaaccaagaagacgagca

SEQ ID NO: 136876 - RNA, 74 nt, Homo sapiens
gagaaaacagcggggcagggagcaaacgagcgccaacggagaaaaaaaggccccgggaccaaggacacgcagac

SEQ ID NO: 136877 - RNA, 63 nt, Homo sapiens
aggaagcgggagggaccacgggcggagacgaggagacagaacagacagaaaaaacaacaagaa

SEQ ID NO: 136878 - RNA, 98 nt, Homo sapiens
ggacgagcaaggaaacaggaaaagcaaccacgccaaccagccgaaggagcaccccccggcccagaaccaaacacgcccgccaccaacgcagccaccgc

SEQ ID NO: 136879 - RNA, 73 nt, Homo sapiens
gaccggcgccccggcgcgaagaggcggaccggacggccgaggcgggaaaacggcacaaggcgacgagggaggg

SEQ ID NO: 136880 - RNA, 79 nt, Homo sapiens
aacggcccggacgggcaggggcgagccacaaccgggaccggccagccgcagcgagaccaggagccgcccgagcgcgaga

SEQ ID NO: 136881 - RNA, 76 nt, Homo sapiens
ccaaacagggccagcacgccaccgggaaggcggggaggaggccccaaagggcgaggccaagaccaaagaaaaaaga

SEQ ID NO: 136882 - RNA, 82 nt, Homo sapiens
gccgcgaggcaccgccccagccgcacccaagccccagcggggcccgcccgaaggcaaaagcagaccggaaaacccaccggca

SEQ ID NO: 136883 - RNA, 80 nt, Homo sapiens
gaaacaaagcaacagcccaaaagcagggagccacgggccgcaaccgcccacggggaccaagaaaggcccagggaccaaag

SEQ ID NO: 136884 - RNA, 70 nt, Homo sapiens
ggagaaccaagggcccaccggagcagcccgggaaaggccaggaaaaaagaagccgaggaagaacgcggcg

SEQ ID NO: 136885 - RNA, 72 nt, Homo sapiens
aacagaagacccacgacggaaaaaggggagcaccacgccgccgaggaccacaagagcaaacaaaaaacagac

SEQ ID NO: 136886 - RNA, 73 nt, Homo sapiens
gcccagcgaagaaaaaacaaagaaggaacacggaacccaggagggagccaggaacagagaggccagagagcgg

SEQ ID NO: 136887 - RNA, 80 nt, Homo sapiens
cacaaggaaccaggaaacaacccgacgccagagacccccaagaagccaacgaaagccagaccacaggagaaggagagaag

SEQ ID NO: 136888 - RNA, 83 nt, Homo sapiens
gagagaaacccagacagaggggagcacagagaaagagaagagaagagaaaggcccggagacgaaggagcgagccgacggaaag

SEQ ID NO: 136889 - RNA, 84 nt, Homo sapiens
ggaagccaagcaaacgcagaaggacgcccacgagcaaccaagaaaagcaccgggaggaaagagagccacacgaagaacacggcc

SEQ ID NO: 136890 - RNA, 78 nt, Homo sapiens
gacaaaaccgaaggaggggggggccccagcccggccgaacgggcgcacgacacaaacacaaccggaggcaccaggggg

SEQ ID NO: 136891 - RNA, 82 nt, Homo sapiens
agcacggcgagccgcggcacaccaagggaggggggaagacagggcccagcaccacaggacgggccgggaagccgccagcagg

SEQ ID NO: 136892 - RNA, 72 nt, Homo sapiens
aaagggaacccgacaagaccaagacacccaagcaacacgcaacccggccaaggaagggaagaaacgaagcgc

SEQ ID NO: 136893 - RNA, 84 nt, Homo sapiens
acccaaggcaaaggcggcaggcacagaggcaagcgaccccgggggcagcacgccacacagacagaccaacagagcagagcagac

SEQ ID NO: 136894 - RNA, 78 nt, Homo sapiens
gacacggccacgggcagggcccgcgggaaagccagagccaagccggagaccgagagacgccccacagacacgggccac

SEQ ID NO: 136895 - RNA, 72 nt, Homo sapiens
agcaggggggccgggaagcaggccggggacgaaaaaggcccagggggaggcggcgcaacgcggggaaagcaa

SEQ ID NO: 136896 - RNA, 48 nt, Homo sapiens
ggaggagaaaacaggacagccaagcccaaccaagccgggggcgaaagc

SEQ ID NO: 136897 - RNA, 80 nt, Homo sapiens
cagcacagccgggaaggggagccaccagcccccgacgacgcaagaacagccaacacagaagacaccgccacgaggccacc

SEQ ID NO: 136898 - RNA, 77 nt, Homo sapiens
ccaagcgccccagaccgcagacagaaacgccccgccgcgcccggggccccgccacagaaaaacgagcagcaaacccc

SEQ ID NO: 136899 - RNA, 59 nt, Homo sapiens
cacacgcgaggcgcagggcagggcagaagggcggagcaccagaagccacgagggcagaa

SEQ ID NO: 136900 - RNA, 77 nt, Homo sapiens
cagaacagaaaagggaccgaaaaccagaaccagccaaaaacagacagaaccaaagacgcgccaggacccacaacccc

SEQ ID NO: 136901 - RNA, 55 nt, Homo sapiens
agacaacgacagagcacggggaggcaagcaggggggcaaaggaaagaaggcagaa

SEQ ID NO: 136902 - RNA, 76 nt, Homo sapiens
gcacccgggacggaaccagaaaaaaagaggcgaccagcccgggggaaaagaagagaacggccgaagacacaggacc

SEQ ID NO: 136903 - RNA, 62 nt, Homo sapiens
ccgaaaaacgggaacaggacggcccaagacgggaaaaagcggggaaggggggcaaaaaaaag

SEQ ID NO: 136904 - RNA, 70 nt, Homo sapiens
aaaaccgagccgggacgaagaaaaaccggagaccggcaaagaaccagcgccaccaggaccacggaggccg

SEQ ID NO: 136905 - RNA, 79 nt, Homo sapiens
gccgggggcccacccgggcgcccaccggaggaccagagaagaaaggccaaaacgacaggacggcgagggaccaggggga

SEQ ID NO: 136906 - RNA, 79 nt, Homo sapiens
ggagccgggccgcggggggcggcggcgcgagccagcggggccgccacaagggcgcagaagccggcagagcccaagagac

SEQ ID NO: 136907 - RNA, 72 nt, Homo sapiens
cgaaagaggaaccaggaagacacagagccgcagagcaaccagcaagcagaagacgcaagagagccgcgaagg

SEQ ID NO: 136908 - RNA, 63 nt, Homo sapiens
acaaaacagggaaagacgacggaacggaaaaacggaggaaccaccgcggccaaagagaaacgg

SEQ ID NO: 136909 - RNA, 70 nt, Homo sapiens
cgaggcgcgacgccacagaccacggcccagaggggcaggcccggacccaggggcgcaaacccggagccac

SEQ ID NO: 136910 - RNA, 61 nt, Homo sapiens
gggcaggcagacaaacgagaggcgcggccagcgaagaagacgcagccagacccggcgacca

SEQ ID NO: 136911 - RNA, 38 nt, Homo sapiens
cagggaacaccaccgcaccccgaaaagcaaaggcccac

SEQ ID NO: 136912 - RNA, 82 nt, Homo sapiens
gccacggcgccgccggcgcggccggcacacgagggaagaggaagaacgcgagaaaaaaacgagcgacagagaaggccggaag

SEQ ID NO: 136913 - RNA, 87 nt, Homo sapiens
aaaacacaacaagagggagccaggccagaaaacggggagagagccaccagagggggcggccgcccgcccaacagcagcaacccacac

SEQ ID NO: 136914 - RNA, 57 nt, Homo sapiens
gcccacgcaaacccaaagaccccgccggagacgagaggaacgcacaccagcaccagc

SEQ ID NO: 136915 - RNA, 114 nt, Homo sapiens
caagcagaagagaaagaaaaaccacaggcaagcccagccgccacaccccgccgggcagggacgaagccaaagaaacagcccggagggcgaagagaacccacagggagagaggaa

SEQ ID NO: 136916 - RNA, 67 nt, Homo sapiens
cgacgacgagaggggaggaggcggggaagaccacagcaccgggaagccagcagcggcagagggcggg

SEQ ID NO: 136917 - RNA, 75 nt, Homo sapiens
gccggaccaggggggcgcgccacggcgacgccccagcccgcccaaagaaagaaggagggacaagcagaggccgag

SEQ ID NO: 136918 - RNA, 70 nt, Homo sapiens
caagaaggccacccaacacacagaacagaagacgcgcagagagccaaaacgaagacaaagagaccaggga

SEQ ID NO: 136919 - RNA, 64 nt, Homo sapiens
gggccaacaggcgaaaccgggaaaggaacaggcgggacgagagagggggcaccccagacaggag

SEQ ID NO: 136920 - RNA, 69 nt, Homo sapiens
gcagcgcccagcagcgcaggaagccgcccgaacacgaagaagagggacggaagggccaaggaagcagaa

SEQ ID NO: 136921 - RNA, 75 nt, Homo sapiens
cagcgcagaaacgcagggcaaggccagagaaggcgggagaaagacacgaaccacagaacgcaacaggacagcaac

SEQ ID NO: 136922 - RNA, 50 nt, Homo sapiens
aggcacaagcacccaaccgaccaggccaccaacgaccaagagagagggac

SEQ ID NO: 136923 - RNA, 79 nt, Homo sapiens
cccaacgaccggggcgcggcagccacccgcccacaacacaagaaggaagaagagccgggcaagggcacccaaaaaccga

SEQ ID NO: 136924 - RNA, 82 nt, Homo sapiens
cgggagcggcggccgcgccagggcgcggggccgcggccgcgcgagcagcgccgcggacaagcagaccggaagaccgacggaa

SEQ ID NO: 136925 - RNA, 79 nt, Homo sapiens
cgcagggaacagcgcgggccgccaaggcccccggccggccccgcccccggccgagcgacgacaaggccagagaaggcag

SEQ ID NO: 136926 - RNA, 38 nt, Homo sapiens
cccaggacaagaggcaagaacaggcggaaaccgcgagg

SEQ ID NO: 136927 - RNA, 66 nt, Homo sapiens
acacaagcacgggaccccagacgaccgcgcgaagaagaccggaaccacaacgaggagccgccggcc

SEQ ID NO: 136928 - RNA, 81 nt, Homo sapiens
ggcaagagggggaaagcacaggggacaggacacagaacagagaagaagcagacgagacagaaaaagaaccagacagagaaa

SEQ ID NO: 136929 - RNA, 71 nt, Homo sapiens
gaaccgcaaagaccaacacaccgagcaagacgaccaggcaagacaggccaacaccgccaccagagaaccac

SEQ ID NO: 136930 - RNA, 38 nt, Homo sapiens
aggagggccagcgaagacaccgcagaccgcgccaacgg

SEQ ID NO: 136931 - RNA, 106 nt, Homo sapiens
acaaaccaccacaagagaagaccgcccaagcgcccggaggcccacagcagggggcagaaccagaagacaaaaacaaggccgcgcagacggagcgacggcagaccac

SEQ ID NO: 136932 - RNA, 83 nt, Homo sapiens
caaggagacgaccggcaaccgcgacccaaacacccaacgagacgggcaagccccagaagacaggcagcagagagaagaccaga

SEQ ID NO: 136933 - RNA, 47 nt, Homo sapiens
cgcgaagcgccaaagccagacaagacggggaggacgaggggggagaa

SEQ ID NO: 136934 - RNA, 69 nt, Homo sapiens
gagcaaaaaagaaaaggccccaacagagccccagcaaggccaggccggccagcgggcaaagaaagagaa

SEQ ID NO: 136935 - RNA, 76 nt, Homo sapiens
ggcagagcaaggggcacgcagaaggaccggccacgcaacggggcggcacacaaggagcgaagggcagggagaacgc

SEQ ID NO: 136936 - RNA, 76 nt, Homo sapiens
cggcgagccggccgcggcagccggaccagcagggagagaaggcgcgcaggagagcgcagagacccgcccggaagcg

SEQ ID NO: 136937 - RNA, 75 nt, Homo sapiens
caagagaaaacccggagacccggccaaacagcaccgccggccaggaggagagcgcaccaccaaaaaggcaaacac

SEQ ID NO: 136938 - RNA, 53 nt, Homo sapiens
cgcaccacgaaccagaccaagcgggggcccccacagagagcacacaaacaaag

SEQ ID NO: 136939 - RNA, 73 nt, Homo sapiens
aaaccaccccccaccacggaacgcaaaggggaccccacaccacaaaccgaggaaagaagggacagcagaaaac

SEQ ID NO: 136940 - RNA, 75 nt, Homo sapiens
aagaaggagaaaccggaacccagcagaagcaggcgagaaagaacgcagcgcagcggacgcaaagacaagcagcca

SEQ ID NO: 136941 - RNA, 59 nt, Homo sapiens
acccgagcggccggcacgcagccgaaggcgccccggcaaggccaccgcagaagccacag

SEQ ID NO: 136942 - RNA, 61 nt, Homo sapiens
gcgcccccagccagccacgcgggccgcccgacggcggccaccgagagaggaccagaaccag

SEQ ID NO: 136943 - RNA, 67 nt, Homo sapiens
ccccccagcagggaacaacggggcacccggacccagaggcgagccggggacgcccccgagcgagggc

SEQ ID NO: 136944 - RNA, 73 nt, Homo sapiens
aaagggccagcggagcgaccaggacaagccacacaagaaggagaaaaaaaagagaaggcaccccacacccgag

SEQ ID NO: 136945 - RNA, 74 nt, Homo sapiens
acagcggcaaacaggcagacagaaaaaaccagcaaggcaacagccacggggggaaaacggagacgggcggccgg

SEQ ID NO: 136946 - RNA, 53 nt, Homo sapiens
cggaggcggggggaccggcgggcggggcagaccaacgcccaacccagcagggg

SEQ ID NO: 136947 - RNA, 78 nt, Homo sapiens
gaggacagggaaaggagcggggagccccgcgccacagaacagaagcaagaccgagaggaacgccggaaagggggagcc

SEQ ID NO: 136948 - RNA, 79 nt, Homo sapiens
aggccaacgaccggagaggggaacagacgcagggcagggccccgcccggcggggaaggcaaaagcagaccggaaaaccc

SEQ ID NO: 136949 - RNA, 71 nt, Homo sapiens
gacacaaggacaagaaagccaccaggacgagaaaaaccaccggacagaacagagaaccagcggcgagcggc

SEQ ID NO: 136950 - RNA, 81 nt, Homo sapiens
aggcaaagaaaacacaagagagccgggaagaggcagacggagggcaggacccggacccagacacagcacacccaaaccacc

SEQ ID NO: 136951 - RNA, 81 nt, Homo sapiens
gccgccggggcccaggcccagggaccaggcggaggcgcgcgggagccggggcaccacagagagcgggaagagcagccccga

SEQ ID NO: 136952 - RNA, 55 nt, Homo sapiens
aacccaggcaaagaacccacgcagcagcgcacacacagccccaggaacccggaga

SEQ ID NO: 136953 - RNA, 71 nt, Homo sapiens
ccagaccacagcacagccgggaaggggagccaccagcccccgacaagaacgagccagcaaacccgaggagc

SEQ ID NO: 136954 - RNA, 75 nt, Homo sapiens
gaaagagacaccaccgagaggagaagacaacaggaaaagaaacccccgaacccggcagaaagagccaccagccac

SEQ ID NO: 136955 - RNA, 75 nt, Homo sapiens
ccgacgggagaggggcgacagggcaggcagggccaaagacccagggacaggacgggcaacaggggaaccaaggca

SEQ ID NO: 136956 - RNA, 62 nt, Homo sapiens
cgccagcggggacaggcagcacagaacaaggcagcccgagacaaaggcagggaggaagggaa

SEQ ID NO: 136957 - RNA, 85 nt, Homo sapiens
gacacgagaagcaaagacagggacaggacagcgagcgaggacgaggaacggcggcaagaacggaagcacgggcggaggaaagcac

SEQ ID NO: 136958 - RNA, 71 nt, Homo sapiens
agcaaaaagacagcgaagggccagcaggcgaggaaaaaagagaacccaaggaccgcaaagaaaacccagag

SEQ ID NO: 136959 - RNA, 75 nt, Homo sapiens
cgcagaaggaagagcaaggaacagcaggagaagaccaacacaggaaccagcagagaagaaacccaaaccaaacgc

SEQ ID NO: 136960 - RNA, 74 nt, Homo sapiens
gcggccccagcccccgggggggcccgaggcagaacagagaagaagaaacaaaagacgagccccagaaaagggcg

SEQ ID NO: 136961 - RNA, 56 nt, Homo sapiens
aacaaagaaaaccaaaacgcaacagaaacaacaggagcacccgcccccacacgaac

SEQ ID NO: 136962 - RNA, 82 nt, Homo sapiens
gcagccaaggaaggaggccgcaaacagacaggaagaggacaccagacaagcgccccagaagagaaagcccagcaacagccgg

SEQ ID NO: 136963 - RNA, 73 nt, Homo sapiens
aggcggagcggcgccgagaacagggccaagggcggagcacgagaaagcggcaccggcagacgaaaagagaagc

SEQ ID NO: 136964 - RNA, 72 nt, Homo sapiens
gaaggcggggaggaggccccaaagggcgaggagagaccaggagcaagaaaaggccaggaaagagaagagccc

SEQ ID NO: 136965 - RNA, 41 nt, Homo sapiens
ggaccaggggaaacccaaagggaaagaacgagcagccaaca

SEQ ID NO: 136966 - RNA, 53 nt, Homo sapiens
aacagacgggacccccagccaaaggcaaagcgacagacggccagacgaaccgc

SEQ ID NO: 136967 - RNA, 76 nt, Homo sapiens
agaaccagggagaagccgcccgaacaccagacagccccagcgccccaggagaccaacaccccacagccaccacacc

SEQ ID NO: 136968 - RNA, 87 nt, Homo sapiens
ggggccggggaaggagccacacacccggcacacggcgcccgcgggagcccagccagccgacgagagagaggagccgaggcagcgacc

SEQ ID NO: 136969 - RNA, 58 nt, Homo sapiens
aaaaccagcaaggccaaggggcaggaggaaggccagagggacaagcaaggggccaagg

SEQ ID NO: 136970 - RNA, 69 nt, Homo sapiens
aggcccccagccagggaaccaaaagcagacaggcaaaaacacacagaggaagcggaggccaaaaacacg

SEQ ID NO: 136971 - RNA, 104 nt, Homo sapiens
aggcaagaaacagaaccagcggaacacaggccggcacggaagcagacaaagcgggcaacaggggcacacacacgagaaagagccacgcaagcagagagggagca

SEQ ID NO: 136972 - RNA, 72 nt, Homo sapiens
gggcaccggcagaaaggaggaggaaaacacccccaacggcccgagcacacgcaagagaccacaggcagcccc

SEQ ID NO: 136973 - RNA, 75 nt, Homo sapiens
ccgccaccagaagccaagcaccaaagccccgaaccagaagcggcaaacagcacagccagcagaccagggacaccc

SEQ ID NO: 136974 - RNA, 103 nt, Homo sapiens
cggccgagacaaaggcaccaggccaccacagaaacaaaagcaacaaagagggcagaagagacaacacagaaaccagggcggaggcaggaacagcagcaaaaca

SEQ ID NO: 136975 - RNA, 82 nt, Homo sapiens
gcggcgccggaggcaaagggagagccaacggaccacaccaaaagccaccaaaggaacacgccaggaaaccagagacacacaa

SEQ ID NO: 136976 - RNA, 79 nt, Homo sapiens
ggccgcgcccgcggaaccagaccagggccagggagcagaagacccaaaagaaacccacaaaaaaccacgcgcccagaga

SEQ ID NO: 136977 - RNA, 53 nt, Homo sapiens
ggaccgagagcgcgaaacgcacgagaaggggaagaacagcagaagggagcagc

SEQ ID NO: 136978 - RNA, 51 nt, Homo sapiens
gagcgcgaaaagagacacaagagcaggcaaacaaagcagagcccacagaca

SEQ ID NO: 136979 - RNA, 81 nt, Homo sapiens
acagacccaccaagagggcgggagaaccacgaggagaggggaaccaagagcccccaggacaacaagaccaaaagaggcggg

SEQ ID NO: 136980 - RNA, 69 nt, Homo sapiens
caggcccgggcgccccccacagagaaagcgccacagagccgggacagcagaaagagccaggcaagggcg

SEQ ID NO: 136981 - RNA, 71 nt, Homo sapiens
gaaacaggcggaccacacgaacggaagccgcagaaggaccggccagaagcaagccggagaacagaaagaca

SEQ ID NO: 136982 - RNA, 77 nt, Homo sapiens
agagggaggcccgcccacggcgggcacggacccaggacccccgcgggcgacgcgagcccagcagccgcgaacgcggc

SEQ ID NO: 136983 - RNA, 67 nt, Homo sapiens
gcccccacacagcgaaggcagaggccaagaaggaacgaaaaaccccggaagcagggacaggaacagc

SEQ ID NO: 136984 - RNA, 64 nt, Homo sapiens
acccgcaaaagagagggacgggaccggaaaaaaggggaccccagcggaacacacccaccacaag

SEQ ID NO: 136985 - RNA, 65 nt, Homo sapiens
aaacaacggaaaaaccagcaaagcggcggacaacagaagacaggcaaagacagaaggggggcaga

SEQ ID NO: 136986 - RNA, 80 nt, Homo sapiens
cgcggggaggccccaaccaggggcgagccgcgcgggagaagccagagaggaacgaagggcaccacgacaaaccaagacga

SEQ ID NO: 136987 - RNA, 79 nt, Homo sapiens
gggggaccgaagcacagacagcacacaagcggagaaaggcacagcagaagaagaaacagaagaagaagagcagaggagg

SEQ ID NO: 136988 - RNA, 77 nt, Homo sapiens
ggacaacacaggggggggggggagcaggaggaagacaaggccaaagcccggaaagaaaaggaaacgagcgcacccag

SEQ ID NO: 136989 - RNA, 82 nt, Homo sapiens
aagaccgagcccccgaaccgcaaagccccagaggacaaccaccccaggacaggagcagagcacaaacggcagaacgaagccc

SEQ ID NO: 136990 - RNA, 96 nt, Homo sapiens
ggagacgcagcgagagaaggcgcaaggcgacgaaaggagaccgcgccgaggagggccaggcccgggcacgaccccgacaagaagagagaagaggcc

SEQ ID NO: 136991 - RNA, 67 nt, Homo sapiens
gaggggcgggaacgaaacgcacaagaccaaccccgaaaaacaggcccagcggccaggggcccggcgg

SEQ ID NO: 136992 - RNA, 72 nt, Homo sapiens
gaaccgggaccagaaaagccaggagcacacggcgcacgccaacacaacacaggcgaagaggcccaagcgcag

SEQ ID NO: 136993 - RNA, 99 nt, Homo sapiens
gcgaaaggaagcaagcagcagaagagccaaggaaaaacagcaagaacccaaaagggaaagaacgaacaacggaagcgagaaacgaggacgacagagaga

SEQ ID NO: 136994 - RNA, 77 nt, Homo sapiens
ggcacagaaccagccgggcgagagcagagcagcagccgccggggcagcgggcagcagcagggggcccgggccgcagg

SEQ ID NO: 136995 - RNA, 84 nt, Homo sapiens
gagaaccaggaagagcagcgcgcaggacccgcaggagaaagacagcaaagaaaaggagaagaaaggaaaaaaacaaccccgggc

SEQ ID NO: 136996 - RNA, 86 nt, Homo sapiens
cagaggggagacccccgggggaagaagggggccaacaccacaggagaggaacagggcgcaccacagaagagccaaagacggcaagg

SEQ ID NO: 136997 - RNA, 78 nt, Homo sapiens
cccggaggacgaaacgcgaaacccgggccaaaggcagaaggaacacagaccgccaccaggaagaaagagacaaagacg

SEQ ID NO: 136998 - RNA, 75 nt, Homo sapiens
caagaccgggcgcaaaggacaggcgcacagaggaagggagaaggccccgaagacaaggagcaacagggcagaaca

SEQ ID NO: 136999 - RNA, 104 nt, Homo sapiens
gaagcacaagagagaggaaaaggagaaggccgagacaagagggccgggacagcgcggaagagagaagggcacagaccaagacaacgaaccccggccaggacagg

SEQ ID NO: 137000 - RNA, 54 nt, Homo sapiens
cagacgcagggcgcccccgggggagagacaaccagagcggaaagggagaaaagc

SEQ ID NO: 137001 - RNA, 77 nt, Homo sapiens
ccaccccaccgagaccaagaaggaccagaaaaccgacaacccccagaaagccaagccggcggagaagcggaggagac

SEQ ID NO: 137002 - RNA, 38 nt, Homo sapiens
gcacgccagccaggaagccgagaagggagccccgggga

SEQ ID NO: 137003 - RNA, 57 nt, Homo sapiens
ggggggacgcgccaggcacagcagcagcaagaaggagaacaagaagcaaaccaagaa

SEQ ID NO: 137004 - RNA, 79 nt, Homo sapiens
caccgaagacacaccccacaggaccccagagcgacagcccgggacaccaagaaagaacgcggagccccacccgccggac

SEQ ID NO: 137005 - RNA, 61 nt, Homo sapiens
ccgaaccccaaggccaaccgcgagaagagacccagagaccagccaaggaagggcgcccggg

SEQ ID NO: 137006 - RNA, 85 nt, Homo sapiens
gccgagcacccaggaacccggggcgggacgcacccccgcggcccccaacccagggaaccccggaacgaagaaaagaaaggccaag

SEQ ID NO: 137007 - RNA, 78 nt, Homo sapiens
aaggaccaagaaccaggcacagaggcagcaggaagccagagccagccagagagaggaccgaaacagcacggagagaga

SEQ ID NO: 137008 - RNA, 83 nt, Homo sapiens
ggcgacgagaggcccacaacacccagagcacggcagggccagagcaaacagcggcacaacaagcgggcgcagcagacagacag

SEQ ID NO: 137009 - RNA, 98 nt, Homo sapiens
ggagaaaggagacccaaagagaccaagggaagccggggaacacagagaaaagcagcagggggagaagcagaccgcaccaggcgggaccccgaaaaagc

SEQ ID NO: 137010 - RNA, 74 nt, Homo sapiens
gaggagccagaggcgccagccgcgaaggggcggcgcgcgccgggcgccggagcgggaccagcaccgccgaaggg

SEQ ID NO: 137011 - RNA, 67 nt, Homo sapiens
caacgccagaaaaccagagaccggccagaagaaaaggcaaggcccggcgaccacgccgggcgcgccc

SEQ ID NO: 137012 - RNA, 118 nt, Homo sapiens
cagaagcgaaacgaaagggagccgccagcgcgggcggaccgacggagacggaaagccgggacaggaggacgaaagcaacgcagaagcaacaggaccagagagcggggacgcaaaagga

SEQ ID NO: 137013 - RNA, 76 nt, Homo sapiens
agccaaaggcaacgacaggcggcgcagaggcggcacacaacaccgcagaacccacgcccgcgagaccccaagggca

SEQ ID NO: 137014 - RNA, 76 nt, Homo sapiens
cgacccgcccggggcagcagcacacagaacacaagagccaccccaacagcagccagcaaggagcccgcaaggcaac

SEQ ID NO: 137015 - RNA, 78 nt, Homo sapiens
acggaccccaaggaagccacggcagacacacaacccgacccgacgaaggcgggaggcggcagaagcagccagaggagg

SEQ ID NO: 137016 - RNA, 72 nt, Homo sapiens
acggagagcggggagggcggagcgcgccgagcgcccacgccgccacccaggcaaaagcagaccggaaaaccc

SEQ ID NO: 137017 - RNA, 62 nt, Homo sapiens
ccggagggagaaagagcccgccacacggaagacagaaacaccgcccaccacccccgacacaa

SEQ ID NO: 137018 - RNA, 78 nt, Homo sapiens
cacgaagcccacgagacacaccgccggcccggggcggcgccgaggggaggaggcggaaacgcaaacagcagacggaag

SEQ ID NO: 137019 - RNA, 81 nt, Homo sapiens
agcccgaagccccccccggcagcaggcccagcgaccaccccgcgcagccaccggacgccgcagacgcacccccagacgccg

SEQ ID NO: 137020 - RNA, 93 nt, Homo sapiens
cgaaaccaggggacgcaccaacacgcacaaaaagggcacaccagcaggaccggaggaaccaccgacaagccgaaagacggaacaacagaaaac

SEQ ID NO: 137021 - RNA, 80 nt, Homo sapiens
acaggagaaggaacacacccaccagccgggacaggcgcagcaccgccgcccggagcgagccccccccccagcgaccagaa

SEQ ID NO: 137022 - RNA, 81 nt, Homo sapiens
cgggcacacagacacgcacggagggcccaacccacagcgccccaggccccccccgccgcccgggcgagcgacacggcgcgg

SEQ ID NO: 137023 - RNA, 78 nt, Homo sapiens
cgcgcagacggagggccgcgccacaagcagcaggccaagagagagccagaaccagaaagaacaaccaggccccggggc

SEQ ID NO: 137024 - RNA, 81 nt, Homo sapiens
aaaaaagagagggggggaccgaccgcaacagaacggacccggagaaagacagcaaagaaaaggagaagaaaggaaaaaaac

SEQ ID NO: 137025 - RNA, 80 nt, Homo sapiens
gacaaccgacccggcgaccggcagacccaggggcaagacagaccggggagggcacaagacaagaaagacccagcggagaa

SEQ ID NO: 137026 - RNA, 71 nt, Homo sapiens
gaaaaggaacgggaacaaaggaaaacagaaaacagacagaaacgaggccgaagagcgaagacacggcccca

SEQ ID NO: 137027 - RNA, 87 nt, Homo sapiens
ggcccccgggcaccccggaccgcgcagccaccgcggcccccgcggaagccagccacggaagaagcaccccagaaggcagccccacca

SEQ ID NO: 137028 - RNA, 83 nt, Homo sapiens
acaaacccagcaaccggggaacaagaagagcaaggacagcagggaggagcccaaggagacgcggcaggcaagaacgcaccgca

SEQ ID NO: 137029 - RNA, 56 nt, Homo sapiens
aacgccggaccccgccacaccggccagacaaggcgccggacaagacgcagagagcc

SEQ ID NO: 137030 - RNA, 88 nt, Homo sapiens
cggcggcccccagaggacaggggagaggcgccgggggcagagacacaaccaccaagggggagagacaaccagagcggaaagggagaaa

SEQ ID NO: 137031 - RNA, 78 nt, Homo sapiens
gccgcaccgccagggcgcaggcacagcccgagaaaccgcagcacacacgggaaagccggggccccggggacccgcggc

SEQ ID NO: 137032 - RNA, 77 nt, Homo sapiens
gaccgaggggacgccgcccgccgcccgccgcaggccacccgggaacggaggaggggcgacgcccagggaggacgagg

SEQ ID NO: 137033 - RNA, 75 nt, Homo sapiens
ggaccaagaaacagaagaaacgcaaagaggacaagaccaggcccaaaaaagggagaagaaaaagcagaaaggaac

SEQ ID NO: 137034 - RNA, 107 nt, Homo sapiens
ggcccccggagggaacccgcccccagggagggaacaaagcccacagcaccggcacaggcaccaggacggacgggaacagccaggaggagggcagcacagggcccgga

SEQ ID NO: 137035 - RNA, 69 nt, Homo sapiens
gagccaaccagaccccgagaaaaagaagggggcggcggccggcgggcaaaggacgccaggaggaaggga

SEQ ID NO: 137036 - RNA, 87 nt, Homo sapiens
caaaccacccaagcgcaacaccagggaggccaagcgaccacccaaagaaggaccgcagggcgacgcaccaaagcgaaacagaagcga

SEQ ID NO: 137037 - RNA, 76 nt, Homo sapiens
ggccgagcccggccgccagaccacagcacagccgggaaggggagccaccagcccccggaacaaggggagaacggac

SEQ ID NO: 137038 - RNA, 51 nt, Homo sapiens
gagaaggaccaagaaccagcccagggcaccaggccagacacagaagagcgc

SEQ ID NO: 137039 - RNA, 71 nt, Homo sapiens
gagaaaacagcggagcgggccacaaaggggaagaccagcaagcacaaaggacaccacagacaaacccccgc

SEQ ID NO: 137040 - RNA, 73 nt, Homo sapiens
cagcaaacaaaggcaggaagagaaaagaacaccgaaaagcggaggacaccgaaaacccaaaacgcgcggacac

SEQ ID NO: 137041 - RNA, 75 nt, Homo sapiens
cgacccggggagaaaggggaggaagggacaccgaaccaaaaaagcaggaagaaagggcaggcgagagagggggaa

SEQ ID NO: 137042 - RNA, 55 nt, Homo sapiens
cggcaacacacggaagggccgagggccaggcaggaggggcacagcccagggacgg

SEQ ID NO: 137043 - RNA, 73 nt, Homo sapiens
gaacagccagcagaagaccaacacaccagcgcgggaggcagaccggacgcaaggcgaagagccaccagcggcg

SEQ ID NO: 137044 - RNA, 43 nt, Homo sapiens
ccccccccaccgaaccgcggaaagccaggccagaagaaggaag

SEQ ID NO: 137045 - RNA, 76 nt, Homo sapiens
gccggccaccgcgcacccacgaacgcccaccccccgaacccagccgcaccgggcacaccgagcccagaaggaggga

SEQ ID NO: 137046 - RNA, 78 nt, Homo sapiens
gcaggcggagccgaccgggccagccccagggaacccgagaaggccaacaaaagagcgaggaaccaagaagaggagaca

SEQ ID NO: 137047 - RNA, 39 nt, Homo sapiens
ggaggggcgccgggcgggaggccaaacgagcagcggcag

SEQ ID NO: 137048 - RNA, 81 nt, Homo sapiens
cagaccaaggccaccgcaaaccacaacacagcacaaagaagcagacagcccagaagaacaggcggcgggcagagcgaggca

SEQ ID NO: 137049 - RNA, 77 nt, Homo sapiens
gggagaaaaaggaggaggacaaagagaggaacccccgcagggaccgcaacaagggaaaacaggcaacgggaagccgc

SEQ ID NO: 137050 - RNA, 80 nt, Homo sapiens
ccggaccgagcgcgagggcgccgccgccgcccgccggacccccggaccccccgacccggaaggaccgggggccaaaaagg

SEQ ID NO: 137051 - RNA, 78 nt, Homo sapiens
cccgagccccagaagggagacgcacacaccaagaagcgccgcaggaggagaaagacgaaggaggcaagagaagccggg

SEQ ID NO: 137052 - RNA, 62 nt, Homo sapiens
gacaacccccgaaggagggacaccaagcagggcggacagaccagccagaccaggcagggaga

SEQ ID NO: 137053 - RNA, 74 nt, Homo sapiens
gagacgggccggagaaggacagcagagaaaagcggacaccaaaacccgacgggaccgggaaaggggaaaggacg

SEQ ID NO: 137054 - RNA, 66 nt, Homo sapiens
aaagaaaacacgggaaacgccggaaacgagagagcccgggcggaggcagccagacgggcacgcaac

SEQ ID NO: 137055 - RNA, 119 nt, Homo sapiens
gggccgggcagaagccaggacgcccacccgccaccaaccagacccagggccgggaccgacccaggaacaaaccgaaggcaacggcacaaaacagaagcaggccagccccccaacccccg

SEQ ID NO: 137056 - RNA, 78 nt, Homo sapiens
gaaaaccgaagaggagccacgaagggggcccaggcgcgcgaacacaaaggcgcgagggaccaacaaagacagagagcc

SEQ ID NO: 137057 - RNA, 77 nt, Homo sapiens
ccgccgcggcacgaccccacaggacggccagcagaagcaggcgagccccccgagaaaaagaagaaacgcgggaccac

SEQ ID NO: 137058 - RNA, 75 nt, Homo sapiens
gaagaaggcagaagagacaggagaggccgagcccgaacagaccacagcaccgggaagccagcagcggcagagggc

SEQ ID NO: 137059 - RNA, 83 nt, Homo sapiens
gcgccgacccgccggaagcgccaggacaaggggacccgggacgacgagacgacaccacaaaggcgagaacgcggacaagcaaa

SEQ ID NO: 137060 - RNA, 65 nt, Homo sapiens
gggcagggcacgcacacgggcagcaacgggggaggaacagagggacgcaagaacaggaaggggcc

SEQ ID NO: 137061 - RNA, 84 nt, Homo sapiens
gcaagcgacacacacgaccaggacaagcgccccaaaccagaggacccgaagacaaaaccacccacgaaagcgaaaagacccaaa

SEQ ID NO: 137062 - RNA, 84 nt, Homo sapiens
ggcgccggcccgcgcgcggcgcgccacgagcagggaagcaggggacgcagcccgaagaagcagaagcgagggcagagagcgacg

SEQ ID NO: 137063 - RNA, 79 nt, Homo sapiens
aaagacggaggagggcgcggaggagaggagcgagcccagcgcaaaacacagcaaagacaaagacgaacagagacagcga

SEQ ID NO: 137064 - RNA, 85 nt, Homo sapiens
ggacgacacgggccgcgacagcagccacgaggcgagccagagccgcagcccacacgacacacgggggaacaccggacaaccgaag

SEQ ID NO: 137065 - RNA, 67 nt, Homo sapiens
cgaaaacgaaaaggaagaccagagcagcacggccagaccaaacaaacgaagaggccacaccaacaac

SEQ ID NO: 137066 - RNA, 80 nt, Homo sapiens
aagaacagccgagagagcaacaagccagcccgggaccgaggcgaggaaaaccaccacacaggggaaacacccagacaaca

SEQ ID NO: 137067 - RNA, 35 nt, Homo sapiens
gccaagggaccacacgagggaggagagagcgaggc

SEQ ID NO: 137068 - RNA, 76 nt, Homo sapiens
gaagaagcgcggaccccgcgcaacggggcggcacacaaggagcgaagggcagggagaacgccaggcacagcacgac

SEQ ID NO: 137069 - RNA, 68 nt, Homo sapiens
gacagaacaacccaagagcggcaaaaagcggaccagcccgggaaccgaacacaagggaaaacacacaa

SEQ ID NO: 137070 - RNA, 90 nt, Homo sapiens
gcagacacgagaagcaaagacagggacaggacagcgagcgaggacgaggaacggcgggcggagaacggaaaagcaccaggaagcagagag

SEQ ID NO: 137071 - RNA, 65 nt, Homo sapiens
cgaacaccccaacagaagcccagccgacggcccacaagggcaaggccagcccagaacaaagcagg

SEQ ID NO: 137072 - RNA, 61 nt, Homo sapiens
gccagagccgcaggaggagcggacccggaagagggcgaggaggaggccaagaagaagcaac

SEQ ID NO: 137073 - RNA, 60 nt, Homo sapiens
cgcagacggagccgagagcagggaaagagcaccgaaaccaggcggaaacacggcaggcaa

SEQ ID NO: 137074 - RNA, 50 nt, Homo sapiens
cccccccccccccaaggcccggagaggaagccgccagccaccaaggagac

SEQ ID NO: 137075 - RNA, 66 nt, Homo sapiens
gggcaggcgagggcgcggcggacgagaaaaccaaggaacagagcaacaccagccagccgccaggga

SEQ ID NO: 137076 - RNA, 86 nt, Homo sapiens
ccaggcaggcacccgggcccggcaccgcgccgcccagaggccacccagccccagacaggaccgggacacagaaagaaacgaagagg

SEQ ID NO: 137077 - RNA, 79 nt, Homo sapiens
ggccacagccaacaaaggaaggaggggaccgggacacgaaaacccagagggggagcccggcccagccccccaccccccg

SEQ ID NO: 137078 - RNA, 66 nt, Homo sapiens
gcggaagcacacagccaggacaagccagacaggagaggcagcgcggagggcgcaggaacaaggaac

SEQ ID NO: 137079 - RNA, 107 nt, Homo sapiens
cgggccgcgggcgcggacgccggcccgcgcgcgcaccccgcggacgccacagcgcaagcagaccccacgagcgaaagggaaaaaacgaaggaggcaggaagagcgga

SEQ ID NO: 137080 - RNA, 52 nt, Homo sapiens
ggaccaggaggcgagcaacagaacgaaaccagaacagaaagggacgggacag

SEQ ID NO: 137081 - RNA, 86 nt, Homo sapiens
ggagaagcagggaaggaggccgagccgggaccaggcccgggggcggcggccacgccaaggacggagccggacgagcgggagaggac

SEQ ID NO: 137082 - RNA, 75 nt, Homo sapiens
gaagaggcgcaaaagacccaaccggaaggcacaggaacaaaacagccaagcgagcagacagcggggagcacgcag

SEQ ID NO: 137083 - RNA, 71 nt, Homo sapiens
gccccaagaaccggccaccggccccacacgaccggggagaaaaagaacaccgcagagcccacaaagcagca

SEQ ID NO: 137084 - RNA, 84 nt, Homo sapiens
aaggaaacaaaaccaaaggccgaagacaagacaaggccgcggagcaaaagaaaaggccaaaacgaaaaaccaaacagagggagc

SEQ ID NO: 137085 - RNA, 69 nt, Homo sapiens
acagccgacaggcgcggcacgggaggcggaggcgccccgccaggaaacagaaccgaagccggaccgggg

SEQ ID NO: 137086 - RNA, 71 nt, Homo sapiens
gggagagacaagagaggagacccaacagacgaacggagcggagcccagaaggggaacggcggaccacaaag

SEQ ID NO: 137087 - RNA, 87 nt, Homo sapiens
gcccgaggccggcgaagccagggcgccgggaccccgccgccgccgccgccgccgccgcggccccagagaagaggcgaaagaagaggg

SEQ ID NO: 137088 - RNA, 75 nt, Homo sapiens
ggaagggcaaaggcgccaaaacgagacggaaagagacccagggcgccaaaaacaggaccaccgacggaagagaga

SEQ ID NO: 137089 - RNA, 90 nt, Homo sapiens
cacaacagagcaaccacaagaggcgcaaagagagagcgcaggccaagcagaaccgagcagccagacggaggcaagagaagaggcagcagc

SEQ ID NO: 137090 - RNA, 50 nt, Homo sapiens
agacaaaagggccaaagaagggagagagaggccggaccacggaaagaccc

SEQ ID NO: 137091 - RNA, 73 nt, Homo sapiens
cagcagaacaaagcagccggaaaggagccaagagggagagaccaggagcaagaaaaggccaggaaagagaaga

SEQ ID NO: 137092 - RNA, 82 nt, Homo sapiens
gaggccccccagccagggaacaccccagccagaccggaaacgacccaccccagggcaggggcaagaaagaaaaggcaaccaa

SEQ ID NO: 137093 - RNA, 71 nt, Homo sapiens
cccggcgccggccgagaaggcagaggcgacacccccaaaaccgcaaacagagcgagcacgcgaaggcaggg

SEQ ID NO: 137094 - RNA, 78 nt, Homo sapiens
cggcgccgccaacgcgcccccgaggggcgaggaagcgccccgaaacccccagaagacacgccgcagaggcccaccacg

SEQ ID NO: 137095 - RNA, 69 nt, Homo sapiens
aggacccagaacacaacacgagagcacaacacgaaaggagaagaggacgggaggagaaaagccgaagaa

SEQ ID NO: 137096 - RNA, 80 nt, Homo sapiens
cgcgcaggacccagacccccccccgagaccggaagagaaagagcagcagcaagaacaaacccaaggccacaacgccgcaa

SEQ ID NO: 137097 - RNA, 76 nt, Homo sapiens
caccccagccccagcagcagaagaagaggaccggagagagcaccgacagaaggaacgcaccgcgcccagacacaca

SEQ ID NO: 137098 - RNA, 72 nt, Homo sapiens
gaagagacaggaagaagagagcggaacagcagagcgcacaagaaagaagaggacaaaggcccaggccgcaga

SEQ ID NO: 137099 - RNA, 60 nt, Homo sapiens
cagagagagaagagaggagggagaacaagcaacggacacagggggcagaagcagcgaggg

SEQ ID NO: 137100 - RNA, 77 nt, Homo sapiens
aggggaacaacccgcgcccaggccagcgccccaggccaagagggacccacccggcgcccgggcgcgccaggcacagc

SEQ ID NO: 137101 - RNA, 51 nt, Homo sapiens
cgcgggagagaggacccccccccccccccaaggaagaaagagggccacgga

SEQ ID NO: 137102 - RNA, 58 nt, Homo sapiens
ccccgaagaggcgaggagcaacccaggcggcgacggcggcgcgaggaccgaccgggcc

SEQ ID NO: 137103 - RNA, 79 nt, Homo sapiens
ggcggccgccccaccgccccaggacagcaccagcgggccggaggagccagagcgcagaaaggggacgaaacgggaaaag

SEQ ID NO: 137104 - RNA, 80 nt, Homo sapiens
cagagagccgcgcccgccgcgcggagcgcccccgcgccccgcaccagagcggggcaccgagccggggcagcggggaagaa

SEQ ID NO: 137105 - RNA, 74 nt, Homo sapiens
aaaacgaagagaagccacccgacccagcagaacgcagcaaggacaaaaaccgacaggcacaacaccgggaaaag

SEQ ID NO: 137106 - RNA, 77 nt, Homo sapiens
gcggaacgccgacgcagaagcccgccgcccccaaagcggaaccggacaccgagggcaacggcagcggcggagaaacc

SEQ ID NO: 137107 - RNA, 59 nt, Homo sapiens
gcagagccgcgagccaacgccaaaagggggacggcaggccgacgcccgccgcggccggg

SEQ ID NO: 137108 - RNA, 65 nt, Homo sapiens
cgccaggccgcccccacacgcaaacccagacagaggagaaggccggacaccccgcgaggggcgcc

SEQ ID NO: 137109 - RNA, 73 nt, Homo sapiens
caggacggcaagggcgacaaaggacacacggaacacgcagcccagaaccggaaaaacaagccaaaacgaaaga

SEQ ID NO: 137110 - RNA, 78 nt, Homo sapiens
ggacacagcagcaacacggggaaaggcgcaccacgacaaagaagagaaaacgcggcagagcaacaaacacagccagaa

SEQ ID NO: 137111 - RNA, 71 nt, Homo sapiens
cagccccgcgccgccgaccccccggcgccgcgccggcggcgaggacggaagcaaagggcagccaccgaaga

SEQ ID NO: 137112 - RNA, 119 nt, Homo sapiens
aagacccaagagaagaagaaaagagggacacaacagcagccacaggaaccgagcgagcgacggaggcgccgggccaggggcacagcaccgccccagaagacgagaacgagcgaaagggc

SEQ ID NO: 137113 - RNA, 83 nt, Homo sapiens
cacggaccagccgcaaagagccagaggggagacacgccaaagccccaagcccagcagaccgggacccagccgaggccagcgaa

SEQ ID NO: 137114 - RNA, 79 nt, Homo sapiens
cgcccagcgggggggcagcagaagcccagagcccagacgcagacaacaggcacaaagagagaaggaacacccacagggc

SEQ ID NO: 137115 - RNA, 35 nt, Homo sapiens
ggggacaggcacaccaacagacggagccaccacca

SEQ ID NO: 137116 - RNA, 121 nt, Homo sapiens
cgagccgcagaccagaccgggaggagcagccgcgcgccgagaagcacccgcgacccagaaggcaaaagcagaccggaaaacccaccggcaagaccacacccgaggggagcccaggacacca

SEQ ID NO: 137117 - RNA, 73 nt, Homo sapiens
gcagcaaaagaaggccaaagaaggagaaaagggagcagcaggagccccgcggggagcccagccccaagcagca

SEQ ID NO: 137118 - RNA, 63 nt, Homo sapiens
gcagggcgcccccgcacccggaacaggacaccgggccaggaccagagcagacgacaccgaccc

SEQ ID NO: 137119 - RNA, 92 nt, Homo sapiens
cagcacccacaagaccaccacgcccagggccagggaacagccagggcagcaggagcacaaaggaacggaaaccaagccaaagaggcaagaaa

SEQ ID NO: 137120 - RNA, 56 nt, Homo sapiens
gacagagcacccaccacaggagaagcccggcaggcacccagagagcaagcacgcac

SEQ ID NO: 137121 - RNA, 77 nt, Homo sapiens
ggcggaggccccagggaagcgcagaaagcaggcgaacccgcggcgcaaaacgggcgacccagcaacgcggccggcca

SEQ ID NO: 137122 - RNA, 82 nt, Homo sapiens
gcgaagcaccgcagccgggcagacacacgacgagaaccggggggcacccgaggaggaagagggcagggcccacggaaagaag

SEQ ID NO: 137123 - RNA, 67 nt, Homo sapiens
ggcagaagggaggagaaaaagaccacacaaccccaggacaggagagacaacggaggcaagaaagacg

SEQ ID NO: 137124 - RNA, 60 nt, Homo sapiens
gagggaggcggaggggagcggagcccggagcgcgggaaagacaagacaaaggcagaagca

SEQ ID NO: 137125 - RNA, 78 nt, Homo sapiens
ggcaagaagaacacagggggaagccaagcagaacaaaacaccggaaacgccaggccacaagggagcaaacgaaaagcc

SEQ ID NO: 137126 - RNA, 84 nt, Homo sapiens
gggagcaagaagaacacccagaggcgccggaccgaaggcgcgaccacgacgagaagcgggggccgcagcggggcaccaacgcag

SEQ ID NO: 137127 - RNA, 112 nt, Homo sapiens
gcgcaacagaggagggcggcgggcggaggaacagcggcagccacaggagccagggacagaggaaacgagaaaggacgcagaaacagcaaggaccggaagcagagaaaaaagc

SEQ ID NO: 137128 - RNA, 79 nt, Homo sapiens
ggcggcgccgccacccccccccagcaggcgcgagaaacccaggccgcgcacaagaaccggcagcgaacaaggagaaagc

SEQ ID NO: 137129 - RNA, 72 nt, Homo sapiens
gcgagggcgggggcagcggcaggagaaacagaaacggaaaccacgcccaaccagagcaagagcaaagaggga

SEQ ID NO: 137130 - RNA, 78 nt, Homo sapiens
agccacgccggccccggcccggaccgccgccgggagcggaaacagcggcagccagagacagcagagagcacaagaccg

SEQ ID NO: 137131 - RNA, 83 nt, Homo sapiens
ggcacggagacagggaccacccaggcccacagcccgggacaggggagacccgccccaagggccacggacagagcgaaggggag

SEQ ID NO: 137132 - RNA, 68 nt, Homo sapiens
gagaggacaccacacagccaagagcgccgccgaagaggggcgaggaggcgggccaggaaaggagggaa

SEQ ID NO: 137133 - RNA, 84 nt, Homo sapiens
ccaggccggccacacggaggcgggccagggccagcgcgggggacgaccagcggcaggcaggggccaggaagccagccgacggag

SEQ ID NO: 137134 - RNA, 63 nt, Homo sapiens
gcgcgcgacccccgcgcaggacaggagcagccagaaaaacccgacagacaagggcgccgagag

SEQ ID NO: 137135 - RNA, 60 nt, Homo sapiens
gcggaaggcagcgcccagcagcgcagggaagcacaagaagagagcccagacagccacaac

SEQ ID NO: 137136 - RNA, 56 nt, Homo sapiens
acgggccagcagacaggaggaagacaaggcagcaccagagacggaagcggaagcac

SEQ ID NO: 137137 - RNA, 78 nt, Homo sapiens
cgacggcgcccggcaaggacaaggccaggcgaaccagccgaaaaaggagaaaccaaaaggaaaagcgaaccagacaga

SEQ ID NO: 137138 - RNA, 85 nt, Homo sapiens
agcaggccgagggaggaagagcgggagccgggccgagccggggcgaagcggaccccagacaaggcgagaccaccagaaggaggcc

SEQ ID NO: 137139 - RNA, 84 nt, Homo sapiens
gggaagaggcggcgccgccacccccccccagcagggcgcccgcgccggcagaggaggcgagcacccgccagggagaggaacccc

SEQ ID NO: 137140 - RNA, 86 nt, Homo sapiens
gcggccacggaacaaccgaacgcaccgaggagaagaccaggaggcgggccaaggagcccaagcgccggaaggcacgacacgcgaag

SEQ ID NO: 137141 - RNA, 73 nt, Homo sapiens
gccggccgacgagggagaaaaggaggcacccgggaagcggaaaagcagccagaggaaggaaaacgcgaagaac

SEQ ID NO: 137142 - RNA, 79 nt, Homo sapiens
gcaggacagcagccccgagcacgggccgaggcccaccgcgacacaccgccaggggcccccggagggccacaagccagag

SEQ ID NO: 137143 - RNA, 62 nt, Homo sapiens
ccccagccagcaccacaagcccccccaccgaggcgcacagggcaggcagcagacggcggccc

SEQ ID NO: 137144 - RNA, 77 nt, Homo sapiens
aggagagagcgacgcgcacaccaaagcaagggcacgcaaagaacgcccacaaggcccagaagaagagaaaaaaggga

SEQ ID NO: 137145 - RNA, 52 nt, Homo sapiens
ccgcagaggaagacccgaagaacagacggcaacaagcggaccgaacccagac

SEQ ID NO: 137146 - RNA, 89 nt, Homo sapiens
ccgcgacagacaccaagggcgcgcgacacgaacaccgaggaggccaaggaacagagacagacccgggggcccccaaggagagggaagaa

SEQ ID NO: 137147 - RNA, 75 nt, Homo sapiens
ggaacccaaaagcgggcccccagagaagacacagggaaaggaaagcgcacggcagcagcaaaaccacagagaaac

SEQ ID NO: 137148 - RNA, 56 nt, Homo sapiens
gaagaccgaacaagccgagagggaaacaacccacaaccgcacggccaagcccacac

SEQ ID NO: 137149 - RNA, 82 nt, Homo sapiens
cccagcccgccacacacccgaccgcacgcccagaggccccgcaaagaagggggcgagaagaaaaagggccgcgccacaacga

SEQ ID NO: 137150 - RNA, 60 nt, Homo sapiens
cccaccaaacacgccggaaaccccgcccacagcacgagggggcaggagggacagagacgc

SEQ ID NO: 137151 - RNA, 56 nt, Homo sapiens
caaaaggagacccaaccaggggaccgccaaccaaaggacggcacaacacaaggagc

SEQ ID NO: 137152 - RNA, 76 nt, Homo sapiens
cacagccgacggagcggaggagggcacccacgggggccggagagagaagcacgggaccaagagcgccgggaaaacg

SEQ ID NO: 137153 - RNA, 62 nt, Homo sapiens
gcggccggcccccgacagccaggcccgcgagaaggcaggaaccacagagaacagcccggaca

SEQ ID NO: 137154 - RNA, 79 nt, Homo sapiens
gaagaaccagcaaccagagaacaacagaaaaccaaaaaccacgggcgggagcaaccgaagaccaccggaagcaggggca

SEQ ID NO: 137155 - RNA, 106 nt, Homo sapiens
cgcccgggaccgccagccgccgcgcccacagccagcagcgggaccgacgagggagacagagcgaaagcgcccggcaggaccaagaaggaaagacagaggagaaaac

SEQ ID NO: 137156 - RNA, 77 nt, Homo sapiens
gggcccaggcgcggcggggacggccgcgagccgcggaggacacaccccagcaggcggccgacagccggaaaaaggac

SEQ ID NO: 137157 - RNA, 90 nt, Homo sapiens
cgcacgcaaccaccgcccggccacaccaggcccccaggaccggggaggcacaggggcccccaccacccggaggagcagcccgccccgccg

SEQ ID NO: 137158 - RNA, 80 nt, Homo sapiens
gcacccgcagaaaagccaacaggacacggagggaacaagaccagagcacggggagacagaggaaagcaccaaggaaccga

SEQ ID NO: 137159 - RNA, 79 nt, Homo sapiens
ggcacacagaggagaccgcccggagaacaggaccgacaaagcaggaaggagaccgcaaggagaagaccacaaaccgcga

SEQ ID NO: 137160 - RNA, 85 nt, Homo sapiens
cacccgaaaccgaggcgcgggagccgcaccaccaacgcggccgacaacagccggcgccgccacgacagagcgccgccaccgccgc

SEQ ID NO: 137161 - RNA, 77 nt, Homo sapiens
caacaacagccgccaggcccaaagaaccagcggaccgagccaagaaaggaacgagaggagcaacagagacaggcgga

SEQ ID NO: 137162 - RNA, 77 nt, Homo sapiens
gaccagaggacgcaagacccgcccccaagggaaagggagcagcaccggccacacccacagcacgaccggaacccagc

SEQ ID NO: 137163 - RNA, 76 nt, Homo sapiens
gccggccgcgccgggagcgccaaccccccagggggcccgccgaggagcaaccgcagcaccggggcgcggccaaccg

SEQ ID NO: 137164 - RNA, 70 nt, Homo sapiens
cgccacgccccagcgcggacgggagccgccacgcagaagagaggagaaggcgcgcagcagaagaccagaa

SEQ ID NO: 137165 - RNA, 72 nt, Homo sapiens
gcccaggccggcccaccagcagccgcggagacaggcccagaaccagacccaaaagagcaaacaaccgacgga

SEQ ID NO: 137166 - RNA, 75 nt, Homo sapiens
acgcagggcgcccccgagacggaggaggccggagagggggggacggccaagagaagggagccgggcgaagacaag

SEQ ID NO: 137167 - RNA, 77 nt, Homo sapiens
cccggcagaaaacccgcaaacacgccgccagaacccgcaccagcgcgggaagaggagcagaccacgagcgacagccc

SEQ ID NO: 137168 - RNA, 89 nt, Homo sapiens
cgacggcccagcaggcggggaagagaaaggggcaccacccaaaagagggaggcagaagaacccaccgaggcccagagcccacagggccc

SEQ ID NO: 137169 - RNA, 71 nt, Homo sapiens
accaacaaccaaagaaaacagaacagaaaagaggggaaaccacgggaagacaacaaggaacgagggaaagc

SEQ ID NO: 137170 - RNA, 84 nt, Homo sapiens
gacgaacccccaagcgaccaaggaggagccgccagaacgcggaagcgagggaagcgcgcgccggaaggggacccccccccagag

SEQ ID NO: 137171 - RNA, 68 nt, Homo sapiens
gcgcgccacaacaggaggaacagcccaccaccaaaaaccaggaagggcggaaaaggcaaaacagcgca

SEQ ID NO: 137172 - RNA, 55 nt, Homo sapiens
cgaaaccgccccacacacccggggacagccaggaaccagaacgggacacgccgca

SEQ ID NO: 137173 - RNA, 74 nt, Homo sapiens
gagcccgaacggggcaaaaaggcgagacaaaaccaaaggaggaaggccagcggaagacacacccgcaaaacgca

SEQ ID NO: 137174 - RNA, 68 nt, Homo sapiens
accgcaccagcccgagccgaacccaagggggagaaggccagcaacacccaacacaaagcggaagaaca

SEQ ID NO: 137175 - RNA, 72 nt, Homo sapiens
agacagcgccgcgggcaaggaaacggcaaaacagggaccacagagaagcgccccaaagacaggacaagaagg

SEQ ID NO: 137176 - RNA, 48 nt, Homo sapiens
cgcgacaagcgcgcacgggaaacaaaagggccggagcagacagcacaa

SEQ ID NO: 137177 - RNA, 57 nt, Homo sapiens
gcaagacccgccacaagcaacgcgggaagagaagaaggagcccgcagggccgccacc

SEQ ID NO: 137178 - RNA, 77 nt, Homo sapiens
cggcccagcgcccccacggagcagcacccacccgcacagccgaggacccaaagacaggaccacgcaccagcagagaa

SEQ ID NO: 137179 - RNA, 68 nt, Homo sapiens
acaacaacagcagacagcgcaagcgaaaaggccgcaagccaagaaaaggaccagccaaggaagcaaca

SEQ ID NO: 137180 - RNA, 56 nt, Homo sapiens
ggcaagagcgggggcgggaccccgccgcggcgggaggaccacgcggcggaccaagc

SEQ ID NO: 137181 - RNA, 63 nt, Homo sapiens
aaaaacaaaggggcaggaaagggaagaaggagaacaaaagcacggaacaagagacccaggcac

SEQ ID NO: 137182 - RNA, 78 nt, Homo sapiens
caggggacaggcccacgccagacacgacgcggcaggaacccggcccagaggggacagccaagccaaaggagcggcgga

SEQ ID NO: 137183 - RNA, 83 nt, Homo sapiens
ccggagccgccgccaccgccagcagggggaggaccacgacggacagagaaccgagcggccggagcagaaacgagcggaccacg

SEQ ID NO: 137184 - RNA, 79 nt, Homo sapiens
cagggcacagaaaaacaagagagcagacgggcacgaaggacgccaggaaaaaaggaagcacagcagcggaagaagccac

SEQ ID NO: 137185 - RNA, 77 nt, Homo sapiens
acccacccgacagggggcgccacagggggcagcacaggggcagcgagacacacgggcaggaccccccaggggcgggg

SEQ ID NO: 137186 - RNA, 73 nt, Homo sapiens
caggagaagccagcccgagagccagggccaggaaaccgacggcgcacaggacgaaaaaagcacaaggacagaa

SEQ ID NO: 137187 - RNA, 78 nt, Homo sapiens
ggaacagagcgaagggaagcagcgccgcagcgaaaaccccggaaacgcaaagagcggcacagcagccaggaaggccac

SEQ ID NO: 137188 - RNA, 86 nt, Homo sapiens
aaaccgccccaggacagcaacgccaggaccacggccaccgcgcggaagaggcgagagggagagcggcgcgagaggagagagacggc

SEQ ID NO: 137189 - RNA, 62 nt, Homo sapiens
caggaccagcgccccacaaccaagaggagcgaggcccgcacagcggccagacacgagaccca

SEQ ID NO: 137190 - RNA, 76 nt, Homo sapiens
ccagaaggggagaaggcaggcaccacaaaaaggacaggagacggggccagggagaaaggaaggccaggagcaaaca

SEQ ID NO: 137191 - RNA, 38 nt, Homo sapiens
gcacgaaaggaaagacggaaacagaaagacgacccagc

SEQ ID NO: 137192 - RNA, 68 nt, Homo sapiens
aaacccgagagaacagaacccaggaagagagcagccaaccaggggcaccagcgagaaacaaacagacc

SEQ ID NO: 137193 - RNA, 69 nt, Homo sapiens
aaccccagaagcgcgcccgggaggacaaacggacgcaaccgccaggacggccaccccacagagaggacc

SEQ ID NO: 137194 - RNA, 76 nt, Homo sapiens
cggccggcgaggcagcggcgagcacccgccaccccacaccgccaccagaacaccacaccgaaccggggaccaccgc

SEQ ID NO: 137195 - RNA, 79 nt, Homo sapiens
gccaggccggggcgaccaacggcagggaacggggacaggagaaaggagaagagcacccggagcagaacacaaaggggag

SEQ ID NO: 137196 - RNA, 69 nt, Homo sapiens
aggacacagaaggaggcaacaaaaggcaagcggcagccacacccggagaaggagccgcccagggacgaa

SEQ ID NO: 137197 - RNA, 88 nt, Homo sapiens
cgcgccggccgcggggcggcgcgccgccgaaggcgggcgcagcggcggagcggagcggagcccggagggcagacagcaagcgcgggcg

SEQ ID NO: 137198 - RNA, 56 nt, Homo sapiens
ggacggggcggggggaacggagacagcggaagggacaagggaagagacccccaagg

SEQ ID NO: 137199 - RNA, 75 nt, Homo sapiens
agggcaacaccaaaaacaaaacgaaccaggacggcaaaaccgcaaccaggcggccacagccagccggaagcccag

SEQ ID NO: 137200 - RNA, 82 nt, Homo sapiens
gcggaaacgccccgaggagcaggaagagcaaaccccccaccgccggccaggggccgggcccacaagcgcagcagccgacccc

SEQ ID NO: 137201 - RNA, 82 nt, Homo sapiens
ccaggacccccagaagccagaaaggagccccaagccagaacgacaccgcggagcaaggaaaaaaacccgaccggaagagaca

SEQ ID NO: 137202 - RNA, 77 nt, Homo sapiens
acccgccaggcaacacgacaggcgcaggaccccggacaaacaacagcagggagaagaggagagagcagccaggcccc

SEQ ID NO: 137203 - RNA, 78 nt, Homo sapiens
aacaggaacccccaccaacaccgaagagaggccgcccgccccccaagaaaggccagccgaagaaaagcgaaagggaga

SEQ ID NO: 137204 - RNA, 71 nt, Homo sapiens
cacggacggggaaacacagcaagcagaccgagagacccagcgagcagcgcgcgcgaagggcagagcggaga

SEQ ID NO: 137205 - RNA, 71 nt, Homo sapiens
accagagacaagcacaaggaggccagaagccgcagagcagcagaacagacagaaacacgaaaaccagacag

SEQ ID NO: 137206 - RNA, 71 nt, Homo sapiens
aggaccccgccagccccaaacgcgggaacagacgagacgcccacccgcaacgcgagcggccccgccgagaa

SEQ ID NO: 137207 - RNA, 44 nt, Homo sapiens
aaaacacaaacaagaccgcaggaagggccaaagccccaagaacc

SEQ ID NO: 137208 - RNA, 96 nt, Homo sapiens
cgacgcacaaacgagaaaaaggaaggagcagcagaacgaaaagccacgccggaaccggaaacacaccagaggcgcagcagcgccacagcacaagcg

SEQ ID NO: 137209 - RNA, 80 nt, Homo sapiens
agcacagccccaccaggcccagggccggcccccccaggacaacccagaggcaacaaaggcgaggggaaggcgcacaacaa

SEQ ID NO: 137210 - RNA, 87 nt, Homo sapiens
cccgaagacaagacggacaagcgccagcagaaggagacacacagagcccaccacgccaccacacccgggaccagcacacagcacgcc

SEQ ID NO: 137211 - RNA, 66 nt, Homo sapiens
cggcaccagggcgcgcagccgggccggcccgaccccaccggccaacggacccaaagacaggaccac

SEQ ID NO: 137212 - RNA, 83 nt, Homo sapiens
gcagccacacccagacgagcgggagaaggcgcgcgcaagcacgcgaggagggggcacccgaggaggaagagggcagggcccac

SEQ ID NO: 137213 - RNA, 82 nt, Homo sapiens
ccgaccgcggccgggaggcccgggggccggggcccgagaacagcagcaaacggaggcaagcacacacggagacagggaagga

SEQ ID NO: 137214 - RNA, 77 nt, Homo sapiens
cgaggccccagaccacacgggggccgagacaacaagaaggggaggaacaaaagcgcaaaccggagccagaaacaacc

SEQ ID NO: 137215 - RNA, 84 nt, Homo sapiens
accacgcccgcaacagggcaccaagagaggcgagagaccaggccgaagaacaggagaaggaagaacaaagaaagacagaggaaa

SEQ ID NO: 137216 - RNA, 121 nt, Homo sapiens
aaagaagcagaaagagcagaaaggagggggcgagaaggcgggaagccgaaggcagccacagcaaagaagaaggaagaaaccagaagcgcacgaggaagacacagggagacgccgccgaacc

SEQ ID NO: 137217 - RNA, 54 nt, Homo sapiens
cccgggagcgggacacagggacaggccaagaggacgggaccaccaggaggaggg

SEQ ID NO: 137218 - RNA, 61 nt, Homo sapiens
ggggccccccccgccaggaggacccgaaaaccccgagaggcaaccaaaaaaacggaggagg

SEQ ID NO: 137219 - RNA, 109 nt, Homo sapiens
cacgaggaccccagcgcggcgcgcggaagcaccagaagccacgggacggaggagaacccaccccccacggaccgacgaagcggcacaaggcacgcacaggcgcgggagc

SEQ ID NO: 137220 - RNA, 72 nt, Homo sapiens
gagagccacaccaggcggagaaagggcagaggcccccacgggaaagacaaggagccgggccgagaaaccgaa

SEQ ID NO: 137221 - RNA, 44 nt, Homo sapiens
gacaccccacgccggagagcagcaccagcagaagagggcccgac

SEQ ID NO: 137222 - RNA, 57 nt, Homo sapiens
aaggaccccgcccagcccccgagaccgagaagcccagagcgccgcacccacaccaaa

SEQ ID NO: 137223 - RNA, 70 nt, Homo sapiens
gggccgggagcgcggcggagacgagccgagacagagcacgcccggcaacggggcggcacacaaggagcga

SEQ ID NO: 137224 - RNA, 85 nt, Homo sapiens
agccccagagggaaaaaaggagaccccgggacacggacggcacagcagagagcgagcagcagcgacgagaacagcacagaagcca

SEQ ID NO: 137225 - RNA, 69 nt, Homo sapiens
gaagcggcccaaaggcggaaaagaaacaagaggagagacgcccaagccaaagagaacagcaccaccaag

SEQ ID NO: 137226 - RNA, 76 nt, Homo sapiens
agccacccccaaacagaccacgaacgagcgcagagacggccagcagcaggacaagcggcagaaaaaacaacacggg

SEQ ID NO: 137227 - RNA, 69 nt, Homo sapiens
aaacaaggaccgggaaagaggagacaaaccccagacgcgccggagggccagaagacaaacagaccccag

SEQ ID NO: 137228 - RNA, 73 nt, Homo sapiens
aagggcgaccaccacaacgccgcggacgaccgcacgggcaggacaccccccaggcacagccacaccccagcgg

SEQ ID NO: 137229 - RNA, 78 nt, Homo sapiens
gagacccgaccgggccaaagaagagccaacaggaccgagaagcaccaggccacgcacaacagaaacaggacaaaaggc

SEQ ID NO: 137230 - RNA, 68 nt, Homo sapiens
cgcgcggggccgcccgcccacccagggccggaaaagccaacgccggcgaagcggcagcggagagccgc

SEQ ID NO: 137231 - RNA, 77 nt, Homo sapiens
cccgcgcgcaggggaagcgggcagcagagccccgagaggggcgcgcagaaacgggaagaaacacgacaggaaaagaa

SEQ ID NO: 137232 - RNA, 32 nt, Homo sapiens
aacacgaccagaaaagggcgacgccaggagca

SEQ ID NO: 137233 - RNA, 70 nt, Homo sapiens
gcgaaaaaagggaaaggacgggaagggcgacagcgcaaggagacgaaggagcaaaccaggaccgaccacc

SEQ ID NO: 137234 - RNA, 77 nt, Homo sapiens
cccagcccggaagacagcacgccgccaccgcccgacgagaccgcggccgccagacacagaggagccaccgcgcccag

SEQ ID NO: 137235 - RNA, 75 nt, Homo sapiens
aggcggcccacggcagcgagagacgagagccgaggcgccggaaacaacagccaacaaaaccaagccgggacccac

SEQ ID NO: 137236 - RNA, 75 nt, Homo sapiens
ggacaagaagggcaaagccgaagccaaggaaaaggaacagagagagcagaaccgaaacggggaaagaccgaagaa

SEQ ID NO: 137237 - RNA, 77 nt, Homo sapiens
ggaggcggcaggccccagagcccggcggagagggcgggcggcggacgccaggagcaacaagggagcaggggcaacgc

SEQ ID NO: 137238 - RNA, 83 nt, Homo sapiens
ggggagcagacaggccaggagaaggcggaaccggggaccggaccggggcgaggaagaggagaggcaaggcaacggaacaggga

SEQ ID NO: 137239 - RNA, 67 nt, Homo sapiens
gaagaggcaaaacaaacacaacaccaaaagagccccgcccagaggccaccaaccccaagaccccaag

SEQ ID NO: 137240 - RNA, 55 nt, Homo sapiens
gaaccagaccaaaaacgcaacaacagacggcagaccgaccaaacagggagcagcg

SEQ ID NO: 137241 - RNA, 75 nt, Homo sapiens
ccagggagagaaacccgcaaaaaggggggcaggcacaggggcaacaccggaggacagcaacccccaccgaacaaa

SEQ ID NO: 137242 - RNA, 53 nt, Homo sapiens
cacccagcggcacaaaaaggacgccggcaaccaaaccaaaaaaccaaggacga

SEQ ID NO: 137243 - RNA, 74 nt, Homo sapiens
caagcacccaaaaggccacccaaacaacaccagacacggggacgcagagaaaggcgggcaccgcgcacccacgc

SEQ ID NO: 137244 - RNA, 62 nt, Homo sapiens
gcagcaccaaaaggcagcacccggacccaccacgcgcacagaagagcaacaagcggaagacc

SEQ ID NO: 137245 - RNA, 59 nt, Homo sapiens
aggagaaaaggaaccaaagaagggaggacccggagggcgcaaaagacaagggacagcag

SEQ ID NO: 137246 - RNA, 57 nt, Homo sapiens
ccggaaccagcgagagacaccaaaggcaaggaagaccggagcacccgggacggccac

SEQ ID NO: 137247 - RNA, 62 nt, Homo sapiens
ccccgacggacagaccaacgggacaagaaggcccaccaagccgagaacaccaggaaacagcc

SEQ ID NO: 137248 - RNA, 53 nt, Homo sapiens
gaaaagccaacgccggcgaaggcaccagacgacaagacaacaaggccaggaga

SEQ ID NO: 137249 - RNA, 80 nt, Homo sapiens
cggccaagagcgacaggaggagacaggcgagagaggaggacacgaccgggcacacagggaccaagaagccccggggacac

SEQ ID NO: 137250 - RNA, 76 nt, Homo sapiens
gaccaacgacgaagagcagagcagaaaagggcacagaaagccaggagcgaacacacagaacccgcaagaaaaagga

SEQ ID NO: 137251 - RNA, 73 nt, Homo sapiens
gcccggccccaggacgcccggcggccggggagccggcccaagcggaggcagcgagaagaaaaagaagagagag

SEQ ID NO: 137252 - RNA, 75 nt, Homo sapiens
aaccaaggagcgcgcgcacagagaccaccgggcgcaccccacccgggccgcccgaagaagaggacgaacaaggcg

SEQ ID NO: 137253 - RNA, 78 nt, Homo sapiens
gaccccgggacacgaaagccaggaaagggaaggcacgaccagcaaccagcccgagagaccgcggaccacggcaagacc

SEQ ID NO: 137254 - RNA, 77 nt, Homo sapiens
caagccgggcagcagcccagcggcagcagaaagagcagaggccaggagcacagaaacacccaccaggagccaagcag

SEQ ID NO: 137255 - RNA, 92 nt, Homo sapiens
gacaccgagaagacaagacgacgcaggaaggggcaaacgcacacacagcaccagccaaaaacagacggagaagagcaaagaggagagacacc

SEQ ID NO: 137256 - RNA, 75 nt, Homo sapiens
gccagaagacgcgagagcaccgaagacggcaagcacggccacgccaagggccccagggcagccaaccccgcggca

SEQ ID NO: 137257 - RNA, 72 nt, Homo sapiens
aggcccagggaggcaggggcagaaacagagaaggaacaggcaccaagcagccgaagagaaacaagggacagc

SEQ ID NO: 137258 - RNA, 81 nt, Homo sapiens
acccagaaagagcaaccggagcagcagggaaccagggccaccagagaagcgacagaccaggaaccagggggaagggagggc

SEQ ID NO: 137259 - RNA, 72 nt, Homo sapiens
gcccaaaacaagcgaaggccaggagagaaggcgggaggaaaaaaaagagacaacgaagaacagcagaaaacc

SEQ ID NO: 137260 - RNA, 71 nt, Homo sapiens
cggacggagaaaaagagggggagaggcaccagcaacagaccaaccgcagcaagcacagagacaggaagccc

SEQ ID NO: 137261 - RNA, 71 nt, Homo sapiens
ggacaacggacacccgacgccgccgccagccgcaaccagaggacccgaagagacacccaaagacccagacg

SEQ ID NO: 137262 - RNA, 66 nt, Homo sapiens
ggcacccacagacggcgaaggcagccacagcgcccagagaggaaggagggccccggagcagccaca

SEQ ID NO: 137263 - RNA, 74 nt, Homo sapiens
gggggcccgggcgaaaccggaccgggcccggaggagcgaacaaggcgacaacacagaccaagcccacgaagacc

SEQ ID NO: 137264 - RNA, 72 nt, Homo sapiens
cccgggcaccacagaaaaggcagcaacaacccaaaagaagaaagagggaagagccaagcccaagacaacgga

SEQ ID NO: 137265 - RNA, 82 nt, Homo sapiens
ccggcggacggagcacgcagacccgcaaaggacagagcgggagccaccagcgccaaagggaagccaggagcccgggggcacg

SEQ ID NO: 137266 - RNA, 60 nt, Homo sapiens
gccaacaagaccaagcccgcggacgccaggggccagacccacgggagagaaggcaaaaag

SEQ ID NO: 137267 - RNA, 81 nt, Homo sapiens
aagagcgccaaaaaacccgacggaaagcgaaggccccgaaacaacagcgcgaagcggacaagcacaaaacacaagggccag

SEQ ID NO: 137268 - RNA, 73 nt, Homo sapiens
ccaccagagggagaagaaacagaacgccccacgaggcggcgccgcgaaaggaggaaaaggcccacacgaccag

SEQ ID NO: 137269 - RNA, 60 nt, Homo sapiens
ggagcccacaacaaccacaggggcaaagagaaccaggagaccccaccaccacagaaaaag

SEQ ID NO: 137270 - RNA, 72 nt, Homo sapiens
ggaaaaacaggacaaaggaagccaagcaggaggccgggaacagcccgggccgccgcacccaccgcggagaag

SEQ ID NO: 137271 - RNA, 80 nt, Homo sapiens
gggaggaggccaggaagcccagggacagccaggcaggggagcccccgagcgcccgcgacgcagcacggacccacaacgag

SEQ ID NO: 137272 - RNA, 74 nt, Homo sapiens
cacacagaccgaaagaccgaccaccccgggcgggaagacagaaccagggccgggggccagagcacgcacgagaa

SEQ ID NO: 137273 - RNA, 71 nt, Homo sapiens
gccaagcccaccgaagggaccgaagccggcggcggagggacgaccagcagaagcaggcgaaggcccaccca

SEQ ID NO: 137274 - RNA, 76 nt, Homo sapiens
ccgaaaaaaacccaggcggcccaggaacggccgagcgaccaggagaggagcccccgcccgaagaccggggagggcc

SEQ ID NO: 137275 - RNA, 58 nt, Homo sapiens
cccgcgccccacacaagcagaccggaccacgccacaagcgaaggcacccgaggcccca

SEQ ID NO: 137276 - RNA, 37 nt, Homo sapiens
cccgggacaccaagaaagaacgcacaagaaaggacga

SEQ ID NO: 137277 - RNA, 70 nt, Homo sapiens
gaagacggaaacgaggaaaccgggaaagccaccgaaaaggaaaacggggccaaccaaggaccaagggacc

SEQ ID NO: 137278 - RNA, 72 nt, Homo sapiens
gcgccgacacgccacgcaccccccgccggccgcgcccgcgaccagagacgacgccccagagagcacagacca

SEQ ID NO: 137279 - RNA, 79 nt, Homo sapiens
gggcaaccaggcagacccgaccccagcgaaggggcagaccaacaccacccagcaaaaaccccgacgaacgcgccaggga

SEQ ID NO: 137280 - RNA, 75 nt, Homo sapiens
cgggggaggcaagaccgccccgccgcccagaggacgcccaacaccacccacccaccacgaagggccaaaagaaac

SEQ ID NO: 137281 - RNA, 78 nt, Homo sapiens
caacaagagcccgagcgccacggaacgagaaagaagcccggcgaggccggagggccacccccggaagcaaaggccggg

SEQ ID NO: 137282 - RNA, 80 nt, Homo sapiens
gacaagggacaagcaagcgagaccccgccaccggagccaaacaggacccagagagggaccagggccaaagaagagccggg

SEQ ID NO: 137283 - RNA, 53 nt, Homo sapiens
gcgccgccgaccccccggcgccgcgccggcggcgaaacccagcagccaacggc

SEQ ID NO: 137284 - RNA, 93 nt, Homo sapiens
cgggccgggaaagccgcaccaccgaccgcgacgacgggagaagaccaagccgcacggggggcaaaccgagggacacccagcgagcacaagcac

SEQ ID NO: 137285 - RNA, 77 nt, Homo sapiens
aaagcgcacccagaagacaaacggaacacacacagaccccacaagcagacgaaaaggcgcgaaccaagacaggaagc

SEQ ID NO: 137286 - RNA, 77 nt, Homo sapiens
agaaagccacgagaccgggagcggggggaagggggggccccgccggaggccgaaaccggggcccagggcaccgggac

SEQ ID NO: 137287 - RNA, 90 nt, Homo sapiens
ccagagaacagaaacggcaaagggccggggacaccagcagagcaccggccagaacaagccaaggagccaagacgagagggacacacggac

SEQ ID NO: 137288 - RNA, 49 nt, Homo sapiens
cggaagcggggggaccgcacgggagcaccccaggcagggcgcggacacg

SEQ ID NO: 137289 - RNA, 77 nt, Homo sapiens
gccgacaacgagggagaagcacaagacagcacagaggaagagccccgaaagcacaaagcagaccaccagacacagag

SEQ ID NO: 137290 - RNA, 70 nt, Homo sapiens
gaaaccagcaggcgaagcaagcacagccaacagcccacaaggaagcgcagaccggccagagggaaccaac

SEQ ID NO: 137291 - RNA, 55 nt, Homo sapiens
gcgccgcgccgcaccccgagcgaccgaccggagagaacagaaaaaaagcggcccg

SEQ ID NO: 137292 - RNA, 68 nt, Homo sapiens
ccagagagcaaaaagcacccacccagcacgcaccccaagaaaccaggcaaagccagagcagcggccgc

SEQ ID NO: 137293 - RNA, 50 nt, Homo sapiens
gaaccagggagaagccgcccgaacaccagaccggaaacaggcacagaaca

SEQ ID NO: 137294 - RNA, 79 nt, Homo sapiens
gaccccaccggcggagacgcaacgcggcgaggcgcccaacccacgggcagcacaaggcacggacaaccccagaacaagc

SEQ ID NO: 137295 - RNA, 73 nt, Homo sapiens
gccgccagaacgcggaagcgagacggaagaaagcggaagccagcaaccccacagaaagcgcggaaccaaacac

SEQ ID NO: 137296 - RNA, 61 nt, Homo sapiens
acagagagagaaccaaaccagaggccagggagaccagggggcaggggaggagcgcccaggc

SEQ ID NO: 137297 - RNA, 75 nt, Homo sapiens
ggaccagacgggaggacacaggcaacaccgggagccacagcgggaccaggccagaacgccgagagcggaggggcc

SEQ ID NO: 137298 - RNA, 71 nt, Homo sapiens
cggccccaacagagaagaaacggaagagaagcccagacacgaagaagagagccagagcacaagaaagacac

SEQ ID NO: 137299 - RNA, 79 nt, Homo sapiens
cacaaaggacggaggcacggcacaaaccgaagagcccggggcgggacgccacgaaagaaagggagacagaccgagaggc

SEQ ID NO: 137300 - RNA, 85 nt, Homo sapiens
gcggggcaagaggaggcgcgagccaccaagcagcccaggagaggccaagggagagaaacgaggccccaccaaaagccagcaccaa

SEQ ID NO: 137301 - RNA, 68 nt, Homo sapiens
accggcgcccccacggcagacagagcggcagcagcgcacccaggaggccacgcgcagccccggaagag

SEQ ID NO: 137302 - RNA, 75 nt, Homo sapiens
aaagcaacaacccagaaagcaaaccccccgaaaaccggaaaagggccccagcgcaaagcccaaggccacaccagg

SEQ ID NO: 137303 - RNA, 70 nt, Homo sapiens
agaggacaagcagacagcaccaacggaacagacgaggcacaagcaccaccggcgagagcacacgaaagga

SEQ ID NO: 137304 - RNA, 83 nt, Homo sapiens
ccgacgcgaccagcagagacggaccgagaccaccagcagacagcagcagcccgggagccgagccaggaggaaccaccggaaag

SEQ ID NO: 137305 - RNA, 69 nt, Homo sapiens
cagaaaacggcagcggacacaggaggaaacaagaagaaaaagggcagccacaacccaaaaaaacgcgcc

SEQ ID NO: 137306 - RNA, 80 nt, Homo sapiens
aagaaccaaagcgaccccacagcgaacgaaacaccccagggaaggacaagacaacaagcagggaccagcagcgcaggagc

SEQ ID NO: 137307 - RNA, 78 nt, Homo sapiens
cgagggccgcggccacgaagcaggagaccaagaacccaccaaccggacacacgggaacagggcaccagacgcccgaga

SEQ ID NO: 137308 - RNA, 63 nt, Homo sapiens
ggccgggggacccgcccgccaggccaccaagaggccgaagacaagccccggcacaggaggaga

SEQ ID NO: 137309 - RNA, 73 nt, Homo sapiens
ggaggaggaggggagaggccggaggacaccaacaggcgcgggacaaccaacacaaccaaagagaagaaaacgc

SEQ ID NO: 137310 - RNA, 79 nt, Homo sapiens
agcagcggaagccgggcgcgcccccccgcgggcgccgcccaggggaaaagaagaccccggagcaggcccgaaaggcgga

SEQ ID NO: 137311 - RNA, 78 nt, Homo sapiens
ggcggaaagcgccagcaaaaaggcggacaggcgagaaccaggagccgaggaaagaccacagcaagaccacgcccccag

SEQ ID NO: 137312 - RNA, 73 nt, Homo sapiens
gagacaaccgaggccgcagagcccagaagaagacaagagcagacgagggagaagcgggcaaaacagacaaagg

SEQ ID NO: 137313 - RNA, 69 nt, Homo sapiens
aaggcgacgcaaccaagcaccgaaacagcagacggccggggacgagaaacgaaacaaggcaccgagcac

SEQ ID NO: 137314 - RNA, 54 nt, Homo sapiens
ccgggcacaggagggaagagcaagcaacgcacacggcgccacacgaggccacga

SEQ ID NO: 137315 - RNA, 78 nt, Homo sapiens
gcggggcggggccgccgcagcagcgagcgagcgcggcgcgcggacccgaaggcaaggaggggcaggagcacaccccca

SEQ ID NO: 137316 - RNA, 79 nt, Homo sapiens
gggaaccagcaacgcagggaccgcggcggaacgggcagggaaaccggagcggcagagcaggacccccagaagcggccgc

SEQ ID NO: 137317 - RNA, 81 nt, Homo sapiens
gcggcccgccgagcccgggggcgcgccccgcaggggggaagagaccgaaaccaagggggaaaggcacgagggcaacccgcc

SEQ ID NO: 137318 - RNA, 67 nt, Homo sapiens
agggcaagaaaacccccaaggcagccaacagcaagaggcggagccaaccgcgcaaggccaagcaggg

SEQ ID NO: 137319 - RNA, 83 nt, Homo sapiens
cggaggaagcggcgcgagcgccccgccacgcccgagccccccaagagaacccagggggagccacgccggagcgggcaccggcg

SEQ ID NO: 137320 - RNA, 76 nt, Homo sapiens
caaaaacggagcacacgccccaaggagggaccaagagcccgcccgcacgcgacagaagggaacccagcaagaggca

SEQ ID NO: 137321 - RNA, 78 nt, Homo sapiens
aaggcgggaggccgagggcgaggagccccaaacgaaaggccggagaagacgcggggccgccgccgcaaaacccggagg

SEQ ID NO: 137322 - RNA, 76 nt, Homo sapiens
cggaggagccccggaggcagagcggcgccagagacaacccgagccagggcgcagcagggccgcccccccacacccc

SEQ ID NO: 137323 - RNA, 72 nt, Homo sapiens
agcagcgagaaaccagaaaacacggaacaaagcgccccaacccagcggaaacagggacggaagggcagacaa

SEQ ID NO: 137324 - RNA, 60 nt, Homo sapiens
cagcgccacagaaccgcccaaaaaggcaaagaaaccacgagccccgcccaggagaagcag

SEQ ID NO: 137325 - RNA, 85 nt, Homo sapiens
ccgcagcgcgaggccgcagggagaaggcgccgggaacacggaaaaagcagcaaagggagaaaagaaggccaaacagaagcaggcc

SEQ ID NO: 137326 - RNA, 76 nt, Homo sapiens
aaccccaaagaacccgacggcacccaaaaagaacaagagcagccgaggaaaaaggagccagggccgcagaaagccc

SEQ ID NO: 137327 - RNA, 80 nt, Homo sapiens
cgcagccggaccgggaggggggcagcccgggagcgccccgcaccccagaggagggacaaggcacacgcgggacggagccc

SEQ ID NO: 137328 - RNA, 46 nt, Homo sapiens
aagaagcagcacaaggcgagccagggcaacaacggcggagacccga

SEQ ID NO: 137329 - RNA, 57 nt, Homo sapiens
gcgacccccgccaggcaaaaggaaggcccccacagagagcacacaaacaaagcgaaa

SEQ ID NO: 137330 - RNA, 36 nt, Homo sapiens
gggggggcgcgcgcgggggacggagccgccgcaccc

SEQ ID NO: 137331 - RNA, 82 nt, Homo sapiens
gccgaggaccggcaacagggcggcggggaaaagcccgccccccaaagcgaagccaaagcgaaggcaaaggccaagaaggcag

SEQ ID NO: 137332 - RNA, 76 nt, Homo sapiens
cacggaaagcagccgccaggccaagaacaacccagggaccaagaaaggcccagggaccaaagcccggacaaggccc

SEQ ID NO: 137333 - RNA, 73 nt, Homo sapiens
gaagcgcaccccagacaacaggcaggggaggaccagcggcaccaaagacaaagagcagggagaacacaaaaca

SEQ ID NO: 137334 - RNA, 64 nt, Homo sapiens
cagcccaggcaagcgaaaccaaagccaaaaggaggggaaccacgacccaacaaaaaacggaagg

SEQ ID NO: 137335 - RNA, 64 nt, Homo sapiens
agacgacgcgcgggccgcgagcggggcgacccgagagcacgaagaacaccagccagccggccgc

SEQ ID NO: 137336 - RNA, 93 nt, Homo sapiens
ccacccaacccgcaacccaggacacccaccaaccaaacggacgcaaacaggggccacggcccgcccaggggccagaaccgaggaggccaggag

SEQ ID NO: 137337 - RNA, 74 nt, Homo sapiens
gcgcggagggccgagggagggccgagccagccgcggccggaggagcccccaggccacagcagcgcccaaggaca

SEQ ID NO: 137338 - RNA, 112 nt, Homo sapiens
gcgcgcaggccgccggcccgggggagaagccccaaaaggacgacggcgcccccgggacgggaaacaaagccagaccgccgaggggggacgaacccaggagggaaaccgaaga

SEQ ID NO: 137339 - RNA, 69 nt, Homo sapiens
caaccggcgaaaggcccccagcaaagccaaggccgaaagaagccagcggagaaggcggagagaaggagg

SEQ ID NO: 137340 - RNA, 78 nt, Homo sapiens
cccaagcgagcccccggagcccaagagagacaccaccagcccccaggaccgccacccaggcccaggaccgagcccgac

SEQ ID NO: 137341 - RNA, 68 nt, Homo sapiens
aggaaggaaccaaaaagaagagcagaaggaaaaccgcagaacccggaggcacagcgcacggccgcagg

SEQ ID NO: 137342 - RNA, 94 nt, Homo sapiens
gacgacaagcgcccacgaggagacgcggaggacagcccgcaggcagaggcaaggcggcagcaaaacgggcgcccgggcagaagcaagagaaacg

SEQ ID NO: 137343 - RNA, 60 nt, Homo sapiens
gcggagcggagacgggagaagaaaagacgcagccggcacccgcacaacccagggggccga

SEQ ID NO: 137344 - RNA, 77 nt, Homo sapiens
cgaccgcccgggagacggagcgaaggccggagacagcaaagcaagccaagagggcccagccaagaagcacggcaaga

SEQ ID NO: 137345 - RNA, 82 nt, Homo sapiens
agagggcccggcgcggacagagggacaccacaacgccgcccagaacaaagcgccccagggcaggggcccggagagcgcgccc

SEQ ID NO: 137346 - RNA, 54 nt, Homo sapiens
ccgagacacggggcgagaaggcggcgcacaaggggagagacagagcaacgaaag

SEQ ID NO: 137347 - RNA, 82 nt, Homo sapiens
ggcaaaagacccaccaagaaggcacaaggagaaaccagagagcaagacaaagaaacagaagcgcgagaacagaaccccgagg

SEQ ID NO: 137348 - RNA, 86 nt, Homo sapiens
ggagacggacgcccgggacggagaaccagccaagccccaggccgacagcaggaagcaccagacaccaaccacagcgcagcaggccc

SEQ ID NO: 137349 - RNA, 69 nt, Homo sapiens
acaaggaggagaaaggaaaaagacagggagcgcagaaacggagaaagaggaaacagaagagcaaaacgg

SEQ ID NO: 137350 - RNA, 76 nt, Homo sapiens
ccggcccaccggggaccagccgccccgacagccggcaggaagggaagcaccgggcacaagacgaagacccccgacg

SEQ ID NO: 137351 - RNA, 74 nt, Homo sapiens
agaccgcccaccgagacagccggagaagagcgaccagccacaagaacagggaaaaggcaacccagccagcacgg

SEQ ID NO: 137352 - RNA, 73 nt, Homo sapiens
agcgcgggccgccaaggcccccggccggccccgcccccggccgagcgacgacaacggcaagcggagaagagca

SEQ ID NO: 137353 - RNA, 91 nt, Homo sapiens
accacccagagcaggagcggagaccaccagccgaccagagaggagacccaccagcagaccggaaggccaaaacaagggaagcaaaggaaac

SEQ ID NO: 137354 - RNA, 73 nt, Homo sapiens
cagaggagccaggaggaaaacacaccaagggcgggaaaccaacccgcaaggcagaaccagcaagggaagggcg

SEQ ID NO: 137355 - RNA, 76 nt, Homo sapiens
cggcagagaacccacaaagaggcgagaaaccaggcggggaacaagccagcagcccaaggagaagccccacagagca

SEQ ID NO: 137356 - RNA, 76 nt, Homo sapiens
ccggggggaagaaaccaggaacaacggcagcagcagccccccaaggagagaaggggcaaaccgccagcagcagaca

SEQ ID NO: 137357 - RNA, 76 nt, Homo sapiens
aacaaagcgcaagccaacagacgagagagcggaaacacaggcaaacaggacgacaccagacagacccggcccccgc

SEQ ID NO: 137358 - RNA, 66 nt, Homo sapiens
cgggaggccgagggcgcagaaggagagcagccagcgggacagaaggaggaagagggagcaccacgg

SEQ ID NO: 137359 - RNA, 74 nt, Homo sapiens
agagcgagcgagggggggcgcgccggaaaccggagcgcgcagcagcagaacggggaagagaagagaggccgaca

SEQ ID NO: 137360 - RNA, 77 nt, Homo sapiens
ggggaagaaccgaagcaacggggcagagaccccccagcaagcaagaaggggcagaccaacaccacccagcaaaaacc

SEQ ID NO: 137361 - RNA, 82 nt, Homo sapiens
gaagcgccaaaggaccggacccagagaagaggaaaaccaccgggcagggcaaggagagccaagcggaccaagaaggcaagag

SEQ ID NO: 137362 - RNA, 69 nt, Homo sapiens
cacaaggagccagcccggcaggaagaccacgacgagggcagacgccccggcaaaaagggcgcgccgggc

SEQ ID NO: 137363 - RNA, 73 nt, Homo sapiens
ggagagcaagagcgaccagaggcgccaccagcaaaaccagagaaacaggcagagaaagacacccggcaccgca

SEQ ID NO: 137364 - RNA, 71 nt, Homo sapiens
gacggacaccaaaaaggggaaacccggcacaggagacgaggaaagcaccgcaaggcagagggcagacagac

SEQ ID NO: 137365 - RNA, 80 nt, Homo sapiens
gggcgccaggagaacgaacagacaagcacgccggagggaagagcgagggagagaaggacagaaaacgggccccagacaca

SEQ ID NO: 137366 - RNA, 76 nt, Homo sapiens
ggggcgcaaggcaagcaagaaggaggcacgacgaaaacaacaagcaaaaaagccaagagcgggaccaagaccacga

SEQ ID NO: 137367 - RNA, 76 nt, Homo sapiens
aaaaacgagccacaccaaacaccgacaaaccccggaacagagacagagacacggcacaccgcaggaggaaccccag

SEQ ID NO: 137368 - RNA, 121 nt, Homo sapiens
ccgaagaacgggcaaaaccacgaacgccaggaaaagcagagggcacccaaaacaccggaagaccagcaccagacagcgaaaaagaggacccaaaaaagagagaaaaggccaaagagagggc

SEQ ID NO: 137369 - RNA, 80 nt, Homo sapiens
ccaaaggcggagcacacaaaaaacagcgccgcccggagcaagcggaggaaagcaggaagcagaggcaaagaagacgcaga

SEQ ID NO: 137370 - RNA, 68 nt, Homo sapiens
agcaagggcggcaccaaaacagaggccccacagacaaaaccgccggcggaagagagcgcaccacgcac

SEQ ID NO: 137371 - RNA, 65 nt, Homo sapiens
ccaccacacaagacaagcaggcaagacgcgcaccgcaagcccgagaaaagcacagcacccgcagg

SEQ ID NO: 137372 - RNA, 81 nt, Homo sapiens
ccgcgcccggccccggcccgccgcccgccggcaccagaggaggagacgaccggccagggcgaccaaccaggagcgacaggg

SEQ ID NO: 137373 - RNA, 63 nt, Homo sapiens
ccagggcgcagacaaggcaggaaccacccaccaaacggaagcagaccaacgcaagacagagac

SEQ ID NO: 137374 - RNA, 88 nt, Homo sapiens
caaggaagaaaaccgaccagaagagaaagagagaagccaaaccccagggaccaagaaaggcccagggaccaaagcccggacaaggccc

SEQ ID NO: 137375 - RNA, 67 nt, Homo sapiens
ggcagccgccggccacccagacaccaggagggggccccggcgggccgggccgagcgcagagcgccgg

SEQ ID NO: 137376 - RNA, 92 nt, Homo sapiens
ccaaggcaagccagagaacacccgccgcgcaaaagggaggccccgaaggagcaaggaaacgcgaaccaagggccacggggagacaaggcaaa

SEQ ID NO: 137377 - RNA, 55 nt, Homo sapiens
agacaaccccagggaaggggcagcacaggcggagcccaccaggcacgaacacgag

SEQ ID NO: 137378 - RNA, 71 nt, Homo sapiens
acccaagaaaaaaaccacaaagcggccgaaacagaaaacaagagaccacagaagggacggacaagggaggg

SEQ ID NO: 137379 - RNA, 29 nt, Homo sapiens
cccccaagggcaggccgaacggccccccc

SEQ ID NO: 137380 - RNA, 57 nt, Homo sapiens
ccagaccagcagggggcacaccaggagggacgcgcaggcccgacagggcagaggagg

SEQ ID NO: 137381 - RNA, 68 nt, Homo sapiens
gccccccacgggacgccaggccaaccaaagcccggagagacagagcggccaccccaaacccccagacc

SEQ ID NO: 137382 - RNA, 74 nt, Homo sapiens
ggaggaagcagaaaaaaaagggcccccgacgccaggaaaggccagagagcaggacaaaccggcgaccacacacg

SEQ ID NO: 137383 - RNA, 80 nt, Homo sapiens
cgccgccgccgcgccgcgccgcgccgcaccccgagcgaccgaaacagagaggccaaaacaaccgagccccagcaagcgga

SEQ ID NO: 137384 - RNA, 72 nt, Homo sapiens
aagcacaggacgccagcacaacgcccaacacacacagagagagacaggacggaccccagagagagaggcccc

SEQ ID NO: 137385 - RNA, 59 nt, Homo sapiens
gggccaaagaagggagaagggcaaaacggcaaaggcagagaccaaaccaacccaaaccg

SEQ ID NO: 137386 - RNA, 78 nt, Homo sapiens
acacgacggcggaacggggaacgacggcccagcaggcggggaagagaaaggagaaaccaagaccaggacacaaccacc

SEQ ID NO: 137387 - RNA, 80 nt, Homo sapiens
ggagccacgcacgagcccccaaagggcagggcggggggggagagcgcagcccacgcggaaggaccagcacagccgcagcg

SEQ ID NO: 137388 - RNA, 54 nt, Homo sapiens
cagccgcgcgccgagaagcacccgcgacccagaaggcacaagacacgaagagca

SEQ ID NO: 137389 - RNA, 86 nt, Homo sapiens
cgcgacaccgccgccacaccgccgccacaccgccgcgcccagcagccggccagcagcacgaggaaggaaaaccgcaacggacaacg

SEQ ID NO: 137390 - RNA, 79 nt, Homo sapiens
gacgggagccagagcgggacaaagcgagcagcgggccgccaccgggaggcggcggagcaagcggcgcggggaggagcga

SEQ ID NO: 137391 - RNA, 73 nt, Homo sapiens
ccggaggcggcggggcggcagagagcggggcggcggcagacgacgcaccaaacccccacggacagccccagaa

SEQ ID NO: 137392 - RNA, 79 nt, Homo sapiens
ggagagagagggcccagcccggcaggacacgaagcgcagggacgcaaggagcgaagcagggcacagaccccagggggaa

SEQ ID NO: 137393 - RNA, 66 nt, Homo sapiens
gccccaccaccagcggcccaccccccgaagacccgaacggggagcccaccccggacgacaacgaca

SEQ ID NO: 137394 - RNA, 73 nt, Homo sapiens
accgcggacagagacaacaccgagagagaagcacgggccacagagacgagaccccaacaacaaaaccacacgc

SEQ ID NO: 137395 - RNA, 73 nt, Homo sapiens
ggggggccgggcgcagaaggacaggaaagacgagaagggaccgacggaaaagaaaagagcgcagacccccagc

SEQ ID NO: 137396 - RNA, 57 nt, Homo sapiens
gcgaagggcggaaacgggggggcggaggggccgaagacaaacccacgaaggcggccg

SEQ ID NO: 137397 - RNA, 57 nt, Homo sapiens
gcagccagggaagagaaaccgagcaacagacaaagcccgggcgaggccgggaaggaa

SEQ ID NO: 137398 - RNA, 84 nt, Homo sapiens
gagggcgccgcagacccggcagggcacggaccgccaggccgaggcaaaagagcggaaaaggcacaggagcggggagaggaaaag

SEQ ID NO: 137399 - RNA, 60 nt, Homo sapiens
gggaacccggcaccgccccaggcgccgcgcccggggagacagaaacgaggcgcccccagc

SEQ ID NO: 137400 - RNA, 70 nt, Homo sapiens
cggagaggacaaacgggggcgggaccgcgagggacggacgaggaagagggaagcgacccggaaccgggaa

SEQ ID NO: 137401 - RNA, 74 nt, Homo sapiens
gagcaagaagcaggaaaggccggacaccagcccaggccccccagccacccagccccaagagggagcgcgcgcgc

SEQ ID NO: 137402 - RNA, 75 nt, Homo sapiens
aggagggagaacacagaaaccggccccagaaagccaacaggcagaccagagacagcgccacgcacccggggagca

SEQ ID NO: 137403 - RNA, 79 nt, Homo sapiens
agcaccacggaccccaaggaagccacggcagacacacaacccgacccgacgacgacggaaaaccggcagcaggagaggc

SEQ ID NO: 137404 - RNA, 86 nt, Homo sapiens
caccacggaggccacagccgccggggaggaggaggaggaggaagaggaggagaagaagcaaagagaggagagagaaacaccccgga

SEQ ID NO: 137405 - RNA, 77 nt, Homo sapiens
gcgggaggccaccgccaggcaagagccgcagagaaagcgcgcgacggacacccaaggaggacagcgcgggagcccgg

SEQ ID NO: 137406 - RNA, 84 nt, Homo sapiens
ccagcaccagcggcgcgcccaaaaggcagacgacaagaaacggcgaggaaagagaggagccccggaaagaaaaggacagacccg

SEQ ID NO: 137407 - RNA, 83 nt, Homo sapiens
gaaacagcaaggaccggaagcagagaaaaaagccaggcccaccagcagaaagagcccccaaaaagggagggaggaaaaaccac

SEQ ID NO: 137408 - RNA, 60 nt, Homo sapiens
gccccaaagcccccacgcaacaaaacgccgaaaagcgaaaagaaacaagccgcggcaaca

SEQ ID NO: 137409 - RNA, 75 nt, Homo sapiens
acgggaagccacacaccaaagagcccaaagaggggcgaggaaggcaccagcgaagcggccacgagaaaaagggga

SEQ ID NO: 137410 - RNA, 79 nt, Homo sapiens
aacaccaggcgcggcggcccagccccgacacaggacccacgaggaagcggccgcggcgaaccccagagccagcgggcag

SEQ ID NO: 137411 - RNA, 58 nt, Homo sapiens
acacagacgacacaccacagggggccgagcgaaagccacaagggagagggcacccacc

SEQ ID NO: 137412 - RNA, 74 nt, Homo sapiens
cggacccgggagggcaggcccaagaacagaaccaaaggcaagaaccggagcaggagaaaagccggaaagaaaac

SEQ ID NO: 137413 - RNA, 74 nt, Homo sapiens
ggcgcacagacagacagcggcccagggaggacaacagagcagcgggccgagaaggagaagcaccagcagcgcgc

SEQ ID NO: 137414 - RNA, 59 nt, Homo sapiens
ggccaccaggccacgccgggcccagcagcacagcaaacggaaacagcagagacaaggag

SEQ ID NO: 137415 - RNA, 76 nt, Homo sapiens
ccggagaaaaggccaagaaggcagggcgccagcccccaggaggaccgacgaacccccaaggcacggggcggagcgc

SEQ ID NO: 137416 - RNA, 73 nt, Homo sapiens
aaggaccaagaaccaggagaaagcccgaacgcgggaagaacgaagaaggacaaaaaggagaggcgacggacag

SEQ ID NO: 137417 - RNA, 77 nt, Homo sapiens
cgcaaaccgccgagccagggggagcgggccggagagaagagaggggcgcgaggagaaggaaacaggcccggaggccc

SEQ ID NO: 137418 - RNA, 71 nt, Homo sapiens
gcaccacgaaggaccgaagaggagaggagcaggaagaagaccacgcccccagaaggcaaaaccaggaacaa

SEQ ID NO: 137419 - RNA, 85 nt, Homo sapiens
caggcggccgcccgggagcgagcggaggagcaggcgccggagggcaccggcacagacagaagcgcggccccgccagcccgagacc

SEQ ID NO: 137420 - RNA, 50 nt, Homo sapiens
acggaggggcggaggcggaagcccgaccaggccaggagacaagcccaagc

SEQ ID NO: 137421 - RNA, 76 nt, Homo sapiens
ggaaccagaggccgccaccgccagcggagagcgggcgccaggacccccccagagccaagacccccagaagggaccc

SEQ ID NO: 137422 - RNA, 67 nt, Homo sapiens
ggagcacccaaaccaaggcgcggcgaaggcacaagagaggcagaaagaaacgaaaaacagaggaagg

SEQ ID NO: 137423 - RNA, 70 nt, Homo sapiens
gccagaggcaacccaggagcacgaagggaagccaaggccaccaaaacaggcaaacgaggagccgcgcgcc

SEQ ID NO: 137424 - RNA, 75 nt, Homo sapiens
cagggagcagcaagacaacacgcagagaaccaggcagcagagggaaaccggacaaaagagcggacacccagaaag

SEQ ID NO: 137425 - RNA, 76 nt, Homo sapiens
gcacccgcagaagaggaaaccacaaaccacgagggaaaagcgcaagacagccagaaccgacaacagagacgaaaac

SEQ ID NO: 137426 - RNA, 77 nt, Homo sapiens
gccgggacaggccccgccaggaccgcgacaggcccccgggccacgggcaccagggcccacagggcacagagaacgaa

SEQ ID NO: 137427 - RNA, 70 nt, Homo sapiens
caaaagggccaaagaagggagagaggcaagcagaaccagcaaacggcaagagcaccaacaagacaaggca

SEQ ID NO: 137428 - RNA, 52 nt, Homo sapiens
cacaggggcgcaagacagacgagaagaggacagacggaggagaaggaggaag

SEQ ID NO: 137429 - RNA, 86 nt, Homo sapiens
aggcgcccgcccgcacgggcgcgccaagggcacagagggagagaagccaccgggccaagcacaacaccagagggcagcaggagcgc

SEQ ID NO: 137430 - RNA, 76 nt, Homo sapiens
gggaccagcgacgcacccgagcccacgaaagggccagcagcccccagaagaagccagaaagccaggaaaggcccag

SEQ ID NO: 137431 - RNA, 75 nt, Homo sapiens
agcggaagaggcggggcggcgggcggggcgaggccagcgaggcagggaagagacaccaggacccaggcacacaca

SEQ ID NO: 137432 - RNA, 73 nt, Homo sapiens
aaacacacggaagagcgcggccagcaccccaacgggccaaaggaagcgggacgaccaggacacaccacgagga

SEQ ID NO: 137433 - RNA, 81 nt, Homo sapiens
agacggcagcggccccggagacacaccggcgagaaccacgccgacaacggcggaagaggaacgggaacggggaagaagagc

SEQ ID NO: 137434 - RNA, 72 nt, Homo sapiens
cacaggacccagcggggcaagagacgaccaagacacccaggagaaagacagcggggaaaagaaaaaggaggg

SEQ ID NO: 137435 - RNA, 74 nt, Homo sapiens
gccgggaccaggcccgggggcggcggccacgccaaggacgggaagaagagagggcgaaggaggccacacagaag

SEQ ID NO: 137436 - RNA, 88 nt, Homo sapiens
gcagacacaccgaagaacagacgaagcagagaagaacaggaaacccaggcccaacggcaggggagcaagaagaaagccccaaaacgac

SEQ ID NO: 137437 - RNA, 69 nt, Homo sapiens
ggccaccgccacgggccgagacacgcagcggcggccagggaccagaacgaccaaaaagcaaaagcgcgc

SEQ ID NO: 137438 - RNA, 79 nt, Homo sapiens
cgggaagcaggacgcgccgcgccccaaggggggcggggggccaccgaacgcgcacgccggcagagagggagggaccggg

SEQ ID NO: 137439 - RNA, 78 nt, Homo sapiens
cgggccgcgagcggggcgacccgaggaaagaccacagcaagaccacgcccccagccgggggaccaggccgaacgaccc

SEQ ID NO: 137440 - RNA, 108 nt, Homo sapiens
cccaggagaagggaggccgggcaccccgccagaaagcccaacccccaagacgccaccgaggcccgcggaggggaaacgaggcacggagcggacaggaccagacaccag

SEQ ID NO: 137441 - RNA, 53 nt, Homo sapiens
acgcagaagagaagcgagaacagccagagagggcaggggaccaaaacgaagag

SEQ ID NO: 137442 - RNA, 75 nt, Homo sapiens
acccgccagggacgggcacgggaaggcacgaaccccagcccgccgggaagcgccgccaggccccccacccagggg

SEQ ID NO: 137443 - RNA, 103 nt, Homo sapiens
agagagacagcgggagccacggccacacgggagagaagagacccaggaacacaagcaccgaagggcaaagaggcagaggagacagcgccagagaggcagcgca

SEQ ID NO: 137444 - RNA, 94 nt, Homo sapiens
acacagcaagacacgacgaagccaaaccgcccaaccgagagcccgcgccccagacaaagacaacaggcacaaagagagaaggaacacccacagg

SEQ ID NO: 137445 - RNA, 67 nt, Homo sapiens
cagcgcaaggaggccgcacccaaggccgcagacaagaaggacagaaaacgggccccagacacaagcc

SEQ ID NO: 137446 - RNA, 78 nt, Homo sapiens
gaaaaaaccggagaaggaagacagaggccaaggaaaaggaacagagagagcagaaccgaaacggggaaagaccgaaga

SEQ ID NO: 137447 - RNA, 33 nt, Homo sapiens
gagagccgaccaagcggaggaaagacccagcgc

SEQ ID NO: 137448 - RNA, 90 nt, Homo sapiens
gcgaccgggcaccagcaggacccgaggccaggagccaggggcccagaaggggcaacgaggaacaggccaagaaacaacacagccaaggcc

SEQ ID NO: 137449 - RNA, 74 nt, Homo sapiens
cgaacaggcgcgaggacccggaggaaggaggcccccgcggacaagacccggaggccagggggaaccgaccagag

SEQ ID NO: 137450 - RNA, 80 nt, Homo sapiens
gcgggaagaagcgcgccagacacagcggaagacgcagagggagacagccaccaaacccagagggcccacaccaccggaca

SEQ ID NO: 137451 - RNA, 80 nt, Homo sapiens
caagcccagaacggcgcaccaggaaacggcaaaaggcgccccacaaagaggaaaaccaaaggaccaggagaaaaggggag

SEQ ID NO: 137452 - RNA, 84 nt, Homo sapiens
cggcgagagcagcaagcaggaccgggagaagaggaagggacacaggggagacaagcagaagccggagcagacaagccaaggggc

SEQ ID NO: 137453 - RNA, 51 nt, Homo sapiens
gcagacaggacgagacaaggacaacccgccacaacgacaaaggaccccaaa

SEQ ID NO: 137454 - RNA, 73 nt, Homo sapiens
gcgggagagcccagcagaacggagcaagggaggaaggccgacggccaaaacccgaacacaaagacagaaggcc

SEQ ID NO: 137455 - RNA, 82 nt, Homo sapiens
gagcgaacaaagcaccggcaggaggagcaaagcccacaggaaaaaccagaccaacgaacaagaaggcgagcaacagagcgca

SEQ ID NO: 137456 - RNA, 71 nt, Homo sapiens
caaaaagcccaccacccgaagacgaagggagcaaccggaacacgaccgacggggaaaccacgaagcagggg

SEQ ID NO: 137457 - RNA, 77 nt, Homo sapiens
cacagcccaagccccggggaccggggaagggaccacagaccagcacgccggcgccacgaaccgagcgacaggacggg

SEQ ID NO: 137458 - RNA, 68 nt, Homo sapiens
aaggaggagaaaggaaaaaggcccaaacaaaaagaggaagccgaaaacaccgcagggaagacaaagac

SEQ ID NO: 137459 - RNA, 59 nt, Homo sapiens
aaggacacagcacacacacggcgaggaaccaaagccccggcgcgcaacagaagaggagc

SEQ ID NO: 137460 - RNA, 61 nt, Homo sapiens
gccagccacggcacccccccaaagggccaaccgccccccagcagcaggcacgggcgaaccc

SEQ ID NO: 137461 - RNA, 82 nt, Homo sapiens
ggggcgaggaagaagccagccacaccaggcgagaccccagggcccgcagccgcagcaggaagaaggcgagaggagaaccaga

SEQ ID NO: 137462 - RNA, 68 nt, Homo sapiens
agaaagcaaaccagcaggcaccaaggaaagcagaagacaaggcaaaacggacaacgagaacggcaacg

SEQ ID NO: 137463 - RNA, 83 nt, Homo sapiens
gcggagaacaccagagcaaagccaccccccgaggaaaaacccacaccagaccagaaagaggggacgaagccccaaggcacccc

SEQ ID NO: 137464 - RNA, 76 nt, Homo sapiens
aggagaaggagggccggacagggcaccccccaaagagaagaaggaacgaaggggaaaaacacagaggagaggacac

SEQ ID NO: 137465 - RNA, 78 nt, Homo sapiens
aggacccgcaggccagaccccgggagcccagccaccacagacagggcgggacgaccccacaacccgagcgcccaagcc

SEQ ID NO: 137466 - RNA, 74 nt, Homo sapiens
gggagaacacacagagaggcaagcccacaccaccgcgaccaagccagcaacagggcgagcaccaaagccaagga

SEQ ID NO: 137467 - RNA, 72 nt, Homo sapiens
ccgcagcggggcagccgccgcccccccagaccgccagacaccacgccacccaagagagagcaaaaaccgaga

SEQ ID NO: 137468 - RNA, 71 nt, Homo sapiens
cccgcggggccaggagggccgcgcggccgcagcgacaccaagacaagaaggaaggagaccaggcggaaaga

SEQ ID NO: 137469 - RNA, 83 nt, Homo sapiens
ggggccacgcgggcccgaggcgcaccaagggcgaaggagccggcccaaggagacacgagcccacccgagaccacgccggaccc

SEQ ID NO: 137470 - RNA, 70 nt, Homo sapiens
caacgcccccccagcacacagaggagagcgacgagaaggaccaagccaagaacgcccccgcaggcaggga

SEQ ID NO: 137471 - RNA, 79 nt, Homo sapiens
ggcacgcgacgcacagaggaacacgccggggcccaaccacaagacgaccaaaggaggaagaccacccaagaagaccaag

SEQ ID NO: 137472 - RNA, 84 nt, Homo sapiens
cagcggagggcagaggaggcgggaaggcacgaccgaaacgaagaccccaaccacccccccagacagggagacagaggcgagcag

SEQ ID NO: 137473 - RNA, 70 nt, Homo sapiens
cacaaagcggccgaaacagaaaacaagagaccacagaagggaggcaccgccccaacccccccccgcccgg

SEQ ID NO: 137474 - RNA, 35 nt, Homo sapiens
cacacagagggaaacggaaagagaggggcgccagg

SEQ ID NO: 137475 - RNA, 71 nt, Homo sapiens
ggagagcacgccgaaagaaaggggcagacaacgacaccaaagggggcgacagacagcggaaagccccagga

SEQ ID NO: 137476 - RNA, 72 nt, Homo sapiens
acgggagccccggccccgggaagcagaaaacggggccacagggcccacccacggcagcgcggccgaggggcg

SEQ ID NO: 137477 - RNA, 67 nt, Homo sapiens
aacacaagcagaaacagacaggaccacgcaagacaagagaaaaggaaaaagaacaaaaagcgaaaag

SEQ ID NO: 137478 - RNA, 63 nt, Homo sapiens
aaacaccgagaaaaagaaagggaggacacgagcaaggacaaaaaacccgacacaagaaaaagc

SEQ ID NO: 137479 - RNA, 81 nt, Homo sapiens
aagcaagcagcagaagagccaaggaaaaacagcaagaacccaaaaggcgaaggaagaagaacgcagcagcaaacacagaaa

SEQ ID NO: 137480 - RNA, 71 nt, Homo sapiens
gccggcaacaccagacaccaaggacagcccgcaagaaacagagggaggaccaagccacagggggcccaagc

SEQ ID NO: 137481 - RNA, 53 nt, Homo sapiens
acaccaaaaacaaaacgaaccaggacggcaaccaccgcaccagccaagacaga

SEQ ID NO: 137482 - RNA, 91 nt, Homo sapiens
gggaacggcggcgggacggcggccccgcgcagcccccggccgcagcgcaggcagcccagcagcggccacgaccgggcacgggacccaggac

SEQ ID NO: 137483 - RNA, 78 nt, Homo sapiens
agcagggacagaaccggcgcagacgggcggggacggccgccgccgacagggccgccgggagaggaagaaaggaagggg

SEQ ID NO: 137484 - RNA, 71 nt, Homo sapiens
cggcgcgcaaccgagaacagccaaggcggcccgacaccgccacccccagcaggaaagcgcggagccagcgc

SEQ ID NO: 137485 - RNA, 64 nt, Homo sapiens
aggcgaccgcagccccccgcccggaggccgggaagacacacaacaacaggaggcaaacccacag

SEQ ID NO: 137486 - RNA, 80 nt, Homo sapiens
cccagccccccgcccgccacacgaggccgccagcagcgacaaacgcccacaaagcgccgccagggacgagacacccaggc

SEQ ID NO: 137487 - RNA, 80 nt, Homo sapiens
caaaggacggaaacgccgaggaacccggcgaggcggcaggcaggcaggggcagaaggcgacccagcgcagagcaaacaga

SEQ ID NO: 137488 - RNA, 75 nt, Homo sapiens
ggaggacagcccaagaacaccgagccccggccaccacagacgaaccagccggcaacgaaaaggcaaggcgagagc

SEQ ID NO: 137489 - RNA, 87 nt, Homo sapiens
aacagaccagacaggaccagggaggagcaggaaagagaagggaagcaagaacgcgggaggagacagcaccgaaggacagaagaggac

SEQ ID NO: 137490 - RNA, 63 nt, Homo sapiens
acaccccacgccaagcaccaagaagaaccggcacaagcaagggaggaaccgaaaggaaaccga

SEQ ID NO: 137491 - RNA, 99 nt, Homo sapiens
cagaccagaccagagaaaacgggaggacgcacccggggaaccagcaaacaagacggaaaagcaaaggcagcagggaggagcgaggaggccaaaaaggcg

SEQ ID NO: 137492 - RNA, 76 nt, Homo sapiens
acaagacaccaacaaaagaaaagaacaaagggccagccagcaaagcagcagaacgagacagacggggcaccagggc

SEQ ID NO: 137493 - RNA, 80 nt, Homo sapiens
ccagcacccgcagggggcagggggggaggaagaacacagacaagaagagaaaccgcaaaaagaaagacgaacaaaaaaag

SEQ ID NO: 137494 - RNA, 77 nt, Homo sapiens
cggagagacaacaagggccacggacgagagaagagggggaaaaaggaaggccgccggacagcgcagagccaagacgg

SEQ ID NO: 137495 - RNA, 75 nt, Homo sapiens
ccggccacgggacggcggcgcggagaaggcagagacgaaagggaagggagggggagcggcaagagaccggaagga

SEQ ID NO: 137496 - RNA, 74 nt, Homo sapiens
ggcaccaaacgcggcaacgcccccgggacagcacgccccggaccccaaacaaaagagcaacgagaccggacgaa

SEQ ID NO: 137497 - RNA, 73 nt, Homo sapiens
cccggggggggaagggagaacccagagcacaagaccgaagcgagaaccagccacacaaggccagcagaaaccc

SEQ ID NO: 137498 - RNA, 73 nt, Homo sapiens
gaacgggcaggcaagcaggcaaagcagcacgccgagggacagcacaagaccacaaagaacggggcaaaccaag

SEQ ID NO: 137499 - RNA, 82 nt, Homo sapiens
acagcaagcgaagccgaaaaagcgcccgagacgggcccgccgaaagccggcacaagacaacaggaccccccagaaacccagg

SEQ ID NO: 137500 - RNA, 71 nt, Homo sapiens
ggcaaacgccgcccccggccacgacccccgaagagccgcgccgccaggcacgaaccaccagagagggggcg

SEQ ID NO: 137501 - RNA, 67 nt, Homo sapiens
aaaaaagaaccagagcaaaacgacagaaagcaagaccagggcccacaggccacccgccagacgcagc

SEQ ID NO: 137502 - RNA, 77 nt, Homo sapiens
ccacgcccgagccgagcagagggaagaaccacggcagagagcaaggacaccaacaagggcggacgccggcggcagcg

SEQ ID NO: 137503 - RNA, 73 nt, Homo sapiens
gagaccgcccagaacagaacaagcaaaagccacggaagacggacaggaagaagccaagaaggaagggcagcac

SEQ ID NO: 137504 - RNA, 77 nt, Homo sapiens
aggaggggccccaggcgcagcagacaaccaggacaacccgggcaggaagagcagcagagcagccgaccgccaacaag

SEQ ID NO: 137505 - RNA, 70 nt, Homo sapiens
ggaacccagggccaccggggaaacaaacacacgcaggcagagcaccacaagcaaggaacaaaagaaagca

SEQ ID NO: 137506 - RNA, 83 nt, Homo sapiens
cagagcccagggcaggacaccgacaggaacagggaccacgggggggagcgacagaaaagcagcacaacccccggagaaccgaa

SEQ ID NO: 137507 - RNA, 69 nt, Homo sapiens
aaggaagccaccaccgagacgaccaagagaaaagcgaaagcagcacaagcaagaacaggcggaaaccgc

SEQ ID NO: 137508 - RNA, 69 nt, Homo sapiens
gcaacggcggccaaaccgcgccccaaagggaagaccgacacaggaggacccgggccagccgccggaacc

SEQ ID NO: 137509 - RNA, 83 nt, Homo sapiens
aggcacagcgccgaggcccagagagaccccagaagggggaggaacacgaccggaagacaggccaaggagagcagcgcggacag

SEQ ID NO: 137510 - RNA, 78 nt, Homo sapiens
gaggaggaacaccaggcacaagacgccccgggaaaacggagcgccgaaaagccaagaagccccccacgccggagcccc

SEQ ID NO: 137511 - RNA, 77 nt, Homo sapiens
cacggccgaggacacggaggaaggcggcacggcagacacaccgaccagaggaaggcgaacccgccacgcagcaggag

SEQ ID NO: 137512 - RNA, 83 nt, Homo sapiens
ccgggacggaccgagaccggaccgagagcggaccgagagcgcgaaacgcacgagaagaaaccaggagaagggcaaagagccag

SEQ ID NO: 137513 - RNA, 81 nt, Homo sapiens
cgacagcgcgcaccacccgcaggaacaccccaccagaccacccagcaagcccacaaaaaaggcacaagcagggacagcccg

SEQ ID NO: 137514 - RNA, 60 nt, Homo sapiens
ccggcggcggcggaggcgcgccgagaaccgacgaggccacaggaacgcgccgaaacacgc

SEQ ID NO: 137515 - RNA, 78 nt, Homo sapiens
agagcggaggaccacccaagaacagccacaagaagggggccaagggcaggaggaccagcaagacggcaggggcacacc

SEQ ID NO: 137516 - RNA, 78 nt, Homo sapiens
gcggaggccgccgcagcaagggcagcgacaggggccggccacagcgggggagacgcgaccgcggcaggaggacccaac

SEQ ID NO: 137517 - RNA, 70 nt, Homo sapiens
ccacagaaacaaaagcaacaaagaggcaccgcgccggagcacaacagacccggacacggacaaaagaaac

SEQ ID NO: 137518 - RNA, 72 nt, Homo sapiens
gccagaggaccaacagggacggagcggagaaaaggaaccggccccggggaacaggcaggaaaacgacccaaa

SEQ ID NO: 137519 - RNA, 92 nt, Homo sapiens
cgaacaaagagagagcagcacccggaaagagaaaccccaagccaaaggacaggacccagaccagccaaagagaagaagaaaggaagcaaaac

SEQ ID NO: 137520 - RNA, 66 nt, Homo sapiens
gggacagagccacccaagaaagcgcagaacaaaaaaggaaacaaaaaagggccaagacagcaacaa

SEQ ID NO: 137521 - RNA, 82 nt, Homo sapiens
ggacagaaagcagcccggccgcagggaggagaagaagagaaccacagccgcagccagggaagcacagcagcgcgacaccacg

SEQ ID NO: 137522 - RNA, 75 nt, Homo sapiens
gacccccagcagaccagccagcggcggcccaggagaaccgcgagacaacaaaaacgcgaccggaaaggagagaga

SEQ ID NO: 137523 - RNA, 72 nt, Homo sapiens
gagcgaccagaaccgcccaggggccggcgccaggccgggaccgcagccagaccacgcgagccggcccgggcc

SEQ ID NO: 137524 - RNA, 68 nt, Homo sapiens
gcagcgggagcggacggcgagcgcgagcggcgcgagaaaacagagcgccgccaccgccgccaccacgg

SEQ ID NO: 137525 - RNA, 86 nt, Homo sapiens
aaaagggaagcgaaaccaaccagaagccgagaagggacgaacagcggggacgccccagcagaccgcccaggagaggaaagcaggag

SEQ ID NO: 137526 - RNA, 69 nt, Homo sapiens
aagaacaggccacgcaaacaagcagcgaaacgagcagaaagcaggacaagcggcagaaaaaacaacacg

SEQ ID NO: 137527 - RNA, 63 nt, Homo sapiens
ccaaaagaaaaaagggacccacccaggccagacagaaaagggagccaggaccccagagaggag

SEQ ID NO: 137528 - RNA, 86 nt, Homo sapiens
gccgccgggggccgggccgcgcgcaccccaacacccccaccagcgggcccggggggcccagcacccaggagcccgggcaggagcac

SEQ ID NO: 137529 - RNA, 84 nt, Homo sapiens
gccggacccaagccaccccccagaggcagaaacacagcaaggagcacaggaagcagcagaagcccagcccaccagggcaggagc

SEQ ID NO: 137530 - RNA, 69 nt, Homo sapiens
caccgccccaacccacgagaggacagcccagggcgacccggacacgacacacacaagagcgggaaaggc

SEQ ID NO: 137531 - RNA, 77 nt, Homo sapiens
gaagacggacacacggcgggcgacacgcgggcgcggcacccggcaaaggaagagaacaagaagacgaaagcgccggc

SEQ ID NO: 137532 - RNA, 81 nt, Homo sapiens
ccaacgcgcccccgagcagcgacgggggacaggaggcgcgcaggaacagaaacccccagcacacgaagaggccaaggcacc

SEQ ID NO: 137533 - RNA, 78 nt, Homo sapiens
agcacagggaaaaaagcaaacgccgacccagagcccggaggcagaggcgccacaccacgcaaagaggaacccgccgcc

SEQ ID NO: 137534 - RNA, 74 nt, Homo sapiens
ggcagcgagaaacgcaggcgcccagaacgcaaaaggaggcagacgagaccggagaaggaaagacaagccgagag

SEQ ID NO: 137535 - RNA, 58 nt, Homo sapiens
caaaagcaacaaagaggacgagagaaacgacaccaagaacgagcgcgaaggacaagcg

SEQ ID NO: 137536 - RNA, 76 nt, Homo sapiens
caggaggaacccagaacagggccgggcggcccaagggaaaagcagcggccgcaagggagaagaaaagcaacacagc

SEQ ID NO: 137537 - RNA, 71 nt, Homo sapiens
gcaaaaggacccaagaacacgggagacacacacaaacgaacgcggcagaacggaggcaggcagcacgagac

SEQ ID NO: 137538 - RNA, 73 nt, Homo sapiens
gggagaaaaacaggcagggacacggaagaaccagggaggacgcccgaccccacccagcccgcaccgggcagcc

SEQ ID NO: 137539 - RNA, 72 nt, Homo sapiens
cagccacccacgagcccggcaaaagcgcacaaacgcccaagaagaagaggagagggaagaagaaagaacgcg

SEQ ID NO: 137540 - RNA, 59 nt, Homo sapiens
cccggcagcgggaacacagagagcgaagccagaacggccgagcgaccaggagaggagcc

SEQ ID NO: 137541 - RNA, 54 nt, Homo sapiens
acagaagaccgccagagacagagaagacaacggccaaaacagaagaggcaaagc

SEQ ID NO: 137542 - RNA, 76 nt, Homo sapiens
ccagagcagcaggaagggagagccacccaagagacaagcagacaccacgacagcgaggcagccagcagcagccacc

SEQ ID NO: 137543 - RNA, 75 nt, Homo sapiens
aaagccgcgaaaggccgggaagagggagagcaaacggccagcccaacaacggcaagcggagaagagcaaggccga

SEQ ID NO: 137544 - RNA, 54 nt, Homo sapiens
gcggaaaggcccaggcgccccgcaggagggagccacaccaaagccggacccccc

SEQ ID NO: 137545 - RNA, 84 nt, Homo sapiens
gccgaggccgccggagaggagggcccgcccgcgacacagcggacagccccaggacccacgcccacggccccccgcggccaccgc

SEQ ID NO: 137546 - RNA, 70 nt, Homo sapiens
gaaacaacgacgggcagcaaaggaacacagacagagcagaaaggaaaaggcgaaagaaggaaccaaacgg

SEQ ID NO: 137547 - RNA, 82 nt, Homo sapiens
ggaagccaagcaaacgcagaaggacgcccacgagcaaccaagacccggccgcgggcaaagggggaggggccgccagagggga

SEQ ID NO: 137548 - RNA, 58 nt, Homo sapiens
aaaaagaaacaaccgcaggcccaccagaccaggggaggaggagaaagggagaagggga

SEQ ID NO: 137549 - RNA, 57 nt, Homo sapiens
acggaaacaggaagaggaaaaacacgacaaaggaaagggcacacggcccgaacaagg

SEQ ID NO: 137550 - RNA, 72 nt, Homo sapiens
acgcgcccaggagacgcaccgcggggaccggacacacccccccagaccgggaaaaccggaggccagcccacc

SEQ ID NO: 137551 - RNA, 76 nt, Homo sapiens
gccggccgcgacgcaggccccacgaggggagggcgagccgccagcccaaccacgaagaagaagcgagcggcgcaga

SEQ ID NO: 137552 - RNA, 75 nt, Homo sapiens
ccccaacccagcggccaaggagcaggacccgaccagaaaggagcccgggaccgaagccggcgaaacccgagaaac

SEQ ID NO: 137553 - RNA, 88 nt, Homo sapiens
caccggcggccccaccagcagacgcagccgagacaccagcccgaaacaccaccaagggaaaggcagcagaagcaacgcagcaagaaac

SEQ ID NO: 137554 - RNA, 76 nt, Homo sapiens
caggaagaaaggccgccacacacaagcaggcagccagcccagaacagagaacaggcacgggggccagcaggagcag

SEQ ID NO: 137555 - RNA, 30 nt, Homo sapiens
gaacacacagacaaaggaagcacgaacagg

SEQ ID NO: 137556 - RNA, 78 nt, Homo sapiens
aagaacaacacaccggagcgcccggagccgcccgcgggcagcaggaaaggggccaaggaagacgggacagacagagaa

SEQ ID NO: 137557 - RNA, 84 nt, Homo sapiens
cgcggccggacgccagcggacacgcgggcgagacgggagagaagcgccggccggaaagaagacggggaggagcaggacgagccc

SEQ ID NO: 137558 - RNA, 68 nt, Homo sapiens
agaaggaccaagaaccaggacaaaccggcgaccacacacggggacgacggggaagccggacagcaagc

SEQ ID NO: 137559 - RNA, 38 nt, Homo sapiens
aaaacgcgcgggccaagggagcggagaaagagacaaca

SEQ ID NO: 137560 - RNA, 53 nt, Homo sapiens
gcggacccacccccgaacccccaagcagacgaggaagagaacccacaaagaag

SEQ ID NO: 137561 - RNA, 79 nt, Homo sapiens
gccgcaggaggccaacgccggcgacaccggccggcgcaggagaagaaacgaggccggaagaaaccacaaggacccaggg

SEQ ID NO: 137562 - RNA, 68 nt, Homo sapiens
cagccccccagagcgagacacagagcgggaggaagaaggaggaccaccggaccccgccgagcgaggac

SEQ ID NO: 137563 - RNA, 68 nt, Homo sapiens
acaacacgaaccagaggaccacggggccaaaggaagaggagagagacccagcgagagacaccggaaaa

SEQ ID NO: 137564 - RNA, 77 nt, Homo sapiens
acccacggccacggccagaggaccccaaggaccagagcaaagaaaaagagccgcgggggagcaaaggaggagaaaag

SEQ ID NO: 137565 - RNA, 73 nt, Homo sapiens
cagaaggggacagcggcaccccgacccagcggcagcggagccagaaagcagcagaaaagacagaagcgaggaa

SEQ ID NO: 137566 - RNA, 77 nt, Homo sapiens
gccgcccgggagcgggagccgcggggaaccgggcaccgcacccgcccgggagcgcggggaccacgagccaggaccca

SEQ ID NO: 137567 - RNA, 74 nt, Homo sapiens
gaaggaaaccaggaaaacaaagcagccaacagacaccaggaagaaagacagaccagaagagaggacacagcagc

SEQ ID NO: 137568 - RNA, 73 nt, Homo sapiens
gcaaccagccaaaacaacggaaaacagcgacaggggaggaggaggccacaacgggaagagagagagaacacac

SEQ ID NO: 137569 - RNA, 78 nt, Homo sapiens
ggcgccaaaacgcccccaacccagcgcaaaggaagaggaaggaccagagggaaaaggcacccagcggacggggccgga

SEQ ID NO: 137570 - RNA, 75 nt, Homo sapiens
cgggccccgaggccccagaccaacaaccccacgaggcagcaggagccacgacccgacacgcgcagccacgcgagg

SEQ ID NO: 137571 - RNA, 88 nt, Homo sapiens
ggcagacaaaagggccaaagaagggagagagcaaggggcgaacgccacggggggcccgccgcgcaaagcgggccggagaagggggccc

SEQ ID NO: 137572 - RNA, 71 nt, Homo sapiens
cccgcccgcgagacaccggcaggcaggagacaaagagggagaaaagagcgcacaaaaacccggacagacag

SEQ ID NO: 137573 - RNA, 83 nt, Homo sapiens
caagcgaaaacaccgcaccgcgcgaccccagggaacaaggaccgggccaaggggggggaagaagcggaaaggaggggccccgg

SEQ ID NO: 137574 - RNA, 59 nt, Homo sapiens
agagaggagaagacagaagaagaacagaagaagacggcacgggacccccagcacaggca

SEQ ID NO: 137575 - RNA, 59 nt, Homo sapiens
cagcaacggcgggggaccacgagagcagggcgcgaaggaccccacgcccgccaggccga

SEQ ID NO: 137576 - RNA, 86 nt, Homo sapiens
gccagcccccgccacggccgccggagagcagcaggaccgccgacaccacaacaacacgcgaaaacaccgcgagaaaaaaagcacaa

SEQ ID NO: 137577 - RNA, 73 nt, Homo sapiens
ccgggcccccaccgcagacggccggcaacaaccggggagcccccggaagcaggacaagcccaaccagggacca

SEQ ID NO: 137578 - RNA, 63 nt, Homo sapiens
cccacgaacccgaagcccccaaagagagaaccggagagcacccaacagggagaaacaggccca

SEQ ID NO: 137579 - RNA, 88 nt, Homo sapiens
gcagcaaagcgcccagccgccgcccgcgcccgcggccggggacggaaagcacccgaggagaaagggaacgaaaaagacgagcagggaa

SEQ ID NO: 137580 - RNA, 49 nt, Homo sapiens
gggacccaaagcgggaaccaaaggcacggagacagaggcacaaaaggag

SEQ ID NO: 137581 - RNA, 70 nt, Homo sapiens
acccccaaccacacacgagaaaggggccaacccgaagcgagcaaaggcgaggagcagaaacagccgagac

SEQ ID NO: 137582 - RNA, 78 nt, Homo sapiens
ggaggggcccagcaggggagaggcgacagaagacgaagggagaaggaggcgggcaagaggacccaaggcgcacaacag

SEQ ID NO: 137583 - RNA, 74 nt, Homo sapiens
aggcagaaaccagcgccggacagagaagcccccaaggagcgcagagagaacacaagaagaaagacagcacgggc

SEQ ID NO: 137584 - RNA, 63 nt, Homo sapiens
cgaaaaacagagggaggagcaagacagcgagcagggcgaaccacagaggagccgcggcaacgg

SEQ ID NO: 137585 - RNA, 73 nt, Homo sapiens
cgcagaggcgccagggcaagagcaaaaggggaagggacgcaaaaaggaagccccacaaggaccaggcaaaacg

SEQ ID NO: 137586 - RNA, 85 nt, Homo sapiens
ggccggaggacgccaaagaaggcacaggcccagccccagggcgcaaggccgcgcacagcagcggcggagcagagcgccagcaaga

SEQ ID NO: 137587 - RNA, 77 nt, Homo sapiens
aaccagagcaggacagaagccgaaacacaagccgccaaacccccagcagaggaaaaagcaaagccagagaagcagaa

SEQ ID NO: 137588 - RNA, 79 nt, Homo sapiens
ccacgggagggaagggcaggagaaaaccaagaaggagagaagagcagaacccaggaagagcccagcggcccaacaccca

SEQ ID NO: 137589 - RNA, 64 nt, Homo sapiens
ggagccccgaccccaggccccccacagaaaaggaaaggcagggacaaaccccggccagaacccg

SEQ ID NO: 137590 - RNA, 74 nt, Homo sapiens
ccgaaaaaagcagggaagaagagccagagcacagagcaccacgaacaaacagaaagcgcgaagaggggaagcaa

SEQ ID NO: 137591 - RNA, 73 nt, Homo sapiens
aaggaggccaccccgccccgcaggagcaggaaccaagaagccacaggaccaaacaagcgaccacaggagaaac

SEQ ID NO: 137592 - RNA, 76 nt, Homo sapiens
cccacccccagcggaaaggccaaccgaggcaaaagaaacaaacacgcacaccaaaagccgcagaaggcccgccaaa

SEQ ID NO: 137593 - RNA, 58 nt, Homo sapiens
ggaagacgcacgccggaccgagaaaggcggggagacaaccccccccaagaagcgaggg

SEQ ID NO: 137594 - RNA, 76 nt, Homo sapiens
cggccacgaccaagaagaagccgcggacccgcggcacaccccaacacccgccaccccgaggcaggaacagcacccg

SEQ ID NO: 137595 - RNA, 84 nt, Homo sapiens
gcggggaaaaggcggacgggaaggcgggagacgagaagccgaaaagcgcagcgagcggagccgccggagcccaaacgggcacag

SEQ ID NO: 137596 - RNA, 73 nt, Homo sapiens
aaggccgcggggggagaccccaccaccgggcagaaaaaaccaggaagacagccaaggacaaaaagccaagacc

SEQ ID NO: 137597 - RNA, 52 nt, Homo sapiens
ggaaaaccgacacaacaggcacagcaaggcggggcgggcacagagacaaggc

SEQ ID NO: 137598 - RNA, 74 nt, Homo sapiens
ggaagcgggaggacgggccaccgcggcgccagcgcgcagacaggacaaccagcggaggcacgacgccaaaccaa

SEQ ID NO: 137599 - RNA, 84 nt, Homo sapiens
cccgaacgagggggcgcgaggcagggaagaagcccagcggaggcgaacggcccccgccaacacgaggaccccacggagaggccc

SEQ ID NO: 137600 - RNA, 84 nt, Homo sapiens
cgcaaacacggacacccgccgaaggagcccaggaagagcaaagccgagcgcagaagaaggagagcgcacagggagcaacgaggc

SEQ ID NO: 137601 - RNA, 68 nt, Homo sapiens
aggaggaagaagacaccggggacagacagggcaagaagggcaaggccggggaaggaacgaaaaagccc

SEQ ID NO: 137602 - RNA, 68 nt, Homo sapiens
aaaggcaccccaccagccgaaaaaaagacagcaaagacccgagaccaggcgcgggggccaccagccag

SEQ ID NO: 137603 - RNA, 58 nt, Homo sapiens
ccggaaacaagacaccgaaaggaaaggaagccagaaccgaaaacccaccgacaccagc

SEQ ID NO: 137604 - RNA, 69 nt, Homo sapiens
cccccagccaggccacggaaaagcaagcccagaacacagacccgagccccaaagacagaaaagccccga

SEQ ID NO: 137605 - RNA, 83 nt, Homo sapiens
cacccgagcgggcgccccgcaaaaccgaaagacgggccagagacgacaacccgggccccgaggagggagaaaacgcaggacac

SEQ ID NO: 137606 - RNA, 76 nt, Homo sapiens
ccacagcaagagcaccggcgaccgcaccacaagggacgagaccaaacggaagaggaagagcaacgcaaggaaaaag

SEQ ID NO: 137607 - RNA, 84 nt, Homo sapiens
aaacagagcaaaaacccgaaaacagcaaccagggaaaaaagcccggcgagcgacggaagcccacagaacagggggcagaagaaa

SEQ ID NO: 137608 - RNA, 79 nt, Homo sapiens
gcccgcccggggcggcaaggaccgagcagccccgccacccggaaggaagaaccgccaaaaagagggaaaaacgggcgcc

SEQ ID NO: 137609 - RNA, 39 nt, Homo sapiens
cagggcacggccgggacggaaaaaccagaagagaaaaaa

SEQ ID NO: 137610 - RNA, 127 nt, Homo sapiens
cggagcagcggcacaggaggaggggagaaaccccacccacacaggaccaaagggagacacacacgggggagagcgggacggccccaaggccacagaaaaggagaccagccccacgcaggagcaccac

SEQ ID NO: 137611 - RNA, 71 nt, Homo sapiens
gcaagccgccccagagaacgacgcacgacaaggagggcggaacggcggaagaggccgagggagccaaccgg

SEQ ID NO: 137612 - RNA, 72 nt, Homo sapiens
cgggcgaaaaggaggaaaagaagccagaccgagacagcaaagcaagccaagagggcccagccaagaagcacg

SEQ ID NO: 137613 - RNA, 82 nt, Homo sapiens
acaaaacgccccggaagaagaaggacccccgcaacagaaagagccacccaaacagaacagggacccagaacgggggaacggc

SEQ ID NO: 137614 - RNA, 92 nt, Homo sapiens
gcggcggcagcgcaggacagccagcagaacccgaaagacaacaaaaacacggacccaacccacaaccggcgaaagcaccgagcagccagcag

SEQ ID NO: 137615 - RNA, 75 nt, Homo sapiens
ccagaccccggccgccgaccgcggccccgccggccgccggccgcgcggggggaaccgcgacccaagcggaggacc

SEQ ID NO: 137616 - RNA, 73 nt, Homo sapiens
aacgcgcccagccgcagcccgcgcggcaaccacaacgacagaagaccggaggaaaccaccgcccggggccgga

SEQ ID NO: 137617 - RNA, 73 nt, Homo sapiens
acggcagaaagagggaaaaaggaggagacgaccaggggagccgccaccaaaagcagacggaaaacccacgggg

SEQ ID NO: 137618 - RNA, 82 nt, Homo sapiens
gagaaggcaaggcagggaaggagcagcgaacgcccggcgccaccccacgcgccggcggcgccagcgcagccgggagcacacc

SEQ ID NO: 137619 - RNA, 77 nt, Homo sapiens
cggccgagacggcggcagcagcggcacagaaggggaggaaagacaccacgccaaaggcggcggacagccccacagac

SEQ ID NO: 137620 - RNA, 71 nt, Homo sapiens
cgcgaccaccccacaggaagcccgggagccacacacgacgggaagcgggagcccaaaaggcagagcgagga

SEQ ID NO: 137621 - RNA, 81 nt, Homo sapiens
agaacccaccacccagcagcagggcacaagggggcgaacaagggacacgagcacgcgacggagacccacgagaacccacaa

SEQ ID NO: 137622 - RNA, 75 nt, Homo sapiens
cagccacaggaggcgcggaggacgccccaccgccgacgcccccagccaccaggaccagaacagagaagaaagcag

SEQ ID NO: 137623 - RNA, 89 nt, Homo sapiens
aaggcagaggaggcgcaagacgcgaccaaagccgacggggcaagcccaccgggacaccgacccaagcccagcagaagccaacagacggg

SEQ ID NO: 137624 - RNA, 61 nt, Homo sapiens
agaaacaccaacaggaacagaaaggaaaggaagccagaaccgaaaacccaccgacaccagc

SEQ ID NO: 137625 - RNA, 68 nt, Homo sapiens
gccccgaagacaaggacagccccggcaggaggcagagaacaaggcaaagaggcaggagggcagaagag

SEQ ID NO: 137626 - RNA, 79 nt, Homo sapiens
accaacccggacacaggggccaggaaagaaaaccagagacagagaagaaaggggcccccggcagcagcccaacaccaga

SEQ ID NO: 137627 - RNA, 88 nt, Homo sapiens
aggggagcacagagcgagaccaggaaagaagggggcagaagaggggagaagcaaaacacagaggaaaagggaaagaggaacccaagaa

SEQ ID NO: 137628 - RNA, 41 nt, Homo sapiens
cgcacggaagaaaccaggcagcaccggcccagcgaagaagg

SEQ ID NO: 137629 - RNA, 80 nt, Homo sapiens
gcggggagacccggggggggaggagaggacccgccacccaccggaagggaggaagagcaagcaggcccgagggacaaaga

SEQ ID NO: 137630 - RNA, 66 nt, Homo sapiens
ggggagccaaagcaccacacaaaggaggaagaagcagacgccaagcaagaaccaagcaagcaccag

SEQ ID NO: 137631 - RNA, 78 nt, Homo sapiens
caaacaagccgacagagggaaaccaacagccaggaagcaacaggaccaaacacggaacagggcacgcggaacaggaga

SEQ ID NO: 137632 - RNA, 77 nt, Homo sapiens
gaccggccgacacgcggcccccgaccggaaacaggaacacgaaagaggaaaaacgcacaagaaaccgaagccaagga

SEQ ID NO: 137633 - RNA, 80 nt, Homo sapiens
ggacgagggccgaccggagcccaggcggccccagacgggggaaccccaagcgaggcgaggggacggcggggagcgcagga

SEQ ID NO: 137634 - RNA, 63 nt, Homo sapiens
cagacaggagaacccagcgacgacagaagcagccgaaaacgccaacgaagccaacgcaaagca

SEQ ID NO: 137635 - RNA, 76 nt, Homo sapiens
agcccgagcgccgccgcagccacagccgagggcacagggaggccaacagacccaacccagaaggcaccaaacggag

SEQ ID NO: 137636 - RNA, 53 nt, Homo sapiens
cgagccccacgaggccggggacgaccggaagccgcaggagcagccggccacac

SEQ ID NO: 137637 - RNA, 115 nt, Homo sapiens
caccgcaccgcgacggcgaccggggcgaaacggaagaggaaagcagacaagccagcggagaaagggcgacaaccaggggcaggagaacaaggagaccaggaggcagaaagacggg

SEQ ID NO: 137638 - RNA, 73 nt, Homo sapiens
ccagcaacgccggcagcgcccacgaccaggaagaccgcaggaaagcaggaaggcaagaaagccaaggacgaaa

SEQ ID NO: 137639 - RNA, 79 nt, Homo sapiens
aagagccaagccaacagagccgagagcagaccagcccaccgcacccagggaaaaaacagcagccacacgaagccggggg

SEQ ID NO: 137640 - RNA, 73 nt, Homo sapiens
aaaagaaagggacaaaagcaggcccccccgggcccaccaccaaagagacaagcacgaaaaaagcaaggaccag

SEQ ID NO: 137641 - RNA, 40 nt, Homo sapiens
cacccggacagaacccgcaggaaagaacaggccgggcagc

SEQ ID NO: 137642 - RNA, 71 nt, Homo sapiens
cacaaaaagcagcggcccgacccaccacaaagccaccgcgcgacacacaaaccgggccaccaagagccacc

SEQ ID NO: 137643 - RNA, 81 nt, Homo sapiens
aaagaggcacacagcgcgcgcagggggaggcgacaacaaaagagaaaagacgaccaccagacccacaaccgcccgagaccc

SEQ ID NO: 137644 - RNA, 76 nt, Homo sapiens
gcgccgccgcgcagcgccgcgcgcaaagcagcagcacaccccgacaagggaaggaacccacgcggccaccccccgc

SEQ ID NO: 137645 - RNA, 73 nt, Homo sapiens
gcaaaaggcggacaggcaggcaggcacagaacgaaccaaaaaggaaaggacccacaaagacagaaagagaaca

SEQ ID NO: 137646 - RNA, 84 nt, Homo sapiens
cccaggaaagggacacgcccccaaggcagagcggccccccccggccaaggccaggccaggacaagaggaacccgcaccggagag

SEQ ID NO: 137647 - RNA, 52 nt, Homo sapiens
ggagaaaacagcacaggcagcgccaacaaaaaaaaaccaagaaaccaccaga

SEQ ID NO: 137648 - RNA, 86 nt, Homo sapiens
ggagccccagagagacaagccccaaggagcccggccccacaccggcacacagcgacccagagagggaccagggccaaagaagagcc

SEQ ID NO: 137649 - RNA, 80 nt, Homo sapiens
cccagaagcggggacccgagacgcaagccccagcgaccccaagcaaaccggaaccaacggacccaaaaaacaaggaggaa

SEQ ID NO: 137650 - RNA, 80 nt, Homo sapiens
gggaagcgcagaaagcaggcgaacccgcggcgcaaaacggcaaaagcagaccggaaaacccaccggcaagaccacacccg

SEQ ID NO: 137651 - RNA, 73 nt, Homo sapiens
gggcgcggggaaccaggcgccccgagaggccggagagacacagggccgccagaagcgacagccccgacgagag

SEQ ID NO: 137652 - RNA, 62 nt, Homo sapiens
ggagccgcgcagccccggagcacgacaccaagggaacccaaggggaagcgagcgggcccacc

SEQ ID NO: 137653 - RNA, 37 nt, Homo sapiens
acagacgagccccagaagagaaggagggccccggagc

SEQ ID NO: 137654 - RNA, 77 nt, Homo sapiens
cggccccggcccgccggagaaacagggacccccccgcggcaggaacgcacccggcggccccacgcagccacccaaaa

SEQ ID NO: 137655 - RNA, 70 nt, Homo sapiens
gccccacagcggaacacacaacacacaggggcacgagcgaacaaagaagaaagaaacagaaaaggaacca

SEQ ID NO: 137656 - RNA, 49 nt, Homo sapiens
ccggagacagcaaccagcggaaggagaggaaaacacagccaaagagacc

SEQ ID NO: 137657 - RNA, 74 nt, Homo sapiens
ggcacaacccccccccacccccccggcccgccagggggagcccgccacggagagccgcagaggaacaccggccc

SEQ ID NO: 137658 - RNA, 31 nt, Homo sapiens
agggacccggacaccaaggggaacagagccc

SEQ ID NO: 137659 - RNA, 68 nt, Homo sapiens
cacaaggagaaaaacgaaaaggacccgaccaaccggcaaaaaccacacaacaaagacgcgccgaggaa

SEQ ID NO: 137660 - RNA, 78 nt, Homo sapiens
gcggggaaaccgcagcagccgcggagcacacggagccaagagcaaggacccagccgagcccacgggaggcagaaagca

SEQ ID NO: 137661 - RNA, 74 nt, Homo sapiens
aaacaagcggaagacacaaacagcagggagaagagacaacaagacagacccacaaccccaagagcagcggcgag

SEQ ID NO: 137662 - RNA, 75 nt, Homo sapiens
gcggagcccacccggcagcgcagcggcgggaaacaacgggaagacacggagaaaaacggccagagacaccaaaag

SEQ ID NO: 137663 - RNA, 78 nt, Homo sapiens
agagggaaaaaccccaagaggaagacaaacaaccagcccaggccacagaaacacacagaaggggagcaagaggaacca

SEQ ID NO: 137664 - RNA, 61 nt, Homo sapiens
gcgacagaggagggaaacgcggagccaggccgagagacggcaacacacacgaaggagccac

SEQ ID NO: 137665 - RNA, 62 nt, Homo sapiens
cgagagggcacaacaaacaacggggcggcacacaaggagcgaagggcagggagaacgccagg

SEQ ID NO: 137666 - RNA, 82 nt, Homo sapiens
ggccgggaccggagcaccggcagacccggggaccgggaagagccggcccaacagagaacggcaaacagcgagaaaccacaga

SEQ ID NO: 137667 - RNA, 42 nt, Homo sapiens
gggagcagccgaagagcaaagacaacccagaaaagaaaaggc

SEQ ID NO: 137668 - RNA, 85 nt, Homo sapiens
agcgggagcgggccggcgcccgggggcgcagggaaggagggcgccgagcaacaaccgccgagcgcgcccaacagcggcgacccgg

SEQ ID NO: 137669 - RNA, 92 nt, Homo sapiens
gcgggcccgagcgcagccgcgcagggagaagaggcacccaggacccagacagacggcacgcccacagaggagcgggcgaacgcagcaccacg

SEQ ID NO: 137670 - RNA, 88 nt, Homo sapiens
cggcagccacccaccgccgccgcccccagaaggggcaggaggggcgggaagccaaccccacgcagggccagccggacaggaggccgac

SEQ ID NO: 137671 - RNA, 78 nt, Homo sapiens
gaaggaccaagaaccagaaaaagcggggaaggggggcaaaaaaaagaagcaagcgaagcaccgagcacccacccgaga

SEQ ID NO: 137672 - RNA, 74 nt, Homo sapiens
cggccaggcacgaaacacaggccccgcgccagaaagcgaacaagggcccaacgccgggagagccccagggcccc

SEQ ID NO: 137673 - RNA, 36 nt, Homo sapiens
ggcccggcccagcacccccagcggagagcggccggg

SEQ ID NO: 137674 - RNA, 79 nt, Homo sapiens
ggaggccagaagaggacgacgccagcgacgagcaggacggccagcagaagcaggcgagccccccgagaaaaagaagaaa

SEQ ID NO: 137675 - RNA, 84 nt, Homo sapiens
caaccagcgaggccacggcgcaccgcagcagcccacccagggagcaggcgcagagagcaggcggccagcgggggggacaacccc

SEQ ID NO: 137676 - RNA, 72 nt, Homo sapiens
ggcccaccccacggggaaccggcgaagaacgggcagagaggcagggacaaccacccccaaggaggacacccc

SEQ ID NO: 137677 - RNA, 81 nt, Homo sapiens
ggggccagagaggcggaagaggaggccgagggcggagaggagcgaagagcgaagccagccagccgccgaacagagcccgcc

SEQ ID NO: 137678 - RNA, 79 nt, Homo sapiens
caccaaagaaaaaacgccacgcaaggagacagccacaacgacccagggggagaaaacacaacgggcgaccaggagaagc

SEQ ID NO: 137679 - RNA, 80 nt, Homo sapiens
ggccgccccggcaagcgccagaaaccccgggaaggcccccagacccaaagccgggaacggcagacgcagcagagagacca

SEQ ID NO: 137680 - RNA, 69 nt, Homo sapiens
acccggggaaaccaagagacggcacagaagacagacaggccggcgggagccaaacagcaccaggggcgc

SEQ ID NO: 137681 - RNA, 69 nt, Homo sapiens
ccaacgccggccggagcagcagcccgagacaggaagggaaggggcggagacgggcggaacgcaggaggc

SEQ ID NO: 137682 - RNA, 70 nt, Homo sapiens
gagcggccagcaggagcgccggggccggggcgaacgcggccgagagacccggaccgcgaaggagcgcgga

SEQ ID NO: 137683 - RNA, 71 nt, Homo sapiens
cgccgaccagccggcgccaaaggagggcaccggaagagcggaaagccgcccagagcccggaccaagcaccc

SEQ ID NO: 137684 - RNA, 35 nt, Homo sapiens
cccccgcagcccccgcagcggaagacaagaaacac

SEQ ID NO: 137685 - RNA, 79 nt, Homo sapiens
ggaggacagcgcacacagcaagcacgagagccaggagaagcaagcgggcacaggagaacaccccaagaccacacccgga

SEQ ID NO: 137686 - RNA, 104 nt, Homo sapiens
gaaaaccagacaaaagcacagaaaaagcaggacacgaaggaagaagacgagagggaacaacaggaaaacaagggcacgagcccaggacccaaacaacaaaccca

SEQ ID NO: 137687 - RNA, 84 nt, Homo sapiens
aaccagggagaccacaaaagagcagaggaggaacaccaggcacaaggggaacccggaggcaagacacgaggagaggcgcccagc

SEQ ID NO: 137688 - RNA, 82 nt, Homo sapiens
caggagacccgaaagacacgggagaacaacgacagaacgagaccaggaaaaaaggggaaacccaggaccacaaaaaggcaag

SEQ ID NO: 137689 - RNA, 77 nt, Homo sapiens
gaacccgggccccgccagggaagcgagaagagaaaaaagggagacaagagacgccagggagaaggagggggaaaccg

SEQ ID NO: 137690 - RNA, 83 nt, Homo sapiens
cacaacgcaggaacaccgcacgcgcggaggagcgagaagaagaaaagaagagagcgaggagcggcaggagcaagccaagaaag

SEQ ID NO: 137691 - RNA, 76 nt, Homo sapiens
gggggcagcacaccgggcaagcaaaagggccagcggaacccacaggagagaaccacccagagccgccaccaggggg

SEQ ID NO: 137692 - RNA, 78 nt, Homo sapiens
gacggcaaggccacagaccacaacaccaggaggaccagcggacgacccccgggacaggcacaacaccaagaggacggg

SEQ ID NO: 137693 - RNA, 74 nt, Homo sapiens
aaccgccaggagaaaaaagaaaaaggcacaaacccagcacagagaagacggcgacaagcaaaagacgacgcaga

SEQ ID NO: 137694 - RNA, 73 nt, Homo sapiens
cccaacaggagcacaagagaccacagacacacccgaaaaacagcgaagaagaagaggacccaaggggagacgg

SEQ ID NO: 137695 - RNA, 75 nt, Homo sapiens
aacaggaccaaagcggacacccgagcaccgaaggccacagcgaaaaggaggcgggcgacaggagaggacagagga

SEQ ID NO: 137696 - RNA, 77 nt, Homo sapiens
aaccaagcccaaaaagccaccgaggaccacacggaacacgacacagaccccggccggaacccagggagaccagcccc

SEQ ID NO: 137697 - RNA, 40 nt, Homo sapiens
ggcgggcagagcaacgcagaaagcaccgggaggaaagaga

SEQ ID NO: 137698 - RNA, 84 nt, Homo sapiens
ggagccaccagcagcggggggcgacccccagaagcggggagaggacagaaaccgaagcgaaaagggccgggccaagcaggacaa

SEQ ID NO: 137699 - RNA, 75 nt, Homo sapiens
caacgcgagaaggagagaggacagaggacggagcgcgcgcagccgcagccggagcaaacagaacaaaaacaagaa

SEQ ID NO: 137700 - RNA, 56 nt, Homo sapiens
gaaccagggcacacagccggcaaagaaaccccaaagccagcaagaccacagcagca

SEQ ID NO: 137701 - RNA, 78 nt, Homo sapiens
caccccaccaaggggggcaggacacacggaacccaaacgcggagccgacacccgcacgccaggaccaagagcagggcg

SEQ ID NO: 137702 - RNA, 81 nt, Homo sapiens
ccgggggcgcccccgcgacccggaccaccgggcgcggcgccccagccgccccgccgccgcagacccgaggaaccaggaggg

SEQ ID NO: 137703 - RNA, 82 nt, Homo sapiens
agcggagccccccaagagccggaaagaaggaaagaggcagaaggccagaagggcgaagaagaaggaaaaaaggccacgccac

SEQ ID NO: 137704 - RNA, 75 nt, Homo sapiens
gcccggggcaacgggccgacagcacaggcagaaggcggcagggagcacgcaccaggagcccacggcccacccaca

SEQ ID NO: 137705 - RNA, 107 nt, Homo sapiens
gggggggcgcgggagcaacgggaggccggacccagcgagcgggcggcacgcacgcagcaggcaaggccagcaaggaggggggccgagccggcggcggcggcggcagg

SEQ ID NO: 137706 - RNA, 74 nt, Homo sapiens
gcgccgccgccagacgcaccagaagagaacacgagccacgcggacaaaaccaagaagcaaaagaccgggggaca

SEQ ID NO: 137707 - RNA, 58 nt, Homo sapiens
ccgggagccagaagcacaggcccgggcgaaggggccacgcgacaaaccagccggcggg

SEQ ID NO: 137708 - RNA, 53 nt, Homo sapiens
accagcaaccccccacgagaacgaacagagacagacccgggggcccccaagga

SEQ ID NO: 137709 - RNA, 80 nt, Homo sapiens
aggaacggcagccaagcccccacgccagggaggcgagggccccgggcgcgggagccagccgaagaaaggaaaagagaggc

SEQ ID NO: 137710 - RNA, 61 nt, Homo sapiens
ccaaacagacgacgcaaacccccggggccacacgagcccagcccagcgagcagcaacccag

SEQ ID NO: 137711 - RNA, 78 nt, Homo sapiens
ccccgcgccgccgaccccccggcgccgcgccggcggcggggaggggggagacacgaaccgcgcacccgcgagcgcaga

SEQ ID NO: 137712 - RNA, 95 nt, Homo sapiens
gagacaacaggaggacacggaagagggaagaaagaagcagcgccagcaaggaccagaaggacccaaggacgaaggcaggggaaaggaccccagcc

SEQ ID NO: 137713 - RNA, 80 nt, Homo sapiens
cagacgcagggcgcccccgggcggcagggcaggccacacgcgggacacagacgacaccaccgggcacgccacgaggagca

SEQ ID NO: 137714 - RNA, 76 nt, Homo sapiens
gcgaagacggaaacgaggaaaccgggaaagccaccgaaaaggagcgggaggggggacgggagcaggagaccggccc

SEQ ID NO: 137715 - RNA, 68 nt, Homo sapiens
cagcagagagcaacccgaaaagaccagaaaccaccgcagcgacgaaaaacgccaggagaagacgcagc

SEQ ID NO: 137716 - RNA, 63 nt, Homo sapiens
agaggcgcgcgcgcggcacaccgcacaggaaagagaggagaggagcgccggggcgcacgcaga

SEQ ID NO: 137717 - RNA, 53 nt, Homo sapiens
caggccaggaccgacagcccccacaaggggcaagaagaccaaaaaacaccaga

SEQ ID NO: 137718 - RNA, 65 nt, Homo sapiens
cccaaaccaagcgcgacaagaaagccccgacaagggaccgggcgggccccgcaggaaacccccac

SEQ ID NO: 137719 - RNA, 67 nt, Homo sapiens
acggcggagggcccggccagggcagcagagcacggagggcaggagccaacacagggacgagacccgc

SEQ ID NO: 137720 - RNA, 40 nt, Homo sapiens
ccaccccacaggcccacgacccaggaaaaccaacggcccg

SEQ ID NO: 137721 - RNA, 97 nt, Homo sapiens
caccacgccagccgcaccagccgcccaagccgcacagccgcggcggcagcagcaggagagggcgaccagacgaggggagacggacgggggagagagg

SEQ ID NO: 137722 - RNA, 86 nt, Homo sapiens
cgagaagcagcgggggggcaggcgacgaagccaacgggacaggaaaaccagcccacagcgcaagaagacgcagcgcgccgggagaa

SEQ ID NO: 137723 - RNA, 79 nt, Homo sapiens
aaggccgcccgggaacgcgacgcgagagaaggacccacggcgcgcgaagcaagaagcgagaaccaaaaaggcaaagaca

SEQ ID NO: 137724 - RNA, 70 nt, Homo sapiens
aaagaaaagcccgagaccagccgccggcgacggcccacccaaaggaacacaccagcgggcacagcacagc

SEQ ID NO: 137725 - RNA, 87 nt, Homo sapiens
aagagggcaaggcggcagaccgcagaacaagcgccccggcccgcgggcacgccagcgccacaggcaccaccggcgcccagcccaacc

SEQ ID NO: 137726 - RNA, 94 nt, Homo sapiens
caaacgcgagcgaggacccaaaggggagaaaagacacacagagcgggggaaagggaagaagacagcggcaccgaacaagacaaggcaacaccac

SEQ ID NO: 137727 - RNA, 75 nt, Homo sapiens
gcacgcggaccagagggaccaacgcaggagcagagaggagcagggagacggagagaggagaggagaaaagcagaa

SEQ ID NO: 137728 - RNA, 72 nt, Homo sapiens
aagccgccgccgaggccagcacccaagggggcaagggcggagaaacaagaacaggcgaggggcccgcgagca

SEQ ID NO: 137729 - RNA, 79 nt, Homo sapiens
gagggaggccgcggcccgggccgcaccagagcgcccggcccacgacacaggaagaagacaggaacgcagaggaagggag

SEQ ID NO: 137730 - RNA, 53 nt, Homo sapiens
gaagagaccggagccgacagacgggaggaagagccacaggaagccaacaacgg

SEQ ID NO: 137731 - RNA, 66 nt, Homo sapiens
gggaccgaccgcaacagaacggacccgcgagcaggcgacccaaaagagcgaaggaaaaccagcaac

SEQ ID NO: 137732 - RNA, 86 nt, Homo sapiens
cgcgggaccacaaagcacgacggcacccgggggccacacgcaggccccgcgccaggggccaaaaagcagaaaaacaaaccagccca

SEQ ID NO: 137733 - RNA, 57 nt, Homo sapiens
agaggaccacccagaggagcaacccagcagaaaacgagcccggcacagagaacggca

SEQ ID NO: 137734 - RNA, 56 nt, Homo sapiens
aaaaaggcgaggcgcagcagcacgcaaaggagcaacaggcacagaaccgggcacga

SEQ ID NO: 137735 - RNA, 87 nt, Homo sapiens
ggacgcgcccgaggagcgcaggggcagcccaggcggccgaacccgcggccggccgagccggagaacagaaggagcggcggacacaca

SEQ ID NO: 137736 - RNA, 67 nt, Homo sapiens
gagggcaacggcacagcgggagcagagccccgagcggcccgggagggaacaaagaggaacaggccaa

SEQ ID NO: 137737 - RNA, 73 nt, Homo sapiens
aaggccaagggcaaggagacaggacacggacgacaccgagcccaaccgaccaaccacaacaccccaaaggaag

SEQ ID NO: 137738 - RNA, 78 nt, Homo sapiens
cagaaggcccgggagcagaaagccaaacaggagcgggcggaacgaaaggagcgacgagagccgaaagaagcgaggaaa

SEQ ID NO: 137739 - RNA, 46 nt, Homo sapiens
caccagacagacgcgcaaaacccaggccaaaggggagggccccagg

SEQ ID NO: 137740 - RNA, 78 nt, Homo sapiens
aggaggacgaagcgcacgggacagccaaagaccggagcggagagagaagaaacaggccacagagaacaggccggagca

SEQ ID NO: 137741 - RNA, 59 nt, Homo sapiens
gcggggcaaagggaccacggcaccgccccagaaaggagacacggcgcgccgcagcaggg

SEQ ID NO: 137742 - RNA, 74 nt, Homo sapiens
agaacacgccggaagagacacccaagcaggagagaagcacaaaggagccagcaccgccgaccgccagcgccaga

SEQ ID NO: 137743 - RNA, 75 nt, Homo sapiens
aacccccagcagcacggggaaggaccggacccggcccgggagcaaaggagcggcagcccacaagcaggaagacca

SEQ ID NO: 137744 - RNA, 76 nt, Homo sapiens
gcgcagacgcacccgcagcccccaggccgcccagcagccgcgccagccagaaagagcagaagacacagaggacacc

SEQ ID NO: 137745 - RNA, 67 nt, Homo sapiens
gaggcggggagcagcgccgggagaaggaccacgcaggacagaagcaccaccaccgagaaaccaggcc

SEQ ID NO: 137746 - RNA, 77 nt, Homo sapiens
acacggccaagcgccgcggagaagagaaaagggaaggcacggaggaagcccgagaccacgaggcagagaagaaggaa

SEQ ID NO: 137747 - RNA, 47 nt, Homo sapiens
cgggccgaaccggaagggcaaggaaccggaaagagagcgggaccagg

SEQ ID NO: 137748 - RNA, 86 nt, Homo sapiens
gcaccggaggaggagaccgacagaccgccgacgacgcaagcagcgggaggagcaaccacccgacaggaggacgcccgccaggggag

SEQ ID NO: 137749 - RNA, 79 nt, Homo sapiens
gcaggagcgccgggcggccccggcgggccacagcccaaaccacaacccaggaggacccgagccccaaagacagaaaagc

SEQ ID NO: 137750 - RNA, 81 nt, Homo sapiens
gcaaccggcaacacagccagccccagccaggcacgaacagaaaaagagagcccgagggaaaagacaggcaacaggaaagca

SEQ ID NO: 137751 - RNA, 57 nt, Homo sapiens
cagcacgaaagagagaggccgcaagaagaacagacagaggcacaaaaggagaaagca

SEQ ID NO: 137752 - RNA, 74 nt, Homo sapiens
agcaaaccggaccaccccgaagaaagcacagggacccgccagcgcgccccgcccccagcacggagggcaaacaa

SEQ ID NO: 137753 - RNA, 84 nt, Homo sapiens
cgagacaaggaagccgcgcgcccgcccccggccagggggacccacggggagcgagggaggaggacgccagacagcagcagccgc

SEQ ID NO: 137754 - RNA, 81 nt, Homo sapiens
ggaaacgacagacgaacacgaaccccggacgggagagcgccggcggagaaaaagggccaggccgagcacgggcacgcaggc

SEQ ID NO: 137755 - RNA, 76 nt, Homo sapiens
acgacggggaccgccgccggccagaacaggcgaggcgcggccgccccacagccgacgcgcagccccaggccgccag

SEQ ID NO: 137756 - RNA, 89 nt, Homo sapiens
gagagccgggggagcggggccccacacccccccggggggggaggagagaccagcagcaaacccacgcggcgcaccgcacaccagcgcgg

SEQ ID NO: 137757 - RNA, 72 nt, Homo sapiens
ccagccaaaaagcacaacaccgggcaaccacggggcggcgccggccccaagccccagggggcagagcggaag

SEQ ID NO: 137758 - RNA, 53 nt, Homo sapiens
gcaccaggccaaagaaagagaaggaccccgacggagagacaaagaagacggag

SEQ ID NO: 137759 - RNA, 59 nt, Homo sapiens
accggaccgagagcggaccgagagcgcgaaacgcacgagaaggcagagaggcggacccc

SEQ ID NO: 137760 - RNA, 78 nt, Homo sapiens
gggggcccccaagggagccggaggaagcacggggccacgccgggaccaggccggggacggggagcagcacccaagacc

SEQ ID NO: 137761 - RNA, 69 nt, Homo sapiens
aagggcgccgcgccccgaaggagagccgagagccaaggcggacaaagcaccacccagcacaacagcaac

SEQ ID NO: 137762 - RNA, 76 nt, Homo sapiens
gcgcagggagaaggaagaggggaaaaggggcacaagaaggccaaccccaaaagagagaacacaggcaagacgaaaa

SEQ ID NO: 137763 - RNA, 33 nt, Homo sapiens
cagaagcagaacaaaaggacaaaccggcgacca

SEQ ID NO: 137764 - RNA, 86 nt, Homo sapiens
aaaggaaggagcagcagaacgaaaagagaaaggacagggacaggaaagaaagaaaaagaaaagaaaaacagaaagggcaaagacaa

SEQ ID NO: 137765 - RNA, 58 nt, Homo sapiens
gcgaggggaagaggaagcaaagccaaggacaaaaaggccaagagccagcacaggaaga

SEQ ID NO: 137766 - RNA, 48 nt, Homo sapiens
cgccgaccgacaaaaagcccacggcaccaggccaccggagccgacgcg

SEQ ID NO: 137767 - RNA, 78 nt, Homo sapiens
acggaccaccaccgaaggaacggacaacaaggccgaggcacggaaggccaggacagaggcccggccgacgccggggga

SEQ ID NO: 137768 - RNA, 70 nt, Homo sapiens
aggcagcagcgaccagaaagaggagcaacaggaaacaagggaaacccaagcggagaaaggacgggacacc

SEQ ID NO: 137769 - RNA, 69 nt, Homo sapiens
gaagacagacaaaaaccaagaaacaaggacagcagaccacagcccggcaggcccaaaaacccaaaggga

SEQ ID NO: 137770 - RNA, 76 nt, Homo sapiens
caggaccccaaaagagagaccagccagccagagaccaggaccaggagcaaggagccgcacgggggccacaggcgac

SEQ ID NO: 137771 - RNA, 55 nt, Homo sapiens
aaaaagaagcgggagaacgggcgcgccagagcagcaaaagcagccgagaggaaca

SEQ ID NO: 137772 - RNA, 74 nt, Homo sapiens
gcagaggaagaacagagagccaaagggaccgggacaggggaagaaaagaagaagaagagagaagaagacacaag

SEQ ID NO: 137773 - RNA, 73 nt, Homo sapiens
aaaccagagacccccgaagacgaaaacgaaggaaggaggacccgaggagagagaagacggaaaggaaacacgg

SEQ ID NO: 137774 - RNA, 40 nt, Homo sapiens
aaacgacaccacccgaccgccaaaagaagcaagggaaaga

SEQ ID NO: 137775 - RNA, 80 nt, Homo sapiens
agcagcagcaaaccggcggaggacggaaccaggggagagcgacccaaacaaagaagagaagcgaaggacgacagccaggg

SEQ ID NO: 137776 - RNA, 89 nt, Homo sapiens
cagggaacagggggccccgccccccggccacgcgagcgggaacagcccccaccggagcggcaaagcgaaggcggagcaggagaaagcgg

SEQ ID NO: 137777 - RNA, 37 nt, Homo sapiens
gccaaagcggagcgcaacggcccgccgggacccacca

SEQ ID NO: 137778 - RNA, 74 nt, Homo sapiens
ggcagccacaacagggcaagccgccgcagacacacaaaccgggccaccaagagccaccgaggccaaagaagcga

SEQ ID NO: 137779 - RNA, 75 nt, Homo sapiens
caaacaaaaggcaccagacggcaaagcggacgggccgggaacggcccagcgggcagaggaaaaacgcagccaacc

SEQ ID NO: 137780 - RNA, 82 nt, Homo sapiens
gagcaaggaacacccgcccaagaccagcagggacacagcaggacaagaacgacagaaagagcaggcagcacacacagaaaga

SEQ ID NO: 137781 - RNA, 77 nt, Homo sapiens
acccccacaccgccaccaggacaagaagcaccaaacccaccagcgcgaaagcaaaagagacccgacagagagaagag

SEQ ID NO: 137782 - RNA, 68 nt, Homo sapiens
gacgcccaccgcccaggggacaagaaacggggggcggaggcacaggagaagagaaaagggaaggcacg

SEQ ID NO: 137783 - RNA, 59 nt, Homo sapiens
caagcgaaaacagaccgcgagcccagaggcgcccgaggacgggggaaaaggagccaaac

SEQ ID NO: 137784 - RNA, 85 nt, Homo sapiens
cggaaaaggcccaggagccaaggagcagaaaaacgagcgccggaggcgaggagcgccaccagcccgccacggcagccagcccccc

SEQ ID NO: 137785 - RNA, 78 nt, Homo sapiens
acgccacgcccggcgcgacacaagaaaaccacaagaacgcaccccccaggacgagaacccccgcgaaccagaggaacc

SEQ ID NO: 137786 - RNA, 61 nt, Homo sapiens
cggggggggcaaggcgggaggcacgggcaggagggaccaggaccggcaaaggacccagccc

SEQ ID NO: 137787 - RNA, 74 nt, Homo sapiens
ggcccagcgagcgacggcaaaagcagggcagcgcaagaccccgcacggaagcagcaagcacaggcagcgcagag

SEQ ID NO: 137788 - RNA, 70 nt, Homo sapiens
cgagcgcagggggcaccgagcgggaaggaagaaggcggaggaacacaccgcgccccgaaagcagcagccc

SEQ ID NO: 137789 - RNA, 71 nt, Homo sapiens
accaggaaagaagggggcagaagagggacgaaggaagaccaaggaagaacaggcaagcgaaaaagggaaaa

SEQ ID NO: 137790 - RNA, 71 nt, Homo sapiens
gagggaacagggaaggaacccgggcaaacaggaccacaggcccggaaaaggcagccaccggaagagaaaac

SEQ ID NO: 137791 - RNA, 74 nt, Homo sapiens
ccccgggccgaccgagagccgggacgaacagcgggccgcagccaagcgccgccggaacaaccggaaagcaccag

SEQ ID NO: 137792 - RNA, 78 nt, Homo sapiens
gacgccgacacgggccgcgccagcccgacagagaaaggcacaacccagaccagagaagcgaccagacgcaccagagac

SEQ ID NO: 137793 - RNA, 73 nt, Homo sapiens
agacgagacaagccaacaaaaaacgacgggcaacacgagcacggacaagccggagcagacagcgaagaccccg

SEQ ID NO: 137794 - RNA, 54 nt, Homo sapiens
cgcaccgcacaaaccaaccgaggagcgagcacaaacgacacacgcaaaccacaa

SEQ ID NO: 137795 - RNA, 81 nt, Homo sapiens
accgcagaaggccggagacaccagcagacacaccgaaggcgcaaaagacgaaaagacaaggacgaagaccaagcaaccgga

SEQ ID NO: 137796 - RNA, 75 nt, Homo sapiens
aaacggcagcgagacggccggccggcgccgggaaccacggccaaagaagagaggagcggcggaaaagaaaaggca

SEQ ID NO: 137797 - RNA, 84 nt, Homo sapiens
cgggaagagccggggccgggcgacaggagcaggccggacaagacgcagagagccgacagaccccgaagggacagggaaagagcg

SEQ ID NO: 137798 - RNA, 61 nt, Homo sapiens
cgcaccgccgaaaacgagacaaggcaaccaacccacagccaaggcccaacccccccacgcc

SEQ ID NO: 137799 - RNA, 79 nt, Homo sapiens
ggagccgagcggagcgccgcggcgcagccagaaccggaacaccaggaacgacacaggagcccgagaaaagacaaaaaac

SEQ ID NO: 137800 - RNA, 76 nt, Homo sapiens
aaaagacgcgcccccgccgcacggaaaagggcgacagagcgaaagaaacgagccaggccaagacgggaaagcaccc

SEQ ID NO: 137801 - RNA, 99 nt, Homo sapiens
cacacggaccggcccagcgaagacagcagaggggaccgaccccaaaaacgggcccagaaaggaagcgcccaagcaggaggaaaaaggagaagacaaaac

SEQ ID NO: 137802 - RNA, 67 nt, Homo sapiens
caccccacgggaaagcaggagcccaccgggaggaaccagagacacgcgagacccgcggaaggagcca

SEQ ID NO: 137803 - RNA, 73 nt, Homo sapiens
gccacgagagaggaggcgcgcgcgcgccgagccgcgggcccgcaggaggagcagcgacgagaaagagcaagag

SEQ ID NO: 137804 - RNA, 79 nt, Homo sapiens
aacaaggcgcaaccagggggcaaccccaaccccaccacccagagaggggcagaaaccgagagacagacagcaccacggc

SEQ ID NO: 137805 - RNA, 76 nt, Homo sapiens
aaaccaagaaccagaacggccacagaacacagacaccagaaaggaagaagaacagaacccaggaagagcacaagca

SEQ ID NO: 137806 - RNA, 105 nt, Homo sapiens
gacaagaaacaaaacccagccgagcagggcagcagcagaccaaggaaagcaacaacggaaaggcacaggacccaaggagaaacaagaaaagcaagggcgggcaag

SEQ ID NO: 137807 - RNA, 74 nt, Homo sapiens
aagggcccgggccgaggcgaccagcaggaggaaaaaaaagaaggagccaagaggcccgaagccggccacgggag

SEQ ID NO: 137808 - RNA, 76 nt, Homo sapiens
cccgcaaacgaaaaagaacgacagagcaaccaggaaagaagagggcaccggcacggaccaccccaacaccggggga

SEQ ID NO: 137809 - RNA, 53 nt, Homo sapiens
cagagaaggagcacccgggaggagagaaagaacccacgcaggacgacagaaga

SEQ ID NO: 137810 - RNA, 81 nt, Homo sapiens
caagagcggcacgggaacagcggcgagaccagaccaggacaaaggaaaagaaggaggccagcgggacacacaaagaaagac

SEQ ID NO: 137811 - RNA, 67 nt, Homo sapiens
gaaaaggacgggcccccaagaaaccaagaaaaagacgcgaaaaagacagacaagagaagagaggaaa

SEQ ID NO: 137812 - RNA, 79 nt, Homo sapiens
gaaaggcacaagcaggggcggaagccacacaggccagaacgaggccaaaacaagcagaagcaagaagagaaaaaccgaa

SEQ ID NO: 137813 - RNA, 71 nt, Homo sapiens
gccaagaccagaaccagcccgggaaagcccggcggcgcggccgcccacgccgaggagcagccagacacaag

SEQ ID NO: 137814 - RNA, 71 nt, Homo sapiens
gaacccgaccacccggcggggagcacggaggccgccaggcacagagaaggcaaacgggagggcgaggacac

SEQ ID NO: 137815 - RNA, 48 nt, Homo sapiens
acccaccggaccgagccagagcaaagcgaaaccaggcaacaaaggaag

SEQ ID NO: 137816 - RNA, 70 nt, Homo sapiens
ccccaacccaccggcggaggggacgggcccccgagacaggagcaggagagggagggggacaggggcgggc

SEQ ID NO: 137817 - RNA, 59 nt, Homo sapiens
gcccaggaccaaaaaagggagacaacagccacacaaagcagcaacaggagcagggaaga

SEQ ID NO: 137818 - RNA, 79 nt, Homo sapiens
agcgggaagcggccagccgagcaagcggaggaccacgccggccgggacgagacaagggcaacgagacacccagcggccc

SEQ ID NO: 137819 - RNA, 77 nt, Homo sapiens
agaaaagaagaacagagcaaacagacggaagaggaagaaaacacgaagaaacgcaggagcccaccgcgagcccccag

SEQ ID NO: 137820 - RNA, 77 nt, Homo sapiens
acgcgaccagcagcagaagacggccgagacgggagacagagaacgcggggacagggcgagggagaggcgcaggcggc

SEQ ID NO: 137821 - RNA, 82 nt, Homo sapiens
cacgggccccagcagcccaggcaggaaaggagccccgggaacacccagagaacgagaccgggaagggaggacccaaaaaacc

SEQ ID NO: 137822 - RNA, 81 nt, Homo sapiens
agaccgggacagaaggcaaggaacgagcaggaagggcccaacaacgcaccggagaagggcagaggaagcgcaaaaaccaag

SEQ ID NO: 137823 - RNA, 61 nt, Homo sapiens
gccccaaggccagacaaaacgggccccaaaaagaaagagcgaaggggcccgagagacaccg

SEQ ID NO: 137824 - RNA, 69 nt, Homo sapiens
gaggacgcacccggggaaccagcaaacaagggagaagaaaaagcagaaaggaacagaaaacaaaagaac

SEQ ID NO: 137825 - RNA, 87 nt, Homo sapiens
cggccaaggcgggcgcgggggccggggcgcgcgcagcgaccggacagaagacagaccgacagacgccaaaccacccgagagaagcga

SEQ ID NO: 137826 - RNA, 80 nt, Homo sapiens
gaggccgacccgaggagcaacccccaaaagacacagaagaaaagcggccaggcgagaagacagaaggagccacagagaac

SEQ ID NO: 137827 - RNA, 43 nt, Homo sapiens
ccccgccacgcccgccacgaaagaaccaagagggagacaaggg

SEQ ID NO: 137828 - RNA, 80 nt, Homo sapiens
gggccaccacaaggcacagacgaaacagcaaccagagcccacgcagagcccccccacaaacaggagaacagcagcaaccc

SEQ ID NO: 137829 - RNA, 58 nt, Homo sapiens
ggaccgcgccacaaggagagaaccgaaaccaggggaggacacggacgagccaccccaa

SEQ ID NO: 137830 - RNA, 92 nt, Homo sapiens
cagggcaaggcggcgggacgccagagcaacggaagaagcaacgagcgcgcccgcgcccggggcggccaagggcccagggcgcacgcaaaggg

SEQ ID NO: 137831 - RNA, 75 nt, Homo sapiens
cggcgcagcgacaggcccccgccggcccgcccaggcccacccagcggcggcaaagaaaaaaaggaaaaagacacc

SEQ ID NO: 137832 - RNA, 61 nt, Homo sapiens
cggagcccgcagaccgcagaaggccggagacaccagcagaaacggcgaggaaagagaggag

SEQ ID NO: 137833 - RNA, 75 nt, Homo sapiens
cgcgaagccgaggccccgcaacggcaagaccaagaggggggagaccggaggacccccaaacaacccggagaggca

SEQ ID NO: 137834 - RNA, 57 nt, Homo sapiens
agacaacgccaacccaaggaaggaccaaacggagaaccagggcccgacccgaaaagc

SEQ ID NO: 137835 - RNA, 79 nt, Homo sapiens
ccgccgccgccgccgcgggcgccagaaggaagaggcggacggaggagcaggcgagaagagaagcccgggcaccagccga

SEQ ID NO: 137836 - RNA, 68 nt, Homo sapiens
cgcaccaagaaacagccccacggcaggaagaagagcaccggcgacaaaggacagccaccccgacaccc

SEQ ID NO: 137837 - RNA, 83 nt, Homo sapiens
ggcgggagggaacgggacagcggccaccaaaccaaccgcagagagaggccagccggccgaccgcacagacgaccacacgcgcc

SEQ ID NO: 137838 - RNA, 71 nt, Homo sapiens
caaacccccacacaggacacaggggcggaaaaaacaaggagcagagaagccaaagacagcaaagggacacc

SEQ ID NO: 137839 - RNA, 32 nt, Homo sapiens
aaaccgcacgcgagggagccagcacgagacaa

SEQ ID NO: 137840 - RNA, 55 nt, Homo sapiens
agaggacgggagaccagcaggcaaccagccagagggcaccggcaacccacaggcc

SEQ ID NO: 137841 - RNA, 68 nt, Homo sapiens
accccagacccccagcgcggcacgacgcggaagaagaagaggcaccacaacgcaagagaaaacaccag

SEQ ID NO: 137842 - RNA, 74 nt, Homo sapiens
ccggcccgaccaggccccgcagacccaacggaccccgcaagcaggcaaccgaccgaacggcgccccggccgacc

SEQ ID NO: 137843 - RNA, 81 nt, Homo sapiens
ggccccgagccccccggagccggcaccccacgaaacgcaaggagcagacagaaccacaccaccggagagaggggcgccagg

SEQ ID NO: 137844 - RNA, 71 nt, Homo sapiens
aaggaagggccacccaggacaggggcacccaggcaagggcagacgggggaggaggacgcaaagacaagcca

SEQ ID NO: 137845 - RNA, 74 nt, Homo sapiens
ccgaagagccgccccagggaacgcgcaacacaaaggaggaagaggcagagaggacggaccagcaccacccgcca

SEQ ID NO: 137846 - RNA, 73 nt, Homo sapiens
gccagaaaacccgcgagcaggaaccccaggaaacggccagcaaggaagcgagccaacaggagccgaaaccgga

SEQ ID NO: 137847 - RNA, 73 nt, Homo sapiens
ccagccccggggggaacgggcacagggcaggggggaccaggagcgcaacacagacaaacgaagaaccccaaac

SEQ ID NO: 137848 - RNA, 77 nt, Homo sapiens
cggaccagaggaaagcccagccaccgggaaaaccagagacccagacacgcgaaggaacgaaaggccaaaaggcaaaa

SEQ ID NO: 137849 - RNA, 70 nt, Homo sapiens
cggaggacacggggaaccaacagaagaaggaaaggaaaaggcgaaaccagcaggagggagccagccaagg

SEQ ID NO: 137850 - RNA, 57 nt, Homo sapiens
ggaggacgaagagggggagcaagagagaaggacgacgcaggaaagagcaagaccaga

SEQ ID NO: 137851 - RNA, 83 nt, Homo sapiens
gagaagcccggcgacggaggaacgcaggcgcgccaggaacaagaggcagaaacaacagcaagaaagaggcccgaaaaagacac

SEQ ID NO: 137852 - RNA, 74 nt, Homo sapiens
ggaccgggacgccacagccagggccgaagggagagggagaacgcgccagccaggcagacccgcccgcgcaaagc

SEQ ID NO: 137853 - RNA, 83 nt, Homo sapiens
cgaaaacccaccgagcccgccaaagcaggcgaggacaacaccgcgccccagcggcgggcgaccacagcacgccgccgcgcacg

SEQ ID NO: 137854 - RNA, 76 nt, Homo sapiens
ccaaccccacagggcccggcacacagacacacccgcggcagaagcccccggggagagacagacagagggacacaga

SEQ ID NO: 137855 - RNA, 67 nt, Homo sapiens
gaccaacccaagggaaaggagaaccagaaaacacgcaagcggacgaaaagaacaagcgcccggagac

SEQ ID NO: 137856 - RNA, 72 nt, Homo sapiens
cagaccagaaggaggagcccgacacggccaaaggcccaaacaaaaagcaggggggaggcaccacccaggacc

SEQ ID NO: 137857 - RNA, 74 nt, Homo sapiens
cccggccaaggaccgggaggacgaaccaagaaacaaaagggaagaccggaacggagacgcacaacaaggggcca

SEQ ID NO: 137858 - RNA, 58 nt, Homo sapiens
ccagccaacggacagcggagcacgagagaagggccagacggcagcggaaggcgaggac

SEQ ID NO: 137859 - RNA, 81 nt, Homo sapiens
gcgcaagccaaagccacaagaacaagagaggggagcacagagaaacggagaaggagaaaccgagaaaaagccgggaggcac

SEQ ID NO: 137860 - RNA, 69 nt, Homo sapiens
ggcagacaaaagggccaaagaagggagaggaagacagccgccaccaggcgcccccccagcaaccaccca

SEQ ID NO: 137861 - RNA, 37 nt, Homo sapiens
gcgcaaaaaacgcgggaacagccacgccaggaacaga

SEQ ID NO: 137862 - RNA, 79 nt, Homo sapiens
gccacccaacccggaaaggcagaagggaaggagcagaacggaggggaacacaaaaaggcaaaagcagaccggaaaaccc

SEQ ID NO: 137863 - RNA, 100 nt, Homo sapiens
ccagaacgcggcacaagccgggcggggcaaggagcggcggcgcggaaacccagcggcggcagaaccagccggcacaaagccgaaccagagagagcaacgc

SEQ ID NO: 137864 - RNA, 81 nt, Homo sapiens
gagcacaaaaagaaagaagagaaccagagcgagggcagcagaaaaccaggcccgaaggaacagcagcccaccgccccacag

SEQ ID NO: 137865 - RNA, 79 nt, Homo sapiens
caggagacacaaaacccagacaccgacgggccgcgaggggaagaggaagcaaagccaagggcacagaggaccaaggaag

SEQ ID NO: 137866 - RNA, 77 nt, Homo sapiens
aacccccggcacaccgaggcggccaaagcaggaccggacggagaccccaaagaaacaaagagcaacaccaaacaggc

SEQ ID NO: 137867 - RNA, 76 nt, Homo sapiens
aacccagcggagcagggaggagccccagccgcgggaagggaccagccaacgagaggagcccaggaggcgagcaagg

SEQ ID NO: 137868 - RNA, 52 nt, Homo sapiens
gccaaaccagagaaagaaacacccgaacagcgaagggacgaacgggaacagg

SEQ ID NO: 137869 - RNA, 71 nt, Homo sapiens
ggagaaggaccaagaaccagggcgagcgccgcccaaggaccaccaccgcgaagcacgagggcggagcccga

SEQ ID NO: 137870 - RNA, 81 nt, Homo sapiens
caagaaaagcaagagaagccgaggagagccaagagcagaggccaggaggggcccagcccggccaggaggcggcggaaaaag

SEQ ID NO: 137871 - RNA, 78 nt, Homo sapiens
aagagagagaaaaaggacaaaagccaagaggaggacagcgcacacagcaagcacgagggaacacgagccaagcgagga

SEQ ID NO: 137872 - RNA, 65 nt, Homo sapiens
cgaccagccgcggagccgggggcaggagaaagaggacacggccgacagacagcgggccggggcag

SEQ ID NO: 137873 - RNA, 67 nt, Homo sapiens
ccggagcagcaacgcaagacaccggcacgcaacagcaaccacgacggcagagacaggagaggagagc

SEQ ID NO: 137874 - RNA, 70 nt, Homo sapiens
ccggcacagagccccccccccagaggaagcccaggggcacgggcacagcccagaagaccagcgagaggcg

SEQ ID NO: 137875 - RNA, 76 nt, Homo sapiens
gagaaagcacagaaaccaaagccagccagaacggagacacagcgggcccccaccacgagcggcaagaacaaaacag

SEQ ID NO: 137876 - RNA, 83 nt, Homo sapiens
caaaacaacagaggaccaacaagcagagaaggggacccaaacacaaggcggaccggaagcgagcaggagcagagcggaagacc

SEQ ID NO: 137877 - RNA, 55 nt, Homo sapiens
agaaaccgagccccggagcggcagcccccgaagccagaacccgggaccaaagagg

SEQ ID NO: 137878 - RNA, 69 nt, Homo sapiens
gacaggcaggcagaagaacagaccagaacagggccaaacggacagggccgaggggaaaggcgaggacga

SEQ ID NO: 137879 - RNA, 78 nt, Homo sapiens
gcaggaaaaggcgggggaagaggagacaggggaggcaaaacagcaggcgggacagagggaagaaggccggagagagga

SEQ ID NO: 137880 - RNA, 55 nt, Homo sapiens
acccagaggcagagccgccccagcagcaggggcgccagcgccgaacacaaggaga

SEQ ID NO: 137881 - RNA, 70 nt, Homo sapiens
cgggagggcgcagcggggacgcggacgcacgggaaagggagcagcaccggccacacccacagcacgaccg

SEQ ID NO: 137882 - RNA, 52 nt, Homo sapiens
cgacacgccgcgaaaacaagacagccagaggaaagccgcagcggggagaagc

SEQ ID NO: 137883 - RNA, 32 nt, Homo sapiens
gccaggggaccggcccggaggccgggcagggc

SEQ ID NO: 137884 - RNA, 80 nt, Homo sapiens
aggcgcagggcgcagcggcagcaaggggcggaacaccaaccaggaccacccagcaagcagccagccaacagagggcccac

SEQ ID NO: 137885 - RNA, 73 nt, Homo sapiens
gagaacacagggagcggccgaacggcaaggccaggaacacagcggaagacccgcccaaaggaaggaaccgcaa

SEQ ID NO: 137886 - RNA, 78 nt, Homo sapiens
gagagccggcggggcggagcaggaaagcgaagccaacaaagaaaggaccggggcaaaacggccagaaggcccaagccc

SEQ ID NO: 137887 - RNA, 58 nt, Homo sapiens
cccgcgggcccgacccaacaggacacgaaagcacacacagaccagccaccacaacagc

SEQ ID NO: 137888 - RNA, 69 nt, Homo sapiens
acgacaaggagcaggcgaacaagaagggaagacaacacgggggagggacaaaagcggaaagcgagaacc

SEQ ID NO: 137889 - RNA, 81 nt, Homo sapiens
ccaccgaggccgacccagccccaggagaagcaggcagggcacaccaaaaaggacaacaaccaggcaacgccacaaacacaa

SEQ ID NO: 137890 - RNA, 68 nt, Homo sapiens
aacacgaggcagggggccacacgcaaggggaacagagagccaacggaccacaacagagaaccaaggac

SEQ ID NO: 137891 - RNA, 86 nt, Homo sapiens
gacaggaggagacaggcgagagaggaggacacgaccgggcccaaaacgacagacgcgaaaggggacgacgaagaggaacagagagg

SEQ ID NO: 137892 - RNA, 76 nt, Homo sapiens
cggcggacagccgcccgcgccggagaaccggcccaagagaaacccagacgcacaaaagagaaaacgaaaggaccga

SEQ ID NO: 137893 - RNA, 71 nt, Homo sapiens
gaagggggcccagccaaagaaaggagcaggaagaagagagccaagcgaacgccgaggaacagggacaacgg

SEQ ID NO: 137894 - RNA, 78 nt, Homo sapiens
ggaccgggcacgggaacaaacacgagaaaaaggcacaaacccagcacagagaagacggcgacaagcaaaagacgacgc

SEQ ID NO: 137895 - RNA, 88 nt, Homo sapiens
caaccgcccgaaccagagccggaggcgggaggacgggcgccgcagaagacgaccccgacgcaggccaggagccgcggacagaagccga

SEQ ID NO: 137896 - RNA, 79 nt, Homo sapiens
gcaaggcacaacgccacgaggcacaccccagcaaggggggggagaccgagacgggcccccagcccagccgggagaaggg

SEQ ID NO: 137897 - RNA, 83 nt, Homo sapiens
gagagacgcagaggggcggcgggggagccgccaggcagcacacaaagcaggagacccgaagccaacacagaaccacagagacc

SEQ ID NO: 137898 - RNA, 74 nt, Homo sapiens
gaggcgagcgggggccgggcagggcaaacgaagaaaacgacccagccagaggacaaaggaccgaggacagggaa

SEQ ID NO: 137899 - RNA, 75 nt, Homo sapiens
gcagaccgcagaaggccggagacaccagcagggccacgcaccagcggaggcagggcacaagcaggccacgcaccg

SEQ ID NO: 137900 - RNA, 67 nt, Homo sapiens
aagaaaaccaagagaccagacaagccccccggacggcaaaagcacgggccaggcacaagccacccgg

SEQ ID NO: 137901 - RNA, 67 nt, Homo sapiens
agcggagcgccaagcccggccaaaaagcgcagggagcaggagaagcggagcgaaggggcgggcaggc

SEQ ID NO: 137902 - RNA, 73 nt, Homo sapiens
cgcccgacgcccggcgcacggggcgcacaccacggcccggaggacagcagcggacggccggaccaagaggcgc

SEQ ID NO: 137903 - RNA, 72 nt, Homo sapiens
aagacgagaggaggaagagacgcaaccagggagaggagccgcaagccgaacaaggacccgagacaaggaaaa

SEQ ID NO: 137904 - RNA, 96 nt, Homo sapiens
gagagcacccagggaaaggagacaaggaccgaaacagaaacggaacaccaaggagaagacagaggagccagaccaagagacagcacaggcgagcga

SEQ ID NO: 137905 - RNA, 71 nt, Homo sapiens
cacaacccccagacgcaagccaagcagcgcgcagacaggacaaccagcggaggcacgacgccaaaccaaaa

SEQ ID NO: 137906 - RNA, 81 nt, Homo sapiens
cgaggagggcacgagcccgaggcgagcccagggaggcccagcgaagagaaagaaaacaagaagcccggaaggccggcacaa

SEQ ID NO: 137907 - RNA, 91 nt, Homo sapiens
aaagccaacaagaggaagcaggaaaaacaaagaagacccaggaaagaccacagcaagaccacgcccccagccgggggaccaggccgaacga

SEQ ID NO: 137908 - RNA, 56 nt, Homo sapiens
ggccaccccggggagccaaccagggggggccccagcccggccgaacgggcgcacga

SEQ ID NO: 137909 - RNA, 58 nt, Homo sapiens
aggacagcgcacacagcaagcacgaggagaagccccggggaaagaggaggaaaacaaa

SEQ ID NO: 137910 - RNA, 78 nt, Homo sapiens
acggggcacgccaccaccaaggcgaggagacacagggacggccgccccgcaaaaaggaaaccaacaccagcccggggg

SEQ ID NO: 137911 - RNA, 61 nt, Homo sapiens
cagcgccggcccccaggcgaagaagcgcagccgcaccggccaaggcacagggaacaccaga

SEQ ID NO: 137912 - RNA, 76 nt, Homo sapiens
ggaaagcccgcgaaacggagacaccaaaccgcccagaggcgggacgcccaaaccagggcaggcccccgggcacgga

SEQ ID NO: 137913 - RNA, 87 nt, Homo sapiens
ggccagagcaaaaggggccccacggaggccacagccacaacaacccaggggccccacgccggcggaggcggacaacaccggcaaagc

SEQ ID NO: 137914 - RNA, 80 nt, Homo sapiens
cagccagaaggaagcaaagaccaaggccgcacgcggccagaagagcggcaggagacacaacagcaacaaagaagacgagg

SEQ ID NO: 137915 - RNA, 60 nt, Homo sapiens
gagacccgcacaccccgaagggggaaagcggaaggagagacaggaagggcacagaaacgg

SEQ ID NO: 137916 - RNA, 114 nt, Homo sapiens
cggggaccgagccgggaggccggccgggccagcacccggccgagacggcggcagcagcggcacaggcgcaaaaaccagacaccccacaccaccacccagacgaccaaaagggca

SEQ ID NO: 137917 - RNA, 60 nt, Homo sapiens
gagggagaaaaacaggcagggacacggaagaaccaggaaaagcggccaggaccaccaggc

SEQ ID NO: 137918 - RNA, 64 nt, Homo sapiens
caaagaggagagagaaaaggagacgaagagcaccaggaggcgaagacgcagcgaagaaggaaag

SEQ ID NO: 137919 - RNA, 111 nt, Homo sapiens
gccagacccgcccaacagaaaaagagaggagggagaacacagaaacccgccccggagcaagaagaagcgcccagaagaaaagagagaggaaaaggaaggaggcaacgcaga

SEQ ID NO: 137920 - RNA, 72 nt, Homo sapiens
cggcgcgaccacgcccggcgccccaccccaggcggcagggcagcccaggcccggccccagcaggagaggcca

SEQ ID NO: 137921 - RNA, 77 nt, Homo sapiens
cggcgcagcgggcaagaaacacagcgccgggagcccagcggaaggcgaacacccgcaaacaccacccaagcaaacag

SEQ ID NO: 137922 - RNA, 62 nt, Homo sapiens
gcgaggacggcggaccccgcggcgggaggagccgccccgaggaacgaaacagacggaggcag

SEQ ID NO: 137923 - RNA, 68 nt, Homo sapiens
aaggaccaagaaccagggcccgacccgaaaagcgcagccaaccagacgcgcgaagaacgggacaggca

SEQ ID NO: 137924 - RNA, 80 nt, Homo sapiens
ccacgaaccaaaagggacggacaaaggaacaggaccaggcgcgagaacagacccagcccgaggaaggagaagaggcgcca

SEQ ID NO: 137925 - RNA, 81 nt, Homo sapiens
cccgcggcgaagggaagaggcccagccggcccgcgggggagccccgggagccgcacggcggagggaaggccggagaggccg

SEQ ID NO: 137926 - RNA, 79 nt, Homo sapiens
cacacgcccgggcgggacaagcggcaagaaccagacccaaaagagcaaacaaccgacggagaaggaaaaaagccgagaa

SEQ ID NO: 137927 - RNA, 75 nt, Homo sapiens
gaggagcagggaaaagaccgaggcagcaccaccgaccagccacccagacaggaaagcaccccacgaacaaccaca

SEQ ID NO: 137928 - RNA, 70 nt, Homo sapiens
aaagaacacaagaaaccaccaaaagggcaggcacgcggaaagcgaaaaccaaagcggcgggaaaggaagg

SEQ ID NO: 137929 - RNA, 90 nt, Homo sapiens
ccgagcgggaggccacagcagccagccggcccgaggacaccgacaccagcagcaggcccccacgggaacgacgccgcgagagccagggag

SEQ ID NO: 137930 - RNA, 77 nt, Homo sapiens
gcccgcagcccccgccggccgcccaacaccgaacaccggcgggaccgggcccccaacccgggcacccaggcgaggag

SEQ ID NO: 137931 - RNA, 58 nt, Homo sapiens
ggacgcgacgagcccggcaaggagggacaagcaaggggccaaggagccaaggaggaaa

SEQ ID NO: 137932 - RNA, 79 nt, Homo sapiens
cgccgccgccaccgccaaggccaaaacagaagaggcaaagcccagccacagcagcagcccagcagcaaacaaccaaaga

SEQ ID NO: 137933 - RNA, 88 nt, Homo sapiens
ccagagcccaaggaccagcagcagggaagaacgaggggagaagccccccgacagcagcggaaggaaagcagaagcagaagaggaggag

SEQ ID NO: 137934 - RNA, 66 nt, Homo sapiens
gcccacacacgccagcagaccaccccgggagggagagaacacccacgaagcaccgccccacgccga

SEQ ID NO: 137935 - RNA, 80 nt, Homo sapiens
ccaggaggcagaagccagcagacacggcccgggcaaacagcagaacgcaagaggggaaccacccaccgagcgcaccccag

SEQ ID NO: 137936 - RNA, 36 nt, Homo sapiens
gagccagaagaagggaaagggggacaagcccacccg

SEQ ID NO: 137937 - RNA, 71 nt, Homo sapiens
gcagcccacacagggcagacagaccgaaaacacgaagcagcagaggaacgcagagcagggagcgaacgcgg

SEQ ID NO: 137938 - RNA, 74 nt, Homo sapiens
gaaggagccgacggcgcaaggagagagacacaccgacacacgaggcggccagacaacaccagagggaagagaca

SEQ ID NO: 137939 - RNA, 73 nt, Homo sapiens
aacaaagaacggacccacaccgaggcacccgaagaagagaccaccaaccaggagaagccagcaacagggaaac

SEQ ID NO: 137940 - RNA, 83 nt, Homo sapiens
agaacgcaagaagagggcaaagacaggccaccacaggaggagcagcgaacaggcaaggcgcaccacgagggcacgcagacaac

SEQ ID NO: 137941 - RNA, 76 nt, Homo sapiens
agcaccacacggagcagagcacgaccggcccgaggagccacgcagcacacagagggggggacgagagacaaagagg

SEQ ID NO: 137942 - RNA, 47 nt, Homo sapiens
caccgcgcacgccagcagcaagcagagaggcggaccccgcgggcgcg

SEQ ID NO: 137943 - RNA, 66 nt, Homo sapiens
aacggagagggaaccacccgacacacagccaggcccacgggaaaaggccagggaagaaaggaaaaa

SEQ ID NO: 137944 - RNA, 76 nt, Homo sapiens
cgaaaacggaaaacccgaaaaggagaaccaagaagagggcccccccaaagacccaaacgaacaaagcccggagacc

SEQ ID NO: 137945 - RNA, 82 nt, Homo sapiens
ccgccgccacaaaggcagcagcacgggacgcacggcccggggggagacagccacgggaaggccccggagccagcgggggcca

SEQ ID NO: 137946 - RNA, 51 nt, Homo sapiens
aaaggaaccaaccccaagaccgcaaaacgggacaagcccgcacgcgcagag

SEQ ID NO: 137947 - RNA, 83 nt, Homo sapiens
gaggaggcggaggacgagaggaggaaacagcgcggagaccccagacccccagcgcggcacaaagcaccgggaggaaagagagc

SEQ ID NO: 137948 - RNA, 78 nt, Homo sapiens
aggaaaaacaacagcacacagcaaaagagacagacggacaacagcccaacaacacccagcccgacccccaggaaccac

SEQ ID NO: 137949 - RNA, 80 nt, Homo sapiens
cgggcgcccaagcgacagcgcagaggggcaggagccgggagccaccgcgaagcgcccagcgccagggagccaccccagcc

SEQ ID NO: 137950 - RNA, 81 nt, Homo sapiens
aacggcgggccccggcgaggcagcgcggccgcagcagcccaacagacacaagggcagaaggaaggcagcgcagagaaagcg

SEQ ID NO: 137951 - RNA, 60 nt, Homo sapiens
caacacgcacaaaaagggcacaccagcaggaggagagaaagaacccacgcaggacgacag

SEQ ID NO: 137952 - RNA, 69 nt, Homo sapiens
aagacccagacccgcccgccagaaccgcgcgccacccacaaccaggaggccccgggggccgcggcccgg

SEQ ID NO: 137953 - RNA, 81 nt, Homo sapiens
cggggccggcccgcaaggcgcccccccagagagccagaaagaagacggggaggacgcacgacgcgcggcacgggaacgcag

SEQ ID NO: 137954 - RNA, 75 nt, Homo sapiens
gagcgccaacaggaccagaccccaggggcgcagggccaccagcagagacccgccggaggcacagacagcagacag

SEQ ID NO: 137955 - RNA, 77 nt, Homo sapiens
acgaggggccccagaccgagagccgcccggaccacaccaagggggaaccggggcccgcgaggaaggacgccgagagg

SEQ ID NO: 137956 - RNA, 81 nt, Homo sapiens
agaggcccaagaacacgaaaccaacagcgacaaaaggacaaaagcgagcagagcgcaaaaagcagcgcagcacagaaagag

SEQ ID NO: 137957 - RNA, 80 nt, Homo sapiens
gcgaggagaacgcccgcggacgacccgaggaaggggaaaaccgccgccacccaagacagcggggcagggcagaagaggaa

SEQ ID NO: 137958 - RNA, 90 nt, Homo sapiens
ggcggggggcccgggcgccgagccgcaggagagacacgcgggccgaccccagagcggcgcggacagaccagagcagaaacagccaacacg

SEQ ID NO: 137959 - RNA, 101 nt, Homo sapiens
cacaggagaccaaagccagaccggggcccagcgcgacagcgcaaccggaccagcgacaaaacccgcgaaggacgagacgcgcaacaacccgagcgcacggg

SEQ ID NO: 137960 - RNA, 73 nt, Homo sapiens
cagggggaacagcaggaaagccaggggcagggccccaggacagcaagaaccaggagacccgcccacagaccaa

SEQ ID NO: 137961 - RNA, 75 nt, Homo sapiens
cgaggagaagggagaggaagcgagacccagacggggaagcggagcacaggaaccaacagaggcaaaacccgacgc

SEQ ID NO: 137962 - RNA, 70 nt, Homo sapiens
acgagaagcaagagaagccaagacgaaggaaagcgcaggacagagcggaagcgcagcacccacccggggg

SEQ ID NO: 137963 - RNA, 87 nt, Homo sapiens
ccgagacagcgggagccggcggcgagcggcaggagcacagaccagcgcgcgaccggagccccacagcggcacaggccccagccaagc

SEQ ID NO: 137964 - RNA, 67 nt, Homo sapiens
gaagaagacccaggaccacaacccagaagggggcagccaagcaaaaaggacagacaagggcaggaac

SEQ ID NO: 137965 - RNA, 75 nt, Homo sapiens
cgcagaggcaaggggccaccaggaggccagggggcgccagcagaaaggccccgggacagaggaggaagaggaggg

SEQ ID NO: 137966 - RNA, 62 nt, Homo sapiens
cggcgggggccagcccccagcccggagaagccaaaggcaaaggccaggccacacaagcccca

SEQ ID NO: 137967 - RNA, 102 nt, Homo sapiens
gcgcagccaaagaggaaagccacgcgcggggagcagcccgcacccggggccccggggcccagaggcccggaaagggcagcggagaggagacgccacagcacg

SEQ ID NO: 137968 - RNA, 69 nt, Homo sapiens
gacccccacaacgcggcagaggggaaaagggaggaggaggcaggcccagaaaccgaggcgcccgcagac

SEQ ID NO: 137969 - RNA, 85 nt, Homo sapiens
cccacgagccccgcagcgcagccgccgaccacggcgacggacacgaggagcagaagcagcccacagaagaggccgcggcaccccg

SEQ ID NO: 137970 - RNA, 79 nt, Homo sapiens
aacagacccaggccagagggaaaagcaagagcccaaacaagcacaaccaagcagaagagagaggagggcacaaaggagg

SEQ ID NO: 137971 - RNA, 83 nt, Homo sapiens
caccacccgcccaggccagccccagcagcaacagcagcacagaccgcaacccaccaaggagcacaggacgaagaggaaggaaa

SEQ ID NO: 137972 - RNA, 76 nt, Homo sapiens
gaaagagaccgggacagaacagaacaaccgccagggaacagcaaaaaacgagagcagcaaagagcaagcccaaacc

SEQ ID NO: 137973 - RNA, 73 nt, Homo sapiens
caggcagccgagaaggcgacggcccgccagcccacgggaaagccggggcacgggagccacggacccgcgccgc

SEQ ID NO: 137974 - RNA, 78 nt, Homo sapiens
gccggggcgccaccccgcccccgaggggccgcaggccaccagcccccgggccaagagcagcacggagacagagccaca

SEQ ID NO: 137975 - RNA, 85 nt, Homo sapiens
gcagaagcgcgcagcaacggcgggaaacacagaggccaacagcaagagcaaccagggaccaccccacaacagggaaccaccccag

SEQ ID NO: 137976 - RNA, 72 nt, Homo sapiens
aagaaagaagacggacacacggagcgacacgagaggccccggggagccggaaggagaccagagaaaaagaac

SEQ ID NO: 137977 - RNA, 76 nt, Homo sapiens
agaaaaagcgaacagacagacgagggagaggagacgaagaagcgaagacaggcgagggccagcggaggcccacacc

SEQ ID NO: 137978 - RNA, 77 nt, Homo sapiens
aaacggggagcagcgcgggaaaccaaagaagggcagcccagcccaaacaccgaaggcgacagacgggcaagagcaga

SEQ ID NO: 137979 - RNA, 77 nt, Homo sapiens
cacaacaagaaagcagaaacgaaagaaagcaagagaagcacacaaggaagacaggaggccagagcgaccaaaccgca

SEQ ID NO: 137980 - RNA, 74 nt, Homo sapiens
ccacgaagggcgacggacagaggagagcccgaccagagaaaaggcggaagaccgccaaaaaggacacggagcca

SEQ ID NO: 137981 - RNA, 80 nt, Homo sapiens
ggacccagacccagacgggagaaggaagaccccaagcagcagcaaaaaggaaaaccgaaggcaaaacacgcgacaggagc

SEQ ID NO: 137982 - RNA, 75 nt, Homo sapiens
gcagaaacgccaaccacccgacccccagcagacgagcagcggagcgcacacaggacacagcaggggccagacaac

SEQ ID NO: 137983 - RNA, 71 nt, Homo sapiens
cacaaaaaaggaagcgaaaggacaagcagaggccgagggcggggcacagaaggggccgcaagcaaagcaca

SEQ ID NO: 137984 - RNA, 82 nt, Homo sapiens
gcgcgcccagagcggggccgcaggagcggaggcaagaggacgcccacagcgcagcaacgcgccacacgccagacaagccagc

SEQ ID NO: 137985 - RNA, 72 nt, Homo sapiens
cggcagacggcaggccagcgcagggaaaaacgggccaaccgacagaaccgacacacgaaacagcccaaccca

SEQ ID NO: 137986 - RNA, 77 nt, Homo sapiens
ggcgcgaggccgcagagcaaagggggcccccagggaggccgcacggcccacgcgaggcaaagccccacaagggacgg

SEQ ID NO: 137987 - RNA, 68 nt, Homo sapiens
acgagacagagagacggcagcagaaggggacacagaaaagggaagcagagaagggagaggcacggggc

SEQ ID NO: 137988 - RNA, 76 nt, Homo sapiens
gcggccacggcaacacgagccgccgacacagcccccgaggagcagccacaccagccccaggcgcccccccacgccc

SEQ ID NO: 137989 - RNA, 71 nt, Homo sapiens
aaggaggaagaggaacaacggaaccaacagacaacagccacaaacggggcagccccagaaagagcaaggga

SEQ ID NO: 137990 - RNA, 80 nt, Homo sapiens
cggcaccgcggagcaaaaaaagagcccgcaagaagaacagagacagcagccaaacccccagcagagaagaccagaaaggg

SEQ ID NO: 137991 - RNA, 80 nt, Homo sapiens
cggaagcgaggaggcccacacggccggcagcaccgcagccaggagcaaaaacaccacggcagccagcacaaacggagggg

SEQ ID NO: 137992 - RNA, 64 nt, Homo sapiens
cgggccgaggagagcggaggaggggggaggcggaccggcggaggaggcgggagcccagcccgag

SEQ ID NO: 137993 - RNA, 67 nt, Homo sapiens
gacgcaaccacccaaaacaccgagcagaacaccggcccacaaaacagggccgcacaaaccagggcag

SEQ ID NO: 137994 - RNA, 79 nt, Homo sapiens
ggacccgacgcccgcacggagccgcagacagggggagccgggaaggagaagagaaaacaacggacagccaggcacaggg

SEQ ID NO: 137995 - RNA, 34 nt, Homo sapiens
cgaaaccaccccagcgcggcagaccagggaaggg

SEQ ID NO: 137996 - RNA, 76 nt, Homo sapiens
caagcgcccaagcgcggacccggaggcggcgcgggggggcggagggaccaccaagcagaccgggaccccaaaccca

SEQ ID NO: 137997 - RNA, 74 nt, Homo sapiens
acgaagggagacggagcggcggcacccgggcaaccgccaggccaaagaccaacaggacggggcagacccgcaga

SEQ ID NO: 137998 - RNA, 90 nt, Homo sapiens
cccgaacagcaggcgccaccagcccggagcaccaggagacaaagccacaaaaacaccagaaaaaccaagcagaaaaggagcggcagcaaa

SEQ ID NO: 137999 - RNA, 78 nt, Homo sapiens
ggaccgagagcggaccgagagcgcgaaacgcacgagaaggccgggaagggggagaaccgggccagggaacgcaccccg

SEQ ID NO: 138000 - RNA, 77 nt, Homo sapiens
ggacacagccccaaacaggacgaaggcggcgaagcggaggcacccaccacgggccaggcgggccagaggcaagccgc

SEQ ID NO: 138001 - RNA, 43 nt, Homo sapiens
gaggccccccagccacgggaacacaggaaagagagacaaaaag

SEQ ID NO: 138002 - RNA, 82 nt, Homo sapiens
caccggagaaagcacaagaagaagcagaggaggcccacaggcccgcccggacaccgagcgccagaccaaaacgaagaagacg

SEQ ID NO: 138003 - RNA, 40 nt, Homo sapiens
gccccaagggcaccgggacagaaggcagagcagggggcag

SEQ ID NO: 138004 - RNA, 64 nt, Homo sapiens
accccaggccccccacagaaaaggaaagaacggagaaacccgcgacgaaccgcaccaaaccaca

SEQ ID NO: 138005 - RNA, 81 nt, Homo sapiens
ccaaaagcggggagaagagggaccgagggaaacccccggaggacaggccaggcacgaacgagacccaccagaaccaaaagg

SEQ ID NO: 138006 - RNA, 83 nt, Homo sapiens
cggacaagcccaggagccgaccagagagcagggggcacccgaggaggaagagggcagggcccacggaaagaagggaaacccgg

SEQ ID NO: 138007 - RNA, 80 nt, Homo sapiens
ggaaacagcaagcgaagccgaaaaagcgcccgagacgggcccgccgaaaggcgccacgcgggaaaacagcaacagaagga

SEQ ID NO: 138008 - RNA, 75 nt, Homo sapiens
gcaggagacaggccggacaggaggcagcacggcaggagacgaggagaggacagcaggacacccggaccccaccgc

SEQ ID NO: 138009 - RNA, 81 nt, Homo sapiens
ggagccgccaccgaggacggggcccaggacagaaggcgggcaaggagcgccccccgagcaccccccacagcccacgcagca

SEQ ID NO: 138010 - RNA, 80 nt, Homo sapiens
aggcgcggcccgcggggcgccaggcacgcgaggcccccagggagagcacaccgggacagccagccaacagcccaagaaca

SEQ ID NO: 138011 - RNA, 58 nt, Homo sapiens
cccccccaacaggcggcccagacggcagccaggagggcgcgaagagagacaccagaaa

SEQ ID NO: 138012 - RNA, 79 nt, Homo sapiens
cccgcgcgggacagcagcggagaccgaggagcccaggaggaggaacccacagacccccagcgagcggcggacaacagcg

SEQ ID NO: 138013 - RNA, 77 nt, Homo sapiens
gaacaccgaacaccagccgaaagggcccaccgcaaggacggagaagggaccgcacgccgggccagacgacaagaagg

SEQ ID NO: 138014 - RNA, 74 nt, Homo sapiens
cgcgcggcgcggggaccgcggcccgcgccgaaaagcgaaaagaaacaagccgcggcaacagcgaccccaagcca

SEQ ID NO: 138015 - RNA, 74 nt, Homo sapiens
gggcaaacccgagagaacggcggagagcggccgggaggaagcagagggaaccaggacagagcgaaacgggaccc

SEQ ID NO: 138016 - RNA, 78 nt, Homo sapiens
gaaggaaaaacagaacggcaaaccggaaaaaaacggcgccccccccaacccaacggcaccaaggaagagagaagggaa

SEQ ID NO: 138017 - RNA, 48 nt, Homo sapiens
cgcggccagcgaaaacgcccagggaacccacgacaccacgaacaagaa

SEQ ID NO: 138018 - RNA, 69 nt, Homo sapiens
cgccaacggaggacccaagcagggcacaggaacagcagaaaacacagagaaaacacggagaaacagcaa

SEQ ID NO: 138019 - RNA, 79 nt, Homo sapiens
cagggcgcccccggccagccagcgaagacagagaccacaccagaggagaaggagcagcagcggcaagacgcggaaggag

SEQ ID NO: 138020 - RNA, 80 nt, Homo sapiens
ggagggccgagccagccgcggccggaggagcccccaggcccagggaaaagccccgagccccgccgccccaccgcgaccag

SEQ ID NO: 138021 - RNA, 69 nt, Homo sapiens
ggaaccggccccacccgggaggggggagcggcgggaggccaccgccagagccgcgagaaggggccagca

SEQ ID NO: 138022 - RNA, 113 nt, Homo sapiens
gaaaagaaggagcaacagaggagccaggaagaggcacacgaagccccaaagccaaggaggaaggaaggggaaggaagaagaaaaagggagaagcggagcagaagacacgggga

SEQ ID NO: 138023 - RNA, 72 nt, Homo sapiens
agccgcggggcgcaggaggcgggcacagcgccaaggcagaaaaccgcgcgggagggggcaagccaccaggag

SEQ ID NO: 138024 - RNA, 73 nt, Homo sapiens
aaggcgccaccaggcggcgcccccgcagcccgcacccacccacgacaggacggacccgggcacacagagaaaa

SEQ ID NO: 138025 - RNA, 70 nt, Homo sapiens
cggagcaccggacaagcaccagagcccagagcaggaagggccccacaccaaaccgccacgcaacagacgc

SEQ ID NO: 138026 - RNA, 114 nt, Homo sapiens
gcaaaacgacaacacagaaccccagaaacgggccaccacacgcccaggcgcccagccccggagcgcacaagaggaggaaagcccgacgagccgaggcccgaacaccacggcaaa

SEQ ID NO: 138027 - RNA, 73 nt, Homo sapiens
gggacaacggccacccgagaggaccgcaagggcccagccgccgggggcagcagccaagaccagaccgaaccga

SEQ ID NO: 138028 - RNA, 72 nt, Homo sapiens
caagaacgccgccgccgcacaagcaggcccaggggaagaaaaggccaccagcgaggagaagaaggaagagaa

SEQ ID NO: 138029 - RNA, 77 nt, Homo sapiens
aagaaagaggccagacaggagcggaaaggcagccacagcagaggaaagagggaaagacaaaggccagcagagcgggc

SEQ ID NO: 138030 - RNA, 84 nt, Homo sapiens
cccgggcggacgagcacgaacacacggagaaccaacagaggcaaaagcagagacaacaacagcgaagccccacggagaaaaggc

SEQ ID NO: 138031 - RNA, 73 nt, Homo sapiens
aagaaacagacagaagggaggcaaagaaaaggagaaaagaagccaaagggacacggaagggcagagagcaaac

SEQ ID NO: 138032 - RNA, 58 nt, Homo sapiens
cgacagagcccagaagaggggggccgcagcgagccccggcagaacagagagaagggcg

SEQ ID NO: 138033 - RNA, 79 nt, Homo sapiens
agcacggcacccgacgagaccgcaacaacaccaggccaaggaccagggaaagaccacagcaagaccacgcccccagccg

SEQ ID NO: 138034 - RNA, 85 nt, Homo sapiens
ggcccgcgggcgaagcggacgcagccgcgagcccggaggcggcgggaggaggcggcggccggccggaccggagcaggacccgcgg

SEQ ID NO: 138035 - RNA, 72 nt, Homo sapiens
ccaggagcgccacgcgcggaaggcagcgcccagcagcgcagaccacacgaaggggcagaagagcacaagacg

SEQ ID NO: 138036 - RNA, 80 nt, Homo sapiens
gagaccagggcccgggcccgcggagcaagcaccagaagcaccaggcgaagcagagcgcagccaacgcgaccggaccgggg

SEQ ID NO: 138037 - RNA, 75 nt, Homo sapiens
cgaaaggcaccccggagagccggggaaggcacgcacagaggcgggcgcggccagagcggcccagaaggcacgccc

SEQ ID NO: 138038 - RNA, 80 nt, Homo sapiens
gaagagcccaagcagcgccagacaaagagcaaggggcgcacccccgagagagccacggaagggcgccaaggagccaccgc

SEQ ID NO: 138039 - RNA, 87 nt, Homo sapiens
agaggccaggaggacgaggagagacagaagaagcggaggccggcaaagccaaggcacacacaacgaccaagccaaggaccagccaaa

SEQ ID NO: 138040 - RNA, 67 nt, Homo sapiens
aacaagaggcaaggggggaggagcgccgccccccgcacaagagccgcgagaaccgaagcccacaaga

SEQ ID NO: 138041 - RNA, 78 nt, Homo sapiens
agcacgcagaaccaccaaacccccaccgcaaggcgccaggggagaggaggcagaaggagaccgcgggacagaaccgcg

SEQ ID NO: 138042 - RNA, 102 nt, Homo sapiens
gggaagcagaagaaaaggagaaggaaagcgaaggggaaggcgccgaagaggacgaagggcagagcggcgggaaaccaccaacaacacccccaaaccaaaaca

SEQ ID NO: 138043 - RNA, 95 nt, Homo sapiens
gccaagcgcgcacacccgccgacgaggaacggcggagcagggagcccaaagaccccggagacagcgccggccgcccgcaggacaccgagggccca

SEQ ID NO: 138044 - RNA, 59 nt, Homo sapiens
acacccacacacagaggggaaagacccagagaagagggagaagagggggaggaaggccg

SEQ ID NO: 138045 - RNA, 72 nt, Homo sapiens
gccccaccggcacaaggacaaggcacgggcagacccacgcccaacacgaccgcaagaccgcgccgaccaaag

SEQ ID NO: 138046 - RNA, 92 nt, Homo sapiens
agcaccgacagccgacgcgcagaagcagagccaccgggcaccacaccccaccggccggagcacgccaagcagcccccacgcccggaaacggc

SEQ ID NO: 138047 - RNA, 81 nt, Homo sapiens
aacacgagcaggcaggccccgcaggccacccaggcccggaggcagcgcaggaagaaagacaacgcaagaaccaagagacag

SEQ ID NO: 138048 - RNA, 39 nt, Homo sapiens
ggaaaggagaggcggcgcccaaccaaaagcgagacaaga

SEQ ID NO: 138049 - RNA, 56 nt, Homo sapiens
ggaagacacccacaccccacgaaccacccagacagagaagaaagccagaaagagca

SEQ ID NO: 138050 - RNA, 79 nt, Homo sapiens
gccagggaagaccacacaccccacaggaaggcacacagcagcaagagcccaaacgcaggacggaaggcccacgccccga

SEQ ID NO: 138051 - RNA, 91 nt, Homo sapiens
aaaccggaaccacacacaccacaggaagccagcaagagcaaaaagggagcgccagaggccaaaaggccggaggaacggaaggaagagcgga

SEQ ID NO: 138052 - RNA, 79 nt, Homo sapiens
ggagaagcaggcggcggaaacccggcaaaagcagaccggaaaacccaccggcaagaccacacccgaggggagcccagga

SEQ ID NO: 138053 - RNA, 62 nt, Homo sapiens
ccagcagccaccaggagcccgagagagaagggggaggcggaagcagcacgggcacgagcagc

SEQ ID NO: 138054 - RNA, 69 nt, Homo sapiens
agcagacgcagacacaggaggccagcaggaccggccagggaccggagcacggaggcccaacaaagagac

SEQ ID NO: 138055 - RNA, 82 nt, Homo sapiens
caagcaggaccacccaccagccaccagaggagcccaagggggcacaagaccacaagggacgccagcgcagcaggaggagaac

SEQ ID NO: 138056 - RNA, 72 nt, Homo sapiens
gggggcaggagcgggagcgcagcgaccacaccgaaggcccagggggcgaaagcccaccacaccagcacgggg

SEQ ID NO: 138057 - RNA, 77 nt, Homo sapiens
gcgcaacagcagcaccaggcgcggcccgagccccaggagagccgaggacccacccccacaagacaacaggcgccaga

SEQ ID NO: 138058 - RNA, 76 nt, Homo sapiens
caggaggccagccggaagagggccaagaacaaaaggcaacacagaaagcaccgcccaccaccaagcccagggccag

SEQ ID NO: 138059 - RNA, 79 nt, Homo sapiens
gacgcggacgcacgcagccacaagagaacagcgagacggacaagcaacgaaccaggcaacaccccccaagaaggaagga

SEQ ID NO: 138060 - RNA, 39 nt, Homo sapiens
accaccccggcaacaaaagcgagaagaacgaacagaaca

SEQ ID NO: 138061 - RNA, 82 nt, Homo sapiens
gacacacccagcagaagaaagggaaggaacacgcgcaacgcggcgcacaacacgggaggcgccgccgccgcggacggcaagc

SEQ ID NO: 138062 - RNA, 64 nt, Homo sapiens
gcaaacagggaacaagcaggcaccgaggcacccggggcaaagcggccgggcccaaccagcggag

SEQ ID NO: 138063 - RNA, 61 nt, Homo sapiens
gaagaggaggccaaaccgaggggggacgacacagcagggcacgcgaaaaaagcccaggacc

SEQ ID NO: 138064 - RNA, 77 nt, Homo sapiens
caaaagaaaccaggaagaaagacaaaaggagcggcaaccgacccgcaagacacccaagaacgaggccccgcagcagg

SEQ ID NO: 138065 - RNA, 71 nt, Homo sapiens
gacgaccagagacccagagaaaacagcagaacgccagcgcaggacccacaggcagagccagaaaccacaaa

SEQ ID NO: 138066 - RNA, 76 nt, Homo sapiens
cgagagaaggcgcaaggcgacgaaaggagaccgcgccgaggaggggaaacgccgaccagcaggacgccagaagagc

SEQ ID NO: 138067 - RNA, 61 nt, Homo sapiens
caacaggagccgaaaccggaacgcagggacaggacgggagcagcggaaggcccagaccgag

SEQ ID NO: 138068 - RNA, 76 nt, Homo sapiens
agcaaccggcgacaaagaagagcagcccagacaagcaaacaacggaaaggagggggaagcaacggccaaaagccga

SEQ ID NO: 138069 - RNA, 69 nt, Homo sapiens
ggggcccgaagcagcaggacaaggccgggaggcaagaaggagagacacagcgccggaaccggagagacc

SEQ ID NO: 138070 - RNA, 73 nt, Homo sapiens
aggggaaccaaagagagcgcccagagaagcagcgggagagaggagagcagagagcagaaacaccgaccaccca

SEQ ID NO: 138071 - RNA, 75 nt, Homo sapiens
cggggaagcagaagcacagggcacgccaacccagggagacaacgagcagcagaagaaggggccacccaagcgcag

SEQ ID NO: 138072 - RNA, 40 nt, Homo sapiens
acagggcagacccgcaggaaaagcaacggcgcaagaggcg

SEQ ID NO: 138073 - RNA, 83 nt, Homo sapiens
gcgaaggagcaaggacaccgaggccacccgcagggggcggagaccacgcacaccaggggaagcccgggggaacccgcaccccg

SEQ ID NO: 138074 - RNA, 52 nt, Homo sapiens
cacgcgcggaaggcagcgcccagcagcgcaggcggagacccgcgcgcaagga

SEQ ID NO: 138075 - RNA, 82 nt, Homo sapiens
gaagagcgcgcccggagagccaccggagacgccgagcccacccccacgcacccggaggagaagaggcgcggaacaagcggga

SEQ ID NO: 138076 - RNA, 76 nt, Homo sapiens
accgagagcgcgaaacgcacgagaaggaaggagggccccggagcagccacaccaccgaggccccacccagcacgag

SEQ ID NO: 138077 - RNA, 67 nt, Homo sapiens
ccgccccccccgcggcgcaggggggaaaccaaagacagcgacagaggcaccccaacaaagaagcacc

SEQ ID NO: 138078 - RNA, 81 nt, Homo sapiens
gaagaacggcccagcggaggcccgccgaagcggggaggcggaagagacgcagagacggggcacggagccaggaggccgacc

SEQ ID NO: 138079 - RNA, 72 nt, Homo sapiens
caacagcacgggagaaagcgcccacgcacgaaagcccaggccaaaaagaggcagggagaaacaccaacagca

SEQ ID NO: 138080 - RNA, 96 nt, Homo sapiens
gggaagcgcccggagagaggagagaaaagccacggacccgccaggacgcccagaagagaaaacgaagaaggaggaaggcgggggcgaaagccagcc

SEQ ID NO: 138081 - RNA, 59 nt, Homo sapiens
ggccacgaccaagaagaagccacggaccccgcgaccccaaccgagggccacgccagccg

SEQ ID NO: 138082 - RNA, 77 nt, Homo sapiens
agacgggggcgagcggacccgcagccccaaaccaacaggaaggccgggggcagcacaccgcagccggagcgaccaag

SEQ ID NO: 138083 - RNA, 80 nt, Homo sapiens
gaacagaggagcgagaaagccggccccagcaccaccaaggccagggcccagcagcagcccacggggccagcggaggaaaa

SEQ ID NO: 138084 - RNA, 65 nt, Homo sapiens
ggcagaagagagagaaaggacaaaccggcgaccacacacggggacgacggggaagccggacagca

SEQ ID NO: 138085 - RNA, 85 nt, Homo sapiens
ggacaccaaccgggacgaacgcacgccgcggcccaaaagcaagcggaaggcgcggaaaaggaacagaagaggaaccgaaacccaa

SEQ ID NO: 138086 - RNA, 55 nt, Homo sapiens
ggggagcagaaggaccggacacagaaaaggggaagaaggccaaccgggggccaag

SEQ ID NO: 138087 - RNA, 85 nt, Homo sapiens
ggacacaggcccgacacgagccccagagcagcagaccgcagccccgcgggaaggcggggcgagggcaagaacaccagagcgcaag

SEQ ID NO: 138088 - RNA, 47 nt, Homo sapiens
acgcagggcgcccccgaggcacaggaagcggagcgagacccagagcg

SEQ ID NO: 138089 - RNA, 72 nt, Homo sapiens
agaggagaaaaggcggacagcagcgcaggcaaaaaacagggaccagaggagacaacaaagaaacaaacagca

SEQ ID NO: 138090 - RNA, 71 nt, Homo sapiens
gggggggggggaagccgcagcggaaagcaggagcacaggggaaagccaaaacccagaacccgaagcaacgc

SEQ ID NO: 138091 - RNA, 77 nt, Homo sapiens
accaagagggaaggagacagggaagcaaagcgcaacagaaacagagagagagcagaagcacaagcagaggaagggag

SEQ ID NO: 138092 - RNA, 56 nt, Homo sapiens
ggaagagcaagcgggggaccgaacaaggcaaaaggggaccccccccagccggcaag

SEQ ID NO: 138093 - RNA, 56 nt, Homo sapiens
cgccacggaccgcgggacaagaaaacagcgccgccagggagaaaagacgaggaagc

SEQ ID NO: 138094 - RNA, 77 nt, Homo sapiens
ccaggaggcagggaggaaggggggagggggaggagccgaacgagccccagccagggcaaaaagcggaccccaaaggc

SEQ ID NO: 138095 - RNA, 83 nt, Homo sapiens
cgcaacgcccgccggggagccaagaggcaggcccgagggccccccggggccccccgggcaaggggaaggagggcgaaacaaag

SEQ ID NO: 138096 - RNA, 63 nt, Homo sapiens
caacaggagaagagagaggacagcggccggacgcagccagcaggacaggcacacccgggcagc

SEQ ID NO: 138097 - RNA, 62 nt, Homo sapiens
ggagggaaaaacagccgcagggaagagaaagacggagagcccgagggaaaagacaggcaaca

SEQ ID NO: 138098 - RNA, 79 nt, Homo sapiens
cacacaacccaggcaaccaacaggccccgcaggcagagcaaggggaaggcccagaagacccacaaaccgagaggcggcc

SEQ ID NO: 138099 - RNA, 71 nt, Homo sapiens
acgcccagcccgcgggcaccggcagaaaggaggaggaaaacacccccaggagagaggcagaacagaacaaa

SEQ ID NO: 138100 - RNA, 70 nt, Homo sapiens
ccacaaagaggacgcccgcgccccccagaggaggccccccagccacgggaacgccgcgccgggcccacgc

SEQ ID NO: 138101 - RNA, 81 nt, Homo sapiens
cggcgacaacccgaagggaggaggcagaagaggaccaaaggccacaagcccgaggaaagccagccaaacacccaagccaaa

SEQ ID NO: 138102 - RNA, 78 nt, Homo sapiens
cagagagagagcgcgagagaggagagggcagacggacaagagcgcggaacaggacgccccgaaaccggaacagaagac

SEQ ID NO: 138103 - RNA, 70 nt, Homo sapiens
cccagaccagaccaccaccagaaccacacccggagacccagacaacacagcagccaggaggcccgcaaca

SEQ ID NO: 138104 - RNA, 53 nt, Homo sapiens
cccagcaaagcccaggaagccgccgaaccaggagaaggacacagaggcagcga

SEQ ID NO: 138105 - RNA, 67 nt, Homo sapiens
agggcggagcggagacgaccgagagagcagcacccccaagggggagaaacgagccaggccagaagaa

SEQ ID NO: 138106 - RNA, 73 nt, Homo sapiens
aggaacagcagcaacgcggaaggaagaacagaaacacgaccaaggggggccgcccgcccaaggcaggaagagg

SEQ ID NO: 138107 - RNA, 68 nt, Homo sapiens
aagaggcgggagaagaggcaaaaacgaacaggaccagaggacaccagcagccgcaacggcacacacgc

SEQ ID NO: 138108 - RNA, 57 nt, Homo sapiens
ccacgcaaacccaaagaccccgccggagacgagagaaaaaggcacaaacccagcaca

SEQ ID NO: 138109 - RNA, 54 nt, Homo sapiens
agggccgcgaggaccagaagacacggaaagaccagagaacacccgcgagggccc

SEQ ID NO: 138110 - RNA, 98 nt, Homo sapiens
cgcacaacacaggagcaggagagccagggcaaggggccgagcaaagaagaaacgaaaaaggcagaagaacgcagacagaagaaggaaacaagaggcaa

SEQ ID NO: 138111 - RNA, 80 nt, Homo sapiens
gccaccgccgcagcggcgcagcccacgccagacgaccccacccgcgccgcgacccgccgccgcccgccagcggacccgcg

SEQ ID NO: 138112 - RNA, 50 nt, Homo sapiens
aacagagaggaccccaccggaggagaaaaggacgacggaaccaccacgaa

SEQ ID NO: 138113 - RNA, 83 nt, Homo sapiens
ggagaaccgcgaccgggaggcaaagaggagcgccaaaaaagagggggcgaagggaaaagccccgcaggaggccgaagcagcaa

SEQ ID NO: 138114 - RNA, 124 nt, Homo sapiens
gcaagacccacaggacaagcggaaaagaaaaaacgaagaaaaaacgcaggcgaagaaaacaccacacccgcagcacgaaggaccacagcgacacagaccagaagcgggcacagcgaacagaccc

SEQ ID NO: 138115 - RNA, 75 nt, Homo sapiens
cgaaacgccgcacagaaacaaggcgcggcggcggagcggcgcagccggcacccgcacaacccagggggccgaacc

SEQ ID NO: 138116 - RNA, 54 nt, Homo sapiens
cagacgcagggcgcccccgaaaaagcgagcccacccccacaccaacccccggaa

SEQ ID NO: 138117 - RNA, 66 nt, Homo sapiens
ccgcggcgagcggacagaggcaaaaggaaaaaaccaaacaagcaggaaaagcggaccaacagccgg

SEQ ID NO: 138118 - RNA, 61 nt, Homo sapiens
ccggacggggcggggggaacgggagagggcccggaccccaggacagaagggccaaggaggg

SEQ ID NO: 138119 - RNA, 64 nt, Homo sapiens
agagacgggacaagacagggcaaaggacagaccagggacggaacggagagggggaccaacacag

SEQ ID NO: 138120 - RNA, 66 nt, Homo sapiens
aaaaaggaagacagcagcaaaacaaaggaagagccccgaggagaccagaacagggggggggaacaa

SEQ ID NO: 138121 - RNA, 71 nt, Homo sapiens
ggcggccacgaggcaaccagcaagcgaaggaggaccagacaagaagagaagaaagaaggcagacaaaacaa

SEQ ID NO: 138122 - RNA, 75 nt, Homo sapiens
ccaacggacaccagccaacgagaaaggcagccggaccccgcaccacacacccccagcaagaggaaagcgaggccg

SEQ ID NO: 138123 - RNA, 78 nt, Homo sapiens
ccgcaagaacgccaaaaaaggagaagaaaagacagaccgggggggaggggaacagcagcggagaacacggcagagaca

SEQ ID NO: 138124 - RNA, 63 nt, Homo sapiens
gagacagcgacgagagacaccaaggcagcgcaaagccaccggcacacggaaacgcacaggaag

SEQ ID NO: 138125 - RNA, 65 nt, Homo sapiens
gggcacagacaccacgacaccggcgcccccaggcagggggcggagaggcaaaagacccggaacag

SEQ ID NO: 138126 - RNA, 46 nt, Homo sapiens
acagcgccgcagacgaaaaaggagggcagcacccgacgcaaccacg

SEQ ID NO: 138127 - RNA, 59 nt, Homo sapiens
cccgaccccgaggcgagacggaaagggcgcccgcgccggcagaggaggcgagcacccgc

SEQ ID NO: 138128 - RNA, 81 nt, Homo sapiens
aaggcaagagaacagcagcgccgcccgccgacagccaggcccgggagaagacaggacaacgcacaacagggcaggagaagg

SEQ ID NO: 138129 - RNA, 77 nt, Homo sapiens
ggcccgggacacggggcacccaccccggagaggagaggcagcccccccgggccaacaaacccgcgggacgcggcccc

SEQ ID NO: 138130 - RNA, 72 nt, Homo sapiens
caacaaggaggcaaccccgcccggaccaaggaacccagaaccgcgggcagcaagaaccaccaaacaaggaca

SEQ ID NO: 138131 - RNA, 71 nt, Homo sapiens
caggggagaaagaagccagccaaaggaaccccaccaagaagcggagaccgggcccccgggggacagggacg

SEQ ID NO: 138132 - RNA, 46 nt, Homo sapiens
gaaacccggcggcacaccccaaagcccgcggccccaccagccagac

SEQ ID NO: 138133 - RNA, 76 nt, Homo sapiens
accacgccccacccaacaagacgacgcccccgggcgcgccggacaggccgccgcggcgggacagcggccccaagga

SEQ ID NO: 138134 - RNA, 74 nt, Homo sapiens
gaagagagaacacagagaacccagaggaaaggccaaggaagcacgggaagaacagaaaagagaagcaccacgga

SEQ ID NO: 138135 - RNA, 80 nt, Homo sapiens
caagcaggaccacccaccagccaccagcgcgggccaggcacgacaccgcaacgacacagcagcgaagcgccggagaacgc

SEQ ID NO: 138136 - RNA, 112 nt, Homo sapiens
gagcaacaccgagagaggaggagccagacgacaagcacacacaggcgcgaaacggaaaaaggccagaggcacggacgaccccggagagagcgggcgagcagaaacccggaag

SEQ ID NO: 138137 - RNA, 58 nt, Homo sapiens
ccgagaaccgcaggagccagaggaacgggcccaggggacccgcaccaccagccaggca

SEQ ID NO: 138138 - RNA, 76 nt, Homo sapiens
ggcccccacccaagggcacaggggaccgcgcacacagcacccaacaggacagcccaaggcggaaaagcgaaggaag

SEQ ID NO: 138139 - RNA, 78 nt, Homo sapiens
gcaggagcgccgcgcgaagagccaaggagaggcgcacgcgggacagagcacccgaagcgcccagccagcacgccaccc

SEQ ID NO: 138140 - RNA, 80 nt, Homo sapiens
cgccggcgcgcacaagggcagagggccagagcccagaaaagaggccgagcaaccagagccaccaggaaaaccagaacgag

SEQ ID NO: 138141 - RNA, 81 nt, Homo sapiens
gccgcccgagcgcgcagccgcggcagaccgggaaaaccggaggccagcccacccagagaggccgaaaaccggcgacgaggc

SEQ ID NO: 138142 - RNA, 60 nt, Homo sapiens
aaaaggagcagggaggccacacagggaccccgccaggaagcccggccggcggagcccagc

SEQ ID NO: 138143 - RNA, 73 nt, Homo sapiens
agggcgcccccgaaccagggccgaaaacccagaagaacggccacccagagacacgcagagcagaggacccggc

SEQ ID NO: 138144 - RNA, 80 nt, Homo sapiens
ggccacacggggccggcacagcacgcccggcaccccgaccagcccggcagggcccggcccgccccccacccccggcccca

SEQ ID NO: 138145 - RNA, 87 nt, Homo sapiens
caagagagccgcagccgccagggacgggggccaccggacaggccaccagcgggcccccacggagggcagcaaggggacggggaaccc

SEQ ID NO: 138146 - RNA, 71 nt, Homo sapiens
cgacaccacaccaagccacaggcagcaccacccgccgggacagcaggagagagaagggccagagaggggaa

SEQ ID NO: 138147 - RNA, 40 nt, Homo sapiens
aagcccgcaaacgggacaaaaaggagaaaagaaagccaga

SEQ ID NO: 138148 - RNA, 73 nt, Homo sapiens
cgaaggaggcagaggcacagcgcaggggaaaaagaaaagggcgaagacccgaagcagcgcaggaacagaagag

SEQ ID NO: 138149 - RNA, 52 nt, Homo sapiens
agaaaacgggaagagagggaacacgcaggaggggcagggaaaaaccaggaca

SEQ ID NO: 138150 - RNA, 83 nt, Homo sapiens
acagacaagacaccagaaagacaggacaccaggggggaaaaaccacacaggcaaagaacgcgcaaaacaggacgaaaacaaag

SEQ ID NO: 138151 - RNA, 55 nt, Homo sapiens
cgcggaaggcagcgcccagcagcgcagggcaccaagaggcccagcccggccagca

SEQ ID NO: 138152 - RNA, 65 nt, Homo sapiens
aagagacggaccaccacgagagacgaagaaaaggacagagaaaaaaaaaggaagcagcaagcgca

SEQ ID NO: 138153 - RNA, 73 nt, Homo sapiens
aaaaaacggcaacacagggacaccggaaacgcagagaaaacaagacgggaacggagccccccgcacaggacaa

SEQ ID NO: 138154 - RNA, 66 nt, Homo sapiens
agccgagcggccaggacgacgaggagcagggccgacgcgcaggcagaacaagaagggcaaccaggg

SEQ ID NO: 138155 - RNA, 84 nt, Homo sapiens
aacaagcagccgcacgacgcacggcccaggaccgcacaaggagacaagggcgggcccccggcagggacaaaggcgagacaccac

SEQ ID NO: 138156 - RNA, 91 nt, Homo sapiens
accggccccgcggccccacgcggcgcacacggaggccccgggcccaaaacaagcgccgcccaacaccgccggaaccaaaaagaagccccag

SEQ ID NO: 138157 - RNA, 87 nt, Homo sapiens
gcagggcaccgcgcgaagcggccaaagccgcccagacggccaccggcgggaggaacaaaaggacggaggaagaccagcggagccgac

SEQ ID NO: 138158 - RNA, 54 nt, Homo sapiens
cacccccaggaagcgcggacacggcaaagagaccccccaggggacagaaggagc

SEQ ID NO: 138159 - RNA, 134 nt, Homo sapiens
agaacgggaggccagcggcaggaaggccggaagaagaggagccgccaagcccgacccacaaagagccgcccggcagaggaccggaggagaggaggaacaggagcgcgagcgcaggcggcggcaccgcaaccgag

SEQ ID NO: 138160 - RNA, 79 nt, Homo sapiens
caggagcagaacggcaaagcaaggcggaagcccccccagaaccgggaaaaagacggaggcaccgggggaagcacccgcc

SEQ ID NO: 138161 - RNA, 79 nt, Homo sapiens
accccaggagggaggaaggaaagccggcgaacggagagagggcgggaggccaggcagcacgcagacaagaagcgcagga

SEQ ID NO: 138162 - RNA, 78 nt, Homo sapiens
aacggggccaagagacgacaaaggagaggaaaacagccacccgccacagcgcacgaacccaaaaccacagcagaggca

SEQ ID NO: 138163 - RNA, 84 nt, Homo sapiens
ggagagagcggccaagagaagcaggagcccgaggcacggagggcgccaagagaacaaaagacggaagggcgagaaaaaacagca

SEQ ID NO: 138164 - RNA, 87 nt, Homo sapiens
caaaacccagacaccgacgggccgcgaggggaagaggaagcaaagccaaggagcaaagaaggacgcagagccagccacacagcccca

SEQ ID NO: 138165 - RNA, 41 nt, Homo sapiens
accgcgacggcagcagagcagaagaagcagcagcaacagcc

SEQ ID NO: 138166 - RNA, 69 nt, Homo sapiens
aacaagccaacaccacaaaccggaaaacggaaagaaaaggagagcaccacgaagacgccccggcggcga

SEQ ID NO: 138167 - RNA, 84 nt, Homo sapiens
gcggcgccgggcagccccacgcgagaacccagcggggccgccccacccgaggcccaccccaacgagccagccaggcgcaggagc

SEQ ID NO: 138168 - RNA, 72 nt, Homo sapiens
gacgaacacgaaccccggacgggagagcgccggcggagaaaaagggcgagaaaaagcggagaaaaaacaagc

SEQ ID NO: 138169 - RNA, 82 nt, Homo sapiens
cagcagaggcggagcccgcagaccgcagaaggccggagacaccagcagaggcccaggaagaaaagcgccagcgagaccggac

SEQ ID NO: 138170 - RNA, 72 nt, Homo sapiens
caagacgggggaaaccgacggacaagacacgggacagagcgacagaggacagcgacagcagacaagcaacac

SEQ ID NO: 138171 - RNA, 71 nt, Homo sapiens
acgcacacgcccccgccaagcccggggcggagcgacaggggaccagaccaccgcgcaacagcaacgagcga

SEQ ID NO: 138172 - RNA, 82 nt, Homo sapiens
gcgcccgccgcgggagagaggacccccccccccccccaagagggaaggagagaaggagagagacccagcccaccaaaggaag

SEQ ID NO: 138173 - RNA, 65 nt, Homo sapiens
ccgaagagggaagacacgcggaaacaggcaagaagcaagcaaccaggcgccgcaccagaagagga

SEQ ID NO: 138174 - RNA, 84 nt, Homo sapiens
gcagaacaacgaacagaagcacaaccagagccggccccgggcaaggccagagaaggcgggagaaagacacgaaccacagaacgc

SEQ ID NO: 138175 - RNA, 81 nt, Homo sapiens
gagaaaccccacccccaagaaccaacccccaaaggcgggacaggacagagcgggagccaccagcgccaaagggaagccagg

SEQ ID NO: 138176 - RNA, 74 nt, Homo sapiens
cccacccacagcaggcgagaacaccgagcaaagccaccaacaagcgacagcaagcgagcaaaccaacagcaaga

SEQ ID NO: 138177 - RNA, 75 nt, Homo sapiens
aggaacgcagccccagagcggcggggaaacgggaggcaacaccaaaaggcgaggagagagagacaggcagaccaa

SEQ ID NO: 138178 - RNA, 81 nt, Homo sapiens
ggccggagaaggcaccgcgccgagggccaagaacagggcacagccaaaagacaacagaggcgcggcaggcaggaggccacc

SEQ ID NO: 138179 - RNA, 77 nt, Homo sapiens
aggccgcaaaggcggggcccacaacccaacaggaagccaccaggcccgaaaaaggagcaagaggagcccgccagaag

SEQ ID NO: 138180 - RNA, 65 nt, Homo sapiens
cccgaaagcaagcgcggaagccccgaaaccccaggacccagacacaccaccgaggaacgggagcg

SEQ ID NO: 138181 - RNA, 65 nt, Homo sapiens
ccaaggcaagccagagaacacccgccgcgcaaaagaccccaaaggacgacacccgcgggccaggc

SEQ ID NO: 138182 - RNA, 68 nt, Homo sapiens
gcacggcgcagggcccggggccccagacgcacaggaaccaaccacaggacaccgaagcgcgaggcgac

SEQ ID NO: 138183 - RNA, 44 nt, Homo sapiens
gcgggcagagcgcggcggcgcgggcagaaccagagaccacagaa

SEQ ID NO: 138184 - RNA, 72 nt, Homo sapiens
cgaaccagccgggaggggaggagcgcaggggcgcaccacaccaggaggcaggggaagcacaaaagcgcaccc

SEQ ID NO: 138185 - RNA, 60 nt, Homo sapiens
gcggccaagaacagaggaagggcaccaagaaggcggagaggaaagagagggaccaccgaa

SEQ ID NO: 138186 - RNA, 80 nt, Homo sapiens
gaaaacagggaccgagcaagcaggccacaacagaaccacagagacagccaggcccgcggcgggggcggacgacagaaggc

SEQ ID NO: 138187 - RNA, 82 nt, Homo sapiens
cgcagcgagcggagccgccggaggaacccagagaagacgaagccgggaacggagaggaagaaaaacaaaggaccccaccgaa

SEQ ID NO: 138188 - RNA, 68 nt, Homo sapiens
cggcgccgcgcccgccccggccacccggccagcgagaaagaaagccaagcacacacgaagacgcccgc

SEQ ID NO: 138189 - RNA, 96 nt, Homo sapiens
cagcgaagggaaccagcggaaacgggaagcgggccgggaccaggcagacaccagccccaaacggcaagacaccaccaaaggaagaaagaaggaaaa

SEQ ID NO: 138190 - RNA, 65 nt, Homo sapiens
cccacgccaggccccacgcgagaaaaggccaagagccagggaaaaagaacagaacagaagaaaag

SEQ ID NO: 138191 - RNA, 81 nt, Homo sapiens
gcaaagacccagaacaccaagcaaagaagaggagcacaacagaaccgagcggcggaggagaaagagaaggaaggcaggccc

SEQ ID NO: 138192 - RNA, 74 nt, Homo sapiens
gaaagccccagagaccaacagaaaagcacgaacacccgcaaagcggcgcaaaaaacggccgaagggaagacccc

SEQ ID NO: 138193 - RNA, 81 nt, Homo sapiens
gggcaccacggagagaaggagaaagacagcaaagaaaaggagaagaaaggaaaaaaacaaccccgggcaccccgccagcca

SEQ ID NO: 138194 - RNA, 76 nt, Homo sapiens
cgacggcggcccgaagccagcgccccaccggggcaagcaggggacgcaaacgcaggcacaccggccacaaaggagg

SEQ ID NO: 138195 - RNA, 71 nt, Homo sapiens
gaaagcaggacagccccagagccccagcgagccagagggacagcacagcccgcccgcgcaagcccaaagaa

SEQ ID NO: 138196 - RNA, 36 nt, Homo sapiens
cagaacacaggaggggcagcaagaaccaagccgcca

SEQ ID NO: 138197 - RNA, 73 nt, Homo sapiens
ccccgcggacacaccccgccagcgccgaaaaccaggaccccagggaagagaagaacagaagaggacacaccag

SEQ ID NO: 138198 - RNA, 76 nt, Homo sapiens
aagaaaggaaacgcagagaagaaacacggcaaaaagaaaaaccagcgaagcacaggccagcaacagaagaaagcaa

SEQ ID NO: 138199 - RNA, 90 nt, Homo sapiens
gcgcggcggggcccgaggcagcacccgggagccgcaaggcgagagcgcaaagaggagaaggcagagcccccccaggcagaagcccgagcg

SEQ ID NO: 138200 - RNA, 71 nt, Homo sapiens
gcgggagacacaccacgccaaggggcagagacaggcaacagacggcaacgaaaggcacaaaaacgcaacac

SEQ ID NO: 138201 - RNA, 68 nt, Homo sapiens
cgcacgcgccggagacagggagaccaagagacagacaccgccccgagacgagggcccacggccccacg

SEQ ID NO: 138202 - RNA, 69 nt, Homo sapiens
acgcagggcgaaaccccacaagggaaaggaaaggacccccccaggaagagagaaggccacgcccgaccc

SEQ ID NO: 138203 - RNA, 71 nt, Homo sapiens
cgcccggcggggacccacgagcgcggaccgagcagagaaccaacggagaacagcccaccgagaaacacaaa

SEQ ID NO: 138204 - RNA, 62 nt, Homo sapiens
accgagcacggaggagggcaccccccacagcgaaggccagggcggaaccagaggcaggaaga

SEQ ID NO: 138205 - RNA, 78 nt, Homo sapiens
aggaaaaaaggaccagagacggagcaagaacaaggaacacaaaggaaacacagacccccccagcgcccgccccagcac

SEQ ID NO: 138206 - RNA, 85 nt, Homo sapiens
cacccggcacccgggccgccggcccccagccgcccgaccgcgcgccggagccccagggcagcgggggcagagacggggaacaggg

SEQ ID NO: 138207 - RNA, 79 nt, Homo sapiens
gcaacgaaaaaagaaaccgagaacggaaggcagaaaggggccaggcaccgcaagggccagcaagagaggaccggcaggg

SEQ ID NO: 138208 - RNA, 105 nt, Homo sapiens
aagcagagcgccaaggggagaaaccaggacaggagccacagaacaagaaggagcggaggaagacaaggccaaagcccggaaagaaaaggaaacgagcgcacccag

SEQ ID NO: 138209 - RNA, 78 nt, Homo sapiens
ggcaccggccagcccagcccccgccgcgagccaggacaaaaccaggcagaaccaacacgaacccaagcacaaacaaga

SEQ ID NO: 138210 - RNA, 81 nt, Homo sapiens
gggggggaccccccccacgacgcagcagagaacgggcagaggaggcgaagccgacgagcccgaacagacgcaccagcggga

SEQ ID NO: 138211 - RNA, 80 nt, Homo sapiens
accccacagcggggccacagcaagcccaggcagcgcaaaccggcaaacaggaacccaaggagcggaacgaaaggagaggc

SEQ ID NO: 138212 - RNA, 77 nt, Homo sapiens
gaaaagaagaccgaagggaacacacacaaaaaagacagaaaggaagccgaggaacagaacccccacagcagcacgca

SEQ ID NO: 138213 - RNA, 72 nt, Homo sapiens
ggaaaggaaggcggaaaagcccaaacaggggagccaggacaggagaggaaaaccaagcggaaacagcccaag

SEQ ID NO: 138214 - RNA, 40 nt, Homo sapiens
cagagcggggcgaccaggaaaggaagaggggagaacaacc

SEQ ID NO: 138215 - RNA, 54 nt, Homo sapiens
gcccgaggcagacgcgccacaacaggaacaggaaaagggaggcaaagacaacca

SEQ ID NO: 138216 - RNA, 77 nt, Homo sapiens
gaacaggaggaaccaagcaacacaaggaacaccacaccacgggcccacaggagcaaaacagggaaccacaaaaccaa

SEQ ID NO: 138217 - RNA, 73 nt, Homo sapiens
ccacaaccggcgaaagcaccgagcagccagcaggaggaagccggcgggggcagcaagacaacaagacccgacc

SEQ ID NO: 138218 - RNA, 42 nt, Homo sapiens
caccacgacacgggaggacgcaccgggaaccccaagaggaac

SEQ ID NO: 138219 - RNA, 81 nt, Homo sapiens
ccgcaaacaggagccagagaagagcccggagcgcaaaggcagggaggagccccgcagaaccgccgggagaacgcgcagaaa

SEQ ID NO: 138220 - RNA, 54 nt, Homo sapiens
aggccgccccaacaccagggaagagacacacccaggaaacagaacgacagcccg

SEQ ID NO: 138221 - RNA, 76 nt, Homo sapiens
aacgacaggcaacaagacaagcggcggggccccggccccggcacaaagcagaccgccccacgggcgcgcccgcgac

SEQ ID NO: 138222 - RNA, 87 nt, Homo sapiens
agagacgcagccgcacagagaaggggagaagagccaccaaaaaacgagaagaaggaaaaaacagcgcaggagcaagacacgcaaaaa

SEQ ID NO: 138223 - RNA, 73 nt, Homo sapiens
ggagcgaaaagaacccccaaaaggggcgaagcgaggaacaaggcccaaaaaaacagcacaggagaaccagagg

SEQ ID NO: 138224 - RNA, 80 nt, Homo sapiens
ccgaacgcgagaacaacacaacaggccaaacacacaggaacgccagaccccagccgagggaggcaacagcaaagggacag

SEQ ID NO: 138225 - RNA, 42 nt, Homo sapiens
aacgaagcccggcgggagcgggcggagaacggaaaagcacca

SEQ ID NO: 138226 - RNA, 87 nt, Homo sapiens
agccgcagcagcaaacccccaggaacagacaccaccaccacagcagcagcagcagcaacccaagacgcagacgaggcgcagcacccg

SEQ ID NO: 138227 - RNA, 86 nt, Homo sapiens
acgaaccacaggaagcgcggggcggcggcgaaaggacggaaagaccacagcaagaccacgcccccagccgggggaccaggccgaac

SEQ ID NO: 138228 - RNA, 72 nt, Homo sapiens
agggcagaaggggacagggaaaagaaagagaccaaagaaagacaggccccggcagaggggcagggggacaag

SEQ ID NO: 138229 - RNA, 74 nt, Homo sapiens
aggagagaagaggcagcagaagccagggcagcgaaagacagagacccagacaccgaaaacgagaaacgaaagag

SEQ ID NO: 138230 - RNA, 72 nt, Homo sapiens
ccgccgcgccgcggagcggcgccgacaaaccggggggccgcgcgcgaacccccaccggccgccccaccgagg

SEQ ID NO: 138231 - RNA, 86 nt, Homo sapiens
ggcggccgaggagaggcagggcgcgagggcgggggcagcggcagccagacaacacagggacacaacaaacacaaccgccacagaag

SEQ ID NO: 138232 - RNA, 78 nt, Homo sapiens
agccgggccacggagaggagcagcccccggagacagcggcacagagggccgccagccgacgcagcgaaaggagaccgg

SEQ ID NO: 138233 - RNA, 68 nt, Homo sapiens
acgcagccacccacccagaccgcccgaacaaccaagcggagggcagaagaagacagccagaacagcaa

SEQ ID NO: 138234 - RNA, 80 nt, Homo sapiens
gacaaggcacggagagcaacaaagccgacccaacccaagggccaaagcggcggcagagaagaaacgccaggaagccaagc

SEQ ID NO: 138235 - RNA, 93 nt, Homo sapiens
gggagagaagcggacccgccgagccccggccccaagaacgccgccgccccggagccgccaaggaggccccaacccgagcacaacagcaaccgg

SEQ ID NO: 138236 - RNA, 82 nt, Homo sapiens
gagggagagacgccgaacgacgccccgcacaccggagcgcccagcgcgaggaggcagaggggaggagacacgaagcgacgca

SEQ ID NO: 138237 - RNA, 76 nt, Homo sapiens
agaacagagagccacacacccgaaagccaccacgcaccggaagcgagaccaggaggagcgccggaagcagcgaggg

SEQ ID NO: 138238 - RNA, 89 nt, Homo sapiens
ccccccccgcccccccagggccggccgggagggcggccgcagcagggggcggggcacccggcccgcagcggacaaaagaaccaaggcag

SEQ ID NO: 138239 - RNA, 54 nt, Homo sapiens
cagacgcagggcgcccccggcagagcagccgagaagaagccaaaaaacacggag

SEQ ID NO: 138240 - RNA, 65 nt, Homo sapiens
aaagcgccaagggcagaaaagcaccaccgggagaaaccggaagaggaaaccccagaacgagcgag

SEQ ID NO: 138241 - RNA, 65 nt, Homo sapiens
ccagcacagaagcggcgagccgcccaaaagcaggccaaggggcccaacggagggaacaggccggg

SEQ ID NO: 138242 - RNA, 74 nt, Homo sapiens
cggaaacgccgaaacgcccagagaggcgccagcggaaaccacgccaagaaggcgaggcccagaagcacgggcac

SEQ ID NO: 138243 - RNA, 66 nt, Homo sapiens
gccgcggccacgcggagccagggaacggcacggagaaagaaccggccaagccgccccagccgggcc

SEQ ID NO: 138244 - RNA, 74 nt, Homo sapiens
ggacccacgaaggacagaggcggggcaaccgagagcggcagaggacacgccacccaggcagaagagagcgaccg

SEQ ID NO: 138245 - RNA, 77 nt, Homo sapiens
ggggcaagacaccgggaaagagaaaccacaggaagacggccaaaacccaaaccaggaaaaaagcccaccaaaacgaa

SEQ ID NO: 138246 - RNA, 82 nt, Homo sapiens
agagcaggaacccagaagcaaagaagacgaacagaggaaggagacccccgcaaccccaaggccaggggaggccacgaagggg

SEQ ID NO: 138247 - RNA, 63 nt, Homo sapiens
gggcccacagcgcgccgcgccgaccgccggagaagcgcgcgcgccgcgggcgcgcacagagca

SEQ ID NO: 138248 - RNA, 55 nt, Homo sapiens
gccccagcggggagacacagaaggagagcgcgcgccgcgcgcccgcacaaacgcc

SEQ ID NO: 138249 - RNA, 47 nt, Homo sapiens
gcccggcgagcgggccggaggaaaagaaaggcgccccgacgagagac

SEQ ID NO: 138250 - RNA, 63 nt, Homo sapiens
ggaagggaacaagaggggcagcaagggccaagggggcgcacacgcagaaagaacagcgaaaaa

SEQ ID NO: 138251 - RNA, 68 nt, Homo sapiens
cgaagaccacaaaagaaccgcaaaccccagaagaaaagccgaaagcgacaccaaacgcacggaccgac

SEQ ID NO: 138252 - RNA, 72 nt, Homo sapiens
aggagaacggacagagaggagaagaaagaaggaaagaaacgcagagaagggacaagaggagcgaagaaggag

SEQ ID NO: 138253 - RNA, 97 nt, Homo sapiens
cgagaaggacccaagccaggcccacgcaccaaggaggagccggagaccagaaagcaccccacgaacaaccacaggaagagacacacaagaaacaaaa

SEQ ID NO: 138254 - RNA, 58 nt, Homo sapiens
agcacaggcccgggcgaaggggccacgcgagaccacaacgggaaaaggaagagccggc

SEQ ID NO: 138255 - RNA, 81 nt, Homo sapiens
aacacaccggagacggggggaaacaggcgaggcggcggcgcccggagggcagcgagcaagagggacagggaggacccagaa

SEQ ID NO: 138256 - RNA, 76 nt, Homo sapiens
ccaggcaccgagggaccccgcagccggagaaccaccaggcggcagccgggcaggggccccagcccgcgccggagag

SEQ ID NO: 138257 - RNA, 51 nt, Homo sapiens
aaacggacagcccagccgcggccgcacgagcggaaggacgaacaccacgcc

SEQ ID NO: 138258 - RNA, 89 nt, Homo sapiens
gggccacggggcgggggcggggcggcaggagccggccggcaaccgagggacccgcgccaggaaaccccagacagccagcagcaggccgg

SEQ ID NO: 138259 - RNA, 112 nt, Homo sapiens
gggcggagacaaccgaagcaaggacggagaacaagcggagcccaggcaggcacaaaagcaccaccccagacgacaggcagaccggaagaccaggcccccccccaagcagcaa

SEQ ID NO: 138260 - RNA, 82 nt, Homo sapiens
caagcgagaaagcacgaggcacccccggaccagaacggcacggccacgggcgggcaggcaagggggaagaagagcgcaccga

SEQ ID NO: 138261 - RNA, 77 nt, Homo sapiens
ggcagggcggaacagaagaaagagaggcgccaccacgagggaccagcaggccggaagagagcagcgggcgggaaacc

SEQ ID NO: 138262 - RNA, 77 nt, Homo sapiens
cggaagggagcgccagcaggccgggcgcagcgcagcccccgggaccggcccgacagagccgccgaccgacagcagcc

SEQ ID NO: 138263 - RNA, 79 nt, Homo sapiens
gcacgcaggccagacagacaggacaggcaacaccaaggaggcaccagacaaggccaaagaagcgaagcaaccagagcgg

SEQ ID NO: 138264 - RNA, 74 nt, Homo sapiens
gagcccaggagaaaccggacgcgacgggagaaccaggagcggcagaccgccgccaggaggaggcacgcagcccg

SEQ ID NO: 138265 - RNA, 81 nt, Homo sapiens
gcccaaggcaaggcccagaaaaaggaagaaaacaaccaggcaaagacacagcgcacgaagagagcagcacgaggcagcaca

SEQ ID NO: 138266 - RNA, 67 nt, Homo sapiens
aagcaacacgagaaccaccccgacacaacaccaccaacaacgaagagaggaaagaagcggaaaggag

SEQ ID NO: 138267 - RNA, 94 nt, Homo sapiens
gcagggaaacagaagcacgcgaccgaaagaagaaagcaccacggaggacgagacggagccagaaggaagaggaggacacgacccagggcgcggg

SEQ ID NO: 138268 - RNA, 64 nt, Homo sapiens
cagaccccccgcgcggcgccgccaacgcgcccccgaggcccgaaaggacagacagcacaaaacc

SEQ ID NO: 138269 - RNA, 53 nt, Homo sapiens
gggacccacggaaggaaccgaggcggcagggcacccccaagcaggcaggcagc

SEQ ID NO: 138270 - RNA, 83 nt, Homo sapiens
gagaagggagacgacgcgcgggccgcgagcggggcgacccgaggaccagagccggcaaggaggaacagcagcacagcccaggg

SEQ ID NO: 138271 - RNA, 78 nt, Homo sapiens
agccgggccccccccaggaacggcccggggccgacccggcccgaggggaagcagccagggagccaaggagccagcagg

SEQ ID NO: 138272 - RNA, 62 nt, Homo sapiens
cacagagcaagcaggacggcggaccgccccgcagacgccgacaaagcgaacaaggacgaagg

SEQ ID NO: 138273 - RNA, 54 nt, Homo sapiens
gcccggcgccggccgagaaggcagaggcgagagcgcgccagccggaaggaacca

SEQ ID NO: 138274 - RNA, 65 nt, Homo sapiens
gagggcaggacaacacggcccgcacccaggggaaaacgaccaccggacgcccacagacagaaccc

SEQ ID NO: 138275 - RNA, 69 nt, Homo sapiens
ccagccacgcgcgcccacgcaggagcaccacaacagagcccaagagaacgaaagcacagaaaacaacgc

SEQ ID NO: 138276 - RNA, 66 nt, Homo sapiens
cagagaaacaggaagggcgacgaagaccggagggaccaaaaggaagcagcaggcgcaaaaacgaac

SEQ ID NO: 138277 - RNA, 76 nt, Homo sapiens
ggagcgcgggggcccgcgcagcagcgaccacggaggggccacggggccggggagccaccaggagacagcccagaca

SEQ ID NO: 138278 - RNA, 52 nt, Homo sapiens
agagacggaggaaacccgacagcaaagggggagaagagggagacccgaacga

SEQ ID NO: 138279 - RNA, 39 nt, Homo sapiens
gcaccaaagaaagagacacgcagggaggaacgagacagc

SEQ ID NO: 138280 - RNA, 74 nt, Homo sapiens
ggaaagagcaaaaaccccgaaaggcgagaaagaaccccagaagacaccaaccacagaaccgccgagaagagcac

SEQ ID NO: 138281 - RNA, 75 nt, Homo sapiens
agacacgggacagagggcggggagaggagcagagcgcagggagaagggccccgaagaccgcaaaagggagacgcc

SEQ ID NO: 138282 - RNA, 60 nt, Homo sapiens
caccgcagcgccggggcacgacacaaaaacaggacacaccgagaagccgaaacagccaca

SEQ ID NO: 138283 - RNA, 86 nt, Homo sapiens
ccgcggagccaggcagcaggcccgaggcgaccacccggacggcggcggggcggaggggaggaaggccaagaagcgagagaagaaaa

SEQ ID NO: 138284 - RNA, 59 nt, Homo sapiens
gccgccccggaggagaagcaccgccggccaggaggagagcgcaccaccaaaaaggcaaa

SEQ ID NO: 138285 - RNA, 76 nt, Homo sapiens
gacccacccaggacaggggaagagggcggaggaacagcggggggaaagcacaaggcagggaggagaaccccaagag

SEQ ID NO: 138286 - RNA, 37 nt, Homo sapiens
gcacggcgcaggaaggccacgaggagggcacgcggag

SEQ ID NO: 138287 - RNA, 77 nt, Homo sapiens
cacgccccagaggcaagaccaaccaagagaggaaccagaaacggccccaaaaacagaacagcggaagcgaccacaga

SEQ ID NO: 138288 - RNA, 77 nt, Homo sapiens
cacacagcacaacacaacacgccccgaaggccgcggagcgggacccagaacgcgaggcagaggcccacagagggacg

SEQ ID NO: 138289 - RNA, 72 nt, Homo sapiens
ggccacccagcggggagcacggcgagcagccaggccaggagaggggagggggagcgaggagacggacccagc

SEQ ID NO: 138290 - RNA, 82 nt, Homo sapiens
aaggaccaaccagaagaccaacaggacaggaccggcagggggagcgagcgaccagaaacagggccggagcgagggagagcag

SEQ ID NO: 138291 - RNA, 77 nt, Homo sapiens
gagcacagaccagcagccgccaaagggagaagagccaaggagaccaaacccagcagcaccgcagcagcagaagaaca

SEQ ID NO: 138292 - RNA, 73 nt, Homo sapiens
cagacaaaggaccacacaaaaaagacgagagcaggacaccaggcagaaagagcccacaagacaaaaaagcaga

SEQ ID NO: 138293 - RNA, 105 nt, Homo sapiens
ccccccaccgcccgggcccgaggaggcagccaagccgagccgccacccggcagagcagcaccagcagaagagggcccgaccacggcaacccagaggcgaagcagg

SEQ ID NO: 138294 - RNA, 56 nt, Homo sapiens
ccaggcccgcgagccaggggaccaccaggcaggaaaacaagcgacacgcccacaac

SEQ ID NO: 138295 - RNA, 54 nt, Homo sapiens
agcggcagaagcccggagcagcaagggcgcgccagaggacaccagacccaaggc

SEQ ID NO: 138296 - RNA, 32 nt, Homo sapiens
acccgcgacccagaagagcccaaaaggcagag

SEQ ID NO: 138297 - RNA, 73 nt, Homo sapiens
agaccgggcgcaaaggacaggccaaagagcacagggacagaaaaacagcgcagacgagccgcaaggacaagac

SEQ ID NO: 138298 - RNA, 74 nt, Homo sapiens
aaaacccagccaccacagagaacgcagccggagaaacagagaacccccaacccaacaggacaccaggcccacaa

SEQ ID NO: 138299 - RNA, 70 nt, Homo sapiens
acacaaacaccagagggaaaaagaccacagaaacagccaaaaccaaccaacaacaacgaccggcccgcag

SEQ ID NO: 138300 - RNA, 80 nt, Homo sapiens
gggaagccccagacgcgccgaggggccgggcacgagcggcgaggcgggcacaaaccgaagaggacaaggagagaagcaga

SEQ ID NO: 138301 - RNA, 75 nt, Homo sapiens
cacgccagggagcacggcacaagaacgccgaacaaacccagcagcagaaacgggccgaaacagggacgcgagaga

SEQ ID NO: 138302 - RNA, 76 nt, Homo sapiens
gcagcagcggccccaacacccccgaagggccacggggggaccgaggaggaccccgcaccagggccggacaaacacc

SEQ ID NO: 138303 - RNA, 81 nt, Homo sapiens
cccaggcaccgccagcacgcgccgccccgcgcgcgagccacgcagcccccagcgagcaggcgacccaaaagagcgaaggaa

SEQ ID NO: 138304 - RNA, 76 nt, Homo sapiens
ccaggggaccagagaggacggcaccagccaggagaggccggaagagcgggagcgggagccaggcagaaggccaacc

SEQ ID NO: 138305 - RNA, 76 nt, Homo sapiens
ccgccaaagcgcgcacagccccgcggcgcccgagccccaccagcggccccgacacaccaggcagaaggaaggcaaa

SEQ ID NO: 138306 - RNA, 77 nt, Homo sapiens
aggccgcgccgggcgggacgggggggcggcccggccccgcaggagccgggcgcgagcagcgcgagaagacccccagg

SEQ ID NO: 138307 - RNA, 76 nt, Homo sapiens
ggccgcagcgggcacaaaaacccagaccaaaacagacagagaagaggagagaagaggccaggaggcacacggaagg

SEQ ID NO: 138308 - RNA, 116 nt, Homo sapiens
agcaagaaaaacgcaaaacaacagaggaccaacaagcagagaaggggacccaaacacaagacggcgcggacggacagaaggaacccccaccccgcgaccgcacaagaaaaacaaag

SEQ ID NO: 138309 - RNA, 76 nt, Homo sapiens
aggaagacccagccagaccagggacaaagagcaaacagacagggccgcagggccaaaccaagccgaggcccagcgg

SEQ ID NO: 138310 - RNA, 83 nt, Homo sapiens
cagggcagcgcccgaccggagcccagcggggggagccggagccccccagccgcgccagcagagagaacgggacccagagcccc

SEQ ID NO: 138311 - RNA, 72 nt, Homo sapiens
gcggcaagagaggcaccccgaagaggcgaggagcaacccagggacggcgaagagagcggagaggaaccagag

SEQ ID NO: 138312 - RNA, 74 nt, Homo sapiens
aacaggccaaggaccgggggacgccgggcgcccagaaagcgagaagaaagccaaggcagcaggaagaagcggga

SEQ ID NO: 138313 - RNA, 73 nt, Homo sapiens
cgacggggaggcgcggccaacggggccacaagccaagaaaaccaggcccgacagcaagaaaaaaggagacggc

SEQ ID NO: 138314 - RNA, 81 nt, Homo sapiens
aggcccaaggggcccccgggcaccccggaccgcgcagccaccgcggcccccgcggaccccagcgaacacgaagagaaaaga

SEQ ID NO: 138315 - RNA, 56 nt, Homo sapiens
acgggcaagacgagagggcccgacggaggggaggaaacagacagaaagcgcccagg

SEQ ID NO: 138316 - RNA, 83 nt, Homo sapiens
agcggacagcgaggcgggccccggaggcagcacgggcgaccccccggcgcagcagcacacaaggcgcgggacaaccaacacaa

SEQ ID NO: 138317 - RNA, 78 nt, Homo sapiens
aaagagaagcggagaacacagcaacccaccacggagagaggagcgagaggaagcggaagaaaaccaacaaaggacagc

SEQ ID NO: 138318 - RNA, 67 nt, Homo sapiens
accaggaccagaggggaccgagccccccaccggccggaaaaccagccaggagaaacgacaggaaaac

SEQ ID NO: 138319 - RNA, 70 nt, Homo sapiens
gcgaagaccaaggaggggcggagaacggaaaagcaccaggaagcagagaggaccgcagaagggaaggaga

SEQ ID NO: 138320 - RNA, 59 nt, Homo sapiens
gcacaagaaggcaaggggacgccccagcccaaagcagcgagggccggaccagacaccgc

SEQ ID NO: 138321 - RNA, 72 nt, Homo sapiens
acgcagccaagagggccccaaagaggagagagaaaaggagacgaagagcaccagggaaagaagaaagcaccc

SEQ ID NO: 138322 - RNA, 71 nt, Homo sapiens
gagcccccccgacacggccaaggccagcagggaggagcccaggcaaagacagcagccaggcccaccaccac

SEQ ID NO: 138323 - RNA, 79 nt, Homo sapiens
cggaacccggggccgggacgcagcccggcggcagcaggcccaagagccacaaagaagcacaacaacagcccgacggcag

SEQ ID NO: 138324 - RNA, 119 nt, Homo sapiens
gggcgcggagggccgagggagggccgagccagccgcggccggaggagcccccaggccggcggagggggagagccaacagacacgccacgcgaagcgcaggaggccggaccagagagcgc

SEQ ID NO: 138325 - RNA, 78 nt, Homo sapiens
gacaaagaggggagcagacggcaggccagacccccgaggagaagaaagggaagcaaagaaagaagaaccgaggagcga

SEQ ID NO: 138326 - RNA, 65 nt, Homo sapiens
cacagacaccaaggacgaaccccaccggccagcaaccacgacaggagggacgaggacgaggaggg

SEQ ID NO: 138327 - RNA, 69 nt, Homo sapiens
acaccaggaagccggacaccgggaacggagagaaggaagaaaccaaacgaaacacaacgaccaacggga

SEQ ID NO: 138328 - RNA, 86 nt, Homo sapiens
gagccggagcgcgaaggccgggacccggccccggcccacaggggggggcaaacccgagagaacgggagagcaagcccggaggcacc

SEQ ID NO: 138329 - RNA, 75 nt, Homo sapiens
aagacgaacgggagaacagcagcagcccacgaacagaaagggagagcacgaagggagaagcccgacgccaaaaca

SEQ ID NO: 138330 - RNA, 72 nt, Homo sapiens
aaacgcgagggccaccagccaaggcaagcgaaagggcccaacccccccggccagcggcaccagcacaggcgc

SEQ ID NO: 138331 - RNA, 72 nt, Homo sapiens
ggaaccaaagaaccaaaaccaagacccagccaagcagaggccacacgaacggaccaaaggcgaccaggagag

SEQ ID NO: 138332 - RNA, 62 nt, Homo sapiens
gccccgaggacagagaacagcacagcacacccagcaccaggaaacacgcccaaacgccaccg

SEQ ID NO: 138333 - RNA, 72 nt, Homo sapiens
gacagggagagacgggcacagggaagcgccggaaaaaccaaagggaccagacaggcaaaacaccagagaaaa

SEQ ID NO: 138334 - RNA, 72 nt, Homo sapiens
gaaagcagaagaacaacgaggcagcggggccaagcggagggaagagaccacaggaccgacgcaaacgcaagc

SEQ ID NO: 138335 - RNA, 73 nt, Homo sapiens
aacaggagccacccacgagaaaacaaagagccgggaaaaacccagcagggggcgaaagaaaccccaggcagga

SEQ ID NO: 138336 - RNA, 79 nt, Homo sapiens
caggaggagccagggcccggcccgaaaggagagcccccagaaagcagggggccgagacaccaagacagaccggcccgcc

SEQ ID NO: 138337 - RNA, 73 nt, Homo sapiens
cggcggggaggccagagccgcacgcagcagccaaggacaccaggggggaaaaaccacacaggcaaagaacgcg

SEQ ID NO: 138338 - RNA, 74 nt, Homo sapiens
gaccggaccgggccggccggaccccaagaagaagccccagccagcgggggacggagaacaagggaggcacgcgg

SEQ ID NO: 138339 - RNA, 92 nt, Homo sapiens
ggcgagcgggcccgggggccggggccgcgcgcccgggccgcgaggacgaggcggcgccgccgggcgggaggaccgaaggagaagaaggagaa

SEQ ID NO: 138340 - RNA, 76 nt, Homo sapiens
accgccagggcgcaggcacagcccgagaaaccgcagcacacacgaccgcaagaaccagggagaccacaaaagagca

SEQ ID NO: 138341 - RNA, 72 nt, Homo sapiens
ccgaaccggaggagcgaggagagcgagggacgagaccgccggccgcagggagggcagacaacaaacccaaga

SEQ ID NO: 138342 - RNA, 100 nt, Homo sapiens
gcgagcaccgccccagacgaccgggacaagacggaaccgccgagacagcccaaaaggcagagcgaggagagaagaaggagggaaagccaaacaacggaca

SEQ ID NO: 138343 - RNA, 78 nt, Homo sapiens
gagcaaccacagcggagacaggacgagagcacagcccccaggagaggcaggcgcaaaggaggcaacagaggagcagcg

SEQ ID NO: 138344 - RNA, 81 nt, Homo sapiens
ccaaggagacgcccgcccgcgccaagacaggacagcccagaaacgcaggaccggccgaaaaaacgacaagaaggcccaaaa

SEQ ID NO: 138345 - RNA, 80 nt, Homo sapiens
gcaggaccaagcgccaccaggcacacacggcagcacagacaagccaaacggcccgggacagagggaccgcgcgaaaggac

SEQ ID NO: 138346 - RNA, 78 nt, Homo sapiens
agaccccacacaaagagaagcggaccaagcgcagagcaccccaggacgaacagagcgggagagccccccacgacccag

SEQ ID NO: 138347 - RNA, 88 nt, Homo sapiens
ggcacccgcaggggcagacagcacaaccagcgacagggcgcacgaggcccgccagcgccccggacaacacgcgcacgcagggaccagg

SEQ ID NO: 138348 - RNA, 74 nt, Homo sapiens
ccacaccagaagcagagccgcaaagagaggagccaagcccaacgggacgggaaaacggccacagccaacgacgc

SEQ ID NO: 138349 - RNA, 79 nt, Homo sapiens
ccacacacgggcccgcggaagggcagcgggcacgccccagaccgagggaagaaggaggcagcagccggcaaaaagcggg

SEQ ID NO: 138350 - RNA, 77 nt, Homo sapiens
gaaggacaacaggaacacacagacaagaggcgacaagaggcgaaaacaccccaaaaggcggaaagaaagaagagaaa

SEQ ID NO: 138351 - RNA, 76 nt, Homo sapiens
agggccgacacaagcccgcaggaagaccggaagcgccaagcccaccagacaccgagccaagaggaccagacgggaa

SEQ ID NO: 138352 - RNA, 86 nt, Homo sapiens
cgacaaaggaggcaaacccacaggccgcaccgagccccggcaccaggggaagaggaagaagcgggggagacccgcgccgccaaccg

SEQ ID NO: 138353 - RNA, 77 nt, Homo sapiens
gcagcagagggagagaggccaccgagagaccccaggccagaaccaaccgccccgagccaagaaccgccggcgcagca

SEQ ID NO: 138354 - RNA, 70 nt, Homo sapiens
caaaaccccgaaaaaggcgggaccccgaagcaggaggcccaaggaacagcacagcagcgacacacggacc

SEQ ID NO: 138355 - RNA, 66 nt, Homo sapiens
accacaggagccgggccagcaagggcgggcaacccggcggaacgaccagagagcccccaccaagcc

SEQ ID NO: 138356 - RNA, 63 nt, Homo sapiens
cccaccgcccccggcccgaccagggcggccaccgagaggcggacagcggaaagagaccaccca

SEQ ID NO: 138357 - RNA, 83 nt, Homo sapiens
agagcaagacaccggacaccgagggcccccaaaagagggagcacagcgcggaagccccgaggcagccccgcggaggagcagaa

SEQ ID NO: 138358 - RNA, 75 nt, Homo sapiens
agagggacccacccggcgggaacgaagcccaaaaggcagagacggaccgagacaggagagcaggggcccagccac

SEQ ID NO: 138359 - RNA, 75 nt, Homo sapiens
aagagcagaagccagcccaacaagacggaacacagcacccacccacacccacacccgcgacgggagggaggagcc

SEQ ID NO: 138360 - RNA, 78 nt, Homo sapiens
cccacccgggccgggccggaccaagccgacccagagggagaacggagaagaaacagccacggagaacaacagacggga

SEQ ID NO: 138361 - RNA, 72 nt, Homo sapiens
gcccccggccggcccggacacaggcccgcgcgccgcggcaccaggcgcaggaagagagaaggccacgcccga

SEQ ID NO: 138362 - RNA, 58 nt, Homo sapiens
acggagagggacccgggaaaagaacaacgaccgcaggcacaacaccaagaggacgggg

SEQ ID NO: 138363 - RNA, 68 nt, Homo sapiens
ggggggcaggggcgggcggcagaacagccaagagcgcggaacgcgccgcccggggagaggaaccaacc

SEQ ID NO: 138364 - RNA, 83 nt, Homo sapiens
gggggccgaggggccaaccagcgaagagcgacaagccgcggcagccgcggaccaccgccgccaggcccgccagggccaccagg

SEQ ID NO: 138365 - RNA, 79 nt, Homo sapiens
ggcgcagaggcccacgccgagacagggagcagggaaagcgccagcgaggcgaagaagaagaaacaccagaaacaagggc

SEQ ID NO: 138366 - RNA, 70 nt, Homo sapiens
gggaggccgacgagcaggagcgccgcaagggaggcgcaggagccggcagaggggggaaggcgaagaagag

SEQ ID NO: 138367 - RNA, 91 nt, Homo sapiens
cagcaccccgggaccgggaaacaagccgagcaccaagagccacaccaaaaaggaagaagaaaggaccagcagcgcacaaccaggggagcag

SEQ ID NO: 138368 - RNA, 80 nt, Homo sapiens
gagaggggccgaaggaaccggacagaagcgcggcggcgcggcgggaagaagaggagaacgaacggagaccaagaggagag

SEQ ID NO: 138369 - RNA, 92 nt, Homo sapiens
caacaaaagcacccggagaggaggaaaaaaaggaccaccccaacaggaaacaaggaaaaacgacagccaccaggcacacaaacacgaaggag

SEQ ID NO: 138370 - RNA, 83 nt, Homo sapiens
cgggcaaggccgagggacacagcgcacaaggcggcgggacgaccaccagaaacggaccccacccggaccccaacacgccacgc

SEQ ID NO: 138371 - RNA, 105 nt, Homo sapiens
ggaaagggcagaggcccaacgcagaccgaggcgaagcgcgcagcgccggggcaagaaaccaccaaaaagccccaaggaaacgagcagccgcaccaaagcagaaac

SEQ ID NO: 138372 - RNA, 99 nt, Homo sapiens
aaccggaacaacgcacccaccagcaaagaaagggaagcagcgggagaggagcaaagcaccacaggggaaaacaagcagaaccggggaccagccaacaga

SEQ ID NO: 138373 - RNA, 50 nt, Homo sapiens
gcacaaggagcaaaaggcagaagggacgaagaaaggcgacacggagagga

SEQ ID NO: 138374 - RNA, 72 nt, Homo sapiens
cacaaagggagagagaagacgggcccgacgagaaaggacccagggggagaagcaagagcacacaacgggaag

SEQ ID NO: 138375 - RNA, 77 nt, Homo sapiens
ccgacccgcccgcccccgccccacgaagccagaaagaagccacccagagagaaccagaaacgaaggaggcccaacca

SEQ ID NO: 138376 - RNA, 75 nt, Homo sapiens
gcaaccaggcccgcgccgccaccagggaagagcgagacaagagccaaggacagggcccgccaccagaaggaccca

SEQ ID NO: 138377 - RNA, 65 nt, Homo sapiens
aaggggccagccgcagcgcaccccgcgcacaggcaggacagaagaccagcgcccgccacaggggc

SEQ ID NO: 138378 - RNA, 70 nt, Homo sapiens
ggaagagccaccagcgacaaacaggaaaggcaaaaccgacagagacgcagacaaggagggcggaaagggg

SEQ ID NO: 138379 - RNA, 64 nt, Homo sapiens
aaacacccaggcggccaggcgacccggaagaggaacacagcgaagagccacgaaaagccagaga

SEQ ID NO: 138380 - RNA, 74 nt, Homo sapiens
gagaagcgcggagccccaagggaggaggacaggacggaaagaacaaccaagaagggagagaaacgcaggggacc

SEQ ID NO: 138381 - RNA, 75 nt, Homo sapiens
ccccgcaagcccaggcaccccacccgacacagcggagcaagcggcgccaaaagagaggagcgcccagcccgaccc

SEQ ID NO: 138382 - RNA, 65 nt, Homo sapiens
acaacgacaagaaaacagaaacgacggagagaaaccacaagggggccacgaaggaggcccaaaaa

SEQ ID NO: 138383 - RNA, 82 nt, Homo sapiens
cggagccgacgggcggggccgcacgggaccccggaacccgcgcgcgcccacgacgccgagacgcgaaggcaacgaaacaaga

SEQ ID NO: 138384 - RNA, 73 nt, Homo sapiens
cgaccggggacggggagcggaacagcagagaacaaaggaccgcaaacgaagacggcagcacagcaggcacagg

SEQ ID NO: 138385 - RNA, 86 nt, Homo sapiens
ccggacgcgccgcccgaggccgcggccgccgcagcgagggcgccgagcaaccgccgagagcccaaagccaagggacaagacaccga

SEQ ID NO: 138386 - RNA, 75 nt, Homo sapiens
gggacgcccgccaccgcacccggcggaggaccgcgcaggagcccaggccccagcagccgagcggaacaacaagcc

SEQ ID NO: 138387 - RNA, 59 nt, Homo sapiens
ccacaaaaaaggaagcgaaacggagcacacagaagccgcgcagacacaccacggcccga

SEQ ID NO: 138388 - RNA, 65 nt, Homo sapiens
ggggaaagaaggaaccgcacaaggagcgcccagcgggggaacgcagcacaacaccgcgggagagc

SEQ ID NO: 138389 - RNA, 76 nt, Homo sapiens
gcgacacaagcccagaaaggacacaaaagagaggcagaaaccacagaggaaaagacacaacgcagaaggcaaggag

SEQ ID NO: 138390 - RNA, 78 nt, Homo sapiens
caagcgccgagcaaagaggaacagacagcagcagagggggacgggagcagacaaaaagcgggaacacccagccggagg

SEQ ID NO: 138391 - RNA, 72 nt, Homo sapiens
acaggaaaggagaagccaagccaggaaaaggaccaccggaacagccgcaggcaccaagaagaccaacaagca

SEQ ID NO: 138392 - RNA, 78 nt, Homo sapiens
cacgagaagagagccagaggggggacgaacccacagccgagacgggcccccaccccacaggaggaagccgaagaagaa

SEQ ID NO: 138393 - RNA, 78 nt, Homo sapiens
gggaagcagccgccacggaggcaaagcagccgaggcccaagccccgaagccgaagccacgccccacaggaacacccaa

SEQ ID NO: 138394 - RNA, 80 nt, Homo sapiens
agcaacggcggccccaggcccaggccccccaccaccagaggcaagacagccggcaggcgacaagccaggccgcgagaagc

SEQ ID NO: 138395 - RNA, 73 nt, Homo sapiens
ggagaagaagagaaaaggagggaacacagacccagccgccaaggggccgcagccggccaggggacccgaaggg

SEQ ID NO: 138396 - RNA, 62 nt, Homo sapiens
agcacagggacggagaggagcacggacaggaggagggggcccacacggggacggcccaaaac

SEQ ID NO: 138397 - RNA, 84 nt, Homo sapiens
ccaaagaccacagcacccagacaacaaccaaggacgcacccgcgcccccgccggcaaccggcagcacagcgcccgacccggcgc

SEQ ID NO: 138398 - RNA, 73 nt, Homo sapiens
acgccccgaaggagagaaagggaccagaggaagagcaaggcgccaaacggacgaagcaaaaacacggagacgc

SEQ ID NO: 138399 - RNA, 78 nt, Homo sapiens
gccaacccaaagcccaaacggaaccaaagggcaccaagagggcaagaaaagaaaacccgaggggcgggaccaggagcc

SEQ ID NO: 138400 - RNA, 84 nt, Homo sapiens
aagaagaaaaagaaggcccgagcaaagaagagcccgaacaaacaaacacccagaaacaagagcgaacagagcagagcacgccca

SEQ ID NO: 138401 - RNA, 63 nt, Homo sapiens
gaacgggcgcccacagagaagccaagagaggggcccgccacgggcaagagcaccgagggacag

SEQ ID NO: 138402 - RNA, 78 nt, Homo sapiens
ggcgcccccgcaagaggacggcgccggcagccgacacaggaagcaagccagcaccagagcaccgggcaaggagacaga

SEQ ID NO: 138403 - RNA, 70 nt, Homo sapiens
acacggagaagaaaaacgcgcaacaagcaggaaaagagagaccaggcaaaagagccgggaacaacccagg

SEQ ID NO: 138404 - RNA, 74 nt, Homo sapiens
gaagccgaaccaccacacacaaaagcaccagggcccccggccaaggcggaggagaggcacgcagcgacgcagcc

SEQ ID NO: 138405 - RNA, 78 nt, Homo sapiens
cgccggaacccggaaaaagaacgggcccggaagagcggaggagagcgcgcgccgcgcgcccgcacaaacgccggggac

SEQ ID NO: 138406 - RNA, 78 nt, Homo sapiens
cgggacagcggaccggccccagacccgcccagacggcccaggaccggggggaaccggaggcccccccccccccagcca

SEQ ID NO: 138407 - RNA, 70 nt, Homo sapiens
agaaacacccagcgccgaggcgcgggacgcgaagcaacaggcaagaaggaaccagcaaagcgccacgaag

SEQ ID NO: 138408 - RNA, 78 nt, Homo sapiens
cgaaggaagcaagccccaaggcaagagcaacagcaacagcagcccagaagaaaggcaacagcaagagaaaagcccaca

SEQ ID NO: 138409 - RNA, 88 nt, Homo sapiens
acccagagggggcagcagcgcggaggcaggaggaagcaggaaaagcagacggcacgggacgccggaacagcgggcaagagagcaggga

SEQ ID NO: 138410 - RNA, 67 nt, Homo sapiens
acggggagcggaaccccgggaaacacccgggcgaggccaccaagaagcccggccggcacgagacagg

SEQ ID NO: 138411 - RNA, 80 nt, Homo sapiens
aaaggcggaggggagccagcggcgccgaggcagaaaagcaccaggagcccagggcaaaggccgacaccaaacaagcaagg

SEQ ID NO: 138412 - RNA, 82 nt, Homo sapiens
cgaggaaagcgaacaaaccagaacaggacggacagaggagcacgccaacccaaccgccagaggcaggaagaagaagacgaga

SEQ ID NO: 138413 - RNA, 62 nt, Homo sapiens
cggagcccggcccggaagcaggacccaaagacaggaccacgcaccagcagagaaggaaagca

SEQ ID NO: 138414 - RNA, 76 nt, Homo sapiens
acagaggaccgacgcgcgcaggcagaggagaaggcagcggacaaagagacagcgcgggagccaggaaacgcagacc

SEQ ID NO: 138415 - RNA, 74 nt, Homo sapiens
gcgaagaagcgcagccgcaccggccaaggcgcggagccagcgcccggcaaggagcgagcgggagacaccggccg

SEQ ID NO: 138416 - RNA, 63 nt, Homo sapiens
gaagaccgagagcaccacaaggccaagggcaaggagacaggaggaagaagacagaagagcccg

SEQ ID NO: 138417 - RNA, 35 nt, Homo sapiens
aggggcagaaaaacaggggagccacggaaaggcag

SEQ ID NO: 138418 - RNA, 67 nt, Homo sapiens
gacccggcacacaaagccagcagcagggggcaccagggccccgcacagcgaccggaaggacagcaag

SEQ ID NO: 138419 - RNA, 69 nt, Homo sapiens
gcccggacgaccaaagggacaaggggacacagccagggcgcaggcagcgcccaacaacacgggaaagaa

SEQ ID NO: 138420 - RNA, 78 nt, Homo sapiens
ggcgacaaggggcccgaacagaggggaacaagagcaaagaccaagagccaggggggggggcaaagcggagagaaagga

SEQ ID NO: 138421 - RNA, 76 nt, Homo sapiens
caagcccacaggcgagagcgaaaagcgagaacccagggcagggaagacgccccccggggccaggcccgcgcacagg

SEQ ID NO: 138422 - RNA, 80 nt, Homo sapiens
gagggcccgggaggaccgacgcagccaggagccccgggccccaggcgcagacggaccgcgagagcgaggaacgggccacg

SEQ ID NO: 138423 - RNA, 78 nt, Homo sapiens
gaaaggaacagaacgcggccccagccacaccaagcagaggccgcgacagccaccaaagcagcgcggacaagaaaagac

SEQ ID NO: 138424 - RNA, 49 nt, Homo sapiens
gcggccggcccccggaccagcgaccaagcgcacgcggccacaagcgcca

SEQ ID NO: 138425 - RNA, 82 nt, Homo sapiens
ccggagggaagaagcggcaaccgggagcacggaggcacagcgacgccacgagcaacagggacaggcggaggcaaggcgagac

SEQ ID NO: 138426 - RNA, 70 nt, Homo sapiens
ggacacgcccagccccgggcacggaaaggggcgcgggaaggacaacagccccaaaggcaagcccacagga

SEQ ID NO: 138427 - RNA, 79 nt, Homo sapiens
cacgaggacacgccagcgagccccacgccggggaggaggagccacggccggggacagcaccgcgccggagcacaacaga

SEQ ID NO: 138428 - RNA, 73 nt, Homo sapiens
cacgggaagcaggacaccaaccgacaagccaacggaacagagaaccaggagcggcagaccgccgccaggagga

SEQ ID NO: 138429 - RNA, 76 nt, Homo sapiens
ggcggcggaaaggccggggaagcccaacagaccgcagccaggccaacagccgaaaaaaaggccaacggccaagaaa

SEQ ID NO: 138430 - RNA, 81 nt, Homo sapiens
ggaagccaccgacaggcccgagggcccgagagcaccgcgccagacaggaaaagagaaggggcagaaggaaggggaccaagc

SEQ ID NO: 138431 - RNA, 56 nt, Homo sapiens
agagcggaccgagagcgcgaaacgcacgagaagaaacccggacacaaaacaagacc

SEQ ID NO: 138432 - RNA, 69 nt, Homo sapiens
gaacaacaaaccggaggaggaagcgaaggagaacacccaaagacacgggcccaagggcagagaaagacc

SEQ ID NO: 138433 - RNA, 79 nt, Homo sapiens
ccgcaagaagaacagagacagcagccaaacccccaggcaagagagggagcgacagaaacaaacaaagaaacgccaaagg

SEQ ID NO: 138434 - RNA, 73 nt, Homo sapiens
ggcgggaagaggcgaaggccagagcacgagcacgggaagaaccccagccccacaccgaggagcgggcagagac

SEQ ID NO: 138435 - RNA, 73 nt, Homo sapiens
cacgacacgaaggaggcacagcgagcagggaaccccagaccagcggcgccggagcaccggagcagaagaccga

SEQ ID NO: 138436 - RNA, 132 nt, Homo sapiens
gcgcgaccagcgcggaacgcccgcgcgagggcggcggccgccgccgcaccacagcgccacccaagcgcggacaagcccaaccagggaccaggccaaaaccagacgccacgccccacgggccccacgccccag

SEQ ID NO: 138437 - RNA, 68 nt, Homo sapiens
ggaacgcgccacagagagaaaaccagaacagggcagggggccgcagcgcagaggacggagaccgggcc

SEQ ID NO: 138438 - RNA, 74 nt, Homo sapiens
ggacgacccccagcgagccagcggagcgcggaccagcggaacaaacaccacccgagcaggccagggacaaccgc

SEQ ID NO: 138439 - RNA, 32 nt, Homo sapiens
gcgcccagcgaccgggcacggaccccgcggac

SEQ ID NO: 138440 - RNA, 104 nt, Homo sapiens
cgacgacagcgggccgggaaaagggcacgaggccggaaccgcccagccccggcaagaaaaggagaagaaagaagaaaaaaaagagcaaaacaccggaaaaccca

SEQ ID NO: 138441 - RNA, 59 nt, Homo sapiens
agacggaacgggagaagaggcaaagaaacaccaaagaggcggcgggcagagcaacgcag

SEQ ID NO: 138442 - RNA, 72 nt, Homo sapiens
acaggcaacggcagaacacaaagcacgcagaggagacaggaaaaggccaaaggggaaagccaaaacccagaa

SEQ ID NO: 138443 - RNA, 69 nt, Homo sapiens
acaaccggggaggcacaagagggaaaccgcaccacggacgcaacacaaccggccaaggggcagagcaca

SEQ ID NO: 138444 - RNA, 62 nt, Homo sapiens
cgcggaggaggacaggaggaggacgggcgggccacagggccccgcacaaaggagcgcaaagc

SEQ ID NO: 138445 - RNA, 56 nt, Homo sapiens
gcggggcaagaggaggcgcgaggaaagaccacagcaagaccacgcccccagccggg

SEQ ID NO: 138446 - RNA, 69 nt, Homo sapiens
gaaaggacagaaaggagccacgggcacaagacccaagcacaggaaccaggccccgcagcaccccagcca

SEQ ID NO: 138447 - RNA, 73 nt, Homo sapiens
aagccccgggagaagcagcgccgcccggggcagaccaggcaggcagcgcaccgcaaaggccccagggagcccc

SEQ ID NO: 138448 - RNA, 69 nt, Homo sapiens
cacggcggccggccggagccgggcacgcggggacccggggaaagaaccccgggagcgaagaagcggaac

SEQ ID NO: 138449 - RNA, 75 nt, Homo sapiens
aaggccgaaggagacagcacagacagacggcacccacggacacggcagacaagaggaaaagggagaaccaacaaa

SEQ ID NO: 138450 - RNA, 74 nt, Homo sapiens
gggagaacagccaagggccaaggaggccagccccagggcaccagagcccccagaggaggacacagcgacaaaaa

SEQ ID NO: 138451 - RNA, 78 nt, Homo sapiens
gcccagccagcccgagcaagaaagagaacccaccacgcagaaggacagaaaggccaagccaaacacgcaagcaggaga

SEQ ID NO: 138452 - RNA, 72 nt, Homo sapiens
gagcagaaccgacagaccaggaagaagcacacaaaaagggcagaaaccaaacgcccaaaagcaggcacagga

SEQ ID NO: 138453 - RNA, 71 nt, Homo sapiens
gaaacaaccaacgacaacaaggcagaagaccggcggcacacggacaaccgggcgaggggcagggaccaggc

SEQ ID NO: 138454 - RNA, 78 nt, Homo sapiens
ccaagaagcagagaccaccgcccaggcgcggaagagaagcagcggcaggaggaggcccaggaaaccagagaaaaaccg

SEQ ID NO: 138455 - RNA, 86 nt, Homo sapiens
gggacacagaggccaagagcagaggcgaagggagggccgccccaaccgacgcaccagccggaggaggagggacagggccaggaacg

SEQ ID NO: 138456 - RNA, 40 nt, Homo sapiens
ccagggcggcccgacgcgccccaggaaggaagggaacacg

SEQ ID NO: 138457 - RNA, 77 nt, Homo sapiens
gacaccaacaggacccgaagccacgggaaggaccgggaagcgagccgacgcgagcgcgcaggcccaggggcccagag

SEQ ID NO: 138458 - RNA, 57 nt, Homo sapiens
gccacacgccgccgcggcgcagccaggcccacacgggacaggaagggaaccggacag

SEQ ID NO: 138459 - RNA, 73 nt, Homo sapiens
acaccgcagacgaagagaacgggggaccagcgagcccgggggggccccgcggcccacccggagacggaggaga

SEQ ID NO: 138460 - RNA, 83 nt, Homo sapiens
cggagagccgagcccaaggcaagacccaaggcgacgaccgacaggggggaaagagcaccaagggaaaggaaagccagaggacc

SEQ ID NO: 138461 - RNA, 88 nt, Homo sapiens
ccgacgcaccgccggagcccagggaagacagggcgaccggaagccaacacccaagacacaccgaagaggacacaggacgcacagaaaa

SEQ ID NO: 138462 - RNA, 75 nt, Homo sapiens
ggggaccgaaaaccaggcacggcaagaagaggccaaagaaaaacaaaaccgcgaaaaagacggaacacgaaagga

SEQ ID NO: 138463 - RNA, 46 nt, Homo sapiens
aaacagaacagggacaccagaaagccaacaggcagaccagagacag

SEQ ID NO: 138464 - RNA, 68 nt, Homo sapiens
gagcgcagagagagcgcccaggccacggaagcaaaaaccccagggaaggcaaggaacacaagcggcgg

SEQ ID NO: 138465 - RNA, 52 nt, Homo sapiens
ggcgccgaggaaaccgcggcgaaccaagccgccacagggagaaaagagcaga

SEQ ID NO: 138466 - RNA, 73 nt, Homo sapiens
caggaaaaggaaacgggcaagaaagaagaaacaaccaccacaaacacaccagaccaaagagaggcacaacaca

SEQ ID NO: 138467 - RNA, 81 nt, Homo sapiens
ggcgggacagagggagccaggcagaggacccaacaagacggccccaaagggagccaggcaccagggaagacccaaagcccc

SEQ ID NO: 138468 - RNA, 54 nt, Homo sapiens
ccccccgggacccacagcaccccgaggcccgacccagggaaacgagcacggagc

SEQ ID NO: 138469 - RNA, 76 nt, Homo sapiens
agagaggacccccccccccccccaagaggaagacaccaccggacaccgaccaggccgcccgagcagcgaggcccac

SEQ ID NO: 138470 - RNA, 72 nt, Homo sapiens
agccgagaggcaagacaacacacccagaagaaaggagaaaagaggcgcggaccaggggaaggcaaaaggccc

SEQ ID NO: 138471 - RNA, 79 nt, Homo sapiens
ccggcgccggcaaggggacccaggcgcccgcacgcgagggcgccacggggaaacaacaaaggagggaacaagaacgaaa

SEQ ID NO: 138472 - RNA, 77 nt, Homo sapiens
ccggggagagccaggaggaaaacagccgcaccacagcacaggaccgcaccagcaggaccgagacagccacccaagaa

SEQ ID NO: 138473 - RNA, 53 nt, Homo sapiens
ccacggccagagcaagacacccagcagaaacaagaaaaacaaccaaagaaagc

SEQ ID NO: 138474 - RNA, 76 nt, Homo sapiens
gggcggcgcgggagcagcacccacagccaaggcgggagccacgaaagaggcccgacccagccaaagaaacagagaa

SEQ ID NO: 138475 - RNA, 74 nt, Homo sapiens
gaggagggagaacacagaaacccgccccggagccgagaaaaagcggaccgggcacgccaagcccaggccggaga

SEQ ID NO: 138476 - RNA, 74 nt, Homo sapiens
gacccggcccaacgccagggccccggcaagcagaggccaccagccgcgcccaccgccaggacaccccgagaagg

SEQ ID NO: 138477 - RNA, 72 nt, Homo sapiens
cccagcggagggcagccccgagccaggcccgccgccgagcgagaggccccagacgacccgaccccagcgaaa

SEQ ID NO: 138478 - RNA, 75 nt, Homo sapiens
gggcagcccgggagaaccgcggcggccggagcggacgagaacaaaagaaccgagcgaagaaggccacgggaagcc

SEQ ID NO: 138479 - RNA, 81 nt, Homo sapiens
ggagacgcgcgagagccgaaaaccagacgagagacagaagacgaaagggcaagaaagagagcacggacaagaggagcagag

SEQ ID NO: 138480 - RNA, 82 nt, Homo sapiens
gcgagacgagccaagaaccggcacggcccggccccgcccggcgccgaggacccccggagagaagagacgaggaggaggggag

SEQ ID NO: 138481 - RNA, 83 nt, Homo sapiens
gccgggcagggcagccggggggaccagcagccggcacaagagagagggcacaggacagagagcccagaggggaccgagcgcca

SEQ ID NO: 138482 - RNA, 77 nt, Homo sapiens
cagaacagaacagaacacgaaaagaccacggcagaagccccacagagaggcaggcagaggggaggagacacgaagcg

SEQ ID NO: 138483 - RNA, 65 nt, Homo sapiens
accggaagcagagaagaacagcaggccccaaagcccaagaggaaggggaggcgggagcagagcgg

SEQ ID NO: 138484 - RNA, 84 nt, Homo sapiens
ggcggcaggccgcagcgcccgagcgagcaccccccaacgggcaaaccccgcccagcagggaccgggcggccacaaggggcagga

SEQ ID NO: 138485 - RNA, 79 nt, Homo sapiens
gcccaagcacaccggagcaacaaccggcgggccgaggccgcaggaggagggagaacaccgaggcaagcaaaggcacgcc

SEQ ID NO: 138486 - RNA, 80 nt, Homo sapiens
accgggagagaccgaagccagcccaaacccaaggggagaccagaaggcaaggagccgggaagcagggcaaagggcaagac

SEQ ID NO: 138487 - RNA, 78 nt, Homo sapiens
cggaaagcagaccgggcccgcagacggcaggagcagaccaaaggcacaggaagaagcgcagacaggagaaaacgaccc

SEQ ID NO: 138488 - RNA, 55 nt, Homo sapiens
ggccgcggcccgcgccgaacaacaggcacaaagagagaaggaacacccacagggc

SEQ ID NO: 138489 - RNA, 114 nt, Homo sapiens
ccaggaacgggggccagacggagccagaccggaacggggccgcacccgcggggcccccaggggaccccgaagcaggaggcccaaggaacagcacagcagcgacacacggaccgg

SEQ ID NO: 138490 - RNA, 78 nt, Homo sapiens
ggacggcacccagacagcgagcacacgcaccccagcaagacaacggaagccaaaagaagcaagggaaagaccaggagc

SEQ ID NO: 138491 - RNA, 42 nt, Homo sapiens
accgggacggaccccgggagcccagacgccggcgcggcaccc

SEQ ID NO: 138492 - RNA, 70 nt, Homo sapiens
ggaccggaacggcggcgacaaggggcccgaacagagggacgagaggccgcagcgacaaaagggaaggagg

SEQ ID NO: 138493 - RNA, 69 nt, Homo sapiens
gcaggaagaaaacgagccaggaacaaagagcaagcacagggaacaccagaggcgggaccacgggcagcg

SEQ ID NO: 138494 - RNA, 79 nt, Homo sapiens
gaaagcgggagagggaccggaacggcggcgacaaggggcccgaacagaggggagacagacccagcacggaccccccccc

SEQ ID NO: 138495 - RNA, 87 nt, Homo sapiens
ccagggcggaaaggaagaggagacagagggccgagaaggacaggacagagcagcccgacggccaggaggcgaagagacgaggaagcc

SEQ ID NO: 138496 - RNA, 76 nt, Homo sapiens
aaggccccccgcgcaggcacacagcaaagggaaaacccacccggaaagacggccgagcggccaccagacgggcacc

SEQ ID NO: 138497 - RNA, 87 nt, Homo sapiens
cccgaccgcacgaaacgcccgaaaacagggccggccgcagagcccaccggaaggagaaggaagaggagcgcaccagaaaggagcagg

SEQ ID NO: 138498 - RNA, 74 nt, Homo sapiens
ggagggagaggggggacgcggcggcggcggacaagagacaagaccagccagcggccccgagaaacccaagaaca

SEQ ID NO: 138499 - RNA, 58 nt, Homo sapiens
cacaggcacaggccacagccagccggacccaagccagaagcccgcaaagcccccagac

SEQ ID NO: 138500 - RNA, 68 nt, Homo sapiens
ccaccagcagcccccagagcgggaccacaggacaggccccgcagccacacgaaacgggacagcagcaa

SEQ ID NO: 138501 - RNA, 80 nt, Homo sapiens
acccccgcccaaagggcaaaggcggaagccggcgcgggagcccagagcgcaggcaacaccaccgagaacggggaaaaaga

SEQ ID NO: 138502 - RNA, 65 nt, Homo sapiens
ggcagcaccaccgaccagccacccagacagaaggacagaaaacgggccccagacacaagccccac

SEQ ID NO: 138503 - RNA, 71 nt, Homo sapiens
aacagaaagcaaaggaaaagagacaaacgaaaaccaacaagcagaagagaggacaggaccaagaaagcgcc

SEQ ID NO: 138504 - RNA, 75 nt, Homo sapiens
ccaccacaccacggggcaggcgggccaccaccggaccgggccgagccgcacagaagggaagcagagccccgggcc

SEQ ID NO: 138505 - RNA, 76 nt, Homo sapiens
cgacgcccgaagcaaaagccacagaaaagacaagagcccggagcgcagaaccggccgaaaagcacaaacagcaaga

SEQ ID NO: 138506 - RNA, 74 nt, Homo sapiens
gggcgcacaacggccgaagcgccgagccagagccagggaacggaggagcgagccacggcgcagaaaagagacac

SEQ ID NO: 138507 - RNA, 85 nt, Homo sapiens
accggagaaacgggaagaaaccgcccacggacacgcgggcaggcccgcacaccggagaggaccaccgcccgggggcacgagcaga

SEQ ID NO: 138508 - RNA, 52 nt, Homo sapiens
aagaaccccgccaaagccaaacgaaagagacacgagaccagaagccaagaaa

SEQ ID NO: 138509 - RNA, 79 nt, Homo sapiens
agaaacggaaagccaaaaaggccgcagggcagagggggagacaccacagagaaccccaaacaaaggagcaacccccaga

SEQ ID NO: 138510 - RNA, 64 nt, Homo sapiens
ggacgagggacaagagcggagcagcggacgccagagagaaagcccagaggccccgggaccggcc

SEQ ID NO: 138511 - RNA, 63 nt, Homo sapiens
cccagcgccgcccccggagggcccacgcagcgccggacaagcaggcgccgggaccccggagcc

SEQ ID NO: 138512 - RNA, 37 nt, Homo sapiens
accccacccgggccgcccgaaggggcacgagggcgag

SEQ ID NO: 138513 - RNA, 48 nt, Homo sapiens
cagacggcgccccaagaccaccaacagcaggcaggggcgcacccaggg

SEQ ID NO: 138514 - RNA, 77 nt, Homo sapiens
ggaaccccagcagcgccggaccgccagaacacaggaaaggaagggcccccaccaccggagccagagaaggggcacac

SEQ ID NO: 138515 - RNA, 59 nt, Homo sapiens
gaggcggagcggacaaggcccggccgcgaggagaggcagcgagaagaaaaagaagagag

SEQ ID NO: 138516 - RNA, 50 nt, Homo sapiens
caagcgggagcagccgagcgcaaccaagcggaagacaccgggaggccagg

SEQ ID NO: 138517 - RNA, 76 nt, Homo sapiens
gcggggggcgggccggaggggagacgggaggcagacggagccgagccacgcggagcgccgggggcccagggacggc

SEQ ID NO: 138518 - RNA, 69 nt, Homo sapiens
aaagcaaaaaaagcagccaagccagccccgaaggccagagagagggagaaagaagagagaccagaaacg

SEQ ID NO: 138519 - RNA, 82 nt, Homo sapiens
cggcccaagacaggcccacccagcccccggagaaacagggcacacgggccacagaggaccagcaaggagaagaaaggagcag

SEQ ID NO: 138520 - RNA, 53 nt, Homo sapiens
gacccaaaggccagcaagagcgaccccaggcccaacaccccaaagccccaaca

SEQ ID NO: 138521 - RNA, 87 nt, Homo sapiens
cggagcccagaccacccgggcgaagcgggcgagcggggggacgccggcggagacgcgggcgagcaaccgccccacggaaaaccagaa

SEQ ID NO: 138522 - RNA, 78 nt, Homo sapiens
ccagccagcagcccgccagccgccgggagcgcccgaagagcggaaagagagaagaaaaccaggccggagaacacggac

SEQ ID NO: 138523 - RNA, 80 nt, Homo sapiens
gcgcacccccggccggaggcaccagcaaggccgggacagcagaaaacagccagcagaaaaagccaaaaagcaagcggaca

SEQ ID NO: 138524 - RNA, 69 nt, Homo sapiens
acaggaggcgcggaggacgccccaccgccgacgcccccagccaccagggagcccgggagaaagacaggc

SEQ ID NO: 138525 - RNA, 38 nt, Homo sapiens
ccccgaaaggagagccccgggcccccccagcagcccac

SEQ ID NO: 138526 - RNA, 70 nt, Homo sapiens
gaagaacaccagaagaaaaacccacaggacaaaagaagaagcagcaagggcgacgccaggagcacaccga

SEQ ID NO: 138527 - RNA, 70 nt, Homo sapiens
cggccggcggccggaggagcggcgcgcgcgcgcgcgcggggccccgcagggcagcaggagcggagggccc

SEQ ID NO: 138528 - RNA, 74 nt, Homo sapiens
cagcagaggccagcgcccgaggacacccgaaggccacagcacgcaggcgcgcacagcagccgcgcccggcgcgc

SEQ ID NO: 138529 - RNA, 81 nt, Homo sapiens
aacagggaaccacacacaaaagcacacaaagaccccccccacaggggagacagagagacgggagggacaaaacaaggaaag

SEQ ID NO: 138530 - RNA, 92 nt, Homo sapiens
gacaagccaacaacaggacggaagccccaacaagccaggacaaaaccaggcagaaccaacacgaacccaagcacaaacaagaaaacgagcag

SEQ ID NO: 138531 - RNA, 76 nt, Homo sapiens
aggggccagcagagcaggaaaacgaagaaggcaaaaccaagaggaaaagagagaaaaaaagaggcgaccagcccgg

SEQ ID NO: 138532 - RNA, 74 nt, Homo sapiens
gcagaaacgcaccaggccaaagaaagagaaggaacaggacgccagacgaaaggaaaggcgcacagcgagcacca

SEQ ID NO: 138533 - RNA, 81 nt, Homo sapiens
ggaccccggggaacccgcagccccaggggacagcgcacgaagcggccagagcagcagggacccacgagccgccgcccgggc

SEQ ID NO: 138534 - RNA, 52 nt, Homo sapiens
cacaagccaccaaagccgcagacagacaaacggaagagccggcaccacccca

SEQ ID NO: 138535 - RNA, 71 nt, Homo sapiens
aaagaaaaagaacaaaggagagaaaggaacggcagaagccaagaacaaaagaggaccgaacccacaacacc

SEQ ID NO: 138536 - RNA, 68 nt, Homo sapiens
cagaggaccccagccgcgcccgggagagcaagcaaccccgggggccaaggaaacggaagaccaaccca

SEQ ID NO: 138537 - RNA, 73 nt, Homo sapiens
cacccgggagagcccggaaaggcccgcggcgaggagcgagcagagggcaccggccccgcaccagaagggcccc

SEQ ID NO: 138538 - RNA, 87 nt, Homo sapiens
aagacaaggaaaaggacaaggggaaaggaaggggccccagggcgcagacaaggcaggagcgcagggagaagaaacgaacggaacgag

SEQ ID NO: 138539 - RNA, 75 nt, Homo sapiens
ccgaaccaaagagcagcaggagacagaagccgaggccgccagcgccaagaaaaaaacaaggccaaagccagcccc

SEQ ID NO: 138540 - RNA, 77 nt, Homo sapiens
gccggccgggagggcggccgcagcagggggcggagcagaaaccagagacagcaccacacagacgggaagaacagccc

SEQ ID NO: 138541 - RNA, 77 nt, Homo sapiens
gagcgcgaaacgcacgagaagagcagacagacagcgaacacggaagccacgaaaagcaaaagcacaggaagccggca

SEQ ID NO: 138542 - RNA, 78 nt, Homo sapiens
agacacagccacgcacgaccggggcaggaaccacagagaacagcccggacacgcgcaccccgaggacacgggagcaga

SEQ ID NO: 138543 - RNA, 68 nt, Homo sapiens
ggacccgcgcacgacccagggcccagaccaagccccaccaacagaagagccccacacacagcccggac

SEQ ID NO: 138544 - RNA, 55 nt, Homo sapiens
cccaggccgagacgaaaggcaggacgcgcccaggagaaaaacagaagggcagcca

SEQ ID NO: 138545 - RNA, 78 nt, Homo sapiens
caacaacgaccggagacggggcccgcagcccaccagcaccgacgcgggaagaacgccagcggaaggccgcggaccccc

SEQ ID NO: 138546 - RNA, 71 nt, Homo sapiens
gacaagcaaggaccgcaggacccaggccagaccggagcagcggggacagggaggaagcgagaaaagacagg

SEQ ID NO: 138547 - RNA, 39 nt, Homo sapiens
ggcaaacagacggcaggaggcggagcggaggcagacaca

SEQ ID NO: 138548 - RNA, 84 nt, Homo sapiens
gcgccgccggaccccagagagccggaacaccagccgggcccgcacaccaccgggcaccggcagaagcggaggaccagaccaagc

SEQ ID NO: 138549 - RNA, 76 nt, Homo sapiens
cccagcgcacccaggagggaacagcccaggagccagagcccccgggaacaggagggaagaaagggacacacagaac

SEQ ID NO: 138550 - RNA, 68 nt, Homo sapiens
aaaaagggcccccacagagacagaacagaagagagccgacccagccaggaaaccgaagagccggaggg

SEQ ID NO: 138551 - RNA, 74 nt, Homo sapiens
cggcccacgacgggaagcccacagcccagaggacggaagacagaaccccgagccccccaggcgccgagggcccc

SEQ ID NO: 138552 - RNA, 69 nt, Homo sapiens
cggggcccaacgcacagacaaaccaagcgccgacaacacccgaaccaagaccagggaagcgcaagaaag

SEQ ID NO: 138553 - RNA, 77 nt, Homo sapiens
gggggggcgcgccggaaaccggagcgcgcagcaggacgagaacccccgcgaaccagaggaacccagcgagcgagagc

SEQ ID NO: 138554 - RNA, 72 nt, Homo sapiens
gaaaggaacccgaaaacagcccaagccccgcggcccagccaacccgcaacaacggcccgaagcggcacacaa

SEQ ID NO: 138555 - RNA, 76 nt, Homo sapiens
aagccgagagggaagcacaggcggcagcccacaggagccaccaggcaggcggggcacaggacggccagcagaagca

SEQ ID NO: 138556 - RNA, 81 nt, Homo sapiens
cggccggcaggaccagcgcgaaagagaccggacgcagccgccaccgagacgagggggagccccccagacccgaaaggagac

SEQ ID NO: 138557 - RNA, 75 nt, Homo sapiens
gaagacagccggcaaagggagacaaaacaccagaccaacaagaccaggaaccaacagggcaaaccacgacgaaga

SEQ ID NO: 138558 - RNA, 75 nt, Homo sapiens
ccaacagcgcgcggcgccagccgcaccggcaccaccgccggcgcggacggaaaacagaggcccaaaaaagcaaaa

SEQ ID NO: 138559 - RNA, 86 nt, Homo sapiens
ggcgccgaaaacaagccggaagggagccaacaaaggcaaaaagaggggggaaaacacgcggcccagcgggcaagcaggcaccaccc

SEQ ID NO: 138560 - RNA, 70 nt, Homo sapiens
cggcaagagaggcaccccgaagaggcgaggagcaacccaggggaccccgcagaaaaagcaaaagagaaac

SEQ ID NO: 138561 - RNA, 79 nt, Homo sapiens
acccgggacaaggcagacgggagcgcaaggcgccccaaggccagacaaaacgccaaagccacccccaaaggcagaggaa

SEQ ID NO: 138562 - RNA, 69 nt, Homo sapiens
ggaaagacgccaaaaacagggaaagggccagcacaggagagaagcggaaacacaaccgccacgaccaaa

SEQ ID NO: 138563 - RNA, 80 nt, Homo sapiens
cgagagagagaaagacgcgaggggacgaggaagacaggggaccagcggggagaagaacgcgcagaacacacccgaggaga

SEQ ID NO: 138564 - RNA, 73 nt, Homo sapiens
agacgcggcggcgcggcgccggcggagggaagaagacggcgaagcaccaacgccaaggcacgaaggcaaaccg

SEQ ID NO: 138565 - RNA, 79 nt, Homo sapiens
gagaacgggagggcagaccagaaaaaaggagccacagcccgaaggagagaggcgccgggggagacccaaccagaccagc

SEQ ID NO: 138566 - RNA, 77 nt, Homo sapiens
aacgccacaaaacaacgaccagaccaggagaacaacaaggcaggaagaagaaccgcagagaggaaaggcgccacaca

SEQ ID NO: 138567 - RNA, 59 nt, Homo sapiens
acgggccaaaaagcacagaagacaacgcacccgcccccaaagagagaagcggaccacaa

SEQ ID NO: 138568 - RNA, 63 nt, Homo sapiens
ggaaaaaccccaagcagcagcagccggcagcaggcaaaaagaaacacgaaggaagagaggcaa

SEQ ID NO: 138569 - RNA, 84 nt, Homo sapiens
ccccacaacccgccagcgagacacccgaggcacgaggaccgcgaaggacaccccgaaacggaacagcccagcaacagagagaca

SEQ ID NO: 138570 - RNA, 76 nt, Homo sapiens
aaccccccaggacgggcggaggcggggggaccggcgggcgggaacgcacaccagcaccagcccaccaaaccagcac

SEQ ID NO: 138571 - RNA, 75 nt, Homo sapiens
acgcggggggggccaagagacagggcacaccaaacccacgggcagcggggaagaagaaaaggaaccgaggccccc

SEQ ID NO: 138572 - RNA, 75 nt, Homo sapiens
gaaagaagcagggaagcacagaaagaccaaaagacaaagaagaaccaccaggacaaaacagcaccaacggagaaa

SEQ ID NO: 138573 - RNA, 82 nt, Homo sapiens
accgcgccacccgccggcccgcgggcaccccaaaggagggacaaaacaagagaagcacagggcaaagacacgcaaacccaag

SEQ ID NO: 138574 - RNA, 75 nt, Homo sapiens
cagacggaagcggccaagaccaggcaagaacggcgcacgacaagaggaccacccgcacccaggggacgcacggcc

SEQ ID NO: 138575 - RNA, 39 nt, Homo sapiens
ggacacgaagcgcagggacgcaaagacaaaaccaaagga

SEQ ID NO: 138576 - RNA, 68 nt, Homo sapiens
gcccagcgcaaccccaagcgcccaaaggcacccaggccacggggggacccaggacaagccaaagagag

SEQ ID NO: 138577 - RNA, 73 nt, Homo sapiens
gacaccagagccagaagaagcaggaaagcgaccaccacgagacacacagaagacgaaagacgaaagaagaaca

SEQ ID NO: 138578 - RNA, 90 nt, Homo sapiens
aagaaccgggacgaagccacaaacagcgcggaagcgcagcgaccacagggccgagaagcgcgcggcgcagcggaggaggagccacccgcg

SEQ ID NO: 138579 - RNA, 54 nt, Homo sapiens
acacgcaaaccacacaagccaggacacggccaaggccggcgagaacgcccgcgg

SEQ ID NO: 138580 - RNA, 53 nt, Homo sapiens
agagaaacgaaagcccaaagacaacaggcccccccgccccccgcggagccccg

SEQ ID NO: 138581 - RNA, 73 nt, Homo sapiens
cagacgcagggcgcccccggccaaacaaagacagaagagcaccaaaaagaagaagaaaagagagcaggcaccc

SEQ ID NO: 138582 - RNA, 68 nt, Homo sapiens
ggcgaaacacaaagggagcagaaccagaaaggaacaaagaaaggcggaaacaaagaagccaaagaaga

SEQ ID NO: 138583 - RNA, 78 nt, Homo sapiens
agccaggaaacaggaggaagaacccaagccaaagcccagcaaccagggggagaagaggccgccacacacccaacggca

SEQ ID NO: 138584 - RNA, 73 nt, Homo sapiens
gaaaccgaaccgccaccagggccaggagacgcgaccgccggagagagaacagagcacgggagacaccgcggac

SEQ ID NO: 138585 - RNA, 80 nt, Homo sapiens
gccccacgggaaggagagcagccagcaggcaaaagcagaccggaaaacccaccggcaagaccacacccgaggggagccca

SEQ ID NO: 138586 - RNA, 82 nt, Homo sapiens
gaggagaacagaagccagccgacaagggcagaacgaacaggaacaaagccagacggcccccacagagagcacacaaacaaag

SEQ ID NO: 138587 - RNA, 62 nt, Homo sapiens
caagcgccagcaccccaaacggcgagcaccaccggaacgccgacggcaaacagaagggcgca

SEQ ID NO: 138588 - RNA, 81 nt, Homo sapiens
gacagcaccacgacagcggcaagacagccccggaaaagagcagaaccggaaagagcgaggccccgagaccccggagagcag

SEQ ID NO: 138589 - RNA, 58 nt, Homo sapiens
cccggaacggagggaccgccccgggagcgggcaaagagccaggaaaaggaaaagaccc

SEQ ID NO: 138590 - RNA, 63 nt, Homo sapiens
ccggccgcggccagcggagcccgggcggggcaggagccgagcaagaaaggagcaggcagagca

SEQ ID NO: 138591 - RNA, 68 nt, Homo sapiens
ggaccaagaagaagaaccagcaaaagaggagagaaagaacccacgcaggacgacagaagaggccggac

SEQ ID NO: 138592 - RNA, 84 nt, Homo sapiens
gaaggaaaaggaggaacgccggcccgagaaagcccgccagcagaccagcacgggacggacgagacgacggagaggggaagagga

SEQ ID NO: 138593 - RNA, 82 nt, Homo sapiens
aagcgcaggaacgggaacgcaggagcgaccaggaacagcaacaaaaggcagcaagaggccagaagaagggccgcgacaacga

SEQ ID NO: 138594 - RNA, 86 nt, Homo sapiens
cgccgccgccaccagcccaagagaaaggcgcagacggggaagcggagccaacagccagggcccggagcggggcgcaaaacaggacc

SEQ ID NO: 138595 - RNA, 64 nt, Homo sapiens
gcagcacgcgaggaggaaaggcaccccaccaggagacaagcgcaagcagccagagcccgggcgc

SEQ ID NO: 138596 - RNA, 80 nt, Homo sapiens
gaggcggagcccgcagaccgcagaaggccggagacaccagcaggaaaccccccaggcaagaggcgcaggaccgggaagac

SEQ ID NO: 138597 - RNA, 76 nt, Homo sapiens
gacgaagacagacacacaagaggacagggagaaagggccccaagaagagggggcagagagccaaacgacaacccag

SEQ ID NO: 138598 - RNA, 79 nt, Homo sapiens
gcggacgaagaggcgaccgccagacggagcacacggacaacggcccgccacgggccccgcagccgcgcccgagcgcccg

SEQ ID NO: 138599 - RNA, 64 nt, Homo sapiens
gcaagcagcggccggaggacgccaaagaaggcacagaaggggagaacccgggagaggagcggaa

SEQ ID NO: 138600 - RNA, 85 nt, Homo sapiens
ggaagggcaagaagaaggagcgaggcccggcaagaagccggagccgcggcgggcagccagagcccagccaacagaaccgcccaca

SEQ ID NO: 138601 - RNA, 78 nt, Homo sapiens
cacgcgagcagccagagacagcccagacagggccccgggacacggagcgacggcagcccccagaacagaagaccagga

SEQ ID NO: 138602 - RNA, 75 nt, Homo sapiens
aagaaccaaagaggaagacaaaagcaaaacgcagcacagggaaccaagaccaggacaaagaagacccggagagac

SEQ ID NO: 138603 - RNA, 68 nt, Homo sapiens
aggacccgggcgggccccacccgggaaaaacgcaggaggagaagaaacaggagaggaggaaacgcaag

SEQ ID NO: 138604 - RNA, 70 nt, Homo sapiens
gagaacacgccaaacggcgacgccaggagcacaccgaaaagaaaggaaaaccgggaggaaaagcaaaccg

SEQ ID NO: 138605 - RNA, 66 nt, Homo sapiens
agaaaacgggaggacgcacccggggaaccagcaaacaagggcggaggcccggagcgggcggggcag

SEQ ID NO: 138606 - RNA, 72 nt, Homo sapiens
gggccagccccaccacgcccccaccacagcccggacgcggaccgagggaacagccaggagagcaagcaaaag

SEQ ID NO: 138607 - RNA, 74 nt, Homo sapiens
agccagcccggcgccgcaggggccggacccgggacaccggagaccgaagaacggaagcgcacgaacaaggcgga

SEQ ID NO: 138608 - RNA, 79 nt, Homo sapiens
aggagccccccgcggcgcggcgcagggccccggccgagcgggaggagcgccgcggaaccgaaggcgggaaaacggcaca

SEQ ID NO: 138609 - RNA, 77 nt, Homo sapiens
ggcgacggcacacagagagaccgaccggacaccagaaggccagaaggaacgaccaaagagaacgagacaaaagaaaa

SEQ ID NO: 138610 - RNA, 74 nt, Homo sapiens
acagggcccggaggcgacaaccccggccaggaacaagggagcccgccagccacacgcacagacgccgggaccgg

SEQ ID NO: 138611 - RNA, 73 nt, Homo sapiens
cgcccggccggaggcaggggaaaggggcgcaccgaagcacgacaacacgccaaccgaccggcgcaagcaggga

SEQ ID NO: 138612 - RNA, 67 nt, Homo sapiens
gcagagaccgggcgagcgacccaggaaggagagagagcgaggcacagaagaaaaggagcaccaaacc

SEQ ID NO: 138613 - RNA, 79 nt, Homo sapiens
ccgggcccggcggacagccgcacccgcgccccagcaggcagcgagggagaagaaaacagagacggcagaaggaggggga

SEQ ID NO: 138614 - RNA, 63 nt, Homo sapiens
cgggccgcaggcagcccgcggcagcaggacacaggacccaaagacaggaccacgcaccagcag

SEQ ID NO: 138615 - RNA, 75 nt, Homo sapiens
gcagaagagaagcgagaacagccagagagaccaaagagaacccgacagaagaaaagggggacccacagaacacca

SEQ ID NO: 138616 - RNA, 80 nt, Homo sapiens
caacgaccggagaggggaacagacgcagggcagggccccgcccggcggggaaggagacggcgaagaacagaggaacaacg

SEQ ID NO: 138617 - RNA, 81 nt, Homo sapiens
aagaccggaaaggccacacgaagaaccagggaagggaaaagaagaaacgcaaagaaaacccagcaaacacaacccagcaag

SEQ ID NO: 138618 - RNA, 59 nt, Homo sapiens
ggagacgcaccagcagccaccaggagcccgagagagaaggaggcccccagaggagaagg

SEQ ID NO: 138619 - RNA, 77 nt, Homo sapiens
aagacaggcggccaaacagcaccgccgccggccaccggacagaagagccaagacaacccacggcacgccgagcagga

SEQ ID NO: 138620 - RNA, 67 nt, Homo sapiens
cgaaggcgccggccaaaagaggcgaaaaaccccgagcacacgaaaaacacagcaaacccaaagcacc

SEQ ID NO: 138621 - RNA, 77 nt, Homo sapiens
gcgagcgacccggggccgccgccaaggcacggaagaaacaacgccaccacacccccaaaacagaaagagcaagagag

SEQ ID NO: 138622 - RNA, 79 nt, Homo sapiens
cgccgagccgcagccgccccgcggccaacagagccgcgcgagaccgaggcacgggcaggcacagcagaccagaagcagc

SEQ ID NO: 138623 - RNA, 90 nt, Homo sapiens
cccgccgcccccggcccgaccgccgcccgacgccacgcccggcccggccgcgcccgcggaaccagaccaggcaggagacggcagcaagga

SEQ ID NO: 138624 - RNA, 73 nt, Homo sapiens
ggcagacagagaagaacagacgccgcacccccgcgacacaggaaagccacaccaagcgggccccagcaccggc

SEQ ID NO: 138625 - RNA, 56 nt, Homo sapiens
cgaaggggccccagagccaaggaggaaggggccgggaacccccgaacgcaaagcca

SEQ ID NO: 138626 - RNA, 85 nt, Homo sapiens
gaggaggaggcgggccaggcgccccgaggcgcgggggaagcgggcggaccccgaaaaggcggcagcagagcgggagcgacaggga

SEQ ID NO: 138627 - RNA, 82 nt, Homo sapiens
gacagagagggaaaagaaaagaccaaagcaagagagagaaagccagaggcaccgaagacccagcccgaaaagaagggcaggg

SEQ ID NO: 138628 - RNA, 75 nt, Homo sapiens
acgggagcgccgcaaggaaagcgaacgcgaaaagaaaagccgagagcagccagaccggcgaagaaagaacgaaga

SEQ ID NO: 138629 - RNA, 65 nt, Homo sapiens
accacaaacccaacaaggaaaaggcccaggcagggcgggcaccaggagcgaagcccaaggcccac

SEQ ID NO: 138630 - RNA, 72 nt, Homo sapiens
acagcaagagaacacgaggacgggcggcagagaagagaagagcacagcgggaggaaagggagagacaagaga

SEQ ID NO: 138631 - RNA, 74 nt, Homo sapiens
ggcagcgaggccgcagaccgccccggcggaagaggaggcggcgaccccgagccaaaacacgcggacaagccagg

SEQ ID NO: 138632 - RNA, 71 nt, Homo sapiens
cgcgggagagaggacccccccccccccccaagcgccacccgacagagaaaaacaaaagggacagcgcacgg

SEQ ID NO: 138633 - RNA, 84 nt, Homo sapiens
gcggcagggcggcgcggccgagcaaacggggacagcgccgaccggaacagggaccacggaagcccaggaccagccccgacaagc

SEQ ID NO: 138634 - RNA, 60 nt, Homo sapiens
gaagaggaacacgaacaaccacgccacggggacaaggccacgaagacggcaaggaggaaa

SEQ ID NO: 138635 - RNA, 87 nt, Homo sapiens
cggaaccgccacagcaccaacaagaggagccaggagcacggggggaacaagaccgccgggacggaagacgggagcgggcccggagaa

SEQ ID NO: 138636 - RNA, 65 nt, Homo sapiens
cagcgacacggcgaaagacagcgaaacgggaacagcagccaccgcagaacaagagaccaaccagg

SEQ ID NO: 138637 - RNA, 69 nt, Homo sapiens
cgcagggcgcccccgaagcacagcccgacagaccgaagaaaagagaaacacaagaggacagacaagccc

SEQ ID NO: 138638 - RNA, 74 nt, Homo sapiens
gacaggaaaaaaagcggaagagcgccagcacgggcgaggaggccgcggacgaaagaagaacaacaggacccccc

SEQ ID NO: 138639 - RNA, 71 nt, Homo sapiens
aggagaaagacgacacagggcagacaggaagagagaagacagcagcgaacaagaaggggcagcccaccggg

SEQ ID NO: 138640 - RNA, 76 nt, Homo sapiens
cggagagcaacaaagccgacccaacccaagggccaaagaacaccggaaacgccaggccacaagggagcaaacgaaa

SEQ ID NO: 138641 - RNA, 74 nt, Homo sapiens
gcaggggaggcaggaccaggccaagcaaaagggaaggaagcagacaggaaggcagaagaagacgaagagaaaag

SEQ ID NO: 138642 - RNA, 88 nt, Homo sapiens
agcgcagcccggagggggagcagacgaaccggaacccgcggaaacaacgaacgagcaaggaagggccaaggcagaccccacaccggag

SEQ ID NO: 138643 - RNA, 36 nt, Homo sapiens
ggaccagaccgcccaggaaacggaaaggagcagaac

SEQ ID NO: 138644 - RNA, 117 nt, Homo sapiens
ggagaagacacggcgagaacggggccagcacagagaggcgacagcggagaagggaaggcgggcggcggacgaagggcaaagaccggggcccgggagagccgcggacggcggcaacaa

SEQ ID NO: 138645 - RNA, 79 nt, Homo sapiens
cgcacccagagaaagaggccacacgcaggcaaaaccaggggcaaaaagcaggcccccaaccaacgagcgggcaaaagcc

SEQ ID NO: 138646 - RNA, 78 nt, Homo sapiens
aacagccgcgcggcgagcggcccgcacaaggccggcagagggagacggggggcggccccggacacgacccgaggacag

SEQ ID NO: 138647 - RNA, 87 nt, Homo sapiens
ggcgagcgagcaccgagcaacacacgcaggcagaaggagagcaggggccaggagggccgaagcccacagcgaggcagagaagcgacc

SEQ ID NO: 138648 - RNA, 82 nt, Homo sapiens
accgcggcggcacgaaggaaaacaaagggccccaaggcccccggacgcaaagaccgaggccaggagagagggccaccaaaag

SEQ ID NO: 138649 - RNA, 60 nt, Homo sapiens
gcccgggacaccaagaaagaacggcaacagcaacgaaacggcacggaggacacaaaggcc

SEQ ID NO: 138650 - RNA, 79 nt, Homo sapiens
gggagacgggccggaacacccggcgaaccagagcccgaagagccaaccacaggagggaaaccacgcaggcaaacgagaa

SEQ ID NO: 138651 - RNA, 77 nt, Homo sapiens
gagaacaacacagcggaacggcaaagcagcacacaaagagggcacccagaccgcaggcacagagcacaggaaggagc

SEQ ID NO: 138652 - RNA, 57 nt, Homo sapiens
aaagaagagccacaaagcaggcagaaacacgaccccccgagagcacccgcgcaaaag

SEQ ID NO: 138653 - RNA, 69 nt, Homo sapiens
gccgaccgagacgggcggagaggagaaggccacagcagaccgggaaaaaaggaagcgaagcagaggggg

SEQ ID NO: 138654 - RNA, 80 nt, Homo sapiens
gggaagagggcgagaacacaaggacgagccaaaagcgcaacccagcccagggccaggcagacaagcccaagacgacaaga

SEQ ID NO: 138655 - RNA, 81 nt, Homo sapiens
aagagggaaaggagagggacagcaccaggagacaaagccacaaaaacaccagaaaaaccaagcagaaaaggagcggcagca

SEQ ID NO: 138656 - RNA, 64 nt, Homo sapiens
ccacacccagaagacgacggcacagcgcacaagaaacccaagcgcgagacgccccgaaagaaaa

SEQ ID NO: 138657 - RNA, 113 nt, Homo sapiens
agaagagcaaaaaaaccagagcaaaacacacgaacgcgagaaagcaaacccagaccacaccccggagaagacaagagaaaggacaccagagagcgcaggaagggaaccacgag

SEQ ID NO: 138658 - RNA, 81 nt, Homo sapiens
gcagcgcgcaggcggggcccaacccgggaaacaccccgcgcaggcccggaaccccacgccagcagaagagccaaccagacc

SEQ ID NO: 138659 - RNA, 74 nt, Homo sapiens
gaccccagggcaccagcaacaccccaggccggggagggcgcgccgaaagcgaaaaacgcaagggaaaagagaaa

SEQ ID NO: 138660 - RNA, 65 nt, Homo sapiens
aagggccaaggaggcaaaggcccgagaacaccccagacgaaccccgggccggcgagacaccagaa

SEQ ID NO: 138661 - RNA, 72 nt, Homo sapiens
ggccgaccgagagccgggacgaacagcgggccgcagccaagcgccgccggagacgagaaacccacccagcaa

SEQ ID NO: 138662 - RNA, 80 nt, Homo sapiens
gcggcggcggcggcagcagcggcagcggcaagcaccggaaagagagagacgggaagccaccaaaaacaaggaagcacaca

SEQ ID NO: 138663 - RNA, 70 nt, Homo sapiens
cggggcccgagcgccggccgccccccgcagggcccaggcgagaaaggcgcacaccaagcggcgcacagga

SEQ ID NO: 138664 - RNA, 73 nt, Homo sapiens
gccgaacaggaggccaaacaggagaaagcaacacacgaagggccagaccagagccagagccacccgacccgcc

SEQ ID NO: 138665 - RNA, 73 nt, Homo sapiens
ccaggaggaaaacacaccaagggcacgcacggcggacacagcagaacccccggaccaggcccggccggcacga

SEQ ID NO: 138666 - RNA, 77 nt, Homo sapiens
gcccggagaagaacggaggcgccagggaaaaaaccccaaacagaaaccgacagacacagaagaaaaaggccgaccag

SEQ ID NO: 138667 - RNA, 56 nt, Homo sapiens
acggcagacacacaacccgacccgacgagggacccagaaagaagcacaaaacaaac

SEQ ID NO: 138668 - RNA, 73 nt, Homo sapiens
cgaccgcagaggaggaggagggcaacccggacaagcgggggcacccacagaggcaacgaaagcacaaaagaaa

SEQ ID NO: 138669 - RNA, 65 nt, Homo sapiens
gccacaccgccccggagagccccgggggacacaagagccaaaagggccaacggccgccaccaaaa

SEQ ID NO: 138670 - RNA, 83 nt, Homo sapiens
caggccaagccgggggggcgccgagcggggaagcccgcaaacagaaaagaggaggcgagcgggaacaagcaaaaaagacgaca

SEQ ID NO: 138671 - RNA, 65 nt, Homo sapiens
agcgaccgagggacgggagcgaggagccaccggcgacacgaccccacagaggacccacacgaaga

SEQ ID NO: 138672 - RNA, 71 nt, Homo sapiens
cgaagcgggaaggcgagagccaaccagaccccgagaaaaagaagacccagagcaggacggacaccgaaccg

SEQ ID NO: 138673 - RNA, 78 nt, Homo sapiens
cggagcccaccggccaacacaaacccgaaacacaaggcagccccagcagcacggacagcggacgggcagccggggcag

SEQ ID NO: 138674 - RNA, 74 nt, Homo sapiens
gcggccggaaaaaggcgacgggcagaggaaggcggccccaaccacccccagcgagagagaggccaaccccggcc

SEQ ID NO: 138675 - RNA, 38 nt, Homo sapiens
aggaggagcaaagcccacaggaagcgaaagggggcaga

SEQ ID NO: 138676 - RNA, 81 nt, Homo sapiens
caaagccgcccagacggccaccggcgggaggaacaaaaggggccgaaaagaaggacccaacaccgccccaagcaccagccg

SEQ ID NO: 138677 - RNA, 107 nt, Homo sapiens
gcccgcgcgcccggccaagaggcaaaggggaggacgcagcaaaccaccagaagaggcccacgcggaccggcagcgccaccggaccaccagacaaggacacggcccaa

SEQ ID NO: 138678 - RNA, 54 nt, Homo sapiens
gccagaaaacaagaagcagcggagaccagcacgggcaacgcggcgagggggggg

SEQ ID NO: 138679 - RNA, 57 nt, Homo sapiens
aacgaagaaggcccagcccaccagagccaaggagcaaaacgaacgaagaagccagag

SEQ ID NO: 138680 - RNA, 52 nt, Homo sapiens
cccccaagacgggacacagccagaggaggacgagccccgccagggagacaac

SEQ ID NO: 138681 - RNA, 78 nt, Homo sapiens
ggagcgaacccgagagcgggagcgggcgggccagagagaggccgcagaagggcagaagaacaggccgggcacaaaaag

SEQ ID NO: 138682 - RNA, 76 nt, Homo sapiens
accgggggagcaagccagcagcaggccaaacagggagcaccgcacaaggaaaaaccaagaacgacagcgaggaacc

SEQ ID NO: 138683 - RNA, 54 nt, Homo sapiens
cccagcgagcccagcccccacaggacacaagggaacccagaaggccggcgccac

SEQ ID NO: 138684 - RNA, 74 nt, Homo sapiens
cccccaggggaccaacccagaccacacgaaggggcagaagagcacaagacggaagagaggagcgaccagacggc

SEQ ID NO: 138685 - RNA, 73 nt, Homo sapiens
aggaagccgacgcgccggcgcaaagaagcccaagccaggacggaccccaagcaagccgaagcaaacacaccac

SEQ ID NO: 138686 - RNA, 52 nt, Homo sapiens
cggccgaggccgacccgaggagcaacccccaaaagagcccccgggccacggg

SEQ ID NO: 138687 - RNA, 75 nt, Homo sapiens
gaacggcggggggacgccacacagcacaacacaacacgccccgaaggacccaccccggcacccccccggagacac

SEQ ID NO: 138688 - RNA, 96 nt, Homo sapiens
gcaagcgcagcaacaacagagagcacgggaccgaaggagaagaaggagaaggggaggagaaggcaagccggaaagagcgaaagaaagaagggggag

SEQ ID NO: 138689 - RNA, 74 nt, Homo sapiens
gcaaaggcggaccgacaccacgacgacgggccacagcagccggcggcggcagaggcaaagcaccacaggggaaa

SEQ ID NO: 138690 - RNA, 57 nt, Homo sapiens
ccgccgcgcaaaaaccgaggaaggagagggaccggaccagcccgacacgggagcgcg

SEQ ID NO: 138691 - RNA, 72 nt, Homo sapiens
gggaagccgcagcggaaagcaggagcacaggaaacagagcaaagcagcgacaacaaagacagaggaagaaaa

SEQ ID NO: 138692 - RNA, 83 nt, Homo sapiens
gagccaggccgcgacgcggggcacgcacagcagcacgggggcgcggacagaaaggaccaaccaagaagcgaagaaaagagaaa

SEQ ID NO: 138693 - RNA, 79 nt, Homo sapiens
ccgccagcacagcgccaaagacacgcacggaacggagcggagcacaaggagccggggagagggacagcgaggaggcccc

SEQ ID NO: 138694 - RNA, 77 nt, Homo sapiens
gagccaagaggacaaccgggaggcaggaccgagggaacagccaggagagcaagcaaaagggaggcacgacgggggag

SEQ ID NO: 138695 - RNA, 75 nt, Homo sapiens
caggaaaaaaggagcaagaaagcaaaggaacaacacaccaccaccaagaaggaggaaaaggaaggggaaccacag

SEQ ID NO: 138696 - RNA, 86 nt, Homo sapiens
gaaaagagaagacccgggcagggaaagacccaagaagccagcaagaagacagacagcaccaggcccgaagcagaaaacagagggaa

SEQ ID NO: 138697 - RNA, 69 nt, Homo sapiens
aaccgcagaccgggccgggccgccacaggcgagcggccccggaggaagagcgggggcgcgagggcggga

SEQ ID NO: 138698 - RNA, 41 nt, Homo sapiens
aggagacaaaaaagcccaaggccaccgaacaaagaaccgca

SEQ ID NO: 138699 - RNA, 80 nt, Homo sapiens
cacaagcacccgccgggcgcccccccagcgggcggagggacaaccagacggaaaacccggccacgagcagggaaaggaaa

SEQ ID NO: 138700 - RNA, 72 nt, Homo sapiens
gaagaacccggagccaggggaacaagggaagccagaaaacgacaaggaggcacacgggcaagggacagaagg

SEQ ID NO: 138701 - RNA, 60 nt, Homo sapiens
agacggcggaccgcgggggagaacacacaccccaagcagcccaccaggggcggacacccc

SEQ ID NO: 138702 - RNA, 52 nt, Homo sapiens
ccaaaacaggacacaccaagccaagaaggacggacccaaccagggcagaacc

SEQ ID NO: 138703 - RNA, 85 nt, Homo sapiens
gcgccgccgccgcgggagccgcgcccgaaccccggcccgaacccaggaggagccgaggaaggcgccaccacgaccgccgaaccgg

SEQ ID NO: 138704 - RNA, 73 nt, Homo sapiens
ccggccgcaacggccaaagaagagacgcgacgcaccagaaacggaccgaggacagacaccaacgggcccgccc

SEQ ID NO: 138705 - RNA, 75 nt, Homo sapiens
acccccccccgaccgcggcggccggcccaccggggacgccagcaaggcacgcacaggccccccgcagggccagcg

SEQ ID NO: 138706 - RNA, 59 nt, Homo sapiens
accagcgggccggaggagccagagcgcagaaagaccagaggacaagacaaagggagcaa

SEQ ID NO: 138707 - RNA, 79 nt, Homo sapiens
cagcagggaccaagaggaaacgggacacgcccaccaagaaagaaccggaaaggggaccgggccaggaaagcagaaaagc

SEQ ID NO: 138708 - RNA, 90 nt, Homo sapiens
ggcaacaacagccaccacagccagcaccaccaccaccacgccacgacagcagcaggagagaagagacgaggaggaggggagaccgcggca

SEQ ID NO: 138709 - RNA, 98 nt, Homo sapiens
ggcggcaagccagaacccaacaaggaggccagggcggccagaaacggcgaggaaagagaggagccccggaaagaaaaggacagacccggccagaaagg

SEQ ID NO: 138710 - RNA, 77 nt, Homo sapiens
ggaggagagcacccacagggggcggggcgccaaccaccgcacgccggcggcaaggcggccccggcggccacccgcag

SEQ ID NO: 138711 - RNA, 83 nt, Homo sapiens
agacagaggaacccagggcaagaaccggacaccggaaggggcccccggggggccacacccagaccccggaaaagcacgagggg

SEQ ID NO: 138712 - RNA, 78 nt, Homo sapiens
gaggcagaaccccaaaaccagcagaccacagacccacagcgaaagcaacaggccacgaggcccagggaacccggacca

SEQ ID NO: 138713 - RNA, 109 nt, Homo sapiens
cgcggcgcgcgcccagcgccgccccgcgcgcgcccgccacggcgccgagccgcggccgaaacacaaccgccaaaaaaaaaacaaggagacgaggccacgaggaaggagg

SEQ ID NO: 138714 - RNA, 73 nt, Homo sapiens
gcagacacaaggcaccacaacaaccgagaaaaggaccacagaaggcccggaggcgcccgcgggccagcgcgcc

SEQ ID NO: 138715 - RNA, 61 nt, Homo sapiens
ggggaagagcaagcgaggaaaaacaccaacaggcacagagcaaggcgccaccggaagaaac

SEQ ID NO: 138716 - RNA, 75 nt, Homo sapiens
cagagcgcacggcgacgccccaggggaaaacccccgggaccaggaaggagggccccggagcagccacaccaccga

SEQ ID NO: 138717 - RNA, 74 nt, Homo sapiens
gagcccgcgcaggggcggcccagccgagacagcaggaacgacgaagcgggacgggggcggccccgggaacgccg

SEQ ID NO: 138718 - RNA, 84 nt, Homo sapiens
ccgccgccagcagcagcgcagcagggcagcgcagagcggcagcagccccagcccaaggccaggcaggagccagaagccaggagc

SEQ ID NO: 138719 - RNA, 101 nt, Homo sapiens
agagggcggagggcgagcagcaaccaaagcaagccaagaggaggaggaggcggaggccaagcggaaagacgaggagacggcagagggaaagaaagcaacag

SEQ ID NO: 138720 - RNA, 79 nt, Homo sapiens
gcccgcgggcaccggcagaaaggaggaggaaaacacccccagcgaagccgacgagcccgaacagacgcaccagcgggag

SEQ ID NO: 138721 - RNA, 71 nt, Homo sapiens
cgccgcacaacaagcgcggaccggaaggaccgcacaagaccaagcaccacaacggaggaaagccaggaagc

SEQ ID NO: 138722 - RNA, 59 nt, Homo sapiens
cccgggagcaagcggggacggcgcggccaggcgcacacacaaaggggagccaggaagaa

SEQ ID NO: 138723 - RNA, 74 nt, Homo sapiens
cagaaaacagcagcgaacccagcagagaaaacagaaggagaccagggaagggccaggggaagaagacggacaga

SEQ ID NO: 138724 - RNA, 89 nt, Homo sapiens
gcccacggaggaagaggaggaggcgaaggaaggacccagcagagaaacccagcccccgcagccaagcacaggacagacaagcgcacgag

SEQ ID NO: 138725 - RNA, 84 nt, Homo sapiens
cggcagcgggcgggccccgagagcagcagcgaacgccaaaagacgaacacaaagggaaagaggagaggcacccgaaagccaggc

SEQ ID NO: 138726 - RNA, 68 nt, Homo sapiens
gccacaaaggccagagaaaaaacagagaggaggcgcaggccaggcggcagaacccgagcgaaacaacc

SEQ ID NO: 138727 - RNA, 71 nt, Homo sapiens
agcggcgacacacgacgggaaagagaaaggagaccacaagaccccgcgccaccaaagggagggcggccaac

SEQ ID NO: 138728 - RNA, 56 nt, Homo sapiens
acgcgcccggggcgaggagcccacgaccaccaggaaacagaagagacagaaggaga

SEQ ID NO: 138729 - RNA, 69 nt, Homo sapiens
gaaggcgcgcgggggaggccggggcagccgaaagaggcacgccagagaaaggaaagggcggcaggaaga

SEQ ID NO: 138730 - RNA, 58 nt, Homo sapiens
ccgcggaagcggggcgcacaccaccggacaaccgacaaaagccccgagccccggcccc

SEQ ID NO: 138731 - RNA, 92 nt, Homo sapiens
cggccgacgcccccccccgcccggaaagcgcccagccaccagcaaccccccagagccaaaccccagccaccggaagaagaagagaacaccga

SEQ ID NO: 138732 - RNA, 55 nt, Homo sapiens
gaaagaggcacgcagacaggccaccgggagcaggagagggccagaagacaaaggg

SEQ ID NO: 138733 - RNA, 83 nt, Homo sapiens
ccagacgaagacagcccggacaccgacagcacagacagaacccgcaccagacaggacagcagccgcaaccaagcacacgagag

SEQ ID NO: 138734 - RNA, 75 nt, Homo sapiens
gccaaccccagcaaaaagcccgcaacaagaagcaggaacaaacaggggaaggacacgaagcagaggcccaagagc

SEQ ID NO: 138735 - RNA, 74 nt, Homo sapiens
gccaccaaggacagagcagacacaccacccaacaggaaaacccaaccccaagaaacagaagcaaaaaaggcgcc

SEQ ID NO: 138736 - RNA, 65 nt, Homo sapiens
ccaccgggaccacagggggagagacaaccagagcggaaagggagaaaagcccccagaaaggaggc

SEQ ID NO: 138737 - RNA, 73 nt, Homo sapiens
aaacaaaaaaggaaccaagcaccgggcagacgaggggcaaaacaggagggcgacagaccagagaaagagaagg

SEQ ID NO: 138738 - RNA, 72 nt, Homo sapiens
agcgggcgcaggcggcacgaaacggagcccggagcagcggcggcgaaagacaaggcagaaaaaaccccaaac

SEQ ID NO: 138739 - RNA, 89 nt, Homo sapiens
ccgggaccggcggcgcgcggcggccgaggccagcagaagaccgaagaagcagccgaacacggagcagaaacgagcgcgaacgggaccca

SEQ ID NO: 138740 - RNA, 91 nt, Homo sapiens
gaggaccgaaggacgcgcaggagaagcggagccacggagaagaaggccccgacggcggaaaacaccccaaaagccaaaagggaaaggaaaa

SEQ ID NO: 138741 - RNA, 75 nt, Homo sapiens
caaacccccagacaagaacacaacccaaacccgcccggagaagaagcaccagccgacgcgaacggaacacccggg

SEQ ID NO: 138742 - RNA, 95 nt, Homo sapiens
gcaggcgcgcgccgccccaggccgcaagacccagcgcccaaccgcccggcacggggcaccgggcccagaggagcagcccggagcgggagccccgg

SEQ ID NO: 138743 - RNA, 37 nt, Homo sapiens
cgcggagcaggcgcagagcagggggaaagggaagaag

SEQ ID NO: 138744 - RNA, 69 nt, Homo sapiens
gaaagagaaaagagaaggcagggggagaagaccaccgccacaccagcagggaaaaggagccacaaagac

SEQ ID NO: 138745 - RNA, 70 nt, Homo sapiens
gaccagggcagacaggacccgaagacaaaaccacccacgaaagcgaaaagacccaaaacaaggcagccac

SEQ ID NO: 138746 - RNA, 85 nt, Homo sapiens
gaacgcaagaccaccgagacacaaagagacagcgcagaggagccaaagccaccgcccagcccagacaagccccggacaagagacc

SEQ ID NO: 138747 - RNA, 78 nt, Homo sapiens
cgacccccgcaaggaagcgcaggcgagcaaagcccccaacaccggccgcagaaagccggccaccggccccgggcagca

SEQ ID NO: 138748 - RNA, 36 nt, Homo sapiens
cagagggccccggaccaaaagccgcagccagcccca

SEQ ID NO: 138749 - RNA, 74 nt, Homo sapiens
ccggagcggccgcgagccaccgaggcccagggaccccggcccagcacggccacaagaccagcacgcgccacaca

SEQ ID NO: 138750 - RNA, 75 nt, Homo sapiens
aggaggaaaacggccaacccaccgcgccgaaagaagaaaggaaggacaacccgggggacgccgccacgaagaaga

SEQ ID NO: 138751 - RNA, 51 nt, Homo sapiens
cacacacagcgaccgggagcacaccacaggcaagagcgcacagcaccaacc

SEQ ID NO: 138752 - RNA, 92 nt, Homo sapiens
ccagcccgcgggcaccggcagaaaggaggaggaaaacacccccaggaaagcacaaagcgcggaaaggcaacacggagagaaccgggagcccg

SEQ ID NO: 138753 - RNA, 83 nt, Homo sapiens
cacccccgccagcagccgccggagccagccaacgagcggcaaacgaacacgcgcagcgcagaggcccggcagccccaaggaac

SEQ ID NO: 138754 - RNA, 87 nt, Homo sapiens
ccgcggcgcgcgccggagagggagggcaccgcgcgcgaaaaagagaagcgcagcgaaaagaagagcaccgaggaacggcagcacccc

SEQ ID NO: 138755 - RNA, 80 nt, Homo sapiens
ccgcgccggaccgcggcagaagaaagcaagacccaggacaccccgaagccgagaaagggacaggagagagggcaagagac

SEQ ID NO: 138756 - RNA, 79 nt, Homo sapiens
caaagcggaaggacagaagaacagagacagggagaaacacgcccgcaaagaaccacgcagaaaaggggcaaaagaacaa

SEQ ID NO: 138757 - RNA, 83 nt, Homo sapiens
ggaacgagaaggaagagagccaacccacacagcaggcacaggccgccccagaccccggaagcccaagacgcaaaaagagaacc

SEQ ID NO: 138758 - RNA, 85 nt, Homo sapiens
cgcgcccgccgggccaccgcgcccgcccagccccgcccgagcaggaaccaagggggagcccaccagaaacccccagggaaggaga

SEQ ID NO: 138759 - RNA, 42 nt, Homo sapiens
aaagagacagaagccgggcccgacgccgccgacgccacgagg

SEQ ID NO: 138760 - RNA, 68 nt, Homo sapiens
cagggaggaaacacggggcaaaaacgggggagagcagcggcgccagcccgggccacaccgggacgcac

SEQ ID NO: 138761 - RNA, 59 nt, Homo sapiens
aagaaaaccaacacgacagcaaccaacggcgcggaagggcggagaacggaaaagcacca

SEQ ID NO: 138762 - RNA, 85 nt, Homo sapiens
cgacacgggggaagcacaggcgaaagacaccagcacccgaggccagcaacaacaccgccagcaagcacaagccaggaagcggaga

SEQ ID NO: 138763 - RNA, 71 nt, Homo sapiens
ccggagcgcgcgcgcccgcgaagcgagcgccgccgagcgcaaaaaccagacaccccacaccaccacccaga

SEQ ID NO: 138764 - RNA, 44 nt, Homo sapiens
cgccagacgcgcggccggccgcacgagacaaaaggaagaggaga

SEQ ID NO: 138765 - RNA, 68 nt, Homo sapiens
aaaaggcaacggacgacacaacaaaagaggaggccaaagaaaggggacacaaaaccacggaaaccagg

SEQ ID NO: 138766 - RNA, 74 nt, Homo sapiens
aaaggagcaccccaggcgagcagcaggcacaccgcagcaagggaccaggcgaccagaagcaagaacaacaaacg

SEQ ID NO: 138767 - RNA, 84 nt, Homo sapiens
ccgcagccggcagaagaggccgcgcacggacaccggcaaccgcccagcacaaggccaaggcaaggacggggacacaagaccagc

SEQ ID NO: 138768 - RNA, 77 nt, Homo sapiens
aagaagggcccccgaagcagggagagaggccagccaggggaacacgacggcgaagaggcagaagcagagacagacag

SEQ ID NO: 138769 - RNA, 77 nt, Homo sapiens
gcgaaccgccagacccccagcgcagacccacccggaaggcaggggcacgagcagcccaggggagaagagggcagcag

SEQ ID NO: 138770 - RNA, 71 nt, Homo sapiens
gggccccagccccgcccgcccccagcccgggggcacccgaggaggaagagggcagggcccacggaaagaag

SEQ ID NO: 138771 - RNA, 72 nt, Homo sapiens
agaccacccaggaggaaagaccacccccccaccccggaccccgcaaaaagcggcagccgacaccccaggaca

SEQ ID NO: 138772 - RNA, 72 nt, Homo sapiens
aagacaacagaaccaacaaagcgggccggcgcccagaaaggcgaacccaggcacccagagacggagcggaaa

SEQ ID NO: 138773 - RNA, 56 nt, Homo sapiens
caccgcggggggcggggccgcgacaaggccggaagggggaaggccacaccccaaaa

SEQ ID NO: 138774 - RNA, 75 nt, Homo sapiens
acgcgccgcggccacaccccaggagcagccaccaagggggagcacagggaggaggcaggggggcagcagcagccc

SEQ ID NO: 138775 - RNA, 78 nt, Homo sapiens
ggccacgagaaggcgcgcgagaccaggagaacgggagacagacccagcacggaccccccccccagccgggcgaggccc

SEQ ID NO: 138776 - RNA, 69 nt, Homo sapiens
gccacgaagaaaaggggaaggaggcgaacaggaaggagcaagaacgagcccaagggaaccagccaagcg

SEQ ID NO: 138777 - RNA, 58 nt, Homo sapiens
cagaggggcgccaggcgagacggcagggcaaagccggggagcaccccaagggccacac

SEQ ID NO: 138778 - RNA, 80 nt, Homo sapiens
ccagggacgagaggggcgccgacaggggagagaagaagagaagagagccacccaaagagagaccgaagaaaagaagaaga

SEQ ID NO: 138779 - RNA, 73 nt, Homo sapiens
acgaaccaggacggcaaaagcaccaccgggagaaaccggaagaggaaaccccagaacgagcgagaaggaaaag

SEQ ID NO: 138780 - RNA, 71 nt, Homo sapiens
cggccgacaaccacggcaagcggcagccacacccggagaaggagccgcccagggacgaagcacccagggag

SEQ ID NO: 138781 - RNA, 65 nt, Homo sapiens
ccagagagcggagggagccacggagcggccaaagagagcaggagacggagggcagaggcagggag

SEQ ID NO: 138782 - RNA, 68 nt, Homo sapiens
cgcgcacagacggggcacgcggacacaccacccccgaggggacaaggagggcaagaccccagaagagg

SEQ ID NO: 138783 - RNA, 69 nt, Homo sapiens
agagaacacacaaacaagaggcaagaagacccaaagcggagaaaaagacccaggaaaagaagaaccccc

SEQ ID NO: 138784 - RNA, 73 nt, Homo sapiens
cacccagaggagacagccacaagaggacaaaggggcagggaaaaaaagggcggagaacggaaaagcaccagga

SEQ ID NO: 138785 - RNA, 55 nt, Homo sapiens
ccagaacacaaaaacaaaaaaggaacggagaaggaaggaagagaaccgaagaaga

SEQ ID NO: 138786 - RNA, 57 nt, Homo sapiens
aggaccgaacgagaagccaacgcccaagaagaaagcgcggcccaaacgagcaaccaa

SEQ ID NO: 138787 - RNA, 56 nt, Homo sapiens
ggcaaagcggggaggccagcgacgccaggaagaaaacggcggaggcagggcacagc

SEQ ID NO: 138788 - RNA, 83 nt, Homo sapiens
caacccggaggagcagggaaaagaccgaggcagcaccaccgaccagccacccagacagcgaagacaacagagcgccaaggcgg

SEQ ID NO: 138789 - RNA, 68 nt, Homo sapiens
gacgacagcaggagcgaagcaacagagaacaaggacggcacaaaccaggcgaccggcccgaggaccgc

SEQ ID NO: 138790 - RNA, 69 nt, Homo sapiens
agaaaaacaaggcgaaagcgcccgcaaacgcaggcaggcaaggccacgacacaggagggcccaaacccg

SEQ ID NO: 138791 - RNA, 54 nt, Homo sapiens
ccccaccagccccaaaaggcggcaacagaagcagaagccagcagaagaaagaga

SEQ ID NO: 138792 - RNA, 76 nt, Homo sapiens
ccagcaggggccagcccccggccccccgcaagcgagacccgagaaacaggaggcgcagggcggggccccacaacga

SEQ ID NO: 138793 - RNA, 69 nt, Homo sapiens
aacacccaacaccagcagagcccaagagaacgaaagcacagaaaacaacgccccaggaccgcagagggg

SEQ ID NO: 138794 - RNA, 56 nt, Homo sapiens
cacagagccaagcgccaaagaaagggaagcgagaagagcagaagaggcagacacaa

SEQ ID NO: 138795 - RNA, 68 nt, Homo sapiens
gcagccaggaaacggaccacacaaggcaggaccggccagggaaccaggggcccagcgaagacagcgaa

SEQ ID NO: 138796 - RNA, 90 nt, Homo sapiens
aagcagaccaccaagaaggggaagggggcaaacgcagaggcgggaacaaacagccccaagacgggaaagagccaagaagcagaagacgga

SEQ ID NO: 138797 - RNA, 71 nt, Homo sapiens
aagcaggggaagcagcgcacgccagacaccacgcaaacaaaagaaaaccaaaaagcgaaaaaccgcaagca

SEQ ID NO: 138798 - RNA, 71 nt, Homo sapiens
caaagcaagaagggcccaagaacgggccgccgcccggcgaaaagggggcccacgcaacaagggaaaggcaa

SEQ ID NO: 138799 - RNA, 74 nt, Homo sapiens
gccgagcacagcacgggacgcgccaaggcgcagagaacaccgagcggagcaaggagaagccgcccgccgggccc

SEQ ID NO: 138800 - RNA, 78 nt, Homo sapiens
ggagcaggggaaggaacgggccgaaccgggagcgaggaaccagaacgaaaagcgccagaaagaaaaaagggacccaag

SEQ ID NO: 138801 - RNA, 94 nt, Homo sapiens
gaggacccgccgagacgcaacagacgcccagaaggggaggaagccgcagcccaaggaggcgcacgccgggaaggggccgggccaggcgcaccaa

SEQ ID NO: 138802 - RNA, 71 nt, Homo sapiens
agagcaggccgaggcacagaagaaaggggagccgccaccaaaagcagacggaaaacccacggggaagacca

SEQ ID NO: 138803 - RNA, 66 nt, Homo sapiens
cggaagggaggaacaggccaggaaccggaggggagcaacacgaagaaacgaagccggaggggaggg

SEQ ID NO: 138804 - RNA, 83 nt, Homo sapiens
gcaagggggaagagagagaaacaaaagcgccagagccaagaacggaagcaaaaccgaccaaaaaccaggcacaaaggacagcc

SEQ ID NO: 138805 - RNA, 80 nt, Homo sapiens
gccacagaggcagaagagacaccaggaaggagccagaggagacgcaggaaccgggaaaagaccagaaagaagagcaaaga

SEQ ID NO: 138806 - RNA, 77 nt, Homo sapiens
ggagagacgggcaggacgacgagcagggagagcccggcccagaggacaagcagagaccacagagggacagaggaccc

SEQ ID NO: 138807 - RNA, 37 nt, Homo sapiens
cccagccgcaccggaggaagaggagaaaggcccaaag

SEQ ID NO: 138808 - RNA, 64 nt, Homo sapiens
caagaacagagagagaggggacagacgagagaacgagaacaccggaaacgccaggccacaaggg

SEQ ID NO: 138809 - RNA, 73 nt, Homo sapiens
aggaggacgagagcccaagaccaccccgagagaaacggcgagaaaaccaaacaggagccgacagccggagaag

SEQ ID NO: 138810 - RNA, 73 nt, Homo sapiens
cccagacacacgagacacaacaggggcgggaagcccagccgaacgcccaaaacccgccggaccgaagaagggg

SEQ ID NO: 138811 - RNA, 85 nt, Homo sapiens
aggagaccaagagagggcggggagccggagaaaacagaacggacgggggacaaggcaagcgccggcaggcggagagaacgggccg

SEQ ID NO: 138812 - RNA, 82 nt, Homo sapiens
aagcagccaccagcagcccccagagcgggaccacagaaaacagacacagaccccagagaacgcagccgcagacacgcgaagc

SEQ ID NO: 138813 - RNA, 78 nt, Homo sapiens
caagaaccagacaagcggaaaaacagaaccacaggacaagagccgccacaacaaacaccaaagagaaaacaggcagac

SEQ ID NO: 138814 - RNA, 53 nt, Homo sapiens
acgcagccggaccacagcccggggggaaaaagcgaaccaacacagacccaaag

SEQ ID NO: 138815 - RNA, 75 nt, Homo sapiens
aaccaggggaccagagaggacggcaccagccaggaggccagcaacagaagaaagcaagcaccggggaaagcggcc

SEQ ID NO: 138816 - RNA, 68 nt, Homo sapiens
aaaaaaacaacagcagagcaaggaaagccagacaccgacggaaaagaaccaacaggaggaagccacaa

SEQ ID NO: 138817 - RNA, 89 nt, Homo sapiens
cccagcagagacagcaccaggggcagcagggggccagccaggacacacagacccagcggaaccggcacacacggcagccgccagagaac

SEQ ID NO: 138818 - RNA, 76 nt, Homo sapiens
gccccgaaaacacgagcacaacaccagcgcgcaagaagaccacagaggagggacaaagagggaacggaaaaagcaa

SEQ ID NO: 138819 - RNA, 37 nt, Homo sapiens
ggacaggagagaaaccacagagcaaaggggaccggac

SEQ ID NO: 138820 - RNA, 83 nt, Homo sapiens
cccccacgggcaccaagagcagcccacaggggggccgacacaagagcgcgagaccaacaggggggcaaccggccaacccgcaa

SEQ ID NO: 138821 - RNA, 78 nt, Homo sapiens
ggagagccgaaccagaagagaaagaccaagacacccaggagaaagacagcggggaaaagaaaaaggagggggcaaaag

SEQ ID NO: 138822 - RNA, 73 nt, Homo sapiens
aaggcgagaaccccaccccaccaaggaagaaccagccacagagacacaggaacagaccaaacgcgaagaaccc

SEQ ID NO: 138823 - RNA, 75 nt, Homo sapiens
aaaggagagacacggaacacaaggaagcaaaagcccagaaggaaggagcaaaagccccgccacccgggacagcaa

SEQ ID NO: 138824 - RNA, 76 nt, Homo sapiens
ccggcggaacccagcaaggacaaacaacagaccaaggggcggaaaacccgaagccaggaacagcggcaagccccgg

SEQ ID NO: 138825 - RNA, 91 nt, Homo sapiens
gagcggcgccgagaggccggcgggacgcgggcgccaggaccggccgaacgcagaggaagggggagcaacagacaagcccgaaaggaacagc

SEQ ID NO: 138826 - RNA, 71 nt, Homo sapiens
cacaccccacaggccgccccaacaccagggaagagacacacccaggggagacgcgcggccgagggcaaaaa

SEQ ID NO: 138827 - RNA, 62 nt, Homo sapiens
ccaaagccccgcaacgaggggagaggagaggcaaggcggaggcaagacacacaaagcagaga

SEQ ID NO: 138828 - RNA, 73 nt, Homo sapiens
gaaaaaaccagaagacggaccccaaacaacaaaggcagggagaggggaaagaacgcggcagaacggaggcagg

SEQ ID NO: 138829 - RNA, 79 nt, Homo sapiens
cagaaagggagagagccgcagggaagacacaggaagcgccgaggaaggaaaccagcccagaaccgcaaccgaaaaacac

SEQ ID NO: 138830 - RNA, 79 nt, Homo sapiens
gaggagcccagcacccaaaaggcaagcggcaccacgacaaccccacaccaacgagaggcaacgcgaggagggcaacgag

SEQ ID NO: 138831 - RNA, 50 nt, Homo sapiens
gaccaagaaccaggcaaggagagcgaaaggaaaacaaggcaccaggacca

SEQ ID NO: 138832 - RNA, 71 nt, Homo sapiens
gcggcaagcagacaccaaaggacccagcccccaagaaaacacaaccgaaaaggagcgaggggggcccacac

SEQ ID NO: 138833 - RNA, 79 nt, Homo sapiens
ggagaggaaccggggcacgccccgagccgcccgccgccgaggcaaaagaggagaagagcaggcccagaaaaggcaaaaa

SEQ ID NO: 138834 - RNA, 71 nt, Homo sapiens
aggacgagaaagagaagcacaagggaagaaaaggaagggaaccaggagcgagcaaggagccgcgcgcccag

SEQ ID NO: 138835 - RNA, 68 nt, Homo sapiens
gacaccacgcaaaacaaaagacccaaaaggcaggggaacccaacagcccgccaacgaagaacgaacca

SEQ ID NO: 138836 - RNA, 56 nt, Homo sapiens
gaggcaaagaaacaccaagaacagagcagccaaggccggggaggagaaggaggcgg

SEQ ID NO: 138837 - RNA, 73 nt, Homo sapiens
ggggggaacgacccgaggggggagagcgcgggggcgacggccgagcagggcacaagcccaggaaaaacagaac

SEQ ID NO: 138838 - RNA, 50 nt, Homo sapiens
acaacaggaaaacaaaagaggagaaaggacagcagaccacagcccggcag

SEQ ID NO: 138839 - RNA, 78 nt, Homo sapiens
acagggccagcacgccaccgggaaggcggggaggaggccccaaagggcgaggcggcccagaagcccaggaggaagggg

SEQ ID NO: 138840 - RNA, 68 nt, Homo sapiens
aaagccagcgacccaaaggggccggacccgaaaacacaagaacacagcaacacacggcgcacggaagc

SEQ ID NO: 138841 - RNA, 55 nt, Homo sapiens
cgggaaaaggaggaaagcaagcgaagcacggcacgcaaagaacgcccacaaggcc

SEQ ID NO: 138842 - RNA, 80 nt, Homo sapiens
gaaccacaacccaggaagacacgacccaccagccccacgagccgggcaagagcccaaggggagcccgggggccgcccaca

SEQ ID NO: 138843 - RNA, 75 nt, Homo sapiens
agcgcacggcccgaccgcccgggagacggagcgaaggccggaggaaagcacaccggcccccaaaaacaagaggca

SEQ ID NO: 138844 - RNA, 80 nt, Homo sapiens
agccgggagcgggcagccgaccgggaggccggcaccgccggaggcccaggaccccacaccccccaggcccaagccggagg

SEQ ID NO: 138845 - RNA, 63 nt, Homo sapiens
agcgacgagagagaccggagaggggagagggccaagccgcccgccaaccggcagcgccgacga

SEQ ID NO: 138846 - RNA, 72 nt, Homo sapiens
gagaaggccacaaacggaaccagaagcaaggccgcggacccggcggaggcagggcacacaggcagacaagca

SEQ ID NO: 138847 - RNA, 71 nt, Homo sapiens
gcacgccgaagcaccgccggggggaagccccgcgccggccgcccggcaggaccaaggccgagcccagccac

SEQ ID NO: 138848 - RNA, 63 nt, Homo sapiens
ggaaaggaaccgcggacaggggcaaagaaaaaggagagaaaaagaggcaaaacaacaagaaga

SEQ ID NO: 138849 - RNA, 78 nt, Homo sapiens
acccacacccccccccaccgcagcagcacccgacagagacgaagaggagcagaaccagaagggacacacaggacggca

SEQ ID NO: 138850 - RNA, 62 nt, Homo sapiens
ggacacaaggacaccagcgcagacccaggggagcccaccagccagcaacaggcccggaagac

SEQ ID NO: 138851 - RNA, 87 nt, Homo sapiens
aggggccccagcagcccccgaaggcccacaggacaggagagaaagacgaacaccccaccagaccacccagcaagcccacaaaaaagg

SEQ ID NO: 138852 - RNA, 54 nt, Homo sapiens
cacccggccaccaagaaccgcaggaaagaccacagcaagaccacgcccccagcc

SEQ ID NO: 138853 - RNA, 37 nt, Homo sapiens
gacacccggacccaaacacgagaggcgagggacgaca

SEQ ID NO: 138854 - RNA, 77 nt, Homo sapiens
ggcggaaaaggccggcagaagggaggcacgaggcaggccagacggcacccgacagaagcagcaccaaacaacgcaag

SEQ ID NO: 138855 - RNA, 37 nt, Homo sapiens
gaaccggcacagcccccgggccgagcagagcagccgg

SEQ ID NO: 138856 - RNA, 114 nt, Homo sapiens
ggcggagggggacacccgggcggggcagagcagcccccagccagccgcagagaagaagaaggaggccgcggccagaaacccaagaaaaagcgaaggaacgcagagcgaagacaa

SEQ ID NO: 138857 - RNA, 85 nt, Homo sapiens
gcagccaagccgagccgccacccggcgcagaagccccagaggagcccgaaacccccaggcgggcaggaaggagagccccagcgag

SEQ ID NO: 138858 - RNA, 55 nt, Homo sapiens
cgcgagaacgaccacgcagcaggaccacgcaagacgggcaaggcgagcccgcaga

SEQ ID NO: 138859 - RNA, 82 nt, Homo sapiens
gcccagaaaaaggggcgggacccccccaccggcggcacgacggcagccggcccgggcgcccccagacacggaccgcgccgag

SEQ ID NO: 138860 - RNA, 88 nt, Homo sapiens
agcgcgggcagcaggagacggaggaccagaacacggcagccgacgccccccccagggcagcgcgggccccaggccaggcgcccagacc

SEQ ID NO: 138861 - RNA, 80 nt, Homo sapiens
aggacccacccaaccgcgccacaccacagaacgcacaaggaccgccaagcggacacagacaggcaggagaagaaggagcg

SEQ ID NO: 138862 - RNA, 80 nt, Homo sapiens
gcccgcccgccgaggaggcccccgggggagccaggacggccagcagaagcaggcgagccccccgagaaaaagaagaaacg

SEQ ID NO: 138863 - RNA, 81 nt, Homo sapiens
agaggaggacaggagagaagaagaagaaaccggagaaggaacagaccccggaggaggaaagaacccaaggaaaccccccac

SEQ ID NO: 138864 - RNA, 75 nt, Homo sapiens
gcgggaccacggcagaaggagcggaaggcggagcgaagagccggaccaagcgccagagacgccggggcccggcgc

SEQ ID NO: 138865 - RNA, 68 nt, Homo sapiens
ggccaaagccgcccagacggccaccggcgggaggaacaaaagacagcgaccgcccggggggacgagag

SEQ ID NO: 138866 - RNA, 75 nt, Homo sapiens
gcccgaccacgacacggggaggaccaagcgccccacagaagaacgcccccgccagggagccgccaccaaaagcag

SEQ ID NO: 138867 - RNA, 56 nt, Homo sapiens
ccgccggagacagccaagggcggaaccagggggccggagagaagcacacgcacaag

SEQ ID NO: 138868 - RNA, 86 nt, Homo sapiens
ggagccggccagggccggcgcggcgagagaacaggccgaaagggccacaaacccaaggcgccgaccccgacagaacgggccccgca

SEQ ID NO: 138869 - RNA, 68 nt, Homo sapiens
cggccccggcggccaaacaccgaggaaagaaacagcaaacaaaacgccccaaaacacgaaaggagcgg

SEQ ID NO: 138870 - RNA, 58 nt, Homo sapiens
cagaagggagaaggcgaagagcaagagaagccacagacaagaaagcagacaaccaaga

SEQ ID NO: 138871 - RNA, 77 nt, Homo sapiens
ggcaagagggggaaagcacagggggcaggagacagagagaaagcaacagcaggccagccccagagcccggggagcac

SEQ ID NO: 138872 - RNA, 63 nt, Homo sapiens
caacaacaccgccaccagcgccgcgcgcaccaacacaggcaacagccgcacccagggagaagc

SEQ ID NO: 138873 - RNA, 73 nt, Homo sapiens
agaaaaagccagagcgaaaggaaacaggcgccaaaaaccacacccggagcccgcacacagacggccgcgggcg

SEQ ID NO: 138874 - RNA, 56 nt, Homo sapiens
cagcagccaggaagcagcagcggagaaacagggacaccaagaacgaagcacccaga

SEQ ID NO: 138875 - RNA, 68 nt, Homo sapiens
cggaagacgggacaggacaacacgaagagggaaggaaccagcaaaacaggaggagaaggaccccaaga

SEQ ID NO: 138876 - RNA, 68 nt, Homo sapiens
gggggggggccacgcaggggaggcgccgagagaaggccaaccaaaccacccagacaagccacccaccg

SEQ ID NO: 138877 - RNA, 72 nt, Homo sapiens
gcgcaaaaacaagacggggcgccccacagaggggcgacggaagccaggagggaagcccagaagacgcacaag

SEQ ID NO: 138878 - RNA, 81 nt, Homo sapiens
ccccagcaggccagagagccccgacgccgcaggaacaggcagaggagacaccgcgccacaaaaggagcgccagcccaggcg

SEQ ID NO: 138879 - RNA, 68 nt, Homo sapiens
aaggaccaagaaccagaagccaacgggcccgggcgccacgccgaacgcgagaagccgcagggggggac

SEQ ID NO: 138880 - RNA, 80 nt, Homo sapiens
acgagcaggaggcgaaaaggagcagaaaaacacgacagccagacagaggaggagggaacccggcccccgagcacgagcca

SEQ ID NO: 138881 - RNA, 102 nt, Homo sapiens
ggaaacccgggaccgacgccagacaagacggacacacaacaaaccagagcagcgcaggcaaacgaagcaaaaaccgaagcaagagacagcaaaaagaagcac

SEQ ID NO: 138882 - RNA, 69 nt, Homo sapiens
cagagaccgaaaaccggaggagggcgaaaccgcagacgaagacgcacggggcgcggcggcagcccgggg

SEQ ID NO: 138883 - RNA, 84 nt, Homo sapiens
agaaggaagcgagaccaacgcaacccaagaggaagcagaagcagaaggaacccaaagcgaaaccagaaagcaaaagaaaaagac

SEQ ID NO: 138884 - RNA, 75 nt, Homo sapiens
gcgccagcgccggggcacgcgcgcagcgccgcccccaggcgcaccagcaccagaacagaagaggaacgacagcgc

SEQ ID NO: 138885 - RNA, 74 nt, Homo sapiens
agcggcagacgccaagagaagaacaacaaacggcaaagaacacgacgaggaggaagacaaggccaaagcccgga

SEQ ID NO: 138886 - RNA, 30 nt, Homo sapiens
cacaccccccggagaagcacccccacccag

SEQ ID NO: 138887 - RNA, 35 nt, Homo sapiens
gccggacccgaagaccagagacggggcgccagggc

SEQ ID NO: 138888 - RNA, 50 nt, Homo sapiens
cggccagacgccaggagggcaagaaagcccccacaaacccagaacaaagg

SEQ ID NO: 138889 - RNA, 74 nt, Homo sapiens
aaaaaccgagaacccgaccccgcggagacagcgagacccgccaggagcaaaggagacgcgcagaagaaagggac

SEQ ID NO: 138890 - RNA, 61 nt, Homo sapiens
gccgacgaagcaggagaccccggagaagagccaaggagaccaaacccagcagcaccgcagc

SEQ ID NO: 138891 - RNA, 41 nt, Homo sapiens
cggccaagacccgccgcaaggcccgccagccaccgcagagg

SEQ ID NO: 138892 - RNA, 121 nt, Homo sapiens
cagagacccacaaagaagaagggaaaagaggggaacaaaggcaacacacagaaacagagaaccggagagagagacaaggggaccagcagacacagaggacgaagggaccgacgacagagaa

SEQ ID NO: 138893 - RNA, 75 nt, Homo sapiens
gagacggcgggcagggcaaaaacacaggccggccaacaggacggaaaaacagaaaacaagaagcgcgaagcccag

SEQ ID NO: 138894 - RNA, 35 nt, Homo sapiens
gccggcgaccaggcaggcagcggaagagaaagacc

SEQ ID NO: 138895 - RNA, 62 nt, Homo sapiens
ccaacagcacacagacaacaggagcgaagaagaagcgcaaacgccggcgggggaacgggagc

SEQ ID NO: 138896 - RNA, 55 nt, Homo sapiens
ggcagcagcaccagcccaagagaaggccagccggacaaggaccacccaggaacca

SEQ ID NO: 138897 - RNA, 70 nt, Homo sapiens
gccccagcgcagcagagcgccaagacggaagaaagaagccaccccaaccagcagaagagggaagaaaggg

SEQ ID NO: 138898 - RNA, 81 nt, Homo sapiens
gcgccgcaagaggaggggccgccggcgggaccgcagcacggggaaacgaccgccccaaaacggacccgagccccaaagaca

SEQ ID NO: 138899 - RNA, 66 nt, Homo sapiens
gagccaggacacagcaggcaaccgcggggcgaagcaaagagggcaaccccaaaaggaggggaagcg

SEQ ID NO: 138900 - RNA, 82 nt, Homo sapiens
ccgacaccgcaagaccccgaagcccagccggcggaccacaagggacaccaccagggaccacaccagccccaacggccgacaa

SEQ ID NO: 138901 - RNA, 83 nt, Homo sapiens
cgaggaccgagaccgcggccgggaccgaggccgaaaagacgaggcgaggaggcgagacacccaacccaccccaccccggaggg

SEQ ID NO: 138902 - RNA, 70 nt, Homo sapiens
ccccagagccgggaacaggaaacggggacagaagaacgaagaacaaggacaaggaaaacaggagagaaga

SEQ ID NO: 138903 - RNA, 73 nt, Homo sapiens
cggaggcgaagaagaaacaagacgagagagagacacacccacagcgcgaaccaagacaggaagcccacccaaa

SEQ ID NO: 138904 - RNA, 64 nt, Homo sapiens
accacgagagcccaagccccagagagcccagagaggaccaggaaaaaccccagaccaccaacac

SEQ ID NO: 138905 - RNA, 72 nt, Homo sapiens
cgaggccccccagcgagccgcaggaaaaaaaagggaaccaagaacgagaagagcggcggaagcggaaaagca

SEQ ID NO: 138906 - RNA, 76 nt, Homo sapiens
ccccgcagcagcagcccaaaggaaggagcgggaggagaaaacaaaaagaaagacaaaaggccaacagagggcacac

SEQ ID NO: 138907 - RNA, 86 nt, Homo sapiens
ccaaaaggaggccggagagacagcccagggccgaagcacgaggacaaacgggaggagcggaccacaacggggaacgcaaagacgaa

SEQ ID NO: 138908 - RNA, 41 nt, Homo sapiens
cagacaaccgacccaagcagcgacggagacgggcgaaggcc

SEQ ID NO: 138909 - RNA, 68 nt, Homo sapiens
cccccacggcgaagccagcggacgggcagggcccagaacaggagagagcagccgggcggcccagccaa

SEQ ID NO: 138910 - RNA, 63 nt, Homo sapiens
acaacagggaaccaaggggacaaaccaacagaagggcaaccaggccccgggaccaaggacacg

SEQ ID NO: 138911 - RNA, 74 nt, Homo sapiens
ggccccgacccccgcccggcgccggcccgggccgccagggcagacaaagaaacagccggaaaagcacgagcaca

SEQ ID NO: 138912 - RNA, 65 nt, Homo sapiens
acggggccggcggccacggccggaaggcagcaagccagcgggacaccggaagaaagcagccacca

SEQ ID NO: 138913 - RNA, 63 nt, Homo sapiens
ccgaggaacggcaggcggccccgagcggaaccagagaagcgaggcagaaagacccccccaccg

SEQ ID NO: 138914 - RNA, 71 nt, Homo sapiens
gaagggacgaaaaccgaggaaccaaacccaccgaaaacaggaagaaaccagccaagccgacaaagcccgcc

SEQ ID NO: 138915 - RNA, 81 nt, Homo sapiens
cgaaacaccggaggagcggggagagccccgggggccacgcaaggccggccccgagagccaaagccgcgggaagcgaaggca

SEQ ID NO: 138916 - RNA, 79 nt, Homo sapiens
acgaagagaagcagagcgcaacagaacccacagaaaaccacacagggccagcggagccacaccagccgccacagaccga

SEQ ID NO: 138917 - RNA, 84 nt, Homo sapiens
aaacggaggcaaaggaggcgccgggccccgcccaggacccgacggggaagccaggagcagaacgaaagccaaggacacgcagga

SEQ ID NO: 138918 - RNA, 70 nt, Homo sapiens
cggcaaggagcgagggaacagacacccccgaggcaccagcaagggaccagaggagacaagccgggcccaa

SEQ ID NO: 138919 - RNA, 80 nt, Homo sapiens
acgaaaacgagggaccacacaaagacagccacaggcgggaccagcccacacccaaggagagaaggcgaggggaaccccgc

SEQ ID NO: 138920 - RNA, 63 nt, Homo sapiens
gcaaaaacccggccaggaggacccccaaaaaggggaggggaggcgagaaaaggagaagaacac

SEQ ID NO: 138921 - RNA, 76 nt, Homo sapiens
acgaggaggaacccacacccccaaggcacggggccacaccacgaagcgcgcgcagagaccagcgccgacggggcag

SEQ ID NO: 138922 - RNA, 79 nt, Homo sapiens
ggcgagagaacaggccgaaagggccacaaacccaaggccgaacgaggcggggggcccgagaccacaccacacccaccag

SEQ ID NO: 138923 - RNA, 63 nt, Homo sapiens
ggaagccacggcagacacacaacccgacccgacgaggcccagccccggaaggcaggaagggga

SEQ ID NO: 138924 - RNA, 94 nt, Homo sapiens
ccgaaagcgggcccgggagacccaggcgggacagagggagccaggcagagggggggccccagcccggccgaacgggcgcacgacacaaacacaa

SEQ ID NO: 138925 - RNA, 37 nt, Homo sapiens
cccccagcgggcaggaaggggagaggccaacaaccaa

SEQ ID NO: 138926 - RNA, 95 nt, Homo sapiens
gggaaaaaaagagacaagaaaacagagccacaggaagagcccagggccgaaaagaaaacaggagaaccacccgccaacagcaagcgacccaaggc

SEQ ID NO: 138927 - RNA, 87 nt, Homo sapiens
gaaaccggaggagaaaggcaggagagaagaggcagcagaagccagggcagcgaaagacagagacccaggacaaaagggagaaaccag

SEQ ID NO: 138928 - RNA, 83 nt, Homo sapiens
cggagagagccgaaaacgcaaggccgaagccaaagccagggggcaggagggacagagacgcagaagggccaaccgagagcaga

SEQ ID NO: 138929 - RNA, 78 nt, Homo sapiens
ggacgaggaaggcgagaccagaggggacaacaacaaacagggggcgggagaaggccaacaccaaacaagagacaagaa

SEQ ID NO: 138930 - RNA, 73 nt, Homo sapiens
agcccagacccaggaacaaggccagccccgagagcgcagacaggggggccaagccagagccagaccgcagcac

SEQ ID NO: 138931 - RNA, 52 nt, Homo sapiens
cgaccccccggcgccgcgccggcggcggacaggagagacaacggaggcaaga

SEQ ID NO: 138932 - RNA, 62 nt, Homo sapiens
ccagcggcagcaagagcgccaggagcgccgaagagagggcggagaacggaaaagcaccagga

SEQ ID NO: 138933 - RNA, 79 nt, Homo sapiens
ggccagacaggcaccgcgcccacaaagaaaccgcaggaaacgagccgggccggaaggggggcgacgcggaaggcacaac

SEQ ID NO: 138934 - RNA, 76 nt, Homo sapiens
gaccagcgcagacccagaggaggggaggcaagcaggggggcaaaggaaagaaggcagaaagggaggccaggagcgc

SEQ ID NO: 138935 - RNA, 52 nt, Homo sapiens
cgcacgagcggaggggccaccgggaaaacaaagggcaaaggacacaccgcac

SEQ ID NO: 138936 - RNA, 65 nt, Homo sapiens
agaccgaaaggagagaagaacaaaggaacgcggaagcccggaaggccaacagccaggagaagcca

SEQ ID NO: 138937 - RNA, 73 nt, Homo sapiens
cccagagcacgggcccccggacgcgagcccgcccccgagaccacccaccaccgaggacccacagaagaggaaa

SEQ ID NO: 138938 - RNA, 74 nt, Homo sapiens
gagagaaaacgcggaccagcacacaaccacgaggacgaccccacaacaggccacaggagggacccgcagacggg

SEQ ID NO: 138939 - RNA, 80 nt, Homo sapiens
ccgggcgggccccggacccggagacaccccgcagcacagccgcgaccaaggacaaaccggcgaccacacacggggacgac

SEQ ID NO: 138940 - RNA, 74 nt, Homo sapiens
gaagcggcagaagggacaagcacggagaaagagaacaaagggagacagacccaagaaaagcagaacagccgcgg

SEQ ID NO: 138941 - RNA, 72 nt, Homo sapiens
acgacaacggcacagcggggggggacaagagggcaagcgaaaaagcggacacagggaccggcggggcacacg

SEQ ID NO: 138942 - RNA, 78 nt, Homo sapiens
cagcagagaagaccaggaaagacaggaggccacccccaaagaaaaggccaagaagcgagagaagaaaaacagaaaaag

SEQ ID NO: 138943 - RNA, 63 nt, Homo sapiens
gcacacaaagagggcacccagaccgcagaccccggccgcccccagcggggagcacgcgccaag

SEQ ID NO: 138944 - RNA, 68 nt, Homo sapiens
gagggcgcgggggaccaagccgagccaaccgcgaaaggagaagacggaccagcacggggaccggagaa

SEQ ID NO: 138945 - RNA, 93 nt, Homo sapiens
ccaggagccacgggagccaccagaggccgggagcggcccagcaggagcgccaaccaggcagcggggggcacacgcagagccgggccagccagg

SEQ ID NO: 138946 - RNA, 84 nt, Homo sapiens
gaagaaacgggcaacaaaacccaagggaccaagaaaggcccagggaccaaagcccggacaaggcccgagcaccaggaccgcaga

SEQ ID NO: 138947 - RNA, 69 nt, Homo sapiens
gccagagaagcccagcccgaaagcgggccagacggagcgccgacccaggcggaagcaaggcagaccagc

SEQ ID NO: 138948 - RNA, 63 nt, Homo sapiens
caaaagcaccggccccgcacagcaaaccaggcagacggagaacaggacacaaggacgacaccc

SEQ ID NO: 138949 - RNA, 83 nt, Homo sapiens
gccgcagccagccacccgccagcagcaaaaaacccagaaggggagaaagaacacggcgacgacaccagcagacaaagacagga

SEQ ID NO: 138950 - RNA, 71 nt, Homo sapiens
gaggagcagggccgacgcgcagacagaggcgaaaaaaggaccagcaaagacaccaacaagacagaagaggg

SEQ ID NO: 138951 - RNA, 72 nt, Homo sapiens
aacagaagccaccgcaaaaagaggggagaccaaagaaagagaagacaagaacagaccccccccgaccagaag

SEQ ID NO: 138952 - RNA, 57 nt, Homo sapiens
gccaaaaacagggagaaggaggaaccgacgggaggcccagagcagaacgccgcgaaa

SEQ ID NO: 138953 - RNA, 72 nt, Homo sapiens
agagcccagaacccaaacacggagcagcagaaagcagcgaaggcagcaaaacacggagcgggaacccccggc

SEQ ID NO: 138954 - RNA, 76 nt, Homo sapiens
ggagcgagagcacacaaagaaggggaagagagacaagggcagagaacgggacacacaggccacccagcgagaaaaa

SEQ ID NO: 138955 - RNA, 80 nt, Homo sapiens
ggcgaaagcacccgggcgcagccggagccgggccgcagcgcgaggccgggccgggggagaccgcaacggccgagcgacca

SEQ ID NO: 138956 - RNA, 81 nt, Homo sapiens
gacgacggcaggaagaaaacgagccaggaacaaagagcaagaacgagaaggaaaagcagaaaaaagaagaccgcgaaaaaa

SEQ ID NO: 138957 - RNA, 66 nt, Homo sapiens
accgcgccggcccagcaccccgagaaccgcaggagccagagaggcgccgcgacccaaccgaggaag

SEQ ID NO: 138958 - RNA, 84 nt, Homo sapiens
caccggcgggaggaacaaaagaggcagaaacggggacacaagcgaaaggcaacggcgcacagaacaaaggacgagccaaagagc

SEQ ID NO: 138959 - RNA, 83 nt, Homo sapiens
aaaggggcccagaaccaggcccgaaaaaagagcacagaaaaggcgcccccccacagccccacagaccagagccggccaccggg

SEQ ID NO: 138960 - RNA, 73 nt, Homo sapiens
agaccaccaggagaccaggacagacagagacaagaggacgcaccacgcaggagcgacggcacagcacaggcac

SEQ ID NO: 138961 - RNA, 75 nt, Homo sapiens
aaacaaaaagacacgaagaggaggaagcccaggccgaccacccgcagaccagaaaggcgcaggcacccccacgac

SEQ ID NO: 138962 - RNA, 41 nt, Homo sapiens
gccagggacgcagcacgggaagacagcaagaaagcaccagc

SEQ ID NO: 138963 - RNA, 67 nt, Homo sapiens
aggaaaacaggaacagagcgagggaggagagagggagagccaaagaagaagccaagaccaccaagag

SEQ ID NO: 138964 - RNA, 77 nt, Homo sapiens
caaggcagggaaaaggacggaagagcggagaagcgccaaggcaagaagagcgaaagccagggggcgaaacaaaacaa

SEQ ID NO: 138965 - RNA, 78 nt, Homo sapiens
aagccaccaccacagagccaagaagcgagagaagaaaaacagaaaaagccaagacagaaacaagaaccaggaaaacga

SEQ ID NO: 138966 - RNA, 85 nt, Homo sapiens
gcccaggacacccaggcacagcacccggggaaagccaggccagaagaaggaaggccggggaggggacaggaaagacacaccaccc

SEQ ID NO: 138967 - RNA, 49 nt, Homo sapiens
accgcgaaggcgggggagacgaaaacggcccgagggcaggacagcaggc

SEQ ID NO: 138968 - RNA, 74 nt, Homo sapiens
agggagcccgaccgccaaaagccagggagccacccagcccgcagccgagccgcccagccacgcgccccggcccc

SEQ ID NO: 138969 - RNA, 75 nt, Homo sapiens
cacgccgaggcccgcgccccagccggggcaaagccccagagagagggggagccaggccccaagcgaggaagcaca

SEQ ID NO: 138970 - RNA, 74 nt, Homo sapiens
ccgaggcgaagagcgccaccaaggaagaagagcagacaaggcagcaggagaaacgagaagaaacagacgcgcga

SEQ ID NO: 138971 - RNA, 78 nt, Homo sapiens
acaccggaaggcaggcaaaaagagcacaagacaaagcccaaacccgaaaaagacacgcagcggccgaggcaggggaag

SEQ ID NO: 138972 - RNA, 83 nt, Homo sapiens
aggcgagaaagaagacaggaagcaccagaggaggccacccaaacaagggagaaaccaagaagagggaaacagagaacacggac

SEQ ID NO: 138973 - RNA, 67 nt, Homo sapiens
ggcggaggcggcagagaccgggcgagcgacccaggaaggagagagacgggcgcagacacagaagacg

SEQ ID NO: 138974 - RNA, 88 nt, Homo sapiens
cccagggaccaaccccaaggaggacgagggccgggccgggcgcgggcgagaaagggaggcaaggcaccagcacagaaccaaaagccac

SEQ ID NO: 138975 - RNA, 64 nt, Homo sapiens
acaggaaccgcgaagcaacaaccgcaccaccaggcagaggaaggagaagagccaggcggcggag

SEQ ID NO: 138976 - RNA, 65 nt, Homo sapiens
ggagagaccaaacaggggggaagccagaacaagaaaccagagacgaagcggaggcaaggcacgac

SEQ ID NO: 138977 - RNA, 74 nt, Homo sapiens
ggcagcacagagggggacccagcaggggcgaggcaccagaaacgccacacgggcgggagcccacccacggaaaa

SEQ ID NO: 138978 - RNA, 55 nt, Homo sapiens
ggccacgcccccgcaccaagcggaagagggcgccaaaacccaaaaacaccaagac

SEQ ID NO: 138979 - RNA, 80 nt, Homo sapiens
gaccgcacacggagaaggaagcagccagcccagacgggccaccggggcggccaagcccggcccacagggagcagcgcccg

SEQ ID NO: 138980 - RNA, 74 nt, Homo sapiens
ggcacaggcacaaaacaacaagagcccgagcgccacggaacgagcaaggaagaacggagccagagaagccagaa

SEQ ID NO: 138981 - RNA, 76 nt, Homo sapiens
gccacaacgaggaccgcaacacggccggagacgcgcaccagaaagcacacggcgagcaacggcccaaccaaccccc

SEQ ID NO: 138982 - RNA, 82 nt, Homo sapiens
ccaggaggaagggacaaaagcccccccacggcaggagccagaggggagaagaaacggcgacgcagcgacaaagggggagcga

SEQ ID NO: 138983 - RNA, 76 nt, Homo sapiens
gagacccccggaaaaccccccccggaacccgcgcccagaagggaaggccacggacggggaaacgcaaggcaacccc

SEQ ID NO: 138984 - RNA, 74 nt, Homo sapiens
caacccgacggacccgaagacggaagcgggcaccaacagacaaccagggcaagcagaggcaaaggcaagggcgg

SEQ ID NO: 138985 - RNA, 72 nt, Homo sapiens
gggacccccagaccaccgacagcaccaaggacacacagcaacgaagcaggggaggagggaagaccggacagc

SEQ ID NO: 138986 - RNA, 81 nt, Homo sapiens
accagcagaaccgcgggacaagaacagggccacaggacggagaacaagggcccaggacggccaagcagggcgcaaaaggaa

SEQ ID NO: 138987 - RNA, 58 nt, Homo sapiens
cagcacacgcacccaagcggcacccgcgggcgaggcccccgcacagcacgcgcagaac

SEQ ID NO: 138988 - RNA, 87 nt, Homo sapiens
gacgccccggggacaccaccgaccagagacccagcaccggggagcgcggccacagacgcacaggcagagacacaaggggagaagccc

SEQ ID NO: 138989 - RNA, 68 nt, Homo sapiens
ccagcacaagaagaccggcgagacgacgggaccgaaggaccccgccagagacaaccgagcgccaggag

SEQ ID NO: 138990 - RNA, 68 nt, Homo sapiens
gacggcggaagaagcgcggacaggccgggacaacaggggaaaacagcgccaagccagcgaggcaaacg

SEQ ID NO: 138991 - RNA, 62 nt, Homo sapiens
cgagggcacaggcaggagcaagaccggaaagacaggaagaagaaagcccaacgcagaacaaa

SEQ ID NO: 138992 - RNA, 79 nt, Homo sapiens
caacgcagcgggaacgccaccacacaggagaacgaacaagaggcagagaagggagagaagcccccagccaggagagcag

SEQ ID NO: 138993 - RNA, 54 nt, Homo sapiens
ggagaagcaagaggcgcaaagaagaaccaggggagaagcacgacagcagcaagg

SEQ ID NO: 138994 - RNA, 73 nt, Homo sapiens
agccacggacacgaaaacaagaggggagacggacgagcaagaaacaaacaaccccgaagccccggagaaccca

SEQ ID NO: 138995 - RNA, 73 nt, Homo sapiens
gagaaagcaggagaggcaaccggaaagaacgcaagagcaggaagggaagggaggcggaaaagaaggggggccc

SEQ ID NO: 138996 - RNA, 71 nt, Homo sapiens
agaaaaagcaggaaagaggcagcacagcagagacaaaaacacggagggacgggcgcggcgacgagggaggc

SEQ ID NO: 138997 - RNA, 82 nt, Homo sapiens
gccgaggggcggcggccccagggcggaaaacaccccaaaagccaaaagggaaaggaaaagaccaacaacagcgcaggacacg

SEQ ID NO: 138998 - RNA, 53 nt, Homo sapiens
gcacaggcccgggcgaaggggccacgcgagggacaagcaaccagcgacccacg

SEQ ID NO: 138999 - RNA, 66 nt, Homo sapiens
gagacacccggacggcaagcagagcgggggcggcgaaagaagacaggagaggagcagagaaaagaa

SEQ ID NO: 139000 - RNA, 81 nt, Homo sapiens
gagcccggcgcggggcggagaaccggaagcgggagagggcgcccgggcggcgggggcgcggcgcccccggagggggccaac

SEQ ID NO: 139001 - RNA, 73 nt, Homo sapiens
ccaggccaggggaggcaaacacaggaccggaacagccacggacgggggaggaaggggcgcccgagagggacag

SEQ ID NO: 139002 - RNA, 80 nt, Homo sapiens
caaccaacggacaccaccaggggacggcacggacgacagaagcgacgggagaccggcagaaccaacccgccccccccagg

SEQ ID NO: 139003 - RNA, 52 nt, Homo sapiens
caacccccaccccgcccaaggaggcccagcgaagcgcacaccacaacagcac

SEQ ID NO: 139004 - RNA, 78 nt, Homo sapiens
gccggccgcagcgagagcgaggaggaggggccccggcgcccgcgcagcagagcaaccaggagccccagccgagagcca

SEQ ID NO: 139005 - RNA, 63 nt, Homo sapiens
aaaaaagacgaaagaagaagaagagcaaagggcccgcagaaaaagcggggaaaacaaaaaaaa

SEQ ID NO: 139006 - RNA, 58 nt, Homo sapiens
ccgcggagggaccgaggagaaccgagacacgcagcacaggaagaaagccggaaggaac

SEQ ID NO: 139007 - RNA, 76 nt, Homo sapiens
cgcagccgcgagggccagggagacaaggaccaaggacaccccaagcagacaggagacccaacaccccagccagacg

SEQ ID NO: 139008 - RNA, 74 nt, Homo sapiens
cccaggcgcccagaccaagggaacggacgccggcccaagagccgcagggaggaggggccaaccaccagcagaag

SEQ ID NO: 139009 - RNA, 74 nt, Homo sapiens
cgcgcagcggccccggcggggcaagagcgggggcgggaccccgccgcggcgggagggaccagccaaggaagcaa

SEQ ID NO: 139010 - RNA, 86 nt, Homo sapiens
gcggaacaggacgccccgaccggggcacccgcacgggcccggacgcagcagcccgccgacagcccagccgcacagagcgccgcagc

SEQ ID NO: 139011 - RNA, 74 nt, Homo sapiens
cgcaggccccacggggcaccggagcaggagcgcgcggcgacagcggcagggcaccccgggccaacccccgggga

SEQ ID NO: 139012 - RNA, 80 nt, Homo sapiens
agaacgaaccgccaggccgacccccagacacagaaagacaggagccgagcagacagcggaggacccggggcagggacacc

SEQ ID NO: 139013 - RNA, 77 nt, Homo sapiens
ccccaagagcgggacgcaggagccgggggggcgagcccgccgagagcgccaaggaggagacaacgggggaagaagaa

SEQ ID NO: 139014 - RNA, 74 nt, Homo sapiens
ggaaaaggccgaagggccaagaccgaaaaaaagacggcccagagaccgaagacaaccgaaaaggggcggacccc

SEQ ID NO: 139015 - RNA, 77 nt, Homo sapiens
cggcggcagcggcggggcggggcgagcagaggacccggcgggcggcccgcgggcaggggaaaggcaaaacacaaagc

SEQ ID NO: 139016 - RNA, 64 nt, Homo sapiens
ggaacaggcagcaggaagcacggcgggcgaaacagggccagaggaagacccggccccccccgcc

SEQ ID NO: 139017 - RNA, 79 nt, Homo sapiens
ccggccaggggacccaccggagggaccgcaggggcggcgaccacaacaacacagccgagaaaggcggcccaaggagacg

SEQ ID NO: 139018 - RNA, 65 nt, Homo sapiens
caaccgaacaacaggaacggcagccagaagaaacggagagaggcaccagccgaagaccacaaaaa

SEQ ID NO: 139019 - RNA, 59 nt, Homo sapiens
gaagcgggaaaagagcagagaagggaccaaaccacagcaaaaacaccaggaaagacaac

SEQ ID NO: 139020 - RNA, 78 nt, Homo sapiens
caacaccgcgacacgcaggaacacgaggacccaaagaacaaacccggagagaagaaaaccccagcagggcgccaggag

SEQ ID NO: 139021 - RNA, 74 nt, Homo sapiens
cgcaggcaggaggacgggaggaccaagagagggggaggagcgggcagaagcacaccgacccccaacgggcccca

SEQ ID NO: 139022 - RNA, 68 nt, Homo sapiens
agaaggcagggagccccccagaagcacaaaagaccggcaagcagggagaaaacgggccggaggaaaag

SEQ ID NO: 139023 - RNA, 82 nt, Homo sapiens
ccggccggagaaggccagagcacacacggccaagagcgggcaccaggaagcgaaggcgagcggggcccggcgcacccaccac

SEQ ID NO: 139024 - RNA, 89 nt, Homo sapiens
cagcggcacccccggccccgagggccccggcgccaggccacccggccgcagcagcagcagggaacaagacccccgaaaggaaccgggaa

SEQ ID NO: 139025 - RNA, 71 nt, Homo sapiens
acggccacgaggaagcgcaaagaaaccacgccacccgacccacgcgggaaacggccagcaaaacagaacgc

SEQ ID NO: 139026 - RNA, 67 nt, Homo sapiens
agcgccggcccccaggcgaagaagcgcagccgcaccggccaagggagaagacagcacggggagccca

SEQ ID NO: 139027 - RNA, 74 nt, Homo sapiens
gaaagcacacagggaggaaggagcaacccgaaaaccagccagacacaaacagacagagagcaagcggaggccgc

SEQ ID NO: 139028 - RNA, 76 nt, Homo sapiens
gaccaaaaagaagcaaaaccacgccagaaccgcaaagaagaacaccaagaaccagggcgcccggacaccaacacac

SEQ ID NO: 139029 - RNA, 74 nt, Homo sapiens
gcggcagaggaaaccaagaacgaaaagccaagaacaagcacaagacgaaacgccaagagagaaacgaggcacaa

SEQ ID NO: 139030 - RNA, 72 nt, Homo sapiens
caagaagcaagaaagaaggaggaccgcgaagcggaagacagcaccgaggagcaacacccccagggagcccag

SEQ ID NO: 139031 - RNA, 57 nt, Homo sapiens
cccccacagagacgggcagaggagcggaggagccccaggaaggcgccaaaggggcag

SEQ ID NO: 139032 - RNA, 74 nt, Homo sapiens
accccagcaaccggaagcccccacagcccaaaaagacagcgaacccacccaacacggcaaaacaaagacaccac

SEQ ID NO: 139033 - RNA, 80 nt, Homo sapiens
gaggaagagcaagcgggggaccgaacaaggcaaaagggcccgccccccaaagcgaagccaaagcgaaggcaaaggccaag

SEQ ID NO: 139034 - RNA, 58 nt, Homo sapiens
aacaagccgaccagacgagaccgggagccgccaccaaaagcagacggaaaacccacgg

SEQ ID NO: 139035 - RNA, 108 nt, Homo sapiens
cagacggagcaaagcccccacgcccagccaggagcaccgccgaggacccagcacaccgagggccgaaagaagaaaacccgagcagagaaaacaacaaagcgcccagca

SEQ ID NO: 139036 - RNA, 80 nt, Homo sapiens
ggaggccccccagccagggaacaggaggagacccacccggggacgagccgccccagaagcaccccaggccaccacgcggg

SEQ ID NO: 139037 - RNA, 90 nt, Homo sapiens
acgccccgggaccggagcagaacccccgcagagaaaggaaagaccacagcaagaccacgcccccagccgggggaccaggccgaacgaccc

SEQ ID NO: 139038 - RNA, 58 nt, Homo sapiens
gggagccaagggacagccgcaggcggagaagaacccaaccaaaaccaggcggcaaccc

SEQ ID NO: 139039 - RNA, 93 nt, Homo sapiens
ccaggcccggcggcgacaccacgggaggcagaccacgagaagccaggacaagccacccaaccccaaccaaagcaagcacagcacagggagaag

SEQ ID NO: 139040 - RNA, 33 nt, Homo sapiens
gccagcgggacaagcgggcagcgacacccagac

SEQ ID NO: 139041 - RNA, 78 nt, Homo sapiens
aggaggggccgaacccccaggggcgggcacaagggaagacagcgcccgggacccaacggaagaggcccaagaagcccc

SEQ ID NO: 139042 - RNA, 84 nt, Homo sapiens
gagaaggccgggagcggcgaaaaaacccgagaggaaaaggcccggcagacccaacagaggaagccgcaagaaacgggacgacag

SEQ ID NO: 139043 - RNA, 76 nt, Homo sapiens
gacagacgaaaaagccagcaacaggagcgacgcgggcaggaacgcccaggagaaagagggaagagaaaaggaacaa

SEQ ID NO: 139044 - RNA, 86 nt, Homo sapiens
gaaacaccaggaagggagaacgcccgggcgcgccaggcacagccaagagcggaccggcagcggccagcgcagcggccggagcagac

SEQ ID NO: 139045 - RNA, 80 nt, Homo sapiens
ccaggccacaagggccgcaagccccgccgagcccagaggaagccgagcagcccggaggcggcccaacacagaggacagcc

SEQ ID NO: 139046 - RNA, 78 nt, Homo sapiens
cgcggaccgcacgagcgcgacagcgcacgaaacacacaaagaaccaccaccgggaggaagccagacaaccccagggcc

SEQ ID NO: 139047 - RNA, 62 nt, Homo sapiens
accaccagggagccaggagagacgacccggagacgcggaggcaggcaccgaagcgcagcagc

SEQ ID NO: 139048 - RNA, 82 nt, Homo sapiens
aggaagaggaaggaaggagcgcagcgacacacccgaagcagcccaccacggggcagaacaccgaaaaccgccgaagcagcaa

SEQ ID NO: 139049 - RNA, 77 nt, Homo sapiens
gcggcggcggcggcgcggcccaaaaggagccaaacaaaggaacgccaagcccggcaggacgacaggagggacaaaaa

SEQ ID NO: 139050 - RNA, 70 nt, Homo sapiens
cccggacccagcgggcgccgcacaccacacccaaccgccacggaaggcacaaccaggccgaagaagagcc

SEQ ID NO: 139051 - RNA, 55 nt, Homo sapiens
gaggagggagaacacagaaacccgccccggaacgaaaccagaacagaaagggacg

SEQ ID NO: 139052 - RNA, 79 nt, Homo sapiens
gggaagcaggcgcaggcccggaggaggcaaggccgcaaggaacaaagcaggacccgccagaagagaaaccaagaaagag

SEQ ID NO: 139053 - RNA, 67 nt, Homo sapiens
cacaggcaggcaacaacgaaggaccacagaaacggccagggcaaccggggcaggcacaggacaacaa

SEQ ID NO: 139054 - RNA, 71 nt, Homo sapiens
ggaacggggccccgcaaggccggcgcggaggaggggagcagcgcgcaagcagccagacccggccgggaagc

SEQ ID NO: 139055 - RNA, 76 nt, Homo sapiens
cacccgcaccggccacccccccggagcccggagcaaggaagggaccacagaccagcacgccggcgccacgaaccga

SEQ ID NO: 139056 - RNA, 69 nt, Homo sapiens
cagacgcagggcgcccccgggggacggaagcggcagcgggcagccggcccagcacagggagcagaaccc

SEQ ID NO: 139057 - RNA, 72 nt, Homo sapiens
cccagaagcaggcccccagccgcagccacaacaccggcaggaaccaccaggacagaaaggacaagagcgggg

SEQ ID NO: 139058 - RNA, 77 nt, Homo sapiens
ccagccagccagcgccccgcacccacgaccaggggaagaaagcacgggaaaaggccgggcccacaggggagagccca

SEQ ID NO: 139059 - RNA, 80 nt, Homo sapiens
agcagacgcgcacagcaaggagcgaacaacaaccccgggagagggaaagaggcccaggacaagggagcaaccacaagccc

SEQ ID NO: 139060 - RNA, 85 nt, Homo sapiens
gccccccagcaccgggcggacggaaccaaccgggagccccccaagagacccaggggaagacccaaaggcagcaaaaacaagagcc

SEQ ID NO: 139061 - RNA, 89 nt, Homo sapiens
gaggaaagaaagaaagaacgaacagcagaaaggaaagagccaacagggagacggacggaacgcggcgcgaccagaaaaccgagaaagcc

SEQ ID NO: 139062 - RNA, 77 nt, Homo sapiens
acgaaggaagaacacaaagagaaacaggaacggaagcggggaggacgagaggacaacggacagcaaaggccaggaga

SEQ ID NO: 139063 - RNA, 67 nt, Homo sapiens
ggagccaaggcgggaggcgagacacagagaaaagcggcagaagaaagcaaggcggaggcaaggggac

SEQ ID NO: 139064 - RNA, 82 nt, Homo sapiens
accggcccgggagccccagggaaacgccgcgcggggacaggggggaaggaagggccccacaccaaagaaacccaaaaagaac

SEQ ID NO: 139065 - RNA, 77 nt, Homo sapiens
aggaagaaggcgcacaccccagcgcgcaaagcgcgaggggcgaggaaacggggacagaagaacgaagaacaaggaca

SEQ ID NO: 139066 - RNA, 60 nt, Homo sapiens
cacgcgggcagggaacaggcggagcggaaggcgacaccccaagagggccgccaccacgag

SEQ ID NO: 139067 - RNA, 71 nt, Homo sapiens
ggagaacaaagggagaagaggaagcccgacaacgaagagccggaaaacagcacagaaacgggccggagaaa

SEQ ID NO: 139068 - RNA, 78 nt, Homo sapiens
cgagggggcgcaggaccggccgcaggccaccgacacgagacaaccgggagccggagccagaggacagaaagcagagca

SEQ ID NO: 139069 - RNA, 59 nt, Homo sapiens
cagagagagccaaaccccaggacaacacgcagcgaaggaggaggcggaggagaggaaaa

SEQ ID NO: 139070 - RNA, 70 nt, Homo sapiens
gaccaagaaccaggaagacagaaagagcaaagaaaaaaacacagccaagagaccgagcaaaacgacacag

SEQ ID NO: 139071 - RNA, 52 nt, Homo sapiens
caaccagagcggagcgcagaccgaggaaaaggagagagacgagagcgacaaa

SEQ ID NO: 139072 - RNA, 79 nt, Homo sapiens
gaaacgcggccagagaaccagaggagagagaaaggacgaagcgccaagaggagccagaggcagacaccagggggccgag

SEQ ID NO: 139073 - RNA, 63 nt, Homo sapiens
aaccggggccgaggcagaccccccgaaccgaagcaggaggccaagaaccgcaaagaaagaccc

SEQ ID NO: 139074 - RNA, 55 nt, Homo sapiens
ggagcccagcggcgcgccggcagcagccaggacccgaaaagccagcaagcgagac

SEQ ID NO: 139075 - RNA, 44 nt, Homo sapiens
caggagagccggccgcgacaggacggccccacgaagagcccagc

SEQ ID NO: 139076 - RNA, 85 nt, Homo sapiens
gcgcagccccaaagcgagcgaagcagggcgccgccacgccgcaggaggcggagcagcaggcgagaggcagaacccggaaagaagg

SEQ ID NO: 139077 - RNA, 79 nt, Homo sapiens
ccggggagcccgaccggaccgcggagggagaacggaaaaaacaaagcgaaacagcggggccacccagaacaaaaagggc

SEQ ID NO: 139078 - RNA, 60 nt, Homo sapiens
cccgggcaccggcggcccccgcccgcggaaaaggagaagaaggaggcccggagcgagcca

SEQ ID NO: 139079 - RNA, 77 nt, Homo sapiens
ccacgcgcgggcccgggccaggccgccgccgagccgaggggcaccccccgggaagaagccccccagcaaagccaacc

SEQ ID NO: 139080 - RNA, 61 nt, Homo sapiens
gcggccgcgggagggcgaccgagccggaggcgggcgggcgagacccgaaaggccacccaag

SEQ ID NO: 139081 - RNA, 69 nt, Homo sapiens
gacagcaacaaaagccggaagcagcacaggaaggaagccgcaaggcggcaccaggacgccgaaaagcga

SEQ ID NO: 139082 - RNA, 101 nt, Homo sapiens
cacgcaagccgcaaggacaggacgcaccgagacggaccagacaccgaccccgaacgccaaacgcgaaagggagaaagaagaacgcccggaggcggacaaag

SEQ ID NO: 139083 - RNA, 37 nt, Homo sapiens
acagagacgagaagcaaagcaaaacaaacggagagag

SEQ ID NO: 139084 - RNA, 42 nt, Homo sapiens
gccccagaggacaccagcggggcaggagccgggcaccacgaa

SEQ ID NO: 139085 - RNA, 86 nt, Homo sapiens
aggcaggggcgaacgcgggggaaggggaggcgacacccaggccagggcaggaagcccacaggacgagacaagggcaacgagacacc

SEQ ID NO: 139086 - RNA, 69 nt, Homo sapiens
cccacccaagagaggaagagaaagcacagccgaggaacggccgcccagaacccagcaggaacaagcaca

SEQ ID NO: 139087 - RNA, 60 nt, Homo sapiens
aggagcagcccaacgcagggggccacccgacccgccccaaccacgcgccggcagccgcgg

SEQ ID NO: 139088 - RNA, 79 nt, Homo sapiens
ccaagcgccaaaaggaacgaaggcgggggagaaagacagcaaagaaaaggagaagaaaggaaaaaaacaaccccgggca

SEQ ID NO: 139089 - RNA, 76 nt, Homo sapiens
caagcagagaagagagggcagcacgccccgcccgaggacagcggcaccacccagagaaaacggccgcgacgggccc

SEQ ID NO: 139090 - RNA, 71 nt, Homo sapiens
cggcagcggaccccagagccagagcacacgaaggccaagagaggccaacagaggaacaaggcccgcagaac

SEQ ID NO: 139091 - RNA, 73 nt, Homo sapiens
agagcaaggaaccaaggaacacggggaacaaggaggagaagaaggaggagcgaagaagaagcgcaaacgccgg

SEQ ID NO: 139092 - RNA, 33 nt, Homo sapiens
gcagcgggcaagaaaacagagaggggccggggg

SEQ ID NO: 139093 - RNA, 84 nt, Homo sapiens
agcagcacccgagcaaaccccagcaagagcggaggcgcccggcggagcagaggaaccacacgcgacagggggaccaggacaaag

SEQ ID NO: 139094 - RNA, 71 nt, Homo sapiens
accccgcccaggaaacagcaaacaaggcgggcacaaaccgaagaggacaaggagagaagcagacagaagga

SEQ ID NO: 139095 - RNA, 80 nt, Homo sapiens
accagaccagccgcaagacgcgggccaggcacgacaccgcaacgacacagcagcgaagcgccggagaacgcacgggacga

SEQ ID NO: 139096 - RNA, 77 nt, Homo sapiens
ggacaccggaagcgggaaagggaccggaagccagagcacagaagagcccgggcccagggccgaggaaggagaagcgc

SEQ ID NO: 139097 - RNA, 69 nt, Homo sapiens
aggcggaggaggaaggcagcgcacgccgcaggacaggagagacaacggaggcaagaaagacggagaagc

SEQ ID NO: 139098 - RNA, 75 nt, Homo sapiens
agcgaagcccgcacagcgaccagggcaaccgggaccagcgagcgacagcccccacagaagcaagcagcaggaccc

SEQ ID NO: 139099 - RNA, 83 nt, Homo sapiens
ggggagagcaccccaccacgccgggcagaaggccgaaagagcacggacccggaagccacgaggacaagcagaaaccaagcgga

SEQ ID NO: 139100 - RNA, 68 nt, Homo sapiens
aacaaaagagccacccaagggcgcaagggagagagagggagcggccggaacacccagaacccagcacg

SEQ ID NO: 139101 - RNA, 60 nt, Homo sapiens
cagaaaacccaccgagacggccacagacaacggagggcaagcaagaaaaacccaacacgg

SEQ ID NO: 139102 - RNA, 73 nt, Homo sapiens
gcccaagacccagcagcagccggaacaagaggagaccaagaaaacgaagaaagaaaagaaaagaacaacccag

SEQ ID NO: 139103 - RNA, 65 nt, Homo sapiens
cggcgagcccggccccgccggcaccagcaggcaggagaagggcaccggggaggaccgcgcgacgc

SEQ ID NO: 139104 - RNA, 84 nt, Homo sapiens
ggaccaggggcccggaggagcagggcagagcacgcgcgcagcgaagcccagggaggccaccaggaagaccccccggcacagaag

SEQ ID NO: 139105 - RNA, 80 nt, Homo sapiens
agcgaccgggccgccaccccacggaggacacaagggaacgcccagcgacccccacgccagaacgacagaaagcaagagca

SEQ ID NO: 139106 - RNA, 83 nt, Homo sapiens
cggcgagggaaaagcgaggcaaggcaggcgggaccgcacaggacgagcgaagacagggaaaagaaaagggcgccgaagaagcc

SEQ ID NO: 139107 - RNA, 47 nt, Homo sapiens
gaagacaccggggacagacagggagcaggaacacaaacaccgaagca

SEQ ID NO: 139108 - RNA, 82 nt, Homo sapiens
gggccgcccgcccgcccgggggaccgcaggaaggaacgcggccacgaaaaacgaaaaaagccgccccaaaaacaacccagag

SEQ ID NO: 139109 - RNA, 52 nt, Homo sapiens
caccagcccgggggcagcagagcagggacaaggaagggagcaaacgggagag

SEQ ID NO: 139110 - RNA, 56 nt, Homo sapiens
ggcccaggagcgacgccagaaacagccaccagaagacgaccgaaaacccagccaga

SEQ ID NO: 139111 - RNA, 81 nt, Homo sapiens
gacaggaggagccagggcccggcccgaaaggagagccccacaccagcggacagccaccaagaggccagaaggcagaacagc

SEQ ID NO: 139112 - RNA, 72 nt, Homo sapiens
aagagggcacaacaccaacaccggcgaacaacccagcgggacaaaacccgcagaccggaggagaacaagcga

SEQ ID NO: 139113 - RNA, 72 nt, Homo sapiens
cgggagaaaaaggaaaacgcggaaaaccgacacaacaggacgagagaggagcgcgggccgagagcggagagc

SEQ ID NO: 139114 - RNA, 74 nt, Homo sapiens
gaaacaacgcagagaaacacggaaacaggaagaggaaaaacacgacaaaggccaccaacggcggggggcgagga

SEQ ID NO: 139115 - RNA, 61 nt, Homo sapiens
gcgcgaggggcgacggggagaaggaaacccaaccggaaaaggagcgccccacagcaaggcg

SEQ ID NO: 139116 - RNA, 88 nt, Homo sapiens
cccagccccacccaagacacccacaggaaacggaccgccagcagccgagaagccccacccgccccaggagccagccggcaacacggag

SEQ ID NO: 139117 - RNA, 76 nt, Homo sapiens
gaaccccacaggccgaggagcagaagagaagcgaaggacgacagccaggggaggacaccacggcaccggagcacga

SEQ ID NO: 139118 - RNA, 68 nt, Homo sapiens
caccagagcgcccgcaagaaacgcaacaaccagacaggcaacaaggagaagacaaagaagcaagcggg

SEQ ID NO: 139119 - RNA, 54 nt, Homo sapiens
ggagagggggcgcgagcggggcggcggagaaaccaccacaaacacgaggccagc

SEQ ID NO: 139120 - RNA, 86 nt, Homo sapiens
gacgagcagcgaacgaggcaagcagcgccgagcccaggcaagagcccgcgagaaggaccaaccaagaagcgaagaaaagagaaaga

SEQ ID NO: 139121 - RNA, 88 nt, Homo sapiens
ggaccggccgagaggaagacgagccgggaggaacggcccggaaacaggaggacacgggagcacccgggacgccagaaagccagcaggg

SEQ ID NO: 139122 - RNA, 57 nt, Homo sapiens
agaagccagaagaaaggagggcggcgcgccgagcgacgagagagccaggccagaagg

SEQ ID NO: 139123 - RNA, 61 nt, Homo sapiens
gggacaccagcaggccagccaggggccaagacacaagagagcagcccaaacggacggaagg

SEQ ID NO: 139124 - RNA, 76 nt, Homo sapiens
agccgaggaccaccacagaaggaagaagagccccccccagcgccgaaggcccgacccagcagcccggcccggcacc

SEQ ID NO: 139125 - RNA, 72 nt, Homo sapiens
agaagaaggcaggaacagaaggaaaccagcccagagccaccgagcgaagacccgagaacaagacgccgggca

SEQ ID NO: 139126 - RNA, 74 nt, Homo sapiens
aaaacaagggaaggaacgacagacagcaaagaaagggggggccccgaccccgaaggaccccgaaccaggaaccg

SEQ ID NO: 139127 - RNA, 74 nt, Homo sapiens
cgcgccccagaacggacaggccagagcgcacggcccgggcacacaagaacggccgccccagccccagccaaacc

SEQ ID NO: 139128 - RNA, 81 nt, Homo sapiens
agcagcgacagggccgggcgccggcgagagccgcaccgccaacccccgagcaagacggggaggagacgacggggaccgagg

SEQ ID NO: 139129 - RNA, 118 nt, Homo sapiens
gcggggcccgcggccgccgcgccccgagggcagccgcacgccaacaagggccgccgcgacagcaagaaagcaccagccaagcagaagggagccagcggacgagggcgccaggccaggg

SEQ ID NO: 139130 - RNA, 82 nt, Homo sapiens
gaacagagggacagaggccacgacaggcacaggcacagagcggagaccagggagaccagagcccagcgccaggcacgagcag

SEQ ID NO: 139131 - RNA, 71 nt, Homo sapiens
ccagccacaggaggcggccgcacaaaggggcaaaagcagcgagagcaagcagaacggaacgcgaggaagaa

SEQ ID NO: 139132 - RNA, 72 nt, Homo sapiens
caacggaagaagcggcggccgacgcaggcacccccagcgcgccggcagggcccggggaaggaagaacaagga

SEQ ID NO: 139133 - RNA, 74 nt, Homo sapiens
aagagaacagaagcccaggaaagaagaaaggccccaggggcacgcaaaaaaaccaagggaaaagagacaagacc

SEQ ID NO: 139134 - RNA, 74 nt, Homo sapiens
ggacgaagcaaaaagacacgcggccgagaagcagcaaaggcaaacaaagcggccagaaagaggagccaaaccca

SEQ ID NO: 139135 - RNA, 70 nt, Homo sapiens
ggaccagaacgcagcaacaaagacaacgaagagaggaaagaagcggaaaggagggagcacacaacaagga

SEQ ID NO: 139136 - RNA, 78 nt, Homo sapiens
ccggaccggcacccggacaggaggagccagggcccggcccgaaaggagagccccgcggagaaccgaaccaacagccag

SEQ ID NO: 139137 - RNA, 57 nt, Homo sapiens
gcacccacccgaacgagcagagccccacagaccaggaaagccaaagaagccggaaaa

SEQ ID NO: 139138 - RNA, 50 nt, Homo sapiens
gcgcgcccggcgggccggaccaaggacacagcaggggccagacaaccaga

SEQ ID NO: 139139 - RNA, 88 nt, Homo sapiens
agagagccacacaacacgaaaaagcaaagcacgcagagagaaggcaacgcccagaaaacgaagccacaaagcgaacagacagggaaaa

SEQ ID NO: 139140 - RNA, 75 nt, Homo sapiens
cccagcacagggggggccacaccagccgggccaggcagagaggcaagcagcccacgacaagcccaagaaaaagac

SEQ ID NO: 139141 - RNA, 96 nt, Homo sapiens
ccaacccacccgaagaaggccccggccgcagaggcaagaaagacacccagcaggcaggaccagaaagaagcccagcaggaaaaacacaaacaaaag

SEQ ID NO: 139142 - RNA, 70 nt, Homo sapiens
ggacccggccccggcccacaggggggggcaaacccgagagaacggggagcggcaggggaggcgaagaaga

SEQ ID NO: 139143 - RNA, 83 nt, Homo sapiens
cagagcgggaccacccgggcacagcaggcacggagcgagcgacgcgcccacggaggaggcgggggccccacaagaagaccaac

SEQ ID NO: 139144 - RNA, 82 nt, Homo sapiens
cggcccggcccggccccgaggccggcaacggagacccaagagaggggagaagagcgagacgagaaagaagaggaagaagaga

SEQ ID NO: 139145 - RNA, 76 nt, Homo sapiens
cagcaccggcaagaccacccacagggccagcaccccaagccaggccagcccaggggaacgaggagcgacccacgcg

SEQ ID NO: 139146 - RNA, 63 nt, Homo sapiens
cggcccgcaccaggcggaacggaggaggagccaccagggagaagaggagaccaccccacagga

SEQ ID NO: 139147 - RNA, 57 nt, Homo sapiens
agcgacgacaaggcggaaacaacacagaaagaccaggagggacacacagcacagagg

SEQ ID NO: 139148 - RNA, 79 nt, Homo sapiens
agcacccggccgagacggcggcagcagcggcacagcccgccccccaaagcgaagccaaagcgaaggcaaaggccaagaa

SEQ ID NO: 139149 - RNA, 76 nt, Homo sapiens
cagagaagcgggaaaaaagacagagggaaagcacggaacacggggaagcagcggcagaagccaacacaggaacaca

SEQ ID NO: 139150 - RNA, 76 nt, Homo sapiens
cacggcgcccagggggcaaggccggccggagaccacagggccacgacgccccgggcgcaccagacgccgccgcggg

SEQ ID NO: 139151 - RNA, 64 nt, Homo sapiens
cagcaccccccggacccagccccggcaagcacagcacaccgggagcagaccaccaagaaaccac

SEQ ID NO: 139152 - RNA, 80 nt, Homo sapiens
gaaccaccggcagaaaagagacggacgcggaggccacggcgagccccgaggacggggccgaccgaggccagaggacaccc

SEQ ID NO: 139153 - RNA, 76 nt, Homo sapiens
cccggacacccgccagcgagcggccgcccccagggacgcgagcccgcaacccccaagcagacggagccgccgcgcc

SEQ ID NO: 139154 - RNA, 80 nt, Homo sapiens
gggacacaagaggaagaaaccgacgcccaaggagagacaggacccgagaggcggagcagcgccccagagccaccgggcgc

SEQ ID NO: 139155 - RNA, 78 nt, Homo sapiens
caaggcgccaaagccggaggaacgcaccacgaggaacaaggcgccaggaggaaacaacaccgaagagggcggaaagcc

SEQ ID NO: 139156 - RNA, 39 nt, Homo sapiens
acacaagaaacaagcaacgacagacggcacacaaccaac

SEQ ID NO: 139157 - RNA, 74 nt, Homo sapiens
cgcaagcagagaggcaccaccaccccacgaagaagggggaaaacaaggccagacaggagggaaggagagaagga

SEQ ID NO: 139158 - RNA, 39 nt, Homo sapiens
gaaagaaaagcccaaggacaagggaagaccacaacaagc

SEQ ID NO: 139159 - RNA, 73 nt, Homo sapiens
caacacccgccgagcacaggcgaccggccacagccaggcagccagaagagcaagccggccaagggaggagaaa

SEQ ID NO: 139160 - RNA, 64 nt, Homo sapiens
ggccgcgggcgcgcccgcagcgcccgccacaggacccacccaggaggcagaaacacgccgcgcg

SEQ ID NO: 139161 - RNA, 91 nt, Homo sapiens
ggcgaggcaggggagccaagcggagagccaggacacaacaccgcggagcccgcaggcgagcccggcggacacggaaggaggcccaacaagc

SEQ ID NO: 139162 - RNA, 56 nt, Homo sapiens
ccgggagcggcggccacggaggcaccagaagaagcaccaggccaccgaaagacaca

SEQ ID NO: 139163 - RNA, 84 nt, Homo sapiens
caggaccggacggcccacagaccaagccccacagagggcgagccagggggagaagagccagcccaggcacgagaagagaagccc

SEQ ID NO: 139164 - RNA, 39 nt, Homo sapiens
cccccaccagaacgagggcggccggaggaggccaacgcc

SEQ ID NO: 139165 - RNA, 72 nt, Homo sapiens
gagaacagggcggagaaaggcacggggaaaacagaagcagaagggaggggccacagcccgaaaccaaaaaaa

SEQ ID NO: 139166 - RNA, 78 nt, Homo sapiens
agccgcagagaacaggagggggacagccaacagccgagccaggagcccagagcgcccaaaccgggaccaaccccccgg

SEQ ID NO: 139167 - RNA, 72 nt, Homo sapiens
gcgcagcagaaagcaaaccagcaggcaccaaggaaagcagaagacaaccagacagacacagcacagcagcca

SEQ ID NO: 139168 - RNA, 76 nt, Homo sapiens
agcgagcgggaaacggccgcggagccgacacggggcccgagagggacgcaacccggccagagaggcaaacccagcc

SEQ ID NO: 139169 - RNA, 42 nt, Homo sapiens
gcagcacgagcagacacagagccagccccgggcaacaaaggg

SEQ ID NO: 139170 - RNA, 70 nt, Homo sapiens
gagggacagggaggagggcagccaaccaccagcccgggggcagcagcaggcaacaggaagaagaacccac

SEQ ID NO: 139171 - RNA, 73 nt, Homo sapiens
gaaaacgggccgggcgccagccaggaggaccggcaggaccgacgagcccgggagcccaaggaaaggcccaggc

SEQ ID NO: 139172 - RNA, 72 nt, Homo sapiens
aggccacgcagcaaaccacaggagaggagaggcagcagcagagcgaacaggacgaaaggagaagagggagac

SEQ ID NO: 139173 - RNA, 58 nt, Homo sapiens
caggggaaaacccccgggaccagcccacaggaagaaaaagcccaagagaagaagaaag

SEQ ID NO: 139174 - RNA, 71 nt, Homo sapiens
cggcaacaaagaacacacggaagagcggcccgcgagagacagagcagcggcggcgggacgcgagggacggg

SEQ ID NO: 139175 - RNA, 85 nt, Homo sapiens
ggagcggcgggaggcgaccgcgcagcacgcggcgcggagggcggaccgcgccgagcccaccgggggacggcacggcaggcggacg

SEQ ID NO: 139176 - RNA, 77 nt, Homo sapiens
acaagacaccagaaagacaggaagccggcgagcaaggggaagcccagccgcagaccgcacaaaccaagaaaaaacca

SEQ ID NO: 139177 - RNA, 75 nt, Homo sapiens
caccagaggacgggaggagcagcaacagggaggccaacagacccaacccagaaggcaccaaacggagggggaaca

SEQ ID NO: 139178 - RNA, 70 nt, Homo sapiens
aaaagggagacagacgacaaacagaagcgaagcgcgcaggagcagagaggccaagaacccaaagcaaggc

SEQ ID NO: 139179 - RNA, 56 nt, Homo sapiens
ccgaccccccaagcaggaaaagaaggaggccagcgggacacacaaagaaagacgaa

SEQ ID NO: 139180 - RNA, 70 nt, Homo sapiens
cgcgagggacccggccagcccagggggcccagagagggccgaaccggaggacaagccaggccacaaggaa

SEQ ID NO: 139181 - RNA, 34 nt, Homo sapiens
gccagacgcaaagccccgaccggacagaagacag

SEQ ID NO: 139182 - RNA, 72 nt, Homo sapiens
cccagaccaacacacacaacggggcggcacacaaggagcgaagggcagggagaacgccaggcacagcacgac

SEQ ID NO: 139183 - RNA, 46 nt, Homo sapiens
gaagggcagaggaccggacaacggaccaaagacagagacaagcggg

SEQ ID NO: 139184 - RNA, 73 nt, Homo sapiens
agaaaggcgcaggccaagcgcccacgccggaccgggcaggcgaagagcaagaaaggcgaaccggggcagaaaa

SEQ ID NO: 139185 - RNA, 78 nt, Homo sapiens
aaacagagcaaaaacccgaaaacagcaaccaggaaccacggaaggagggggcgacacacaagcaggggggaccgacga

SEQ ID NO: 139186 - RNA, 79 nt, Homo sapiens
gacccgcccccggacacaacacccacgcaggccagagaggacagcccagagcaagcacacggaggcccgggagccagac

SEQ ID NO: 139187 - RNA, 75 nt, Homo sapiens
acaacaagccaacaccacaaaccggaaaacggaaagaaaaggagagcaccacgagacaggcagaaaggccaggga

SEQ ID NO: 139188 - RNA, 54 nt, Homo sapiens
cgaaacaggccggggcacagcacagcgccggcgcaagggaacgaagaaggacag

SEQ ID NO: 139189 - RNA, 70 nt, Homo sapiens
cccagaagacgacggcacagcgcacaagaaacccaagcgcgaggccagagggcccaaagcggagaggcac

SEQ ID NO: 139190 - RNA, 78 nt, Homo sapiens
gaaaaaagccgaaagggcggagaaaagaaaggcacgaaaggaggaggaaccggagaccccgaaaacggaagcgcaggg

SEQ ID NO: 139191 - RNA, 36 nt, Homo sapiens
agcgggcagggcaacaagacccggggaaagccacca

SEQ ID NO: 139192 - RNA, 76 nt, Homo sapiens
ggagaaccacaggagagggagaagagccaaggagaccaaacccagcagcaccgcagcagcagaagaacaaggagag

SEQ ID NO: 139193 - RNA, 73 nt, Homo sapiens
cacgaaggagcccgcaggaaggaggcccaaggcgggggcgcaacacacagagggagaaaacccccagcgaaga

SEQ ID NO: 139194 - RNA, 79 nt, Homo sapiens
ccggaggggacccacacccgcagcccgagggcacaggaccgagcaggagagaccgggagaaggcagcaaacggagaggc

SEQ ID NO: 139195 - RNA, 75 nt, Homo sapiens
gcgcgaccgcggaccccgcccaggaagcccccgaagcccccgccgccgcgagaaggaaaacagccacaggaagaa

SEQ ID NO: 139196 - RNA, 79 nt, Homo sapiens
gaggaaggccaaacagggagagaccccaacggaggcccagaaagcaacagccggcgccgagaagccaccgcaggaaggg

SEQ ID NO: 139197 - RNA, 90 nt, Homo sapiens
acgaccgcaccacggcaagggcaaccgcggggcaagcgggccacgcacccgcaccaaggccaagagcaagggccagagaaggaggagaag

SEQ ID NO: 139198 - RNA, 102 nt, Homo sapiens
ggagacaaagcagcgcccgcgccgggcccggaaagcgccgcccagcagccgcagagcccgaggagagacaggaaggccgaaggagagaaaaaaaccgaggcg

SEQ ID NO: 139199 - RNA, 78 nt, Homo sapiens
agcagggcccccgagaaacaccggggccagggcaggcagaagggcacggacgaggagccgcgaacgccaccaccccgc

SEQ ID NO: 139200 - RNA, 32 nt, Homo sapiens
aacaacaccgcgaaaggaggagggagacaggg

SEQ ID NO: 139201 - RNA, 101 nt, Homo sapiens
ccaaccaagaaaggggcacggcaaaagaccaagagcacagcagaagacaagggaggcgaggacggacaaaaggaaacggacgggaggccagccagcagaag

SEQ ID NO: 139202 - RNA, 73 nt, Homo sapiens
gacgacgaagcagcgcagaaggagaccaaaaggcgggcaaaacgccgagcccgagaacgaccccagaaggaag

SEQ ID NO: 139203 - RNA, 86 nt, Homo sapiens
ggcgcaggggagcaggacaagccaagcagaaaaagcgaggagacccggccgcaggccaacggcagcggcgaaggagaccgcccaaa

SEQ ID NO: 139204 - RNA, 73 nt, Homo sapiens
agagcaaagagagaaccacccgcacacagccacgagcaaagggcacggaggggggggggagagggcaagaacc

SEQ ID NO: 139205 - RNA, 54 nt, Homo sapiens
ggagagagggagagccaaagaaggcccgggaggagcggggacacgaggaccccc

SEQ ID NO: 139206 - RNA, 68 nt, Homo sapiens
ggcaccccccaaacgacgcagccacggagaggaggcaaggaggccacggggccgaagacaccaaccgg

SEQ ID NO: 139207 - RNA, 74 nt, Homo sapiens
ccccgcgccgccgaccccccggcgccgcgccggcggcggggccaaggggaaacgcaggaagaagccaaaaaaaa

SEQ ID NO: 139208 - RNA, 75 nt, Homo sapiens
acaccgccacccagaggggccggccaccccaacccggaccgggcgaggccaccccgaggcaaggccccagaggag

SEQ ID NO: 139209 - RNA, 55 nt, Homo sapiens
gccgagagagaggaaggccacagaacaagacaggccgacaagaagcagccaccac

SEQ ID NO: 139210 - RNA, 64 nt, Homo sapiens
gccaggcccccggcgcaaagcgacaaggagcggcacggcgggggcggagaacggaaaagcacca

SEQ ID NO: 139211 - RNA, 70 nt, Homo sapiens
gcgcaaggcgcccgccgccagcaaaccacacaaagcgaagcagggagagccacacgaggggaaaaaacgg

SEQ ID NO: 139212 - RNA, 80 nt, Homo sapiens
cgcggaggggccggcccccggagcgacagaaacaagggggagcgaagagccaagaggcccgagcgcagcagcagccagac

SEQ ID NO: 139213 - RNA, 77 nt, Homo sapiens
cccccagccgacagccagggcggaagcccgccccagagcaggcagaggcagaaaagcagagacagacacaagaggcc

SEQ ID NO: 139214 - RNA, 74 nt, Homo sapiens
gggcccccgaccggcaggagacagagagaaagcaacagcaggccagccccagagcccggggagcacgagaagag

SEQ ID NO: 139215 - RNA, 82 nt, Homo sapiens
agcacaacaggagcacgaggagggacagagcgggagccaccagcgccaaagggaagccaggagcccgggggcacggggagaa

SEQ ID NO: 139216 - RNA, 37 nt, Homo sapiens
ccgagagccgggaacagcccagccccggaccagaacc

SEQ ID NO: 139217 - RNA, 69 nt, Homo sapiens
agacacagaagcacaacccaaccaagcagaaacaacagaggcgaagaagggaacccacgacaccacgaa

SEQ ID NO: 139218 - RNA, 92 nt, Homo sapiens
caagcagcaccccaagcagggggaggcccggcaagacgcgcaggaagaccagcgcgcgggagcgcccccacgcccagcacggacgccgagac

SEQ ID NO: 139219 - RNA, 80 nt, Homo sapiens
ccagccccaaaaggcggcaacaggggagcagaccccgcccagggaacgccacaccgcccaccaagaagagaggccggccg

SEQ ID NO: 139220 - RNA, 83 nt, Homo sapiens
cgccgagaaggagaccgcccgggacggaccaggcgccgcgaccccagacgccgacggcacgaggaaggagaagcagaaaacac

SEQ ID NO: 139221 - RNA, 70 nt, Homo sapiens
gggacagagcggcccgggcgcacaaggagcccacgcagaggacccaggagacaagagaaaaacgagagcg

SEQ ID NO: 139222 - RNA, 71 nt, Homo sapiens
cgcagggcgcccccgcagaagaagagggggagacccgcgcacacaagcggcagggccggagaagagacccc

SEQ ID NO: 139223 - RNA, 103 nt, Homo sapiens
cgggcccgcgcgcccggccaagaggcaaaggggaggacgcagcaaaccaccagaaggaaggcccgccgaaggagaagggcaggaagacccagcaggccggccc

SEQ ID NO: 139224 - RNA, 83 nt, Homo sapiens
gagcgccgacccgccggaagcgccaggacaaggggacccgggacgacgagacgacaccacaaagggacacaggcaaggggaga

SEQ ID NO: 139225 - RNA, 73 nt, Homo sapiens
accgagccagaaccgagccgaaagaagaaaaaccgccgagccaggcaagagcaacgaaccaaagcaaaggagg

SEQ ID NO: 139226 - RNA, 77 nt, Homo sapiens
cgaccagcccaccgaaaggagagaagcaggaagagagaagggcacagaccaagacaacgaaccccggccaggacagg

SEQ ID NO: 139227 - RNA, 104 nt, Homo sapiens
ccgagcaacaccgagagaggaggagccagacgacaagcacacacaggcgcgaaacggaaaaaggggggacacaggacaacgagagaagccgaagcgggggaccc

SEQ ID NO: 139228 - RNA, 101 nt, Homo sapiens
aagcacgcccaggcagagccggggcacgggaggagcagcagaccaaaaggagcacgagccgaccaagcacaggcagagaggggccacgggaggagcaagag

SEQ ID NO: 139229 - RNA, 73 nt, Homo sapiens
acggcagcacgaggaggcccgaggccggagccccacggcacggcccaccacaaccaagcgagaggacccacgc

SEQ ID NO: 139230 - RNA, 75 nt, Homo sapiens
ggcgaggcggacaggacggaagccgcgaacccccgaccgggagcccacggggaggagcgcacgacgggaacccac

SEQ ID NO: 139231 - RNA, 83 nt, Homo sapiens
gggcggcgagggggcggccggaagggacaagaacccaagaaacaggaaaaaacccaaaacaccaaaaggaccagcgagaagac

SEQ ID NO: 139232 - RNA, 61 nt, Homo sapiens
gcgggcgggagaaggcgcccggggcgaagcagagcgcgggcaacccgggcaggcggcgcag

SEQ ID NO: 139233 - RNA, 62 nt, Homo sapiens
gaaagcgaaagggagagcacggccaaacaagagcccagccagcgaggggggccggggcaaag

SEQ ID NO: 139234 - RNA, 57 nt, Homo sapiens
cgcagggcgcccccggcaaaccaacacagccaaccacccggcagccccgggaaccag

SEQ ID NO: 139235 - RNA, 81 nt, Homo sapiens
ccgaaagcgccgcggcgcgggcagccgggaggagacaacaacaaggggaaggagaagccgggcaccgaacaaaacaggaga

SEQ ID NO: 139236 - RNA, 102 nt, Homo sapiens
cgggcggcgccgccaggacgcccggggcgcccagcaggaggcgcaccacgacaaagaagagaaaacgcggcagagcaacaaacacagccagaagaagaaagg

SEQ ID NO: 139237 - RNA, 86 nt, Homo sapiens
gaaggaagggcaggcaagacccaccccgggaagaaagcaaacagagccaaagaagaggaaggcccacaaagagccggagcacaacg

SEQ ID NO: 139238 - RNA, 80 nt, Homo sapiens
ccgcacaagcccagaccggaagcaaggcgggcagaccaagcgaggaggggagaagcgggaccggagaagaagagccacac

SEQ ID NO: 139239 - RNA, 56 nt, Homo sapiens
cccccggacccggcaacgacagcagcgcccaaggacaagccaagcggcccaaaacc

SEQ ID NO: 139240 - RNA, 85 nt, Homo sapiens
cagcagacagacagccaggcgcccagaggggccccggagccagacgagccaaaccaggcgaccgagcagccaagcaacgggcccc

SEQ ID NO: 139241 - RNA, 83 nt, Homo sapiens
cgagcgcacgcccgaacgcgaggccaacagccccggccaggcgaaccagccgaaaaaggagaaaccaaaaggaaaagcgaacc

SEQ ID NO: 139242 - RNA, 73 nt, Homo sapiens
accgccgcccgccacgagcgccccccgagcggggggacgcgccaggcacagcagcagcgcaacaggagacgaa

SEQ ID NO: 139243 - RNA, 76 nt, Homo sapiens
cccgggcgcgggggcggcggcagggggcggagcggcgaggcccgggcagcgggccagcgggaggggccccggcccg

SEQ ID NO: 139244 - RNA, 78 nt, Homo sapiens
cccacgaccccgaccgaagagacgagggagccggaaaggcgaacacccgcaaacaccacccaagcaaacaggagccgg

SEQ ID NO: 139245 - RNA, 83 nt, Homo sapiens
gcgacagccggaaaaggagcaccccaggcgagcagcaggcacaccgcagcaaggggaggagaaaccccagggcccacccagac

SEQ ID NO: 139246 - RNA, 59 nt, Homo sapiens
caaaagaaaagaagcaggaggagaggagccgggggggcgagcccgccgagagcgccaag

SEQ ID NO: 139247 - RNA, 65 nt, Homo sapiens
accaccgccagacacaagaacccaacgaaacacaagccacagaacaaagggcaaaggacacaccg

SEQ ID NO: 139248 - RNA, 83 nt, Homo sapiens
caaggggcccgggaccgccgcacaggcggcacgcgaagaggaggcaccggagacgcgccgcgcgggaccacgaaaaacacaca

SEQ ID NO: 139249 - RNA, 73 nt, Homo sapiens
agccgacaaggggcggaggaagggaggagacccgaccccagaagaacagaaggaggagggccaggaaagacgc

SEQ ID NO: 139250 - RNA, 57 nt, Homo sapiens
caaagaaccccaccggacccggaagcagaacaagcggaaagcaccaggaaggcaaga

SEQ ID NO: 139251 - RNA, 83 nt, Homo sapiens
gcggagccggacgcggggggcgggaagagccggggccgggcgacaggagcagccgagcagaccgggaaccgcaccgggaaaga

SEQ ID NO: 139252 - RNA, 75 nt, Homo sapiens
gagcaagccaaagaccaaggggggggcacccccacaacggaagggaaaaggccgaggcacagcgggaagaccgca

SEQ ID NO: 139253 - RNA, 74 nt, Homo sapiens
acaaggagaccaggaagggaaagccccagacggcaccaaacggcaaggaggaaaaaaccagaaaccagacggcg

SEQ ID NO: 139254 - RNA, 56 nt, Homo sapiens
aagagccagcccagaaacggaaaggcccgccagcgcggcaggggcggcacacaccg

SEQ ID NO: 139255 - RNA, 72 nt, Homo sapiens
gagacggcccgggcgcggacggacggcccccaggaccccgcgagaagccagcgaacgaacaaaggaagagca

SEQ ID NO: 139256 - RNA, 72 nt, Homo sapiens
aaaagaggcacccagaggaggaaagaaaagggcaaccccagggcccacaacggcaggccacagcgggaaagg

SEQ ID NO: 139257 - RNA, 81 nt, Homo sapiens
gcccgaggagggcgcaggagcacacgagaccgcaccgcacggcggagcccgcacgcggcgggcagaggaagaccagcacag

SEQ ID NO: 139258 - RNA, 36 nt, Homo sapiens
ccagcccgccaggacagaggacagggcagaccgcca

SEQ ID NO: 139259 - RNA, 36 nt, Homo sapiens
gccaggggccgggagggcgccaggagcagcccgagc

SEQ ID NO: 139260 - RNA, 79 nt, Homo sapiens
caagcaaaagcaaagaaggccaagagaaccaaggccgagggagagggaaaagcggaacccaccggcgcggcggccaagc

SEQ ID NO: 139261 - RNA, 74 nt, Homo sapiens
gagaccaacgcaagcagggagaagacggacgaaccacccacaaccaagaggaacacagcacccacccacaccca

SEQ ID NO: 139262 - RNA, 81 nt, Homo sapiens
cggagccccccagccgcgccagcagagcgccgccccgcgccagaagaaggcccaccgaggagaccagggaacggaggcacg

SEQ ID NO: 139263 - RNA, 62 nt, Homo sapiens
gagaaacaagacaacaggacagagccacagcagaggaaacagggcggcgacggcggcgcgag

SEQ ID NO: 139264 - RNA, 81 nt, Homo sapiens
ccaagaccgccagcaaaggaagacgagaggacagcagcggacggccggaccaagaggcgccgccccccagcaaacgagaaa

SEQ ID NO: 139265 - RNA, 86 nt, Homo sapiens
caggaggaagagagagagaggcgaagagagagaaacgaaaaagaggaaggagcgagggagcacaagcagcggaacggaaccacaga

SEQ ID NO: 139266 - RNA, 87 nt, Homo sapiens
ccgcgcgccgcgcacccgcgccagcaccacgcccgcgccgcgccgccgccaccagcccaagagaaaggacagacaagcagacggggc

SEQ ID NO: 139267 - RNA, 90 nt, Homo sapiens
cgaagcggccaaagccgcccagacggccaccggcgggaggaacaaaagcggcagccaggaggcaggagcagcgggcgacaggcgggcccg

SEQ ID NO: 139268 - RNA, 85 nt, Homo sapiens
cggggccgggcgacaggagcaggcggcccgggacgggccggcgccaccgaggacacgcccagccagacgaggagcacgcccgagc

SEQ ID NO: 139269 - RNA, 94 nt, Homo sapiens
ccagaccacaccccgccagcccagagagaacgacacacgccgacggaccacacccgcgggaacacaacgcccgggcggaccgcagcagaacgaa

SEQ ID NO: 139270 - RNA, 82 nt, Homo sapiens
caggacgccagagacagaacaacggcaccaccagagaaggagaggccagaaagggaagaagcgcggagcacagagcaccgag

SEQ ID NO: 139271 - RNA, 51 nt, Homo sapiens
agaacccacacaaggacaagggcgaaacagaggcaggaagagaagaccagc

SEQ ID NO: 139272 - RNA, 54 nt, Homo sapiens
gcggggcacccgcaggggcagacagcacaaccagcgacaccacgccacccaaga

SEQ ID NO: 139273 - RNA, 56 nt, Homo sapiens
ggggcagcgccggagggagaagaaagggaaccaagaacgagaagagcggcggaagc

SEQ ID NO: 139274 - RNA, 80 nt, Homo sapiens
ccggaccaggagaacggcggcgggacgaagagcccgggcccgccacagaggggaacgaaccagcagaacaaccaagccca

SEQ ID NO: 139275 - RNA, 88 nt, Homo sapiens
gggaaacagccgaaagaaaagcagccagggacacgcaaacccgcgggcaacccgacgcaccgccggagcccagggaagacagggcgac

SEQ ID NO: 139276 - RNA, 85 nt, Homo sapiens
cgcaagggccacgcgggcagaccgacagaagaaacaggaggcgcagggcggggccccacaacgacaaaccagaggacggccacga

SEQ ID NO: 139277 - RNA, 58 nt, Homo sapiens
ggccgcagacgcgaaggaacggcaaagacgccacagaagccagcccaaaagagagggg

SEQ ID NO: 139278 - RNA, 53 nt, Homo sapiens
ggaccaggcacgcacaaaaaggacaaaccggcgaccacacacggggacgacgg

SEQ ID NO: 139279 - RNA, 74 nt, Homo sapiens
aagggcaacaacgacaccaaggaaaggcgcaccaaggaacacgacgcccggcagcgccgcgacgcccagggcga

SEQ ID NO: 139280 - RNA, 82 nt, Homo sapiens
cccccaccggacacccgcggcaaccacgacggcagagacaggagaggagagccacgcccacagacccgggcgagccccaccc

SEQ ID NO: 139281 - RNA, 58 nt, Homo sapiens
gagaaggagacaccggaggacgaagagggggaggccagggagagagaggaaaacaagc

SEQ ID NO: 139282 - RNA, 83 nt, Homo sapiens
gagcgcgaaggccgggacccggccccggcccacaggggggggcaaacccgagagaacggaaagcgcgcgcccggcccaggaga

SEQ ID NO: 139283 - RNA, 79 nt, Homo sapiens
caaggagcccacagcgcgacgcaccgcgggggaccaaggcccccaaacgagaggaacacccacacacggacaacaccca

SEQ ID NO: 139284 - RNA, 53 nt, Homo sapiens
aaggagacaaggaccgaaacagaaacggaacaccaaggaagcccggggcggcg

SEQ ID NO: 139285 - RNA, 64 nt, Homo sapiens
caccagaaaacccagacacgacaaagcaaggcaaggccagccgccacccggcagcaagcaggag

SEQ ID NO: 139286 - RNA, 80 nt, Homo sapiens
ccagcaaacagagacagcaagcgggggccggaaggcgccaccaggaggcacccccgacagcccgaccacaacaaggccag

SEQ ID NO: 139287 - RNA, 43 nt, Homo sapiens
acaggacaggagagaaagacggccggagcccaacagaaagccc

SEQ ID NO: 139288 - RNA, 75 nt, Homo sapiens
gaggcggaagcccgaccagagacgagacaagcacagaggccgggccagaccacccaaccgaaaggccaaacgagc

SEQ ID NO: 139289 - RNA, 80 nt, Homo sapiens
gcggacggacacccagcggcgacacgcgacgcgccaaaacccgcccggaaaggggacaccggcagccagacaggccagga

SEQ ID NO: 139290 - RNA, 56 nt, Homo sapiens
aacagaacaacgagagcaaagggacgaaaaaggacagggcagggacagagaagacc

SEQ ID NO: 139291 - RNA, 63 nt, Homo sapiens
gaagagacacagaggagccacacccccagccaagcgaaagacagaggcccagccgaaagaggg

SEQ ID NO: 139292 - RNA, 79 nt, Homo sapiens
gagcgggcagccgccgccaccccgcggccgcacccccgccccagggcagcggggaagaagaaaaggaaccgaggccccc

SEQ ID NO: 139293 - RNA, 73 nt, Homo sapiens
agggccacaaggggcgggacccagcaacccagggacaacccaaagacggccaccgcgcaggaccagcaccacg

SEQ ID NO: 139294 - RNA, 73 nt, Homo sapiens
gaccggcgggcggccggccggaaagcacacaggcgggaaagccaaaacagaagaggcaaagcccagccacagc

SEQ ID NO: 139295 - RNA, 77 nt, Homo sapiens
gccggaggaagaccgggaggaagagggcgcaagggggaaggaagcaggcccaggcgaaaaagaggcgaccgagcgga

SEQ ID NO: 139296 - RNA, 70 nt, Homo sapiens
ggaacccgaggaaaaacgaccagcgccaggaaacagagaccccaagagacaaccccacacggcaaaaccc

SEQ ID NO: 139297 - RNA, 74 nt, Homo sapiens
gccgcaggaaaccaaggcagggggaaagaggaaacaaagcaacgcgacaccagaaaaaccaacaaaagaacccc

SEQ ID NO: 139298 - RNA, 87 nt, Homo sapiens
cggcggcggagcccaccggagaaagaaggggcaagaggaagaagcagaagcagagagaggagcgaagaagaagaagcgaccaaaggc

SEQ ID NO: 139299 - RNA, 85 nt, Homo sapiens
ggcgccggaaagccgggcgcgcagagccgcgggagaacccgagcaaccccgagaagagaagaaccccaaggccggaacagcccaa

SEQ ID NO: 139300 - RNA, 79 nt, Homo sapiens
ccaacgcgacggaaaggcacgaaagccagaggcagggcagcaccagagcaaaccaagacccccccccccaccaagaaga

SEQ ID NO: 139301 - RNA, 68 nt, Homo sapiens
gcgcgcgccacaaggcgacaaggaaacaaccacggaacaacagacagccacgacggggcacgaaccag

SEQ ID NO: 139302 - RNA, 97 nt, Homo sapiens
ggcgacagacaacccgaggggccaggggggacacggggagcgcgccgagcggagaccggacgggcacagagagcgcgaaggaccccgacaagaacgc

SEQ ID NO: 139303 - RNA, 88 nt, Homo sapiens
cacggacggacgccagccccacaacaagcccgccagagaagacaagggcagaaagcaccagaggggggcccaagggaggaaggcccgg

SEQ ID NO: 139304 - RNA, 80 nt, Homo sapiens
caagccaaacacaagcagaaggagcgaagaagaggaagacaagagcaagaggagacaaaaaacacagccagcacaggagc

SEQ ID NO: 139305 - RNA, 86 nt, Homo sapiens
ggaagggcaggcccggcgccgccacgccgcagccaggagaggcgggccagcggagccgggacggaggcccggggcgggaagcgacc

SEQ ID NO: 139306 - RNA, 78 nt, Homo sapiens
gaagagcagacaacaaagacaagcggcgcagccaggaccgaggggaaacaagcaacaagcaagaagcacagcccaggg

SEQ ID NO: 139307 - RNA, 75 nt, Homo sapiens
cccgcaaagcgcgagacccgggcgggggcaccgagggcaccacgcgcggaaccagggggaaggccccgggcagcc

SEQ ID NO: 139308 - RNA, 79 nt, Homo sapiens
aaccagaaccacggagaagaaaagcgacccaccaagaggacaggcgcccccgccgccagaccccgagccagcgaccccg

SEQ ID NO: 139309 - RNA, 78 nt, Homo sapiens
gaaaccagacagagcaacagcagaaaggaacgcccggaaaacacaggaacaaccaaagaggaggaaaggacgagcacg

SEQ ID NO: 139310 - RNA, 76 nt, Homo sapiens
caccagcaccaaggcagagaagaaagcggaagacacggccaaaagaagacccagacaagaaagaggaagacgaagc

SEQ ID NO: 139311 - RNA, 89 nt, Homo sapiens
cggggggccggcagaggaagaggcggcggcgaaaggaacggcgaaggcccacgggagaaaaccgggcgcaagagagaagagggggaaaa

SEQ ID NO: 139312 - RNA, 78 nt, Homo sapiens
gacagggaagacccagaaaagaaacacaaaacaagcgggaaagaagccaagggaaggacggagccgccgcgcccaggc

SEQ ID NO: 139313 - RNA, 67 nt, Homo sapiens
cgggacccccaaacagagcccaggacaaaaacaccacgacggcaccaggacaagcgagggagacacg

SEQ ID NO: 139314 - RNA, 81 nt, Homo sapiens
agaggcgggggaaacaagcagaagaacgcagaaagagacacaccgacgaaaaaggccccacagacaacaaggagagcacgc

SEQ ID NO: 139315 - RNA, 72 nt, Homo sapiens
ggagcaggagcacccccgcgggcgcggcaacagaggccgacccaggcagaggccccacccgcggagaacaag

SEQ ID NO: 139316 - RNA, 75 nt, Homo sapiens
gcgggccgcagccaccaggcaggggaacgcaacaaagaagcagccaaccacacccaggcaggaggcaacccgaca

SEQ ID NO: 139317 - RNA, 54 nt, Homo sapiens
aagccgcagcggaaagcaggagcacagaaaggccccaacgagcaaccgagacaa

SEQ ID NO: 139318 - RNA, 81 nt, Homo sapiens
aaacagagacgcgaaacgaccccaacaaaaaagggggggagccgcacgacccgaacgccagagacaaaaccagccagacca

SEQ ID NO: 139319 - RNA, 78 nt, Homo sapiens
aaccgccagccccccaagagggagccagagcccgcagcccagcggaggcaccccggccccccggcccgcaccgcggag

SEQ ID NO: 139320 - RNA, 74 nt, Homo sapiens
ggaggagcaggcgagaagagaaggcggccaaaaggcaacaggcgacaggaggaaacacagaccccacaaaccga

SEQ ID NO: 139321 - RNA, 106 nt, Homo sapiens
ccggggcggcgacacccgggagccgccggcaccgccggaaccggcgcaggccggacgggcgcccggaaaagacgacagaagccacgaaccgacgcaaaccccccag

SEQ ID NO: 139322 - RNA, 81 nt, Homo sapiens
gggccggacagccgcgcgcgagggccggggcgggcgccgcgggacccccgggccaggggcgaaccgaccaagaacaacacc

SEQ ID NO: 139323 - RNA, 74 nt, Homo sapiens
caacggccaaccggcaagaccagacgggaacgggagacaagcgcagcgaggacccaaggccagccagccccagg

SEQ ID NO: 139324 - RNA, 81 nt, Homo sapiens
acgccccaccacgaggccagcacgggaacgcgaagcgccaaagccagacaacacccgaaagagaacaaagaacgaagggaa

SEQ ID NO: 139325 - RNA, 82 nt, Homo sapiens
acccgcacggcgcaggccggaacacgggcggccacgaggaggggacccccccgcagcccaagcagcacaccaacaagaggag

SEQ ID NO: 139326 - RNA, 74 nt, Homo sapiens
caggaggaggaggaagaagagaagcggacgccgcaggggaccccgcccgaaagcagggcgcaggcgaaaccggg

SEQ ID NO: 139327 - RNA, 73 nt, Homo sapiens
agcacggccaggaggacggcgcagaagcccagaaaagaaaggagaagaggaaaacggccacaggacaaagaca

SEQ ID NO: 139328 - RNA, 73 nt, Homo sapiens
cacaggccagcaccagcccgggcggcacacgaggcccggggcgggggccggaggaccgcaagggaagcaagca

SEQ ID NO: 139329 - RNA, 59 nt, Homo sapiens
ccacaagaaaacaaaagaaacgcccacagaacaccgagaggcggagaagaacccaacca

SEQ ID NO: 139330 - RNA, 67 nt, Homo sapiens
ggccaagaacacgcgcagaagaggcaggaaccgcagaacgaagccacaaagggacggagacacaaaa

SEQ ID NO: 139331 - RNA, 62 nt, Homo sapiens
cgcccccacggcagaaggggaagccagcaacgcggaagaggagggagaaaacacagcaccgg

SEQ ID NO: 139332 - RNA, 48 nt, Homo sapiens
cagccgagcggggccggccacagccgaacggaagagggcagagagaga

SEQ ID NO: 139333 - RNA, 70 nt, Homo sapiens
gcgcacacggacgagaacggagagaacgcggaaggagacggagaagaaaacaacggcagaaaaggcccaa

SEQ ID NO: 139334 - RNA, 73 nt, Homo sapiens
cagaacgaaaagcgccagaaagggacagcagaaacgcccggaaacaccggagggcacgggcaaacaacagacg

SEQ ID NO: 139335 - RNA, 38 nt, Homo sapiens
agaagggacacaccaagcaaaggcggaggcaaggggac

SEQ ID NO: 139336 - RNA, 90 nt, Homo sapiens
agcccggaggccgccggaggagccgccgccccggcggagcccagccgcgccagcgacgagcggggcgcagaagaagcacgcacagaggca

SEQ ID NO: 139337 - RNA, 83 nt, Homo sapiens
cgaaaggaagcaagcagcagaagagccaaggaaaaacagcaagaacccaaaaggcgcagagccagaaggccacgcccaaagcc

SEQ ID NO: 139338 - RNA, 63 nt, Homo sapiens
ccagcagggccccagagagaggggaggcccacggggcaaccggggcgggcggggaggaaaaag

SEQ ID NO: 139339 - RNA, 76 nt, Homo sapiens
agaacagggaagagaaaagaaggcccgagggaacccggaggcaagacacgaggagaggcgcccagccggacgcgag

SEQ ID NO: 139340 - RNA, 72 nt, Homo sapiens
aacccacacccccggcagcaggcaagaccccacgcgagccggagaaaacaagaagacggcgaaaagaacgga

SEQ ID NO: 139341 - RNA, 75 nt, Homo sapiens
caacaggacggcccaaaaccagccgacaaagagggggcccaagaagagcacgcagccccgaaggcggcccggccc

SEQ ID NO: 139342 - RNA, 67 nt, Homo sapiens
agccaggcgagccaccacagcacagacaagacaggaccggacagggaccacccgagccaggggaccg

SEQ ID NO: 139343 - RNA, 86 nt, Homo sapiens
cagccggaacggcggaccgggacgcacgccagcgaggaggacccccaaaggaacgcaagcacaggaccagaaacgaaaggcagcag

SEQ ID NO: 139344 - RNA, 75 nt, Homo sapiens
ccgagaagcggggcaccacgaaggaccgaagaggaagaaggagaaagacaaagccccgagaaagaccagcaccgc

SEQ ID NO: 139345 - RNA, 80 nt, Homo sapiens
cgggccgccgcgcaccgcagcgccggggcacgacacaaaaacagggacagaacgaagggccggccaaccagggggggcag

SEQ ID NO: 139346 - RNA, 92 nt, Homo sapiens
acgcccagccaaagaaacaagccgggaaagggacaagaagggcaaagccgaagcccaggagacgcaacccagcggccgcagaacgaagggcc

SEQ ID NO: 139347 - RNA, 81 nt, Homo sapiens
caacacaggccccaagccgaaagcacagcagcggagcgcaagcaccggacggaccccaggggcagagacgccacagggacc

SEQ ID NO: 139348 - RNA, 82 nt, Homo sapiens
gagagccacgacgccgggaccgggaccgccgccgccgccgccaccagggaagaagccagaccgaggaaacccagcaaagcca

SEQ ID NO: 139349 - RNA, 62 nt, Homo sapiens
agacagaaccgccaaagcgcgaccggagcgaaccacggggcacaaaagacagggggcgcaag

SEQ ID NO: 139350 - RNA, 85 nt, Homo sapiens
cgggcgggcaagccagacagcgggccggagcagccgcgggcgcccgaggggccgagcgagagcccacggcaacagcccccccagc

SEQ ID NO: 139351 - RNA, 105 nt, Homo sapiens
gcgggagaggcaacaaggcggaaaaagacaccaccaacggaaaacaacacaggagaagccccggggaaagaggaggaaaacaaaggcagcgaacaaaccacaaag

SEQ ID NO: 139352 - RNA, 54 nt, Homo sapiens
gaagagagggaacgaggaagacaggagggcgaaaggaaccagagcagacaagac

SEQ ID NO: 139353 - RNA, 50 nt, Homo sapiens
gagcagccaggaccggaagcagcagacgaacacaggaggagcaaaaaaca

SEQ ID NO: 139354 - RNA, 67 nt, Homo sapiens
cgacagaccaaggagagaaggccaacacggaggcgcgcggagaaagggaacaccagaaaggaaaaga

SEQ ID NO: 139355 - RNA, 64 nt, Homo sapiens
ccgcgagaagggcagacacccaagaaggaccagcgaccccagcgcaggccaccaggcccgcaag

SEQ ID NO: 139356 - RNA, 122 nt, Homo sapiens
gaggaccaccggcagcagaagagacaacaaacagagagaagagagacacacaaagagccagaagagcaaccagacgacaagaccacaacgacccaaagaggcccacaaaccaggcaaagggc

SEQ ID NO: 139357 - RNA, 74 nt, Homo sapiens
gcaacaacacgcggcccgagaacccacaggagggccagaggacaaagcacggcggaagagaagccagccgccgg

SEQ ID NO: 139358 - RNA, 86 nt, Homo sapiens
gggcagcggggacgcggggccgcggcgccggcagcagagaccaccagaagggagaaaagagcagacaccagagaagaacacaaaca

SEQ ID NO: 139359 - RNA, 80 nt, Homo sapiens
gcacccgcgagcgcaacccaaggacccaaggccagccagccccaggcaccagcggacaggacagggaggacgaaggcccc

SEQ ID NO: 139360 - RNA, 76 nt, Homo sapiens
aagaaaaggaaccagagccccggggccaagagaaaggaaccagaggcgagggcgaaaaagagaccgaaacaaaccc

SEQ ID NO: 139361 - RNA, 60 nt, Homo sapiens
cggggccagggaacccggcaccgccccaggcgcggggaggcccagcccgccgcagggcca

SEQ ID NO: 139362 - RNA, 74 nt, Homo sapiens
gacgcggccgccagccccgcgaccgcccccgcccccgccggacccagcaagaggaaaggcaagggcagaaaaga

SEQ ID NO: 139363 - RNA, 71 nt, Homo sapiens
gaggccacccagcccaccaaacacgccggaaaccccgcccacagcacgagcccccaaaagccgccccgaca

SEQ ID NO: 139364 - RNA, 69 nt, Homo sapiens
ggcgaggacggcggaccccgcggcgggaggagccgccccgagacgggaagaaagcaaacgacccaccag

SEQ ID NO: 139365 - RNA, 84 nt, Homo sapiens
cgacaagccgcggcagccgcggaccaccgccgccagggggcacaaggaccagcgccgaggagccacaagggcaccccagagcgg

SEQ ID NO: 139366 - RNA, 75 nt, Homo sapiens
aaagagaggagggagaacacagaaacccgccccggggacgcaccaaagaagacagacacgcagaaaaggagccgg

SEQ ID NO: 139367 - RNA, 68 nt, Homo sapiens
cagacgcagggcgcccccggaacagagcaccagccaaggggagagccccggggcacacgcccgcagga

SEQ ID NO: 139368 - RNA, 52 nt, Homo sapiens
cgccgaccccccggcgccgcgccggcggcgccacagaaagaagacacccgcc

SEQ ID NO: 139369 - RNA, 69 nt, Homo sapiens
cgggggccgcaggcgaaggaccgggcgcggaccaggacagggaccgccgcgaccaccggagaccccacc

SEQ ID NO: 139370 - RNA, 40 nt, Homo sapiens
aggaagaacgagccgcacaggccccgggaccaaggacacg

SEQ ID NO: 139371 - RNA, 52 nt, Homo sapiens
caagcgaaaacagaccgcgagcccagaggcacggaccggaaggggccccccc

SEQ ID NO: 139372 - RNA, 72 nt, Homo sapiens
cggcgccgaccacgcacacgggcagcacaaggcccaaaccaggcccgcaacaggcgcggcagacagaacggg

SEQ ID NO: 139373 - RNA, 62 nt, Homo sapiens
gcgagcccgggccgcgcccgagagagcagcaccagcagaagagggcccgaccacggcaaccc

SEQ ID NO: 139374 - RNA, 79 nt, Homo sapiens
cagccccgcgcagcccagcgccaccgggcagcagcggcgccggccgcccagggaagggaggcagagacacggaacgcaa

SEQ ID NO: 139375 - RNA, 74 nt, Homo sapiens
caccagcgaaggcaggaaccccaaagggcgcagaggggagggcccaacgaaccgaagagaaaaggccaccagga

SEQ ID NO: 139376 - RNA, 86 nt, Homo sapiens
gaaagccaagacggacccaagccgggggacgaccgggacagcaccggcgcaccaggggccaaggggaaacgcaggaagaagccaaa

SEQ ID NO: 139377 - RNA, 97 nt, Homo sapiens
cccagggcagcagcagcagacagcagacagacagccaggcgcccagaggggccccggagccagccgcgccaggcccagacacgcagaggagacccga

SEQ ID NO: 139378 - RNA, 75 nt, Homo sapiens
ggaccacagggccgcagagaagaggaccaggaccaaaaaaaaccaagagcggcaagagcagaaggaagacgaaaa

SEQ ID NO: 139379 - RNA, 71 nt, Homo sapiens
cgcggaccagggacccgcgaaagcggggcacaggcgggcacgcgcccagacaaacccacaagcgaaagaac

SEQ ID NO: 139380 - RNA, 85 nt, Homo sapiens
ccggggcgggccgggcgggccgcgggagccgcacgcggcgaaggaagaggagggcaagaagggcaagaaggagaaagcaggaaga

SEQ ID NO: 139381 - RNA, 58 nt, Homo sapiens
aaccaaacaagaagacccagagagaggagaaaagaaagccagaaggaaggaagcaacg

SEQ ID NO: 139382 - RNA, 33 nt, Homo sapiens
ccacgccgccacccagggaagaacagcgccaaa

SEQ ID NO: 139383 - RNA, 71 nt, Homo sapiens
agcgagcagcgagcagacaagaagcaagcaagaggcgcgaccgcccagggagacggaacccacacagacca

SEQ ID NO: 139384 - RNA, 85 nt, Homo sapiens
cagcggcaggcggagagacccgccgccagaacggaaagagcgaaggagggagaccgcagagaggaaggccacgccgacaacagca

SEQ ID NO: 139385 - RNA, 75 nt, Homo sapiens
agccgggccaaaaggagcacgggcgcacggaaaagcgcaggcccagccagccaaacggcgggagagacccagagc

SEQ ID NO: 139386 - RNA, 78 nt, Homo sapiens
ggggcaggacaagagaagcacaaaacagcagacccaagagcagcggaaaagaccagcacaggaggacaagcgccggca

SEQ ID NO: 139387 - RNA, 38 nt, Homo sapiens
gggacgcagcccggcggcagcagcacgggcccagacgc

SEQ ID NO: 139388 - RNA, 75 nt, Homo sapiens
ccaggagggcaccaaacaaaaggaaaccacaccaaccaagaagagccagagaggaacaggacggaaaaggcagag

SEQ ID NO: 139389 - RNA, 59 nt, Homo sapiens
ccaaccgaaaaagccgacaaaaaaaagcaaaagcgcccaggagggcagaggggagggaa

SEQ ID NO: 139390 - RNA, 54 nt, Homo sapiens
acgaggaagagaaagaagcacggaagccaaaaagggagagaagcaaaacaagca

SEQ ID NO: 139391 - RNA, 35 nt, Homo sapiens
aggcgggggacaaccaagcgggccaaggaaagcgg

SEQ ID NO: 139392 - RNA, 79 nt, Homo sapiens
agcaaccaccagcagcccccagagcggaacacagaggcaggaaaggggaaagcaagcagagcccgcaggagcccacggg

SEQ ID NO: 139393 - RNA, 71 nt, Homo sapiens
caccgaagccagaagacggaaaaaacagcacaggcagaacaggagggaaaacgacggaacgagaagaggaa

SEQ ID NO: 139394 - RNA, 88 nt, Homo sapiens
gggcgggggccccagccccacagaccagcccagcacagggcgcacccacgacgcgcacaccaccggcagaccggcgccacagcaccac

SEQ ID NO: 139395 - RNA, 74 nt, Homo sapiens
aggcacgaggcaaaaacgagccgaccgaagacaacgaccggaagaaggaaaacacaggccccaccaagagagag

SEQ ID NO: 139396 - RNA, 77 nt, Homo sapiens
cccgcccccggagagagcacgaaggacccagcagggcaccagcagccaacagggaagaggcgcacccaggagaaaga

SEQ ID NO: 139397 - RNA, 35 nt, Homo sapiens
cgcggccccaaggcggagcgacagaacggaacccg

SEQ ID NO: 139398 - RNA, 82 nt, Homo sapiens
acgacgccgccaaaacacgcccgacaggggaccggacgacaccagccaaccccaggaaaacgcagcgcggcccacggaccaa

SEQ ID NO: 139399 - RNA, 78 nt, Homo sapiens
ggcacccgggacaaggcagacgggagcgcaaggcgccccaaggccagacaaaacgcgccaccaggggccagaaccgcc

SEQ ID NO: 139400 - RNA, 72 nt, Homo sapiens
cgccccgagaggaaacacccccagaagaggaaccagcaggaacgcccacaggaaaaggacccgaccgcagac

SEQ ID NO: 139401 - RNA, 61 nt, Homo sapiens
agaagggaacagcaaaacaaaggacaaggagccaccaacagagccaggagccaggaagcag

SEQ ID NO: 139402 - RNA, 66 nt, Homo sapiens
gaaggcggaagccaggacaagcacacaaaagagggacaacacaagccacagcgcccaggcccagag

SEQ ID NO: 139403 - RNA, 75 nt, Homo sapiens
ggaggccggagccggagcacccggaggagggccacgcccagaccgaccccggcagacacacaccacgccaagaac

SEQ ID NO: 139404 - RNA, 73 nt, Homo sapiens
ggccacacggggcccggggacggccaaagaagacccaaagaaagcaaggcaaaccagggggccacacagagcg

SEQ ID NO: 139405 - RNA, 74 nt, Homo sapiens
ggaccccggagcccagaagacagagggcgagaagcagcaaagaggccgggagccaacaagaccccaaccccacc

SEQ ID NO: 139406 - RNA, 86 nt, Homo sapiens
cccgccaagaccagagaaggaggagggaccacgcgcgagacacaagccaccaaggcaacgacagcagcagcgggcagcgccccgag

SEQ ID NO: 139407 - RNA, 73 nt, Homo sapiens
acagcgaacagggaggagagacggcggcggaaaaccccaaaaggacaaaggaccccaaagggacaaggaaacc

SEQ ID NO: 139408 - RNA, 80 nt, Homo sapiens
gggaaggggagccaccagccccccggggagccgccaccaaaagcagacggaaaacccacggggaagaccacaccccgagg

SEQ ID NO: 139409 - RNA, 79 nt, Homo sapiens
ggcaccgagagcgacgacgacccacggccagacgccaggagggcaaggaaccagggcacccccaaaccccaaagcccag

SEQ ID NO: 139410 - RNA, 42 nt, Homo sapiens
gggcggggcaacgcggaagagcccgaaacaagcgagaagaag

SEQ ID NO: 139411 - RNA, 72 nt, Homo sapiens
gccgaggggcagagggcgaccgaccgagcagggcacacccgcgaggaagcccgagagagaaagggaaagaag

SEQ ID NO: 139412 - RNA, 74 nt, Homo sapiens
aggcagcccaggagaccagcaaagaaccaggaacaccacccgcagcccggacgccacaagagaaaggacgcccc

SEQ ID NO: 139413 - RNA, 78 nt, Homo sapiens
gcaccagcaagccagagacgagagagaagagcgccgaggaaacagggagacgcagcggcgcccaaaaagaaggaccgg

SEQ ID NO: 139414 - RNA, 84 nt, Homo sapiens
agcgcaccacggagagcacgagagacccgagcacgccacccccacccgcacaggaccaaggaaccaggcgaccgaaaggccgga

SEQ ID NO: 139415 - RNA, 68 nt, Homo sapiens
cgagaaagcaacggaaacgaagaaggcccagcccaccaggaggaaagaaagaaagaacgaacagcaga

SEQ ID NO: 139416 - RNA, 65 nt, Homo sapiens
ccgggggccgccgccagccccggaaggccgagaggacccaaagacaggaccacgcaccagcagag

SEQ ID NO: 139417 - RNA, 55 nt, Homo sapiens
cccaggccccgaagcaagccccgaaaagagacgcagaacgcaggcgaccagcacg

SEQ ID NO: 139418 - RNA, 81 nt, Homo sapiens
ccacaacccacgggcgccgcggagaaggaccagggacaaggccgggagacgcggggcacggagccggaaacacaagcccaa

SEQ ID NO: 139419 - RNA, 62 nt, Homo sapiens
aaccgggaggggagggaagggacaagaagaacgcccggccagagaacaaaccgcagagagaa

SEQ ID NO: 139420 - RNA, 70 nt, Homo sapiens
caacaacaacgcgacaaaggagagaaacagccaaaacagcacaacagcgaacgggaaccagggaacaagc

SEQ ID NO: 139421 - RNA, 39 nt, Homo sapiens
agaaagagcgggcagagacgaggagcacggaagcccgca

SEQ ID NO: 139422 - RNA, 81 nt, Homo sapiens
aacagagggacaacaaaagccccacaagagccaccaaaaaagaagaaggggagcggcaaagccaaagaggccagagacaac

SEQ ID NO: 139423 - RNA, 81 nt, Homo sapiens
cagaggagcgacagcaagagcgcagggcggagaaaagccagagcacgccggccaaccacggacacagcccgccccagcacc

SEQ ID NO: 139424 - RNA, 58 nt, Homo sapiens
cacaggagccggagcagaagcaaagaggaagggccccacaccaaaccgccacgcaaca

SEQ ID NO: 139425 - RNA, 63 nt, Homo sapiens
aaagggcggagagaaaacaccaagaaaagggcaggagcccaagagcagaaccccggggaggag

SEQ ID NO: 139426 - RNA, 75 nt, Homo sapiens
ccccccggcccacgacccaaggacacaacccggccgcagagcccagccgccgcccgccagcggacccgcggcacc

SEQ ID NO: 139427 - RNA, 73 nt, Homo sapiens
cgacggagcagacagaaggaacgggagcgacccaagccagcgagccggaaaaacgcgcacaaacgggcgacgg

SEQ ID NO: 139428 - RNA, 83 nt, Homo sapiens
agaggaaaaggaagagccacaaaaacgagccggaaggggagaacaaacggcacaaacagaacaggcaagggagaaccaaccag

SEQ ID NO: 139429 - RNA, 77 nt, Homo sapiens
cagaaccgaaacggaaagaagcaccggagagacagcacagcacccacaaagcaacgccaaggccaccgagccacaag

SEQ ID NO: 139430 - RNA, 76 nt, Homo sapiens
aaaacaaacacacgcaaaggagaaaggaaccgacaggcaaaccgacaccagcgacacaagcgcgagggaaccacag

SEQ ID NO: 139431 - RNA, 78 nt, Homo sapiens
caagacacaaagaaccgaggacaaaaagccgccaggagcaaggcagcgacccagggcacagcggggcacagcccccag

SEQ ID NO: 139432 - RNA, 72 nt, Homo sapiens
caagggacacaaagacacggacggggcaagcgaaggaggaagcacaaacaccagcccgaacgagacgagaaa

SEQ ID NO: 139433 - RNA, 35 nt, Homo sapiens
gcggaagaccaagacacgagagagacggccggcga

SEQ ID NO: 139434 - RNA, 40 nt, Homo sapiens
gggagagagacacaaaggcacagggaaagaaaacaagcca

SEQ ID NO: 139435 - RNA, 76 nt, Homo sapiens
ggcccagaaagggagcccgcaacgaccacggagagccaagcgccgggcaagcgagagaggaggagcacggaccagc

SEQ ID NO: 139436 - RNA, 57 nt, Homo sapiens
agagcaagcgggggaccgaacaaggcaaaaggggaaggcccgaacaagacaggaacg

SEQ ID NO: 139437 - RNA, 84 nt, Homo sapiens
agagggcagaggagcggcggagagcggccgcgggcgacgggccgaggaaaggaacacggagcgcagaggcacagagccaagagc

SEQ ID NO: 139438 - RNA, 71 nt, Homo sapiens
ggcacggagaaaacaagagcgaaaaccaggcaaacagacaaccaacagcagaggaacaagaggcgagaggc

SEQ ID NO: 139439 - RNA, 81 nt, Homo sapiens
gagacacacggcacacaccagcaggcgcagaacgagggacaaccggagacgggaagcccaacgcgaagaaaagaagccagc

SEQ ID NO: 139440 - RNA, 57 nt, Homo sapiens
agacgccacggaccccccagcaaccccgagacgagacaaccagagggaaaaaacaaa

SEQ ID NO: 139441 - RNA, 77 nt, Homo sapiens
ggcagcgcccagcagcgcaggaccaaaaacgggaagagaggaaaccgccaccccagcaaaagcccaaagcaaacaaa

SEQ ID NO: 139442 - RNA, 80 nt, Homo sapiens
gggccaggcacgccacaggaggcggagcacagagaaggggagcagcagggagagcaagggagaacagagcaaccaccaaa

SEQ ID NO: 139443 - RNA, 70 nt, Homo sapiens
aacagaaggagcggcggacacacagacccccaccaagcaggagacgggacgcgccagcccacaagacacc

SEQ ID NO: 139444 - RNA, 101 nt, Homo sapiens
cacgcgaggacagaaaacgcaagacaacaggagaggaaagcggaaagccaagaagaggcaacggacaaaagagaaacacaagggcagaggcacagaggaaa

SEQ ID NO: 139445 - RNA, 60 nt, Homo sapiens
gcgccgcgacggcgcgagcggggcaacaccgggcgcgcacagaagggacaacggaggaaa

SEQ ID NO: 139446 - RNA, 80 nt, Homo sapiens
caccgcacgcgcggaggagagcagagggaaggcaacacgagcggaagaacacacaccgggaccgcgagcagcaagcggcc

SEQ ID NO: 139447 - RNA, 69 nt, Homo sapiens
cagccgcgcgccccgggcggcagcgcgggggccgacagacaggcacagagggccccagagagccagccc

SEQ ID NO: 139448 - RNA, 69 nt, Homo sapiens
aaagaagagaccggacaagcagccaaccaggaaaccgccagacggccgcaccagaaggaaaggcgacgg

SEQ ID NO: 139449 - RNA, 81 nt, Homo sapiens
gcagcgcaggggcgggaaagacccaggagaagccgcccaaagaacggggaaagcgaggagccccacgccgagggaaacaaa

SEQ ID NO: 139450 - RNA, 78 nt, Homo sapiens
ggagcacgacggcaggaaggaggagacgaagaaaggagcacagaaggaagacggaggaagacagcagagagagagaga

SEQ ID NO: 139451 - RNA, 76 nt, Homo sapiens
gccacggccaccgagcgcaagcagccaccagcacagacacgacggcacagccccaggggcgggccacgcgcggggc

SEQ ID NO: 139452 - RNA, 113 nt, Homo sapiens
aggaacccaagcagggcgaagggaacgcaaggcccccgaccacacgcccgcgcgaggagaacgcgacacacaccaagcgaagcccggagcccgagacgggaaaagaggcggcc

SEQ ID NO: 139453 - RNA, 64 nt, Homo sapiens
acaacaaggccacgcccacaacacccagcaaggaagagccgagcaacgaaaaagacaagggggg

SEQ ID NO: 139454 - RNA, 78 nt, Homo sapiens
aacaaccccgggggcgagaggggggcagacacccggaaaacagggaaagaacaggagagcgcaaaggaacagggggcc

SEQ ID NO: 139455 - RNA, 73 nt, Homo sapiens
ccggagcggcgagccgccgcacacccacggcgggcgggagccagaagaccgagcacgccccgaccgacgaaag

SEQ ID NO: 139456 - RNA, 47 nt, Homo sapiens
cacaagaccgggaggggggagaagcagaccgcaccaggcgggacccc

SEQ ID NO: 139457 - RNA, 83 nt, Homo sapiens
ccgaaaagcgagcgcgaggaaaaggcggcgggagagcggcagcagagaacaccaccgggaccccaagcaaagagcaggagaaa

SEQ ID NO: 139458 - RNA, 76 nt, Homo sapiens
caggaagcgaccccacccagcccgagcacgggaccccagcagccaagaagagggaaagaagacaggaaacaaggga

SEQ ID NO: 139459 - RNA, 69 nt, Homo sapiens
ggagagaagaagaccgcggaggccagagaagacaaagggagaagagaaagaggaaggccccggggaaca

SEQ ID NO: 139460 - RNA, 83 nt, Homo sapiens
gcagcgcacgacagcaaaaggcacggcagacacaccgaccagaggaaggcgaacccgccacgcagcaggagcaggggacgaag

SEQ ID NO: 139461 - RNA, 61 nt, Homo sapiens
caagcgaagaacccaccgacccccggagacagaaaaaaccgccgcaccagaggaaaccgaa

SEQ ID NO: 139462 - RNA, 75 nt, Homo sapiens
gccgccaggccggccggagccgagcggagccgcagacaacacgcaacagagcccccgaaggcaccgaaagacccg

SEQ ID NO: 139463 - RNA, 80 nt, Homo sapiens
aagcggaagggagcccaagaggaccaggcgggggagcagggccccaacgaacggaagacaccacagaggcagaacacaaa

SEQ ID NO: 139464 - RNA, 51 nt, Homo sapiens
gacaaaggaccgagaggaacacaggccgcaagaaagggcccgccaaccccc

SEQ ID NO: 139465 - RNA, 61 nt, Homo sapiens
gaacccaagaacaagcaaagagacgagaacagagcagagaaacggaacaacaggaacagcg

SEQ ID NO: 139466 - RNA, 89 nt, Homo sapiens
gcgccgagccggaggccgcgggacccgaaagccgcgggaaaacagaggcgaccagggaggccgccacccgaagaagacgagggcggaga

SEQ ID NO: 139467 - RNA, 67 nt, Homo sapiens
agcagaaacaagacaggaggaagaaacagacacggacagaaaccgccgcacgccagcacgcaggcag

SEQ ID NO: 139468 - RNA, 80 nt, Homo sapiens
accacggaggccacagccgccggggaggaggaggaggaggaagaggaggagaagcccgccaaggaacccgcggggcagac

SEQ ID NO: 139469 - RNA, 78 nt, Homo sapiens
ggcccagcgccaccccagccacaacaagcgccggcgcgccagggcccggggccgacgaaagggggccagaaagcacgg

SEQ ID NO: 139470 - RNA, 71 nt, Homo sapiens
gaccggacaccgagaacgggaaaggaaggcccggaggcgcccagggaagcagagccccgggccgggaaggg

SEQ ID NO: 139471 - RNA, 75 nt, Homo sapiens
cccccgggacaaggaaacgacccagccaaaggaacacaacaggccaagagaaaccaccaagagccaggaaggcaa

SEQ ID NO: 139472 - RNA, 78 nt, Homo sapiens
ccaagcaaagaccaaagccacagccaagagcccacggacaccacccaacgggccaagaaggagaaaaagaggcccgaa

SEQ ID NO: 139473 - RNA, 119 nt, Homo sapiens
gcccccccgggccccggcccccccagacacacgcaagcggggcaacacacaccccaaagcaggcgccagggacgaaaccacgcagcgacaaccggaaccagcgccagcccaccggaagg

SEQ ID NO: 139474 - RNA, 76 nt, Homo sapiens
ggccacgggcggcccggcccccccacggcggaacacacacagcacccccccaagaccggagggccagggagggcga

SEQ ID NO: 139475 - RNA, 57 nt, Homo sapiens
ggcggcggcgggaggcccggcgcaggaaggacacagacaaaagaccaggagagagca

SEQ ID NO: 139476 - RNA, 74 nt, Homo sapiens
agcaccaaagcacgcccaaaggccagagcacagcgccaaagcaggcgaagccgacgagcccgaacagacgcacc

SEQ ID NO: 139477 - RNA, 66 nt, Homo sapiens
cagagccaggggccgggagggcgccagggccagcgcagaagcagaaaacccagagcccaagcacac

SEQ ID NO: 139478 - RNA, 80 nt, Homo sapiens
cccccgagaccgggaccacagaacagccacaggaagagggaacaaagaaggaaacaggagaagcgggagaagaagcgacc

SEQ ID NO: 139479 - RNA, 85 nt, Homo sapiens
ccaagcggagacacaggcaaacgcagaaaagagagccgggcgcggaaacgaggcgggaaaacggcacaaggcgacgagggagggc

SEQ ID NO: 139480 - RNA, 85 nt, Homo sapiens
agaagacggggcccgggaccacaggccccggcccagaaagccggaaggccccccccgccgggagaagaaagccagacggcacccc

SEQ ID NO: 139481 - RNA, 81 nt, Homo sapiens
cgccgcagcgcgaacaggacgccgcaacgcccaaccaggagaccaagacacccaggagaaagacagcggggaaaagaaaaa

SEQ ID NO: 139482 - RNA, 74 nt, Homo sapiens
gcccccggggggacccgcgaaaacaccgagcgaggacacccccagacccaaaagggccagaacgaggacaggag

SEQ ID NO: 139483 - RNA, 37 nt, Homo sapiens
cgcagcgccaggcaggaaggaccaagacagaaaacgg

SEQ ID NO: 139484 - RNA, 76 nt, Homo sapiens
gcaaggggccaccaggaggccagggggcgccaggagaacaaggagcggcccagagcaaaacagaggaacggacacc

SEQ ID NO: 139485 - RNA, 76 nt, Homo sapiens
ggacgacagaccgagggaggacaccggaccccggacgcgggaaaggagaccaaagaccagacggaggaagcagcca

SEQ ID NO: 139486 - RNA, 76 nt, Homo sapiens
agggccgcccaacgacacgaggccggagaagggaaaggccagcagcaacccaagaaacaaaagcagagaaccaaag

SEQ ID NO: 139487 - RNA, 43 nt, Homo sapiens
gcccccgaaagcgggaccacaggccagcaaaggacgcccgaac

SEQ ID NO: 139488 - RNA, 80 nt, Homo sapiens
ggggaaccagaacaccgggaagaacacagaggaaccagaaaagaacgaggccaggagagggcgacaagaagagcgaggaa

SEQ ID NO: 139489 - RNA, 54 nt, Homo sapiens
caaggggccaccaggaggccagggggcgccaggacagccagccgccagacaggc

SEQ ID NO: 139490 - RNA, 78 nt, Homo sapiens
gcgaaggcaaggcacaaagcccgacagggcaacacccgacaaaggacaagagagggcggcagaaggaacaccgagaaa

SEQ ID NO: 139491 - RNA, 79 nt, Homo sapiens
caagagggcggaggccacgaacacgccggagccgccagaacaccccaccagaccacccagcaagcccacaaaaaaggca

SEQ ID NO: 139492 - RNA, 77 nt, Homo sapiens
gccggaagaggagccccgggcccgacgcagcgccccgcaggcccggggaggaggggcgcaaaacgagaacaaagcca

SEQ ID NO: 139493 - RNA, 80 nt, Homo sapiens
ccggaacgcagaggaaggaaaaagcaaacaaccaggggcagggaggcacaaaggggaacgcaggaacaagccgcaagacc

SEQ ID NO: 139494 - RNA, 51 nt, Homo sapiens
aacagcaagaacccaaaaggagcggcaaagcacgccacggacgcacgaggc

SEQ ID NO: 139495 - RNA, 79 nt, Homo sapiens
caaaccccaggccaagcaaccaccagcagcccccagagcggaacacagaagacccaggaaccgaggaggagcgccacaa

SEQ ID NO: 139496 - RNA, 80 nt, Homo sapiens
aaccagcgggaccccgccagacgcaaagcccagaacccccgacaggccggggacaaaccaggagagcggccacacgaaag

SEQ ID NO: 139497 - RNA, 66 nt, Homo sapiens
cggccccacgggaaacaaaggaccaagaaaggcccagggaccaaagcccggacaaggcccgagcac

SEQ ID NO: 139498 - RNA, 58 nt, Homo sapiens
caaaaccagacacgcaacggacaagagcgcccaagcggacagccccacccgacaccag

SEQ ID NO: 139499 - RNA, 72 nt, Homo sapiens
cagaagagcacagcacgaacagacagaaagcaccacagaaaggggaccaaaggcgaccaggagagaaaacca

SEQ ID NO: 139500 - RNA, 40 nt, Homo sapiens
ccccccagagcgggacacaggcacagaagcaaagagaaag

SEQ ID NO: 139501 - RNA, 73 nt, Homo sapiens
aaccccgggaaagggccagaaagcaccagcgaaacaagaagagggccaaaacgccccggaaagagggccccaa

SEQ ID NO: 139502 - RNA, 66 nt, Homo sapiens
gaaaacgggcagggcagccacaaagaggagcacgaggaaaagcagaagcaacccaaagccaggaaa

SEQ ID NO: 139503 - RNA, 54 nt, Homo sapiens
caacgcaaggccacaagagagaccgcccagagaaagcacaccagacacgcagca

SEQ ID NO: 139504 - RNA, 57 nt, Homo sapiens
acaccccgcaaagggggaccgggagccaggcacaagaggggaagggacccaagagcc

SEQ ID NO: 139505 - RNA, 80 nt, Homo sapiens
cagggccagaaccagagaaggaaagcaaagcgaccaaggccaaaacagaagaggcaaagcccagccacagcagcagccca

SEQ ID NO: 139506 - RNA, 85 nt, Homo sapiens
ccggccagcgccgcgacgggaggagcgccggaacgccgaggcccagggaaagcaggaccgccacaagaacagcaaagcacaccaa

SEQ ID NO: 139507 - RNA, 42 nt, Homo sapiens
cagagaagagccacccgggcaacgggagcgcgacaagggcag

SEQ ID NO: 139508 - RNA, 101 nt, Homo sapiens
ccaccacgcaccgcccccacccccacaccccgcgcccgcaacccagaccaagggcacaaggagaaccaggagaaggaagcagagcgaggaggcagcgacgg

SEQ ID NO: 139509 - RNA, 65 nt, Homo sapiens
cgcggagaccccgcggcccggcagggggaacgggagggggaaacaacgaagaggaagggagggga

SEQ ID NO: 139510 - RNA, 72 nt, Homo sapiens
ggagacacaaacagaaaaggaagaaagggacaaagagaggagcaggcgccggaccgaaggcgcgaccacgac

SEQ ID NO: 139511 - RNA, 83 nt, Homo sapiens
ggccagaggggacaccaaaaggcgaaggagccacccaggacgagagcggcgagaggagacgcgcccagccacgccccgagaag

SEQ ID NO: 139512 - RNA, 70 nt, Homo sapiens
caggaaggaaaaggaccgcacagagaacagaagcgcaagagggccgagcaccacagacagcgcgcccccc

SEQ ID NO: 139513 - RNA, 63 nt, Homo sapiens
acggagagaacgaggaggaaggagagaaaaggcgccacggcacgcaccccgcgccgccgcccc

SEQ ID NO: 139514 - RNA, 69 nt, Homo sapiens
cagaaccaacaagggccaagcccacagaaaaagagaaagaagggaaaaaccagccgggcgaaaagcaag

SEQ ID NO: 139515 - RNA, 89 nt, Homo sapiens
agacccccgcgcaccaccagccgagaccgacccgcccgcccgcggccccgcagcagcccaagaaggaaccaagagaccgaggcccccgc

SEQ ID NO: 139516 - RNA, 76 nt, Homo sapiens
ggacagcaaggacaccaagccggggggggcacagagccccggaagacagcccccagcgaccagacccagggccaga

SEQ ID NO: 139517 - RNA, 76 nt, Homo sapiens
accggaggacagcaccccccggaggacgcggacgaggaagggcggaaccaccccagaagaggggcagcggacagcc

SEQ ID NO: 139518 - RNA, 40 nt, Homo sapiens
gccgggagcgcgcagccagcccaggggggaagacgcgcga

SEQ ID NO: 139519 - RNA, 81 nt, Homo sapiens
ccagaccccggccgccgaccgcggccccgccggccgccggccgcgcgggggaacaggccgcccgccgaagaaacacaagag

SEQ ID NO: 139520 - RNA, 74 nt, Homo sapiens
acccaccgggcgcacgccccgaaagagccgcagacgcacagcaaccaccggacccgaaggccaccacccagagg

SEQ ID NO: 139521 - RNA, 54 nt, Homo sapiens
gagagagagagcagaagccagaacggaagaccaaccagaagacacacaaagcag

SEQ ID NO: 139522 - RNA, 81 nt, Homo sapiens
ccccaggacccaaagaagcgcagacggggaagcggagccaacagccagggcccggagcggggcgcaaaacaggaccccgcg

SEQ ID NO: 139523 - RNA, 36 nt, Homo sapiens
ccaagaagacaccaggaagacccaagacaagcccgc

SEQ ID NO: 139524 - RNA, 77 nt, Homo sapiens
agaccggcccaagccgagcagacggcacgaagggcggccgccgccgggaagagcgagacaagagccaaggacagggc

SEQ ID NO: 139525 - RNA, 66 nt, Homo sapiens
acgccgaaccaggcagggaagcgagaaacagagagacaggccaaagccccaaggccagagaagcgg

SEQ ID NO: 139526 - RNA, 70 nt, Homo sapiens
ccaggcacaagggcaccacaaagggaacggagggaaagcgacaaacaaccaacccacagagacccagaga

SEQ ID NO: 139527 - RNA, 80 nt, Homo sapiens
aagcaaacagcgcaccagaggaagaagcagcgaagacggaggcagcccacacggaacaaggcggagaacggaaaagcacc

SEQ ID NO: 139528 - RNA, 84 nt, Homo sapiens
cccaggcggcacgagccgaggaaacaggacccgagcgaagccaagccgggcggcagacgcgaccggaaaggagagagagacaga

SEQ ID NO: 139529 - RNA, 74 nt, Homo sapiens
gccaaacaacagggaaccaaggggacaaaccaacagaagggcaaccagggaacggcgccaccgagcacagaaga

SEQ ID NO: 139530 - RNA, 81 nt, Homo sapiens
caagccaagcgaaggagcgcaggccacgccgagcgccgggcgcacccgccccagcggccaaggagagacaagaccggagag

SEQ ID NO: 139531 - RNA, 52 nt, Homo sapiens
gaccaagaaccagagagaggagcgagaggaagcggaagaaaaccaacaaagg

SEQ ID NO: 139532 - RNA, 76 nt, Homo sapiens
cgcagggccgaacccaggggaaagcacgaagacagaccgcgaaaccaggaagagaggagggccaaaagcgggcgga

SEQ ID NO: 139533 - RNA, 64 nt, Homo sapiens
cggggcggcggcggcggcggcgcggcccaaaagggagacaggaaccaaaaagcaacagaagaaa

SEQ ID NO: 139534 - RNA, 55 nt, Homo sapiens
caccggccggaaagggggggcacgggcccagaaggcccgggagaacgcaccagca

SEQ ID NO: 139535 - RNA, 98 nt, Homo sapiens
ggccagcccacaagaacgagcgagccaacccagcccagcggacacccgcggaaccggaggaggggagcggggaagaccgagacaggggcccggcaccg

SEQ ID NO: 139536 - RNA, 35 nt, Homo sapiens
caaacccggaaacaggcgggaagaacaaagcaagc

SEQ ID NO: 139537 - RNA, 78 nt, Homo sapiens
ggcgaggagcaacccagaaggaagacccacaagagaccacgcagagacagcacccaaccggcagcagcagggagccac

SEQ ID NO: 139538 - RNA, 96 nt, Homo sapiens
aaggacaagggaaggagcagaggcaaagagcgacgcacagggaccagggacacaacgcaacaggaaggaccacaaccggaccaaagccaggaagaa

SEQ ID NO: 139539 - RNA, 71 nt, Homo sapiens
ccccccccccaagagaccccaacgaacccagagagacccggaagagaggcacacccagaagccacaggaga

SEQ ID NO: 139540 - RNA, 72 nt, Homo sapiens
cgcgcgcgcggaagagccccccgagccacaaacagcccagggggcccaccacacccaccgagccaaagcccc

SEQ ID NO: 139541 - RNA, 70 nt, Homo sapiens
aaaagagcaagcaacagagcgcgggacgggcaaaggaaagacacaagcgggacggaagaggcccggcgac

SEQ ID NO: 139542 - RNA, 78 nt, Homo sapiens
ggagaagcgcccgcaccaggacacaggacgaaccaagagcgggcacccacacccaaagccaggagaagcccagcaccg

SEQ ID NO: 139543 - RNA, 85 nt, Homo sapiens
gaagccacgccaaaagacgaaagggggcgaccacagggaggagccaagagggcccgaggaaaaaggaacggaccagacgccaaag

SEQ ID NO: 139544 - RNA, 44 nt, Homo sapiens
cggagcgaaggccggaggacaagggagcagaccggcaaccacca

SEQ ID NO: 139545 - RNA, 79 nt, Homo sapiens
caaaaaaccaaagagagagaaaaaagaacacaaacacgaaacacaagcacaggccagaggcacggacgaccccggagag

SEQ ID NO: 139546 - RNA, 40 nt, Homo sapiens
gggggaagcggcccagggaggggcaagaaagccagagccc

SEQ ID NO: 139547 - RNA, 77 nt, Homo sapiens
ccgcggcagccggaccagcagcaccaaggagaaacagagacgagcaaggcgagaggcaacgaacgagaccggggacc

SEQ ID NO: 139548 - RNA, 76 nt, Homo sapiens
acacagcgggaacgaccgcaaacagcaaaggcgcgaaaccagagaccgcaccacacagcagggaaaccggaaaagc

SEQ ID NO: 139549 - RNA, 86 nt, Homo sapiens
ggaggagaagaagaaggaagagaggaaagcagaagagaagaagagaagcagggagaagaggaggagagaagagaggaagcgagcag

SEQ ID NO: 139550 - RNA, 79 nt, Homo sapiens
gaccccagaaggacaagcgcccgggcaccgcaggccagacgaccgcagggaaaacccacaagccgcaaggagcaaagaa

SEQ ID NO: 139551 - RNA, 69 nt, Homo sapiens
aaaacacacagacgaaggcaaaagaggaagcaccaggaggggaacaggacagcacaaaagcgggaaggc

SEQ ID NO: 139552 - RNA, 106 nt, Homo sapiens
ccaagaagggcagaagcgcaggggagaggagagaaaaagaacccggagaaacgaagcgggacggagcaggggcaacagacaagcacccagccagaaggaagcacag

SEQ ID NO: 139553 - RNA, 78 nt, Homo sapiens
accacccccaacccgggagcccgaggcagaaggcccagcggaccgccccgccgcaccggacgggccccccgcagccac

SEQ ID NO: 139554 - RNA, 70 nt, Homo sapiens
ggccggacggggcggggggaacggggaggcaagcaggggggcaaaggaaagaaggcagaaagggaggcca

SEQ ID NO: 139555 - RNA, 78 nt, Homo sapiens
ccaaacgaggcgcaaggggacggcgacgagaagagcagccagagaccacagcgccggagaggaagaggagagaagccc

SEQ ID NO: 139556 - RNA, 78 nt, Homo sapiens
ccagccagccaccgccaccgcgaccacacgggccccgagccccggccccaaagacccaaaacagagacaccccccagc

SEQ ID NO: 139557 - RNA, 82 nt, Homo sapiens
acccgggcccagccgggaacccccacgcggccagcgaaaacgcccagcggaccgacccccagccgaggcagacaccacccgg

SEQ ID NO: 139558 - RNA, 51 nt, Homo sapiens
ccccgcggcgcgcagcccagcagggccacggacagagcgaaggggagagga

SEQ ID NO: 139559 - RNA, 62 nt, Homo sapiens
gagagagcggaagcccggggacgcccccaggagagaccgcacgcagggccacagcagcacga

SEQ ID NO: 139560 - RNA, 43 nt, Homo sapiens
ccgcgcgcgcggggcgcaggcgcaagaaacggcgaggaaagag

SEQ ID NO: 139561 - RNA, 76 nt, Homo sapiens
ccccaaacacgaagagacgacagaccagaccaagcaacaggccgcacgcccaaagcggaaacgcggaagagaccgg

SEQ ID NO: 139562 - RNA, 81 nt, Homo sapiens
agcagagcagggacccaaggaagagccagcaggagggggaccacaggggaaccccaggagcgaggagccgcggcacccagg

SEQ ID NO: 139563 - RNA, 86 nt, Homo sapiens
gggcacagaagcgggcggcggcgcgccgccccgggcggccgcgggcggggggcaaaggacaaggcgggaggggcagaccggcgcgg

SEQ ID NO: 139564 - RNA, 75 nt, Homo sapiens
gcccagccaaagaaacaagccgggaaagggacaagaagggcaaagccgaagaggacaagcgccggcacgcgaccg

SEQ ID NO: 139565 - RNA, 60 nt, Homo sapiens
gccaggggacacggcacgcagcgcgcccgccagggcccagaggcgcccccgggacacaag

SEQ ID NO: 139566 - RNA, 58 nt, Homo sapiens
cagacgcagggcgcccccggaagacaccaagacacacaaagagaccgggccccagaga

SEQ ID NO: 139567 - RNA, 65 nt, Homo sapiens
gacccggcgaagacgcgaccgcggcgcgagcaccaggggcaacgaggaacaggccaagaaacaac

SEQ ID NO: 139568 - RNA, 74 nt, Homo sapiens
gggggagacagaccgcagacaggaacacgcgccaggcggacaaggacagcaggagagagaaacacacgccagga

SEQ ID NO: 139569 - RNA, 82 nt, Homo sapiens
agcaagaaagaccacaagaccaaaaaagcggggaaaacaaaaaaaagaaggagggaagagggggccaggaccaggccccacc

SEQ ID NO: 139570 - RNA, 79 nt, Homo sapiens
agcggccggcgggagacgcagcgcgacccagcagggccagcagaagggaagcaccaaaaaaagaccagaagaaggaccg

SEQ ID NO: 139571 - RNA, 70 nt, Homo sapiens
cacaaacacaggcccaggaagaggaggggacaacaccacagaagaagaaaagaacgcagggaaacaacaa

SEQ ID NO: 139572 - RNA, 67 nt, Homo sapiens
gggacgaaagaagcgcagcggaggaaggcgaggcccgacaacaagccaaaacgcaccaaaggcagag

SEQ ID NO: 139573 - RNA, 76 nt, Homo sapiens
gacgcaccccacgggaacccacgaccaaagcggaaggccgcggcgagccaaggggaaaggagcaagaagacaccca

SEQ ID NO: 139574 - RNA, 77 nt, Homo sapiens
aagggagagcacagaggggaacagacaggccccagccgcagacgacggacaaagaaagccgaaagcaccaaaaccaa

SEQ ID NO: 139575 - RNA, 63 nt, Homo sapiens
aacgagcgaaagcgaaaaacagcgaccagacacagacgcagccagcaaggaaggcgggaacgc

SEQ ID NO: 139576 - RNA, 104 nt, Homo sapiens
ccgagaccggaccgagagcggaccgagagcgcgaaacgcacgagaaggacagggaaagaccaaaggaccgacccgaaggagcggggacggacaaggggaggaag

SEQ ID NO: 139577 - RNA, 42 nt, Homo sapiens
ggcgaaggggccacgcgagacccagcagccagcgaagcccca

SEQ ID NO: 139578 - RNA, 73 nt, Homo sapiens
ggccacaccccccacagaaaaccagaaggcaccgacaggaaaggaaaaggagaaccaggcacccgggggcaag

SEQ ID NO: 139579 - RNA, 82 nt, Homo sapiens
aggggaccgacgccggcagaacacgcgcgggaccccgggcacggcgcgcgggagaagaggcaggaacgaaccaacgcaggac

SEQ ID NO: 139580 - RNA, 71 nt, Homo sapiens
caggggaagagagaacagacaacaaacagcacaaccaaaagagcagaaggagcagggcaacgagcacagac

SEQ ID NO: 139581 - RNA, 75 nt, Homo sapiens
aagagccgccccacacgcagaaaagggagagccccgaaccagaagcggcaaacagcacagccagcagaccaggga

SEQ ID NO: 139582 - RNA, 52 nt, Homo sapiens
caaacagcgcaaacggacagagggcaggaaccccacaaacggaaggaccaga

SEQ ID NO: 139583 - RNA, 98 nt, Homo sapiens
accgagccgacggagccggaggcgggagccgcggcggccggggcaaaagggaaagcaaggggaagggcccaagaagacaccccaccagaaaccgaacg

SEQ ID NO: 139584 - RNA, 66 nt, Homo sapiens
gacccggggccgaggagcgggaagaggcggggaaaccccccaggcaagaggcgcaggaccgggaag

SEQ ID NO: 139585 - RNA, 76 nt, Homo sapiens
caagaaagcagaaggaacacccgaaccaaggaagcaggccagaggacacaaaaggagagcgcaggaaagggccgcc

SEQ ID NO: 139586 - RNA, 84 nt, Homo sapiens
acaaacacgccgaagaaacgggcggggggcaaggcacgcagccgggcccgacccgcgggccgcgggcgcagggccagccgaggc

SEQ ID NO: 139587 - RNA, 75 nt, Homo sapiens
gccagcccggccggacccgggccggcggccccgggggcgaggggcgcggaggcgggcacagagagacccagcgac

SEQ ID NO: 139588 - RNA, 77 nt, Homo sapiens
ccgggaaagaaagacccaacagaaacacggaccgaaagagggccaaagagggcagacgccagacacacagccccagc

SEQ ID NO: 139589 - RNA, 37 nt, Homo sapiens
aaaacaaaagaggagaaagggaccggccgggccgacc

SEQ ID NO: 139590 - RNA, 79 nt, Homo sapiens
acaggaccaggaacacggaaaagaagacaggcgcccggacaccaacacacaaaccagggaaaagcgaaccgagaccgcc

SEQ ID NO: 139591 - RNA, 36 nt, Homo sapiens
cccggaggccgggaaggccggccgcccccaggggcc

SEQ ID NO: 139592 - RNA, 81 nt, Homo sapiens
ccaaccaagccaggcacacagaaccagagaaccccaaagacaaaagagcgaaaacaggcaagacggagcgggacgggaacc

SEQ ID NO: 139593 - RNA, 69 nt, Homo sapiens
ggccagggacacaacacagacggggagcacaggcagaccaagaggcccagggcccgccgagaggggccc

SEQ ID NO: 139594 - RNA, 80 nt, Homo sapiens
ggcgcccagccggaccgggggggagacgggccacggaccccccccggggggaacaccagaggggggagacgacagcacca

SEQ ID NO: 139595 - RNA, 75 nt, Homo sapiens
gaacggagcaccagagagcggagaaagcgcccgggagcgggagcgcgcggcaaggaagccaaaccgcaggagaga

SEQ ID NO: 139596 - RNA, 77 nt, Homo sapiens
gcccgaggggccgacccgcagcgcccggccccagccccaccggaaccgcacagccagaccaagaagaaccgccccag

SEQ ID NO: 139597 - RNA, 74 nt, Homo sapiens
gggccaaccgacgcaagggcaggaacgcacagaaggcccaagcccaagcagaaccaggcccaaaacaaaagaaa

SEQ ID NO: 139598 - RNA, 61 nt, Homo sapiens
cacccgcgacccagaagaagaagcccaggacccaggaaggagacacaggaaaacaaagccc

SEQ ID NO: 139599 - RNA, 79 nt, Homo sapiens
cgcccggcgccccggcccgcccccaaagcgaccgacccggacgagaaacgcaagaacaccccaccagaccacccagcaa

SEQ ID NO: 139600 - RNA, 60 nt, Homo sapiens
agcagcgacggggcccgcaccccagggggcccagaggcaccaccaggccaacagcccccc

SEQ ID NO: 139601 - RNA, 46 nt, Homo sapiens
caccccgcgaaaggaggaggcacagagcggcgagaagaggaggaac

SEQ ID NO: 139602 - RNA, 81 nt, Homo sapiens
caggcccccgccccccggagacgagagggccccaaagggaccagggacgcgcccgcgcgggagacgggagccagcgcaagc

SEQ ID NO: 139603 - RNA, 38 nt, Homo sapiens
gcgcggcgggcggcgcgcagagaggcgggggaccaggg

SEQ ID NO: 139604 - RNA, 65 nt, Homo sapiens
ccgcagcccggaaccacgcaccagacaacacaggcaagcagcaaccaagcaagccagccgggagc

SEQ ID NO: 139605 - RNA, 84 nt, Homo sapiens
ggagacaaagccgcaaccagggcagaggaagccaccccgaggaagcccgccacggcaccgaaggacagaagaggacccagccaa

SEQ ID NO: 139606 - RNA, 34 nt, Homo sapiens
gggcaagggaagaaaaggaccaaagagcaggcaa

SEQ ID NO: 139607 - RNA, 78 nt, Homo sapiens
ggagccaaaaaaacacggggaccacaggacaaagcagcagggacgcaccaaaacggacagccgaagacaggcgaccca

SEQ ID NO: 139608 - RNA, 75 nt, Homo sapiens
gcagcggcgggaccaggcgcccggacaccaacacacaaaccagggaaaagcgaaccgagaccgccgccggggagc

SEQ ID NO: 139609 - RNA, 55 nt, Homo sapiens
gaggaaggggcaagagggggaaagcacagggggcggaggaacagcgagagcacca

SEQ ID NO: 139610 - RNA, 37 nt, Homo sapiens
cgcggcgggaaggggcagggagacagccgccggccca

SEQ ID NO: 139611 - RNA, 77 nt, Homo sapiens
gcggagccgggagggagacggcccggagagcggcgcgcagcaaggaccagaaggacccaaggacgaaggcaggggaa

SEQ ID NO: 139612 - RNA, 74 nt, Homo sapiens
ccacggggaggacaaccgcaggacccagcagcgcagcagccaaggagacaccccaggccaggagagcccagaag

SEQ ID NO: 139613 - RNA, 87 nt, Homo sapiens
gcgcccgcaccagggcaggcagacgaggacgcgggcggaagggcacggcagccccggcaggcccaagaaaagaggaggaggagaggg

SEQ ID NO: 139614 - RNA, 81 nt, Homo sapiens
caggcagcccggggggagcggccagcaggagcgccggggccggggcgaacgcggccggcggcgcccagcggccacacgccc

SEQ ID NO: 139615 - RNA, 91 nt, Homo sapiens
accacaaacaggaagcagaaacaaggagggaacagcggaaaagccagggcggaaaccggcaagaggaagagaaagaaaaaaaacccaggaa

SEQ ID NO: 139616 - RNA, 68 nt, Homo sapiens
ggcgcggcggaaccagggccgacccgggccggaccgaccccaggcggcggacccgaagaggcagaagc

SEQ ID NO: 139617 - RNA, 82 nt, Homo sapiens
aaccgcacggggcacggaggagagcaccgagaaaagcccagaaagacagacagagaaggcggaagagaagagacgaaccagc

SEQ ID NO: 139618 - RNA, 78 nt, Homo sapiens
caggcaaggacaaggccacagagcggggccacggaaggagggccccggagcagccacaccaccgaggccccacccagc

SEQ ID NO: 139619 - RNA, 77 nt, Homo sapiens
accaccaggaccagaggaaagagagaaagcacacacagaaagggggaagcagccacagaagcacagccgcacgcaac

SEQ ID NO: 139620 - RNA, 75 nt, Homo sapiens
cgaccccccagacgcacgcgggggccaaacgcacagaacaagccaacgaagcagagcccagggaaaaggaaaaac

SEQ ID NO: 139621 - RNA, 77 nt, Homo sapiens
gacggcccagcaggcggggaagagaaaggagccaaagcagacccccaagcgagcggagcggaaggagcgcgccccac

SEQ ID NO: 139622 - RNA, 81 nt, Homo sapiens
gacgcagccaacaaccgccacgagcggagaagcggccaagaagcaagggcacaagaaaaggaggccccagcagccgagcgg

SEQ ID NO: 139623 - RNA, 66 nt, Homo sapiens
ccgccggaaaacaaccgccccaggggaggcagaggggcggagaacggaaaagcaccaggaagcaga

SEQ ID NO: 139624 - RNA, 59 nt, Homo sapiens
ggacaccagccaaaaaacgacgaaagacccagacagacagagaaaaccagaaggcaccg

SEQ ID NO: 139625 - RNA, 33 nt, Homo sapiens
ggccggcggcaaaggccgagaaacagacaaccc

SEQ ID NO: 139626 - RNA, 81 nt, Homo sapiens
agaagcaggagcccaccggcagacaaacgagggagcaggagacacccccgacaccgacacgagaggcacaagcggagagcg

SEQ ID NO: 139627 - RNA, 72 nt, Homo sapiens
agcagcccccagagcgggaccacagggggcccccccccgagcccagaagacgccacgggggcaaggacgcac

SEQ ID NO: 139628 - RNA, 92 nt, Homo sapiens
acgagccacggagccgcaccagacaacgccccgggaccggagcagaacccccgcagagaaagacagcaaagcaagccaagagggcccagcca

SEQ ID NO: 139629 - RNA, 80 nt, Homo sapiens
gagggcaccgagcggcggagagccgggagaaacacaaagagaccagaggacaagacaaagggagcaagacaagccaaaga

SEQ ID NO: 139630 - RNA, 57 nt, Homo sapiens
cgccaagcagggagaagacacggcggacgcggccaggggacagcggcggagggcaga

SEQ ID NO: 139631 - RNA, 84 nt, Homo sapiens
agaacgaccggaccggagaagaagaggcacaaaggacaaccgcaccacacagccagcagacccccagaccaggaagcgagggag

SEQ ID NO: 139632 - RNA, 69 nt, Homo sapiens
caggaccgaagccacgcaccaccccccggccagcgaaccaccgggcggaaagaggcgagacgaaacggc

SEQ ID NO: 139633 - RNA, 52 nt, Homo sapiens
aaccgacacagaagcacggagcccaagaggaggagagaaagaaagccagcgc

SEQ ID NO: 139634 - RNA, 56 nt, Homo sapiens
gcagagcgggaagcgacacacaggaagaagaaccgcagagaggaaaggcgccacac

SEQ ID NO: 139635 - RNA, 76 nt, Homo sapiens
gccggagggaccaggaggcgaccgcgacgaggcccgagaggcacagaccccacaggccccggacacgggccacacc

SEQ ID NO: 139636 - RNA, 65 nt, Homo sapiens
acgaccccacccccgaggcccgaccgaaggagagaaccaggagaccgaagcaaccaacaagcgag

SEQ ID NO: 139637 - RNA, 77 nt, Homo sapiens
aacgcacaggagaccaccaccccggcgccaccaccgacgagcgaagagcaagagaaacagaagcggagagacaggga

SEQ ID NO: 139638 - RNA, 84 nt, Homo sapiens
accacaaaacaaggccggcgaggaccacagacacaggaaaggacaccaacgagaaaacacgacagaccacccgccaaacgaacg

SEQ ID NO: 139639 - RNA, 59 nt, Homo sapiens
gaaacggcgacaagggccgcgcaagcggcaggagcgaaggaaggccgacgggcaagaac

SEQ ID NO: 139640 - RNA, 55 nt, Homo sapiens
agacaacagggccacagcgaggacagggagggcgaagaaaggggcgcacccaacg

SEQ ID NO: 139641 - RNA, 78 nt, Homo sapiens
cgaagggccgccaccccgcccacccggggcgcggcccccagccgcaaggcggggacagagagcaccagcacccacggc

SEQ ID NO: 139642 - RNA, 75 nt, Homo sapiens
gcagacagcacaaccagcgcacccagccacaccccaccgcccagagaagggaagagaggagcgagccgaagccag

SEQ ID NO: 139643 - RNA, 71 nt, Homo sapiens
aaagcgcccaaggggcggcggagcgacccccccacaaccccacgcagagggggacgaccaccacacgcaga

SEQ ID NO: 139644 - RNA, 59 nt, Homo sapiens
cgggaaagagaaaagggcagagaaagcaaccagaggagagaaagaacccacgcaggacg

SEQ ID NO: 139645 - RNA, 77 nt, Homo sapiens
cgggcaaggcggagaggacggagcggcgagcccccgcggcgacagagagaaaacagagcaggagaagggagacccag

SEQ ID NO: 139646 - RNA, 90 nt, Homo sapiens
gccacgaaagggggccgagagcggagcgcaggacagcgcaggagccccggcgcacgcggcgcgcacagacccagacaacacgagagagcc

SEQ ID NO: 139647 - RNA, 82 nt, Homo sapiens
gagaagcagccgccagccagcagcccgccagccgccgggagggagaacaacacccacagcggcaaagcgccgcaaccgacaa

SEQ ID NO: 139648 - RNA, 72 nt, Homo sapiens
gcaggaaacaggaaacgagccaacacagcgggagaacaacccgaagagagacggagccgggcacggcaagac

SEQ ID NO: 139649 - RNA, 72 nt, Homo sapiens
cacccccgggggaaaagaacgaggagaaagcaggaagagggacaagcaaagggggagacagcagacagacag

SEQ ID NO: 139650 - RNA, 34 nt, Homo sapiens
ccaccgagcacgaccagaaagggcgggaaccagc

SEQ ID NO: 139651 - RNA, 77 nt, Homo sapiens
gggacagaagaagaaaagccaaagaaccaaagcaaagaaacaccaggagagggagcgggaaacgcacaacagagaac

SEQ ID NO: 139652 - RNA, 66 nt, Homo sapiens
accagacccggcagagcaagagcacgacacggccggccgcaagacgccacggaaggccaaagcagc

SEQ ID NO: 139653 - RNA, 80 nt, Homo sapiens
ccaaaggccaggacaccaacgggaccagaagggcaagaaggaacagacaaaaacggccggaaggaaacacaggacaccag

SEQ ID NO: 139654 - RNA, 71 nt, Homo sapiens
ccaaaggaagaagcgaagacggaaacgaggaaaccgggaaagccaccgaaaaggaaacaagagggaagcag

SEQ ID NO: 139655 - RNA, 72 nt, Homo sapiens
ggagcagcggcggcgaaagacaaggaccgagaggcggagagaagaaagggggacagagagggaaacaacgcc

SEQ ID NO: 139656 - RNA, 70 nt, Homo sapiens
gcaagacgcgaccaaagccgacggggcaaggagagagcgaagcaccgcgcagaccgaaaggcacacggag

SEQ ID NO: 139657 - RNA, 57 nt, Homo sapiens
agagcgaagaaaacggaaaagaaaaagcaggagaagcaacccccgagccgcgggccg

SEQ ID NO: 139658 - RNA, 87 nt, Homo sapiens
ccgagccggagcgcagcccgagcgcgggggccccagccccgcccgcccccagcccggacccggcagcccaaggagcaggggccagca

SEQ ID NO: 139659 - RNA, 83 nt, Homo sapiens
gaaagcaaaggcgcagaggaaagccgcggcccaggagcccgccggcccggcccccggccgcccgggccgcgccgccgcgccgc

SEQ ID NO: 139660 - RNA, 65 nt, Homo sapiens
gaacaaaccgggggcaaggccaaaaagaagccaccaggagagaacgccgcgccgcgcgacaacgg

SEQ ID NO: 139661 - RNA, 66 nt, Homo sapiens
ggaggaagcgagaagggcccagagccaggcagaccgaagaccgggagaagacaggaagaccggaag

SEQ ID NO: 139662 - RNA, 59 nt, Homo sapiens
ccggcgccgcacacgggcgcaggggggcacccggaccgaacagcgccgacgccgaaagg

SEQ ID NO: 139663 - RNA, 75 nt, Homo sapiens
caaaacaaccaacgaagacaccgagcgaaagagaaagaggaacagaagaccgccacagaccggaagccaacaaag

SEQ ID NO: 139664 - RNA, 78 nt, Homo sapiens
ggagcccaccacacaggagcagacagagcagacagacagcgaacacggaagccacgaaaagcaaaagcacaggaagcc

SEQ ID NO: 139665 - RNA, 73 nt, Homo sapiens
gacagcccagaagaacgaggaggaaggggcgagccgccaagagaagcaaaagacaaacccccccccagcacag

SEQ ID NO: 139666 - RNA, 80 nt, Homo sapiens
aggagaccacacccacaggcgacagagggcgggaggacaaagggagaaggcagagacgaaggaagaacgagacgccaaac

SEQ ID NO: 139667 - RNA, 68 nt, Homo sapiens
gaccagcagacccaaggcgggaagcggggaaaggaaaacaccagcacaccaaagaccggggccaccga

SEQ ID NO: 139668 - RNA, 63 nt, Homo sapiens
aagaaacaccacagcagcgacggcccaagcgaaaaggccgccagacccacccggacccccaga

SEQ ID NO: 139669 - RNA, 87 nt, Homo sapiens
acagacaccagccccgaggaagcacagacaaagcaccgaggaaccgagaaagccggcaacaggaggagcagagaaagagaagagagg

SEQ ID NO: 139670 - RNA, 76 nt, Homo sapiens
cccgaaaagcgaaaagaaacagagacaagggaggcgaggacggacaaaaggaaacggacgggaggccagccagcag

SEQ ID NO: 139671 - RNA, 79 nt, Homo sapiens
aagaaacgccggggacagaacaaggcgaaggaaacagaagaacggagcggagcccagaaggggaacggcggaccacaaa

SEQ ID NO: 139672 - RNA, 56 nt, Homo sapiens
ggacaagaaaccccgacacaaagaacgaaccaaggggcacccacaaaagcgaaaag

SEQ ID NO: 139673 - RNA, 67 nt, Homo sapiens
aagggacgcaaggaacaaaaggaaacccaccaaggcgaggaaaaccaccacacaggggaaacaccca

SEQ ID NO: 139674 - RNA, 78 nt, Homo sapiens
gaggcaggaggaggagacaggaggaaacagaacggcaagaaaagaggaaagcacgcaaaaagacaagaggaagaaaga

SEQ ID NO: 139675 - RNA, 72 nt, Homo sapiens
gaccaagaaccagagacgggaaaagacaaaacaaacggagagaggagggagaaacaaaggccaaagacgcag

SEQ ID NO: 139676 - RNA, 78 nt, Homo sapiens
aaaaggagacagagcacaaaacgcggaagcaaaaaaggaacacagacaaccagggacacaccccgccaggcaggaagc

SEQ ID NO: 139677 - RNA, 79 nt, Homo sapiens
cagaagaaggagcggaacacacagcaagccgccgggacagccacgacggccgacacgaacggacaacaagcagggcaca

SEQ ID NO: 139678 - RNA, 51 nt, Homo sapiens
aaaagcccgagcagaagcccgaacggaagaaaaggacaaaaacgcggaggg

SEQ ID NO: 139679 - RNA, 78 nt, Homo sapiens
cgccgcggggcagccgccgcccccggggcacgcagcacgggggcaggggccgacccagaacgccagcgccgcaaggaa

SEQ ID NO: 139680 - RNA, 54 nt, Homo sapiens
aggcgcaaccgaaaggcgaggaaaaccaccacacaggggaaacacccagacaac

SEQ ID NO: 139681 - RNA, 77 nt, Homo sapiens
aagaaagggacaaagagaggagcagacagacagcagcaggcccggagacccgagcacccaggcagaaggggccaaga

SEQ ID NO: 139682 - RNA, 79 nt, Homo sapiens
ggagggacccggcccggaggaagaaagccaaggaggggacaaaggaaaaagaggaggaaaacagcagggacgaacaaaa

SEQ ID NO: 139683 - RNA, 55 nt, Homo sapiens
aaagaacaaaggggccaaaccaagaaacaagggacgaacaaaacaccgaggaagg

SEQ ID NO: 139684 - RNA, 85 nt, Homo sapiens
ggcaaagggcagcaaccaaaagccaggagcgcacaggaaacaaccgcaaccagccaaggcacacaagcccagacacccagagacc

SEQ ID NO: 139685 - RNA, 78 nt, Homo sapiens
aaagcaaaggagcagggaggcccccagggacaacccgccacaacgacaaaggaccccaaagaccccggaaggcggacc

SEQ ID NO: 139686 - RNA, 76 nt, Homo sapiens
gcaaagcaaaacaggaagagccgcagcagaagccggaaaggcgaaggagcaggcgaacaagcagaagaaaaggaga

SEQ ID NO: 139687 - RNA, 55 nt, Homo sapiens
ggaaaggaaagacaggcacgccggacaaaacaaggaagggcgcgcaggaacaaga

SEQ ID NO: 139688 - RNA, 84 nt, Homo sapiens
ccaggaccgggcagagacccaagacaagccagccgaggcaccaccagcgccacgcagagccccgccaggaagacacgccgggga

SEQ ID NO: 139689 - RNA, 76 nt, Homo sapiens
gggaaggaaagaagaacaacagacgagaagagaagggagcaccaggagacgccagggagagagaacggggagaagc

SEQ ID NO: 139690 - RNA, 72 nt, Homo sapiens
ggcggcccggccgcagcggcaacagaacgaaaaacagggcgggaaccagaagaggccaaccagcacgaacgc

SEQ ID NO: 139691 - RNA, 76 nt, Homo sapiens
ccggcgccgggacgccccccgcggcaccacccggcaccagggccacccccaaccaggaccaaagacgaccaccaaa

SEQ ID NO: 139692 - RNA, 82 nt, Homo sapiens
ccggggaccggaggagggcagcggccgggagcacggaacccgggcacgaagcagaggacgaagccaagagggccgagagacc

SEQ ID NO: 139693 - RNA, 73 nt, Homo sapiens
cccgaaaccaagcgccgacagaaaagaaaaccccggcgagcaagagagcagcccgacggccaggaggcgaaga

SEQ ID NO: 139694 - RNA, 69 nt, Homo sapiens
agaggaaccaagaaaaccgcaacacagaacgaaaccggaagaacaacggcgcagaccggagcagagacg

SEQ ID NO: 139695 - RNA, 77 nt, Homo sapiens
gcggaggacacgggggccacaaagccccccggagacgcaaccaagcaccgaggagcaacacccccagggagcccaga

SEQ ID NO: 139696 - RNA, 78 nt, Homo sapiens
ggaacaaggcggaggaacgagacgcgaaccaggggggaggcagcaaaggaaggacaaaaccgaaagagcaagggccga

SEQ ID NO: 139697 - RNA, 79 nt, Homo sapiens
gaccgcggaccggcgccccggcgcgaagaggcggaccggacggccgagggcgaccaaggaaagagccaaaagagccagg

SEQ ID NO: 139698 - RNA, 75 nt, Homo sapiens
gaggaggcagggcgccggcggggcggcaacaaggccagcaccacggggcccgccacgggcaagagcaccgaggga

SEQ ID NO: 139699 - RNA, 104 nt, Homo sapiens
gcagccgggagcaggaggacggaaccagggccaggcgaggaccaacccaccccgcgaagcaagagcagggaacggaaccggaagagcaaaagcacgaacagcac

SEQ ID NO: 139700 - RNA, 88 nt, Homo sapiens
cgccgcagaggaaaagcagggccgggccgccccgggggcgccaggcgaccggagcgaacgccacgccgggggacgaacagcggggacg

SEQ ID NO: 139701 - RNA, 78 nt, Homo sapiens
cgccgccgccgccgccgcgggcgccagaaggaagaggcggacggaggagcaggcgagaagagaaggaaagagcagaac

SEQ ID NO: 139702 - RNA, 73 nt, Homo sapiens
ggaccaccgcggcagcacgcggcggcacagcaagcaacccggccgaggggggcaccccgggaggaagcaacgg

SEQ ID NO: 139703 - RNA, 68 nt, Homo sapiens
gccgcacaggccggaacaccaagggagcggagagcaacacaggggaaggaaacgaagaggccacacag

SEQ ID NO: 139704 - RNA, 90 nt, Homo sapiens
ccgccagagcgcggccgccaaggagacaaagaccaccacaggacacggcagagaagagaagaggcgaaagagaggacgaacaggaggcag

SEQ ID NO: 139705 - RNA, 39 nt, Homo sapiens
agacagggcagacagaaagccgaggaaacccagacccaa

SEQ ID NO: 139706 - RNA, 77 nt, Homo sapiens
caccagaaggcaacagcaagacaccgcgggcggcacaggggcgcacagcacacgcacagaagaggggggccaccgag

SEQ ID NO: 139707 - RNA, 73 nt, Homo sapiens
ggaacaagaggggcagcaagggccaagccgcacgggagagccacggaccacagggcacgagggagggcagagg

SEQ ID NO: 139708 - RNA, 65 nt, Homo sapiens
gaagcgcagcgacggcgcgggagagcgcgccagccggccgcgagccaaaacagaagaggcaaagc

SEQ ID NO: 139709 - RNA, 81 nt, Homo sapiens
agaagccggcaaaccgaaaggacacacgaggccgcaacgccggaggcccccagaggagcacgggagcaagccaccagaaca

SEQ ID NO: 139710 - RNA, 83 nt, Homo sapiens
ggagaaggagccaaacccaaagaggaccaggacacagaccggaaaccgaggaggcggaaccaccggaccaaaacacccccaag

SEQ ID NO: 139711 - RNA, 76 nt, Homo sapiens
cccggcgaagagacgcaagcaagagaagcaaggaagaagaggcacaaacgaggaagcgccgcaagagaggagggcc

SEQ ID NO: 139712 - RNA, 72 nt, Homo sapiens
ccagccccgagagcacgacacagagacgggccgccaggcccaggcagccaaacccgggccaagggacccgcc

SEQ ID NO: 139713 - RNA, 76 nt, Homo sapiens
ggcacgggcaagccgggccgcgcgcgagacacgagacggggaggcaagcaggggggcaaaggaaagaaggcagaaa

SEQ ID NO: 139714 - RNA, 73 nt, Homo sapiens
aaccgggcccaggcccaccccagcgaccggaagcgagcagcagcgccgccagaagcggaccagcagacaacag

SEQ ID NO: 139715 - RNA, 73 nt, Homo sapiens
cagacacacgacgagaaccggggcgccacacggaccccccgaaaaccaggaggagcagggacagcccccagag

SEQ ID NO: 139716 - RNA, 77 nt, Homo sapiens
ccgcagcaagaggaaaggaaagaggcgggcagaacacggagggaggagagagcgaggccacccagaaggccagcccc

SEQ ID NO: 139717 - RNA, 82 nt, Homo sapiens
ggacacgagcgggaagcaggcggcaaccacccgcacggagggggccacggacggggccgagcacaaccacccaccggacggg

SEQ ID NO: 139718 - RNA, 77 nt, Homo sapiens
gaggacaaagcgggggaaacagaggaggagggcaccacacaccacaaaccgagggaagaaaggacaacagaagacgc

SEQ ID NO: 139719 - RNA, 76 nt, Homo sapiens
gagagaagacagacgggcagcaccggagggaaaacaacacacagcagcacaagcagacagacaagaacgagccagc

SEQ ID NO: 139720 - RNA, 84 nt, Homo sapiens
gaagagcagacggggggccccgcgaggcccggaggcgccgagcggaggagaccagcagaagggcagcacccccccaccgccccc

SEQ ID NO: 139721 - RNA, 73 nt, Homo sapiens
ccgaccagaagcccagcaaggcacagacaggcgagcggggacggcagagcgggccgaacccagagcgaggggg

SEQ ID NO: 139722 - RNA, 121 nt, Homo sapiens
ggcccggacccaaccagagaaagacaaccaaccccaccgaggaggacagagacgcaaacccagagagcaagagagacgggccaaagggaaacaaggggagaagaagacaccagaggaaacc

SEQ ID NO: 139723 - RNA, 75 nt, Homo sapiens
ggaagacgaacaccgacccgcccggccccgcagccggaaccacgccagaaggggcgcgacgagagaccgcgcaca

SEQ ID NO: 139724 - RNA, 78 nt, Homo sapiens
cgcaagaacaacgaacccaggcggaagcagcgcagcacagcgagcaacacgacaaacgcccgggacaggagaggcagg

SEQ ID NO: 139725 - RNA, 78 nt, Homo sapiens
ccgacagacaaccaggaaaccagagaaacccaggccagcaaagacacacccacaagccacagaaaacaacagcgcgaa

SEQ ID NO: 139726 - RNA, 56 nt, Homo sapiens
gcaggaccgggcaggagcgaagaacaaagaagccacagacaaagagggaggaacaa

SEQ ID NO: 139727 - RNA, 81 nt, Homo sapiens
ggaacagggcccccaggacccaagggcgccaaaggagaaggggcccccccggaccaccagggggagaggcaccagcaacag

SEQ ID NO: 139728 - RNA, 69 nt, Homo sapiens
ggggaagccgcagcggaaagcaggagcacagggcaaggccagagaaggcgggagaaagacacgaaccac

SEQ ID NO: 139729 - RNA, 70 nt, Homo sapiens
gaacacaggaggagaagaagccgcaaggcgaaaagggaaagaaaagaggcgcccggaggccaaaacgcac

SEQ ID NO: 139730 - RNA, 72 nt, Homo sapiens
gaaccagggagaagccgcccgaacaccagaagccccccagggaaagcccaaccagcagacacgccaaaacac

SEQ ID NO: 139731 - RNA, 90 nt, Homo sapiens
ggaaaaggcggacgggaaggcgggagacgagaagccgaaaagcgcagcgagcggagccgccggagcggaagaccaccaaaagcaggaaaa

SEQ ID NO: 139732 - RNA, 83 nt, Homo sapiens
gggggaccaccgccggccaggggcggaaacagcgacgagcggggcgcagaagaagcacgcacagaggcacagcggaggacacg

SEQ ID NO: 139733 - RNA, 81 nt, Homo sapiens
aggaacaggcggcgcgcgcggcgcgggacgcgcgcgggcacccacggagccccggggcgagcacacaccaagcccacacag

SEQ ID NO: 139734 - RNA, 71 nt, Homo sapiens
ggcgcccagcaccaaaagagaaggaacacgcacaggggacgaggccaacacaaggacagcaaaaagggccg

SEQ ID NO: 139735 - RNA, 83 nt, Homo sapiens
cagcaaggaccccggggaacccgcagccccaggggacagcgcacggaaccaccagcgcgcacccaggccaggggggcgccagg

SEQ ID NO: 139736 - RNA, 76 nt, Homo sapiens
acaccccagacggggccccagcagagcgggccacaccccacaacacccaaagagaagacggaacaagaaaggacca

SEQ ID NO: 139737 - RNA, 73 nt, Homo sapiens
cacggggaaaccccccgaaggggaggaggggaaacgacgccagaaaccccaggagaagcaagggccaggcagg

SEQ ID NO: 139738 - RNA, 75 nt, Homo sapiens
gcaggcgggcccccgaccggggccaccacagagcccgcagggacacagcagaacaagcaacccccggcacgaaaa

SEQ ID NO: 139739 - RNA, 80 nt, Homo sapiens
aagcagaccgaaacaccgcccgggcagagccgaggccggacagagacgagagcagcgcgacccacaaacacacaaacaca

SEQ ID NO: 139740 - RNA, 84 nt, Homo sapiens
cgccccgcccacagcgcggcgcggccgagagccgcggcccggcggaaaggacagcagcggccaagcggacccggaaggacaacg

SEQ ID NO: 139741 - RNA, 73 nt, Homo sapiens
agagacgagagaaacccacgaagacgcgcggagaaagagaccaccgagggcggagaacggaaaagcaccagga

SEQ ID NO: 139742 - RNA, 77 nt, Homo sapiens
aaggaaaggagcacaccgaggaggcaaggagcacccagggaagaagggggaggaggcagggaaagaggccgaggacc

SEQ ID NO: 139743 - RNA, 76 nt, Homo sapiens
gaacccgccagggccagggccaggccagcgcccggcggcccaggcaaagaagaggacccagccaggaaggacaccc

SEQ ID NO: 139744 - RNA, 78 nt, Homo sapiens
agaccacccagcgcccagaacaggcccacggggcgggcccgcagcccacccacggcccagaccgggcacccccccgcc

SEQ ID NO: 139745 - RNA, 74 nt, Homo sapiens
ggcaacaggcggaagcacagcaaaggggggagaaaaggccaagggcaggagacacgagacgcaggaagcagcga

SEQ ID NO: 139746 - RNA, 74 nt, Homo sapiens
acaaaggcgccgcagcaccccccggacccagccccggaggacggggagccgaggaggagcaggagccgggacac

SEQ ID NO: 139747 - RNA, 74 nt, Homo sapiens
cgcacggacggggggggggagaaccacgaggagggcgccagccaccggggaagccggcacgccaggcaaccgga

SEQ ID NO: 139748 - RNA, 75 nt, Homo sapiens
ccccccggcccccgggacggcccaaggccagcccgcagcccaggggacagggaagacgcccacaaaaaacagcac

SEQ ID NO: 139749 - RNA, 82 nt, Homo sapiens
ccgcccgcagcgacacaccaagcggaggggacgccacgcaacgccggaaaggacaaccccacagggagaaccggagacaaag

SEQ ID NO: 139750 - RNA, 74 nt, Homo sapiens
gggcaccaaaaccaggcaccaggcacaagaccccgccgcacaacgcaggggcccggcccaaggggcacaggagc

SEQ ID NO: 139751 - RNA, 78 nt, Homo sapiens
ccgcccagcccccgagaggacgaggcgcagcacccgggaggccggaaggcacgcccagcaccagggagaggaagccag

SEQ ID NO: 139752 - RNA, 73 nt, Homo sapiens
gcacgaagaagcaaccccagcaccacaaaaacgcagaaaacgcaggacccccgcggacgcgaaggcgaaaaaa

SEQ ID NO: 139753 - RNA, 74 nt, Homo sapiens
cacccaaacaagaacacgagggagccggaaacaaagaagaggagaaaaagccaaggaaaggcccacagaaagga

SEQ ID NO: 139754 - RNA, 77 nt, Homo sapiens
ggggacccgcgggacccgcagccccgcgcgggcaccagggccccccgggccggccgccggacgacacagcccgccgc

SEQ ID NO: 139755 - RNA, 123 nt, Homo sapiens
cggaccgccgcagacgcgaggggcggccagagcgccggcaagagccgggcggagaaccggggccggcagaaaggaccaagagacgagagacccaacaagacacgcccccgacaaagggaaaaa

SEQ ID NO: 139756 - RNA, 45 nt, Homo sapiens
ccaggaggaggacgacagcacgaggcgcccgcaaggaaggaccgg

SEQ ID NO: 139757 - RNA, 36 nt, Homo sapiens
cacgggaggagagccagcagagggcagacccggaaa

SEQ ID NO: 139758 - RNA, 67 nt, Homo sapiens
cgggaaacggagaagagccaaccgcaccgcgcaggaggggcagcagcaggacagggaacccgggaga

SEQ ID NO: 139759 - RNA, 62 nt, Homo sapiens
ggccggcgccgcccggaccgccaggaaagcgcacggcagcagcaaaaccacagagaaacggc

SEQ ID NO: 139760 - RNA, 79 nt, Homo sapiens
cggaggaacagaagcggaacagccacagcagcccccaaggagcgcaagggggcacgcacggggacgggcggggccaccc

SEQ ID NO: 139761 - RNA, 76 nt, Homo sapiens
aaacagccacggaaagaagaccagccgagaaaaagcgaacaaggggccgaagacaagaagaaacaccccaggggcc

SEQ ID NO: 139762 - RNA, 72 nt, Homo sapiens
accagcgaccaggagcgcagagcgccaagcccgggccggaagaggacacaccaacaggcagcgaagacacgg

SEQ ID NO: 139763 - RNA, 49 nt, Homo sapiens
gcgccacggcgacgcccagagcagcccgggcgcagacaggaacggccga

SEQ ID NO: 139764 - RNA, 55 nt, Homo sapiens
acgcaaacggcaccccaccccagccaaaagccaaaagccgagaacgacgaagacg

SEQ ID NO: 139765 - RNA, 80 nt, Homo sapiens
cagaaccgacaggagagggcagaaaggacggacagagagccgggggagcaagaaaggacaccccacagccgcggccgggg

SEQ ID NO: 139766 - RNA, 73 nt, Homo sapiens
agcggcaccaccgcgcccccgggggccagccccacaggagacaggaccgaagcaaaggagcgaccgaaccggg

SEQ ID NO: 139767 - RNA, 80 nt, Homo sapiens
gcacagcccgcaaagccgcccccccccccgaagccgagggcaggcccaagcagaggcaaaggccgggagggcaccacgcg

SEQ ID NO: 139768 - RNA, 72 nt, Homo sapiens
ggagaaggaccgaagggaacccagaaccgcggaccacagcaaaccaagcagacagcgccgccaccgaggaag

SEQ ID NO: 139769 - RNA, 81 nt, Homo sapiens
gccgcgggggcgaaggcggcgcggcggggggcccgcggcgggacccgggcggcgagagcggaagaagagagggcgaaggag

SEQ ID NO: 139770 - RNA, 76 nt, Homo sapiens
gaaggaacaaaccaccaggagacaaaaccgggacagagccgaggacacagaccccagaaagaagacagaagcaaaa

SEQ ID NO: 139771 - RNA, 56 nt, Homo sapiens
aaaagaccagcccagggcagaaagccagcaccagagccggagagacggagcacaaa

SEQ ID NO: 139772 - RNA, 75 nt, Homo sapiens
gggcaaggagccaggaaggaggaggaaaaaaggagcaaaaggaacacaccccagcgcaccaacaagagaaaagca

SEQ ID NO: 139773 - RNA, 72 nt, Homo sapiens
ggaaagggccgccacagaaaccagggaggcagggagcaaagcccagaaagcaagcccccccagcagaccgag

SEQ ID NO: 139774 - RNA, 76 nt, Homo sapiens
cccaggaagggacccgagcacggcgaggcagccaacccagagaagcagacgggaggcagcagcccgggagcaccgc

SEQ ID NO: 139775 - RNA, 77 nt, Homo sapiens
cccagagcaccccggagcccacagggaaaaccgggacgggcgaaagagaagaaagaaacgcacaggcaccagagcac

SEQ ID NO: 139776 - RNA, 76 nt, Homo sapiens
gacaaaagggccaaagaagggagagaggcaagagcgaaggagaaaggcaacaaggcccgagcggggaacacgagag

SEQ ID NO: 139777 - RNA, 81 nt, Homo sapiens
acggcgaccacaggaaggacacaggcagagagcagcaccagcagaagagggcccgaccacggcaacccagaggcgaagcag

SEQ ID NO: 139778 - RNA, 75 nt, Homo sapiens
gccccccagaccgggacagaaggcaaggccaggacacgccaagaaagaaacaacggcccggaggggaacgccccc

SEQ ID NO: 139779 - RNA, 58 nt, Homo sapiens
caagagcggccgggccggaggcgcgccagccccccgggaaccagcagcagaagagaag

SEQ ID NO: 139780 - RNA, 78 nt, Homo sapiens
ggacaagagaaagcagcggcagcagagagccgagggcagggaggcccaaaaaacaaagccgcaccccgcccccggcca

SEQ ID NO: 139781 - RNA, 80 nt, Homo sapiens
ggaggccaacggcagaagccaccacaaaagcgaaagggcacaccacaggacgaggaaagccccaggaagaagaagaagcc

SEQ ID NO: 139782 - RNA, 75 nt, Homo sapiens
cacccccggcgggcccgaggcggcgagagaggcaggcggagccgaccgggccaggagccaagggagacaagagga

SEQ ID NO: 139783 - RNA, 107 nt, Homo sapiens
ggcccggaaaccggaaggagaaggccaccgggggagcggggggacaggaaagcagcgacaccacacaaaggccaccacagaccgcgagggcagcagagcacaccggg

SEQ ID NO: 139784 - RNA, 74 nt, Homo sapiens
aggccgcaagacccagcgcccaaccgcccggggccaagccgcccgccaaccggcagcgccgacgacaaaccagg

SEQ ID NO: 139785 - RNA, 80 nt, Homo sapiens
ccggggcgaggaccgacggaggagccccggcacaaaggaagaagaaagaagggagcaagagcaaaaaagaagaggagagg

SEQ ID NO: 139786 - RNA, 72 nt, Homo sapiens
cggacgggcagggcccagacgaaaagaccccgcacacccccgagcagaggcagaggggcccgcacgacaccc

SEQ ID NO: 139787 - RNA, 51 nt, Homo sapiens
ggaaacggacaaacagacgaaggaagaccaaggaagaacaggcaagcgaaa

SEQ ID NO: 139788 - RNA, 81 nt, Homo sapiens
gaagcgcgccgccgccaccgccggggccgcgccggaggaggagacggaggagaccgacggaggggaaaaagaaaagggcga

SEQ ID NO: 139789 - RNA, 72 nt, Homo sapiens
ccccaggcccacaaccagcccagcagcagcaagcagaacccgaaccacaccaggggagaagaagagcagccg

SEQ ID NO: 139790 - RNA, 55 nt, Homo sapiens
gacagaaagcggacaacaaggagcggacacaccaagaccaggacgacaagaaccc

SEQ ID NO: 139791 - RNA, 91 nt, Homo sapiens
accgacgagcgcacgaggaggcgcgcagaaccagaccgggagcacgcacccacgaggcggagggaaacgccgaagccgggagagaaccggg

SEQ ID NO: 139792 - RNA, 65 nt, Homo sapiens
gagaagagaaaaaagcacagagccccacagccaggccgccccacccaccccagggcccagggccc

SEQ ID NO: 139793 - RNA, 75 nt, Homo sapiens
ccgagagccgcccgggccagcggccgcgcacccccggccggaggcaccagccaaggagcagggacaagacaggaa

SEQ ID NO: 139794 - RNA, 82 nt, Homo sapiens
agccgccgcgccccgcgcgcgggaagcagcaccaagcacggccaacgccggcacaggaccagcaccagacagcgaaaaagag

SEQ ID NO: 139795 - RNA, 70 nt, Homo sapiens
cgaggaacggccgcccagaacccaggaaaccgaacacaccagcaacaagaaggccagaccagagacccac

SEQ ID NO: 139796 - RNA, 81 nt, Homo sapiens
ggcgagcccgcggaaccgcagccaggaaggaggcgccagggagcgggaaaggccgagccgacaccccacaggagaagccgg

SEQ ID NO: 139797 - RNA, 52 nt, Homo sapiens
gacgcagggcgcccccgggaagacagccgccaccaggcgcccccccagcaac

SEQ ID NO: 139798 - RNA, 71 nt, Homo sapiens
agaggaagaaagcgacaccaggacaaaacaaaggaccaagaaagggcaaaagagacggacaagcaaggcag

SEQ ID NO: 139799 - RNA, 67 nt, Homo sapiens
acaacaggaaaacaaaagaggagaaaggggcacgaaacccaaaacccaggagggcaggagaccaccc

SEQ ID NO: 139800 - RNA, 72 nt, Homo sapiens
gggagagccaccggccacacgcggcacaggcgcgaacaccaaggggcagaagacacgcagccccccgacaca

SEQ ID NO: 139801 - RNA, 58 nt, Homo sapiens
gcccgggccgcgcccgaggccaagaaaggagcgagggacggcggcgaggaccagcagc

SEQ ID NO: 139802 - RNA, 58 nt, Homo sapiens
gaagggaacgcgaggcccgcgcccccgaccgagggaagaaaacgccagagaagcagag

SEQ ID NO: 139803 - RNA, 67 nt, Homo sapiens
caggagaggaaagcggaaagccaagggcccgacccgaaaagcgcagccaaccagacgcgcgaagaac

SEQ ID NO: 139804 - RNA, 67 nt, Homo sapiens
ccaaggcagaggacgcggcaacagaacggaaggcacagggagccaaccgccacaggaccaggcacca

SEQ ID NO: 139805 - RNA, 71 nt, Homo sapiens
gcgggacagaccccaaaacgcccaaacagcagaccgagcacacccgcacacgcgggcagcccacacagcca

SEQ ID NO: 139806 - RNA, 86 nt, Homo sapiens
ggccaggagggcacggaaagggaagaggcccagccagagaggggagcgagcagcccaaccggagcagagccacacaaggaagacaa

SEQ ID NO: 139807 - RNA, 74 nt, Homo sapiens
agggcccccgagaaacaccggggccaggggccaccacagagcccgcagggacacagcagaacaagcaacccccg

SEQ ID NO: 139808 - RNA, 78 nt, Homo sapiens
ccccgcaggcggcggggcagggcagacaacaccgacgagcgagacgacgggaccgaaggaccccgccagagacaaccg

SEQ ID NO: 139809 - RNA, 71 nt, Homo sapiens
caggagcggcaaaaaacacacggggagcaccccaggaccggccaggccaccgaagcgacaggacgggaccc

SEQ ID NO: 139810 - RNA, 55 nt, Homo sapiens
aaaaggcaacaccgcacaggccagccggcaaaaaccacaggaaagagaggagagg

SEQ ID NO: 139811 - RNA, 72 nt, Homo sapiens
ggaagcagccagaccaagaacaaccgcggacacggagaggaaggacaccagccgcacccaagcgcagggggg

SEQ ID NO: 139812 - RNA, 55 nt, Homo sapiens
caccagagagaaaccggaagggccgacgagagaaagacagacggaccgaaagggc

SEQ ID NO: 139813 - RNA, 75 nt, Homo sapiens
ccagagaaaaaccgaccaaaccacgcacaccagggagagggggccgggagcccagcagacgacgggacccccagg

SEQ ID NO: 139814 - RNA, 72 nt, Homo sapiens
acgggagggggaaggggccggagggcagggggcagggcggcagaggggagcccacaccggaggagaggaaag

SEQ ID NO: 139815 - RNA, 83 nt, Homo sapiens
ccaccgagagagcgcacacagagcaggagccagcggggacagaagacgaccaggccagacggggcagggaacaacgggcgaaa

SEQ ID NO: 139816 - RNA, 85 nt, Homo sapiens
gccggaaggggcaagacgggcagcgcaggggcgggaaagacccaggagaagccgcccaaagaacgaggcgacccgcggcgagagc

SEQ ID NO: 139817 - RNA, 77 nt, Homo sapiens
cagcgccagcggcacggcccgccgcccaagcagaaacaacggcagaaagagagcccggccaaccgacaccgcagcag

SEQ ID NO: 139818 - RNA, 74 nt, Homo sapiens
aggagcagccaaaagccaccccagagaggagcaagagacagaaacagccgccaggacaccaggggagaaacgag

SEQ ID NO: 139819 - RNA, 74 nt, Homo sapiens
accagaaagggagagagccgcagcggccaggcagccaagcggacagcgccagacagcaaaaccccagggcacca

SEQ ID NO: 139820 - RNA, 79 nt, Homo sapiens
gcccccacacaaaagcgagacccccccgcaagacgggcccaccgagcagacagcgaacccacccaacacggcaaaacaa

SEQ ID NO: 139821 - RNA, 77 nt, Homo sapiens
ggagagggccaccgcccgccacccgcgcgccgccgccgaggagaaagaaacacccgaggacccagagaccccacgga

SEQ ID NO: 139822 - RNA, 74 nt, Homo sapiens
gccagccaggagagagagcaccaccggcgcggacgaccggagacccgccacaccagggaagcgcaagaaagcac

SEQ ID NO: 139823 - RNA, 101 nt, Homo sapiens
gggggacggcggcagagccgaacgcgagggcggcgcccggggacggagcgcgcgcaaagaagcacccaagccagggagcggcaaaagcaaaagggccagaa

SEQ ID NO: 139824 - RNA, 63 nt, Homo sapiens
gcccgccccgcagagagggaccgcaggagccacagcaacaaggcccaaacaggacccgggccc

SEQ ID NO: 139825 - RNA, 73 nt, Homo sapiens
gccaaaacggcaggaagcgccagaaggagcggagggagcacacgggcgaagaacccccaaaccaaccagacgc

SEQ ID NO: 139826 - RNA, 51 nt, Homo sapiens
aaagacacggaagcacacgaaaagagcacgggccaggacccagaggacacg

SEQ ID NO: 139827 - RNA, 72 nt, Homo sapiens
ggacacggagaggaaggacaagggaggcgaggacggacaaaaggaaacggacgggaggccagccagcagaag

SEQ ID NO: 139828 - RNA, 50 nt, Homo sapiens
cccccgcggacccacccccgaacccccaaggaaaaaagcggcaccaagcc

SEQ ID NO: 139829 - RNA, 74 nt, Homo sapiens
gccgacgcccccagccaccagccaggagcacacggcgcacgccaacacaacacaggcgaagaggcccaagcgca

SEQ ID NO: 139830 - RNA, 72 nt, Homo sapiens
cggcgccccggcgcgccgagagaggcgggacaagggccacaggccaacgacaacgacaagcgacagagaacg

SEQ ID NO: 139831 - RNA, 66 nt, Homo sapiens
gcagccacacagggcggacacaaccacccgcaccagacacagaccagcgcgagagaacaccaagga

SEQ ID NO: 139832 - RNA, 75 nt, Homo sapiens
aagaaggaacaagcccaggacagggacgccaacgaccacccccaccagcaggacagccaaaccagggcagagaag

SEQ ID NO: 139833 - RNA, 70 nt, Homo sapiens
aaagcacaacccggacacgccagggacacccaaagcgaaccacaacagcacaagccagacaagcaaaagg

SEQ ID NO: 139834 - RNA, 70 nt, Homo sapiens
cgccggagagcccaggagcaggggagacagagagcagcaccagcagaagagggcccgaccacggcaaccc

SEQ ID NO: 139835 - RNA, 77 nt, Homo sapiens
gcccccgcgagccgcgcgcccagccaggggacaccagacccgcggcgccagcagccgggcggccccggaggacccag

SEQ ID NO: 139836 - RNA, 85 nt, Homo sapiens
caccccgccggacacgaacgaaacagcaagaaagcaccagccaagcagaagggagccagcggacgagggcgccaggccagggcag

SEQ ID NO: 139837 - RNA, 77 nt, Homo sapiens
ccccgggcgcacccacaaccgaaggagacaaccgaggccgcagagcccagaaaaacacggagagcaacaaagaggga

SEQ ID NO: 139838 - RNA, 79 nt, Homo sapiens
caaagacagaacaaaacacaaacgccaagaaaaagacggaaaggacgggcggggggaaaagaacgcaggcaaacagaca

SEQ ID NO: 139839 - RNA, 74 nt, Homo sapiens
aacagaacggacccgaacaggcaaccaaagaacgccaggaacgaagaacgaccaaaaagaagaacagggaaaca

SEQ ID NO: 139840 - RNA, 39 nt, Homo sapiens
ccgcgggggggggcgcggagaacggggagcccagcaggg

SEQ ID NO: 139841 - RNA, 82 nt, Homo sapiens
cgaaggccgccgccgggcgagaaagagcgggaagaaggccgccgcacggccagcgggaagaagaacaagacccaaccgagag

SEQ ID NO: 139842 - RNA, 73 nt, Homo sapiens
cgcccgggccgggggccgccgggacccggccaccagcaagccgcagaagacaagaagaagccaagagaaagga

SEQ ID NO: 139843 - RNA, 73 nt, Homo sapiens
gaccccaggaacggggaccacggaagagaaggcaggacaagaaaacccccggaagaagaacagcagcgcgaaa

SEQ ID NO: 139844 - RNA, 78 nt, Homo sapiens
aggaagaaaacacaggagccggagcagaagcaaagagaagccacgccagaagcagacaaacccaaccggagagaagac

SEQ ID NO: 139845 - RNA, 68 nt, Homo sapiens
ggaagcggcccggaggagcagccggaccaagggacaagagaaaaaaagggcgggcgaacaaaaagagc

SEQ ID NO: 139846 - RNA, 82 nt, Homo sapiens
cgaccggggagggcgcaggagcgccgggccccgaagggcggcacaccgcaggagacgcagggcccgcgcgcggaggccggcc

SEQ ID NO: 139847 - RNA, 73 nt, Homo sapiens
gacccgccgccgccgaaggcccgcagcaagaaaacccgacaaaaagaagcggaggacagcagggggggacgag

SEQ ID NO: 139848 - RNA, 77 nt, Homo sapiens
ggccgaggcgcacccccaggagggcgacaaggagcccagcacccagggcagaaagcagacaagcagaccggaagacc

SEQ ID NO: 139849 - RNA, 39 nt, Homo sapiens
cgacgaggcccggcgcaaaagcgagaagcagaaagccaa

SEQ ID NO: 139850 - RNA, 79 nt, Homo sapiens
gccagcgaccaaaaacagaaacccagaggaaaacgcacggcaacccacgaagcccagccggagaagcaagccaaccaca

SEQ ID NO: 139851 - RNA, 74 nt, Homo sapiens
cacgaaagccccacccgccgcagcaagcagaggacggccggagcagcagaacaagagcggagaccaagggagcc

SEQ ID NO: 139852 - RNA, 76 nt, Homo sapiens
cggcacggcccagaccagaccacaggagcagcaacccagccccggaaccacgccaggggaagaaacgagaaggcac

SEQ ID NO: 139853 - RNA, 79 nt, Homo sapiens
ggaaggcccagcccaggggggccgaaagaaacgagccagaggacaaaacccagccggcacaaaccaggaaaggaagccg

SEQ ID NO: 139854 - RNA, 33 nt, Homo sapiens
gagacacagcggagaagcccaccacaaaccaaa

SEQ ID NO: 139855 - RNA, 84 nt, Homo sapiens
ggacccacggaccccggagagcacaggccaccacaggaacaaaccagccaggcaaagcccagcccgcagcacaggcccagggac

SEQ ID NO: 139856 - RNA, 74 nt, Homo sapiens
ccgggccagccccgcgacggcccacgagccaagcccagaccggagggaagacaagggccggcgagaggaggaag

SEQ ID NO: 139857 - RNA, 75 nt, Homo sapiens
aaaaaggggcggagaaacaacagaagaacgagcagaaagaacagaccacccgaaagaaaggcaccaggccagccg

SEQ ID NO: 139858 - RNA, 79 nt, Homo sapiens
agcggaaagaaaagggccacacacgaggggaccgaaagagcgccggagaagggaggaagaaagcccgccggaaagcaac

SEQ ID NO: 139859 - RNA, 68 nt, Homo sapiens
caaccgcaccgcacccaacaccgcccgaagggggacagggagaagacggggagaaaacaggccaaaag

SEQ ID NO: 139860 - RNA, 72 nt, Homo sapiens
cgaagccaggacaccgccacaggagggaccagcaccggaggaaccgcaccagcccaaaaggcagagcgagga

SEQ ID NO: 139861 - RNA, 68 nt, Homo sapiens
ccccagaagccgcgcaggacgggccaacgcacggcccggcagagccagcaccccccgcggcagccaag

SEQ ID NO: 139862 - RNA, 56 nt, Homo sapiens
acgcgccacggaccgcgggacaagaaaacagcggaagagggccccccagggaccag

SEQ ID NO: 139863 - RNA, 41 nt, Homo sapiens
ggacaccccggaagcgggaaaggaaagcaaggaaacagggc

SEQ ID NO: 139864 - RNA, 73 nt, Homo sapiens
caaaaacgcacacaacgacccagcaaaccaagggaggaaccgaaaggaaaccgaggacacagaaaagggcaca

SEQ ID NO: 139865 - RNA, 78 nt, Homo sapiens
cggaggaacgggcccgcaagcgcgccgacaggcagcaggcaccagaacggaaaaaggggccggcacaagcgaggaggc

SEQ ID NO: 139866 - RNA, 86 nt, Homo sapiens
caccccccaagaccggcggcccaacccaccggaagggcagacagagcacaagcgcggggaaacagcccgaacacacccaagcagag

SEQ ID NO: 139867 - RNA, 60 nt, Homo sapiens
gaagcgacgcaaggaaacaagaacacacacccggacaagaggaaaagaaaggaaacaagc

SEQ ID NO: 139868 - RNA, 73 nt, Homo sapiens
accaaacccaccgcaagacagggaagcgacagcggaaacgccaggaagagccgggcgggaaagcacagccgcc

SEQ ID NO: 139869 - RNA, 90 nt, Homo sapiens
cagggaccgagcagggccagccggaccccggcgggcggccgggagagagccagccagcagggcagcccccgcccgcccccaccccccaca

SEQ ID NO: 139870 - RNA, 64 nt, Homo sapiens
gcagcccggagggggagcagacgaaccggaacccgcggcacccagccaaacccaggcccgagaa

SEQ ID NO: 139871 - RNA, 69 nt, Homo sapiens
cgccgcgcaccgacccgacgcgccggcccacgcgcggccaagccacagaaagcccgccccagacagggc

SEQ ID NO: 139872 - RNA, 69 nt, Homo sapiens
ggcgcgggggaccgaggggacaggaccgcaggaacgcgcccaggccgcaagaaccaacacagagcacgg

SEQ ID NO: 139873 - RNA, 71 nt, Homo sapiens
acagagagagaggaaacgaagggagcgacacacacccaagagcaggacccaggcccaaaaggaaaagccag

SEQ ID NO: 139874 - RNA, 63 nt, Homo sapiens
gcgggcaacccggcggaacggccggacccagcagggcccccggaacaaacccgggagccacgc

SEQ ID NO: 139875 - RNA, 60 nt, Homo sapiens
aacggaggcgggcggccaggcccggaggccggggacgcccagaagggagacaagccaagg

SEQ ID NO: 139876 - RNA, 80 nt, Homo sapiens
ccgacccacccggcggaggaacggggcccgcccgcggcccccgcgcggaggacaccaggcccccacagagagcacacaaa

SEQ ID NO: 139877 - RNA, 101 nt, Homo sapiens
gggaaagagccaccccagagaaaagaagaagagcacgacagacacagccaccgaggaacgggagcgggggccaaacccgggagaagaagaagcgcgagaaa

SEQ ID NO: 139878 - RNA, 72 nt, Homo sapiens
accacacgaacagcggaggagaagacaagacaacaggaccaggaaccagggaagaacacagaggaaaaagac

SEQ ID NO: 139879 - RNA, 95 nt, Homo sapiens
caagcaccagggccaaagacccccaggggaagaggcaggccccgaggagccgggagcgcaaggcgcagggccacggcgagcggccaacagggacg

SEQ ID NO: 139880 - RNA, 63 nt, Homo sapiens
gcggaaggggcccagcagacgcaaagacgcaagggagaagcagaccgcaccaggcgggacccc

SEQ ID NO: 139881 - RNA, 114 nt, Homo sapiens
gcgcccggaccggccgagaggaagacgagccgggaggaacggcccggaaacaggaggaccccgggaccgggagcccgggaccgggagccggggggccaccccgaccggaggagc

SEQ ID NO: 139882 - RNA, 78 nt, Homo sapiens
aaacgcgaagcagccccgcgaggaccacccggaaagaccacagcaagaccacgcccccagccgggggaccaggccgaa

SEQ ID NO: 139883 - RNA, 79 nt, Homo sapiens
ggcggaagacaggccacccagcggggagcacggcgagcagccaggccaggagagaaagcagaagccacggagaaaaacg

SEQ ID NO: 139884 - RNA, 75 nt, Homo sapiens
gcccaggcggccgaaccgagccaagcgaccgcccacccggccacccaaaaggggaacagggagccgaagacacaa

SEQ ID NO: 139885 - RNA, 85 nt, Homo sapiens
ggagccgcgcgcgcgggcgccccccgggacagcccgaagccgagcaggaccagggccacagggcgccaagagcccagggcaccgc

SEQ ID NO: 139886 - RNA, 73 nt, Homo sapiens
cggagacacccaggaggcagaagccacccaccagccggacacccgaagcagaagcgcggccaaaagaggggaa

SEQ ID NO: 139887 - RNA, 49 nt, Homo sapiens
agcgcgcaccaaacccccggacccggcaacgggcggcggaagacgggca

SEQ ID NO: 139888 - RNA, 68 nt, Homo sapiens
cccagggaaaggcaacaggagcggcagcccacaagcaggaagaccagccccaggagggaaacagagca

SEQ ID NO: 139889 - RNA, 85 nt, Homo sapiens
cggagcggccggggccggggcgccgccgggcggccgggcgcggcgagcccaggggcaaagggaaggagaggcagcagaaaaacac

SEQ ID NO: 139890 - RNA, 61 nt, Homo sapiens
gaccagccacggggcggaccggagaagggcccacggagacaacccacgacggcaacgaggc

SEQ ID NO: 139891 - RNA, 83 nt, Homo sapiens
gacggcgcccagcaacacagaagccgacaaggcgcaagcgaaaacagaccgcgagcccagagagagggccgaggcagacaagg

SEQ ID NO: 139892 - RNA, 52 nt, Homo sapiens
cccccgcggcggcagccacaggggcggcagaccgcaaggacaacacaccaaa

SEQ ID NO: 139893 - RNA, 76 nt, Homo sapiens
ccaggacacagcccgcacccacagaggccgaggggcagcccacccacagcaccgcaaggccccaacgcaaccagac

SEQ ID NO: 139894 - RNA, 82 nt, Homo sapiens
gcgcagcgggggggcgcgggagcaacgggaggccggacccagcgagcgggcggcacgcacgcagccacccggcccgcgcgcc

SEQ ID NO: 139895 - RNA, 72 nt, Homo sapiens
aacacagacccagccgccaaagaggaaaacccaagacaaggaagggcaaagcccacagcacaagaggcgggc

SEQ ID NO: 139896 - RNA, 71 nt, Homo sapiens
agcagcaccgggcacacgcagaagcacggaggacaaggcaaaccgacaccagcgacacaagcgcgagggaa

SEQ ID NO: 139897 - RNA, 77 nt, Homo sapiens
cccacaccaggaaccggcaaaagaggaccgaggagaaggcagaagggacacagaggaggggggacgggaagccagcg

SEQ ID NO: 139898 - RNA, 76 nt, Homo sapiens
aaaaggaagaaacggggacgcggagaaaccaaccacagggcgcaaaggaaccacacagcaaaaggacaaaccgcac

SEQ ID NO: 139899 - RNA, 68 nt, Homo sapiens
cccgacgccaggcagcgcccccaaacgaggagacaaccacaagacagaacccaggagggggacagaca

SEQ ID NO: 139900 - RNA, 68 nt, Homo sapiens
agggggggccgcaaaagcccgcgaccaccaaacacgggagaccacaggacgcccaccagaagcaggga

SEQ ID NO: 139901 - RNA, 71 nt, Homo sapiens
gcgaagacaaacaaaagagaacgaaaaaaagcagagaaacaacacacgaaaagacgccgggaaggaaaaaa

SEQ ID NO: 139902 - RNA, 60 nt, Homo sapiens
aagagggacaggaagggaccccaggaaacagaacgaaaacaaacggaagagagggcagca

SEQ ID NO: 139903 - RNA, 72 nt, Homo sapiens
gggcgggggcgcggggcgggcgggcgggcggagggagaacccacaggagggccagaggacaaagcacggcgg

SEQ ID NO: 139904 - RNA, 79 nt, Homo sapiens
ggaagaagcgagagcaggcagaaagggggcagggcggacccgaagggggcccccaaagggaagccaaacacaaaggaag

SEQ ID NO: 139905 - RNA, 75 nt, Homo sapiens
ccggagcgcgaaggagcgcggagcccagcaaaaagaggagaagcacccccccagaagaaaagagaagggacaaga

SEQ ID NO: 139906 - RNA, 85 nt, Homo sapiens
gaaaaagcaaaacgggcaaaagaccaaagaaggcaaggagagaagagaagaacagcacaggacagccaagggaagaagcagaagc

SEQ ID NO: 139907 - RNA, 73 nt, Homo sapiens
agccggaggcaaaaagaagggccgggcgggaaaagcacagcccagggcaccgccgaggcagacccgaagccag

SEQ ID NO: 139908 - RNA, 77 nt, Homo sapiens
cccacagaccagcccagcacaggagaaggagcaagaagagaaaaacaaagcacacacggcaggaacggagaaaaaaa

SEQ ID NO: 139909 - RNA, 52 nt, Homo sapiens
aacacaggcgcacaaaaaaacccagccaaaggaacccaaggaccgcaaagaa

SEQ ID NO: 139910 - RNA, 75 nt, Homo sapiens
agcaagaaagacagagcaccaggagaggcacaagaaaaggaagcaaggaaaaggacagcaaaaagaaacgacaag

SEQ ID NO: 139911 - RNA, 82 nt, Homo sapiens
acgcgcgcacagggacacagcgagccaaacggaacgaggcagcccaagacaccccgcggcacgccgccgccggaggagcccc

SEQ ID NO: 139912 - RNA, 59 nt, Homo sapiens
cggacagcggggacgaggcggacgacgaccggccaacaagaccaagggaacggaagccc

SEQ ID NO: 139913 - RNA, 81 nt, Homo sapiens
agcgggcacccgcacgagcaacagacgagcgcgccaggccgacagccgcggccgggcccgaggaccggcagacagagaggg

SEQ ID NO: 139914 - RNA, 70 nt, Homo sapiens
aaggaacgggcagaccgcaggcacggggacaacagggcaggagacccggacagacaccagggagagaaga

SEQ ID NO: 139915 - RNA, 63 nt, Homo sapiens
gagacgcgcacagaagaggcgcagccgagccaaagaaaaagccggccagggcggaaaaagggg

SEQ ID NO: 139916 - RNA, 65 nt, Homo sapiens
gaaggaccaagaaccagaacgggacaggggggcccaaaccaggagggaaccaggggccaaaggaa

SEQ ID NO: 139917 - RNA, 81 nt, Homo sapiens
agcggcaaaagccggggcaacacaagaacagaagaccagcacagccagaggcaaccacgacggcagagacaggagaggaga

SEQ ID NO: 139918 - RNA, 79 nt, Homo sapiens
agacacaaaagacagggggaggagccacggaggcaagagggaaggaggccaaaaaaagccaaaaaagcaaacaggcagg

SEQ ID NO: 139919 - RNA, 75 nt, Homo sapiens
cccagcaaacccagacagaaggacacgagaagaaaaggcaagagggagacaaagagagagcagggacgaagcggg

SEQ ID NO: 139920 - RNA, 71 nt, Homo sapiens
gaaggaccaagaaccaggggcacagaccagcgcgaagacaaggagcagggagcccaccagggccagccagc

SEQ ID NO: 139921 - RNA, 48 nt, Homo sapiens
gcccaagaacgaggcagaacccaagagccaaaggacggaggaagagaa

SEQ ID NO: 139922 - RNA, 81 nt, Homo sapiens
gggagggccacaggaggcggcgggccccgcccgccgaaggaagcgaaaccacaacacccaaaagcaaggaagaccacggac

SEQ ID NO: 139923 - RNA, 74 nt, Homo sapiens
agaacaaaggggacgggcagagaaacaccagcccaccgcacccagggaaaaaacagcagccacacgaagccggg

SEQ ID NO: 139924 - RNA, 79 nt, Homo sapiens
cggcggccaggccccagacacagacgagcaggggaagaaccagagagagacgaggccaccggccaagcccagcagagcg

SEQ ID NO: 139925 - RNA, 83 nt, Homo sapiens
gccgcccccccaacgcggacagcgggggaccggacgcaggaagacgcagccggccgcgcccccagccagagaacagccgagcg

SEQ ID NO: 139926 - RNA, 83 nt, Homo sapiens
cggagagccgcaggacggcgcggcagagccccgacgccacagaacgacagaagcgaaggggacagggggagaaccgccaggga

SEQ ID NO: 139927 - RNA, 64 nt, Homo sapiens
ccacagcgcccagagaggaggaggcggcaggagaagcagagaagaccgcacgggcaacaccggg

SEQ ID NO: 139928 - RNA, 75 nt, Homo sapiens
caaagcaccacaaggcaggcccaacggaggaaccacgaagcaaaaggaaaaccagcgggcaggaacaccagacag

SEQ ID NO: 139929 - RNA, 73 nt, Homo sapiens
acagcgccccaccccagaggcgcggagcgccccagggggcggccgggggggcaacaaccagagcagccagaac

SEQ ID NO: 139930 - RNA, 78 nt, Homo sapiens
cgccgcgcccggggccggcgcccgggccaccggccgcagagccgcgagaaggggccagcaaagacggagcgggaagaa

SEQ ID NO: 139931 - RNA, 47 nt, Homo sapiens
acagcagcggggaaaaacaagagaaggccaagagaggccaacagagg

SEQ ID NO: 139932 - RNA, 62 nt, Homo sapiens
ggagcgcgccggaccaagcgggcccagaagcgggacccgacaaacggacagcaggaccagaa

SEQ ID NO: 139933 - RNA, 80 nt, Homo sapiens
cagccaggccgcgaaaggcaacaagacaaagaaaccagccgagcaaccaaaccaaagaggggagaaaacccgggccagca

SEQ ID NO: 139934 - RNA, 69 nt, Homo sapiens
ggcaagaagaagaaccgagcccagcaagacccccagcgccccagcaggacaggcacacccgggcagccc

SEQ ID NO: 139935 - RNA, 118 nt, Homo sapiens
acaaaggcgagggggcagaaaacacccagccccaaaaccccgggagggaccggaaaaagaggcaccaggggccagggaggcccaaccagagcgcgcgggccgcgggaagaaacaaagg

SEQ ID NO: 139936 - RNA, 79 nt, Homo sapiens
aagagggagaaccaggaagagcagcgcgcaggacccgcagcacgcagaaaagcaaccgcaaccagaaggacaacgaagg

SEQ ID NO: 139937 - RNA, 75 nt, Homo sapiens
acacaggaacaagcaccacagagaggagcccccgcacccaggcggaacgcagggagaccggcaacgcaacccagc

SEQ ID NO: 139938 - RNA, 85 nt, Homo sapiens
gggaacgacgcagagccgaggcagaagacggggcccgggaccacaggccccggcccagaaacaccccaccagaccacccagcaag

SEQ ID NO: 139939 - RNA, 73 nt, Homo sapiens
aggcagaagcgacggccccccgggagcgccaggagcggaggagggaagaacaggggccagggaaaggagcaga

SEQ ID NO: 139940 - RNA, 84 nt, Homo sapiens
agagaacaccagaaacccggcggacggaaggcagggccagggcacccgccagccccgggaggaggccccagcccgcccggacgc

SEQ ID NO: 139941 - RNA, 70 nt, Homo sapiens
cagaagccaaaccagaaggaaaccagaagcacaaaggccgacgagaaaagaaccccggaccgcagcaggc

SEQ ID NO: 139942 - RNA, 89 nt, Homo sapiens
cagagcccagcccagagaggcccacaaccaagccacaaaagacacgccacaaccgacccggaggaaagcccagagggaagcgcaagaag

SEQ ID NO: 139943 - RNA, 71 nt, Homo sapiens
acggcggcccccggccaccgccggccagcaaacgaacacaagagacagggaacaccagaccggagcaggaa

SEQ ID NO: 139944 - RNA, 65 nt, Homo sapiens
gacgacacgagggggccagacagccaccgaaggggcccagggaccgggaccgcgcaccgcccaaa

SEQ ID NO: 139945 - RNA, 83 nt, Homo sapiens
agaagcagcggacccgccaccacacggcaccgggggcggccgagcccgggggaggccccggagcgcagccgggcccagcccac

SEQ ID NO: 139946 - RNA, 79 nt, Homo sapiens
gccacccccaagcaaagcagcacccagggccggagcccggacacaaaagccagggagacaggacccagaccagccaaag

SEQ ID NO: 139947 - RNA, 67 nt, Homo sapiens
gacacgcgaaggggagaagccgaccgaacgcgccagcgcggggcaacaggccccgggccagcagccg

SEQ ID NO: 139948 - RNA, 48 nt, Homo sapiens
acaagcccaagcgccaaagagaagaacaaaccgccggagcggggaccg

SEQ ID NO: 139949 - RNA, 82 nt, Homo sapiens
cgcgccccggcggcgcgcagccaccagccaaggacagagggcaagagagacccagccaaggcgggacaacccaaccgcagca

SEQ ID NO: 139950 - RNA, 64 nt, Homo sapiens
cgggagagaggacccccccccccccccaagggaaacccagacgacaaggaaggccaagggaccc

SEQ ID NO: 139951 - RNA, 61 nt, Homo sapiens
gccccaggggaaaacccccgggaccagaaacaggaagaggaacgccggaacaaagaacgca

SEQ ID NO: 139952 - RNA, 32 nt, Homo sapiens
gagaggcacagaccaggagcagaaacgggggg

SEQ ID NO: 139953 - RNA, 79 nt, Homo sapiens
aaccaaccgggaccccaagccaaagaacccacacaaggacaaggagccaggcagcgagcgggagcagacagggaaccga

SEQ ID NO: 139954 - RNA, 76 nt, Homo sapiens
gcgcaacaaaggagcacgacggcaggaaggaggagacgaagaaaggagggcccagcagaggccaccgggccaaccc

SEQ ID NO: 139955 - RNA, 77 nt, Homo sapiens
gcgcccggcaggccgccgcgagcagccaggcggcgggccagcccggcccccacgacacaccgaagaggcccacggag

SEQ ID NO: 139956 - RNA, 79 nt, Homo sapiens
ggaaccaggccccgggaaaaaagaccgagcagggcagacaaaaagagagcggcagaggaaaagcgcgccaaaaggacag

SEQ ID NO: 139957 - RNA, 49 nt, Homo sapiens
acggaaaaccccgcaccagacaaggcagggcccagcgcccaaccccgcc

SEQ ID NO: 139958 - RNA, 75 nt, Homo sapiens
ccaaaccccacacgaggcgggcgcacgagcacggagcagaggaccacgagcgaccggaagccgcgggggacaccc

SEQ ID NO: 139959 - RNA, 103 nt, Homo sapiens
cggccgcggccaggcgacgccacccaagacacaaacggcgacacagcaccccgcggagccccagagaaaccaggccggaagaccaggagggaccgaagccagc

SEQ ID NO: 139960 - RNA, 54 nt, Homo sapiens
ggggacgcacgccacccccgccccggacgaccgccccaaaccccaggcccaaac

SEQ ID NO: 139961 - RNA, 75 nt, Homo sapiens
accaccgcgcagaggggcagggggagcggcagcagaagcagcggccaagaacccaggcacgcaagaaaggggccc

SEQ ID NO: 139962 - RNA, 91 nt, Homo sapiens
aggaaccgcccgcaagagcgagccgccgccccgggcgcagacagagcaccagcaccagcagaggacccaaagacaggaccacgcaccagca

SEQ ID NO: 139963 - RNA, 77 nt, Homo sapiens
cggccgccgaccgcggccccgccggccgccggccgcgcggggggagcaggccgggcccgccagggcacgcgcccgcc

SEQ ID NO: 139964 - RNA, 59 nt, Homo sapiens
agaaaagacacaggagaacgggaggcgcagaaagagccacgagagaagaaagaaaaaga

SEQ ID NO: 139965 - RNA, 40 nt, Homo sapiens
cagcggcggagccgcccggacgcaaaagcgaaagccggac

SEQ ID NO: 139966 - RNA, 75 nt, Homo sapiens
gcaaggcgacgccagaggaggaaaggaagacaagggaaaagcccaaggaggccaagagcaagagaaaagccaaac

SEQ ID NO: 139967 - RNA, 73 nt, Homo sapiens
aaaggccaacacaagacaagccagcagccgccagacaagagaccccagaacggaccaacaccccaggccagga

SEQ ID NO: 139968 - RNA, 78 nt, Homo sapiens
aaggcgagccgggcccgagacagaggggcaggagcagagagcgagccaaggcgaagaaaagcccacccacaagaccag

SEQ ID NO: 139969 - RNA, 100 nt, Homo sapiens
ccaagacgagcgacaggagcacacccggagaagcaggagcccaccggcaggacagcccagagcaagcacacggaggcccgggagccagaccgggagcccg

SEQ ID NO: 139970 - RNA, 71 nt, Homo sapiens
cgggccgccggggcacagccaaaagggcaaaggagcagagaacgacaagccacacgaggacagcccgcaac

SEQ ID NO: 139971 - RNA, 68 nt, Homo sapiens
acggaccagggggacggcgacagcgccgaacaggccagcgcagaagacgagaagccaggaggagaagc

SEQ ID NO: 139972 - RNA, 87 nt, Homo sapiens
aggaccacaggcccagacgagcggaggaggcacagggcgcggaccgcacgagcgcgagaacacaaggaacgaaaggaagggaagaag

SEQ ID NO: 139973 - RNA, 75 nt, Homo sapiens
accggagccagaaacaaccgcaaccacccaacaaggcaccgcgcacagcgggagggcaccaggccccgcgggcca

SEQ ID NO: 139974 - RNA, 101 nt, Homo sapiens
gggagacccggggacccccgacgccaggcagcgcccccaaacgccaaggagaccgggagagagacgaaggacgcgcaggggcagcagacacggaaacgaag

SEQ ID NO: 139975 - RNA, 77 nt, Homo sapiens
cggcagccacccaccgccgccgcccccagcggaggcacccaccacgggccaggcgggccagaggcaagccgcgggag

SEQ ID NO: 139976 - RNA, 76 nt, Homo sapiens
gcgcaaacacccccagacaaaggcccagcaaacccaccaaacacagccacccaccagcaagagaacaaaaagacgg

SEQ ID NO: 139977 - RNA, 63 nt, Homo sapiens
gcaaagcagcagaacggacagggcaaggaagagaggcgaccacaggcaaacaaagaaccacgg

SEQ ID NO: 139978 - RNA, 80 nt, Homo sapiens
cccgcccgcccccagcccgcacacaagagcagaggccaacgcacagaagccaaacgcacgagcaaaacaacagcagcagc

SEQ ID NO: 139979 - RNA, 73 nt, Homo sapiens
gagcagaagaggaacaagggggggaaacccaccgggaaaaggcacgaaggcgagaacaagccaaagacagacc

SEQ ID NO: 139980 - RNA, 86 nt, Homo sapiens
ggagaacaagcccacgcaccagcaagagaacagagaaagacagaacaagaccaaacgccgaacccgagcagaaggaggagcccccc

SEQ ID NO: 139981 - RNA, 79 nt, Homo sapiens
gcagcggggccggaggaaagagccacccacggaaccaaccggcaaggcgggaccgacgcaggaagcccgagcaccgacg

SEQ ID NO: 139982 - RNA, 59 nt, Homo sapiens
gcggcgaacacgccgacagggaaacaggaacacgaaagaggaaaaacgcacaagaaacc

SEQ ID NO: 139983 - RNA, 76 nt, Homo sapiens
cagcgcgaggcgcggcgcgcgccagaccggcgagcccgagcaggagaccggacgcgggacacaagaaaaaacccgg

SEQ ID NO: 139984 - RNA, 84 nt, Homo sapiens
gggaaggaaacagcaagcgaagccgaaaaagcgcccgagacgggcccgccgaaaggggcaaagaaaaaggagagaaaaagaggc

SEQ ID NO: 139985 - RNA, 74 nt, Homo sapiens
caaccgcaaccacccaacaagggcagccagacaagaaggacacagaagagagcaaagaagcgaaaccgagcagg

SEQ ID NO: 139986 - RNA, 73 nt, Homo sapiens
gcggaagcaacacaacaggaggcggaggcgaaagcggaacgaggcaagaacggaagcacgggcggaggaaagc

SEQ ID NO: 139987 - RNA, 83 nt, Homo sapiens
aaggaagaaaagcacagcaaccaaagccgacggccgccggcacgcgaagggcggaagggcaagaaagaaggaaagcccaagag

SEQ ID NO: 139988 - RNA, 83 nt, Homo sapiens
aaggaacagcacaccaagcaggagcggcaccagacagccggggcaaagaaaaaggagagaaaaagaggcaaaacaacaagaag

SEQ ID NO: 139989 - RNA, 66 nt, Homo sapiens
gggccagcgccgggaccgccacaaccacacccgagggcggccaccaagagccaagcagacggcggg

SEQ ID NO: 139990 - RNA, 108 nt, Homo sapiens
caggccaccgccacgggccgagacacgcagcggcggccagggaccaaacaacggcccaagagcacagagaagaccaagggccgccagcggggccgccagccgcgggag

SEQ ID NO: 139991 - RNA, 43 nt, Homo sapiens
ggcagcacaagcacacacacagaaacgcccagggagccaggac

SEQ ID NO: 139992 - RNA, 90 nt, Homo sapiens
cgccgccaagcccggcccggcccgacaccgcgggccgccagacgggaaggacggccgaagcccgcagcccacgcacagccggagagcagc

SEQ ID NO: 139993 - RNA, 78 nt, Homo sapiens
ggaaacagcccaaaaccgccgcgcgcgaccaaagacaccgcagaccgcgccaacggcacgacggacccccagaaggaa

SEQ ID NO: 139994 - RNA, 62 nt, Homo sapiens
gagcaacacaggagccggagggcaccgagaacggagaccgcagggaggagcccccggaccca

SEQ ID NO: 139995 - RNA, 73 nt, Homo sapiens
acgcgcccacccaccccacgacggacacccaagagacaaagcccaggaagcaggacccgccggagcaaaacca

SEQ ID NO: 139996 - RNA, 73 nt, Homo sapiens
cccagaggaaacaacgcagagaaacacggaaacaggaagaggaaaaacacgacaaagacaagccagccaaaaa

SEQ ID NO: 139997 - RNA, 76 nt, Homo sapiens
cccgcccccaagcccggagcccggcgcccccgcaagaggacggcgccggcagccgggcaggcgccccaacccaagc

SEQ ID NO: 139998 - RNA, 64 nt, Homo sapiens
gggagggagacgcggcgaaacgccaggaggagagacacgacacagcaagaaagaaaaccgaaag

SEQ ID NO: 139999 - RNA, 73 nt, Homo sapiens
agcaaagaagagcccgaacaaacaaacacccagaaacaagagccagacaggcaccgcacgaagagagagggga

SEQ ID NO: 140000 - RNA, 91 nt, Homo sapiens
acagcggcagcacccccagcccagggacggccccggaacccagagacgcacagagccacgcgaggcaggacggagcccgcgcgcggcgcca

SEQ ID NO: 140001 - RNA, 76 nt, Homo sapiens
caccaggccaagagccagaaccgagacaagcagccagaaagaggagcagaaaaccacaacgaagagaggaaagaag

SEQ ID NO: 140002 - RNA, 72 nt, Homo sapiens
cagggccccacccgcccagagggccgggcggagaaaggaaggccacaccaggccccccacgcaacaagcccc

SEQ ID NO: 140003 - RNA, 76 nt, Homo sapiens
gggagaacaccgaagcccccacaagggaagaaccacaagccaagacccaccccgcggggccccagccagaggccgg

SEQ ID NO: 140004 - RNA, 62 nt, Homo sapiens
ccaaacgcggccacgcgcgcgcagaagacggcgagggacacaccccaggccgaagccaggca

SEQ ID NO: 140005 - RNA, 75 nt, Homo sapiens
ccaagaggggggagacggggaagacaggccagcgcggccaagacccaccgcaagaaaacccccagcaggcaaaga

SEQ ID NO: 140006 - RNA, 68 nt, Homo sapiens
gcggcggcccagccccgacacaggcaaggccccagcccaagcgggccgacgagaggaaagcacaaagg

SEQ ID NO: 140007 - RNA, 71 nt, Homo sapiens
cccagccgagaggacgcggcggaaacgaagacaaaggagagaggcaccaccagaccaaagagagcgagaac

SEQ ID NO: 140008 - RNA, 65 nt, Homo sapiens
aacaaaaaagggggagaaccaaccaagaagaaaggacccgcaaccgacacacagcaaaagcaaag

SEQ ID NO: 140009 - RNA, 75 nt, Homo sapiens
ggaggaagccgacgcgccggcgcaaagaagcccaagccaggacggaccccaagcaagccgccacaaacaaccccc

SEQ ID NO: 140010 - RNA, 72 nt, Homo sapiens
agaccgaccaccaaaacaggggaaagcgcgagcgagcacccggagcagcagagcacccaacaggggacaggc

SEQ ID NO: 140011 - RNA, 81 nt, Homo sapiens
cgggacccgagcggagagccgcggagccggaagagccccgagcgccaaagcagaaaagagaacaagacaccgggagaggaa

SEQ ID NO: 140012 - RNA, 72 nt, Homo sapiens
gaaacagaaacggaacaccaaggagacccaaaaaaaagccgaagcaacaacacgcaagaggcaccggacccc

SEQ ID NO: 140013 - RNA, 84 nt, Homo sapiens
cagagcaccgcggcgccgagcgcagacccgagagacaagcggaaccagaaccaaaacaaagacaagagaaccacaccgagaaag

SEQ ID NO: 140014 - RNA, 83 nt, Homo sapiens
cgggccccagccggcgcggggagaaggaggggcaggaaagcagcgggaccaggccgagcgcaggaggagggaagaacgccaca

SEQ ID NO: 140015 - RNA, 85 nt, Homo sapiens
gaacccccgcgaagcgccaaccgcgacacaccgccgcggcggacccaaggcggccaaggacggcggcgacggcggcgcgaggacc

SEQ ID NO: 140016 - RNA, 65 nt, Homo sapiens
cggggacccccgacgccaggcagcgcccccaaacgccacggggaaaaagcgggaccgcagccagc

SEQ ID NO: 140017 - RNA, 76 nt, Homo sapiens
gaggaaaaacagccaagacggcaaagccccccagaagaccaggccccccccgccgcccgggcgagcgacacggcgc

SEQ ID NO: 140018 - RNA, 86 nt, Homo sapiens
cccgggcggccggacagcaaggacaccaagcgggcgcaaagacaccgccagaagaccagaggaccccggaggaagcagccgaaaac

SEQ ID NO: 140019 - RNA, 74 nt, Homo sapiens
caaaacggagacagagagcagcaagaaggaacgacaaggcgcccagacaagccgagaaagaagcagcacgaacg

SEQ ID NO: 140020 - RNA, 83 nt, Homo sapiens
gagaaagggcaaccgaaaccccccaggcaagaggcgcaggaccgggaagaccaacaaacgcaccgcggccagcggcacaccca

SEQ ID NO: 140021 - RNA, 73 nt, Homo sapiens
cagggccgccacgcccccacgccccacagaccggagagaacagaaaaaaagcggcccgggaccaggaaagaca

SEQ ID NO: 140022 - RNA, 77 nt, Homo sapiens
caggcgccgagcgaccaggagccggggcggcgcaggaggagccgaggcgagccaacagcacagagacggggcgccgg

SEQ ID NO: 140023 - RNA, 64 nt, Homo sapiens
caacagacccaggccaagaggccaaccaggaacagaaaccccaaacaacacgagaacggcaaca

SEQ ID NO: 140024 - RNA, 75 nt, Homo sapiens
acaccaacacaaaaaaaaccaacagccccccagcaccaggacaaaagaagggcagcacaaaggaaagccccaaac

SEQ ID NO: 140025 - RNA, 69 nt, Homo sapiens
ggccagaaggcgcgaggcgggaacacgaagacagcaacggcagcgcgcacaggcggaacccggcggcca

SEQ ID NO: 140026 - RNA, 67 nt, Homo sapiens
cagaaagggaaagaagccaggcaagggcgaccgacagacaagaacggaaagcagacaagaaacagca

SEQ ID NO: 140027 - RNA, 85 nt, Homo sapiens
ccggagacagcgcgaccggacgggcagggagacagaagccaaacaggaggaggaagggagggaccacgcggcgcgggagagcccg

SEQ ID NO: 140028 - RNA, 62 nt, Homo sapiens
cgaaaaaaaaagaagaacggcaagacaacagggcagcaaaccggccgcacgacgcgcagagg

SEQ ID NO: 140029 - RNA, 66 nt, Homo sapiens
gcaccaggccgaaagacggacgcagcggcgcgcacggaacacaggccaggagaccagcacggagac

SEQ ID NO: 140030 - RNA, 78 nt, Homo sapiens
gcagacacaggcacaccaagggggggaaagccagacacagacccaggagcgggccacaagacacaagaacaaaaaggc

SEQ ID NO: 140031 - RNA, 85 nt, Homo sapiens
ccaggagcccggagaggaacccccgaagggaccagaacggaggccggaagaaacgcggaccgcggagggccggagagcgggaccc

SEQ ID NO: 140032 - RNA, 69 nt, Homo sapiens
acaagggcagagggaacaggcagcaggaagcacggcgggcgaaacaggagaagacaagcgaggccccgc

SEQ ID NO: 140033 - RNA, 73 nt, Homo sapiens
aaagaagccagaccccaacacggcagccggcacccgcacaacccagggggccgaacccagaccaacaaaagga

SEQ ID NO: 140034 - RNA, 76 nt, Homo sapiens
caccccgccgagccaaacgccggggaccccggcagccacccaccgccgccgcccccagcaacaaacaagcgcacgc

SEQ ID NO: 140035 - RNA, 71 nt, Homo sapiens
ggaaccgcaggacgcagggccccagccggccccgagcgaggcaccggacccgacacccccggcaccacagc

SEQ ID NO: 140036 - RNA, 72 nt, Homo sapiens
ggcagaaaaagaaggaaaacccaaagacccagagcagcacaggcagcccgcagaaaacggaaggccagggcc

SEQ ID NO: 140037 - RNA, 71 nt, Homo sapiens
cgccccgcccggagcgagggggcgcccgccacgacagaccgacacgacgcagcacgccccggaccagacga

SEQ ID NO: 140038 - RNA, 73 nt, Homo sapiens
ccaggacaaagaagacccggagagacaagccggaggacgcaaacgagaacgaagcagagcccaacaggggagc

SEQ ID NO: 140039 - RNA, 49 nt, Homo sapiens
aacccgaaccggccagaaaaccgcgaaagagcccacgagaaaaggaaga

SEQ ID NO: 140040 - RNA, 77 nt, Homo sapiens
caccgggacggaccgagaccggaccgagagcggaccgagagcgcgaaacgcacgagaagcgggcccgaggacgagaa

SEQ ID NO: 140041 - RNA, 76 nt, Homo sapiens
ccagccgccagcaccaagaaagccaaagggcgcacacgcaggcacaacaagaagcaagggcaaccagaaaaggcga

SEQ ID NO: 140042 - RNA, 71 nt, Homo sapiens
cgggagaaaacagaagacagacagccacacggagaacgggaccgggagcagaaccgacccaaacgggagca

SEQ ID NO: 140043 - RNA, 90 nt, Homo sapiens
cggaagcgaacacagccaccaaccacacaacgagacaagaagcaacagccacgggagcaagaacgggccggcccagggagaacgcaaaac

SEQ ID NO: 140044 - RNA, 51 nt, Homo sapiens
accgcagaacacccagccagggccgagggaaagaaaccgaaccaaacgcca

SEQ ID NO: 140045 - RNA, 69 nt, Homo sapiens
agcaccgcgaaggagcaagcagacaggcgaacaagaggcgccagcgggcgcgccggaagaacagcgcca

SEQ ID NO: 140046 - RNA, 74 nt, Homo sapiens
gccaggcaaagcggacccaacacaaaggcccagcacgcacgccaagacgagggaaccaccgcacggacaagcga

SEQ ID NO: 140047 - RNA, 57 nt, Homo sapiens
aagcggggcgaagagaaacagacaggaacgcaccagaagacaacgggagggcggcag

SEQ ID NO: 140048 - RNA, 44 nt, Homo sapiens
aagaacccccagggcccagaggagaccaagacacaccaccccag

SEQ ID NO: 140049 - RNA, 87 nt, Homo sapiens
gcacaaacgggcaccaggagaacaaaccgcgaccgcgccggcgggagggaggaagaggcgcggcaagggcgcggcaagaaaaccggg

SEQ ID NO: 140050 - RNA, 56 nt, Homo sapiens
cacagggcagaccaaccagaacaaggagccgccaagcaccacagcaccagaacgcg

SEQ ID NO: 140051 - RNA, 69 nt, Homo sapiens
agaccgaccaccaaaagaaaacggcacacgcaggaggagacagagacaacgggaaaacgccaaagaggc

SEQ ID NO: 140052 - RNA, 62 nt, Homo sapiens
aacccccacggcgaagccagcggacgggcagggcccagaacaaaccaggggagggaaacgag

SEQ ID NO: 140053 - RNA, 68 nt, Homo sapiens
agcgaccagagcaacacgaaagcgggccaacggcacaaaaggcacgggacaaccaaaaaagcagggga

SEQ ID NO: 140054 - RNA, 82 nt, Homo sapiens
cgcgcggccaagcagaaaggaacagaacgcggccccagccacaccaagcagggacaaggcccaggaggccaccagcacggcc

SEQ ID NO: 140055 - RNA, 72 nt, Homo sapiens
gagggcgccacggcagggggaagccgcagacggggagaaacaagaaacagaggcgcgaggcaccccaaagga

SEQ ID NO: 140056 - RNA, 72 nt, Homo sapiens
cagagacacggccgcggaggagcaagaggggggggcccccccgaagaaaggaaccggggagcggcgaaaaaa

SEQ ID NO: 140057 - RNA, 76 nt, Homo sapiens
ggacgggcgcaaggccgacgccgggggcgggcacagcacaaagacggggcgaggccagcacccacagggccccaag

SEQ ID NO: 140058 - RNA, 51 nt, Homo sapiens
gaacagccgggagaaacccgaccacagaagaagcacagacgagaaacaagg

SEQ ID NO: 140059 - RNA, 74 nt, Homo sapiens
gcccagaggaccccagccgcgcccgggagagcaagacaaacagagaggaggcagcaacacgacaaacgaggaga

SEQ ID NO: 140060 - RNA, 62 nt, Homo sapiens
cggcggcgcgcccagggcagggcccaaggaaggacccgccagcacggcccaaagaagagcag

SEQ ID NO: 140061 - RNA, 71 nt, Homo sapiens
cccaagagcaggaacaggccaccgccccagcaccccccaaggcagcaaggccagggggaagagcgacaagg

SEQ ID NO: 140062 - RNA, 96 nt, Homo sapiens
agcgcaggggaagccgcaaggaccaacggaacaccgcggagaaccgaaccaacagccagccaaagccaggcagcacagcacaggaaaacaaacgag

SEQ ID NO: 140063 - RNA, 79 nt, Homo sapiens
ggaacgcgacgcgagagaaggacccacggcgcgcgaaggagcgccggaccagcgcgagcgccacggcacggccccaccc

SEQ ID NO: 140064 - RNA, 75 nt, Homo sapiens
gggcccgcgggagagcaagggaaagccccagagacacgaggcacccaacccagaccccaagccagcaagaggaac

SEQ ID NO: 140065 - RNA, 50 nt, Homo sapiens
gacgggaccagcaccgggcaggccgggaacgccacacaacagggccccgg

SEQ ID NO: 140066 - RNA, 78 nt, Homo sapiens
cagcagaagagccaaggaaaaacagcaagaacccaaaagggaaagcggggcagcaaggcaaggaaaaaacgaagagca

SEQ ID NO: 140067 - RNA, 59 nt, Homo sapiens
cgaggagaggagcgcaacagcagcaccaggacaagaacgagccagcaaacccgaggagc

SEQ ID NO: 140068 - RNA, 89 nt, Homo sapiens
gcgccacgagcggaaaaccagaggcagcccaccgaggagaggccaggcgggagaacaccgcagcaggcggaggcaaggcgcaaccggcc

SEQ ID NO: 140069 - RNA, 75 nt, Homo sapiens
ggggagccacaccggggcggggcagcccagcagagcacccgaaggcccgaaccagcggcacgcccaaggggaagg

SEQ ID NO: 140070 - RNA, 77 nt, Homo sapiens
cggggcaggaggagacccggccaagaaaaagcagcgagggaagccgagagaaggcgggaaggccgacggccagaagg

SEQ ID NO: 140071 - RNA, 78 nt, Homo sapiens
ccccgcgcaggaggcggccagcggcaccgccggccaggaggagagcgcaccaccaaaaaggcaaacacaccagcccca

SEQ ID NO: 140072 - RNA, 40 nt, Homo sapiens
ccgccccgccgagcgcggggcagcaaaagcacaacacggg

SEQ ID NO: 140073 - RNA, 69 nt, Homo sapiens
cagaagccaagaacgggaaacaacagagcaaccccaggcaaagaaaaagaggcgaccgagcggaagcag

SEQ ID NO: 140074 - RNA, 74 nt, Homo sapiens
gcacaccgaccagccgcacgccgaccggcgccgggagaccgggcacggggccaaaaaggcacgagggaacggga

SEQ ID NO: 140075 - RNA, 85 nt, Homo sapiens
cccgaacaagacgacgacacagagaggccccccaacccagacgaagagcaagaaaccccggacagaaggcacggcgaacaaaggg

SEQ ID NO: 140076 - RNA, 72 nt, Homo sapiens
gacaccggcacgcaacaggagaaaaccccccaaacgaaccacagagcaaccccccaaaccggagacaacaga

SEQ ID NO: 140077 - RNA, 75 nt, Homo sapiens
ccgaaacggggaaaaaaaccgcagggcggagagaccaggcaagagacaaaccacacgccaagaggaaggacggag

SEQ ID NO: 140078 - RNA, 72 nt, Homo sapiens
gaagagacagacaaggcaaagcgaaaggcaccgcaacaacgcccagcgagcgaagacacggaccagggcaga

SEQ ID NO: 140079 - RNA, 55 nt, Homo sapiens
caaaaacaaaacgaaccaggacggcaaacgcggccggagcccccccagacacacg

SEQ ID NO: 140080 - RNA, 84 nt, Homo sapiens
gcccccggagggcccacgcagcgccggacaaggcaccagggcaggggacggaggccaaacacgcagaggccgacgggagaggcc

SEQ ID NO: 140081 - RNA, 75 nt, Homo sapiens
gacacgacgacggaaggagcagaacaaacggccaagaagggccaccccacagacggaggggggaccccgcccagg

SEQ ID NO: 140082 - RNA, 87 nt, Homo sapiens
ccaaggaagccacggcagacacacaacccgacccgacgacgcaccacgacaaagaagagaaaacgcggcagagcaacaaacacagcc

SEQ ID NO: 140083 - RNA, 34 nt, Homo sapiens
gaggaagggcggcggaccgggaccgccagaccgg

SEQ ID NO: 140084 - RNA, 73 nt, Homo sapiens
cagcaacaagaggaccacccgccgaggaacaagcgcgagaaggaacaaaccaggagaaaccgaacagaagagg

SEQ ID NO: 140085 - RNA, 73 nt, Homo sapiens
cggagcgccaggacgggggaggagagacaagaagaagggaccgagccacccaccaaagccggagcagaagcag

SEQ ID NO: 140086 - RNA, 75 nt, Homo sapiens
aaacaagccaacccaggaggaaaaacggacagggggagaggcaaggaaacgacaagagaagaacacccaggaaaa

SEQ ID NO: 140087 - RNA, 74 nt, Homo sapiens
agggacgggagcgaggagacccgggccagccgccggaacccgaacgggcgggcggccgcggccgggccaggggc

SEQ ID NO: 140088 - RNA, 70 nt, Homo sapiens
gagagccgcgagcacgggcaaccccagggggccgccaaggccccgcagccgccaacccgacagcgccacc

SEQ ID NO: 140089 - RNA, 81 nt, Homo sapiens
ccaggcggcgcggacggggcggggggaaagcaggccaccccgccacagagcccccgccaagagcaggagcgccgcaggaac

SEQ ID NO: 140090 - RNA, 70 nt, Homo sapiens
gaaacagaaaggggcgccgcgggcagcgggcagagaacacaccgccggaagaggaaaagaaaaaacaaaa

SEQ ID NO: 140091 - RNA, 101 nt, Homo sapiens
ggggaagcggagggccaggaggaggacaggccagcaggagccgccgcccagggcagcaccagcacggcgaaagagcaagcgggcacaccgacggacgaaaa

SEQ ID NO: 140092 - RNA, 66 nt, Homo sapiens
cgccaaaaggcgagaaggaagaaacagccaaacaagaagaagagaagggacgaaccagaacaagcc

SEQ ID NO: 140093 - RNA, 52 nt, Homo sapiens
cagaagcagaacaaaagggggaaaagccagccagaacacagaacagaacaca

SEQ ID NO: 140094 - RNA, 60 nt, Homo sapiens
gcggaggaaacacccaggacacggccacaacaccaagagagccgaagaccggaaacccag

SEQ ID NO: 140095 - RNA, 79 nt, Homo sapiens
caaacaagacaccaccagcccaagaaagcaccgggcgaacagaaacagacgccgaaagaccagggacacagagagccac

SEQ ID NO: 140096 - RNA, 95 nt, Homo sapiens
gagcggccggacggaaagcgacaagggaggcgccgccagcggccgggaccgaacaggcgacccgggagagggcccaaggcgaagacacagcaacc

SEQ ID NO: 140097 - RNA, 84 nt, Homo sapiens
cgcagcacgggaggacaccgccgggaacgcgcggaggaacgaaaagcggaagagggagcacgaaccgcgcaggcgacaacagag

SEQ ID NO: 140098 - RNA, 86 nt, Homo sapiens
ggcccagagacagagaagagacaccggcaaagacacaaccaacagaacgagaaaggagagaaggcggagcaggcaggccgaaaggc

SEQ ID NO: 140099 - RNA, 76 nt, Homo sapiens
ccagccgcggcccgcccgcccagcccccaggcccgcggccgcgggagcaaaggcacaacaccacgcccaccaccaa

SEQ ID NO: 140100 - RNA, 72 nt, Homo sapiens
cgcgcaccggaagcaccagcgaggaaggaagagagaaccaacccgggccaagcaaaggaccgacaacagcca

SEQ ID NO: 140101 - RNA, 87 nt, Homo sapiens
ggagcagccagacacaaggaggacgacaccccacaacacagaagagaacccgaacacagcaggagcaagcgggggcaggagccaaag

SEQ ID NO: 140102 - RNA, 47 nt, Homo sapiens
acacaaccagagcgaggacgaccccccccaagacacaagacccacca

SEQ ID NO: 140103 - RNA, 78 nt, Homo sapiens
caacccaaaccaaacagcagggacagaagcgagcagcgcgcaaagagagaaggcgggaccaagaagaaagaaagaagg

SEQ ID NO: 140104 - RNA, 85 nt, Homo sapiens
gggggaggggagcccgcgcccgccgcgggagagaggacagcccagagcaagcacacggaggcccgggagccagaccgggagcccg

SEQ ID NO: 140105 - RNA, 92 nt, Homo sapiens
cgagaggccacagcaccaaaggaccccagccaggccacggggacaacaggcagcagcgcagcgcacagaggagaaaaagcaaagcaagcaca

SEQ ID NO: 140106 - RNA, 67 nt, Homo sapiens
ggcaggacccccagacagggcccaggggagaaggcaaccaaaggcaggacacaaaaacaaccgaaag

SEQ ID NO: 140107 - RNA, 76 nt, Homo sapiens
gccgccgcccgccgccaagagccccgcaggaggcaaagggaccccaagaaaccaaagggcaagagccgcagcccgg

SEQ ID NO: 140108 - RNA, 60 nt, Homo sapiens
gaaaggaagagccggaagaaccagaagcgccccagcaccgcgcaccaaggaagacacaag

SEQ ID NO: 140109 - RNA, 81 nt, Homo sapiens
ccacgccggcaagaagggggccaggccaccaaacacgacaggagggcaagaccgccgagcaggagcacgaaggggagaaaa

SEQ ID NO: 140110 - RNA, 79 nt, Homo sapiens
gaagcggcgccgggccaaggaccacgaaagagggaggcaaagacaaaagcgacagcacaaccgaagacagcagaagcac

SEQ ID NO: 140111 - RNA, 86 nt, Homo sapiens
cagacggcgcccagcaacacagaagccgacaaggcgcaagcgaaaacagaccgcgagcccagagggcgcccgcgccggcagaggag

SEQ ID NO: 140112 - RNA, 76 nt, Homo sapiens
agcaagacagccggcagaggcaagcaggggggcaaagcagagggcagggcgacaggagccaagggaaaacacacca

SEQ ID NO: 140113 - RNA, 78 nt, Homo sapiens
ggagcgccaggccgcaccgaaggaacacagaaacgccccgggccagccgccaaggccgcccagagccccagcacaaga

SEQ ID NO: 140114 - RNA, 44 nt, Homo sapiens
ggagaaccggagcggccaacggcaggagggccaagggcggagca

SEQ ID NO: 140115 - RNA, 77 nt, Homo sapiens
aacgaagaagcgggccacccacaaaaagacaaagaggcaccaaagcagcaccggccagggccgcgcgggccagaagg

SEQ ID NO: 140116 - RNA, 73 nt, Homo sapiens
agggcgcgggccaggacccgggaagcgagcaggccccaccccagggcccggcacagacacagaacaaaagcag

SEQ ID NO: 140117 - RNA, 87 nt, Homo sapiens
cggcaccggcccgcagaagccgcccaccaaggcggccccaagaaagaagccccggagacaagaaaagcggcacccaccgccgccacc

SEQ ID NO: 140118 - RNA, 74 nt, Homo sapiens
acacaccggcacgaaaaacccgcagcccagggcacccgaccgcccccccccaccgacgccccgagcgaaaaacg

SEQ ID NO: 140119 - RNA, 80 nt, Homo sapiens
ggaaagagaaaaagagcaccaccagggaccggcaaagaccagaacaccccagaagcagggcacacaaacaagcgaggcac

SEQ ID NO: 140120 - RNA, 73 nt, Homo sapiens
acggcggcggcgccggggcgagcggggccggggcgccgggccggccccccagaaaacaagccgacagaagaaa

SEQ ID NO: 140121 - RNA, 40 nt, Homo sapiens
agcggagcggcggaaaagcccccccaacagcaccaacgcg

SEQ ID NO: 140122 - RNA, 70 nt, Homo sapiens
gcaaacacaggaacccaacgagccaaagggcaccgagcaccgagaaaaagaaggagacaaagaaaccacc

SEQ ID NO: 140123 - RNA, 49 nt, Homo sapiens
aacccaccaggccaccgggcaaaacagagaacccccggcccagacagca

SEQ ID NO: 140124 - RNA, 59 nt, Homo sapiens
gagaggcagggagcggcgaggccgaagaagcccgccgcagcaagagagagcaaggagca

SEQ ID NO: 140125 - RNA, 71 nt, Homo sapiens
agcagggcagggaaaagcgccgggcggaccagcaggaaaccggagaagacacaccacagagcacccagagc

SEQ ID NO: 140126 - RNA, 70 nt, Homo sapiens
agcgaccaggggcgagagcgggcaccccccaaacgacgcagccacggagaggcaaaagcagaccggaaaa

SEQ ID NO: 140127 - RNA, 82 nt, Homo sapiens
gaacgcgcccaagggcggggacacgggccgcgcgaaaaagagagaacggacgagaccaacgcggaaaccagcaagaaaacca

SEQ ID NO: 140128 - RNA, 96 nt, Homo sapiens
gggcacggcccagcgccccccccggaagcgggccgacgccaccgccgagcccagaccggaacagacggggggccaacaaagaagcaggagaaccgg

SEQ ID NO: 140129 - RNA, 82 nt, Homo sapiens
cggccccgccggccgccggccgcgcggggggggacggcaaaacagaacagaaaggcggagaaaaaagagggggaaaagacca

SEQ ID NO: 140130 - RNA, 77 nt, Homo sapiens
gaaagcagagaaggagaagaagggaccagggaccaggccaagccaccaagaccaagagcgccacaacgacccacaag

SEQ ID NO: 140131 - RNA, 79 nt, Homo sapiens
caccgcgcgaccggcgggcccccgcccgggcccccgaagaggcggcgccagacagaaagcgccagagcaggcgaggaca

SEQ ID NO: 140132 - RNA, 85 nt, Homo sapiens
ccaccgcaccacgggcccaccaccgcacccgccagcgagcccgggcacccgcggaccaggcaaagcgaaggcggagcaggagaaa

SEQ ID NO: 140133 - RNA, 76 nt, Homo sapiens
aacaagaaggacacagggcggaaaaaaaagagagaagggagaccgagccaggccaggagagaagaaccgcagacca

SEQ ID NO: 140134 - RNA, 95 nt, Homo sapiens
cgaggcgcgaacagacggacgcaccggcgagcgccgaggggacaggccgagcgcggggcgccggaggcaggcgcgcccgggacgacggcgcggcg

SEQ ID NO: 140135 - RNA, 111 nt, Homo sapiens
ccggagcgcgaaggccgggacccggccccggcccacaggggggggcaaacccgagagaacggcgagacgacgggaccgaaggaccccgccagagacaaccgagcgccagga

SEQ ID NO: 140136 - RNA, 72 nt, Homo sapiens
ggaacaggcaccaagccggcggggcggagaccgcaacagaacagagagaccaaccggggcacaggcggcgag

SEQ ID NO: 140137 - RNA, 117 nt, Homo sapiens
ggccgggagcggccgagccagcggcggcccagcccgacgggccgccggggcgccccgcgcacggcgggcggaagaagcaagaaggcccccaaaagcaagagccgaagggccccaggc

SEQ ID NO: 140138 - RNA, 87 nt, Homo sapiens
gagcaagaggaggacaggagagaagaagaagaaaccggagaaggaacagaccccggaggagggcggcacccaccccccgagcccgcc

SEQ ID NO: 140139 - RNA, 80 nt, Homo sapiens
gccaaagaagaaccgaacccgaacaccagggaccaagaaaggcccagggaccaaagcccggacaaggcccgagcaccagg

SEQ ID NO: 140140 - RNA, 71 nt, Homo sapiens
ccgggcgcacccccagggaccagcaaggacacccagagacgacggaggaacgggagggagggggggaacgg

SEQ ID NO: 140141 - RNA, 82 nt, Homo sapiens
cgaggaagcaaaaagcagcggccagccgacaggggagccgccaccaaaagcagacggaaaacccacggggaagaccacaccc

SEQ ID NO: 140142 - RNA, 71 nt, Homo sapiens
gccccgagcgaggacacagcccgcggaggcagcgggaaacacaaagaagacaccagaagggccagcaccac

SEQ ID NO: 140143 - RNA, 76 nt, Homo sapiens
cgggcggaagcgcggaaaggcaacgcgcggggagggcgggcccggaggacgagcgacacacagacagccccacccg

SEQ ID NO: 140144 - RNA, 73 nt, Homo sapiens
gaaaaaacccagaacacgggagaaaaaggaaaacgcggaaaaccgacacaacagagcaagaagcccgaacgcc

SEQ ID NO: 140145 - RNA, 75 nt, Homo sapiens
cccagcaacggagagagggacccccaagcccagggcgaacagggaccggaagagacggaaagagaggaggcaagg

SEQ ID NO: 140146 - RNA, 77 nt, Homo sapiens
ccaccgccagaagcggcaagacccaaagggcagcggcgcccggacgagagccagcaccggagggcgcgcccacgcac

SEQ ID NO: 140147 - RNA, 81 nt, Homo sapiens
cacgggacgcgacgcgccccgcccccccgccggcccccccacggaaggggcggccggggccgggccggggcacggcagagg

SEQ ID NO: 140148 - RNA, 71 nt, Homo sapiens
cgccgccgccgcacaaggcagcccacagcaagcacgccgacacaaagggaccgccaggcaccccccaaacc

SEQ ID NO: 140149 - RNA, 36 nt, Homo sapiens
ccgagaagggcagcaaagccggagcccgacccaggg

SEQ ID NO: 140150 - RNA, 81 nt, Homo sapiens
caaccccagaaccccacggcagggggagcacggcggaagcccagaaacgggggagcaacaaaccccagggccggcaagggg

SEQ ID NO: 140151 - RNA, 90 nt, Homo sapiens
aaagcgcaggggcagggcgggaaggaagaccggcgcggggcacaggaccggagcggagcccccagggacccggcaaagagagaggcacac

SEQ ID NO: 140152 - RNA, 69 nt, Homo sapiens
ggacaacagacagagcagcgaagcaccgagagggaccagcgcccgagcccaacacgcagcgaaccacca

SEQ ID NO: 140153 - RNA, 76 nt, Homo sapiens
gggcagagggaccaccgacaggacccaaagacaggaccacgcaccagcagagaaggaaagcaaaccgaagcaggcg

SEQ ID NO: 140154 - RNA, 78 nt, Homo sapiens
ggaaccgaagcggccaggaaggcagcgcacgagccccggaacagagcgagagacacggggacagaagacccacgccga

SEQ ID NO: 140155 - RNA, 76 nt, Homo sapiens
cacagcacacggagcgcgccggccccacgggaaacaaaggccaaccgccaggaaggaagagggacaaggaaaggag

SEQ ID NO: 140156 - RNA, 76 nt, Homo sapiens
ggagccggggacggagcagcgcgcgggggcgagcggcagggcagcggggaagaagaaaaggaaccgaggccccccg

SEQ ID NO: 140157 - RNA, 84 nt, Homo sapiens
cggagccgcgcgcgacgcccagagccgcgaaccccgcccgagcccgccggaccccccgacccagagagaacgacacacgccgac

SEQ ID NO: 140158 - RNA, 68 nt, Homo sapiens
agcagggcaaacgaggacaacaagaccggagaaaaagagaggcgccgccaggccgggacagggggggc

SEQ ID NO: 140159 - RNA, 75 nt, Homo sapiens
gagaaacaagcaccgggggaccccccggcccgcagcaggaggcaaggaggccacggggccgaagacaccaaccgg

SEQ ID NO: 140160 - RNA, 72 nt, Homo sapiens
ccagcgcccaaacgcgaggggaacgcaggaaacaacgggaagacacggagaaaaacggccagagacaccaaa

SEQ ID NO: 140161 - RNA, 73 nt, Homo sapiens
aacccgaggacacggaacgccaaacaaggaaaccccgggggggaccgaaaaccagaaggaagaaccgccaaaa

SEQ ID NO: 140162 - RNA, 66 nt, Homo sapiens
ggaccagagacgaagaccacgccggccgcgaccaaggaagcaagggcccggccagaaagacaggag

SEQ ID NO: 140163 - RNA, 78 nt, Homo sapiens
gcgcgcagaccaggaacaagagagaaagagggacagccgcacggaggcgaaacacaaaggggccccagggcaaagagc

SEQ ID NO: 140164 - RNA, 70 nt, Homo sapiens
accccgcacacgaagagacgccgggcaccccaacacccggcaaggaaaacgcaaaagaggaccagacgga

SEQ ID NO: 140165 - RNA, 84 nt, Homo sapiens
gcggcgcacaagcaggccggcacagccgcggagcggacccagcaagacgagcccccgaggaaagcacgcacaacgaggaaaaga

SEQ ID NO: 140166 - RNA, 69 nt, Homo sapiens
aaagccaccgcgaaaccccggagcgacgcagcgccggagaagcgggagcacccacgggagaccgggggg

SEQ ID NO: 140167 - RNA, 77 nt, Homo sapiens
agagcggacgacagaacccggccgacccggaccaacaaccccaaggcagagaccacaagaaccaggagagacccaga

SEQ ID NO: 140168 - RNA, 68 nt, Homo sapiens
gcagagagccaacagcgaaaggcagagcagaaagcgccgcggaacggcaaacagccaaaggagagcgg

SEQ ID NO: 140169 - RNA, 79 nt, Homo sapiens
gaagcacaagggggcccgcacaccagcccccaagcccccaggcacccaggagacaagcaaggagaggagccaagcccaa

SEQ ID NO: 140170 - RNA, 61 nt, Homo sapiens
gccgagcaacaccccggccaccgacccacaaggggccggagaagaccggcaccgcaccacg

SEQ ID NO: 140171 - RNA, 66 nt, Homo sapiens
cggaaggcacagggagccaaaaccaaaaacgcagaaaacagcacgagagaaaaccaggccgaggag

SEQ ID NO: 140172 - RNA, 83 nt, Homo sapiens
cgggacgcgcccccggggccggcggccgaccgagaacgcagcaccacgcccgaagcggaggacccggcccagccgggcaggcc

SEQ ID NO: 140173 - RNA, 60 nt, Homo sapiens
ggaaaccgagaccggcggagagaaagaacacgagccccccaccaggaaccacgccccgag

SEQ ID NO: 140174 - RNA, 82 nt, Homo sapiens
gcacagggacaccggggcgacgggagaccgaaggaagaaaccgggcaacggaccgagagaggaggaccccgcccaaagagca

SEQ ID NO: 140175 - RNA, 77 nt, Homo sapiens
aaacgggcagcaagaccgcccacccgcggggccgggagaggaaggccccaagcagccagcagaaaagcaaccagacc

SEQ ID NO: 140176 - RNA, 72 nt, Homo sapiens
cgaacccaaagacaaccaacagccagcaaagacaagagcagaccagcagccgcagcgcgacagccaaaaacg

SEQ ID NO: 140177 - RNA, 79 nt, Homo sapiens
gcaaccagagcagagaccaaagcgccccagcgcacgggcaaggcgcccaaaacaagcgaaggaacaaggggagaagaag

SEQ ID NO: 140178 - RNA, 96 nt, Homo sapiens
gaacaggcgggggacaggcaccgacaccaccagaagcgcagggcaagccacagagccagagcgacaccagaagcggagagagaggccggacgccgc

SEQ ID NO: 140179 - RNA, 69 nt, Homo sapiens
aggggaaccccggagaaaaggccaagaaggcagggggggccgcccgcccaaggcaggaagaggggccgc

SEQ ID NO: 140180 - RNA, 81 nt, Homo sapiens
gcagggacccaaggggggagcgggaacacccaaaagcgagcgcaaggaggcaggacaggcgcgggaggagcgcaggacgag

SEQ ID NO: 140181 - RNA, 83 nt, Homo sapiens
agaccccccagcccacaaagccaacaggagacagaccaaggccggaagcgcagcaggacgagcagccccagccagacgacaca

SEQ ID NO: 140182 - RNA, 102 nt, Homo sapiens
ccgcaaggcgaggcccgcgccccgagcgcaggcagcggccggggcccggccagggcgacggcccggagcccggcgggcaggaaacccgagaggagcaggagc

SEQ ID NO: 140183 - RNA, 80 nt, Homo sapiens
ggccgcggaggcgccgcaaaaccgaacagagcagcccgacggccaggaggcgaagagacgaggaagcccaggagcccgaa

SEQ ID NO: 140184 - RNA, 72 nt, Homo sapiens
gaacccacgccaaagaggaagcccaccacaaaaacgaaggcggcgggcaccaaccagcggacacacggaaaa

SEQ ID NO: 140185 - RNA, 76 nt, Homo sapiens
cccgcaagacccgagaagaaacgccccaacaggagacaccgccggagaggcaggaggggcggcaaagggaggcaaa

SEQ ID NO: 140186 - RNA, 70 nt, Homo sapiens
aacacccagcaaaagaaacgagccaacagcaccacaagcgaaaagcagaaaagacacaagagggccacaa

SEQ ID NO: 140187 - RNA, 70 nt, Homo sapiens
caagcccacagagggaaagaagaggccccagcacacggccccagcagaacacccacaccccccgaacaag

SEQ ID NO: 140188 - RNA, 81 nt, Homo sapiens
cgggggggaggagccccagccaccaagaacccgccgagggccgggaaccgcagagaagagcaggggggccaggagaaggag

SEQ ID NO: 140189 - RNA, 75 nt, Homo sapiens
gaaacacaccaaccacaggcagcagaaagcccagggaccgggaacagcagcgccgcaggcgccaaaaggaaacac

SEQ ID NO: 140190 - RNA, 75 nt, Homo sapiens
acagaccagacagaagcacagggagcaacacgcacacgaaacccacgacccaaacagagcgcgcacccaggcgga

SEQ ID NO: 140191 - RNA, 82 nt, Homo sapiens
gcaggggggcaacagccagccagccagcgccccgcacccacgaccagggcgacgccccgaaagcccgccccagaagcccaca

SEQ ID NO: 140192 - RNA, 76 nt, Homo sapiens
cgccaccgaacagacccggaaggacggcgaggccgcagaaacaacaacgagacaaaaagccaagcaaaaaagcagc

SEQ ID NO: 140193 - RNA, 72 nt, Homo sapiens
cggacaaagaaggacagggaaaaccgacgaccggaagaggccaggaccgggccaagagcacacgggacccca

SEQ ID NO: 140194 - RNA, 37 nt, Homo sapiens
gcccgcggaggagcgcccgggagagaccggagcagcg

SEQ ID NO: 140195 - RNA, 78 nt, Homo sapiens
agcagcagcagggaaccggaaggggaacaggcgcaacaaagcccccacaccagacagccaacccaaaagggaaggccc

SEQ ID NO: 140196 - RNA, 80 nt, Homo sapiens
cgaagagcgacaagccgcggcagccgcggaccaccgccgccagggagcaacgcacgaaaacgcacgaggagcacagaaac

SEQ ID NO: 140197 - RNA, 80 nt, Homo sapiens
gagagccgaggcaggaccccgggacacccggaagccaggaaagaggcaaggaagaggcacagaaaagaacaaaccagcca

SEQ ID NO: 140198 - RNA, 74 nt, Homo sapiens
agcacagcaagagccaggaccaccggaagccagaaaggccgggcaaaagacaggagaagaaggagaggcaccag

SEQ ID NO: 140199 - RNA, 81 nt, Homo sapiens
gggcccccgccacggcagagcgcgggcgcagaagggccccgcccagagcaccacccgagacacaggagcccacggggcagg

SEQ ID NO: 140200 - RNA, 67 nt, Homo sapiens
acagagcaggcgcgccaacacaagagaaacaccaaacaaggggcaaagaaaaaggagagaaaaagag

SEQ ID NO: 140201 - RNA, 66 nt, Homo sapiens
ccgagaccgcggccgggaccgaggacaacaggcggcccgggcggagggacacggaggggccggaag

SEQ ID NO: 140202 - RNA, 82 nt, Homo sapiens
ggcaacccccacaggcgcacaggaaacagaacccaggagaaggagaaaaagagccccaggccgagaaaggaaaagcacgcag

SEQ ID NO: 140203 - RNA, 79 nt, Homo sapiens
cccccagggagggaacaaagcccacaagcaccgccagccagccggaccacggaggcaggaggacaggaagaacgaaagg

SEQ ID NO: 140204 - RNA, 64 nt, Homo sapiens
cagggaccgcccgaccagggacagagcgggagccaccagcgccaaagggaagccaggagcccgg

SEQ ID NO: 140205 - RNA, 84 nt, Homo sapiens
ccccgagaggcagacccaggccagcgacacagaacaggcagccagcacagcagcaaccagcagcagcaaggcagcaccgaagac

SEQ ID NO: 140206 - RNA, 38 nt, Homo sapiens
ggaagcacaaccccgagcacgacagcaacgagccgagg

SEQ ID NO: 140207 - RNA, 75 nt, Homo sapiens
ccccccgggggcagagggcagcaagaggcgcgcagagggcgcaggaaaaagaaccgccaagagagaaaaaaacag

SEQ ID NO: 140208 - RNA, 79 nt, Homo sapiens
aggagacacgcgcaaaagaacaccgcgaaaaggaggggagccgccaccaaaagcagacggaaaacccacggggaagacc

SEQ ID NO: 140209 - RNA, 90 nt, Homo sapiens
cgggcgcacccgccccggcgccgccggcccgcgggaccgacagccgggcagagcccgggcgcgccaggcacagccaagagcggaccggca

SEQ ID NO: 140210 - RNA, 80 nt, Homo sapiens
ggacagagaggcaagcgcagggggacggggaccagcagcgcgccgccgcccaggcccgaagacccaaggaacacacggac

SEQ ID NO: 140211 - RNA, 108 nt, Homo sapiens
aggaggaacccagaacagggccgggcggcccaagggaaaagcagcggccgcaagggaccaagaaaggcccagggaccaaagcccggacaaggcccgagcaccaggacc

SEQ ID NO: 140212 - RNA, 79 nt, Homo sapiens
cacacgggagagaaggaccaagaaaggcccagggaccaaagcccggacaaggcccgagcaccaggaccgcagaaggccc

SEQ ID NO: 140213 - RNA, 80 nt, Homo sapiens
cacggggccaccgccggcggccgcaggagcgacccacagacaggcgagcaccacgccgaaaaacgggagaacgccaaaaa

SEQ ID NO: 140214 - RNA, 62 nt, Homo sapiens
cacgagaccccccgcgagagcgcaaacacccccagacaaagggcggagaacggaaaagcacc

SEQ ID NO: 140215 - RNA, 90 nt, Homo sapiens
gcggggacgaggggacacaagacggcgaggagaagacacaaggggcccgcgagcaccggaagcccggggcggcgacggagcacgacccaa

SEQ ID NO: 140216 - RNA, 74 nt, Homo sapiens
gccccagaaacagcaacaaacacgaaaacgggaagacccaccgccagcccaccacgccgcacagagaccaagga

SEQ ID NO: 140217 - RNA, 82 nt, Homo sapiens
ccggcagcccgaccaccacaggccccaagccagaagaaacaaccgccaccggggagcgaacacagacccaggaaccgaggac

SEQ ID NO: 140218 - RNA, 72 nt, Homo sapiens
gagaaaccaaagggaacgggggagagaagccacaaagcaagcagggcgaagccgacgagcccgaacagacgc

SEQ ID NO: 140219 - RNA, 69 nt, Homo sapiens
cagaacacagaaggcccgcccccaaaccaccaggcaggaaggccgcgggcccggggacccacacccgcg

SEQ ID NO: 140220 - RNA, 60 nt, Homo sapiens
cgagcagcgcagcgaccggggaccggagcgacgccaaaagggcaagcagaaaccgggaag

SEQ ID NO: 140221 - RNA, 71 nt, Homo sapiens
ccggccccgcacgccacccgcccacccagagaggcccgccgccaggccagagcaacaagaaacaaagccag

SEQ ID NO: 140222 - RNA, 68 nt, Homo sapiens
gggacccacaggcggagaagagggggggacccgaagcccgcgagaaggaggcgcaaaaaagaccagaa

SEQ ID NO: 140223 - RNA, 76 nt, Homo sapiens
ggaagaaagagcagaggaaagaaaagaaacaccgaaccgccacccaggcccaagaaggaaaaccagcgccccacag

SEQ ID NO: 140224 - RNA, 93 nt, Homo sapiens
aagagccgggagacggagcacggcgccgcggcaagagccaggaagagccagcagacaccggcggcccgagggcacccagagcacggccacacc

SEQ ID NO: 140225 - RNA, 53 nt, Homo sapiens
cggagaggccggggggccaggcccaccgccacggacccaaagacaggaccacg

SEQ ID NO: 140226 - RNA, 68 nt, Homo sapiens
ccggagcagaacccccgcagagaaagaggcagaggaggggacacggggacgcccggcggcccgcagag

SEQ ID NO: 140227 - RNA, 71 nt, Homo sapiens
gagcaagggggggccacaaagccagcagcccaggcaaacaccacagggcggaaagaggaaaacagacacga

SEQ ID NO: 140228 - RNA, 83 nt, Homo sapiens
cgggaaggggcgacggccggcccgaggggccagcgcccacccaagcgcgaccccgggaaggaggggcaaccacccagaggcag

SEQ ID NO: 140229 - RNA, 72 nt, Homo sapiens
gaagaagaaaaggcgcccagaaggcaaagccaggcacgcccaccggacccaggcaacgcagagcagaacgga

SEQ ID NO: 140230 - RNA, 45 nt, Homo sapiens
aaacacaggagccggagcagaagcaaagaggggggagaaaaggcc

SEQ ID NO: 140231 - RNA, 73 nt, Homo sapiens
agcaacgggagagagaagcagccacccaagaacaccaccacggaacgagggccccaaccaagacgacagaccc

SEQ ID NO: 140232 - RNA, 86 nt, Homo sapiens
cgacccggagcccgagccgggagagggagccgccgcagccgccggcgcgggaggccaagggagccaaggaggcgcagccaagacag

SEQ ID NO: 140233 - RNA, 81 nt, Homo sapiens
aaagagcgaaaaagacacgccggggaacacggaagggagcgcagagcaaaccaggcagaaggccagaacgaacagcccagg

SEQ ID NO: 140234 - RNA, 79 nt, Homo sapiens
ccagcccaccagccgcaccaaggagacaggacgaagcccaaaccacaagccacaaaagggccaccacgacgacaaaggg

SEQ ID NO: 140235 - RNA, 33 nt, Homo sapiens
ggaagcaaagccagcaagcaggcaggcggaacc

SEQ ID NO: 140236 - RNA, 70 nt, Homo sapiens
acgcaaacaagagaacgggcccacacaacccaggcaaccaacagagagcaaacggaagaacagaaggccc

SEQ ID NO: 140237 - RNA, 78 nt, Homo sapiens
ggcgcgccgggagaccgcggaggccgacaggacgggcgccgccccgcgcggcaggaaaagagcaccggccagcagaac

SEQ ID NO: 140238 - RNA, 73 nt, Homo sapiens
accgcgcgaaagcaaccagaaaagagacccggcagacaagacgccggcaagaggcggggccggggagcccggg

SEQ ID NO: 140239 - RNA, 67 nt, Homo sapiens
gcccaggggggaggcgccccagggacgagaggaagaccgaaggacaaggaagcacgaacaggcagaa

SEQ ID NO: 140240 - RNA, 57 nt, Homo sapiens
gcaaggagacccgccaaagccgccgggcaaggacgaacgcgccgagaggagaaggag

SEQ ID NO: 140241 - RNA, 82 nt, Homo sapiens
aagaaaaggcgacgaaaggcaagaagacaccaggaaaacaagaaaggcagacccggcaccacagggaaaacggggcaagccc

SEQ ID NO: 140242 - RNA, 67 nt, Homo sapiens
caggagaaggcaaccagcaacagaacgaacagccagcgaagcaagacacgcaaggaagagacagagg

SEQ ID NO: 140243 - RNA, 56 nt, Homo sapiens
gcacggaccggcgacaaggcaaaagggagaccacaacagccaccaaacagaagaac

SEQ ID NO: 140244 - RNA, 58 nt, Homo sapiens
ccggggaggaagggcggcggaccggggacccaagggagagagggaacggcgaaagggc

SEQ ID NO: 140245 - RNA, 77 nt, Homo sapiens
gaggaggcggcgggagcggcaggcgccgacccgaaggccgccgccgggcgagacaacggcaagcggagaagagcaag

SEQ ID NO: 140246 - RNA, 71 nt, Homo sapiens
ggcgcagggcggaaggacaacagcccgacaaccagacccgacagaagcaaggggagacaggcgcccgccgc

SEQ ID NO: 140247 - RNA, 78 nt, Homo sapiens
ggcaccaggaagcgaaggcgacgaaaacaccgacagaaaaaaaagccagggaaggaggagaggcgccacgcaagcaga

SEQ ID NO: 140248 - RNA, 86 nt, Homo sapiens
ccgggaagaggcgccagcggcaagagcgaggcagcggggcgcgagcacagacagaggagcccaaaggcgaaggggagcaagggaga

SEQ ID NO: 140249 - RNA, 82 nt, Homo sapiens
agacggcagcacgccggcccagaggccagaccaacaagcaacaaaccacagcaccgggaagccagcagcggcagagggcggg

SEQ ID NO: 140250 - RNA, 79 nt, Homo sapiens
cccaagacggcacaaaggcggacacgaaaccaccgggaagcgccggggaacgcaggggacccccaaaagacaagggcaa

SEQ ID NO: 140251 - RNA, 80 nt, Homo sapiens
ggggacccagacccggagcccagggaagcagccgaccagccgcggagccgggggcaggggggcgcacacgcagaaagaac

SEQ ID NO: 140252 - RNA, 84 nt, Homo sapiens
cagggagggcggagcagcccggcggcggcggccgaaccaaccgagcggaccgacccaaaaccagaagacacagaaaagaacccc

SEQ ID NO: 140253 - RNA, 77 nt, Homo sapiens
gggagggggacacacaaccgcccagccggcgagggacgccgcaggggagccgccaccaaaagcagacggaaaaccca

SEQ ID NO: 140254 - RNA, 73 nt, Homo sapiens
agaaacggggacacgccgagagacccaagaaacaggacccgagccccaaagacagaaaagccccgagacggaa

SEQ ID NO: 140255 - RNA, 98 nt, Homo sapiens
agaagaagcaggagaacgaaacggagccagagaaggcagaagcccggaccgacaggaaagaaggagcccacaaagaaaagaacaccgccagcagccag

SEQ ID NO: 140256 - RNA, 73 nt, Homo sapiens
ccccgacagcgaagacccgaaacaggacagggacaagcgcacagcggagaaagcagcgcggccaggaggcggg

SEQ ID NO: 140257 - RNA, 76 nt, Homo sapiens
aacaaaaagcccgagcccaaaccccgccaccacaagccgagggaaaaaagaagaaacggaaaggaaggcacccggg

SEQ ID NO: 140258 - RNA, 62 nt, Homo sapiens
agcagcgcaggcaaaaaacaggaacgaaagagaaccagagcaccccaggaagaaacagacca

SEQ ID NO: 140259 - RNA, 36 nt, Homo sapiens
cccccacgcaagccaggaaccgcacaccaaggcagg

SEQ ID NO: 140260 - RNA, 81 nt, Homo sapiens
cccggccgaccaagccagcacgggccgcaagagccaaagaaacaaccggggccgcaggacaagaagaacagaggggacaga

SEQ ID NO: 140261 - RNA, 70 nt, Homo sapiens
ggcgagcgcccccgccagggccgaccaggagggacaaggcacacgcgggacggagcccggacccagacca

SEQ ID NO: 140262 - RNA, 67 nt, Homo sapiens
ccgagaacccgggcggcgcagcagaaccggccgcccagccaggagaaccgagacagggaacagcaaa

SEQ ID NO: 140263 - RNA, 72 nt, Homo sapiens
cccgagggcgggacacagggagcccacaggagacaaaagccaaaagaaccaccgagcagcaagagaaagaga

SEQ ID NO: 140264 - RNA, 65 nt, Homo sapiens
ggagccggagcgggcgcggacgccgaggcaccgaggcaccagaggagcacaacaacagcaacgga

SEQ ID NO: 140265 - RNA, 55 nt, Homo sapiens
ggcagcgggccagacccaggaccgcgacacgagaagacagaggagccagaccaag

SEQ ID NO: 140266 - RNA, 79 nt, Homo sapiens
gccccgcagacggcgggggcacgacagcgcaaggaggccgcacccaaggccgcagacaaggccacaggccaacgacaac

SEQ ID NO: 140267 - RNA, 73 nt, Homo sapiens
aagaagaggaagcaaagcgacaggaaggcaagaacaaaggcaccaaaggagccaaggagacagcgaacccaca

SEQ ID NO: 140268 - RNA, 60 nt, Homo sapiens
acgggcaacagagcaggaccagggcggaacgcacccaggagaaagaaggccagaaaaagg

SEQ ID NO: 140269 - RNA, 76 nt, Homo sapiens
ggcggcgcaccgggcggcagggccggcccagggagaacgcaaaaccaccacccccacaaaaaacgcagggagaaaa

SEQ ID NO: 140270 - RNA, 72 nt, Homo sapiens
agccgggcccagaggaccggccggcacgccgcccggggccagacccccgaaagaggcaggcaagcgagaagg

SEQ ID NO: 140271 - RNA, 73 nt, Homo sapiens
aacagagaacgacgggggaagcagcagccaggaagcagcagcggagaaacaggaggcacccgagcagagcaca

SEQ ID NO: 140272 - RNA, 67 nt, Homo sapiens
gaacaagaggggacagaaagaagaaaaagcagcacgaaggcgaggaaccagcagacaaaaaagaaga

SEQ ID NO: 140273 - RNA, 77 nt, Homo sapiens
gaggagacaccccgggggccccgagcaaaccaggaaaaaggcacaaacccagcacagagaagacggcgacaagcaaa

SEQ ID NO: 140274 - RNA, 56 nt, Homo sapiens
accgggaccagcgagcgacaggcagaaaggaaacccacgccacaacaaagaccaac

SEQ ID NO: 140275 - RNA, 78 nt, Homo sapiens
cccaaacgcaaaagccgccccaagaaaaggggaccggaagaagaaccaagaagacaacaacgaaaccggaggcgcacg

SEQ ID NO: 140276 - RNA, 67 nt, Homo sapiens
ccgggggccaggcaccagggacgggacgggaagcagcccaggggagccacaaggaccaccggacgaa

SEQ ID NO: 140277 - RNA, 51 nt, Homo sapiens
cggcgcgccccggccggagggagagggagagcgaacagagacgacccacgc

SEQ ID NO: 140278 - RNA, 84 nt, Homo sapiens
cgggcagaagcgaagcgggacagaacagccaccaaaacagaagacaccgccagcgcagcgaagaacgacgccgacgggaaaacc

SEQ ID NO: 140279 - RNA, 81 nt, Homo sapiens
agacaggacaccaaacaccgccgccgggcgcccaccaacccgaggagagcggcagggacagccgcccaggacagcgagggc

SEQ ID NO: 140280 - RNA, 77 nt, Homo sapiens
acgaccagcccaggcacccaaaggcccggagcgccgggagagggggaggggacccaggagagccagaccgaccaagc

SEQ ID NO: 140281 - RNA, 81 nt, Homo sapiens
cggacccgccccgggacagcgaggagcgagggacccggccaaccgccccccagcagcaggcacgggcgaaccccgagcccc

SEQ ID NO: 140282 - RNA, 77 nt, Homo sapiens
ggagcggggagggggacacacaaccgcccagccggcgagggacgccgcagggagcagaggaagcgcggaaaagggcc

SEQ ID NO: 140283 - RNA, 79 nt, Homo sapiens
gagaaggggaggaagaggaggaggaagccgagggcgaggaggacccaccaacaggacacggcccccgcacggcaagccg

SEQ ID NO: 140284 - RNA, 75 nt, Homo sapiens
gcgacggggagaaggaaacccaaccggagcacgaccgcacaggcaaaggaaggcgaacacaaagagaaggaccgg

SEQ ID NO: 140285 - RNA, 74 nt, Homo sapiens
aaccaggaaaaggcaccgggagagggaaacaaggcagcgggaagcacaggccaacccagcacagacgaccaccg

SEQ ID NO: 140286 - RNA, 78 nt, Homo sapiens
ggaccagcaggaacaacgcccagggcccgacggaaaagaccagccgaggacggcgccccgaacaccaaaagggaagac

SEQ ID NO: 140287 - RNA, 86 nt, Homo sapiens
cagaggaacgagcgagcggcagagcggacaagcagaagcaagcaaacgcacgaggaggcaaggaccgcgcacccggcagagaagcg

SEQ ID NO: 140288 - RNA, 61 nt, Homo sapiens
agcgccagcccgcacgccaggcgcaaccccgggcaggccccagcgagacgggcagaagcgg

SEQ ID NO: 140289 - RNA, 116 nt, Homo sapiens
ccccccgacgccccgccgccgccgaggaggcgagcagccgggagacaccgccaccgccaggggagaaccacgagagcgcagccaaaaaccacgccgaggacaggggggaaccagag

SEQ ID NO: 140290 - RNA, 80 nt, Homo sapiens
aaggacaccgcaggcggggccccagcgaggagggccaacccagcggcaagcccggaacagccgcagcagggggacgggac

SEQ ID NO: 140291 - RNA, 86 nt, Homo sapiens
gcaaagagcgccggcgcggcgcggccgggccgcgccccccggcgggccggacggcgcccgagccggaaaagcgaggacgcccggga

SEQ ID NO: 140292 - RNA, 98 nt, Homo sapiens
cgcggagcggcgccgcgagcccaccgccagcgccagagcgagcgccccgcccagggcccaacgcgcaggccacgggccggcggggaaacccaggcgaa

SEQ ID NO: 140293 - RNA, 81 nt, Homo sapiens
cgccccgagacaagggagaccacccccacccccggagccaaaaacagagcacaggccacgagccagggcgcagccacgccg

SEQ ID NO: 140294 - RNA, 112 nt, Homo sapiens
gcacgaggggcgaaccacggaaaggaggaagaagacaccggggacagacaggaagcgcaaaccccccaagacgagcacggaaggcgacggcccccagggagccgaccacccc

SEQ ID NO: 140295 - RNA, 79 nt, Homo sapiens
gagggcccggcgaggagaaccaacggcccgaaagaggcccgaaaagaaagcgaacacacaaaacaagaaaaggcacgca

SEQ ID NO: 140296 - RNA, 77 nt, Homo sapiens
gaagcagcagaggacgcggccaggcgacgggaagcgaccgcaggcgggcccccgaccggaacacaacagcgagcaac

SEQ ID NO: 140297 - RNA, 72 nt, Homo sapiens
gagagcagcgagaaaccagaaaacacggaacaaaggaacagaggcacccaccacacgcaagaagggaaccga

SEQ ID NO: 140298 - RNA, 52 nt, Homo sapiens
gggggaggagagggaaggcgcggagacacaagcccaggggcgacgcggagca

SEQ ID NO: 140299 - RNA, 80 nt, Homo sapiens
ccggaccaggaagcggacgcgggacggaagcacacgcggcgcgaaacaaacaaacggcggacaaaagggagcggcgggca

SEQ ID NO: 140300 - RNA, 65 nt, Homo sapiens
caaaggggccagagccgccaccagaagccaagcaccaaaggaacagggagagaaggcagaaaaag

SEQ ID NO: 140301 - RNA, 79 nt, Homo sapiens
gcgcgcccaccccgccgggacacgcagaccccaccaagaggcggagcgacccggcccaaggacccaacgccacccaggg

SEQ ID NO: 140302 - RNA, 77 nt, Homo sapiens
ccccggcggagacaacagcaggggcagcgggccgcaggggcgcgcagcgcggggagcgccagggagagaagaagggc

SEQ ID NO: 140303 - RNA, 83 nt, Homo sapiens
gaggcacaggaagaccccaccccgaaacggaggaagaacgccgccaccagccaccaccaagagcaggaaagccaaccaaccac

SEQ ID NO: 140304 - RNA, 69 nt, Homo sapiens
gcccagggcccggccgacccgcggcccggggaacacagcaagaccccggggaggcccaaggaacccaca

SEQ ID NO: 140305 - RNA, 88 nt, Homo sapiens
agagcgagggaggcgcgagggcgcggagccaggcgagcagaggccgcgagcgacgcggcgccgagccgcccggagcgagagcgagaga

SEQ ID NO: 140306 - RNA, 104 nt, Homo sapiens
aacaaaaggagagcgccaaaccaacgagagggaggaacagcaccaaaaggcgacggcggagacagaagagaggagagcccacaaacggcaacagccagggacag

SEQ ID NO: 140307 - RNA, 78 nt, Homo sapiens
gccgcgcccaagcgcaggggccccgggccagggagagggcaaaaaacacagacaccggcgaacaacaagaaccgggga

SEQ ID NO: 140308 - RNA, 82 nt, Homo sapiens
gagccggagcgcgaaggccgggacccggccccggcccacaggggggggcaaacccgagagaacggacagacaagagaagaga

SEQ ID NO: 140309 - RNA, 84 nt, Homo sapiens
ggagcagacccccaggcccggccgggccaagacaccagcagccgcaacggcacacacgcccgccaccaccccagccgggccccg

SEQ ID NO: 140310 - RNA, 78 nt, Homo sapiens
accggacgacgggaccacagcggaccaccacccggggacacccggagccgacaggaggaagaggaggaggcgccgaag

SEQ ID NO: 140311 - RNA, 45 nt, Homo sapiens
ccggcagccgggaagacaagacaggaggacacccgaaacaagggg

SEQ ID NO: 140312 - RNA, 51 nt, Homo sapiens
gaacaagggagggggacagaccaaagaggagagcgcgcacaccgaaccaga

SEQ ID NO: 140313 - RNA, 86 nt, Homo sapiens
gcgcggggcggcgcgggcggaggcggcggagcgcgagagccgagcggaccagggcccgacccaggcaagcgagcaggcgagcagga

SEQ ID NO: 140314 - RNA, 68 nt, Homo sapiens
gcccgaggaggcagggcgagggggggaaacccgcccagggcgggagaccgccaagaaacaccacaagg

SEQ ID NO: 140315 - RNA, 92 nt, Homo sapiens
gccgccagggagcccccgcgcgcccggccggcccggagcaccgagccgcggcacggaggaggcgcgccacgccccgaggccgggccaggccg

SEQ ID NO: 140316 - RNA, 76 nt, Homo sapiens
caacgagaggccggagacaggagagaggcagcacggggaacaacgacacgcaccacaagagagaacagccaccccc

SEQ ID NO: 140317 - RNA, 42 nt, Homo sapiens
gcagcagcaccagcccaagagaaggacaggggacacagagca

SEQ ID NO: 140318 - RNA, 40 nt, Homo sapiens
acgagacccgagccagggcggaaccggcggcgggaccgaa

SEQ ID NO: 140319 - RNA, 83 nt, Homo sapiens
gccgcggaccaacagcccaggaggccgagcgcgggaaagcagcgcacgccgagaggagcgaagcccaacgcaggagcgaccgg

SEQ ID NO: 140320 - RNA, 81 nt, Homo sapiens
caggaagcaccaaagaaaacaccccaagaaggcaaaggggcgagagaagccccagcgaaaagcaaaggaaaccggaaagaa

SEQ ID NO: 140321 - RNA, 78 nt, Homo sapiens
ccaccgggagaagcggccgggccaaggggccacaaggccaacccacaaggagcacaggacggaaccggcagcacggga

SEQ ID NO: 140322 - RNA, 70 nt, Homo sapiens
gaaacaacacaaccagaagcggaaacaagcggaaaggacacagcgccacgcagagccccgccaggaagac

SEQ ID NO: 140323 - RNA, 53 nt, Homo sapiens
acaaagcaaacaacaaaacaccacagaacgaccaagcaaaagaagggaggggg

SEQ ID NO: 140324 - RNA, 79 nt, Homo sapiens
gcgaaaggaaaacaaggcaccaggaccaaaggccccagccaacccgaaaaccccccagcggccacagagagcacaaaga

SEQ ID NO: 140325 - RNA, 68 nt, Homo sapiens
ccgagaaccccacagcgaaggaaaaggacagaaaaagaagcgaagcgaaccccaggacgaccggcacg

SEQ ID NO: 140326 - RNA, 72 nt, Homo sapiens
gcggcccacagcaggacggaagcgagggcacgggcggcagcccgagaccgcagcaggcgggcgacaaacccc

SEQ ID NO: 140327 - RNA, 84 nt, Homo sapiens
ccccaaagcgaccgacccggacgagaaacgcaagagacggagcgcaagaggacggcagcgcggcgaagggaccgccgcacccaa

SEQ ID NO: 140328 - RNA, 81 nt, Homo sapiens
acgcggagcccaagaaacgggcagccaggcccccacagcccgcagcacaccgacagagaacccaggccaacacacagacag

SEQ ID NO: 140329 - RNA, 70 nt, Homo sapiens
gcagggcgccaaagcgagagagggaagcgcccggccggaggcaggggaaagggaccaggaggagaagcaa

SEQ ID NO: 140330 - RNA, 76 nt, Homo sapiens
acaggcgacgcgcacgacgacaccgaagaacggccgcgggcagcaggagaaacgagaagaaacagacgcgcgaggg

SEQ ID NO: 140331 - RNA, 80 nt, Homo sapiens
accgcggaggaggccaaggagcccgggagagggcacgcgcgcgacgcacgcagccacagcgccgcggccacgaccgggca

SEQ ID NO: 140332 - RNA, 68 nt, Homo sapiens
ccgaccgaagccgcaaaagaagggaggaaccgaaccagaaggcaaagcccaggcgacagaacccaaag

SEQ ID NO: 140333 - RNA, 85 nt, Homo sapiens
cgcccccgagggcccacgcgccgggcggccaccggcgccgcgccagcgcccgccgcgcggcgaacagccaaagaagagcagaagc

SEQ ID NO: 140334 - RNA, 82 nt, Homo sapiens
ccgacggcggagcaccgccccggcagaagcggcagcaaaaaggaggggaaagccagcgcagcgcgagaagcgacagcgaaga

SEQ ID NO: 140335 - RNA, 57 nt, Homo sapiens
ggaggcagaggggaggcgcgaaagcggaggcacccaccacgggccaggcgggccaga

SEQ ID NO: 140336 - RNA, 80 nt, Homo sapiens
gcaaccggcccagaggccccagccccaggcaaggcccggggccacccccaaccaggaccaaagacgaccaccaaagccag

SEQ ID NO: 140337 - RNA, 68 nt, Homo sapiens
cgcggaaggcgggcgacagcggcaggggccccgaaccagaagccaggaacgcaaggaagaaaagggaa

SEQ ID NO: 140338 - RNA, 82 nt, Homo sapiens
gcgcccggggccacgcacggggacacgggcccaggcccgagggggccggaccgggagggcagcgggaggccaccgccccacc

SEQ ID NO: 140339 - RNA, 78 nt, Homo sapiens
ggaccgaccgcaacagaacggacccgacgacgcagccagagcagcaagaggccaaggggacgacggccacgggcccgg

SEQ ID NO: 140340 - RNA, 86 nt, Homo sapiens
cgaaacaaagaacccccaaacccaaaccgaggagcgcccgccccagggagccgccccagcacgcgcccaccaagaaagaaccagag

SEQ ID NO: 140341 - RNA, 77 nt, Homo sapiens
gcgagcaggggcccggggcggaaagcgcggaccgcgccgccccgccgcggcggggacgcaggggccgcaaggccagg

SEQ ID NO: 140342 - RNA, 64 nt, Homo sapiens
aaagcacccggcggccaaaggccaggacaccaacgggaccagaagccccacgacggcaggcgca

SEQ ID NO: 140343 - RNA, 76 nt, Homo sapiens
gggaacaacagacacgggcagagccacccaggaccccaggaccagaaggcaaccaacagaaccaccagacagccca

SEQ ID NO: 140344 - RNA, 68 nt, Homo sapiens
gcggggcgcgcggcgccggcggcgcgcgacccccgcgcagacaccgaaaacgagaaacgaaagagaca

SEQ ID NO: 140345 - RNA, 88 nt, Homo sapiens
cggacgggggccggaggggaggggaagggagaaaccagcagaaacgagaggagaagagacacaacaggagaaaagaagcagaacgaga

SEQ ID NO: 140346 - RNA, 86 nt, Homo sapiens
gcaaggagaagcgcacgacgggaccacaaggcccgcaggagaggagaaggagaaacggaggacgcccccacacaagccaacacggg

SEQ ID NO: 140347 - RNA, 75 nt, Homo sapiens
ccgcccgacagaacgaagaaccaccgagaaagaggaggaggaggaggaacgagaccgaaaaaaggaaacagcgac

SEQ ID NO: 140348 - RNA, 70 nt, Homo sapiens
cgagacaaacggcaccaagagagccgagggaaaaccagccagggagccaagaggaacacaaagaagcaac

SEQ ID NO: 140349 - RNA, 68 nt, Homo sapiens
cgaaggcggacacccccagagcagcagggacgcaccaaaacggacagccgaagacaggcgacccacca

SEQ ID NO: 140350 - RNA, 85 nt, Homo sapiens
acagaagccgacaaggcgcaagcgaaaacagaccgcgagcccagagagcggggcccggcgcacccaccaccgccgcccacggcag

SEQ ID NO: 140351 - RNA, 77 nt, Homo sapiens
aaccgaacaagcccagcgaagcgggcacggggcggacaaggcgaaggaaaacaacaggcaacagaccaccaggaagc

SEQ ID NO: 140352 - RNA, 82 nt, Homo sapiens
ggagaagcgggacgcgaccccacccgccccccgggaacaggcacccagagaagagggcccaagcacggaccaaagaaaggca

SEQ ID NO: 140353 - RNA, 74 nt, Homo sapiens
caggggagagagaagaaccgagcaggacgaaaggaacccggccgaaaagaacaggaacagacgacagggaacag

SEQ ID NO: 140354 - RNA, 80 nt, Homo sapiens
cggcgccgcggccgagcgccgggagcagcgagagcccagcagccagagcggcggggaggcagcaaccgccccaacggaaa

SEQ ID NO: 140355 - RNA, 86 nt, Homo sapiens
caacagaacagacccggaacagaccagggcggcgaggaggaggaggacagaaaggaggagcaggcagcaccgcaccgacggcagcc

SEQ ID NO: 140356 - RNA, 75 nt, Homo sapiens
ccagcgcgacagcgcaaccggaccagaagaaggacaggcagaaacagaaaagagccagggcaagccccccggaaa

SEQ ID NO: 140357 - RNA, 60 nt, Homo sapiens
agcacagacaaggaagagaccggacaaccaccaccagcgagcaaaagaacaaagaccaag

SEQ ID NO: 140358 - RNA, 85 nt, Homo sapiens
agcggcacgaccgaaaccacgaggaaaccagacaaagggggcggacggggacggcccagcaagcaggaagacaaggggcgggcgg

SEQ ID NO: 140359 - RNA, 57 nt, Homo sapiens
gagggaaaggcccaggaaaaagagaagaagaagggagggaaccgagaaaggagagga

SEQ ID NO: 140360 - RNA, 74 nt, Homo sapiens
ggaaacaacaagccagacgcggagacacccgcagggggaggcccaccaggagggaaaggaggagaagaacaaga

SEQ ID NO: 140361 - RNA, 101 nt, Homo sapiens
ggagcccgagggacggggacggagagagcacgagcccacaggagcggagagacgaggagcagagaaggagacaccgaaggcccaccaccgccagaccagcc

SEQ ID NO: 140362 - RNA, 63 nt, Homo sapiens
ccgcaagcgcaccccaccaacaaccgagcggaaaacgccagcggacaaaagggacgcgcggag

SEQ ID NO: 140363 - RNA, 42 nt, Homo sapiens
aggcacaccccggagccaggaggaggccaaacggagcgagca

SEQ ID NO: 140364 - RNA, 75 nt, Homo sapiens
gaacgagaaccaaggcggacgcggcgagaaggcacagagcacaggaaggagcccggcagcgccgggaaacaccgg

SEQ ID NO: 140365 - RNA, 77 nt, Homo sapiens
gaagggcagccccgcaacgaagcggccccagcccgaaagcaaccgggcgcaggccacaggcggaggcaaggcagacc

SEQ ID NO: 140366 - RNA, 57 nt, Homo sapiens
ggcgaacggggggcagcaggagccccagccgaggagcacgaaagccaccgggccagg

SEQ ID NO: 140367 - RNA, 68 nt, Homo sapiens
aggcacccagccgccgcccaggaccccgccccgaggggacacggagaaccccccgaaagaagccacca

SEQ ID NO: 140368 - RNA, 86 nt, Homo sapiens
gaccggccggagaggagcgacgcgagggccgagacggcgcggcaaggcaaaagagagccaggaagaacaaccaggcaccacccaag

SEQ ID NO: 140369 - RNA, 57 nt, Homo sapiens
ccagcccgaccagagcagcccgaccagggaacaggaccaacaccgaccccaagagaa

SEQ ID NO: 140370 - RNA, 75 nt, Homo sapiens
aacgccacgcgggccggcgaaagcggcgccacccgggcagagcggacacacaccagaaagcaccacgaccaacca

SEQ ID NO: 140371 - RNA, 56 nt, Homo sapiens
ggaccgaggaaaaagccggacgcacggcccccgaagcgcgcaagacgcaacacaaa

SEQ ID NO: 140372 - RNA, 57 nt, Homo sapiens
acgcaggaggaggcccaccgcagcgcacgagcaaaggaagaagaaagccacggcagc

SEQ ID NO: 140373 - RNA, 85 nt, Homo sapiens
cgaagcaggggaaaccgcgagccaggcgaggaccaccgcgaggccacgagcacgccgcagacaacgcgcgccggcgccgagcgca

SEQ ID NO: 140374 - RNA, 57 nt, Homo sapiens
gcagcaagagaagggaaagggaggcagcagcgcgggagaaaaggcccagcaaaaaca

SEQ ID NO: 140375 - RNA, 66 nt, Homo sapiens
gccggcgccgcagcccgggcccaggccccggcagcgccgggacaagacaacggcaagcggagaaga

SEQ ID NO: 140376 - RNA, 67 nt, Homo sapiens
caggacaaaaacagcacggacagagaaaaacggacagccccaggaggaaggcgggcggaacgacaac

SEQ ID NO: 140377 - RNA, 79 nt, Homo sapiens
aggacacgggggccacaaagccccccggagacgcaaccaaggaagcacgggcagagggggcacaggagccgacgcagag

SEQ ID NO: 140378 - RNA, 40 nt, Homo sapiens
cccccaccccagacaggcgcggcaaacacagggacccgag

SEQ ID NO: 140379 - RNA, 71 nt, Homo sapiens
cgagacacagcaaagcaaccaccaggcagagacagccaacaaaaacaggcgagggaaacggagaaagaagg

SEQ ID NO: 140380 - RNA, 96 nt, Homo sapiens
gccgagcccgcgacggccgcccgaggacccgcaggacccgcaacagcgcagagggcagcaggagaaacgagaagaaacagacgcgcgaggggaaac

SEQ ID NO: 140381 - RNA, 76 nt, Homo sapiens
cagacgaccggcacacagcagagaggaaaccgacagcacagcagaaacaggcgagcacagggagacgaccaggaaa

SEQ ID NO: 140382 - RNA, 71 nt, Homo sapiens
ccaaaaggccgggcccaaagagggcagaaaccaaacgcccaaaagcaggcacaggacaccgggggaggcca

SEQ ID NO: 140383 - RNA, 74 nt, Homo sapiens
ccccgagagcgcaacacaggggaaggaaggaggagaacacacacagaggggcaagccacgccggagaggaggcc

SEQ ID NO: 140384 - RNA, 61 nt, Homo sapiens
ccaaaagcccacggcgagggacagaagagggaggcccgcccccccccacccccggagcgga

SEQ ID NO: 140385 - RNA, 56 nt, Homo sapiens
ggaaaacagagccgggagacagcaagaccacccggcccaagggccagcgcgccgcc

SEQ ID NO: 140386 - RNA, 75 nt, Homo sapiens
gcgcggggcgggcgggggcggcgcgcagagcggagcagccggcacagaagaaaagcggccaggcgagaagacaga

SEQ ID NO: 140387 - RNA, 79 nt, Homo sapiens
gccggccgcagcgagagcgaggaggaggaacaagcacacagagacggggacggcaacaacaacaagaaacgggccagga

SEQ ID NO: 140388 - RNA, 78 nt, Homo sapiens
cgccacgcgaggcgcggcgcacggaggagaaaggcgcaggcagcaaacggaaaagagccagggacaccaaaaacgccc

SEQ ID NO: 140389 - RNA, 84 nt, Homo sapiens
agacaacacaagaggaaggaggacggggcaaaggagcagagaacgacaagccacacgaggacagcccgcaacaccaccgacagc

SEQ ID NO: 140390 - RNA, 68 nt, Homo sapiens
gggaaagacgaagggcgggaccgcaaaaaagaccagaaaagcgggacagccggccagcaggcccacag

SEQ ID NO: 140391 - RNA, 79 nt, Homo sapiens
cccgccggagaccccagcccggcgggggaaacaggaagagaacagaacggaagaaagcagaagaggacgaagcgcaacc

SEQ ID NO: 140392 - RNA, 82 nt, Homo sapiens
cgcggaagaagcgcgcggagcgcgggaggagccgggaaaccgaagaaggcagagaaggcaaacaggaggcgcgggacaggag

SEQ ID NO: 140393 - RNA, 42 nt, Homo sapiens
ccaccccagccccaccaggagaccagaggaccagcacagcag

SEQ ID NO: 140394 - RNA, 47 nt, Homo sapiens
gcagggcgcccccgcccaagcccccagcagcagcgacagcaaacaca

SEQ ID NO: 140395 - RNA, 59 nt, Homo sapiens
ccagaaacccacacggcaaggggaaaacgacccccaggaaaaagaaaaggaccagaaac

SEQ ID NO: 140396 - RNA, 79 nt, Homo sapiens
gggaaggcaggcaaagccggcgacccgcacagccgcaccccaacccccaggaggagagaaagaacccacgcaggacgac

SEQ ID NO: 140397 - RNA, 77 nt, Homo sapiens
cgggacccccgccgccccgggggccggacgaaagaaaaggcagcgaaaggacaggggcgggagccgagaagcaccca

SEQ ID NO: 140398 - RNA, 70 nt, Homo sapiens
acgacaccggcgaggaacggcagcgacaggcgccacccgacaaaagacaaacgggacagagggccgcgcc

SEQ ID NO: 140399 - RNA, 74 nt, Homo sapiens
ggacagcgccacccgagggcgaagcagccaagcggaacggaaaacacgagcagagaggcaggagaacaaggccc

SEQ ID NO: 140400 - RNA, 79 nt, Homo sapiens
aagcggccggcccacgcccgcgggccaccgcagagccccaaggacgaccacggaccaaaaacaccacagcacagaacag

SEQ ID NO: 140401 - RNA, 80 nt, Homo sapiens
ccgggggggaccgcgggccaggcccgggagcgcggaccgaggggccgagcgcccaggggcaggcagggcccagcaggacg

SEQ ID NO: 140402 - RNA, 75 nt, Homo sapiens
gggcgcggaagaagccaaggcgggaaaaccgccacaaagcccccaagccacaagcaacgcgcaggccggaagacc

SEQ ID NO: 140403 - RNA, 76 nt, Homo sapiens
ccggaggaggaccgcggagggaacacccaaaacaagcacgacagggaagacccagaaaagaaacacaaaacaagcg

SEQ ID NO: 140404 - RNA, 78 nt, Homo sapiens
aaaacaacggcaaggggaagcaaaagaaaaggcaagacaaccacaggcagagaggagccagggacgaaccagcagcga

SEQ ID NO: 140405 - RNA, 72 nt, Homo sapiens
gaacccgaagggaaccaaagaggaaaggcacaaggaagaagcggaaggggcagggggaaagcagaagggaac

SEQ ID NO: 140406 - RNA, 80 nt, Homo sapiens
gaacagacggagaggcagcagacaccggcccagggcaagcagaagaggaacagaagaagcagagcagagacggagcagca

SEQ ID NO: 140407 - RNA, 109 nt, Homo sapiens
agaggcgcggccaagcgcaaagcgggagagacggaccagaccagggccgagcacagcgccaggcccagagggcagccagggagaccaccaccgcacggcaaacggcaag

SEQ ID NO: 140408 - RNA, 69 nt, Homo sapiens
cacagcaaacacacggacgagcacgcaaccacgggcccccgcgcgcaggacgaaagaggggccgaaaaa

SEQ ID NO: 140409 - RNA, 75 nt, Homo sapiens
agggagggccccgacagcggaaccaacaagggcaaacaagggagccagcaacaggcccacccccaccggagagac

SEQ ID NO: 140410 - RNA, 74 nt, Homo sapiens
acggcgcacacgcagacccaccgacgaggagaggcggcgagccaagcaggcggaggcaggggaccccccgaggg

SEQ ID NO: 140411 - RNA, 73 nt, Homo sapiens
acaggccccacggccgccaccgcgcaggaggcaaagaagcgaggagcaggcaacccaaaagcaggccggcacc

SEQ ID NO: 140412 - RNA, 64 nt, Homo sapiens
aaaccacacccggcgaaacgacaagagggaaaagcgagacgacgggaccgaaggaccccgccag

SEQ ID NO: 140413 - RNA, 71 nt, Homo sapiens
gaacaaggcaaaagggcggagaccaggccaaaaggagggaaaacccaccggacaaagaggagggggaaggc

SEQ ID NO: 140414 - RNA, 68 nt, Homo sapiens
ggcaagagccaacccaaaaccaaagcaagcccaggccccgaaaggcagcaagaaaagagcaaaacgag

SEQ ID NO: 140415 - RNA, 87 nt, Homo sapiens
gcggcgccgccgggcgggcgggaccgaaggagaagaaggagaaggggaggagaaggcaagccggaaagagcgaaagaaagaaggggg

SEQ ID NO: 140416 - RNA, 84 nt, Homo sapiens
cgggagcagagccgacgggcgcggaccagccaaagcgaggagaacaccgaaggagaagccaagccaggcccaggaaggagccga

SEQ ID NO: 140417 - RNA, 75 nt, Homo sapiens
caacccaaaccggcgacagccgagcaagagagagcccgacaaggagcggcagaccgagacagagaggccgagaag

SEQ ID NO: 140418 - RNA, 75 nt, Homo sapiens
gggaacgcggggaaggcgaggcacgaccccacccccgaggcccgaccggaccgagagcagaacaagacgcccagg

SEQ ID NO: 140419 - RNA, 41 nt, Homo sapiens
ggaacaaaccgacccagagagggggagcagaccggaagacc

SEQ ID NO: 140420 - RNA, 80 nt, Homo sapiens
cacgaggccggggacgaccggaagccgcagcacccaggcgaaccgaccaggaagaaggaagcgagcacggacagccaaag

SEQ ID NO: 140421 - RNA, 81 nt, Homo sapiens
ccagcgccagcgcagcccggccgcgcaccgcccagcgagccgggggaggcaagcaggggggcaaaggaaagaaggcagaaa

SEQ ID NO: 140422 - RNA, 67 nt, Homo sapiens
gggggcgaaccgcccgggcacgcccccacacggacaggaagggaaggggcggagacgggcggaacgc

SEQ ID NO: 140423 - RNA, 78 nt, Homo sapiens
agaagaagaagaaccggaagaaacgccgagaagcccaaaaaagaagagaaagcaaccacaaacacagaaaggacagaa

SEQ ID NO: 140424 - RNA, 58 nt, Homo sapiens
cgccaaggggggcagacaacaaccagaaaacgaccacaagaaggcacacggaaagagc

SEQ ID NO: 140425 - RNA, 39 nt, Homo sapiens
gcgaaggcggagacgcccgccgagacggagccacgggcc

SEQ ID NO: 140426 - RNA, 72 nt, Homo sapiens
cacgcaaaccaccaagaagcgccagccccagccaagcaaaggaaggagaagcgagccagagcggaggagggg

SEQ ID NO: 140427 - RNA, 81 nt, Homo sapiens
gcacaccaacaaggcccggacaaagccgaaaccagaaccacggagcaggacccaggcagaggaggccggagcccaccacag

SEQ ID NO: 140428 - RNA, 73 nt, Homo sapiens
aacgggcgcggggagagaaaccccagccgggaggaagccgacagacagaagacccgagccaggaacagaaaaa

SEQ ID NO: 140429 - RNA, 49 nt, Homo sapiens
gaacggaaacaaagagccggccacgaacgacggcacgaagcagaagagc

SEQ ID NO: 140430 - RNA, 78 nt, Homo sapiens
ccccgccggacaagccaacaccacaccagagaccggccagccacagagcagagaaagccggaccagcagggagccggg

SEQ ID NO: 140431 - RNA, 74 nt, Homo sapiens
gacaaaaccaagccaaacacaagcagaaggagcgaagaagagaggggaaaggacagcggaccagccaacaaagg

SEQ ID NO: 140432 - RNA, 86 nt, Homo sapiens
agaacccaccaagccccgcaggagccaccagacggagcagagcagaccaggagagaagacgaaaaagaagaagcagcgaacagcga

SEQ ID NO: 140433 - RNA, 55 nt, Homo sapiens
ggcaagccccgccagaggcagccggcacccgcacaacccagggggccgaacccag

SEQ ID NO: 140434 - RNA, 79 nt, Homo sapiens
ggaccccagcgagagacgcagcaggcggcgcacgcccacgggcaggggacggaggggaaaaaggcacaaacccagcaca

SEQ ID NO: 140435 - RNA, 58 nt, Homo sapiens
agccaacggacagcggagcacgagagaagaacggccggggggcgagcgaccgaaagac

SEQ ID NO: 140436 - RNA, 49 nt, Homo sapiens
gcgcggcgggaccgggggggacacaagagacacaagcagcgaggaccag

SEQ ID NO: 140437 - RNA, 58 nt, Homo sapiens
gcggaccggacggccgagccaagggaagaagcagaagcaagcccagggcaaggaccgg

SEQ ID NO: 140438 - RNA, 64 nt, Homo sapiens
caagaccagcgcgagggcccgggcaaggcccgacaggcaccccacgccacagcggacccgcagg

SEQ ID NO: 140439 - RNA, 72 nt, Homo sapiens
ggaacgggcagagaaaacaaacggacagcccaggccgaaccggggcagcgcgcaaggaggagcagcgagagc

SEQ ID NO: 140440 - RNA, 86 nt, Homo sapiens
gggcaaaagcacgaggaaccggagaagaggggacaaggcgcgggcgggggagccagcgccagccccggacccccgggagacgacac

SEQ ID NO: 140441 - RNA, 69 nt, Homo sapiens
gcccaccacaaaaacgaaggcggcggcgccaaggggcgaagaccaagacacacagccagcgaccgaaca

SEQ ID NO: 140442 - RNA, 98 nt, Homo sapiens
ccacaagacagggacaagaggacaacgcagaaagaacacacacagaacacaacagcgagcaacagcacagcaaggagagaaaaaaaagagagaggcac

SEQ ID NO: 140443 - RNA, 69 nt, Homo sapiens
gggacccacacgggagagcagacacccaaaagcggaccaaggaaaccacgagcggggagaaacagcaag

SEQ ID NO: 140444 - RNA, 78 nt, Homo sapiens
gcggccgccgcagcccaggcgcgggggcgacgacagaagcgaggggaccagaagaaggagaacccacgacgaaagcaa

SEQ ID NO: 140445 - RNA, 52 nt, Homo sapiens
gccagaggcaacaaggcggacaagagaagccgccagaacaccaagacggaca

SEQ ID NO: 140446 - RNA, 53 nt, Homo sapiens
agcggcagggccgggaagaacagcaagagcaagggggaacaggcaaagggcag

SEQ ID NO: 140447 - RNA, 86 nt, Homo sapiens
gagaaacacaagcagcagccagcagcagcaacgcagagaacaagcaaggagcagggacaagacaggaagcccaagcagcaaccaaa

SEQ ID NO: 140448 - RNA, 36 nt, Homo sapiens
ggccgggaggccggcccggagggcgacgccaggagc

SEQ ID NO: 140449 - RNA, 71 nt, Homo sapiens
gaagcagccagaccaagaacaaccgcggacacggagaggaaggggcgcacccccgagagagccacggaagg

SEQ ID NO: 140450 - RNA, 80 nt, Homo sapiens
acaacaggccccccgccccccccccgcgggcaccgaggacccgcccgcccagaagggagggcaagcagaaagcagaggaa

SEQ ID NO: 140451 - RNA, 51 nt, Homo sapiens
ggagccagacagcagccaaggcccggacaggcagagaaagggaacaccagc

SEQ ID NO: 140452 - RNA, 84 nt, Homo sapiens
ccgaacagcaggcgccaccagcccggaggaaagaccacagcaagaccacgcccccagccgggggaccaggccgaacgacccgga

SEQ ID NO: 140453 - RNA, 84 nt, Homo sapiens
cgacacggcagaccacggagaaaaaggcagccccggagacgaaaagacaaagcaccaccaacagacgaggaacagcgaagggga

SEQ ID NO: 140454 - RNA, 57 nt, Homo sapiens
gaaacacaaaccacccaaacaagggaaggacaggcagccggcacccgcacaacccag

SEQ ID NO: 140455 - RNA, 37 nt, Homo sapiens
ggcacacacggaccggaaagccaaggacacgcaggac

SEQ ID NO: 140456 - RNA, 78 nt, Homo sapiens
cggaaacaggggccacggagccacggccacggccgcaagcacacccccggccgccgccaacacagggaaagacacacc

SEQ ID NO: 140457 - RNA, 60 nt, Homo sapiens
cagaccgccacaccagaaagagaaggacgggagcacccacgaaaggaagagacgaagaac

SEQ ID NO: 140458 - RNA, 72 nt, Homo sapiens
aggcgcaaaagagaacaccaagggaaagcaagggaaacacacagaagaccgcagaccaagggagcagggcgg

SEQ ID NO: 140459 - RNA, 83 nt, Homo sapiens
aaacacaggaacacagcccacccgcagcaacgccaagcagagaaagccggaacgacaggaagaggcacaacaaagaaaagaac

SEQ ID NO: 140460 - RNA, 68 nt, Homo sapiens
caagggacacgagcgggaagcaggcggcaaccacccgcacggagaaccaaagacgccggcggaccccc

SEQ ID NO: 140461 - RNA, 57 nt, Homo sapiens
gacaccgccagcccaaacaacggcccagggagaagaaccaacaacggaaaaccagcg

SEQ ID NO: 140462 - RNA, 76 nt, Homo sapiens
ggagaaaaaggaagcgaggggggcgcggggcccacgccccaggacaaaaggcgggacaacaccccgaggacccgag

SEQ ID NO: 140463 - RNA, 52 nt, Homo sapiens
cggccgccccacgaacgaggaaagagaaagaaaaacgacacagacaggcacc

SEQ ID NO: 140464 - RNA, 63 nt, Homo sapiens
acccaaggggaaaacacaaagaaccgaagaggagggaagacaaaaggggcacacgggcgaggg

SEQ ID NO: 140465 - RNA, 77 nt, Homo sapiens
ggggcccgagcccggcgggaccagcaccagcaccggcccaggggccggaccgggcccggcaagcacaccgcagcccc

SEQ ID NO: 140466 - RNA, 83 nt, Homo sapiens
cccacagaccaccaacaaggaggcggaaaagggcgaggaggccaaacgaccaagaaagcgggacgcggaaaacgggacccgca

SEQ ID NO: 140467 - RNA, 113 nt, Homo sapiens
cgggggcgggcggagggggcggcggcagcgacggcagcggcggcggcggacaaacaggcaccgcaggccggggggggcacagagccccggaagacagcccccagcgaccagac

SEQ ID NO: 140468 - RNA, 73 nt, Homo sapiens
ggagcccacagaaggagaagaagagagaaggccacgcccgaccccaagcaacaacggggcagggacaggcgcg

SEQ ID NO: 140469 - RNA, 74 nt, Homo sapiens
accaaagagcccgccaaaggcccaaaaggaacaggaaaaagggcaagaagcaccaaaaggaagagaaaggagcg

SEQ ID NO: 140470 - RNA, 70 nt, Homo sapiens
aaaacggcccgcagcggggaacagcagcggcaggacggaaagacagggagccacagcacagcacccagag

SEQ ID NO: 140471 - RNA, 79 nt, Homo sapiens
ccgaagccgggagagggccgagggcgccggggaggcagaaggggccgggagcggcccggcccggcacgggagaggcgga

SEQ ID NO: 140472 - RNA, 42 nt, Homo sapiens
gacaggcccacccagggaccaggcacacagaccaagggaccc

SEQ ID NO: 140473 - RNA, 70 nt, Homo sapiens
gggaagaacaaggccaaggcgaaaaccacaaaggaagcggcgcgggcccccccacccccaagaacccaca

SEQ ID NO: 140474 - RNA, 67 nt, Homo sapiens
ccggaaccgcccggccgaacccccgcgggaacaccacggcacggagcaacgacaacggcaagcggag

SEQ ID NO: 140475 - RNA, 79 nt, Homo sapiens
caggccaggaccaaccacacggagaaccacggggaccaagaagcgagcagcccaaacggacccgggaacaagagccgaa

SEQ ID NO: 140476 - RNA, 54 nt, Homo sapiens
cccacccaaggacagacagacgcagaaaaacaggcacgggggaggggagccaga

SEQ ID NO: 140477 - RNA, 70 nt, Homo sapiens
gaggagggagaaaagcggacgccggggaggccaaaaaggaaacccccgagaagcgcaccaagaacagaag

SEQ ID NO: 140478 - RNA, 85 nt, Homo sapiens
gccgaccaggcggagaagaccaaaagagaccacagaccagcaggcgccacgcgcggagcccaggacaccgcagccgccgccccac

SEQ ID NO: 140479 - RNA, 80 nt, Homo sapiens
agacaaggccggacaaagcaagaacgcgcaacacagcgaccgacgggaccggcgcaagcagcggaggggaaagaaggaag

SEQ ID NO: 140480 - RNA, 59 nt, Homo sapiens
cgacagagacgaaaaaccgaggcgagacccaaagcaagaggagccaggagcacgggggg

SEQ ID NO: 140481 - RNA, 78 nt, Homo sapiens
agaccccgaaaaccaagccgaggacgcggggccgggccacgcagaccccaaaagcacgcacgaaaccggcaagccagc

SEQ ID NO: 140482 - RNA, 80 nt, Homo sapiens
ccaaaaagaagaagaaaagagagcaggcacccagaacgcacaagccaaaaccgggacagcaacagaacgcccccggaaca

SEQ ID NO: 140483 - RNA, 75 nt, Homo sapiens
ggcagcaccccgcagacaccggcgacaccccggcagaacagagaggcacccagacgccccacagccagccggggc

SEQ ID NO: 140484 - RNA, 94 nt, Homo sapiens
ggaaagaaaaaaaaggagaacagcgcaggaacaggacaggagaagaagaaggggagcggcaaagccaaagaggccagagacaacagaagaggag

SEQ ID NO: 140485 - RNA, 72 nt, Homo sapiens
gagcgaggagcccggcgagaagaggagaggggaagaagacgggagcccagaggccgagacaaccgaagacgc

SEQ ID NO: 140486 - RNA, 62 nt, Homo sapiens
cgcccgcgccacccggggccgccgcgcaggagcccccggagcggacacaggcggagaccggg

SEQ ID NO: 140487 - RNA, 52 nt, Homo sapiens
acaaccccaccagcaccacagggaagaaaccggccgccagcggaggcccaaa

SEQ ID NO: 140488 - RNA, 75 nt, Homo sapiens
gccaagaggggcaacgaaaagcagagcaccaaacaggggggaaggaagacaaacagagccaagcagacagaaacc

SEQ ID NO: 140489 - RNA, 52 nt, Homo sapiens
cggggacccggaccggggaccagggaagaaggggcagaaagagagccaagag

SEQ ID NO: 140490 - RNA, 74 nt, Homo sapiens
gggaccacaaaggagacacgaggaaggaggccaaaaaggcgaaacgagccgcgcccaagacagggaaggaagaa

SEQ ID NO: 140491 - RNA, 86 nt, Homo sapiens
agacgcagccgagacaccagcccgaaacaccaccaaggccggcaagaagccaacggagaaccaaggccaagaccagaaccagcccg

SEQ ID NO: 140492 - RNA, 89 nt, Homo sapiens
cggcggagcaagaggcggacaccccggacgaaccacaggaagcgcggggcggcggcgaaaggacgggccagcaccccaagccaggccag

SEQ ID NO: 140493 - RNA, 77 nt, Homo sapiens
cgaaagacgaccccgcgcgccgcgaagccgagccaaggggccagcgcgagaaagggccgaccacccaggcggacagg

SEQ ID NO: 140494 - RNA, 68 nt, Homo sapiens
acgacgcaccgcaggcagacaaaagggccaaagaagggagagaggcaccagccaggccagcaccagac

SEQ ID NO: 140495 - RNA, 76 nt, Homo sapiens
gcccaaccaggaggacgccgcggaaacaacacagaaagaccacacagggaaacgaccagggagagaccaacaggaa

SEQ ID NO: 140496 - RNA, 77 nt, Homo sapiens
cagaaaccgccaaagacggaaccgccacagcaccaagaaggccgcggacccccccccccccaccccacaggagaaga

SEQ ID NO: 140497 - RNA, 55 nt, Homo sapiens
cgggcagccagaccgaaaggagccccgcgccccacccgaccggaacggggcaagc

SEQ ID NO: 140498 - RNA, 78 nt, Homo sapiens
cggcccccaagggcggaaacagcggacggcgcgccaccggccacgcaacccccgccgacccgaccagccgcgaggccg

SEQ ID NO: 140499 - RNA, 73 nt, Homo sapiens
gaaggaccaagaaccaggaaaggccgaggggcaaagaaaaggaaagcacggccgaaaagaaggcgaaaacccg

SEQ ID NO: 140500 - RNA, 72 nt, Homo sapiens
ccccagccacgaccacgccacccccgaaggaaccgcgaccacagggccgaggcaaacaagggccacgcgccc

SEQ ID NO: 140501 - RNA, 62 nt, Homo sapiens
ggaaaagcaacgggggcaccagaccgaacaggaaggccccggaaccacagagcggcagcggg

SEQ ID NO: 140502 - RNA, 93 nt, Homo sapiens
ccaacaacacgaacagcgaggaaacagagcaggcagcaaggagccgccccagccgaaacgagaggacaagccgaggcgggagccgggcaggag

SEQ ID NO: 140503 - RNA, 70 nt, Homo sapiens
aaagaaagcaggaccagggggagggaccaagaaccacgagccagaggagacggacggacgagaggagaag

SEQ ID NO: 140504 - RNA, 58 nt, Homo sapiens
ccccccgagcggggggacgcgccaggcacagcagcagagacggaggaacagaaaacca

SEQ ID NO: 140505 - RNA, 71 nt, Homo sapiens
agcggcgaaacaaggaaagcagccaccacgaaacccacaagaaacagagcaaagcgaaggaggggaagcaa

SEQ ID NO: 140506 - RNA, 67 nt, Homo sapiens
aagaaacagaaaagaccaagaccaccaaggcaaagagagcaaacggaagaacagaaggccccaacaa

SEQ ID NO: 140507 - RNA, 69 nt, Homo sapiens
aaacgagacccagggagagggagcgaaccaacaccggccagacccagccccgggaggagacagacccag

SEQ ID NO: 140508 - RNA, 77 nt, Homo sapiens
agacaggaccacgcaagggcaaggacaaagaagcgccgggaaaagcaacgaagaggggacccggagcggaggaaaga

SEQ ID NO: 140509 - RNA, 80 nt, Homo sapiens
cgagaacagaaggaccccaacgcccaccaaagaggaaagcgaggaggagcgagcgcgagaggagagaacagaaagaccaa

SEQ ID NO: 140510 - RNA, 78 nt, Homo sapiens
gggcccagaaaaaccaggccgaaagcagggcgcaggcgaaaccgggccccaacagaggagagccagcaacggccccgc

SEQ ID NO: 140511 - RNA, 69 nt, Homo sapiens
cccccagacagcaaagaagaaacggcgggggccggggccccgcagggcacaggcaaaagaccacccgga

SEQ ID NO: 140512 - RNA, 70 nt, Homo sapiens
gcgcaggcagcaaccccacccggcccccgagggcgggcagagggcgcagccaggagggaaagagagagca

SEQ ID NO: 140513 - RNA, 68 nt, Homo sapiens
ggacgcgaacacagagggaagagaaagcaaacgagcagggcaagggagaccgaacgacgcggacaccg

SEQ ID NO: 140514 - RNA, 63 nt, Homo sapiens
ggaagaacaacacagccagccccccgagggagggacaagaaggagaagaagcaccagccgacg

SEQ ID NO: 140515 - RNA, 70 nt, Homo sapiens
aagaacaaaccgcacgacacaggaaaggacaaaaccagaagcagggggggcaaggagcacgggcagcccc

SEQ ID NO: 140516 - RNA, 72 nt, Homo sapiens
gccggagaggcaccggaccgcaggagcggcccccaggacaaagacaaggaagcgaaagagagaagcgcgaga

SEQ ID NO: 140517 - RNA, 80 nt, Homo sapiens
gaggcaagaaaggggaaccccggagaaaaggccaagaaggcagacagaggcacaaaaggagaaagcagaagaaacaggag

SEQ ID NO: 140518 - RNA, 72 nt, Homo sapiens
aggaagccggagcgcagcggacaaccaagaagaagaggcgcggccgaacccagcgagaaaccaggaaccacc

SEQ ID NO: 140519 - RNA, 84 nt, Homo sapiens
agcagcccagacgcggcacagagagggccgggagcgcgcagccagggggggccccagcccggccgaacgggcgcacgacacaaa

SEQ ID NO: 140520 - RNA, 71 nt, Homo sapiens
ggaccgaccgcaacagaacggacccggcacagaacacaccacaaaaggcacaagaagaagcgcagccagag

SEQ ID NO: 140521 - RNA, 77 nt, Homo sapiens
acagcgacggcaccacacccggcccaaacccaccacagccggcaggccaaagggacaaacgaagcacagcaccaacg

SEQ ID NO: 140522 - RNA, 72 nt, Homo sapiens
ccaacgcgaacagaaacagcacacccgccgggcaaacggacccccgcccgaccgcccgcccggaaaaggggc

SEQ ID NO: 140523 - RNA, 77 nt, Homo sapiens
cggaagagacaggagacagcaaacgcaaggcgaagcaccagccggagagccaaagcgaagcgcgaacgcagacacgg

SEQ ID NO: 140524 - RNA, 69 nt, Homo sapiens
cgaaaagccccgcccgcccggaagaccccaaggacccccggccacaggaggcagcccagcgggcagagc

SEQ ID NO: 140525 - RNA, 55 nt, Homo sapiens
gcaccgcaagccaaccagagccggcggcaggcgagcacaggggcccagggggccc

SEQ ID NO: 140526 - RNA, 74 nt, Homo sapiens
caaaccggccaaggcacaaaaggaaggcccggcgggggcaacgagaaggacagccaacaccagggaggcgacca

SEQ ID NO: 140527 - RNA, 71 nt, Homo sapiens
gccgcccggacgagcgagaccgcaccagagagacgccggcccaccagccagcggggagccgcccaccccac

SEQ ID NO: 140528 - RNA, 102 nt, Homo sapiens
ggcacagaggagagccaagaggcgccagccggagaccagggacaggaacccccgaaaggcgagagaaggccaccgcggccaagcagcgaaggcggagaggac

SEQ ID NO: 140529 - RNA, 76 nt, Homo sapiens
aaaccacggaaacaggcacggccacagaagcaacaaaggaccgcccccagagagagacagggacaagcgcacagcg

SEQ ID NO: 140530 - RNA, 75 nt, Homo sapiens
ccagaagcggcagaagcaccccgaggggccgccaagcccgcagacaccgaaagaccacagcaagaccacgccccc

SEQ ID NO: 140531 - RNA, 82 nt, Homo sapiens
gaaccaaggaaggcaccgcagagccaagaaagccaggggcgcagaaggacgcggagcaggagcacagagagagcggagacca

SEQ ID NO: 140532 - RNA, 74 nt, Homo sapiens
aagaggaacccgcacagaagaccacgggagaaacaaagaccacaccagaagacgaccccgacgcaggccaggag

SEQ ID NO: 140533 - RNA, 82 nt, Homo sapiens
gagccgccacagcaggacagaagcaccacggagacaggcagggagaccccaaggcaaaaccaccacacgacaaaaaccggaa

SEQ ID NO: 140534 - RNA, 36 nt, Homo sapiens
cacagcccgccggggagcccagccaaggcccgcgaa

SEQ ID NO: 140535 - RNA, 82 nt, Homo sapiens
gacgaacaggaacagagaagcgcaaccacgagaaaacggaaccgaaagcaagaggacaagaagaggggaaaacaagaaaagg

SEQ ID NO: 140536 - RNA, 65 nt, Homo sapiens
gaagacgcaccgcggaaacgacaccagaccaggcaacacggacagcggacgcccgggacgggagg

SEQ ID NO: 140537 - RNA, 74 nt, Homo sapiens
gggaggagcgcagggcgagccggagagccggccgagcgaggcggcgcggccagaagcaccaaaaagcccgggca

SEQ ID NO: 140538 - RNA, 81 nt, Homo sapiens
gcggaaagcacgcgcacagagaccaaaaagagccaagcgagaagagagaaccacaaagggcagagcaaagacccagaacac

SEQ ID NO: 140539 - RNA, 74 nt, Homo sapiens
aaaaaaaaaagggcgaaaaacggaaaaggagggccgagagacacgccgcgagaagcacgcacagggccgcggga

SEQ ID NO: 140540 - RNA, 70 nt, Homo sapiens
aaacacgcacccaaagaagaggagagcggggggacccaaaaagggcagaaaggaaaggcccgagccaaaa

SEQ ID NO: 140541 - RNA, 81 nt, Homo sapiens
gaggagacacaggacagaccccccgggccggcacaaccccacaggaggcaagcaaccaacaaaagaaaagagaaaacggac

SEQ ID NO: 140542 - RNA, 53 nt, Homo sapiens
agaggcacaaaaagcggggaccacaccacacagcaacccacgacggagacacc

SEQ ID NO: 140543 - RNA, 91 nt, Homo sapiens
gggcacgcacggcccgggccggcgcccaaggcccgcccgggagggccggggccgcgccagacagagggagacaaagcgggcagaaaagaag

SEQ ID NO: 140544 - RNA, 62 nt, Homo sapiens
acagaaacggaacaccaaggagacaagggcgggcccccggcagggacaaaggcgagacacca

SEQ ID NO: 140545 - RNA, 73 nt, Homo sapiens
gaacgcccagcccgcgggcaccggcagaaaggaggaggaaaacacccccagcggcgccaccagagcagaagga

SEQ ID NO: 140546 - RNA, 64 nt, Homo sapiens
cgaagggcaaggaaagcagcaagagaagagaagccgccgagaaaggagaccaccaacacaccag

SEQ ID NO: 140547 - RNA, 67 nt, Homo sapiens
cgaagagagcccagagcagagaggcaaacaaaaaacaccaggacccgggccagccgccggaacccga

SEQ ID NO: 140548 - RNA, 85 nt, Homo sapiens
cgacgccagaagacaaagagccaagaaacccgagggagaagaccaaagaagagagagcaggaccaccaccgcccacagccgcgga

SEQ ID NO: 140549 - RNA, 74 nt, Homo sapiens
caccagccgccgaccacacaaggcaggggggaggaaaccagaagaagccaaaggacacaccggaggagcaaacc

SEQ ID NO: 140550 - RNA, 59 nt, Homo sapiens
cgagaccagaaacaacggcgaaaacggcaaaacaaagaggaggagagaagagaggaagc

SEQ ID NO: 140551 - RNA, 92 nt, Homo sapiens
gcccgggcgccccgcagccccccaacaccgcccgccaggacgacgagcaggccgggcccgccagggcacgcgcccgccacgggaagcccgag

SEQ ID NO: 140552 - RNA, 85 nt, Homo sapiens
gggggcggcagagcaaagacaccagggcacacagggaccaagaagccccggggacacgcgagaaaagacgccgaagggaagacca

SEQ ID NO: 140553 - RNA, 80 nt, Homo sapiens
ccgagacccaccagagggcgccacaaacggccggcacaagacaacaggaccccccagaaacccaggacgcacacacaaga

SEQ ID NO: 140554 - RNA, 81 nt, Homo sapiens
ccggcgccagccgcccagaggacagcagcggacggccggaccaagaggcgccgccccccagcaaacgagaaaaacccagcg

SEQ ID NO: 140555 - RNA, 70 nt, Homo sapiens
ggaggcacacacaagaccgcacgacaggcacagggcggggaacagaccagggaaggggaggagaagagcc

SEQ ID NO: 140556 - RNA, 83 nt, Homo sapiens
agacagcgacgaaacagacaccggaaaaaggaacaccagcggcacagacgcgaggcaccgccaccgagagggccggaagaagc

SEQ ID NO: 140557 - RNA, 56 nt, Homo sapiens
acagccccaccccgcaccaacagcagcacacgcacaggagagggcgcaagaagacc

SEQ ID NO: 140558 - RNA, 87 nt, Homo sapiens
cgggaccgaaaccagccccggacgagaagcgcagcaacggcgggggaccacgagagcaggaagaaaccacagcgacagaacaaacag

SEQ ID NO: 140559 - RNA, 37 nt, Homo sapiens
aaacaccaccaccaaggaccaggacaaaaccccagag

SEQ ID NO: 140560 - RNA, 102 nt, Homo sapiens
gggagagaggaacacggcccacacacccaggcgcggagggaagacgcccgggccaccaagcaaggcccaccccccccggaggcagcaaggaccaagaagcgg

SEQ ID NO: 140561 - RNA, 77 nt, Homo sapiens
ggcaacccgcggagcacacgcgcgggaggccagcggaccccagggaagcacacccgggccgggaccaggacgggagc

SEQ ID NO: 140562 - RNA, 75 nt, Homo sapiens
cagaccgagggaggcaaagacaccaaccccgcccccacagccgcccagcccaaaccccagagccccccagccagc

SEQ ID NO: 140563 - RNA, 77 nt, Homo sapiens
aacggacaccaccaggggacggcacggacgacagaagcgacgggagaccgcaaggcaggcgaccaaaaggaaagacg

SEQ ID NO: 140564 - RNA, 81 nt, Homo sapiens
cacaaccaagccacaaaagacacgccacaaccgaaacggcgaggaaagagaggagccccggaaagaaaaggacagacccgg

SEQ ID NO: 140565 - RNA, 79 nt, Homo sapiens
ccggaacgcggcaaacagacaagacacaccccaccaggagcagggccacacgcccccacaccacaagggcgcagaagcc

SEQ ID NO: 140566 - RNA, 56 nt, Homo sapiens
ggggagggagccagaagcaacgagggacggaaaaggcgcacacgacccggagaacc

SEQ ID NO: 140567 - RNA, 80 nt, Homo sapiens
ccgccggcgaggcagaaagaagccggacaccagaccaacacgaccgccagcagcagccgaaaacgcacaagaccaacaga

SEQ ID NO: 140568 - RNA, 71 nt, Homo sapiens
cccccgcaggaaccacaacccaaccagaggaaccagagaaggagaaacagcagggccaaaggcaagaaccc

SEQ ID NO: 140569 - RNA, 51 nt, Homo sapiens
ggaaaccaaggcagggggaaagagggcgggaagcggggaaaggaaaacacc

SEQ ID NO: 140570 - RNA, 78 nt, Homo sapiens
ggccccccagccagcagaacggaaaagcaacaaggggcagcaggacccggccgaggagagagcccacccaggaggagg

SEQ ID NO: 140571 - RNA, 84 nt, Homo sapiens
acggagcggcgcccagcccaaaggcccagaggggagcagagggccgcgccggggggaaccggaaagcagacggcccgggaaaca

SEQ ID NO: 140572 - RNA, 86 nt, Homo sapiens
gaacccagaggaaacgacggagacgcagagggacgaaagaagcgcagcggaggaaggcgagaaaccaacgaccagcagaaggggga

SEQ ID NO: 140573 - RNA, 70 nt, Homo sapiens
agagcgcgcccggagagccaccggagacgccgagcccacccccacggacagcagaccacagcccggcagg

SEQ ID NO: 140574 - RNA, 74 nt, Homo sapiens
cgccaccacaagaagaagagccgcccccaccagacgaggccaccagccagggaacggaccccgaggggagcgac

SEQ ID NO: 140575 - RNA, 53 nt, Homo sapiens
aggggcagaaaagcacacgggggacaccgggaagacagacagaaagcgcccag

SEQ ID NO: 140576 - RNA, 75 nt, Homo sapiens
ggcggccccccgggccgcggcccacgcccgcggagcagccgggaagcaaaaaaagccaacggaccccacaaaaga

SEQ ID NO: 140577 - RNA, 72 nt, Homo sapiens
caggccagaggaccacccccaaccccacgccaccgaagagccaagcccaggggaagaagggaaacaggaaga

SEQ ID NO: 140578 - RNA, 72 nt, Homo sapiens
gggggggccggccaagagcacaagagcagcgcacagacagaacggcaggcgcaaaaaccagacaccccacac

SEQ ID NO: 140579 - RNA, 87 nt, Homo sapiens
gagagccagcggcccagcgcgggccacggcggcggcccgggagcagaggggagcgcgacaaccggccgaggacacagcgccccggga

SEQ ID NO: 140580 - RNA, 65 nt, Homo sapiens
caagagggcgggagaaccacgaggagaggggagccgaagagaagaccgggaggaaacaaaaggag

SEQ ID NO: 140581 - RNA, 76 nt, Homo sapiens
agagggccccggagcggcgcggcgggccggcggcgcggaagaacgagacgccaaacaagaagaaggaaccacaaca

SEQ ID NO: 140582 - RNA, 73 nt, Homo sapiens
ccaagagagaaaccaacaagcggaggggaaccacgacccaacaaaaaacggaaggaaaagggagcgaacccac

SEQ ID NO: 140583 - RNA, 66 nt, Homo sapiens
acgaaagagaagccccggagggccggcaccccaaggggggcgccgggcccgcccggagcgccggcc

SEQ ID NO: 140584 - RNA, 63 nt, Homo sapiens
aacccgcggcgaccacagccaaagcgggcggaacggagaagcccagggaaacaagaacaacag

SEQ ID NO: 140585 - RNA, 73 nt, Homo sapiens
aacaccccaggccggggagggcgcgccgaaagcgcaggggacagccaggagccccagcgcagccagaagggaa

SEQ ID NO: 140586 - RNA, 80 nt, Homo sapiens
gaagaggcggggacgaccggggcgggcgacagcgaccgacgccacacggagccgaggccagagcagaaaccagcccagga

SEQ ID NO: 140587 - RNA, 60 nt, Homo sapiens
gccggaaggaagggaaaccgggggccccggacaacccgagcagacagaagcgaaggggac

SEQ ID NO: 140588 - RNA, 86 nt, Homo sapiens
cacagcgaccaccaacagaccgaagaggcgggccaggccagcgggccggggagcgccagccgagaggagcgcggagcgcgcgggag

SEQ ID NO: 140589 - RNA, 76 nt, Homo sapiens
ggaaacgacacaaccaggcaaagcacagaagcggaagaaagaagagccaagaagggaagaaaacaagaaaaagaag

SEQ ID NO: 140590 - RNA, 79 nt, Homo sapiens
ggccaacccacccccagagacaaagacgcagaagaaggggggcgccaccccaccagacggccagcgggaccccacacca

SEQ ID NO: 140591 - RNA, 73 nt, Homo sapiens
gggcccaaagagggccacagcggccaccgccggcgggcaacagagcgcccaaaggacgcggaacagcaccacg

SEQ ID NO: 140592 - RNA, 64 nt, Homo sapiens
ggagccccccggagccgcgggcggcagcacccaggccacagaggaggaaagagaggggaaagaa

SEQ ID NO: 140593 - RNA, 79 nt, Homo sapiens
ggccaccggaggcgggacacccagcaccccacgcccggccgacaagcacgcaagcccggcgagcgaccgccgggggaac

SEQ ID NO: 140594 - RNA, 67 nt, Homo sapiens
gcccaggagaaaccggacgcgacgggacaagagaccagggacccaggagccggccaggcccggcgag

SEQ ID NO: 140595 - RNA, 74 nt, Homo sapiens
gcgcgaggggacgcgcacggcgggccggccaggagccgggggcgaagagagaacacgcacggaaggaaggagac

SEQ ID NO: 140596 - RNA, 73 nt, Homo sapiens
cagaaagcgggggggaaagccaagggaaagacaagcaccaacccaggaaccacggggaccggaacccaacgaa

SEQ ID NO: 140597 - RNA, 76 nt, Homo sapiens
cgccgcggcgcccgagcggcgggccgcagaggagggagcccagccggagacggggccggggacccggccccgggac

SEQ ID NO: 140598 - RNA, 73 nt, Homo sapiens
aagagcaacagaccacgcagcgaggagggggggaagccccgcggagggcgccagcagccgaacagcggagagc

SEQ ID NO: 140599 - RNA, 77 nt, Homo sapiens
aaccgcacggcccgcaccgcccgaggagcggccgcccgcagaagcgagcgaacaacgacgaacacggaaaaagaaca

SEQ ID NO: 140600 - RNA, 82 nt, Homo sapiens
ccgacccacgggggcagccccggagcacgagcagggccagggagcacccccaagccccacgccagggggcggggaccgcaca

SEQ ID NO: 140601 - RNA, 59 nt, Homo sapiens
gggcaggcccagacaggccagagcaaaggcagacaagaccagccacaaaaagcggacaa

SEQ ID NO: 140602 - RNA, 77 nt, Homo sapiens
ccccgcacggacagcgacccgccccacccgcagcagaacaagacgggagagaagcgccggccggaaagaagacgggg

SEQ ID NO: 140603 - RNA, 73 nt, Homo sapiens
agaccgaaggagcggaggagcccgaggaagacggaggaaccgcacaacgggcgccccagaaggagaggacagc

SEQ ID NO: 140604 - RNA, 72 nt, Homo sapiens
accaccgaaaaaccccaaacccacaaggaccgcagcgaagcacagcagaaggggccacaagacagcacaaaa

SEQ ID NO: 140605 - RNA, 81 nt, Homo sapiens
gcaaacagcccgccagacacggcaggccaagaagcaccgagccaggcaacaggaagaagaacccacaggggccaacagagg

SEQ ID NO: 140606 - RNA, 79 nt, Homo sapiens
ccacggaggcaccagaagaagcaccagagccccccaagagaacccagggggagccacgccggagcgggcaccggcgcgg

SEQ ID NO: 140607 - RNA, 73 nt, Homo sapiens
cacccccggcgggcccgaggcggcgagagaggcaggcggagccgaccgggccagaacaccagaagcagccgaa

SEQ ID NO: 140608 - RNA, 87 nt, Homo sapiens
ccagccccgagcgggacagcgcggcggggagcgacgagaacaccagcaaggaaagagaggaaggagaccggcgcccccacaaccgcg

SEQ ID NO: 140609 - RNA, 72 nt, Homo sapiens
ccccgagcagcgggaacagcacacccgccgggcaaacggacccccgcccgaccgcccgcccggaaaaggggc

SEQ ID NO: 140610 - RNA, 74 nt, Homo sapiens
ccagagcccggcaccacccacgagacgaggaaggcgggggagaaggagaggaacaggaagaggccgaccacggg

SEQ ID NO: 140611 - RNA, 75 nt, Homo sapiens
cggacggaacccgggcccacggcggagaacggaaaagcaccaggaagcagagaggaccgcagaagggaaggagag

SEQ ID NO: 140612 - RNA, 74 nt, Homo sapiens
agccacccagcgcccagcacacaaaacagcagcgggaaaacccggcgaggcacagggccgaagaggaagcccac

SEQ ID NO: 140613 - RNA, 75 nt, Homo sapiens
cggagaagcaaagggcaccaaaccggaggaaagaagcacgaaggaaaaagcaccaggaaagggaaaagaaagaaa

SEQ ID NO: 140614 - RNA, 76 nt, Homo sapiens
ccaccacacgaccacagcagagacaggacaagaaacaccgcaagaagcgacaagcaaagcaagcccgagcggccca

SEQ ID NO: 140615 - RNA, 58 nt, Homo sapiens
ccggggcgcgggggacgggagcggcagccccgccacagaaagcccgccccagacaggg

SEQ ID NO: 140616 - RNA, 69 nt, Homo sapiens
agggggggcgcgccggaaaccggagcgcgcagcagggaagagcccggagcaggaggagaaaggaaacag

SEQ ID NO: 140617 - RNA, 84 nt, Homo sapiens
cacaccacaaagaaaccgagcacccagagaaagcaaaccaggaggaggacacccggaagagccgagagcgccggaggaccacac

SEQ ID NO: 140618 - RNA, 67 nt, Homo sapiens
ccgacccgggcgaagaggaccagccagcaagaccgagcgacagaagaagggcaccaaaaagcaacac

SEQ ID NO: 140619 - RNA, 66 nt, Homo sapiens
agcaaaacggggaccaaagaacccgcgaagcaggcagaaacgccacagcgaaaccaccgaggaaag

SEQ ID NO: 140620 - RNA, 57 nt, Homo sapiens
aggccggggcccaagggaggccggccccgaggagcaggaagaccggaagagacagca

SEQ ID NO: 140621 - RNA, 67 nt, Homo sapiens
aaacacccgagagcaccgccgagcggaccccaagaggaagcaccaaccgcccccaggggcagcgggg

SEQ ID NO: 140622 - RNA, 73 nt, Homo sapiens
cacagggaggccagccggagaagcgagcagcggggaaccacaaaaccaagaaacaaaaagcagcaagaagcaa

SEQ ID NO: 140623 - RNA, 34 nt, Homo sapiens
aggaaccaccagcggcaggggagcgccgcgccca

SEQ ID NO: 140624 - RNA, 87 nt, Homo sapiens
cgggaaggacgggcgcggacccagaggggacggcgccgcaggagaagccggaggcgagaacgcggacaagcaaacaaagaggaaaaa

SEQ ID NO: 140625 - RNA, 80 nt, Homo sapiens
agaggcaagcgcagggggacggggaccagcagcgcgccgccgcccagagcccaggaagacaggaacagcagcaacgcgga

SEQ ID NO: 140626 - RNA, 72 nt, Homo sapiens
gaagagacgccacaaaccccagggaagaggaccaaagcgaacagcccagaggagcacccccaagccacccca

SEQ ID NO: 140627 - RNA, 77 nt, Homo sapiens
acggaaagaagcaccggagagacagcacagcacccacaaagcaacgagcccccgaggaaagcacgcacaacgaggaa

SEQ ID NO: 140628 - RNA, 101 nt, Homo sapiens
ggcccaaaaaggacacccaaggagcacaagagcgccccaagcaaggaagcgacagaaaaaaggggaggagaaaggcaagaagaaagaaggcccaggccaca

SEQ ID NO: 140629 - RNA, 82 nt, Homo sapiens
gaccaccgcacacccgacacagcggagcgcccagaggcgagcccggggaggaagaggcccgccgccccggggcacgccaggc

SEQ ID NO: 140630 - RNA, 86 nt, Homo sapiens
acacacagaaccgacagggaggaacgcggggaggaggaggacagacgcccgcgaaccggacacagacacgagagcgcaaggaagca

SEQ ID NO: 140631 - RNA, 74 nt, Homo sapiens
agaggccgaccgagacgggcggagaggagaagcggagagacaaccccagcggacgaggccaaacaggagagaaa

SEQ ID NO: 140632 - RNA, 78 nt, Homo sapiens
gggaagggcagcgcgccccgcaacacaccacgccacccaagagagagcaaaaaccgagaaccagaggcacacagacaa

SEQ ID NO: 140633 - RNA, 74 nt, Homo sapiens
gaaaacaaagaaaggaaaagaacgccagcaaacaacaggcacaaagagagaaggaacacccacagggcagacag

SEQ ID NO: 140634 - RNA, 79 nt, Homo sapiens
cggagcaaagcccccacgcccagccaggagcaccgccgaggacccagcacaccgagggaggcacccagccaacaccgga

SEQ ID NO: 140635 - RNA, 84 nt, Homo sapiens
gcaaaggccagaaggccaaaccacaagccaaaacccgaaaaaggccccccgagaaggcacacaggaccccgcgagccagcggcg

SEQ ID NO: 140636 - RNA, 97 nt, Homo sapiens
gcagggaaaccgacggagaaaccaccggcggaccgcacaagcagggcccgacgggccaggagggggccgaggggacccgcccacggggcccagccag

SEQ ID NO: 140637 - RNA, 81 nt, Homo sapiens
gaggacaggccccgacgaggacaccagggccccccacgcgagaacccgggccggggcccgggggcccgagcccccacccac

SEQ ID NO: 140638 - RNA, 73 nt, Homo sapiens
cgcgagcagcccagccagcagcacaaaggaggacgggaagcggaagaaagaagagccaagaagggaagaaaac

SEQ ID NO: 140639 - RNA, 82 nt, Homo sapiens
gcaacaccgagagaggaggagccagacgacaagcacacacaggcgcgaaacggaaaaaggggaaccaagagcccaggacaaa

SEQ ID NO: 140640 - RNA, 97 nt, Homo sapiens
gaaacgacgagccaagaaagcagaggacccaccaggagcaccgaagggacagccccagggggaaaggagggcgggcgcacagaagagccaggaccag

SEQ ID NO: 140641 - RNA, 79 nt, Homo sapiens
cgcacccaccaaaggacgcaacgacggagcagaggcggcagcaggccagagcgggaggcccaagcaagaacagaggaca

SEQ ID NO: 140642 - RNA, 37 nt, Homo sapiens
aaagaagaaaagcaggccgggagggggcgaaacggag

SEQ ID NO: 140643 - RNA, 75 nt, Homo sapiens
ggaccggccgcaccaccagcccggcagcgccgacagggcagaccgccagcagcacagcaagccacagagagggcc

SEQ ID NO: 140644 - RNA, 55 nt, Homo sapiens
ccgcgagagggccggcaggcccgggaaggagcgagcaagagccaagagaggaccc

SEQ ID NO: 140645 - RNA, 75 nt, Homo sapiens
cgcccccgcccaccgcccggcgcgcgccgcgcgggcgcccgacaagcagaccggaagaccgacggaagaccacac

SEQ ID NO: 140646 - RNA, 51 nt, Homo sapiens
caccgacaaggcaacgcagccacaggcggggagcgcgacaagccaaagaag

SEQ ID NO: 140647 - RNA, 73 nt, Homo sapiens
ccgcccggagggcgccccccccccgaggcgcccgcagggccaggacgcacgagcgcagagcagagagagggag

SEQ ID NO: 140648 - RNA, 63 nt, Homo sapiens
aaagcaaagccccagacggacggcaaagcagaagacgcaagggcacgcgaccgacgggaacaa

SEQ ID NO: 140649 - RNA, 101 nt, Homo sapiens
cgaaaaccgggccagaaggagaggagaagaggaacgcaggagagcagcgaaggagaggcagaggacagaaggaacagagaccgccaggggaaagccccgcg

SEQ ID NO: 140650 - RNA, 78 nt, Homo sapiens
ccggagaggaaagagacccgcagagccacagggcagggaggcgaggacaacgggcagcccccacaccaaaggaaccgg

SEQ ID NO: 140651 - RNA, 68 nt, Homo sapiens
gacaagagcaccccccaggacaaaaaaaggaaacgagaagcggggcagacggcaaaggaacacgcaaa

SEQ ID NO: 140652 - RNA, 78 nt, Homo sapiens
cgagcacgagcggaggggacacgggcggaaccccggaaccagagagcgcgccagccggaaggaaccacggcaccaggg

SEQ ID NO: 140653 - RNA, 79 nt, Homo sapiens
ccaagggcgcccccccggaacggcaccacaagaacgaagcggccacggagcccaaaaggaaaaagaaacagggcagagc

SEQ ID NO: 140654 - RNA, 77 nt, Homo sapiens
agaggcacgagagccccccacacagccacacagacaccgccacaggagagagcaagaggagcaagaggggggggccc

SEQ ID NO: 140655 - RNA, 81 nt, Homo sapiens
cccccacccaggccgagcgaagcccacaaccccgccgggcacaggaaaggcccgcaccagaacacacgagaagccacagga

SEQ ID NO: 140656 - RNA, 48 nt, Homo sapiens
gcacaggagaagggcccggagaagcccaaaagcaaagcagggcagcaa

SEQ ID NO: 140657 - RNA, 77 nt, Homo sapiens
gcgcaggggagaaccggaagacagccgccaggaagcaacgcagcgcggaaaggcacaaccaaggacacgcagcaaac

SEQ ID NO: 140658 - RNA, 70 nt, Homo sapiens
cagcaggaaggacaaaacacaacagggaagagagccagaacccaaaacgccgaacacgacagccacaaga

SEQ ID NO: 140659 - RNA, 75 nt, Homo sapiens
aacaacggagaaaagaagacgacacaggcagcaggcagcggcaccaacggacagggacaagaagaagcggacgcc

SEQ ID NO: 140660 - RNA, 81 nt, Homo sapiens
agcagggaagacggagcggcggcccgaaggagaacaaccgcaacgaacaaacaggagacagagagcaagagcaccccaacg

SEQ ID NO: 140661 - RNA, 64 nt, Homo sapiens
agcggaggcggagcggcgccgagaacagcgaacaccccccagccacggcgccagaaaccagaag

SEQ ID NO: 140662 - RNA, 76 nt, Homo sapiens
gccaggacaaaacagacgcgcccagagcgcagcacgggcgcaggaggcagcgaagcgaccgggggcgcgaagaacc

SEQ ID NO: 140663 - RNA, 77 nt, Homo sapiens
cacacaagagacggaagcagaaagcaaggaggaacaacgggaccggcaggcccaaagggaccgccagcgacagcagg

SEQ ID NO: 140664 - RNA, 84 nt, Homo sapiens
gggcaaccgggacccggcccggaggcgaagcagcacgaccagccaagcgccggagcaaggaaggcacagcaagcaacccggccg

SEQ ID NO: 140665 - RNA, 40 nt, Homo sapiens
gaacaggcacccgccaccacgcccagagcgaaagcacacg

SEQ ID NO: 140666 - RNA, 69 nt, Homo sapiens
accacccagacaagagcaccacgggcaggaaggcagcgcacgacagcaaaaggaagagacgaacgaagc

SEQ ID NO: 140667 - RNA, 71 nt, Homo sapiens
aaagaggggaacaaaggcaacacacagaaacagaagcaccacagccccaccaccccgaacgcaagccagca

SEQ ID NO: 140668 - RNA, 83 nt, Homo sapiens
aggaaggggacgggacggacgggaggggcgccgcggcggcgggcgcccccaggacccacgaggaagcggccgcggcgaacccc

SEQ ID NO: 140669 - RNA, 76 nt, Homo sapiens
ggggaggaggagccaccccaagccacagggccgccgacagcagagacagcaccccaagcaggcacaaaagaaaaga

SEQ ID NO: 140670 - RNA, 77 nt, Homo sapiens
gagagggccagagcgcggggaggcaagagaccaccagcggccaccacacgggacgaaaccccgacccccgagacacg

SEQ ID NO: 140671 - RNA, 76 nt, Homo sapiens
ggcgagggaaccaggcgaggagccgccgggggccggcaaggaaacccaaccccagaacaccccaccagaccaccca

SEQ ID NO: 140672 - RNA, 102 nt, Homo sapiens
gaccaaagcgacagggcacagccacggcacaccggcaaggaaagggacagggaccgccaagcagacgaaggagaacagacacgggcgagccaccgcaggagg

SEQ ID NO: 140673 - RNA, 79 nt, Homo sapiens
ccaccacggagggaaagaccaggcaggcggaggagaagaacggaccacggagacacagggcgggcacgcacagaagaag

SEQ ID NO: 140674 - RNA, 77 nt, Homo sapiens
caagccggagaaacgggaagggaaccacccgccggcggcaccacccggaccaagccaggcagacgccagacacacag

SEQ ID NO: 140675 - RNA, 48 nt, Homo sapiens
acccccccccccccccaagaccggaaacaggcacagaacagaaggaaa

SEQ ID NO: 140676 - RNA, 85 nt, Homo sapiens
accgaggcgcaccagacgaaagcaaccaacgcagagcaccagaagcaaacgggaaagcagagagcaggcagcagaagaagaagcc

SEQ ID NO: 140677 - RNA, 64 nt, Homo sapiens
gaaaaccagaccccacccaaggaaagagcaggcccaacacccccaagcacagaggcccgcacaa

SEQ ID NO: 140678 - RNA, 56 nt, Homo sapiens
ccacacccgcagagcgaggaccggaaggaaagcgcaggcaggagaaggacagcaga

SEQ ID NO: 140679 - RNA, 83 nt, Homo sapiens
caacaacagcaacaacagaccaccccacaggccagcaaggacagcagcaggccaagccgacgccagcgggcgccacccaacag

SEQ ID NO: 140680 - RNA, 55 nt, Homo sapiens
gccagccacagcccagagaccagaaggacccgagccccaaagacagaaaagcccc

SEQ ID NO: 140681 - RNA, 72 nt, Homo sapiens
cgcagaacaagaccggacaccaagcgccacccagaagaaggaagacccccgcggggacagagcgaagaaccc

SEQ ID NO: 140682 - RNA, 51 nt, Homo sapiens
aggccaaggcaagccagagaacacccgccgcgcaaaaggcaaaggaacaga

SEQ ID NO: 140683 - RNA, 73 nt, Homo sapiens
ggaggcaaacggcaaagggagagcaggcggggcaagcagaacccacacccggggaaaggaggaggagacgccg

SEQ ID NO: 140684 - RNA, 68 nt, Homo sapiens
cccgcggcgcgcagcccagcagaaaagggaacaaccccaaaaaaccgacacccgggagaagaaaaaaa

SEQ ID NO: 140685 - RNA, 67 nt, Homo sapiens
acacgccaagcacccaagcaacccaagaagggaacacccgacaccgaggggccagggggcaggggaa

SEQ ID NO: 140686 - RNA, 88 nt, Homo sapiens
ccgagaaaccgcagcacacacgggaaggagaagccgggcaccgaacaaaacaggagaccaggcaccggacacgagagccagcggcccc

SEQ ID NO: 140687 - RNA, 77 nt, Homo sapiens
cgccccccggcggcgcgcgcgcggcgccggggcagaaagagggaagaaagaggggcaagacaccgggaaagagaaac

SEQ ID NO: 140688 - RNA, 33 nt, Homo sapiens
acaagcaacggcggggaaagggagcagcaccgg

SEQ ID NO: 140689 - RNA, 62 nt, Homo sapiens
ccaacagaaaccaacaccccaaagacccacgccgaaggagcccacgaggccgccggaagcca

SEQ ID NO: 140690 - RNA, 76 nt, Homo sapiens
aagcagccaccagcagcccccagagcgggaccacaggagcgagcagaagacccccacccaagaaaagggccagcga

SEQ ID NO: 140691 - RNA, 42 nt, Homo sapiens
ggccgagggcaggagggccgcgcggggcgagggaagcaaaag

SEQ ID NO: 140692 - RNA, 85 nt, Homo sapiens
acagaacgccggagaagcagcgggcaagaaagacgcaagcccagaggcagcgacacacaagagcaggaccaaacgcacaaagacg

SEQ ID NO: 140693 - RNA, 62 nt, Homo sapiens
cagaagcccggggaaacgcaaacacagaggccagaaacacaccagcacagccgaccggagca

SEQ ID NO: 140694 - RNA, 93 nt, Homo sapiens
aaacgcccagcgggagggggccaagaggcccacggcgccacaggaaaggggccggcacagcagcaagaccggaacccagaagccccccccccg

SEQ ID NO: 140695 - RNA, 77 nt, Homo sapiens
agcgccaaggacccgggacagggaccagcgggaaggcagacagcgagggcgacgagagaacacccacgaagcaccgc

SEQ ID NO: 140696 - RNA, 68 nt, Homo sapiens
accaaggccgcaccaggagacaagcggaggacaacgcagaagccaagggggagaggggaaggccgcaa

SEQ ID NO: 140697 - RNA, 65 nt, Homo sapiens
gaaagcacacccgaaaagcgccaaggaaaaggacgagaacgccgcgacagaaagcggagcaaccc

SEQ ID NO: 140698 - RNA, 79 nt, Homo sapiens
caaaaagcagaaacagaggaaagcgacagaagcagacaaaaaacgaaaggaaaagaggccaggcaagcacaaaaggggc

SEQ ID NO: 140699 - RNA, 79 nt, Homo sapiens
acgcaagacaacaggagaggaaagcggaaagccaaggccagaaaccgcagggagaggcccaccagaagaagccaaaaag

SEQ ID NO: 140700 - RNA, 79 nt, Homo sapiens
gacagggcggacaccaggaagaggagccgagcacgggccgagaccaccgaggagagccgggcgagccccaacagaccgg

SEQ ID NO: 140701 - RNA, 79 nt, Homo sapiens
cagcccagaggcagcaccagccacggggcaggaccaagggaaggccacaaagagagacaccggaccaaagccgaggaga

SEQ ID NO: 140702 - RNA, 78 nt, Homo sapiens
cgacgggaccgaaggagcgggaccgccgggcgcaagaggcagacagacaggcgacgggcagccaacaagaaacgacac

SEQ ID NO: 140703 - RNA, 78 nt, Homo sapiens
caagagcacgggaaggaagggacaagacccacagcaaagccagcgacagaagccaggggaccggggccaccagaccca

SEQ ID NO: 140704 - RNA, 71 nt, Homo sapiens
gacacaccggccgacgacacacgcgcccccgcaagcaggcagcacccaagaaaacccaggccgcgaaggag

SEQ ID NO: 140705 - RNA, 80 nt, Homo sapiens
gcgcaggcgccgccgccggacgcggcaacggagaaggaagcgggcaccaacagacaaccagggcaagcagaggcaaaggc

SEQ ID NO: 140706 - RNA, 72 nt, Homo sapiens
cacgcaagggaagacgcgaggaggcagccgccgcccgcccgccaaacgcagaaaggacacgccagagcgggg

SEQ ID NO: 140707 - RNA, 76 nt, Homo sapiens
gcgaggccagacagcaagagcacccgacccacaggccagagagggcgaaccgaccaagaacaacacccagagggcc

SEQ ID NO: 140708 - RNA, 71 nt, Homo sapiens
gcaagaacaagaacaagcgggaacccacacccaagagcccagagaaacagagggcaaagaggaccaaagaa

SEQ ID NO: 140709 - RNA, 58 nt, Homo sapiens
ggaacccggcaccgccccagagccgagagcgccggaggaccacacccggccacagccg

SEQ ID NO: 140710 - RNA, 93 nt, Homo sapiens
cagggccgggccgccgcgcaccgcagcgccggggcacgacacaaaaacagaacccaagaaggcagaagccagccccgcaggccgccacccgcc

SEQ ID NO: 140711 - RNA, 116 nt, Homo sapiens
caccgaggagacgccaccccacgaacccaccgcgacccggccacgccgccccaaggcggggccccgggccgcaccccccaccgcaacccgccgggaagcagccgccaaaaaccgga

SEQ ID NO: 140712 - RNA, 76 nt, Homo sapiens
caagaccaaacgcacgccccaagacaaaaaacgaccccagaagacaaaggaccaaggagaagaaaaaaggaaaccg

SEQ ID NO: 140713 - RNA, 78 nt, Homo sapiens
gggaaaggaaggggccccagggcgcagacaaggcagggcaaggcaaggaggaccaagcgaaaaacccagaagaaacag

SEQ ID NO: 140714 - RNA, 82 nt, Homo sapiens
ccagggcccaaaaaaagggcaggaaccacgaaggacagaagacaccacagagagccagacccagggcccccagaaccccagg

SEQ ID NO: 140715 - RNA, 77 nt, Homo sapiens
aaggaccaagaaccaggaccaagcccaccaagggacgccagcacccaaccgccacagcagaagaaaccggaaagacg

SEQ ID NO: 140716 - RNA, 74 nt, Homo sapiens
cggcccaccagccaccccaccgcgcagggaggccccccaccgaagacaagcgagagcggcaccaaaggcgacac

SEQ ID NO: 140717 - RNA, 63 nt, Homo sapiens
gcagccagcgggagcaagcacaaacacgggaagccacacaccaaaggaaacccggcgcccggg

SEQ ID NO: 140718 - RNA, 62 nt, Homo sapiens
aaccccgagcgcagccgggaaacacggcggagcgaagacaaaacgccggccagacagacaac

SEQ ID NO: 140719 - RNA, 76 nt, Homo sapiens
caagcgcgagcaagaggcgacagcaagcaagcccccggcgccagagcaggcaaccggacaaaggggaaacgaaggg

SEQ ID NO: 140720 - RNA, 89 nt, Homo sapiens
agcaacgccagccccaggaggcaccgggcaggggaccacagcagagagagggggaaccggggaaggcaccggcaaggggggaggcggac

SEQ ID NO: 140721 - RNA, 74 nt, Homo sapiens
aggaagggcggcggcggcaggcggcagaggggagaggcccacgcggaccggcagcgccaccggaccaccagaca

SEQ ID NO: 140722 - RNA, 79 nt, Homo sapiens
gaagaaaggagggcggcgcgccgagcgcgcaggcacgcagggccaacgggacccggcgccggaaaggaaccaggagcga

SEQ ID NO: 140723 - RNA, 73 nt, Homo sapiens
aggcaaacgaggaccggcagagaagaggccgacgacagcccacccccccaaaaccgagaagccaagggaaaga

SEQ ID NO: 140724 - RNA, 74 nt, Homo sapiens
ccagccgggagccgcccgcccccacacgccagcgcacaccggggccaccccaaagaggccagagaggagcccac

SEQ ID NO: 140725 - RNA, 79 nt, Homo sapiens
cacaaggcccagacaagcacgggcgggccccacagagccacccgaggcgcgacccgagaaccgcagcggccagccggcc

SEQ ID NO: 140726 - RNA, 74 nt, Homo sapiens
cgcagcccacgccagacgaccccacccgcgccgcgacccgggacggcgcacacgggccgccggcccccgcaccg

SEQ ID NO: 140727 - RNA, 99 nt, Homo sapiens
ccgggccagcggccgcgcacccccggccggaggcaccagccacccaccaaggcccggaggccccacaacaggggcagacacccaaaggaaacagcccgg

SEQ ID NO: 140728 - RNA, 69 nt, Homo sapiens
aaagcgcgaacaggcgcaaagaggggaaaggaagcacccgcgagaaagaagggcacagcgaaacagccc

SEQ ID NO: 140729 - RNA, 71 nt, Homo sapiens
aagaaagggacaaagagaggagcagacccacaggaccgcgaacaaggaggccacaaaacacccggacccac

SEQ ID NO: 140730 - RNA, 72 nt, Homo sapiens
gaagaaagcagcccagggacccggaccagacccgcacgagccaacaagaagccagagaaacaccggagacag

SEQ ID NO: 140731 - RNA, 83 nt, Homo sapiens
cccacaggaagaggcacggaccgccagcgcggagcaggagaaacagaagcgggaggaagagcagagcagaagagaagaggagg

SEQ ID NO: 140732 - RNA, 68 nt, Homo sapiens
accgggaacccaggagggaagggacccaaagaaggaaagaacccagccagggggaggacaaaggaaag

SEQ ID NO: 140733 - RNA, 55 nt, Homo sapiens
cggaagagagccgggcccgccgggcgaagccgaacagccccaccaccccgcaggc

SEQ ID NO: 140734 - RNA, 80 nt, Homo sapiens
ggggcaagcggcgccaccaccagcaccagagagagagggcccaagggcagagacgccagccgacgcccggcagaacacac

SEQ ID NO: 140735 - RNA, 75 nt, Homo sapiens
cggcgcagacggccaaaggacgggacaaaggccgcagccaagccggaacaggagcggcgagcccaaacgcaaggg

SEQ ID NO: 140736 - RNA, 46 nt, Homo sapiens
cagcccccagcagcagaccggaagagaacgggaagaagaagaaggc

SEQ ID NO: 140737 - RNA, 74 nt, Homo sapiens
ccccaacccgggcgaagcgaaaggccaaagccacccccaaaggcagaggaagaacgagcagggaaccaagacaa

SEQ ID NO: 140738 - RNA, 71 nt, Homo sapiens
agaaacgcccagcccaacccgacgagaaacaaagcaagaaaaaggaagaggaaacacaacccagcaaaagg

SEQ ID NO: 140739 - RNA, 66 nt, Homo sapiens
cagaacagggccgggcggcccaagggaaaagcagcggccgcaaggaaggaaaaggccagggggacc

SEQ ID NO: 140740 - RNA, 80 nt, Homo sapiens
agcgaggaggagcggacaagaagacaaccggcgaacggcgcagggagacaaagcggccagaagaaaagagaggggccccc

SEQ ID NO: 140741 - RNA, 84 nt, Homo sapiens
cgggcaccccggagcacccaaaacgcggggccaagcagcgaggccacggagccccagaagcacaccacaggaagagcaagaagg

SEQ ID NO: 140742 - RNA, 68 nt, Homo sapiens
gcagacacagcgacgaagaggaagagcagccaaggcaccaaagaagagaaaagcaggaagaaaagaag

SEQ ID NO: 140743 - RNA, 39 nt, Homo sapiens
cccagcacaggcggacaggccccggagggacaaagaacc

SEQ ID NO: 140744 - RNA, 74 nt, Homo sapiens
agaaagaccgaagacaaaaaccagaagacaagcagcgcaacggggcggcacacaaggagcgaagggcagggaga

SEQ ID NO: 140745 - RNA, 65 nt, Homo sapiens
gaccaagaaccaggcaacacaccgaaaaaagggaagcggagaggagcagagacgacaccagaccg

SEQ ID NO: 140746 - RNA, 72 nt, Homo sapiens
ggcccccccccagccacgaccggcacaccccggagaaccgcagcggaaccggagacagaaacacaccaaaaa

SEQ ID NO: 140747 - RNA, 78 nt, Homo sapiens
accgggacggaccgagaccggaccgagagcggaccgagagcgcgaaacgcacgagaagaccggaacagaacagcagac

SEQ ID NO: 140748 - RNA, 73 nt, Homo sapiens
gacgcagggcgcccccggaaacgaaaagagacagcagggcaaaacgggccacacacagggcaaaaagaacggg

SEQ ID NO: 140749 - RNA, 80 nt, Homo sapiens
cgaagaggaccagggagggaaaagcagacccaagcggagggcgacacgagaacaaaaggggccggaggacgcggggaacc

SEQ ID NO: 140750 - RNA, 87 nt, Homo sapiens
caccagaagccggcccccaacaccagagggaacaccacaaccagaccagcaccagacagcgaaaaagaggacccaaaaaagagagaa

SEQ ID NO: 140751 - RNA, 82 nt, Homo sapiens
aagaacagaaaaagaagaggaacaggccaaggggcccacccaagggaaagggggcaggaaaaccgaaagcacaaagacccaa

SEQ ID NO: 140752 - RNA, 93 nt, Homo sapiens
gcccggagccagccgggagcgggcagcagcggccgaggaggaagaagcagcgcggcggccacacccggagagggccggcccagggagaacgca

SEQ ID NO: 140753 - RNA, 71 nt, Homo sapiens
accacccggcgaagcacgcagaaacagcagacggaggccgggagcaggcaaaggcggagacagggcacgac

SEQ ID NO: 140754 - RNA, 69 nt, Homo sapiens
cagaaacgaaaccgagccaccccggaaaggaggacacccaagcacccggaaaggccagaacacaggaac

SEQ ID NO: 140755 - RNA, 78 nt, Homo sapiens
cggcccaacaggcaaaaagaagaaaaaacaggcaacagacaaaagagaccgcaacaggcacaagcggcgggggagcgg

SEQ ID NO: 140756 - RNA, 68 nt, Homo sapiens
ggcggaaccaagccccagccggagaaggagcccacaacaaccacagaaaaccgggacgggcgaaagag

SEQ ID NO: 140757 - RNA, 75 nt, Homo sapiens
cccgacgccaggcagcgcccccaaacgaggagaggagacgccggagcgggacgaccagagaccgagagcggcgcg

SEQ ID NO: 140758 - RNA, 76 nt, Homo sapiens
aggacccgaccgaccagggcggggcacccgcaggacaagggcccccaaagcaacagcgcgggagccaggaaacgca

SEQ ID NO: 140759 - RNA, 105 nt, Homo sapiens
cggcggggaagccgggccggccgcgcgacgggggacagaacggcaccgacgagacggagaaggacagcaaaaggagaaccagggagaggaggagaaacccacaaa

SEQ ID NO: 140760 - RNA, 74 nt, Homo sapiens
gaaaacaggcacggaccaccaagcagagggcgagcccaagcccaggaagaggaaaaaccccgcgcccggcacaa

SEQ ID NO: 140761 - RNA, 62 nt, Homo sapiens
agaccgcagaacccaaaggcggcacagaacagagggccgaagagaacccagcgcagcgcaga

SEQ ID NO: 140762 - RNA, 78 nt, Homo sapiens
gaacaagcacgcccggccggacggcaccccccgcaagaggaccagcagagccgccaaggaaccagaggagacccaagc

SEQ ID NO: 140763 - RNA, 75 nt, Homo sapiens
ccacagcgaacccgccaggagcgccaaaccacggacaagaaaggaccggcccaaggaggagaaacccagcaggca

SEQ ID NO: 140764 - RNA, 70 nt, Homo sapiens
ccgagcccgagggcacgaaccgggaaagaggagagacaggagccacgagacagggaccccaccacggcca

SEQ ID NO: 140765 - RNA, 72 nt, Homo sapiens
cgcgacggccccgggaaggaggcccagagaacaccaggccagaccgggccagggccgagagagccaccaccg

SEQ ID NO: 140766 - RNA, 75 nt, Homo sapiens
gcgccgagaagccagcacgccgggagcggacacagcccagcaccagccccggggcaaacaacggcccgcaccagc

SEQ ID NO: 140767 - RNA, 79 nt, Homo sapiens
ggagcaggagcaggagacagagcccagggccagagagggacaaggaaagcaaacaaacccagacaccgaggaagcgagc

SEQ ID NO: 140768 - RNA, 79 nt, Homo sapiens
gcaggccccaccccccagaaagaagaggaaagacgagcccaggaacaggaggcccggacccccagcacaagcgcaggcc

SEQ ID NO: 140769 - RNA, 67 nt, Homo sapiens
cagagcggcaggagacaggaggaggcgcaggacggcccagccccagcaggcgaccaggcaggcccac

SEQ ID NO: 140770 - RNA, 70 nt, Homo sapiens
gaacgcgccagagcaccacagccaaccagccaggcaaagaaaccccaaagccagcaagaccacagcagca

SEQ ID NO: 140771 - RNA, 76 nt, Homo sapiens
cagagacacaaggccccggcagcagcaggagagacagagagaggagaaagcggccaaccccagaagagagaacaga

SEQ ID NO: 140772 - RNA, 68 nt, Homo sapiens
aaacaagagaccacagaagccggccccgagcgaggcaccggacccgacacccccggcaccacagccac

SEQ ID NO: 140773 - RNA, 106 nt, Homo sapiens
ccacaccgagcgcgaggcgcggagagcaacgccgggacagcgcaagggcgacgcgccacagagcgggcgggcgggccacgcggcgggacaggaacccaaccccagc

SEQ ID NO: 140774 - RNA, 67 nt, Homo sapiens
caccccgcgaaaggaggaggcacagagaaaaaccccccccgccagaggaaacgacacaaaagcccac

SEQ ID NO: 140775 - RNA, 77 nt, Homo sapiens
acagggagaaggcccagccaagaagagaagacaaggagggcggagacacacaccaagaccaagaacggcgggccggg

SEQ ID NO: 140776 - RNA, 79 nt, Homo sapiens
agccgcgaacaccagccaacccagccacagcccccccaccaacacagcggccaaacacaacaggaaggagaacaggagg

SEQ ID NO: 140777 - RNA, 80 nt, Homo sapiens
gacagggcacaccaaacccacggacaaacaacagaccaaggggcggaaaacccgaagccaggaacagcggcaagccccgg

SEQ ID NO: 140778 - RNA, 86 nt, Homo sapiens
ggaacagcccggcacagccccagcggagcgacgcagaagacggggacgcaccacgagacccagagagagaggggacaccccccggg

SEQ ID NO: 140779 - RNA, 77 nt, Homo sapiens
gaccgacccgcccagcacgaccagccagcagacgagggaagaagagacaaagaaggggcagagcggaaacccggaag

SEQ ID NO: 140780 - RNA, 74 nt, Homo sapiens
cggcagccacaggaggcgcggaggacgccccaccgccgacgcccccagccaccagagccgaggaaggcaccagg

SEQ ID NO: 140781 - RNA, 74 nt, Homo sapiens
acggggacgcaccaacgagagagaaccccagagggcgcggaagccccagcaaacaagaccaccggcacccagaa

SEQ ID NO: 140782 - RNA, 67 nt, Homo sapiens
caccggaacaaagaaaaccaaaacgcaacagaaacaacaggcaaagcagaagacgcaagggcacgcg

SEQ ID NO: 140783 - RNA, 54 nt, Homo sapiens
acccgccgacgggcagcacacccaccgagccgagaggggaccagaacagagaag

SEQ ID NO: 140784 - RNA, 76 nt, Homo sapiens
aaaagacaggcccaccgaagggaaaacccaaccaaagcccaaacagcgaaacaccgaaggagccaaaaaaagccag

SEQ ID NO: 140785 - RNA, 82 nt, Homo sapiens
aaaagcgcaaaccggagccagaaacaaccgcaaccacccaacaaggaccagagaagacacacaacaaccccacggagcccca

SEQ ID NO: 140786 - RNA, 79 nt, Homo sapiens
cgacgagcgccgggacccagggcgagccggaccagagggccacccgaaacggagcgccggagcagaaggggaaggcaag

SEQ ID NO: 140787 - RNA, 60 nt, Homo sapiens
cggacagaccaaccgcaggcgcaaggaacaccgaggccagggggagccgaccggagcgga

SEQ ID NO: 140788 - RNA, 77 nt, Homo sapiens
ggaagagaggccagaccgcgcgccccagaccaccggcagggaacagccgagcagaccgaggaggcccaccagcagac

SEQ ID NO: 140789 - RNA, 77 nt, Homo sapiens
accaagacggagcaagacaagaacccaaccagcagcaaaacaccaaggaaagggagcagcaaccccagagcagagcc

SEQ ID NO: 140790 - RNA, 80 nt, Homo sapiens
gccgcggcgccggcagcagagaccaccagaaggggcggagaacggaaaagcaccaggaagcagagaggaccgcagaaggg

SEQ ID NO: 140791 - RNA, 80 nt, Homo sapiens
agaagcgcaaaaaacgaaggaagaggacaccagcccgggagaagaggcaacacccgagcggggcccgaaaacgcagagaa

SEQ ID NO: 140792 - RNA, 81 nt, Homo sapiens
gaggaggaagggcaggacgagggcggcgcgggagcagcacccacagccaaggcgggagccacgggccacgggaaacaggca

SEQ ID NO: 140793 - RNA, 79 nt, Homo sapiens
ccccaccgccccaggacagcaccagcgggccggaggagccagagcgcagaaagagaggaaagaacccaagggaacaggg

SEQ ID NO: 140794 - RNA, 71 nt, Homo sapiens
cagcgggggaagaggaacgaaaggaaaagagacgcagacaggagaaaccagaggcaagcgacgggaaggac

SEQ ID NO: 140795 - RNA, 75 nt, Homo sapiens
gggccaccaagcagaccacgcaggcaggcggcggcgacggcagccaaaaagcacccagccacaccccaccgccca

SEQ ID NO: 140796 - RNA, 75 nt, Homo sapiens
ggggccaccaggaggccagggggcgccagggccacgcgccccggcccaagggcgcacgaaggggaaccgaagcga

SEQ ID NO: 140797 - RNA, 76 nt, Homo sapiens
accggcccaagaaacaggaaacccaaagcacccagcagccaaggacaaggaaacacagaccgcacaggcaaaacca

SEQ ID NO: 140798 - RNA, 77 nt, Homo sapiens
ccaccagcagcccccagagcgggaccacagaggcacaggggagaacggaggaccacaacccagccacgagacaagac

SEQ ID NO: 140799 - RNA, 84 nt, Homo sapiens
cgcagcgcgcccagcggcccaggcgccgcggcgaggagcgagcgcgcgaggggcggccgagcgagcgacgcgcccacggaggag

SEQ ID NO: 140800 - RNA, 73 nt, Homo sapiens
ggagcaaggaaaccggagaggcggagccacaagcacgcggaagagccaagcagacacaagagaaagacccaga

SEQ ID NO: 140801 - RNA, 87 nt, Homo sapiens
gagcccgagggaggagaaggggagaaacaagccaggagagggcgagaaagacagcaaagaaaaggagaagaaaggaaaaaaacaacc

SEQ ID NO: 140802 - RNA, 80 nt, Homo sapiens
gcccgcggcggcgcgcccagggcagggcccaaggaaggacccgccaggccaacacccaggcacaggaaaaaaaaccagaa

SEQ ID NO: 140803 - RNA, 67 nt, Homo sapiens
cggcgagccgggaagcgcggccggagcccgggagaaggagccgggagccgaccccgcccccagaggc

SEQ ID NO: 140804 - RNA, 80 nt, Homo sapiens
ccggagcggggacccaggagccggccagcgcgccggagccgccgagaacgcaaggagggacaggacggaaggagcggagg

SEQ ID NO: 140805 - RNA, 80 nt, Homo sapiens
cagaacccagcaggagggaggggagacccacaggagccccggaccaccgagcacccagccacaaacccccccacgacacc

SEQ ID NO: 140806 - RNA, 58 nt, Homo sapiens
cggaaggcagcgcccagcagcgcaggccaaacgaccaagaaagcgggacgcggaaaac

SEQ ID NO: 140807 - RNA, 68 nt, Homo sapiens
ggaaaccagcacgagccagcagaagcaaaaagggaaagacagggaaaccaacaggacgaggagaggca

SEQ ID NO: 140808 - RNA, 82 nt, Homo sapiens
aaggcaagcgcagcaacaacagagagcacggggggcacccgaggaggaagagggcagggcccacggaaagaagggaaacccg

SEQ ID NO: 140809 - RNA, 64 nt, Homo sapiens
cccagaggcgggaggggccgggaggcagaggggcaggggccaacaagccgaggagaggcccacc

SEQ ID NO: 140810 - RNA, 81 nt, Homo sapiens
gcggagagcaagagggagcagaacaaagcaacggaaagagaacggagcaccaaaaaagaaggggggcagaaagaagaggag

SEQ ID NO: 140811 - RNA, 82 nt, Homo sapiens
gagggagcgaggaaccaccggacgaagacagcaaggagacccgccaaagccgccgggcaagggcggagaacggaaaagcacc

SEQ ID NO: 140812 - RNA, 79 nt, Homo sapiens
agggacgaaggcacaccacagcgcacgccgaacggaacaaggaacagcaccacaacaggaaggaacccaggagaagacc

SEQ ID NO: 140813 - RNA, 90 nt, Homo sapiens
agggcccggcggcgcgagcaggaaggagaaagaaggggcaagaggaagaagcagaagcagagagaggagcgaagaagaagaagcgaccaa

SEQ ID NO: 140814 - RNA, 83 nt, Homo sapiens
acggaaagaaacaaaaacgggaaagccggcaagagggagaaggacaccaggcagaggcaagacacggcacagccaacaagcgg

SEQ ID NO: 140815 - RNA, 77 nt, Homo sapiens
acaacagcagaagcacagacaccccgaaacgccaaaacgaaggaagagccaggaaagcaaaagggcacccgccccca

SEQ ID NO: 140816 - RNA, 85 nt, Homo sapiens
agcggaagaacagccgaagaagggcccccggaagaaccgaaggacacacaggcgagaaagagaccaagacgaaaaagcgaacgca

SEQ ID NO: 140817 - RNA, 54 nt, Homo sapiens
aaccgcccccacgaaggccccagagaaaggggcaaagagaaccaggagacccca

SEQ ID NO: 140818 - RNA, 76 nt, Homo sapiens
gaagcacgaaagccccacccgccgcagcaagcagagaagacgaccccgacgcaggccaggagccgcggacagaagc

SEQ ID NO: 140819 - RNA, 68 nt, Homo sapiens
cgagacagggcggaaacgaaaaacagaaaggacggaaacgcgacaacaccaagaccagacgacagaaa

SEQ ID NO: 140820 - RNA, 75 nt, Homo sapiens
acgccaggagggagaagcaggccaggagaagacgaccccgacgcaggccaggagccgcggacagaagccgagcac

SEQ ID NO: 140821 - RNA, 102 nt, Homo sapiens
acaccagaagagcaaccgagcgacgcagaaaaacaaagggcgaaagacacgagaagagggagagccgcccagagaaagcacaaggacaacaggaaaagagca

SEQ ID NO: 140822 - RNA, 85 nt, Homo sapiens
accagggacacaacgggaaaccggaccgagggccaagacagcagggaaccaaggcccggaagaaaagacgaccaacacgcccaaa

SEQ ID NO: 140823 - RNA, 76 nt, Homo sapiens
agcaacgagagaggcccccgccgagcacggacgccaccccgccccaccgaggccggcgggccacagcaggcgcccc

SEQ ID NO: 140824 - RNA, 82 nt, Homo sapiens
gaggccggggccaacgagccaacgccaggcgccgcccacagacgaggagcgccaggaaagaggcagagacgaagcagaagcg

SEQ ID NO: 140825 - RNA, 80 nt, Homo sapiens
gagacccaggcgggacagagggagccaggcagagacgcaaacagcagacggaagaccccacggcaaaaccacacccgagg

SEQ ID NO: 140826 - RNA, 80 nt, Homo sapiens
cgaggggaagccccgacaccaggggacacccagaagcggcgccgccggcaggagggcgaagggaagaagcagaaaccagc

SEQ ID NO: 140827 - RNA, 81 nt, Homo sapiens
ggacgccggcccgcgcgcgcaccccgcggacgccacagcgcaggggggcgggccgagcacccgcaggccccgcagaggcgc

SEQ ID NO: 140828 - RNA, 76 nt, Homo sapiens
aacacagaaaccggcccggaggcgcaaaacaaggaccggacagagcacgcacagaagccaccaaaaaggaacgagg

SEQ ID NO: 140829 - RNA, 69 nt, Homo sapiens
agcgcaaaccacacaacaaacggcaccaacggagcccccaggacaggcacacccgggaaaaccgaacac

SEQ ID NO: 140830 - RNA, 62 nt, Homo sapiens
gccgaaggccagcacaaggcggaggccgcaccggggccggagcgagggagagcaggaacaca

SEQ ID NO: 140831 - RNA, 70 nt, Homo sapiens
ggaccggcagacccagcaaaagcgccacagagccagcgggccggcaccggcacgaggagcgcacacccgc

SEQ ID NO: 140832 - RNA, 78 nt, Homo sapiens
acaagggagcaagaagaggagcccggggaggaggaagaaaggggaggcacgccagacccccacaggcgcgccgagacc

SEQ ID NO: 140833 - RNA, 82 nt, Homo sapiens
gaccacgaaccaccgccagggaaaagcccggaaaagcagccaagcggaagacagagccgcaaagagacacgcagaacaagca

SEQ ID NO: 140834 - RNA, 63 nt, Homo sapiens
ggaaaccgcaccgcccggaggggcgacaaccaggggcaggagaacaaggagaccaggaggcag

SEQ ID NO: 140835 - RNA, 83 nt, Homo sapiens
ggcggcggaggccgccggcgagccgccaagaggcggcgcagccaccccgcgggaacgcccagcgcgaaagcaccgggaggaaa

SEQ ID NO: 140836 - RNA, 80 nt, Homo sapiens
cgcggcccgccaggcgacccacggacagacgcgcgcgcgacgcacaaggaccggcacggcagaagccgccacgccgcagg

SEQ ID NO: 140837 - RNA, 74 nt, Homo sapiens
aacaggacccacagcgcaggagaagggcccagagaccgccagggaaggcccacggcccggcccgaaggggccgg

SEQ ID NO: 140838 - RNA, 71 nt, Homo sapiens
ggggcggcgccggacgccggccccgcgggagcaccaaaacagcaaccgaaacagaggaggagccccagggc

SEQ ID NO: 140839 - RNA, 72 nt, Homo sapiens
cggagaggcaggcgcggcccgcggggcgccaggcacgcgaggcccccaggacccagaggagaaacaccacca

SEQ ID NO: 140840 - RNA, 71 nt, Homo sapiens
acaagacgagagacgcgacgcgggcgggggaccgggcaggaaaaagcacgcagcgcggagccagcgcccgg

SEQ ID NO: 140841 - RNA, 76 nt, Homo sapiens
gaagaaaaccaccaaaggaaaagccgacaaaggacggcacagaaaagaacacacgaaagagaggggacaacaaaca

SEQ ID NO: 140842 - RNA, 77 nt, Homo sapiens
ccacaccgacaccacggaggaggcggccggaggaggacaccccaaggcaccggcgggcgacgagaacaaccccgaga

SEQ ID NO: 140843 - RNA, 70 nt, Homo sapiens
aaaaccccagcgaaacaccaagaggggaagaagcagccaaaacccagcacgcagaacacaaccccagcga

SEQ ID NO: 140844 - RNA, 101 nt, Homo sapiens
gaccaagggagcagagggggcggcagcacggggagcagcagccgcagcagaaggcagaccggcgggccgcccaccacacagcgagcgggagaaggcacgac

SEQ ID NO: 140845 - RNA, 83 nt, Homo sapiens
cagcccgacgcaaaccaaggacggggaccgcacacccaaggaggaccccgcggagcgacaaaggccacaaagcgcgacacccc

SEQ ID NO: 140846 - RNA, 77 nt, Homo sapiens
cagcgagaccgggccggaacgaaagcaggacggaggagcgaccaccgacacgcagacgcagcccagacccggacacg

SEQ ID NO: 140847 - RNA, 79 nt, Homo sapiens
gaggcggaaggcagaagaaaaagggaaagcagcaagcaaggccaaaacagcaccacaagccaacaaaccgaaaaaagag

SEQ ID NO: 140848 - RNA, 69 nt, Homo sapiens
aacgacacgcgcaagaaggaccggaacaacgaacagcgaaaagagaaaaaccgccgcgcagggaccacg

SEQ ID NO: 140849 - RNA, 52 nt, Homo sapiens
acgaccaaggagggaacaggggaaaaaaaccagacacaggaacggagagcaa

SEQ ID NO: 140850 - RNA, 76 nt, Homo sapiens
acgacagcaaccacagggcaggccagggcaagaaccaggcccgcccaaggcagggcgaccaaggaaagagccaaaa

SEQ ID NO: 140851 - RNA, 83 nt, Homo sapiens
gacaggaggagccagggcccggcccgaaaggagagccgaggcagggccggcagacagccggaggcagccgagacccagacccc

SEQ ID NO: 140852 - RNA, 66 nt, Homo sapiens
ggcgaacagaagaaagagggggaaaggaagaaaaggccacaagagaaccaaggaaaagaagacgac

SEQ ID NO: 140853 - RNA, 61 nt, Homo sapiens
ggaaaaaagagaggagcgaacgagacagaacaggaaaaaggcagcaggcgcaaaaacgaac

SEQ ID NO: 140854 - RNA, 74 nt, Homo sapiens
aaccgacgcgaagacccgagagagcaaccagaacccccagaaggacagaaaggcaggaagcgacccagaacgca

SEQ ID NO: 140855 - RNA, 83 nt, Homo sapiens
cccgccgcccgggcacgcgaggaacccagcagccggcggacgaaccagggccgaaaacccagaagaacggccacccagagaca

SEQ ID NO: 140856 - RNA, 60 nt, Homo sapiens
aacaccaccaaaaacagagccggggccggggcccacggacagcccagccaagcgccgacc

SEQ ID NO: 140857 - RNA, 80 nt, Homo sapiens
aaaacgggccacaagagcgcagggagcccaccgggcgggccggccaagggggcgaggaagagacaggcgggggagaagaa

SEQ ID NO: 140858 - RNA, 80 nt, Homo sapiens
cccagccccccgcccggggagggcaccaggcgcgggccgcaacaacccaggggagcgaggccgcccacgacaccagccac

SEQ ID NO: 140859 - RNA, 80 nt, Homo sapiens
gcgacgcgagagaaggacccacggcgcgcgaagaggaagcagccacgaagaagcaggcaggaccagccaggccccaggac

SEQ ID NO: 140860 - RNA, 75 nt, Homo sapiens
aaggacaaaaccgggcaaagccaagacaaaaccaaccccccccaaaaggagcagagaagccaaagacagcaaagg

SEQ ID NO: 140861 - RNA, 76 nt, Homo sapiens
ggagcaagggaggcgaagaaagaagaggaagggaccagaaagcgaaacagaccaccccaggaaaagagaaccgccg

SEQ ID NO: 140862 - RNA, 36 nt, Homo sapiens
gaccgggccccggcgcccaagggagaggggcaccag

SEQ ID NO: 140863 - RNA, 86 nt, Homo sapiens
aagcccaaggcaaggcccagaaaaaggaagaaaacaaccaggcaaagacacagcgcacgaagcaggacggaggaaacagcgccaaa

SEQ ID NO: 140864 - RNA, 57 nt, Homo sapiens
ccgggcgcccgcacaccaggaaccggggcaaaggggaccaaaacaaaacgagagcaa

SEQ ID NO: 140865 - RNA, 77 nt, Homo sapiens
agaagccccagccagccacaccagcaggcacgaagcgaaaagagccaggcccacaacccccgaggcaccagcccacc

SEQ ID NO: 140866 - RNA, 75 nt, Homo sapiens
gggcggagaggagcaaacagcaagcaaagcccacaacccgcgaaaggaggaaagcaggaaaagcaaagaaggcca

SEQ ID NO: 140867 - RNA, 73 nt, Homo sapiens
gccggcagaaagagggagcaacacccgggaaaggaagcgcacaggaagccggaaacggcgaaacagaaagcag

SEQ ID NO: 140868 - RNA, 70 nt, Homo sapiens
acaccggaagcgggaaagaacgacgcccccgccacacaggaacaccagcgcacaaccccaagcaaagaaa

SEQ ID NO: 140869 - RNA, 84 nt, Homo sapiens
ccgggggccgccgcaccacgcaccgcaggcccgaggcccacacccacaaggcacggaagaagagagaaagcaaagaaaacacag

SEQ ID NO: 140870 - RNA, 55 nt, Homo sapiens
ggaaccccggagaaaaggccaagaaggcagggaggccaagggaggacaccaggcc

SEQ ID NO: 140871 - RNA, 94 nt, Homo sapiens
gaagaaacacacacgaagcgagcacagaaagacagcaggcaaaacaggcaaaagaagcaggcaggccacaagccggccggacgccccggaggga

SEQ ID NO: 140872 - RNA, 82 nt, Homo sapiens
agaagcccaggacgagacacacggcacacaccagcaggcgcagaacgagggacaagaaagggagaagagaggaagagaacaa

SEQ ID NO: 140873 - RNA, 71 nt, Homo sapiens
acccaggaagccagcaagacggagcccgaggaaagcagaaagacccaacaagccaaagaacagacacacag

SEQ ID NO: 140874 - RNA, 63 nt, Homo sapiens
cagcccgcgccgggcaagccggcaggagccgcgcagagccagccaggagcccgcccaacagcc

SEQ ID NO: 140875 - RNA, 71 nt, Homo sapiens
gccaagaggcggccaaggggacgagcaaaggaagcgcgaacagcagcgcagccggacgagcgggagaggac

SEQ ID NO: 140876 - RNA, 82 nt, Homo sapiens
ggggcagccgagcgcgcgagccagacagacgcgagcgacaagagaaggaggaaaggggaacccggaggcaagacacgaggag

SEQ ID NO: 140877 - RNA, 76 nt, Homo sapiens
gcccgcagaccggagacgcgacaggacgagagaaccgagggaaacgacaagaagcagcagcgccgacgaaaagcaa

SEQ ID NO: 140878 - RNA, 79 nt, Homo sapiens
ccgcgccgaacgcccggcccgggagggccagacaaggggaacacaagaggagagaaggggaccgcagggagaaaaggcc

SEQ ID NO: 140879 - RNA, 93 nt, Homo sapiens
aaaaaccagagggaaacggcacaccaggcggcaggggcaaccagacgggccaaggaggagcaaaaaacagaagcagggccagaagggggcaag

SEQ ID NO: 140880 - RNA, 51 nt, Homo sapiens
cgccagcaccgggaagaagcagacgaagaagacacgaacaggggacgaaaa

SEQ ID NO: 140881 - RNA, 69 nt, Homo sapiens
gaggggcacgagcgccacaaccccaggcagcgggccccaggccggggcgagcgggcccgggagcgggaa

SEQ ID NO: 140882 - RNA, 108 nt, Homo sapiens
gcggggaaggaggcgcggcccgggcagcagggcggcagcgcccgagagaggcaaaagcagaccggaaaacccaccggcaagaccacacccgaggggagcccaggacac

SEQ ID NO: 140883 - RNA, 57 nt, Homo sapiens
cggaggacgcgaagggacaaagccaggacgagcgcaggaggggagcaggaccgcaga

SEQ ID NO: 140884 - RNA, 54 nt, Homo sapiens
agaacagaaacggcaaagggccggggacaccaggggccgacgcccggaaacaca

SEQ ID NO: 140885 - RNA, 54 nt, Homo sapiens
gagaaacaagaggaggagggggggcagaccgggccgccaggcgacaggcacggg

SEQ ID NO: 140886 - RNA, 75 nt, Homo sapiens
gagggcgcagcgcgaacacaggagccagcgcacgcacgcaacccgggggggcggcaaccggaacccagacaccac

SEQ ID NO: 140887 - RNA, 68 nt, Homo sapiens
cacgggggacgaaagcacacaagccccaagacgaggggccaggacaggaacaggaggagcgcggcaag

SEQ ID NO: 140888 - RNA, 70 nt, Homo sapiens
cacgggccgagacacgcagcggcggccagggaccaacagaagaagggggacacaaaaggccgggggaagc

SEQ ID NO: 140889 - RNA, 80 nt, Homo sapiens
ccaacgagagaaagaccaagagcaagaaacgagccagacaaggaacaagccagccagcaccacccaacaccagccagacc

SEQ ID NO: 140890 - RNA, 61 nt, Homo sapiens
cggaacgcgaccgcagcacacgagggagcaccaggagggggcccgcgggaagaacccccgc

SEQ ID NO: 140891 - RNA, 83 nt, Homo sapiens
cgacggcgcgcggcccgaccccacccgaagcggcgcgccccacacagacaagcagaccggaagaccgacggaagaccacaccc

SEQ ID NO: 140892 - RNA, 78 nt, Homo sapiens
agacgagaggacgggaccaggcgaagcggccgagcaggcgagcgaacgacgacaagcagaccggaagaccgacggaag

SEQ ID NO: 140893 - RNA, 77 nt, Homo sapiens
cccgcgaaagcggggcacaggcgggcacgcgcccaggcgaggcccggaaacagagggagagccgaccccaccaaggc

SEQ ID NO: 140894 - RNA, 77 nt, Homo sapiens
aagaggaacaagacagagaccccgaggaagacaacggggcaaagcgccccggcccaaagcaagaggacgcgggaacg

SEQ ID NO: 140895 - RNA, 72 nt, Homo sapiens
gcgaggcaggcccaagcccgagccacagaggaaccaaccagaggcggggccaaagcacagaacaaacccagg

SEQ ID NO: 140896 - RNA, 75 nt, Homo sapiens
cccgccgacgcaggcgccggagccgaagacacgacagacccgacgcacaacccgaaaaaccgcgccggagaagaa

SEQ ID NO: 140897 - RNA, 75 nt, Homo sapiens
ggcccgcacaccagcccccaagcccccaggcacccaggagacaagcaaggaaagaccacagcaagaccacgcccc

SEQ ID NO: 140898 - RNA, 86 nt, Homo sapiens
agagaagcgagagcgccaaaaggccgggacagcagaaaacagccagcagaaaaagccaaaaagcaagcggacaaaagaagaaacaa

SEQ ID NO: 140899 - RNA, 39 nt, Homo sapiens
gccagagcaacccaaaaagcaagaccccggccgggaggc

SEQ ID NO: 140900 - RNA, 71 nt, Homo sapiens
gaagaaaccgaagaagggacgcaggcaccaaaggaggccgagagggcaccaccaccaaccagaggagacgg

SEQ ID NO: 140901 - RNA, 71 nt, Homo sapiens
ccaacgagaaccgaacacacaaaaaggccagaaacacaccagcacagccgaccggagcacagacaagcgaa

SEQ ID NO: 140902 - RNA, 77 nt, Homo sapiens
gcgcccggcaggcagaagccagggaaggcggcccagcagcgagacacagggggcaggagaaacggcaaaacagagag

SEQ ID NO: 140903 - RNA, 78 nt, Homo sapiens
cacccgaccacgggagagcaccacagcaacggccaagaaccgggaccagggagcagaaaccaggaaacacacaaaggg

SEQ ID NO: 140904 - RNA, 75 nt, Homo sapiens
cggcagaaacaccagaaaagacaagggacacgggaacacagaggagccaagcgcccgccggacaacaagagcccc

SEQ ID NO: 140905 - RNA, 67 nt, Homo sapiens
ggcggacgggccccggaacagccggacacggccacacagaccgaacacaaacagccaacaggacaaa

SEQ ID NO: 140906 - RNA, 80 nt, Homo sapiens
ggaggcacacccgcccgcagaagagagcgaccggagcggggaacacggccccagaggaggagaaaacaccgcggcagggc

SEQ ID NO: 140907 - RNA, 82 nt, Homo sapiens
aaaaagccgcagcgacccgcagcaccaaaacgcagcgcacagggccaccccgcccaggccggccgcagcagcggagccaaac

SEQ ID NO: 140908 - RNA, 64 nt, Homo sapiens
gagcgcaggacgggagcacagaccaggaggaaaaagcagaaaaggaaagagcaagcagcaagac

SEQ ID NO: 140909 - RNA, 65 nt, Homo sapiens
gacccccaaggcaccaacaccaccagggggaccggccccaggccccccccgagcccacacaaagc

SEQ ID NO: 140910 - RNA, 84 nt, Homo sapiens
agccgccgggccaggccaaggagggacagggcgccggggaagcgggcagcgcccggaccacaggccaagcgacacaagggcacc

SEQ ID NO: 140911 - RNA, 78 nt, Homo sapiens
ccggcgccaccgccccacgcgagaccgggcaccagacgcaacaccgcagggcccagacacgcacgcccgcccgcccac

SEQ ID NO: 140912 - RNA, 96 nt, Homo sapiens
gccccacccggccccgccagcgcgcgaaagccgaggaaaaagcggccgcccgccccagccaccaccccaggggccagagcccccccagaacgagca

SEQ ID NO: 140913 - RNA, 72 nt, Homo sapiens
aaagcccaaacaaaaacgaagggcagaacaaggagaagcggcagcggccagggaagaacgggcaggagaaac

SEQ ID NO: 140914 - RNA, 72 nt, Homo sapiens
agagccaagcccagggacagcagccacgccgcaacaaccgcgagacagggaagaaaaaacgcagacgagccg

SEQ ID NO: 140915 - RNA, 57 nt, Homo sapiens
ccgagggcgaacgcacagccaaaacggcaaaggacaccgccgcccagccacaggacc

SEQ ID NO: 140916 - RNA, 77 nt, Homo sapiens
ggaaaaaaccagagaccacagaaggacgggagaacaccccacagggaagagggggagccgccaccaaaagcagacgg

SEQ ID NO: 140917 - RNA, 78 nt, Homo sapiens
ccgcaagaaaagggagacgacagaccggggcaagccccgggcgggacaggccggagcgcgaagacgcagggaaagcgg

SEQ ID NO: 140918 - RNA, 81 nt, Homo sapiens
gagggcggaagaggcagggaacagcgaaagcagccagaaaaaaagaaggcaaaacacagaacagcacacagacaaggacaa

SEQ ID NO: 140919 - RNA, 79 nt, Homo sapiens
ggaaaagcgaggcaaggcaggcggcaacagaagaaccgaaggcaggggagccaaccccaaacaagaacagaaaacggga

SEQ ID NO: 140920 - RNA, 94 nt, Homo sapiens
acagaaaaacagagaagcaacgccagcagaaacagaaaaacagacgcaggaggccagaagaccgaagacagagaagaaaaaaaaagaggcggca

SEQ ID NO: 140921 - RNA, 76 nt, Homo sapiens
agaaagaggcccacccggcaccgcagaagggaggccaacagacccaacccagaaggcaccaaacggagggggaaca

SEQ ID NO: 140922 - RNA, 85 nt, Homo sapiens
cgagaccagccgcgaacacgccaaaccagcgaaacagcgagccagccagcgaagaccccgccacagaagaagggaacagcagaga

SEQ ID NO: 140923 - RNA, 73 nt, Homo sapiens
gagccccacgggaaggagagcagccagcagaaggcgcagcgccaggccaccagaccgcgacaccagcacgccg

SEQ ID NO: 140924 - RNA, 68 nt, Homo sapiens
ccaaaaaacggagggcgcagcggagcaacacaagcggaaagaaggaaccgccccgggcagagacccca

SEQ ID NO: 140925 - RNA, 84 nt, Homo sapiens
gcacccgaggccgcgcggcggagacccccggggaagccaccgcacagcgaccagggaagcaggaagaggaacagacccagccag

SEQ ID NO: 140926 - RNA, 41 nt, Homo sapiens
cgggacccccgggccaggggggggccccagcccggccgaac

SEQ ID NO: 140927 - RNA, 67 nt, Homo sapiens
ggcaagagaaacaagcacgaaggagcaagggcaacacccggagagaagagccgcaaccaaaccacga

SEQ ID NO: 140928 - RNA, 75 nt, Homo sapiens
ggagaacacacaccgccgcaggcgcccccggggacagagcgaagaaccccccaagaagacgaaacccccgggcca

SEQ ID NO: 140929 - RNA, 69 nt, Homo sapiens
ccagccccaagcgcacccccacgccagacaagcagggggaggggagagggcagccggagacgagaagaa

SEQ ID NO: 140930 - RNA, 97 nt, Homo sapiens
gcaaagcacccagccgcagcgccagcagcggacaggcacagacaaccagggaccgccaagcagacgaaggagaacagacacgggcgagccaccgcag

SEQ ID NO: 140931 - RNA, 52 nt, Homo sapiens
gaaggaccaagaaccagacccagcgacacaggacaggaagagcgaacacaca

SEQ ID NO: 140932 - RNA, 83 nt, Homo sapiens
gaggggcggacgcggccggagaacacgagacccgcacaaaaccccgccccccaggccacacaggggccgagacgggggggaag

SEQ ID NO: 140933 - RNA, 75 nt, Homo sapiens
gcgccccaaaagacaggcccaccgaagaggagcggagggagcacacgggcgaagaacccccaaaccaaccagacg

SEQ ID NO: 140934 - RNA, 82 nt, Homo sapiens
caggaaaggcacagcaaccggagaagagccccgagaaccaagaacggaagaccagcccggacccaacgacaggggccaggga

SEQ ID NO: 140935 - RNA, 80 nt, Homo sapiens
gagagagaagaggagagagaagagccgcgcagccagaaagagaagcaaggagaaaagacgggagacaacagagaaaggga

SEQ ID NO: 140936 - RNA, 93 nt, Homo sapiens
gcggccccccgcgccgcagccgcccagaacccgaccaacaccagaacccagcgcccccagcccccggccacgcagggcggcacaaacaaggaa

SEQ ID NO: 140937 - RNA, 76 nt, Homo sapiens
caagaaacaccaacacaaaaaaaaccaacagccccccaggcagaaaaaaccagcaggccaggaacacaacccaccg

SEQ ID NO: 140938 - RNA, 77 nt, Homo sapiens
accgcaccacgagggacaccccggccaccaagcaaagaagcgcaggcaggaggccaagaaagccggacagggccagc

SEQ ID NO: 140939 - RNA, 61 nt, Homo sapiens
aggagcacacaccagaaaccagccccacaccaggagaagcacagcaccggaacgcgagaaa

SEQ ID NO: 140940 - RNA, 43 nt, Homo sapiens
ggacagggagcagaccacgcagcccacacagcagcgcacagca

SEQ ID NO: 140941 - RNA, 69 nt, Homo sapiens
aaaaagggaggagagagagccaccagccaggaccaagcagagacccaagggaacggaaaaggacgcgcc

SEQ ID NO: 140942 - RNA, 61 nt, Homo sapiens
gagccaggagcggcagcccgcagaagggggaagggcagccgacgcacccccacccgacacc

SEQ ID NO: 140943 - RNA, 68 nt, Homo sapiens
gccaaggacccagccggagacggggcagaggagcagcagggaggggaggagcacggccggccaccagc

SEQ ID NO: 140944 - RNA, 75 nt, Homo sapiens
ccgggcacagccgcggccagacgaccaagaaaacacggccaaaacaggggaagacgccaccgacaaaaggaaaac

SEQ ID NO: 140945 - RNA, 84 nt, Homo sapiens
acggaaccagaaccccaccgcggaggaagcacaagccagcagacgacaacaggcgcaggagacacagcaaagacgcaagaacgg

SEQ ID NO: 140946 - RNA, 66 nt, Homo sapiens
aaggaccaagaaccagggagcggcgacagacacgggaagcaagagaacggcgcagcggacaaggaa

SEQ ID NO: 140947 - RNA, 50 nt, Homo sapiens
accgcaaaaagcccaccacccgaagacgaagggcgcccacacgcggacac

SEQ ID NO: 140948 - RNA, 76 nt, Homo sapiens
aaggaccaagaaccaggccgcacccgaggagaggggcgacgagaaagagggaagagccccagaggaacaacaacca

SEQ ID NO: 140949 - RNA, 78 nt, Homo sapiens
ggcgggaaggcaggcaaagccggcgacccgcacagccgcaccccaacccccagggagaagagaggcgcagagaaaacc

SEQ ID NO: 140950 - RNA, 59 nt, Homo sapiens
caacccacagaaaaaccccacaagccgacaggcaccaaggaccaaaggagcaaaaagcc

SEQ ID NO: 140951 - RNA, 77 nt, Homo sapiens
ggcaggcggcggggacacccggacacggcaagaggccccacagagcggagaaagaaggagacagaagcacagaggag

SEQ ID NO: 140952 - RNA, 74 nt, Homo sapiens
cggggaaggccgccggcacgagcggagaccgcaagcagagcgacaagcaacgcaaaaacaggcggggcgcgcgc

SEQ ID NO: 140953 - RNA, 74 nt, Homo sapiens
cgcggcgcgacccaaggcgccggaaggacgggaggagccggggccaggcaccaggggaccgcggaagacccagc

SEQ ID NO: 140954 - RNA, 76 nt, Homo sapiens
ggcgccaccagcccggagacaggagcgcgaaaggggaacccacagggggcagcgggaccagggggcgaagcagggg

SEQ ID NO: 140955 - RNA, 38 nt, Homo sapiens
cgccaggccccacgcgagacaacggcaagcggagaaga

SEQ ID NO: 140956 - RNA, 79 nt, Homo sapiens
ggcaggcacccggaccggacaagggcgcacggggaggagcgcccgcggggcacgaagcccggagcccacgcagcggcca

SEQ ID NO: 140957 - RNA, 101 nt, Homo sapiens
ccgaccaagaaagccccccccgccccgagcaaaaaacacagggacgagccaccagaggaagaaacccgcgccgagcgccaacggggcggcaccaagaaaaa

SEQ ID NO: 140958 - RNA, 66 nt, Homo sapiens
cggaggaccagcaacgcacccgggacagggccagaagcgagcaccaaagcaaagaccaccaaggac

SEQ ID NO: 140959 - RNA, 73 nt, Homo sapiens
gaccaccagggaaacagagacaagaggggccccccagaacacaggggccggccaccggccacacccagggagc

SEQ ID NO: 140960 - RNA, 64 nt, Homo sapiens
cacccgaagcacaacaaaagcacgcgacacaaagcggacacaaaagggcggggccccgagcaga

SEQ ID NO: 140961 - RNA, 38 nt, Homo sapiens
agagaagcagaaccacgggagccgccaccaaaagcaga

SEQ ID NO: 140962 - RNA, 87 nt, Homo sapiens
ccggccggcggcggcgcccggggagcaggggcgcagaggcaggcgcagggccgggccgacccacccgccaccaccagcagaacggcc

SEQ ID NO: 140963 - RNA, 83 nt, Homo sapiens
caaacgcgagccgccaagcaacagccacggaagaaagcagcgccgcaggcgccaaaaggaaacacggaagaccacaacacaca

SEQ ID NO: 140964 - RNA, 66 nt, Homo sapiens
gcagccaggagcagagcgacagcggcgagcagaacacggcgagcgggggaaacaacaagccagacg

SEQ ID NO: 140965 - RNA, 79 nt, Homo sapiens
ggccacaggggggccacagcggccccccaacgccagggcccgacccaggcaagcgagcaggcgagcaggagcccacagc

SEQ ID NO: 140966 - RNA, 43 nt, Homo sapiens
gccgcggccggggcaggagcgcagagccagccggcgaaaagcc

SEQ ID NO: 140967 - RNA, 38 nt, Homo sapiens
gcacagaggaagaaagaagcacagggacacaaacaaag

SEQ ID NO: 140968 - RNA, 72 nt, Homo sapiens
cgcagcggaagcggacgccccaagcccgggccgcaccacagaggcgggggcgccgacaccgcaccccacgcc

SEQ ID NO: 140969 - RNA, 63 nt, Homo sapiens
gaccaagaaccaggaaaacggaagaccggccggccgaacaaaagaccggaacaaccagacagc

SEQ ID NO: 140970 - RNA, 67 nt, Homo sapiens
ggcggccacgcacgccccccaccgccccccacaccccaagcagggcagaaaagaacagacccagaag

SEQ ID NO: 140971 - RNA, 79 nt, Homo sapiens
gaccacgcgccgagagaccagagagaaaaccagcgagccaaacaggccccggaaacgggacgcgccacagacgggggaa

SEQ ID NO: 140972 - RNA, 33 nt, Homo sapiens
cccagccagaagagaagaaaccggacacaagag

SEQ ID NO: 140973 - RNA, 77 nt, Homo sapiens
caggcccagaaacgcacacaagaagcgcaaagaagggacggggaagaacgaaaagcaaaacagaagaaaggagaggc

SEQ ID NO: 140974 - RNA, 74 nt, Homo sapiens
gcgggccgcgagcggggcgacccgaggaaaggagcaagaagaaaagaagagcgaagaggccgagccccacaaac

SEQ ID NO: 140975 - RNA, 77 nt, Homo sapiens
aaaaacccccggcggagggagggaaaaccacacaaggcgcagcaggggacaaaagaagaagcagagagccaggaaaa

SEQ ID NO: 140976 - RNA, 82 nt, Homo sapiens
agggacacacgaacaaagacaggagggggacaaaaaagaccagaagaggagcgacaggaagaggcacaacaaagaaaagaac

SEQ ID NO: 140977 - RNA, 39 nt, Homo sapiens
aaaacgcccacagaaagaggcaaagaagaggaagcagca

SEQ ID NO: 140978 - RNA, 56 nt, Homo sapiens
ccgaggcacacagcccgaagaaggcgaaggcacggggggccgcacgccggaagaag

SEQ ID NO: 140979 - RNA, 82 nt, Homo sapiens
ggaggagggagaaaagcggacgccggggaggccaaaaaggaccccggaggaaaagcggaagcggcagcggcgaacgccggaa

SEQ ID NO: 140980 - RNA, 130 nt, Homo sapiens
aaccgcgcgggggagcgcgacgcgcaagggcgcggagccgcgggccggcgagcgcgcgccaccaggcgaggccaccaggagcagggcggcgggagagagagcggacaaggccgcagaagccgaccacggg

SEQ ID NO: 140981 - RNA, 75 nt, Homo sapiens
ggagaaccgggcagaggcggagcgcccgggccacgaggacgcaccagggcagagacacccacggcaccaccgcca

SEQ ID NO: 140982 - RNA, 80 nt, Homo sapiens
gcccgggcccaggcgccccccggagccgaaagaagccccgggggacaggcccccagcccgggaaccaaccccggcccgca

SEQ ID NO: 140983 - RNA, 97 nt, Homo sapiens
gcccccgccgccccagaaccggcgaaaaccggagagggacaccggccaggacgcagaaggacccacagaagcccaagggaaccacaaacagacagga

SEQ ID NO: 140984 - RNA, 80 nt, Homo sapiens
gaaaaaaaacagaacaggaggggagagggcaggaaccaccgcccaaagccagagcaagacccacgaagggcacacaaagg

SEQ ID NO: 140985 - RNA, 74 nt, Homo sapiens
ggcccacccgcgcagcccccagcaacgccggcagcgcccacgaccagggcagcggagcagaaaaggaaacgagg

SEQ ID NO: 140986 - RNA, 76 nt, Homo sapiens
ccgcgagaagcagcacccaagcccaggagcccgaggccccacagacaaaaccgccggcggaagagagcgcaccacg

SEQ ID NO: 140987 - RNA, 45 nt, Homo sapiens
gccaggcaccccccacagaaagggcgggagacagggaacgcgcgg

SEQ ID NO: 140988 - RNA, 87 nt, Homo sapiens
cgccgcgggagcaccggagaggggccgcggaaaccggagggaaggaagacgcccagacccccaccggcgagccaggcaccggacccc

SEQ ID NO: 140989 - RNA, 79 nt, Homo sapiens
caacgccagcaagaacgaggaggacgcgggaggcgacccgcggcgagagcccccccagagcgccagggcccgagaaggc

SEQ ID NO: 140990 - RNA, 66 nt, Homo sapiens
aggcagaacagcgacacgaacggaagaagcaggaagggcgaagcgaggaacaaggcccaaaaaaac

SEQ ID NO: 140991 - RNA, 78 nt, Homo sapiens
gggcgggcggggaggggacgggagaacagcgccacggcccaccgcgccagaccaaaggacaaggccacagcccgaagc

SEQ ID NO: 140992 - RNA, 80 nt, Homo sapiens
gacgcccagaaagggcgacaggccaccaacacacgggaggagacagcaaggaagaagaaaagagagccaaggcggcaaaa

SEQ ID NO: 140993 - RNA, 74 nt, Homo sapiens
gccaaagcagcgaagaagaggcccaacccccaccccgcccaaggaggcccagcggcccagcgggagaagccgga

SEQ ID NO: 140994 - RNA, 84 nt, Homo sapiens
ccggaggaaacagggccccggaaaaacgaagaggaaacagaaaagagaagcagcggaaggggcagagcggcgggaaaccaccaa

SEQ ID NO: 140995 - RNA, 54 nt, Homo sapiens
gggcggggcagagcaggggccggaagcaccaggacagacgcaggagagagagac

SEQ ID NO: 140996 - RNA, 33 nt, Homo sapiens
cccccgaagcacccagggcagaggcaaggaaag

SEQ ID NO: 140997 - RNA, 38 nt, Homo sapiens
gccggaccgaccccaggcggcggacaggaagaggcagc

SEQ ID NO: 140998 - RNA, 37 nt, Homo sapiens
agggaggacccaaaaagggcgaccagaacgcaacaaa

SEQ ID NO: 140999 - RNA, 115 nt, Homo sapiens
aggaagagggacggaaccaccagaagccagcccccaggcggaacgcccgccccgcagagagcaaccacaacgacagaagaccggaggaaaccaccgcccggggccggacaaccga

SEQ ID NO: 141000 - RNA, 76 nt, Homo sapiens
gccaggcgacaggggaacagacagaaggagcaggaaccaaagggaccccggaggaaaagcggaagcggcagcggcg

SEQ ID NO: 141001 - RNA, 70 nt, Homo sapiens
acaaaaggagaagacaaaagagagaaaagaaaggagagcaagaaccaagccccacaagacacggacacac

SEQ ID NO: 141002 - RNA, 71 nt, Homo sapiens
gccggggccgccgaccaacacccgaggcggacgcagagacagaaaaagaacggggacacgcgagacaccaa

SEQ ID NO: 141003 - RNA, 76 nt, Homo sapiens
caacacccaggcccacggccaggcaaaccggacagggagacggcccggcggcccggagcccacgccaaaaagggaa

SEQ ID NO: 141004 - RNA, 94 nt, Homo sapiens
cgaggccggggccaacgagccaacgccaggcgccgcccacaggacccaaagacaggaccacgcaccagcagagaaggaaagcaaaccgaagcag

SEQ ID NO: 141005 - RNA, 56 nt, Homo sapiens
cgggaccgggcgcagacggcgagaccccgcacagggggagagagacgcgggaaccg

SEQ ID NO: 141006 - RNA, 73 nt, Homo sapiens
agccgccacaccagaagggcgaggcgccgcagcaaacccaaggggggaccaagggagcaggagcagagaggcc

SEQ ID NO: 141007 - RNA, 74 nt, Homo sapiens
cccgagagcgggaccacaggccgccacagaagaagaaagaaccacaggagaccaaaacaccagcccaaggaccc

SEQ ID NO: 141008 - RNA, 76 nt, Homo sapiens
cgaccggccccagcgcgccgacaccacgcgagaacgcaagaccacgggcggaaaacacaggagacccggcaggagc

SEQ ID NO: 141009 - RNA, 80 nt, Homo sapiens
cagaggcggaccgcgcagccagaagggcccccggccacacggccacaccagagcccacagcagccgccacagggaagcca

SEQ ID NO: 141010 - RNA, 77 nt, Homo sapiens
aaaaccgcagaagcgaaaggaagcgccagaaagagagaaccagcaaagaaaaaggcacaaacccagcacagagaaga

SEQ ID NO: 141011 - RNA, 58 nt, Homo sapiens
caagagggacggacggcgagcgggcaccgacacgacgcgcccagggaggcacgccccc

SEQ ID NO: 141012 - RNA, 40 nt, Homo sapiens
ggcgccgccgcgcacgcagcacggagcgcggacgcccagg

SEQ ID NO: 141013 - RNA, 87 nt, Homo sapiens
cagggcaaggaaacggccacaagggaggggcgaccccggggcccggccagcacgaccgaggaggggcggacagcggaggagaacgga

SEQ ID NO: 141014 - RNA, 55 nt, Homo sapiens
gggaggaagacagccagcagcggcgcaaccgaccccagaaggacagccaagcgcc

SEQ ID NO: 141015 - RNA, 74 nt, Homo sapiens
gagggggcccaggccagccaccacacgaccacagcagagacaggacaaggacacaaccagagggaagcacgccc

SEQ ID NO: 141016 - RNA, 76 nt, Homo sapiens
agcaggccggccagcgccgccagggcacagagcagaggacaccacaggaaggaggcgcagagagaaggccaggcgg

SEQ ID NO: 141017 - RNA, 67 nt, Homo sapiens
ggaaccaacaggcaagccaagcaccgaggaagaaaagaaggagcacaagggcagacaaacaaggaga

SEQ ID NO: 141018 - RNA, 81 nt, Homo sapiens
cgggcgaaacgagccgacgggagcacgacaaggacgaggcccaaggaaacggcggcgccagcaggacgcgcaacacgcggc

SEQ ID NO: 141019 - RNA, 77 nt, Homo sapiens
ccaccgcaccggggagccccgccaccgcaagagccgcagcagcgccccgcaggcccccaccgcccaggggcgaccca

SEQ ID NO: 141020 - RNA, 73 nt, Homo sapiens
cgaaacgggccgaaagaccgccgcccagccccaaagagcgagacacagaacaacgccagaaagaaagccacca

SEQ ID NO: 141021 - RNA, 68 nt, Homo sapiens
cccggccgaacccccgcgggaacaccacggcacggagcaacgcgggggcgagagaaggcggagagcgc

SEQ ID NO: 141022 - RNA, 71 nt, Homo sapiens
ggggaagcaaaagaaaaggcaagacaaccacaggcagagaggaaaacagaaccacaccaccgcgccgccgg

SEQ ID NO: 141023 - RNA, 56 nt, Homo sapiens
gcagaacacaagaccaacccgccaaaaggaaccaacggacccaaaaaacaaggagg

SEQ ID NO: 141024 - RNA, 75 nt, Homo sapiens
agaaaaaggcaaaaacccggagagcaaacaacacgacggcgaacccaggcacccagagacggagcggaaaccaag

SEQ ID NO: 141025 - RNA, 57 nt, Homo sapiens
agaagacgggacacagagcacaagcaacacaagacgcgcaggagacccaggccgaga

SEQ ID NO: 141026 - RNA, 63 nt, Homo sapiens
ggcgggacgacaccgcaaggccggaggaacaagaggacgcgcccgaccagccgaggcgaccgg

SEQ ID NO: 141027 - RNA, 81 nt, Homo sapiens
gagcacaggagcgagagaggaccccggacacgaaagccgggaaaggcagagagacgaagagagaagcagggcagaaagagc

SEQ ID NO: 141028 - RNA, 93 nt, Homo sapiens
gagcacgagccacggcagaaccaaacccaccgcaagacagggaagcgcacagcaggaccagaccccagcagcggccgacgcgaccccacagac

SEQ ID NO: 141029 - RNA, 78 nt, Homo sapiens
ccgcgcccgggagcggcgccaggccggagcgcgacacggagacaggggcagcacccgaaagagcgaaagcccagacag

SEQ ID NO: 141030 - RNA, 83 nt, Homo sapiens
agcaggagaagcggaggaagcgaagggaggaagcacgagagaggagccaaagaaccccgggcggagagagcagggacgccaag

SEQ ID NO: 141031 - RNA, 80 nt, Homo sapiens
cgacgaccaccagggcgcacgccgcagagccacagacgagagggcagacccggacccccacagccccccagggcaaggga

SEQ ID NO: 141032 - RNA, 84 nt, Homo sapiens
gcaggcggagccgaccgggccaggacgaaaggaccgaagagaaaggaggaaggcgaccaaacacccaacacaggaacgacagga

SEQ ID NO: 141033 - RNA, 60 nt, Homo sapiens
cgcagggcgcccccgcaaggcggaaagaaggcggcacaagaaaagagaccagcaggagca

SEQ ID NO: 141034 - RNA, 78 nt, Homo sapiens
aaaagagcggcgaggaacccagaaacaaggagagagagcggagacaaggccacagcaggccacggcgggggcagccag

SEQ ID NO: 141035 - RNA, 61 nt, Homo sapiens
ggaaagcgccccccgccgagcgcccgggagccccgccgcgccgaggaaagaaagaaaccgg

SEQ ID NO: 141036 - RNA, 70 nt, Homo sapiens
acacagacacacccgcggaggagagaaagaacccacgcaggacgacagaagaggccggacaagagaagaa

SEQ ID NO: 141037 - RNA, 42 nt, Homo sapiens
ccccaggagaagccggcaggccccaggccaggccagacgggc

SEQ ID NO: 141038 - RNA, 83 nt, Homo sapiens
accaaacagaaaaggaggaagaggaagagaggagagccggcaaaccagccagcacgggggcccagccagccagcagcgagggg

SEQ ID NO: 141039 - RNA, 76 nt, Homo sapiens
gaccgccggcacgcacccgggcgcagcacccccgccccccaggcgacgagacccagggcagacggagcccggccca

SEQ ID NO: 141040 - RNA, 58 nt, Homo sapiens
gcagaggccaagagcccaacaccacccgagagccccaagaagcacccaagccagggag

SEQ ID NO: 141041 - RNA, 68 nt, Homo sapiens
aaagggcagcaccgaccaccgccgacaagggcagggaaacggaacaggacaaagggaaccggaacaac

SEQ ID NO: 141042 - RNA, 86 nt, Homo sapiens
cagaacacgaagcagaagacccccaccacgcccgcaacagggcaccaagagaggcgagagaccagggaagggaaacggcgggccac

SEQ ID NO: 141043 - RNA, 34 nt, Homo sapiens
cgaaaggaggaggcacagaggcccagaccaagcc

SEQ ID NO: 141044 - RNA, 86 nt, Homo sapiens
caaaaccaaaaccagacacagcacaagcagcggccacaggaacaggacggacgagaagccaggacaggccaacaagaaggggaccc

SEQ ID NO: 141045 - RNA, 62 nt, Homo sapiens
gagaacggcaacccaccagacaccagccgggaccaagaaaggcccagggaccaaagcccgga

SEQ ID NO: 141046 - RNA, 52 nt, Homo sapiens
cagacacacaacccgacccgacgagggggcaacccaaagaagaaacagaacc

SEQ ID NO: 141047 - RNA, 78 nt, Homo sapiens
acggaaacggagcagcaaggaaaaggaaaccgcccgcccccagcggggcagcccagaacgccgaggaagagggccccg

SEQ ID NO: 141048 - RNA, 78 nt, Homo sapiens
ccagcacgagaaaaaagcaaaacggaggaggcagggagagagcaccggacacagccagcaggacgacgagaggaacac

SEQ ID NO: 141049 - RNA, 73 nt, Homo sapiens
gaaggaccaagaaccagaaagacaacgaaacggcaaaccgagccacgcaaaagaaaaggacgggaggacaccg

SEQ ID NO: 141050 - RNA, 69 nt, Homo sapiens
caaaggaacaggacagaaaagagcaaacgagcgaagaagcaggaaaaagaaacacaagacggcaaaaac

SEQ ID NO: 141051 - RNA, 75 nt, Homo sapiens
ccccggaccgagccgacgccgcggggcagcgggccggcgccggcgcgagacggagcgcagggccaggcccagaga

SEQ ID NO: 141052 - RNA, 83 nt, Homo sapiens
cccgggccaaaggcagcgcccagcaacaagacagagcggccggagccgcggcggccgcggagagggacagaacaccaacaggg

SEQ ID NO: 141053 - RNA, 73 nt, Homo sapiens
gcccccacgccccgcagaggacgccgccgggcccggggaccccaacgccaaaacgaaaacaaacggaagagag

SEQ ID NO: 141054 - RNA, 62 nt, Homo sapiens
cggacgccccagcacccccagcgggcaggggaggacacaaccccagagagcggaacgagcaa

SEQ ID NO: 141055 - RNA, 84 nt, Homo sapiens
gcaccgcgcgaagcggccaaagccgcccagacggccaccggcgggaggaacaaaagaaggccggcccacagcccaaaaagaaac

SEQ ID NO: 141056 - RNA, 84 nt, Homo sapiens
gaccgcaaagcgcggaagcagaggggcaggcgaggagccagccgaggaccgacagccccagcccaagcggaagggaagaaccag

SEQ ID NO: 141057 - RNA, 76 nt, Homo sapiens
accagcaaccaggaaggagacaaaagggggaaacgaagaagcagaccagacaggaacgaaggggaccacaacacag

SEQ ID NO: 141058 - RNA, 76 nt, Homo sapiens
agaccacagcgcaaaccgagcgccagcaggaccaaacgggggagaaggaggaacacaaagaggaccagcgacaaac

SEQ ID NO: 141059 - RNA, 78 nt, Homo sapiens
agaccaccacaacaagagacaacaccgcgcggaccacaaaccgcgccagaaaagaggccacacaagcagagggcagag

SEQ ID NO: 141060 - RNA, 74 nt, Homo sapiens
aagaagacccgaagaaagcaggagaaacggcgcaacacgcgaccacacgaaggggcagaagagcacaagacgga

SEQ ID NO: 141061 - RNA, 56 nt, Homo sapiens
aggggccccaaaaccggaaaggacgcgaggacaggaaaggcgcgcccaagcacaaa

SEQ ID NO: 141062 - RNA, 74 nt, Homo sapiens
gagggcaccaggagggaagcagggaggagcgcggcaagacaaccacgaaaacgaagaggggagaagcaccacca

SEQ ID NO: 141063 - RNA, 68 nt, Homo sapiens
aaagggaaagaagcaaaggacacgaaggaaaacagagaagcgacacaaagggggaagcaggggaaagc

SEQ ID NO: 141064 - RNA, 66 nt, Homo sapiens
cgcgcgagaagagagacgagagagaagaggagagagaagaacgaggaggggccggaggccggccgg

SEQ ID NO: 141065 - RNA, 64 nt, Homo sapiens
cacacccgaaggaagaccccccagaacacaaagcaaggcacagaagaggaggaagacccaaaca

SEQ ID NO: 141066 - RNA, 80 nt, Homo sapiens
ccgggacaacggaggggaaacacgccgggaggaagagaagccaaaacaaagacagcaggcagcggcaccaacggacaggg

SEQ ID NO: 141067 - RNA, 79 nt, Homo sapiens
gagaaagaagaagaacccacaagagccccagaaaagagcagaaagaccagaggacgccacgccaaaggagcgaaaccgg

SEQ ID NO: 141068 - RNA, 79 nt, Homo sapiens
cggggagcgcccgcgacagaggagggaggaaaacaaccgagggcagaccccaaggcacaaaagaggaggaaagaagagc

SEQ ID NO: 141069 - RNA, 61 nt, Homo sapiens
caccaggaaaccaggcagccaaggcaggacaagcacacaagaaagggagcggccccaccaa

SEQ ID NO: 141070 - RNA, 65 nt, Homo sapiens
cggagagaaaacgcaaggaaaggaacaggaacagaggcccaagaacacgacccacaggcagagcc

SEQ ID NO: 141071 - RNA, 73 nt, Homo sapiens
ggaggagccgcgagcgcgaggggaccccgacggagagacaaagaagacggagggggggccagccaccgcgcca

SEQ ID NO: 141072 - RNA, 84 nt, Homo sapiens
gaaggcgacccaggcaaggccgcaagcggcagaagaaagaggaggccaaggcacacacccacgcggggcgcgcagagcgggccc

SEQ ID NO: 141073 - RNA, 80 nt, Homo sapiens
ccgggcccgggcaccacgggcggcgccaggccggcccagccgcgcgagcaagacgggagaaaaggaggggcgacgcgggc

SEQ ID NO: 141074 - RNA, 81 nt, Homo sapiens
gcgaaagggccagaaagaagagacccccaaacacagaagaggcgaaagaagagggaaaagacgagcaggagaagaaaacaa

SEQ ID NO: 141075 - RNA, 73 nt, Homo sapiens
cggccaggcacaagggcaccacaaagagaacaagcagaggaaagacacgccagagaagaacaggacacaacag

SEQ ID NO: 141076 - RNA, 69 nt, Homo sapiens
aacaaaaaagggggagaaccaaccaagaagaaagggagcaaacgaaaaacggaaaagaaggaaggcaag

SEQ ID NO: 141077 - RNA, 74 nt, Homo sapiens
aagaccaagcgcgaaagcgccaaaaggacagcaggccggggggggcacagagccccggaagacagcccccagcg

SEQ ID NO: 141078 - RNA, 51 nt, Homo sapiens
gccggccagcgccggaaaccaacaagagaacacccacgaagcaccgcccca

SEQ ID NO: 141079 - RNA, 72 nt, Homo sapiens
aaagcaagagagacaacacagggaagcaggggcagagagagagacacccaagcccaccaggggcaacagaag

SEQ ID NO: 141080 - RNA, 77 nt, Homo sapiens
ccgcaccgcgccggcccgcaaagcaaagaggcaaagcaccccgcaagaaaagaaagaacccggaaaccacaaggcca

SEQ ID NO: 141081 - RNA, 69 nt, Homo sapiens
cagacccacgcggcgccagcccggcgggaaggaaaaccgcgcagagagcaaaagagccaacacccaggc

SEQ ID NO: 141082 - RNA, 79 nt, Homo sapiens
ggacacgaccaccaggccaacaacacagcagaaccgccagagaagagaggagagagacgacgacgagacgaggagacag

SEQ ID NO: 141083 - RNA, 77 nt, Homo sapiens
ggaagcaggacgcgccgcgccccaaggccaaacaccagagcacccagaaggaacaaaagaagccaggacccagccgc

SEQ ID NO: 141084 - RNA, 80 nt, Homo sapiens
ccggggccacgcacggggacacgggcccaggcccgagggggccggaccgggagggcagaggggggcgggccgagcacccg

SEQ ID NO: 141085 - RNA, 106 nt, Homo sapiens
gccgccagggcgcagggccgggccgccgcgcaccgcagcgccggggcacgacacaaaaacaggggcgggccaagaagagcggagaagcagcccagcggggagccac

SEQ ID NO: 141086 - RNA, 78 nt, Homo sapiens
cagggggagccaccccgcgggggccaagcaagaggagccaaccgcccacgccaacgggaccccacagccgggacgacc

SEQ ID NO: 141087 - RNA, 62 nt, Homo sapiens
acggcgcggcaaccggggagcccgccagcaggcaggagaagggcaccggggaggaccgcgcg

SEQ ID NO: 141088 - RNA, 78 nt, Homo sapiens
aaaacagaaggggaaaagcaccaaggcccaacaaggcacgcagaagaacccccgacgaagcaaggaggggggccagcg

SEQ ID NO: 141089 - RNA, 81 nt, Homo sapiens
agcggaccacacaaccacaggaggagaccggacagaaaggacgacacgcccagacgcaggaaacacgacggggcgggcggc

SEQ ID NO: 141090 - RNA, 83 nt, Homo sapiens
ccgcacgcggcgaaggaagaggagggcaagaagggcaagaaggcccgaagacccaaggaacacacggaccgaaggaccgccac

SEQ ID NO: 141091 - RNA, 91 nt, Homo sapiens
cggcagaccccacggcacaggggccaacacggaaagaaccagcaccaggaccgacggaaccacccaagaggaaggcagcaacggacccgcc

SEQ ID NO: 141092 - RNA, 57 nt, Homo sapiens
ccggaccgagagcggaccgagagcgcgaaacgcacgagaaggaggaagagaacagcg

SEQ ID NO: 141093 - RNA, 51 nt, Homo sapiens
caacaccaaaaacaaaacgaaccaggacggcaaggcgaccaggagagaaga

SEQ ID NO: 141094 - RNA, 74 nt, Homo sapiens
gcggagccgggggcccgccgggacgaaccaccgcggacaaaccgggggaaccacaaaaccaagaaacaaaaagc

SEQ ID NO: 141095 - RNA, 80 nt, Homo sapiens
gagagccacacgaagaacacggccaaagccagagacgcgcacgaaacgacgaagaggcccgaggacagaggagcaaagga

SEQ ID NO: 141096 - RNA, 83 nt, Homo sapiens
gagaccggaccgagagcggaccgagagcgcgaaacgcacgagaagaaccaaaagagcagaaggagcgagagaacagcaccacc

SEQ ID NO: 141097 - RNA, 34 nt, Homo sapiens
cccgacgcccgcacgggaccccaccaccccagac

SEQ ID NO: 141098 - RNA, 80 nt, Homo sapiens
acgaaggggcaccggacaggcaaagaacgcaacacagagggaagacagaaagagcaagaaaaggagcaggaaaggcggac

SEQ ID NO: 141099 - RNA, 57 nt, Homo sapiens
accccggccggcccccgccggcccggccccacggggaagaggcccacgcggaccggc

SEQ ID NO: 141100 - RNA, 75 nt, Homo sapiens
ccaaacgaggccacggcaccaacgacacggagagcaccgcggaccggccacgcaggaccccagaagggccccgag

SEQ ID NO: 141101 - RNA, 51 nt, Homo sapiens
gccaggacagaacgggggcaagacgccaagagaaaaggcgagagcacaaag

SEQ ID NO: 141102 - RNA, 76 nt, Homo sapiens
gacggccgcggcaaggcaagagcggcggcgccaagaggcgcgaacagggcccacccgccacgacacaggggaagaa

SEQ ID NO: 141103 - RNA, 78 nt, Homo sapiens
agaggaaggaccccagagaagacagcgaagagagagaaacgaaaaagaggaaggagcgagggagcacaagcagcggaa

SEQ ID NO: 141104 - RNA, 73 nt, Homo sapiens
aaggccaccgagggaacccgaccggacccagccccagaagccaggaacaggagaacgagggacggcgacaagc

SEQ ID NO: 141105 - RNA, 74 nt, Homo sapiens
cggcgaagcaaaggaacgcgccggaagaaaaggccaaacgcggccccagaacaacgcagaagaccaagaagaaa

SEQ ID NO: 141106 - RNA, 74 nt, Homo sapiens
aacgggcgaagcgacgagccgcgaggaggcagaggggcgggcaaaggagaggcacaggaagcagaggcaagaaa

SEQ ID NO: 141107 - RNA, 73 nt, Homo sapiens
ggagccgcgcaaaggccccggcaagaagagacagacaacccggcccacaagcggggacccaccagcccggcga

SEQ ID NO: 141108 - RNA, 63 nt, Homo sapiens
ggggcacggagcaacaggaaagaagagagaagaagcaaaccgggaccggaagcaccaaggaga

SEQ ID NO: 141109 - RNA, 80 nt, Homo sapiens
gcagcaccaacccggcccaccaaaccccgaggaggcccagcccggagaggaaagcaaggagagaacagcccagcaaaagc

SEQ ID NO: 141110 - RNA, 71 nt, Homo sapiens
gcggcagacggaggccgagccccacgcgcgccggacgaggacagggcagaccgccagcagcacagcaagcc

SEQ ID NO: 141111 - RNA, 80 nt, Homo sapiens
ccgaggccgccggagaggagggcccgcccgcgcaccagaacagaagaggaacgacagcgccaccccccagaaggcgacaa

SEQ ID NO: 141112 - RNA, 83 nt, Homo sapiens
caacaagccgaccacacacgaggagcggagccgcgacggcccaccaacagggggggaaaccagaaccgccggagaacagaggc

SEQ ID NO: 141113 - RNA, 65 nt, Homo sapiens
cggcccagcgaaggggaccccgaggaccacgcacgaagaagagccaggccaagggaagcagagga

SEQ ID NO: 141114 - RNA, 71 nt, Homo sapiens
cagaagaaaacaaccaaaggcacagacaaagaagagccaaagcccaggacggggaaacagcagagagcagc

SEQ ID NO: 141115 - RNA, 73 nt, Homo sapiens
cggacgagcgcgggcaacaaagacgaagaggagcagaaccagaagggacacacaggacggcaggaaggccagc

SEQ ID NO: 141116 - RNA, 76 nt, Homo sapiens
gacccaggccgccggccccacagggaccgaccagcgggcagcacgcacaaggaggagcagcggcccccggcggagg

SEQ ID NO: 141117 - RNA, 59 nt, Homo sapiens
gaaaaccgaggcaccaagccggccagcaagacccgagcccaccgggagaagaggcacaa

SEQ ID NO: 141118 - RNA, 73 nt, Homo sapiens
aagagagaaaagagagaaccccaaccggggaggaaaaccgacgaaggacaggacaccagcccaaaagagaccc

SEQ ID NO: 141119 - RNA, 65 nt, Homo sapiens
caaacaccaggaggaaagggaggacagcccagcagcaagcccaagccacagaccaaaaagagaaa

SEQ ID NO: 141120 - RNA, 76 nt, Homo sapiens
ccacaccacgcccagcagccggggaagagacccaaacgccaacagaaacgcaccaccaagagccaccgaagaaagg

SEQ ID NO: 141121 - RNA, 69 nt, Homo sapiens
ggaaggccggggcgcccggcgccggccgagaaggcagaggcgcccgccagcagagggaaggcgcccgaa

SEQ ID NO: 141122 - RNA, 76 nt, Homo sapiens
accaaaaaggaaggaggaagggagcgggccccagaaaaacaaggaaagaggggaaaggaggaccagagaggacaac

SEQ ID NO: 141123 - RNA, 76 nt, Homo sapiens
aaggagcaaagcagcggcgcagcccgggagcacaacagggagaagacagcaagaccccgaaccgagcagacgaggc

SEQ ID NO: 141124 - RNA, 54 nt, Homo sapiens
gcggcgccgccaacgcgcccccgagggccccagcgcaaagcccaaggccacacc

SEQ ID NO: 141125 - RNA, 71 nt, Homo sapiens
gggcgcgaccccccggaaaaaaagcccagaaaaagaaagacaagcagcagaggacagaagccagaaaagag

SEQ ID NO: 141126 - RNA, 62 nt, Homo sapiens
gcggggaaaaaggagcggagaaggaggagagcaaaagacaacacccagaaacagaaagggac

SEQ ID NO: 141127 - RNA, 85 nt, Homo sapiens
ccccgcgccccgagagaggcggccacgaagacggcaaggaggaaaggaagaggaagacggcaagaagcgaaaaagacgaagaaag

SEQ ID NO: 141128 - RNA, 69 nt, Homo sapiens
ggccggagaaagacccaggaaaagagacggaaagggcgaacggagaggccagcgcggaacgagaagccc

SEQ ID NO: 141129 - RNA, 84 nt, Homo sapiens
ggcgaaaagacaggagggaggaacagacaccgagccagcaagcccccaacggggaggcagggagcccagaaagaagagaaaaag

SEQ ID NO: 141130 - RNA, 75 nt, Homo sapiens
acaaccagaaccacaaaacaaggccggcgaggaccacagacacagggccagaaacacagggacaagcacggaggg

SEQ ID NO: 141131 - RNA, 55 nt, Homo sapiens
caaggggcacggcgagaagaacagccaccggagagaggaccagaaccagaccgga

SEQ ID NO: 141132 - RNA, 57 nt, Homo sapiens
gcagagaagaacggaacacagaacacggagagagagcgaggacccgccacaggaaga

SEQ ID NO: 141133 - RNA, 78 nt, Homo sapiens
cccacgcggccagcgaaaacgcccagggccaacaagacacacagagggccccgagaaagaccacagcccaagcgcgac

SEQ ID NO: 141134 - RNA, 76 nt, Homo sapiens
ccagaggcccgagcagccagcacggaggaagaccgccggaccaaacagagggccccacgccaccaccagaggggcc

SEQ ID NO: 141135 - RNA, 66 nt, Homo sapiens
gaccggagaaaaagggaggaggcgggaccaccaaaaccaacaacccaaggagaaaggagcccgacc

SEQ ID NO: 141136 - RNA, 82 nt, Homo sapiens
gccgagagccgggggagcggggccccacacccccccggggggggacgcccccgcaagcagcaccagcggcaaccaagaagcg

SEQ ID NO: 141137 - RNA, 81 nt, Homo sapiens
gacgcggaggaggaagaaaagagagccagccgagcacccccaagcagagaggcggcacccagcagcagaggcgggagcggc

SEQ ID NO: 141138 - RNA, 90 nt, Homo sapiens
cagacacccaaccacccgggccgcaaaggcggagacgccgggcagcgggggggcccgggggcccggggcccgggaggggaaccgcggggc

SEQ ID NO: 141139 - RNA, 59 nt, Homo sapiens
gagaccggccagaagaaaaggcgccaaaaggaaacacggaagaccacaacacacaaccc

SEQ ID NO: 141140 - RNA, 67 nt, Homo sapiens
ccgggccagcggccgcgcacccccggccggaggcaccagcggaaagagacgaaaaaaaaccaacacg

SEQ ID NO: 141141 - RNA, 83 nt, Homo sapiens
aggcccacggaggaagagccgggcagcccggagcgggccaggcacccgccggcgccccccggcacaacccgcgggcaccagcc

SEQ ID NO: 141142 - RNA, 82 nt, Homo sapiens
gcgcccgcgggcccagccgacgccaccacgccgcggaggccaggggcggacccaggcaacgggccgggacgaaggcacggac

SEQ ID NO: 141143 - RNA, 45 nt, Homo sapiens
ggcagagggccaggaagagcagcaggcacgcccacccccggcccc

SEQ ID NO: 141144 - RNA, 77 nt, Homo sapiens
cgcccgccgaccggcacgcgccgggacacagacggggggagcccaggaacggccggaggacaggcgggcgcggacgg

SEQ ID NO: 141145 - RNA, 80 nt, Homo sapiens
ggagccgcacgccacagcgaaggcgcgagggacaagagcagaacagaaggacagagaagaacccagaaaaaagcaaggcc

SEQ ID NO: 141146 - RNA, 76 nt, Homo sapiens
ccggccgacgcccggcggggcagggaaggacagcgcaggcccccgcccccgagcagccgaggccggggggggcaca

SEQ ID NO: 141147 - RNA, 57 nt, Homo sapiens
aagagagaccgccacagcagaagaaaagaagcagagcaccaaacaggggggaaggaa

SEQ ID NO: 141148 - RNA, 79 nt, Homo sapiens
gggggagaagagaagagaaacgggagcaccaaaaaggcccgcacacagggacaggcaaaagcagaccggaaaacccacc

SEQ ID NO: 141149 - RNA, 73 nt, Homo sapiens
aacccggccgacccggaccaacaaccccaaggaggcaacaggaagaagaaaccgcgaacagcgcaccacagaa

SEQ ID NO: 141150 - RNA, 79 nt, Homo sapiens
cagcccgcgcccgccaggcgacaggggaacagacagaaggagcaggaaccaaagggcacgggaggacccagcccacgga

SEQ ID NO: 141151 - RNA, 89 nt, Homo sapiens
ccagcaccacgcccgcgccgcgccgccgccaccagcccaagagaaaggggcagagagaagagcacacagaaggccaggagcgacagagc

SEQ ID NO: 141152 - RNA, 74 nt, Homo sapiens
aaccccgggagcaccacacagaacaccaccagaaggcgcggacagaacccaccacccgaccccccggggagaag

SEQ ID NO: 141153 - RNA, 77 nt, Homo sapiens
aaggaaaaccgggccagcgaacggagaagaaacggcgaggaaaaccaccacacaggggaaacacccagacaacacac

SEQ ID NO: 141154 - RNA, 75 nt, Homo sapiens
ggaccaaaacgcggagaacaaacaccgccccaccaggggggagacaacaagaggaaacccacagggaacacgccg

SEQ ID NO: 141155 - RNA, 75 nt, Homo sapiens
aaccacaagccagacgagcgcggaaggcaaggagagaacaacggacaacaagcagagcccagaagaaagaacgac

SEQ ID NO: 141156 - RNA, 65 nt, Homo sapiens
gcagccgggaagagagacccggcccgggcacggagacaggcccaaaaacgcgacggcaacacaag

SEQ ID NO: 141157 - RNA, 73 nt, Homo sapiens
agagggcagagggccagccgccccgcaggaggaggcacgccccgggcggcacgggccaccgcacccaggcgga

SEQ ID NO: 141158 - RNA, 75 nt, Homo sapiens
cacaaaacccagacaccgacgggccgcgaggggaagaggaagcaaagccaaggagggaaacggaacagaacagcg

SEQ ID NO: 141159 - RNA, 72 nt, Homo sapiens
gccgcgggaagggcggggagcggagccaggccccgacgacccggagacgcggaggcaggcaccgaagcgcag

SEQ ID NO: 141160 - RNA, 64 nt, Homo sapiens
gcccggccacggcggagccaaggacggggaggacgcacgacgcgcggcacgggaacgcagccgg

SEQ ID NO: 141161 - RNA, 85 nt, Homo sapiens
gaaaggggaggccgggaggacgaaggaccgggcaaggagggacagcccgaccaagcccggaggagaaggcggggccgacaagcgg

SEQ ID NO: 141162 - RNA, 102 nt, Homo sapiens
cggagagggaccgacccgaggccagcagggaaagccccgcagcaacagacaacccagaaaagaaaaggccaggggcgccgaaaaacccgggaacaaacaggg

SEQ ID NO: 141163 - RNA, 77 nt, Homo sapiens
aagcacaaagggaggagcggacccacccccgaaccaaaagaagcaagggaaagaccaggagccagaaaccaaccaaa

SEQ ID NO: 141164 - RNA, 67 nt, Homo sapiens
caaaccgcgaagagccccaaaccccacaggggagggacccgggaagaaacggcaaaagccacagacc

SEQ ID NO: 141165 - RNA, 71 nt, Homo sapiens
accaagaaccagccaaaagggcaacgaaacgaagcacaaggcaagagcagaaaacaggcaaccaacagaaa

SEQ ID NO: 141166 - RNA, 68 nt, Homo sapiens
acaggcgcggaacaagagcggagaccggacggggccaggagcaggcccccccagcagcccacacacag

SEQ ID NO: 141167 - RNA, 78 nt, Homo sapiens
ggaggcggcagcgaagaagacgaaaaaaacccagacggaaaggagagcggacccaccgaccaagcacagcaaaaaaac

SEQ ID NO: 141168 - RNA, 58 nt, Homo sapiens
gagcgggcagccgccgccaccccgcggccgcacccccgccccagacaagagagggcgg

SEQ ID NO: 141169 - RNA, 75 nt, Homo sapiens
gccagcgcgcgcaacacaagacaagaacccacggccgagcacgaaaggaacggcagaaagaggcagcaacagagg

SEQ ID NO: 141170 - RNA, 80 nt, Homo sapiens
aaaacagcagaaggcagagccagcaaaaaggcgaagaagaagaagaggaaccaaccagaggcggggccaaagcacagaac

SEQ ID NO: 141171 - RNA, 77 nt, Homo sapiens
aaccagaagaccaacaggacaggaccggcagggggagcgagcgaccagaaacagagggaacaggcacgccccacccg

SEQ ID NO: 141172 - RNA, 71 nt, Homo sapiens
agcaccccacaggggagaaggcaaccaagcaacaccaggcaggaggagagcgacacgcgggaggcaaaggc

SEQ ID NO: 141173 - RNA, 68 nt, Homo sapiens
ggacggcgcggaccaaagcgacgggcacgaaagccccgcccggccggggcccagaagaagccccccag

SEQ ID NO: 141174 - RNA, 79 nt, Homo sapiens
cagaagcacaaccacagcaagagcaccggcgaccgcaccacaagggacgagaccaaacggaagagacccaaaggccggc

SEQ ID NO: 141175 - RNA, 67 nt, Homo sapiens
ccacagcccagggaggacaacagaaccacagccaagagaaagaggcagagcaacagggacacaagca

SEQ ID NO: 141176 - RNA, 81 nt, Homo sapiens
gccgaagaaccgagcgacagagacaagcgagcgccgcacaaaaagcagagagggaagggaaccggcagcgaacgaggaagg

SEQ ID NO: 141177 - RNA, 66 nt, Homo sapiens
acagcaccaagaacccacgcagagccccggggcggaaagaagccaaggccaaggagcgggcggcag

SEQ ID NO: 141178 - RNA, 52 nt, Homo sapiens
gcagaaggccggagacaccagcagagaaccgcagccagaagcaaagcagaca

SEQ ID NO: 141179 - RNA, 84 nt, Homo sapiens
gaccgacgaaacagacccagggacaaccaccaccagcgagcaaaagaacaaagaccaagaccaagaagcgccccagcggcaaca

SEQ ID NO: 141180 - RNA, 34 nt, Homo sapiens
cccgagagcgggagcagccccgccacagccccac

SEQ ID NO: 141181 - RNA, 77 nt, Homo sapiens
ggagaaaccccccaacccgcaaaggacaaaaacaaagggaagaacgcgacaacaagacaaaacagcaagacaacaaa

SEQ ID NO: 141182 - RNA, 75 nt, Homo sapiens
gcacggagaaaagaacaacaacgggcaaaagaagacaaggaacagaacaggcccgacccaggcaagcgagcaggc

SEQ ID NO: 141183 - RNA, 124 nt, Homo sapiens
ccacagcccagcggaggcacccaacaacggcggcagcaggacaggaccaaagcaggcgggggagcaaggaaaaggaggcaaaacccccacaggaagaccgaaaggggcgcggggcacgacacag

SEQ ID NO: 141184 - RNA, 72 nt, Homo sapiens
gcggggaccagaggaaccccaggcacacgacggagaacgaagagaaaggacacccacccagaaccaggcaac

SEQ ID NO: 141185 - RNA, 76 nt, Homo sapiens
caacagaaaagagcgcaaagggcaggaaacaaacaggaccgcaagaagggaacgcgaggcaaagcaaggagacaaa

SEQ ID NO: 141186 - RNA, 67 nt, Homo sapiens
agaaagagagcagagcaaaagccagacaccaaaccacgcgaagcgagaaagaaccccagaagacacc

SEQ ID NO: 141187 - RNA, 78 nt, Homo sapiens
ggagacagagcgagggagcaagagggcggaggccacgaacacgccggagccgccagagcaaggggaacaaagcggcaa

SEQ ID NO: 141188 - RNA, 53 nt, Homo sapiens
ggcggaagaaaaccaaaaagcagggaagccagcagcagaaagcaccccagcga

SEQ ID NO: 141189 - RNA, 61 nt, Homo sapiens
aaaggaaacacaacaccaagcccacaaggccccgcagggggagcccgcgccaggggcaggc

SEQ ID NO: 141190 - RNA, 56 nt, Homo sapiens
aaggagaacccaccagccgggcccaggcgacaacaccagaaagagcacgaggagca

SEQ ID NO: 141191 - RNA, 57 nt, Homo sapiens
gcagcgaaccgcagggagaaagaacgagcagcagccgagacaagacccaccaagaaa

SEQ ID NO: 141192 - RNA, 66 nt, Homo sapiens
ccaaaaaggcacgagggaacgggaaagaacagagaagaccagaacacacaagaaccgggagaacga

SEQ ID NO: 141193 - RNA, 79 nt, Homo sapiens
gcaagaccacagcgcgcggcccccacaccacacagagagcgagaggccagagcccaggccgaggcgaaaggagaaaacg

SEQ ID NO: 141194 - RNA, 97 nt, Homo sapiens
gcaaagaccaaaccacaacagcgcgaacagaggcacccgaagccaaagggaaaagaacagagaacgaggaagaaaaggaaacccaaaaagacaaggc

SEQ ID NO: 141195 - RNA, 73 nt, Homo sapiens
gcaggcaaaaaagagagccacagaagaggacgaaaaaaacgcgccaaaccgggacacaagagaggacacagag

SEQ ID NO: 141196 - RNA, 61 nt, Homo sapiens
gccagggcagaagcgggaaggccaggcggccccccccagagccagaggagcagggacccag

SEQ ID NO: 141197 - RNA, 77 nt, Homo sapiens
cacagaccagaggacggcacaaaggagagaagccaagggcacggccgccggggaagaccgggggagcccagaaggcc

SEQ ID NO: 141198 - RNA, 69 nt, Homo sapiens
gacaaagacccggaccgcagcaagacaggagcccaccaccaccagccacgcacccagcgggccccacca

SEQ ID NO: 141199 - RNA, 72 nt, Homo sapiens
cggagccaccacaccagcgacgcaagagaaagcaggaaaaagccagaagggcaccaaccccaccaacacaac

SEQ ID NO: 141200 - RNA, 71 nt, Homo sapiens
caagccaaaagcaaagacgcacaggaccagagaaaggacagggacaggaaagaaagaaaaagaaaagaaaa

SEQ ID NO: 141201 - RNA, 50 nt, Homo sapiens
ggagagagggagagccaaagaagaacggaaaggcgaagagaagagggaaa

SEQ ID NO: 141202 - RNA, 57 nt, Homo sapiens
ggcgccgagggcggaaccgagcgggaaaaggaaagcgaagccaacaaagaaaggacc

SEQ ID NO: 141203 - RNA, 77 nt, Homo sapiens
gaaccaggaccgaacaagcacacccgcagggcgaaccacagcaaaaagcgaccagaagcaacagaagagggccacac

SEQ ID NO: 141204 - RNA, 67 nt, Homo sapiens
caacccgccgaacccaaaaacaacgcaaagggagaaaacgggccggaggaaaagggcggcaggggac

SEQ ID NO: 141205 - RNA, 85 nt, Homo sapiens
gaaacccccgagacgaaccgaaaccgcgacaagccagccagccagccgggcgggacacccggacgcaggcccggccaggagagcg

SEQ ID NO: 141206 - RNA, 60 nt, Homo sapiens
cgaagcaacaaaagagaagaaaagaggggggggggacgggacagggcagaccgccagcag

SEQ ID NO: 141207 - RNA, 58 nt, Homo sapiens
aaacacgcaaagaccaccagcccgcacaggcagacaaccccggggacaggaaacaaag

SEQ ID NO: 141208 - RNA, 39 nt, Homo sapiens
gagccacaggcaaggccccgggagggacaggagaacagg

SEQ ID NO: 141209 - RNA, 74 nt, Homo sapiens
aggccaggcgacccgacgggccaccggccaaagagcacagggacagaaaaacagcgcagacgagccgcaaggac

SEQ ID NO: 141210 - RNA, 74 nt, Homo sapiens
ccaaccaaagacgggaacaagggagggggacagaccaaagagggaaacaggcaccagcagaccacacaagaaaa

SEQ ID NO: 141211 - RNA, 43 nt, Homo sapiens
gcggaggagggaccaaagccaggccgccagggcggcgaaacac

SEQ ID NO: 141212 - RNA, 56 nt, Homo sapiens
cgccgaaaccgcaaaccccaaagccaggggggaggcagcgggagaggcaccaaaga

SEQ ID NO: 141213 - RNA, 78 nt, Homo sapiens
ccgcccgcccagcagcccaaccgggcgcagaccggccagccgccacgccacgcaggaacccgagcgcagaggggaagc

SEQ ID NO: 141214 - RNA, 73 nt, Homo sapiens
ccacgcagagggcggagcggcagggaagcagagccccgggccgggaaggggaaacggccacgcaggaaccaca

SEQ ID NO: 141215 - RNA, 81 nt, Homo sapiens
gccggccaggacgacccggccggggcagcccaaggcgccacgccgacccgagcgcccgaggggcagaacgcaccccaccgc

SEQ ID NO: 141216 - RNA, 49 nt, Homo sapiens
aaaaccaggcaaaaagcagcagagcgagagggaacaagggaggggaaac

SEQ ID NO: 141217 - RNA, 72 nt, Homo sapiens
gaaccgaaaggaccgcaaaaaggccaagacccagagcaggacggacaccgaaccggcggcgaggcccagacc

SEQ ID NO: 141218 - RNA, 58 nt, Homo sapiens
caggagaagaggcggcccacaggaccgccagcagcagccgaaaacgcacaagaccaac

SEQ ID NO: 141219 - RNA, 75 nt, Homo sapiens
cgggaacaaaggagcaacggggccgggcggccaaaggagaacaaaaccccgacacggaacccacaccggagcgga

SEQ ID NO: 141220 - RNA, 74 nt, Homo sapiens
agaccgaccccgagagaggacggaaaggacggaaacagaacccacgcacccagcgggcagggagaaccaagggc

SEQ ID NO: 141221 - RNA, 55 nt, Homo sapiens
accaggcgaacccagagagccgcaacaacaaacaggaacaagcgggaaacggagc

SEQ ID NO: 141222 - RNA, 73 nt, Homo sapiens
ggggccggccaccgggaacaacacgcagcagccagacaccgggggccacgagacgcggacaaaccggcgacca

SEQ ID NO: 141223 - RNA, 79 nt, Homo sapiens
cggagagacaaagcgaaaggggacccagaaagaagcacaaaacaaacgacagcagcagagaaacacgcaaagccgaggg

SEQ ID NO: 141224 - RNA, 78 nt, Homo sapiens
ccaagccccggaccagcggaaaggacacaaaccccagcggcagacacaggacccagcaccgaagcaggccgagcgaga

SEQ ID NO: 141225 - RNA, 71 nt, Homo sapiens
cgagagggcggcgaaggaggcagaggcacagcgcaggcaaaccaggaacgacaaagaagccccaaaacggg

SEQ ID NO: 141226 - RNA, 95 nt, Homo sapiens
caggaaggcccccaagggcaccaacggggagcgcggccagacaggcagacgcggccaggagcggggccgaccacccccagagagacggggaccag

SEQ ID NO: 141227 - RNA, 75 nt, Homo sapiens
gggccgaggcaggaggcaaccaggccccccggcccccggcccccggaccccagggaagcggggggagacggacga

SEQ ID NO: 141228 - RNA, 95 nt, Homo sapiens
gcaggcaaccaaaaagcaggacaagcgccgaaaaaaagaggccgccgcgcgccacaggcacaggccaacgcgccacggcagaacgaagaccagca

SEQ ID NO: 141229 - RNA, 52 nt, Homo sapiens
aagggaaaacgcgcgggccaagaaaagagcaccggccagcagaaccagccgg

SEQ ID NO: 141230 - RNA, 73 nt, Homo sapiens
ccccacggcccccggcgccccggcccccgccccagcccgccggcggcggcgggagaccgaggggagacagcag

SEQ ID NO: 141231 - RNA, 77 nt, Homo sapiens
agagagcaaaccaaagcagcagcagaggcaccaaacgcggccaaccgagcaaggcgcggaccaggcgggcgcgacgg

SEQ ID NO: 141232 - RNA, 74 nt, Homo sapiens
gagccgcccgggccagcggccgcgcacccccggccggaggcaccagcagaagacggcccagcagagcacccaac

SEQ ID NO: 141233 - RNA, 65 nt, Homo sapiens
cccgggaagcgggccggcagcgcccggacgaggaggcacaggccgccccagaccccggaagccca

SEQ ID NO: 141234 - RNA, 79 nt, Homo sapiens
cgacccccgggaagcgcagcagcagggaccgagcaggggcgcggcaagaaacgggccaaggacagaagacaaggagacg

SEQ ID NO: 141235 - RNA, 83 nt, Homo sapiens
aacggaacgcgccaccaaaacccgcagaaagggacgcggcacagaacgaagaagaaagcagaagcaagagaaaaaagaaacac

SEQ ID NO: 141236 - RNA, 77 nt, Homo sapiens
ccaacaaaggcagaagcaaagcaagaccaagcccccagacgaaccggcccaggccggaaggggccagagggaagcac

SEQ ID NO: 141237 - RNA, 73 nt, Homo sapiens
gcggaggacgggacaaccacgcgcagacacagaggaaacaagaagcgggcccacaaagggagaagccagaaag

SEQ ID NO: 141238 - RNA, 87 nt, Homo sapiens
caggaccgccaaacccaaaccgggaagaaggagaaagggccaaccccgaagaagcaaacagaaacgaaggagacagagaagaacgac

SEQ ID NO: 141239 - RNA, 83 nt, Homo sapiens
gagagcagcaaaaacaagaccgacaggcaggagcgaggcagcgcaggagcagaccggagccggaggaagagaaggcagcggac

SEQ ID NO: 141240 - RNA, 72 nt, Homo sapiens
ccacgggaacaagaggggacagaaaggagacagaacagacagaaaaaacaacaagaaacccacaaccaagag

SEQ ID NO: 141241 - RNA, 91 nt, Homo sapiens
agaacagagcaaacagacggaagaggaaaccccaacgagaagcgaagggaacgggaccccagagccgcaccgagggggaaagaccaaaccc

SEQ ID NO: 141242 - RNA, 77 nt, Homo sapiens
cagcgcgggcaccgcggccggagcggggcggggacagaagggccgcccgggcgacgaacaccgccccggaacagcag

SEQ ID NO: 141243 - RNA, 78 nt, Homo sapiens
acaacgcaaaacgaaggaagggaaggccgcagcccagccaacacggcccgaggagcagaaaagaggagagggagagcc

SEQ ID NO: 141244 - RNA, 66 nt, Homo sapiens
ccagagcacagacacaaaggaggaggcaaaccagcgggaggaagaacggcaaaacggaggagcaga

SEQ ID NO: 141245 - RNA, 78 nt, Homo sapiens
gagagagggaagcgcccggccggaggcaggggaaaggaagagagagacgcaggcgccaccacagaccagagcccgcac

SEQ ID NO: 141246 - RNA, 55 nt, Homo sapiens
cagggaaggcggcccagcagcgagacacagaaacagacgcacgccgaaaaaaaac

SEQ ID NO: 141247 - RNA, 85 nt, Homo sapiens
cggccacccgcaggcgagcggggcgaggcagcgcagccgcgccgcaggggcgcgagccgaaccggggggaaagaggcccccgggg

SEQ ID NO: 141248 - RNA, 58 nt, Homo sapiens
cgcccccgccgccccccagagacacaccggagagaccacaccgcgccagaccccccag

SEQ ID NO: 141249 - RNA, 69 nt, Homo sapiens
gggaggagcccagaccgggcgacccgccggaaacaggccagccacgcagcagcagaagccaggccgggc

SEQ ID NO: 141250 - RNA, 72 nt, Homo sapiens
gaaacaaaagcaacaaagaggagaggagcacggcagccaggaggccgacccgacccggaccgcccgccggcc

SEQ ID NO: 141251 - RNA, 82 nt, Homo sapiens
gggaagccaagcaaacgcagaaggacgcccacgagcaaccaagagaggaaacgggaagcgaagggaaagaacgaagaaacgg

SEQ ID NO: 141252 - RNA, 63 nt, Homo sapiens
cggggccccacacccccccggggggggacgagacaagggcaacgagacacccagcggcccggc

SEQ ID NO: 141253 - RNA, 70 nt, Homo sapiens
gagagaagaacaggagaagcagcagagggaagagggccggagcgagggagagcaggaacacagagaggag

SEQ ID NO: 141254 - RNA, 74 nt, Homo sapiens
gagccaaaaccgggcccccacgcgcggcagaccccccggaaggcaggccaaacggagggaggagaagacagagc

SEQ ID NO: 141255 - RNA, 85 nt, Homo sapiens
cccccgaccccagcacaggggagaccacgcccccagccccccggggcggagaaccaaacgggaggccgcagggcaccaccgcaac

SEQ ID NO: 141256 - RNA, 76 nt, Homo sapiens
gaaagcaagaagaaggaggcccaaagaggaaagcgaacgcgaaaagaaaagccgagagcagccagaccggcgaaga

SEQ ID NO: 141257 - RNA, 83 nt, Homo sapiens
cgcgcgaccgccgccaccaggccgcccggaagccgacaggaacccgcccacgccagcgaagccgacaggaccaacgacaggcg

SEQ ID NO: 141258 - RNA, 76 nt, Homo sapiens
cgagacacccccgagaaggacagccagggcccggagacagccaacgagagacccaagagggagagcaagggacgcc

SEQ ID NO: 141259 - RNA, 64 nt, Homo sapiens
gccgggccaaaggacgaagaacccacagagacccaaacacaacggaagccacagacacgggcaa

SEQ ID NO: 141260 - RNA, 68 nt, Homo sapiens
cgcgcccagccccagcaacagcacagccaagcaacgcacacaacagcagcaggagacaacacaaggaa

SEQ ID NO: 141261 - RNA, 61 nt, Homo sapiens
cagagacagcaaccggccacgaggagggagccccccaagagaacccagggggagccacgcc

SEQ ID NO: 141262 - RNA, 88 nt, Homo sapiens
caagacaaaaccaaccccccccaaaaggaccagaggagcgagagcagcaagaaccacacccagcagcaagcagcggaagggaaaccca

SEQ ID NO: 141263 - RNA, 78 nt, Homo sapiens
agccagcccagccccccagcggagcacacagaagccgcgcagacacaccacggcccgagcccagggccgaagcaaaag

SEQ ID NO: 141264 - RNA, 73 nt, Homo sapiens
cgagagacgaaggggcagaggccaagagcccaacaccacccgagagccccaaggaaagaccacagcaagacca

SEQ ID NO: 141265 - RNA, 91 nt, Homo sapiens
gcgacccgcgcaagcgcgagaccgaccgcacggggaggaaggaccgaggaccggaagaagcagaggagccagacaggaggaagacgagaca

SEQ ID NO: 141266 - RNA, 59 nt, Homo sapiens
gaaggccccaacacccggagcagcgccacaagggacaggcaacacaggagcgcccagca

SEQ ID NO: 141267 - RNA, 86 nt, Homo sapiens
agaaggggaaagaggcaaacgaaacccagcaagaccagcaggacgaaaaacggaaacgccggaccaaaagcaagccagagagaacc

SEQ ID NO: 141268 - RNA, 56 nt, Homo sapiens
cccgggggcgcaccgccgccgccaaggcggagaaacaaaacagaggagaccagacc

SEQ ID NO: 141269 - RNA, 79 nt, Homo sapiens
cacgagcgccacaaccccagggcaagaggagcagcagcggcggggccaagcgggagagcgagaaggcggaacaggagag

SEQ ID NO: 141270 - RNA, 81 nt, Homo sapiens
cgccggcccgcggcgaggcgccaaaccccaccgccacgggaaacacacagaagaccgcagaccaagggagcagggcggggg

SEQ ID NO: 141271 - RNA, 81 nt, Homo sapiens
agagagagccgcgcacgcacagacaaggcccccagaaagcgcccgcagggaggggagagccgccggccgcgcccaggagga

SEQ ID NO: 141272 - RNA, 85 nt, Homo sapiens
gcgacacgacccaagaacgccgcgggggaccgccccgcccggagcgaggacccgcgggggaccaccggaaaccgggccaggagca

SEQ ID NO: 141273 - RNA, 46 nt, Homo sapiens
gaggaggccaccaaccagacggccgcgccgcccccaggcccaagcc

SEQ ID NO: 141274 - RNA, 82 nt, Homo sapiens
gaagccggaggccgcgggaggaggcgccccgcgcagcggcggcggagcagagcgccccaggagagcacgccaaccggcagcg

SEQ ID NO: 141275 - RNA, 55 nt, Homo sapiens
cggagggaaccaagaaaaacagacagcaaaggagcgagcagcgccaagaggcaca

SEQ ID NO: 141276 - RNA, 76 nt, Homo sapiens
aaacgcacaaagggagcagggagaggagcgggaaacgggagggaaccagcaacaagccgggcccgacccgaaaagc

SEQ ID NO: 141277 - RNA, 75 nt, Homo sapiens
gcaggaggggcaggaggacggcgcagaccggaaccgccaggacagacaggaccacggaagcaggaggagacacag

SEQ ID NO: 141278 - RNA, 82 nt, Homo sapiens
accggaggccaacggcagaagccaccacaaaagcgaaagggcacaccacaggaccgggagccaacaccccgcgaggccagga

SEQ ID NO: 141279 - RNA, 86 nt, Homo sapiens
accgcccgaaaacggagaagcagcaaccggagcagaagccgcaccaaagcaaggaccacaaggaccagaaggacaccaagaaacca

SEQ ID NO: 141280 - RNA, 76 nt, Homo sapiens
ccccgcgccgccgaccccccggcgccgcgccggcggcggcgaggaggaggccgagaccagccaggggagacccagg

SEQ ID NO: 141281 - RNA, 81 nt, Homo sapiens
agaccgagccacgcgcccagccgacgaggaccccggaggaaaagcggaagcggcagcggcgaacgccggaacggaccaaca

SEQ ID NO: 141282 - RNA, 77 nt, Homo sapiens
gacccacccaagcacacccaaggacagcagcccaccaagcacagacaagcaaagcacagacaagcagcagggaaaac

SEQ ID NO: 141283 - RNA, 60 nt, Homo sapiens
cggcaaagcccggagacaagcccacacgaaaacgacggcacccggggcgccggaagcggc

SEQ ID NO: 141284 - RNA, 53 nt, Homo sapiens
accaagaaccaggagcggaccaagaaaggaccaaagggagcagcaagacaacc

SEQ ID NO: 141285 - RNA, 71 nt, Homo sapiens
caaagaaggagcggagaaacaggaaccccaggcaagggcccaaaccggacagaaggagaaacacacaacag

SEQ ID NO: 141286 - RNA, 52 nt, Homo sapiens
gagccccacgggaaggagagcagccagcagggccagacagccaccgaagggg

SEQ ID NO: 141287 - RNA, 74 nt, Homo sapiens
gcagaccaaaacccagccccagcacggaggagagcagcagaaagcagagagcccagaagaaaccaaagccacac

SEQ ID NO: 141288 - RNA, 75 nt, Homo sapiens
cagcacagagggggacgccccaggaagccagagaagcagaggagagggcaaggaagaaaccaccaaggccaaagc

SEQ ID NO: 141289 - RNA, 54 nt, Homo sapiens
gcgcgaggggcgccgaagcgagggggggaaaccacaccacccgccacagacagg

SEQ ID NO: 141290 - RNA, 77 nt, Homo sapiens
gcagccgccgacccgagggaacacggacgccgcaggagggccaagagaacagaaacgggaggaggcacgagaccagg

SEQ ID NO: 141291 - RNA, 79 nt, Homo sapiens
cagcgaaagaaaggaaagacaaaaaacacggaaaacccacaggaaaacgccccacaggagccgccgcgcccaggcggag

SEQ ID NO: 141292 - RNA, 103 nt, Homo sapiens
accccgccggcaaccaccccgcgagaaggaggagccccccgcccggcagcgccccgcgagaaacagacaagagaagagaggaaaagaaacccgggggagaggc

SEQ ID NO: 141293 - RNA, 70 nt, Homo sapiens
gcacaaagacggagacacccaacaccaaccaccacgccaggagggaagcaggaggagaggaacaggaagc

SEQ ID NO: 141294 - RNA, 72 nt, Homo sapiens
gaacacgcccgaaaaaggggcgaaaggccgacaaaagcagcggggagaccggaaagaagaaggcacaagcgg

SEQ ID NO: 141295 - RNA, 82 nt, Homo sapiens
aggagaagccggaggaggacaacgacaccaccgcagcgacgagcagaaagagccccaagcccgcagccccagaagaaaaaca

SEQ ID NO: 141296 - RNA, 79 nt, Homo sapiens
ggacggggcgggcgcaggacggaccaggggaaaagaaacaaacaacaagaagaaggacaaggaacgaaggcaaggaggc

SEQ ID NO: 141297 - RNA, 75 nt, Homo sapiens
agagaggagggagaacacagaaaccggccccagcacgagcgcagagcagagagagggagcgcgcggacacacccc

SEQ ID NO: 141298 - RNA, 102 nt, Homo sapiens
accagcagcaaggcagaaccaccccaggcacccccggccggcgcgaggccaggagaaaaccggaagagaaaggccgggaagcaggaaagaaaaaaacaacag

SEQ ID NO: 141299 - RNA, 49 nt, Homo sapiens
agagcgcaagcccagcgggacaggcacggagggaaggaagacacaagcc

SEQ ID NO: 141300 - RNA, 67 nt, Homo sapiens
gcccgaggagccccgcgcggcgcaaaaaccagacaccccacaccaccacccagacgaccaaaagggc

SEQ ID NO: 141301 - RNA, 74 nt, Homo sapiens
cagccccgcacacgagcagcgcggcaaaagagccgggaacaacccaggggaaccaggggaccagcagggcaggc

SEQ ID NO: 141302 - RNA, 77 nt, Homo sapiens
agagccgccaggcagaaggccccccgaacagcaggcgccaccagcccggagaacgggcaccccgggcggaaaagagg

SEQ ID NO: 141303 - RNA, 68 nt, Homo sapiens
gccgcaaacgagcgccaaccacaggagggagggaggaggacacgcgaagaaaagccacacggggagca

SEQ ID NO: 141304 - RNA, 58 nt, Homo sapiens
aaggcagcgcacgccgcaggggcagaagcgggagccggcaccgagggaggagggccac

SEQ ID NO: 141305 - RNA, 55 nt, Homo sapiens
cgagaccagccggacaacaggagggcaccggcgcacccgggacgaacgccaggac

SEQ ID NO: 141306 - RNA, 80 nt, Homo sapiens
cgaagaacagcgggaaagaaggcaaaacacggccaccaaaaccccaacaggggcaccgagcacggaggcgcagacgccga

SEQ ID NO: 141307 - RNA, 70 nt, Homo sapiens
gcccaaacgcacacccaggaagcggaagaagagagaaacaagagcgaggagaagagagggacagagaccg

SEQ ID NO: 141308 - RNA, 70 nt, Homo sapiens
gcccgaggcgccaacggagaggcccggggaagaaagaggggaacccgcccaaaaaaccggaaaagacaga

SEQ ID NO: 141309 - RNA, 70 nt, Homo sapiens
gggccggaagaggcagaggcgggagcaagcagccagggggaaacagcagcacagacagacaagaggcagc

SEQ ID NO: 141310 - RNA, 90 nt, Homo sapiens
cggagagcggcgaggcggcagccacaggggcaacacccacgccccggagcccgggagcacagccggccagagaaacagaccagacagcca

SEQ ID NO: 141311 - RNA, 63 nt, Homo sapiens
agacggacagaccccgcaggacggaaacccacaggcacacccaaggaaagggagcagcaccgg

SEQ ID NO: 141312 - RNA, 35 nt, Homo sapiens
agcgaggaacaaaacaggaagaagcagcagcaaca

SEQ ID NO: 141313 - RNA, 54 nt, Homo sapiens
gaggcaaacggggggcgcggagggaccagcgagcggaaaacagaacggcagccc

SEQ ID NO: 141314 - RNA, 50 nt, Homo sapiens
gaaaacgaggcaaggcagaaaacgcacagcaaggcgaccgaaccccggcc

SEQ ID NO: 141315 - RNA, 75 nt, Homo sapiens
gccagaggaggaaaggaagacaaggacggaggaaacagcgcagaggcagaaaggacaacaagaagccagaggccc

SEQ ID NO: 141316 - RNA, 78 nt, Homo sapiens
aaacaagggggcgagcggcgcgagacgcgggagccacggcgccaccaccaggagaaggcggaaggcggccccaaccag

SEQ ID NO: 141317 - RNA, 54 nt, Homo sapiens
aaaaaccaaggagccgggggaggcgcggggccgcaaggccaggcgcgcagaggc

SEQ ID NO: 141318 - RNA, 79 nt, Homo sapiens
ccgggccaagcacagagaagccggggggcacgggcacaggccccagccacccccgaagcacggagagagggggaccccc

SEQ ID NO: 141319 - RNA, 81 nt, Homo sapiens
gggcaccccggaccgcgcagccaccgcggcccccgcggggcggagaacggaaaagcaccaggaagcagagaggaccgcaga

SEQ ID NO: 141320 - RNA, 54 nt, Homo sapiens
acacaggaaccaagggcaacaggaaggcgcaaggcgcgaccagaagaagaacaa

SEQ ID NO: 141321 - RNA, 78 nt, Homo sapiens
gaccgcacacggagaaggaagcgcaccggaggaagccgaacagacccagcagccgggaaccgccccacgcgggccaac

SEQ ID NO: 141322 - RNA, 56 nt, Homo sapiens
gcaaccacagagggcgagcagaggccaacacgcgcgcgccaggcggagaaacacgc

SEQ ID NO: 141323 - RNA, 76 nt, Homo sapiens
gccagagaaagccacccaccccgcaaagaaacaagaggcacccagcaagcccagggaggaaaaccgggcacaagaa

SEQ ID NO: 141324 - RNA, 54 nt, Homo sapiens
cggacgcacaggaaggaaaaagggagaaaaaaccgaggagaaccggggcaggag

SEQ ID NO: 141325 - RNA, 55 nt, Homo sapiens
ggcagaggagaaccgacgaaccgcgaccgggcagccagaacagcacacagcaccg

SEQ ID NO: 141326 - RNA, 66 nt, Homo sapiens
gggaggagaaggggcggaggaacccccaccaaaaggacagaaggacagccaccagaggacgccgca

SEQ ID NO: 141327 - RNA, 77 nt, Homo sapiens
accggaccccaaggcaaaaccgcagccacggcagccaggagggcgcgaagagagacaccagaaagaaggaaaaccac

SEQ ID NO: 141328 - RNA, 76 nt, Homo sapiens
ccccagcaaccagggcggggaggagaacgcaggggccgcagggaaaaggagaaaaggacgacggaaccaccacgaa

SEQ ID NO: 141329 - RNA, 80 nt, Homo sapiens
ggaagagagcaacgccagagcccagggcccagaggaccccagccgcgcccgggagagcaagacaccagccacaaggagag

SEQ ID NO: 141330 - RNA, 65 nt, Homo sapiens
cacgaccaaagggcacccagcccagacccacagcccagcgaaccccaagcccgacggggacccac

SEQ ID NO: 141331 - RNA, 73 nt, Homo sapiens
gaagcgcacacaagaacacagaccggggccaaaccgcaaaccagggaaaggaccggccccagccccaaaagcc

SEQ ID NO: 141332 - RNA, 82 nt, Homo sapiens
gaaaaaccgccaaacgcaggcacaaggcgcagggggaaacggaaagcaaagacagcggaagccaaagccaccaaggccgagg

SEQ ID NO: 141333 - RNA, 73 nt, Homo sapiens
aggccgccaggccgcagacgcgaaggaacggcaaagcggagaaccccgccaaccagaggcaagcacaaaccag

SEQ ID NO: 141334 - RNA, 80 nt, Homo sapiens
cccgcccgacacgcccgcacacaaggcacgggacccggaggaggccacagccacagaagggacaaccacccggcacacgc

SEQ ID NO: 141335 - RNA, 77 nt, Homo sapiens
cacggaacgaaacaagcaggacagcgcagcacaaggcaaagagaaagggaagaacgaacccagaagggaagggacgc

SEQ ID NO: 141336 - RNA, 75 nt, Homo sapiens
ggggcagcggcccgggcggcgacggagcgacgaaagcgccgcgcaaagaggggaaagaccacagcagagggaagc

SEQ ID NO: 141337 - RNA, 81 nt, Homo sapiens
ccacagccccaggagggagccaacaacccgccacacccggggccggcaccccgacccacaggaggaggaagccaagaacgg

SEQ ID NO: 141338 - RNA, 78 nt, Homo sapiens
agacgagggaagccaccaggacgccccggcaaagagaaggagggcggagaacggaaaagcaccaggaagcagagagga

SEQ ID NO: 141339 - RNA, 39 nt, Homo sapiens
gggccagaaacaggaagacggacgccggcagaggccccg

SEQ ID NO: 141340 - RNA, 74 nt, Homo sapiens
acagccagaacagggacgccagccgcagaggaagacccgagccccgggggccacgcaaggccggccccgagagc

SEQ ID NO: 141341 - RNA, 58 nt, Homo sapiens
ggccccgcaggccacccaggcccggaggcagcgcaggagcccccaggacaggcacacc

SEQ ID NO: 141342 - RNA, 79 nt, Homo sapiens
aggagcgcaacagcagcaccaggggagcaacagcgagcaacaggcaacgaaaacagacaaaacaacggaaaagcagggc

SEQ ID NO: 141343 - RNA, 38 nt, Homo sapiens
caaacgcaaacgggaacggagacagacccagcacggac

SEQ ID NO: 141344 - RNA, 85 nt, Homo sapiens
cgccaaccgcaaccagacgccagcgggacgaggaccgagaccgcggccgggaccgagggcacccgggaacagaaaggagagggag

SEQ ID NO: 141345 - RNA, 70 nt, Homo sapiens
gaggccgggggaggcccgaaggccgcccgccgggcgcggcgcccaggaccacagagggcccgcggccggc

SEQ ID NO: 141346 - RNA, 77 nt, Homo sapiens
gacacaaagcacaacgagagaacagagcgggagccgcggaggccggaggacgagagccgcccccaggcacggggcga

SEQ ID NO: 141347 - RNA, 64 nt, Homo sapiens
cagaccgcagggaccgccgcgacaccgaggacgccaaggaggcccgaacggcgcagagcaggag

SEQ ID NO: 141348 - RNA, 61 nt, Homo sapiens
agcggaaacccggcggcacaccccaaaggcagccaaacgggccggcaggacaggagacaga

SEQ ID NO: 141349 - RNA, 59 nt, Homo sapiens
gcaaacacggcaacgggcaaacaagaccagggcgcaaaaccgccaaaggacaccaagcc

SEQ ID NO: 141350 - RNA, 74 nt, Homo sapiens
gacagcagcagcagcagccagacgggaaaggcagacaggcccgggagcgagacgcaacagaaaagccgagacag

SEQ ID NO: 141351 - RNA, 100 nt, Homo sapiens
caaggacaggcgagacagcagccgcaagaaaaggaccaagaaaggcccagggaccaaagcccggacaaggcccgagcaccaggaccgcagaaggccccag

SEQ ID NO: 141352 - RNA, 85 nt, Homo sapiens
ggaacgaagacgaaaagccacgaagaaaaggggaaggaggcgaacaggaagagcgggccgcacgggggaaagggagacaggagag

SEQ ID NO: 141353 - RNA, 71 nt, Homo sapiens
gagcgacgggcaggaaggagggggcgcacaaacgaggcgcgagaccgcacagcaaggaaagcacccagaga

SEQ ID NO: 141354 - RNA, 72 nt, Homo sapiens
cgacagcaggggcgacgaaaccgcagaccagaacagaggagccaggaagagacaagcaacgaggaaaagaaa

SEQ ID NO: 141355 - RNA, 78 nt, Homo sapiens
agcacagagcaccacgaacaaacagaaagcgcgaagaggggaagcaaagcaaaacaccggagaggcaagcaaccagga

SEQ ID NO: 141356 - RNA, 85 nt, Homo sapiens
cacggggaaaaggcaaaaacccacaccgcaacccagcgagagaaaggagagccggagaggaggaaggagaagcccgggagcgcgc

SEQ ID NO: 141357 - RNA, 70 nt, Homo sapiens
aagcacgaacagcaggccaaagaccagagggggaaggagcggcgcgcgcaaccagcccccgcccaccgaa

SEQ ID NO: 141358 - RNA, 88 nt, Homo sapiens
acccgcccacgcccagcagcagcagcaacagaaaacccggacaaccagcggggcacaacaagggcacaacagagccaccccaccaccc

SEQ ID NO: 141359 - RNA, 84 nt, Homo sapiens
gaccccggccgcggggccaggaagcggaggagccccggaggcagagcggcgccaggcgcaaggaagaagagacgccgcgcggca

SEQ ID NO: 141360 - RNA, 72 nt, Homo sapiens
gcaaacaacgaggccaagcccgaaggaccagagcaaggaggacggaaaaccgagcgaaaagaaaccgaaagc

SEQ ID NO: 141361 - RNA, 47 nt, Homo sapiens
aaaaccacacaaggcggcgaagaccaaagcagagagccaaaacaaag

SEQ ID NO: 141362 - RNA, 85 nt, Homo sapiens
ccggcgccgccaaacagcccagccgcgccagcgcccggcgccgcgcgccacccccgaggccagaggagccaggaggaaaacacac

SEQ ID NO: 141363 - RNA, 69 nt, Homo sapiens
cgcccagccccaagagcgggacacagaacaacaacagggcacggaagcaggagcgaaagccagcaaagc

SEQ ID NO: 141364 - RNA, 80 nt, Homo sapiens
cccacgagaggcagcgccaggcggagcagaccaccggggccggcggagggggaacagacccccgggggggcgcaagagcg

SEQ ID NO: 141365 - RNA, 79 nt, Homo sapiens
aaagaccccccacaccggcccacgcccccgacgccaacaaacgagggagcaggagacacccccgacaccgacacgagag

SEQ ID NO: 141366 - RNA, 78 nt, Homo sapiens
aaggaaccggacacagagcaaaacccgaggaaaggaggccaacagaaagaacccagcaccgcaagcccacagagagaa

SEQ ID NO: 141367 - RNA, 63 nt, Homo sapiens
caccccgaaagccggaaaacgagccggagacacaggccccacccccaaggggacaccagggag

SEQ ID NO: 141368 - RNA, 75 nt, Homo sapiens
ggaaggggcagcagggccccgggcacacggaaagaggcccccaacagaagagggaaagggaaccgcacaagaaaa

SEQ ID NO: 141369 - RNA, 70 nt, Homo sapiens
agaacacgggagaaaaaggaaaacgcggaaaaccgacacaacagaaagcgaccagagaccgaggaccgcg

SEQ ID NO: 141370 - RNA, 68 nt, Homo sapiens
ggagcaaagaaggacacagcacacacaccaagggggaacaggcaaagggcagcaccgaccaccgccga

SEQ ID NO: 141371 - RNA, 70 nt, Homo sapiens
ccagacacaaaggaggacacgggcagacgcacacacagcccagaagggaaccgcaccaaaaacaaggggc

SEQ ID NO: 141372 - RNA, 75 nt, Homo sapiens
agcaacggggaaaggccacggaaggaaccaaggagaaaagaaacgaacaggccgccagcgggagccgacaagacc

SEQ ID NO: 141373 - RNA, 95 nt, Homo sapiens
gagagcgagcgagggggggcgcgccggaaaccggagcgcgcagcaggaaagaccacagcaagaccacgcccccagccgggggaccaggccgaacg

SEQ ID NO: 141374 - RNA, 33 nt, Homo sapiens
ggcagaagcgcgaagccgggcaaaccaaaggac

SEQ ID NO: 141375 - RNA, 73 nt, Homo sapiens
caagcaggaccacccaccagccaccagggggccgcagccggccaggggacccgaagggggcgagacgacacag

SEQ ID NO: 141376 - RNA, 55 nt, Homo sapiens
acggcgcacaggagagggaagacaagggaggcgaggacggacaaaaggaaacgga

SEQ ID NO: 141377 - RNA, 82 nt, Homo sapiens
agcggagaggcggcggcgaggacggcgacggcgaggagaaaccgaccagagggcaaaggggagacaggggggagggccaaaa

SEQ ID NO: 141378 - RNA, 68 nt, Homo sapiens
ccgacgccaggcagcgcccccaaacgggaccagaccccacaagaaaacacacaaccacaggcccaagc

SEQ ID NO: 141379 - RNA, 76 nt, Homo sapiens
ggacgggaagaacccacgcgcgacgaaaagacaccagggaaaaacccgaagacgagacaagagaagaagcaacaca

SEQ ID NO: 141380 - RNA, 69 nt, Homo sapiens
acaggaaccgcagcacaaaagaaacgcaggccaacaaaacgagcaaaagggaccggggcaaacaaaaaa

SEQ ID NO: 141381 - RNA, 73 nt, Homo sapiens
accaagcgcgaaagcgccaaaaggacagcaggagaaaaccggaagagaaaggccgggaagcaggaaagaaaaa

SEQ ID NO: 141382 - RNA, 81 nt, Homo sapiens
gaagccggagcacccacaagaaggggaccgcagaccggcagcccgaaaggccccccagccagcgcagggcagaaggccccc

SEQ ID NO: 141383 - RNA, 30 nt, Homo sapiens
cacacaccccgccgggccggggggggcaca

SEQ ID NO: 141384 - RNA, 86 nt, Homo sapiens
cccggagacaggcgaaccgacagccaaaagacggccagggagaccgccggggaagccccggagccagcgggggccaagacaacaag

SEQ ID NO: 141385 - RNA, 123 nt, Homo sapiens
aggggacgagcaccagcgaacgagcaaaggcacgggcagccggaaggacaccaagagcggaccgggccccgcggcaaccggcacgcaccagagcagcccacaggacggcacccgccccacagc

SEQ ID NO: 141386 - RNA, 72 nt, Homo sapiens
cagaggcccaaagaggcgcaagagagaggagggggcaccgagcaacgagggcagagaagaccaaacagacaa

SEQ ID NO: 141387 - RNA, 90 nt, Homo sapiens
cagaggcacccgagcagcgccagcggccgagcgggcggcccggccgggcgcccggggcggcggaggcccagagggggaaccccgggcggg

SEQ ID NO: 141388 - RNA, 79 nt, Homo sapiens
caccccgccgagccaaacgccggggaccccggcagccacccaccgccgccgcccccagcggcagacaaggcccaaagac

SEQ ID NO: 141389 - RNA, 86 nt, Homo sapiens
acaggaggagccagggcccggcccgaaaggagagccaagacgacagcgaacacccgaaggagccagcaacagaggagaacacaagc

SEQ ID NO: 141390 - RNA, 66 nt, Homo sapiens
gcgacgcgagagaagagacgaggaaccccaagagaccaggcagaaacaacgaacgagcaaggaagg

SEQ ID NO: 141391 - RNA, 73 nt, Homo sapiens
ccgcgaccggaccgccccggggaaacccgggcgccgccaagagccgagcacggacagagggaagggaacgccc

SEQ ID NO: 141392 - RNA, 81 nt, Homo sapiens
gcaggaggcgcggccgagccccgacggccacccggcgggcgccggaccgaaggcgcgaccacgacgagaagcgggggccgc

SEQ ID NO: 141393 - RNA, 86 nt, Homo sapiens
aagaaaaaagagagagaaaaaggacaaaagccaagaggaggacagcgcacacagcaagcacgaggggcagggcccagccccgaacc

SEQ ID NO: 141394 - RNA, 44 nt, Homo sapiens
cggcccccagccccaggccgggaggcggcgaaggcgggcaggcc

SEQ ID NO: 141395 - RNA, 74 nt, Homo sapiens
agcagcaccacccccagacggccaccccagccagggaagaaccacaaggagccgcaaaacacaccagggaccac

SEQ ID NO: 141396 - RNA, 69 nt, Homo sapiens
ccacacccaagagcaccgccggccaggaggagagcgcaccaccaaaaaggcaaacacaccagccccaga

SEQ ID NO: 141397 - RNA, 56 nt, Homo sapiens
ggccccccagccagggagccccgagaaccggaggaagcaccaacaaaaagccgcgg

SEQ ID NO: 141398 - RNA, 68 nt, Homo sapiens
gcgggagggcagccaccaaaacagacccgggcagcaccagaacacaaaaggcggagccaagaaaacga

SEQ ID NO: 141399 - RNA, 77 nt, Homo sapiens
acggccgcccagcgccagagacaaggccagcagccgcagcgcccaccgccagggccacgaggggacggcaggggacc

SEQ ID NO: 141400 - RNA, 81 nt, Homo sapiens
ccaaagccccaaggcgacaagaccggaccggaaacaggacacaaggagggccaggacacaccagaggaggggggaagcgga

SEQ ID NO: 141401 - RNA, 78 nt, Homo sapiens
ggcgccccgaggccggaaaaggccgcccggcgcccgcaggagcagaacaccccaccagaccacccagcaagcccacaa

SEQ ID NO: 141402 - RNA, 38 nt, Homo sapiens
cagcgaccgggagaacaagacggcccccgggccacggg

SEQ ID NO: 141403 - RNA, 70 nt, Homo sapiens
gccgccgggacccgccacggggcaccacccggcgccgcgggggcaaaaggaagaggagcaccgcgcccag

SEQ ID NO: 141404 - RNA, 75 nt, Homo sapiens
cgccaccccgcgcaggcgcgcggccgcagggaccagccaaggaggcggagcaacagcaggaaaccaacgaggaag

SEQ ID NO: 141405 - RNA, 65 nt, Homo sapiens
gaccggaggacgcggagaaccggcacagcccccgggagccaaggcgagcgcaacagcagggacaa

SEQ ID NO: 141406 - RNA, 38 nt, Homo sapiens
ggaagaaagcagcccagaggcagcaagaggagaagcca

SEQ ID NO: 141407 - RNA, 65 nt, Homo sapiens
gggaagaaccgaagcaacggggcagagaccccccagcaagcaaggaacgagggaaggaagccccc

SEQ ID NO: 141408 - RNA, 66 nt, Homo sapiens
aaacccaaaccaacaggaaaaccaaaagcccacgacagcaaccggaaacagccagacgaacggacc

SEQ ID NO: 141409 - RNA, 49 nt, Homo sapiens
cagacggcgaaggcagccacagcgcccagagagaacaaaccaggggagg

SEQ ID NO: 141410 - RNA, 70 nt, Homo sapiens
ggaggagcacagaacgccaggaccaaaacagggagaaacacagccagaaggagcagcaacgaaaagacac

SEQ ID NO: 141411 - RNA, 83 nt, Homo sapiens
aagaggcccacccggagaaccccacggagaaccagagcccgacacgggaagagaagaggaggccacccgaagggaaccgcgcc

SEQ ID NO: 141412 - RNA, 35 nt, Homo sapiens
agaggcgcgccaaagaaaagggcacaacgcagccc

SEQ ID NO: 141413 - RNA, 76 nt, Homo sapiens
cgggccgcgcccgagggcagaccacggccccggagaccgggcggaagaaaaagcaagagacgaagcgcccacaacg

SEQ ID NO: 141414 - RNA, 76 nt, Homo sapiens
gccgccgggagcacacgaaggcagaggaaacgaggagccggccgacagagaccaccacagcagaaagagggcagag

SEQ ID NO: 141415 - RNA, 86 nt, Homo sapiens
cagggagcgagagcggagaagcgggaggagaccacccaaacgcggcacgggagcccggcccaggccccgagcggagggaggaaaac

SEQ ID NO: 141416 - RNA, 78 nt, Homo sapiens
aggcaaggacggcggaccgggaggaggcagacgggcgacagaggaacgggggagaggcgaacgcccccagccacagag

SEQ ID NO: 141417 - RNA, 75 nt, Homo sapiens
aggaagacaacacaaagcgaggacaggaaaacaagaaagcagaaaacagaaaagggagaggacaaaacgcaccac

SEQ ID NO: 141418 - RNA, 78 nt, Homo sapiens
gaagacacaaaggacggaggcacggaagggggagcaacagacaagcccgaaaggaacagcagcaggaacgaaacccca

SEQ ID NO: 141419 - RNA, 78 nt, Homo sapiens
cccggagacacaccgacaagcagaccggaagaccgacggaagaccacaccccgagggagcccaggacaccacgagaag

SEQ ID NO: 141420 - RNA, 54 nt, Homo sapiens
cggccggacacgcaggcagcgccacaaacaggaaggaaaggccaacgcaacaac

SEQ ID NO: 141421 - RNA, 66 nt, Homo sapiens
aagcacgccaaaagacgccccacaaaggcaagcggcacaggaagaccgcgggaggccgaagacaca

SEQ ID NO: 141422 - RNA, 33 nt, Homo sapiens
agaccggggccaaacaacccggaacgaccagga

SEQ ID NO: 141423 - RNA, 85 nt, Homo sapiens
ggcggaggccccagggaagcgcagaaagcaggcgaacccgcggcgcaaaacgcaaagagcccgggaagggcgcggagcaggcaac

SEQ ID NO: 141424 - RNA, 67 nt, Homo sapiens
agaccagacagaggagaaacaccaagcacgggggaaagaacagccaaagggaagcgccggcaaagag

SEQ ID NO: 141425 - RNA, 74 nt, Homo sapiens
aacgagagccaccaagcggaccagaacaggagaaagaagagagaccagaaacgagaggagaagaaaccagccag

SEQ ID NO: 141426 - RNA, 67 nt, Homo sapiens
gaaaagacagcgacagccgaaacagcggaacgcaaccgaaccaaccgggcacacaagcaacagaaga

SEQ ID NO: 141427 - RNA, 75 nt, Homo sapiens
aaaaggaaaggagagaccgcaacacaaccaacaacagagaacagccaggaccacaaggacggccagcagaagcag

SEQ ID NO: 141428 - RNA, 85 nt, Homo sapiens
cgaggggacggagccggacaggagccgccgccgccaacagaagcgacgggcgcccagcggccggggaggagcaggcggccccgca

SEQ ID NO: 141429 - RNA, 67 nt, Homo sapiens
gcgaaacgcgaagaaaaacgcgggggacacccagccacacgcggagaagagaaccacgagaaagcgc

SEQ ID NO: 141430 - RNA, 69 nt, Homo sapiens
gacgccacgaccgggaaacggagaagagccaaccgcaccgcgcagccaccaaagccggcacgcaaaggc

SEQ ID NO: 141431 - RNA, 74 nt, Homo sapiens
ggcccagccccgacacagagaggggacgcggggcgcgcccaggcggcgaaccgggcgcaagggaccccgccagc

SEQ ID NO: 141432 - RNA, 67 nt, Homo sapiens
gccgcaggcggggcggggccggaggccgcgcgcgcaggagacagggacccgcaaagcgaaagaggag

SEQ ID NO: 141433 - RNA, 80 nt, Homo sapiens
agcaggaggcaagaaaggggaaccccggagaaaaggccaagaaggcaggacacacagcaacgaagcaggggaggagggaa

SEQ ID NO: 141434 - RNA, 71 nt, Homo sapiens
gaggaggcggggggcccaagcaaggccggaagaagagcgcagaggccacaacggacaaaaagacagcagaa

SEQ ID NO: 141435 - RNA, 79 nt, Homo sapiens
cagcggagaacagcccgaccacgaaggaggggaaagccagcgcagcgcgagaagcgacagcgaagaagaagcgccgacc

SEQ ID NO: 141436 - RNA, 72 nt, Homo sapiens
ccacaaaaaaccagagaaagagcaagacagagaaaaggggcagacacccaaaggggggcgccgggcccccca

SEQ ID NO: 141437 - RNA, 79 nt, Homo sapiens
ccagacccagaggcagagccgccccagcagcaggggcgccaggcgcagcaaacgagagcaaggaaaggaggaagcaaga

SEQ ID NO: 141438 - RNA, 98 nt, Homo sapiens
gccacggggcgggggcggggcggcaggagccggccggcaaccgagggacccgcgccaggaaggcccgccgaaggagaagggcaggaagacccagcagg

SEQ ID NO: 141439 - RNA, 79 nt, Homo sapiens
acaaccggccgcaaaggccaacgacgcccaggagaccgcaagcagagcgacaagcaacgcaaaaacaggcggggcgcgc

SEQ ID NO: 141440 - RNA, 69 nt, Homo sapiens
cgaagaaagagggccgccacaaagcaacgcacccgcccccaaagagagaagcggaccacaaggggcggg

SEQ ID NO: 141441 - RNA, 69 nt, Homo sapiens
gggggccgcggccaagaacgccggcgccccaaccgcacaccggggaagaaggagccgcagccagaaaag

SEQ ID NO: 141442 - RNA, 66 nt, Homo sapiens
gcagaagacacaagaggcgccggcgggaaaacaacagccggaagcggcagcagacaagaagcacca

SEQ ID NO: 141443 - RNA, 52 nt, Homo sapiens
acgccagccccacaacagggcgcgagaacagaacagaagaagcggggccaag

SEQ ID NO: 141444 - RNA, 88 nt, Homo sapiens
cccggagcccccggcggcgccaccagaccgggagccggccccgaggcggggacggacagccaggaccgcgaggcgggcggccgccagg

SEQ ID NO: 141445 - RNA, 74 nt, Homo sapiens
ccggacagagaacaccaaggccaaaaacacagcaacccagcacgaacaaggagggcgacagaccagagaaagag

SEQ ID NO: 141446 - RNA, 68 nt, Homo sapiens
agcagcgccagacaaagagcaaggggaaaaaccaaaacgcccacaaaccgcaaagaacagaacggaac

SEQ ID NO: 141447 - RNA, 81 nt, Homo sapiens
gagccgcagcagcgccccgcagggaacccgaccagcccagggccccagagcaggaggaggggaggagagccccagcgacgg

SEQ ID NO: 141448 - RNA, 78 nt, Homo sapiens
ccccccaggcccaacgaagagacgacacaaggagacgaggggaagaggcgccaagcccacgggcgcaccaacggagag

SEQ ID NO: 141449 - RNA, 54 nt, Homo sapiens
gaaagggaccagcccagcccccacggaacgggacacaggagacagggcaccaga

SEQ ID NO: 141450 - RNA, 68 nt, Homo sapiens
gcccaaagcacaaaagagaccccccagaacgagaacgagcgccaaggacaaacaagcgcgaacgccac

SEQ ID NO: 141451 - RNA, 54 nt, Homo sapiens
gccgcacaaaaagcagagagggcacgcgaaaaaagcccaggacccacccggcag

SEQ ID NO: 141452 - RNA, 70 nt, Homo sapiens
gaccaggcgagccacaacgcgcaccccggaccaccccaccagagccaggcgcccaggccccgccgcacga

SEQ ID NO: 141453 - RNA, 86 nt, Homo sapiens
gaggacgaccccgagggagcacaacagggaaccggggaagcggagccgagcaccagcacgagccggccggggaaggaagcagaaga

SEQ ID NO: 141454 - RNA, 82 nt, Homo sapiens
gccgcgaccgagcaggcgagaccacggacagagcgggagccaccagcgccaaagggaagccaggagcccgggggcacgggga

SEQ ID NO: 141455 - RNA, 56 nt, Homo sapiens
agccccggagagcgggaacagaaagccggccccgacgcgggccccggagcgggcgg

SEQ ID NO: 141456 - RNA, 76 nt, Homo sapiens
ggccgggacaagcagcaaggcgcggggggccacgcgaggccgaggcaaaccgacaccagcgacacaagcgcgaggg

SEQ ID NO: 141457 - RNA, 80 nt, Homo sapiens
caaaagaacaaaaagagaaaaacagccacaacagagcgcaagagcgggaggcagccgaagaagcaggaaggccggagggg

SEQ ID NO: 141458 - RNA, 91 nt, Homo sapiens
cgggcaccgccgggaaccaccggcacgccaagacaggagcccagaaacaagagcaccacagcacaggaaacagacaaagcagaggacggag

SEQ ID NO: 141459 - RNA, 72 nt, Homo sapiens
aggcccggccccgaagagagcccggaaccaccggccgcagccgcaggccaaggcgcagggcaaggcgcggga

SEQ ID NO: 141460 - RNA, 76 nt, Homo sapiens
ccgagagcgcgaaacgcacgagaagggggcacccgaggaggaagagggcagggcccacggaaagaagggaaacccg

SEQ ID NO: 141461 - RNA, 66 nt, Homo sapiens
ggcgagacagcacaaccggcagccagaaaagacagaccaccacaacccgcaacgccacagcgagaa

SEQ ID NO: 141462 - RNA, 54 nt, Homo sapiens
agagaaaggagacccaccaagccaggaaacggggacaaagcaaaaaaccaacaa

SEQ ID NO: 141463 - RNA, 81 nt, Homo sapiens
ggaacccggacccacggccgcccggacccccggcgagcggggaaccggccagagggaaaggaacccggcagagagggccgg

SEQ ID NO: 141464 - RNA, 57 nt, Homo sapiens
cgcgaggcggccagcccacgagggggacacgcagacaagaggcccacgcggaccggc

SEQ ID NO: 141465 - RNA, 55 nt, Homo sapiens
cagaacgaacccccccccccgacacggcagaaaacccacagaagcaacgaagaga

SEQ ID NO: 141466 - RNA, 72 nt, Homo sapiens
ccagccgggaggggagagccccgcaccccccccagaaacagagaacagacagccacgcagacggaaacaagg

SEQ ID NO: 141467 - RNA, 78 nt, Homo sapiens
gcagccggagccgggccgcagcgcgaggccgggccgggggagaccgcgggccagagaacaagcccagacagcaagacg

SEQ ID NO: 141468 - RNA, 70 nt, Homo sapiens
aacacagaagaggcaagcggggaagcgccccagccaaagaaagggcgcaaccgacggagggggaagaaag

SEQ ID NO: 141469 - RNA, 91 nt, Homo sapiens
gcagccgcaagccgcgaggccacgccccgcccaggccaggcacacagaaggccaaaacccgcaaacacgagagaaaagaaagagagacgca

SEQ ID NO: 141470 - RNA, 72 nt, Homo sapiens
ccagaccgccaaaccagagaaagaaacacccgaacagcgagaaaaaagcggcaccaagccaaggagggacga

SEQ ID NO: 141471 - RNA, 67 nt, Homo sapiens
gcgcccgcacagaaggaccgaggcggaaggacaggccggaaaaggcagaaaggcccggaacacaaaa

SEQ ID NO: 141472 - RNA, 78 nt, Homo sapiens
ggagccagcaacagagcaaccccggaccccaggcaaagcacagcagccaccccaaacacggccacaacggacaaaaag

SEQ ID NO: 141473 - RNA, 103 nt, Homo sapiens
caggaagaccgacaccagccaacacgcgacaccagagacaaacagaagggaagggcaccaccggcccaggacgcagcccaaacgggggacgaagagcgcaccg

SEQ ID NO: 141474 - RNA, 60 nt, Homo sapiens
agcggcgccgcgccccccaaccggggccaggccgagggcccgcccggccccaggagaaga

SEQ ID NO: 141475 - RNA, 78 nt, Homo sapiens
cagaagcacgcacaaaaaaacaccgggacagaccaggagagcaccaaacgcccaggagcgagcgaaaaggcaaaagac

SEQ ID NO: 141476 - RNA, 72 nt, Homo sapiens
ccgagagccgcccgggccagcggccgcgcacccccggccggaggcaccagcgggacgaagggaacccgccgg

SEQ ID NO: 141477 - RNA, 77 nt, Homo sapiens
gaagcaaggagagaggccggaaaggaaagaaggaggcacggcacaaaggcccgacgccggcgaaagacggaaacgag

SEQ ID NO: 141478 - RNA, 71 nt, Homo sapiens
aggaagaggagccgagcacgggccgagaccaccgaggagagccggggacccaagcagcccaagcgccgagc

SEQ ID NO: 141479 - RNA, 70 nt, Homo sapiens
gcagagccaggaagaacacgggcccgagcagacagagaagagggcacagaggaagcgaaccgggacgcag

SEQ ID NO: 141480 - RNA, 77 nt, Homo sapiens
agcggggcaaccacgcgagacgccaccaggacaagcaggccacgccgcaagcgaggagaggggaggggacaccgacc

SEQ ID NO: 141481 - RNA, 70 nt, Homo sapiens
cggcggagcaagcaccacaggcggacaggggggcagcacagcggcaggcaccgcaggaaggacccgaccg

SEQ ID NO: 141482 - RNA, 74 nt, Homo sapiens
gacgggcccgcggcgagcgagcccgagcgagacgacgggaccgaaggaccccgccagagacaaccgagcgccag

SEQ ID NO: 141483 - RNA, 86 nt, Homo sapiens
ggcaaaaaagaagaaaacagagaaaaaaacagaacccaacacccccaggagcccacccagaggcagggggcgacccgaacccaaag

SEQ ID NO: 141484 - RNA, 93 nt, Homo sapiens
ccacagcagggggcgaacgaagaaaggccgcaaggcacaaagacagcacccaaggaaaggcccaggcacagcagacgcacggaggcggggaca

SEQ ID NO: 141485 - RNA, 73 nt, Homo sapiens
agaagcaaccggcgccaccagcaaccagagggccagagggaaggacaggaaacgagaagaacgaaagagaaac

SEQ ID NO: 141486 - RNA, 82 nt, Homo sapiens
aaggagcagcccaggaccgagaccggagcagccggggcggagcggaccggaccaaaccagagacaaaaggcacagccagaac

SEQ ID NO: 141487 - RNA, 75 nt, Homo sapiens
ccaaagcccaaaccccaggccaagcaaccaccagcagcccccagagcggaacacagaccagaagggacaccgaag

SEQ ID NO: 141488 - RNA, 73 nt, Homo sapiens
ggcaggaacacggcgcccacagaggaagacggggcccaaagaggaagggggaaaggaccaaaaaaaaggaccc

SEQ ID NO: 141489 - RNA, 83 nt, Homo sapiens
cgggggccaagacccacaccaccagcagaaacagaccaccccaggaaaagagaaccgccgaaaagacaagaacaaaccgaacc

SEQ ID NO: 141490 - RNA, 63 nt, Homo sapiens
ggagaagaaaagaagccaggcaaagaagaaaggccacacccgggcagaccgacagcccccagg

SEQ ID NO: 141491 - RNA, 70 nt, Homo sapiens
aagggcaggaagaccagacgccaggaagccggacgcgcagggaaaacgagaggacccagccacggggggg

SEQ ID NO: 141492 - RNA, 69 nt, Homo sapiens
ggcacgaggcgggccgggaaacccagacgacaaggaaggccaagggacccacgaccaaccaagaaaaca

SEQ ID NO: 141493 - RNA, 60 nt, Homo sapiens
cgggaagcaggacgcgccgcgccccaagagccggaggagccaccaacagaagcaggagcc

SEQ ID NO: 141494 - RNA, 71 nt, Homo sapiens
acgaaggaacaaagccacgaaaaccaaagggcggagaacggaaaagcaccaggaagcagagaggaccgcag

SEQ ID NO: 141495 - RNA, 83 nt, Homo sapiens
acgcgcagcaggcggggaggacgaggggcccgggcccagagcggaagacaagacggaaaggcaacgcgacaggaagggcacca

SEQ ID NO: 141496 - RNA, 57 nt, Homo sapiens
cacagcggccaccgccggcgggcaacaggcaaacccagcaggaagccacgggcgaaa

SEQ ID NO: 141497 - RNA, 65 nt, Homo sapiens
acccccgcccacggagccggcacacccaccaggcggcgccaggaccgacccaaacggaccgaaac

SEQ ID NO: 141498 - RNA, 75 nt, Homo sapiens
cacagcacaacacaggcgggagggacccgagcagccccaggcaagagcagagaggagaaaaagcgaagaagacag

SEQ ID NO: 141499 - RNA, 52 nt, Homo sapiens
cccccgaaccaacacaagggcaaaccccacaggagaaggagcgggaaaacgg

SEQ ID NO: 141500 - RNA, 76 nt, Homo sapiens
agagagcccgaaggaacgaaccagcagaccgaaaagacgcggccccaaaggaaacacccgaagaacacagcgccag

SEQ ID NO: 141501 - RNA, 95 nt, Homo sapiens
cgagaggcaccagcggccacacgcccagcaacacaaaaaccacgaaccagacgccgcaggcccacgcagcggaggcggggaaaggccccacgaac

SEQ ID NO: 141502 - RNA, 72 nt, Homo sapiens
gaccaaagcgcacggcagcgagaggcaagacgagaaacaaaccaaggccaaccacgggaacaaaagacagaa

SEQ ID NO: 141503 - RNA, 36 nt, Homo sapiens
gcgcccccagagccaggggaaggaagaagaagggcc

SEQ ID NO: 141504 - RNA, 78 nt, Homo sapiens
gaggaggcccggggagcgaaggagcgcagcaccaggccggccagggcgggaagcggcaggcagagaaccgacagcagg

SEQ ID NO: 141505 - RNA, 86 nt, Homo sapiens
cccccagagcgggaccacagcacaccgcggggcgggagcagcgccaccaccagcccgcaccacaacgaggggagaaccagacccac

SEQ ID NO: 141506 - RNA, 83 nt, Homo sapiens
gcgggaggcgacgacccgcgcagacacggaccgcgggccagccgccaaagaccccgccggagaagccccaggccacccccgac

SEQ ID NO: 141507 - RNA, 57 nt, Homo sapiens
gaccacggcaccgccccagggggggccccagcccggccgaacgggcgcacgacacaa

SEQ ID NO: 141508 - RNA, 80 nt, Homo sapiens
ggagccgcgccgagcgcgcggagaaccagagaagccggggcgaagaaagggaggcaccaggcacggggaggccaacaaag

SEQ ID NO: 141509 - RNA, 72 nt, Homo sapiens
gcgagcagcggacgccggccgccgcaggagacaacccagaaaagaaaaggccaggggcgccgaaaaacccgg

SEQ ID NO: 141510 - RNA, 59 nt, Homo sapiens
cgcggcccgcccagcacggacagccgagaagccagcagagcagggaggaaaaccaaggc

SEQ ID NO: 141511 - RNA, 74 nt, Homo sapiens
caaagaagagaccacagacgagcgcggcgggaagcagaagggcacaggaaaaaagagcggaaaaaaaaggaggc

SEQ ID NO: 141512 - RNA, 72 nt, Homo sapiens
cccacagcccgcgcgcgcaggcgggagagagaacggaaaggagccaaggaaaacaaaagggcgagccagaaa

SEQ ID NO: 141513 - RNA, 62 nt, Homo sapiens
gaccacagccgcggcccaggcccaaggacaaggaagaggggagccaaagaccaagcaccaga

SEQ ID NO: 141514 - RNA, 52 nt, Homo sapiens
ccggccaaacaacaagcaggcgggacaacacaagggaaccaaggagggcgcc

SEQ ID NO: 141515 - RNA, 79 nt, Homo sapiens
ggagcaaaaggcggacaggcagggacagagcagaagggcgaaagaccgggccgcagaagaggccccaacccgggccaga

SEQ ID NO: 141516 - RNA, 75 nt, Homo sapiens
cacagcacccgggcgcggcggccagccgcaccgggacgacaccggggaccggacaggggaacagcgcaccaggaa

SEQ ID NO: 141517 - RNA, 56 nt, Homo sapiens
gcgcagcccggccgccggcccccaacagcgccgacacaggcaagggaaccggggcc

SEQ ID NO: 141518 - RNA, 72 nt, Homo sapiens
aaaaacgaccacgagagaaaagagccaaacaaggaaacagaagacggaaagacacccagcaaggaggacgaa

SEQ ID NO: 141519 - RNA, 72 nt, Homo sapiens
gagaagcaaaaccacccaaggagggaggggcagaggagaaccgacgaaccgaaggagcacaacaggcagaca

SEQ ID NO: 141520 - RNA, 65 nt, Homo sapiens
gggggcaagacgagaccaccagaccacaggaagacgcaaacacaaggaaggaaccaaccgaggca

SEQ ID NO: 141521 - RNA, 83 nt, Homo sapiens
ccaaaacacacaccggccaaagagcggaaaggcaaaaggacagaacgccaccagaggaagacgagagaagaggaggcagcccg

SEQ ID NO: 141522 - RNA, 57 nt, Homo sapiens
cgcgcgacgacccgccgccgccgggcggaggaaccggccgaaccagaccggagcagg

SEQ ID NO: 141523 - RNA, 57 nt, Homo sapiens
gcagaaaaaccagcccggcgcaggaagccacagagaggacaaacaacaaccccccag

SEQ ID NO: 141524 - RNA, 69 nt, Homo sapiens
aacgagggaaggagcagggacaagagcacccccgcccacagagccacagggcccaggggcccgggccgc

SEQ ID NO: 141525 - RNA, 87 nt, Homo sapiens
gcgccacaccgagcgcgaggcgcggagagcaacgccgggacagcgcaaggagaacacgagacccgcacaaaaccccgccccccaggc

SEQ ID NO: 141526 - RNA, 77 nt, Homo sapiens
agagcgagcgagggggggcgcgccggaaaccggagcgcgcagcaggggcaggcagggcccagcaggacgcggaaaca

SEQ ID NO: 141527 - RNA, 68 nt, Homo sapiens
gaaacacaagagaccagaggaaagggaaccgcacaagaaaaggaccgacagaaaggggaacaacggac

SEQ ID NO: 141528 - RNA, 60 nt, Homo sapiens
ccagcacggcaacgcagcccgaggacaagcggcgcagagaggagggcaaaaagacaaaca

SEQ ID NO: 141529 - RNA, 89 nt, Homo sapiens
gagcgacgccgggggcgcagaccgggcaagaccacccgcaagcacgcggggccagcagacccagcggggcggagcagggaggaacagcc

SEQ ID NO: 141530 - RNA, 73 nt, Homo sapiens
acccaagggcgggagaaccaggaagccgggccgcggaaaaaaagcgcagaaaaggcacagaaacgggaggggc

SEQ ID NO: 141531 - RNA, 63 nt, Homo sapiens
gccaaggcaagggagggagagagcaaaaccagccaggacggcaacccccaccccaaccagcgc

SEQ ID NO: 141532 - RNA, 79 nt, Homo sapiens
ggagagcaagggccgaccaggaagcccaaaagggaagaaggacaccagagacagaaacaaacccaagcagaaggcaaac

SEQ ID NO: 141533 - RNA, 70 nt, Homo sapiens
gccacagccaccagagccggcagcaaagagggaacaggaaccagaggacccacaggagggcagacagcga

SEQ ID NO: 141534 - RNA, 81 nt, Homo sapiens
cgcggcccgggccgcaccagagcgcccggcccacgacacaggaagaagacaggccaaagagggcgaaaaaaaggagccaag

SEQ ID NO: 141535 - RNA, 87 nt, Homo sapiens
cgagaacgaagaggccgccgccgggcccaggcccgcgaccgccgccagcgcccgagagccggcccaggccccccacgccgcagcccc

SEQ ID NO: 141536 - RNA, 83 nt, Homo sapiens
caggggaaaaaccgaggggacaaaacaaccaacgaagacaccgagcgaaagagaaagaggaagcgcagaaaggaagagaagaa

SEQ ID NO: 141537 - RNA, 79 nt, Homo sapiens
agaccagggccaggcccagccccagcacagacaaagcggggcaagcgacgccggaacaggacacccaaccgcgagacca

SEQ ID NO: 141538 - RNA, 84 nt, Homo sapiens
gccagacccaaggcccccgaggagcgcgggcgccgagggggagggccggggaggagcaaccagcgacccagaacgaccccccag

SEQ ID NO: 141539 - RNA, 73 nt, Homo sapiens
gcggcccagggcgcggccggggcggagccgagccgacagcccagcaggacccggccagaccccaacagacacg

SEQ ID NO: 141540 - RNA, 80 nt, Homo sapiens
ccagcggcgccccacccagaaacccaggacagagcacacagacgacacaccacagggggggggggaagacaacccggaga

SEQ ID NO: 141541 - RNA, 79 nt, Homo sapiens
gcgccacacagccccaaacccagagaccagaccccacgccagaacagaaagaacacacacggcggaggcaaggcgcgac

SEQ ID NO: 141542 - RNA, 94 nt, Homo sapiens
cggggagcgcaggaaccagacgggggcgagcgagcaccgagcaacacacgcagggacaggagagagggcaagagacgacaagcagagagaacac

SEQ ID NO: 141543 - RNA, 76 nt, Homo sapiens
cgccacaaagaggagggcaaagcagaaaagcccacgggcagccagggaagagagacaaccagaagacagagcaagg

SEQ ID NO: 141544 - RNA, 82 nt, Homo sapiens
ccagcgccagcgcagccgccagcgccgggcaagaagcaagcaaccaggcgccgcaccagaagaggacgcgcaggggagcgaa

SEQ ID NO: 141545 - RNA, 67 nt, Homo sapiens
aggcagaaggggcccggaccagcgcacggcgggaaggaagacgcaaacacaaggaaggaaccaaccg

SEQ ID NO: 141546 - RNA, 55 nt, Homo sapiens
aaaggcagcagccacggggaacccccccgaaacaaagagacgcacggcggaccaa

SEQ ID NO: 141547 - RNA, 75 nt, Homo sapiens
aacaccgcccgccaggacgacacacccaagaacgaggccccgcagcaggcagaaagggagaagcccgcacacaca

SEQ ID NO: 141548 - RNA, 72 nt, Homo sapiens
ccaagggagaaagccgggccacaacccgaaggccggcgacgcggcaagcaggaacacaccggcaggcagaaa

SEQ ID NO: 141549 - RNA, 83 nt, Homo sapiens
cggaaacggaggcagagggggcccgcccgcaccccccgggcccgcccaaggagaaagacagcaaagaaaaggagaagaaagga

SEQ ID NO: 141550 - RNA, 42 nt, Homo sapiens
gagcgcccccgcgagccggaccaggagacgccccagaggcga

SEQ ID NO: 141551 - RNA, 80 nt, Homo sapiens
aagcaggcggcaaccacccgcacggaggagaggagcagagaaaagaaaaaaaagagccaagaacacggaaaaacgaagca

SEQ ID NO: 141552 - RNA, 73 nt, Homo sapiens
cgggagccccacaacagggcagaagaggaaccagacagcaccaggggccagagcagccgagaaccggcccacc

SEQ ID NO: 141553 - RNA, 81 nt, Homo sapiens
cgcggggaagccggaaagaggaggagacccacccggggacgagccgccccagaagcaccccaggccaccacgcgggccaaa

SEQ ID NO: 141554 - RNA, 60 nt, Homo sapiens
caagacgggaggcagccacaccaggaacccccgggaaacgcagcagaggcagaacggaag

SEQ ID NO: 141555 - RNA, 62 nt, Homo sapiens
agggccggaaaagccaacgccggcgaaggaccccaacaacaggagagagcaagcgagcaggg

SEQ ID NO: 141556 - RNA, 76 nt, Homo sapiens
gggacgaacagcaaaagccccccgccccccccgcagcgcgcagagcccggccaagaacaagcagcagccgaaccga

SEQ ID NO: 141557 - RNA, 73 nt, Homo sapiens
ccagagcgcagcacaaacacagacacgagacagagggcaagcagcagacgcaaaacaaaaggggccaaggacg

SEQ ID NO: 141558 - RNA, 50 nt, Homo sapiens
gggccccggagagaaggcagacggaacagaagccgccagggagaaaagac

SEQ ID NO: 141559 - RNA, 79 nt, Homo sapiens
aggacagaaggggccccgaagccccgaagacaggcacggcagacacaccgaccagaggaaggcgaacccgccacgcagc

SEQ ID NO: 141560 - RNA, 74 nt, Homo sapiens
cggcgcgcggccgggcggcgaggaagaggaaggaaggagcgcagcgccgggcgaaccaaccccacgagcgcgga

SEQ ID NO: 141561 - RNA, 81 nt, Homo sapiens
ccggacacccacagaagggcacgccacagagacccaagaaagccaacaggcagaccagagacagcgccacgcacccgggga

SEQ ID NO: 141562 - RNA, 77 nt, Homo sapiens
agcacaccagcaacagaggcaagccggcaacgcaaggagcacacaccagaaaccaggaaaccaccacggacccaagg

SEQ ID NO: 141563 - RNA, 81 nt, Homo sapiens
cggacgccaagacacgacaagacgaccgggaaagccagggaggccgcgaagagacgaggacgcgcacaggaaaggacgcgg

SEQ ID NO: 141564 - RNA, 91 nt, Homo sapiens
cgcagaccaggaacaagagagaaagagggacagccgcacggaggcgaaacacaaaggggccaaggggcagagcacaagaacagccggggcg

SEQ ID NO: 141565 - RNA, 73 nt, Homo sapiens
cggagaaaaagaccgaacgaggaacccaaaggcaccgggggcacagcacccagccacaccccaccgcccagag

SEQ ID NO: 141566 - RNA, 84 nt, Homo sapiens
cgaccgcaggagggagaccacagcaagacgccaggacccacggaagccagaaagcggacaaggcaaaaccagcaagcggaccca

SEQ ID NO: 141567 - RNA, 41 nt, Homo sapiens
gcgcggggccggaggcgggcgaggaagcacaggaaagagag

SEQ ID NO: 141568 - RNA, 82 nt, Homo sapiens
caggcggcagcggggcggcgcgcggcgcggcggcggcccgccccgcggcccagacagaagcccgggggagcggaggaagaga

SEQ ID NO: 141569 - RNA, 54 nt, Homo sapiens
caccaccaacaaacgaccagaaggaaaacacaccaggcacagaaaggccccccg

SEQ ID NO: 141570 - RNA, 77 nt, Homo sapiens
agaccagcaaaggaaccagggcgaaaccagaggcaaaccgacaccagcgacacaagcgcgagggaaccacagaggac

SEQ ID NO: 141571 - RNA, 80 nt, Homo sapiens
cgaccccacccgcgccgcgacccggggagacacaagaccggcggccacgcaccccccaagaagaggcacccaggcacaag

SEQ ID NO: 141572 - RNA, 65 nt, Homo sapiens
gcgcacaccaccggacaaccgacaaaacaaaccagccagcacgggggcccagccagccagcagcg

SEQ ID NO: 141573 - RNA, 87 nt, Homo sapiens
ggagaccgggggcgaggacaacgacagcgcggcaccccgacaaggagccgcagaagccgccgcgggaagcaacgggaaacggagaac

SEQ ID NO: 141574 - RNA, 69 nt, Homo sapiens
agaacaacacacgacgcacggggccaaaacagacccacaacagacgcccaaggaggagagaacgggccc

SEQ ID NO: 141575 - RNA, 84 nt, Homo sapiens
cacgcggcgcacaacgcaggaacaccgcacgcgcggaggagagccaggcagcgagcgggagcagacagggaaccgaaggcagca

SEQ ID NO: 141576 - RNA, 78 nt, Homo sapiens
aaaacggcacacccaccaagcacccaacagaagaagagacgacaggcccaccaagaacagaaggcgagcacacggaag

SEQ ID NO: 141577 - RNA, 79 nt, Homo sapiens
gcagcggagaacgcaaaccgcgcggagcgcgggccgcacccggaggaggacaagaggcgcccgcgcccgagcaggcccg

SEQ ID NO: 141578 - RNA, 76 nt, Homo sapiens
gacacacaaacaacacagacccacaagcaagcacaggcacgggcgacacaaggccacagcccaacaccaggaaacg

SEQ ID NO: 141579 - RNA, 79 nt, Homo sapiens
cccagaagcggggacccgagacgcaagccccagcgaccccaagcaaaccggggaaagccggggccccggggacccgcgg

SEQ ID NO: 141580 - RNA, 71 nt, Homo sapiens
agacaaacacccaccaccaaacaggaggaagcaagcaagaagagagcggcgggggagaaagacaccagaag

SEQ ID NO: 141581 - RNA, 65 nt, Homo sapiens
gccaaacgcccgaaagaagcggacggagggaagcaagacaagaaccagaaacaccacgcaccagc

SEQ ID NO: 141582 - RNA, 56 nt, Homo sapiens
acacccggaagaagaaagccgaggacagaaggacgacagggaaggaccaccacaac

SEQ ID NO: 141583 - RNA, 77 nt, Homo sapiens
ggaaaaccgcagcaggaagcggggagcagccgccagaccagcccacagcccagagaagacgagcccgagccccggca

SEQ ID NO: 141584 - RNA, 77 nt, Homo sapiens
ccagcccccagagcgggaccacaggggagacaaccagagccggcaggacccaagagaggcgaacaccgaaggggcgg

SEQ ID NO: 141585 - RNA, 79 nt, Homo sapiens
caaacagccacacaggaaaggggaccgggcaaaaggggacgaggaaacagaaaacaacgaaaacaaagaaagaaacaag

SEQ ID NO: 141586 - RNA, 71 nt, Homo sapiens
ggccacgacccccagagcaacgccacaccaccacaggaggcaagaaccgcacccaccccagaccagccagg

SEQ ID NO: 141587 - RNA, 74 nt, Homo sapiens
ccgaccaagagcgaagcgacgcagcgaaaaggggccacagaggcgggccagcccaggcagagccgcgacaaacc

SEQ ID NO: 141588 - RNA, 56 nt, Homo sapiens
acgcagccagaaaagccagaaacaggggagcacgccagacacccagaaccaccacc

SEQ ID NO: 141589 - RNA, 78 nt, Homo sapiens
caccagccacggggccaccaggacaagcgggcagaacagcgcggcagaacgccagcacgggcgaagacagagggcacc

SEQ ID NO: 141590 - RNA, 74 nt, Homo sapiens
ggaccaaggcccgacaacgcagcaaagaaagggagaaacacagacacgaccgacacagagaagcagaggaaaag

SEQ ID NO: 141591 - RNA, 107 nt, Homo sapiens
gaggaagaggaagacaagagggaagccagacaagaagaaagggaggcccgcggggagaggcggaggcgacgacgagagggaggaggagaagggcagagacggagaag

SEQ ID NO: 141592 - RNA, 86 nt, Homo sapiens
cccgccgacagcggaaccaggcgaccagggcccaccgcccccgggcggggcgccggccggccccgggcccaccgcccccccagccc

SEQ ID NO: 141593 - RNA, 69 nt, Homo sapiens
aacaagaaaaacaaagccaaggaaaccccaacacagagccaagcgccaaggacaaagcccccagaggaa

SEQ ID NO: 141594 - RNA, 40 nt, Homo sapiens
gcccacagcgacagggggcggcgacggcggcgcgaggacc

SEQ ID NO: 141595 - RNA, 72 nt, Homo sapiens
aaaaaagaacaaaagaaaaccaaagcagaccagaaaaaacagcacaccaggaagcaagggcaaccaagggca

SEQ ID NO: 141596 - RNA, 56 nt, Homo sapiens
cacgcgcggaaggcagcgcccagcagcgcaggaacaggccacaaacagagcagaca

SEQ ID NO: 141597 - RNA, 81 nt, Homo sapiens
gcggacggaccgcccaaccccaaaagagccaaaccagccgcccggccggcgaagacagcacaggaacggacgggagacaca

SEQ ID NO: 141598 - RNA, 80 nt, Homo sapiens
cgggaaagaccgaggaagaaaggggaccacaggccaagggcagaggcaaggcggcagcaaaacgggcgcccgggcagaag

SEQ ID NO: 141599 - RNA, 83 nt, Homo sapiens
agaaggacgcagcagagccgggggcgaggaagcgccccgaaacccccagaagacacgccgcagaggcccaccacgcgaggccg

SEQ ID NO: 141600 - RNA, 77 nt, Homo sapiens
cgaaccgacggcggaccccggacaaagaaaaagcgccccgggaggagccaccaggggaaggagaaaagccaagggaa

SEQ ID NO: 141601 - RNA, 34 nt, Homo sapiens
cgacagccgggaacgccaaggggaagggacgccg

SEQ ID NO: 141602 - RNA, 70 nt, Homo sapiens
gaaaaagcaaaccggcgcaaagaagacaaagacgcacaccaaagcaggagagccacacgaaggcaaaaaa

SEQ ID NO: 141603 - RNA, 31 nt, Homo sapiens
cgggccgaagcaaaaacaaccaacacaaccc

SEQ ID NO: 141604 - RNA, 77 nt, Homo sapiens
gcaccggggaggacagaccgaagaagggagagaaaggaagagggaccagcgaagaccagagaagagcagcagaaacc

SEQ ID NO: 141605 - RNA, 54 nt, Homo sapiens
agccccgagagcgggaacagaacaccagcacaagccaagggggcagaagcacaa

SEQ ID NO: 141606 - RNA, 74 nt, Homo sapiens
aacggaggagagcaaagacgagcagacacgcaaagaagcccgaggcgcaagagacaagccacgccgggccagaa

SEQ ID NO: 141607 - RNA, 76 nt, Homo sapiens
ggcccgcaggagcagccaaagagacggcccgccacgggccccgcagccgcgcccgagcgcccgagcagggacagcg

SEQ ID NO: 141608 - RNA, 81 nt, Homo sapiens
ccgccagaaggaggccagaccaagcgaagaagagcaaaaggcggagcgagccacgagcagcaaggacaggaagggaaacga

SEQ ID NO: 141609 - RNA, 71 nt, Homo sapiens
gagcccggaaacaagggaaaagggagcggagcaagggcagacgggccaagcgcagaccggggaccacggca

SEQ ID NO: 141610 - RNA, 80 nt, Homo sapiens
gccgccgggccggggccccgcagcgacaacaggaggccggaagacccaaagcgagggcccgacgggccaggagggggccg

SEQ ID NO: 141611 - RNA, 54 nt, Homo sapiens
gccgcgccaagccagaggcagcggccagcaaaccgcaaacaccaagcccagacc

SEQ ID NO: 141612 - RNA, 69 nt, Homo sapiens
gaggcacagcgcgccaagcgaacggagagccagccgggagagggaggcacagcgggacccccggagaag

SEQ ID NO: 141613 - RNA, 79 nt, Homo sapiens
gaagcccacacccccgaggcacgaaccccccaaccggcagaaacggacagaagaaaccagaggcccacgcggaccggca

SEQ ID NO: 141614 - RNA, 77 nt, Homo sapiens
cgcggagacaagaccacaccggacaccaccaccccacgagccgcgcccaggggacaggcaaaggagaaacaagaccc

SEQ ID NO: 141615 - RNA, 71 nt, Homo sapiens
cgaagcagaggaacaacaaggaaagaacgaagggaacccagcgccgccccccgagaaagagacgacaggca

SEQ ID NO: 141616 - RNA, 78 nt, Homo sapiens
gcaaggggccaccaggaggccagggggcgccaggcccgccaagcgcccccgggcacgagagcggacgagccaaggccg

SEQ ID NO: 141617 - RNA, 77 nt, Homo sapiens
gcaaaagaacgagcaaaggaaaggccacacacaaaaaggaacagaggccgggggccagccagccgagcgccacccaa

SEQ ID NO: 141618 - RNA, 72 nt, Homo sapiens
caggcaggcggggcacaggcgcccaacaacaggaggcagcggaggcccaacagcacaccccggcgaagcaga

SEQ ID NO: 141619 - RNA, 83 nt, Homo sapiens
ccagagcgccaagcagcaaaggagagggacccggcagcaaccccaacaaacgccagaggcagccccccccgggagacaccccg

SEQ ID NO: 141620 - RNA, 82 nt, Homo sapiens
cgggaccaccggcccacccggcagcacccaccccgagccccggcacccagcaagagaaacagcacccaggacacccaaagag

SEQ ID NO: 141621 - RNA, 79 nt, Homo sapiens
cggcacccgggggccacacgcaggccccgcgccagggaccgcagcgaagcacagcagaaggggccacaagacagcacaa

SEQ ID NO: 141622 - RNA, 52 nt, Homo sapiens
ccagccccgacagcgggaaccggagcgcggaggccggcgagacaccacacag

SEQ ID NO: 141623 - RNA, 77 nt, Homo sapiens
aaggaccccagagaagacaggacaggaacacaagacacaaacaaaccacagggagggaccaaccagaaggccagaca

SEQ ID NO: 141624 - RNA, 69 nt, Homo sapiens
aaccagaaagcaaacaaagaaagcacaggcgaacccgagcacgcagagggggacggaagaagaagccca

SEQ ID NO: 141625 - RNA, 74 nt, Homo sapiens
cagaccccacccaaggaaagagcaggaacccagaagagcggagacaaaggcacaacagcaaggaaggcaaaaca

SEQ ID NO: 141626 - RNA, 81 nt, Homo sapiens
gacaccggacaccgagggcccccaaaaggcagggcccagcgcccaaccccgccggacagcacagcacacgacacccccggg

SEQ ID NO: 141627 - RNA, 82 nt, Homo sapiens
ccggcccacaggggggggcaaacccgagagaacgggagccaagaggccacgacagaagaacagcaacagaacacaccaagag

SEQ ID NO: 141628 - RNA, 36 nt, Homo sapiens
gcaacccagcaaacggcaaaggcgacccagaaagag

SEQ ID NO: 141629 - RNA, 70 nt, Homo sapiens
gagcaaagcacccaccagaaagaggcacagccccaaaagaaaggcaggccgaacggccccccccaaagag

SEQ ID NO: 141630 - RNA, 90 nt, Homo sapiens
agcagcgagggcccggcgaggagaaccaacggcccgaaagaggccgagcgcaggaggagggaagaacgccacaaccgcccccagcccaac

SEQ ID NO: 141631 - RNA, 78 nt, Homo sapiens
ggacgggcccagaggcccagggaggcaggggcagaaacagagaaggaacagaccacgagaagcaacaggcacaaggcc

SEQ ID NO: 141632 - RNA, 77 nt, Homo sapiens
ccggggccgccaggagcccgaccgggagaggacaagaccacgagccagacacagaggaaaaagacaaaccagccccg

SEQ ID NO: 141633 - RNA, 75 nt, Homo sapiens
gccacacagaacccaccagggaggagcggcaaagcaacagccggggggggcacagagccccggaagacagccccc

SEQ ID NO: 141634 - RNA, 58 nt, Homo sapiens
cgaagcggaaggcagaagcaaaccagaagagacgggcaaaacgccgaaacacggaaga

SEQ ID NO: 141635 - RNA, 75 nt, Homo sapiens
cggacccacagcaagaacggccaggccccgagccccggccccaaagacccaaaacagagacaccccccagccccc

SEQ ID NO: 141636 - RNA, 83 nt, Homo sapiens
aagaccccccacagaagggcaagccaaaaaagcccaggaagaagacgaggagcggaaggaggagcccacggcagccagcggaa

SEQ ID NO: 141637 - RNA, 83 nt, Homo sapiens
gccagggacccaccccgggggagcaagaaggaacacagacggcagagcagaccagacagcgccagccccaccccaacgaaggc

SEQ ID NO: 141638 - RNA, 81 nt, Homo sapiens
caaacccacccgcccggaggccagaggggaccgagcccggaaagaggcacgaggaagaaagggaaaaagcaacacaggaaa

SEQ ID NO: 141639 - RNA, 60 nt, Homo sapiens
acagacgcgacaccagaaaaggcggaccagacccgagggcgaggggaagaagggaagacc

SEQ ID NO: 141640 - RNA, 80 nt, Homo sapiens
acgggagaagaaaagaccgacagcagccaggcgagcggcagggagacagcgcacccgcggagcgggcacacagcaccaag

SEQ ID NO: 141641 - RNA, 85 nt, Homo sapiens
caacggaacgacgaggcaggacagaaagccagaaaaaaggagcagagaggagcaaaaaaggaacaagacagaaaaacaacgacca

SEQ ID NO: 141642 - RNA, 77 nt, Homo sapiens
gacggacggagaacgggaagccgcccggcagagggaaggccagggagaccagggggcaggggaggagcgcccaggcg

SEQ ID NO: 141643 - RNA, 75 nt, Homo sapiens
gcgggggcgccggcagaggaccaggcaccaccggccccggaaggagccagcaccgccgaccgccagcgccagaag

SEQ ID NO: 141644 - RNA, 84 nt, Homo sapiens
acccgcaaacgaaaaagaacgacagagcaaccaggaaagaagaggcgagaggacggcagaccgagagaccaggcaggcaagcgc

SEQ ID NO: 141645 - RNA, 84 nt, Homo sapiens
agaccaggccaggagaagcccccgcagccgcccccagcaacgccgccacacccggagaccccaagaacagaaaaccacccagcc

SEQ ID NO: 141646 - RNA, 77 nt, Homo sapiens
gcacccaaaccaaggcgcaagaagccacaaacgaaggagaccagaaccaacacagcccccaggcgggccagaagaca

SEQ ID NO: 141647 - RNA, 76 nt, Homo sapiens
ggaggccgccaccgccccacggaacacccgcgcccggcccccacacggagacccaaagcaaagccaccagagaaca

SEQ ID NO: 141648 - RNA, 62 nt, Homo sapiens
gaccaccgcagcccaccccaggaaggccgagaagagacaggcaggccggggcagcccagccg

SEQ ID NO: 141649 - RNA, 36 nt, Homo sapiens
ggagcacaacggaccaaggaacagagacaaaagcaa

SEQ ID NO: 141650 - RNA, 76 nt, Homo sapiens
aagaggcggccggcgaaaggagcgggccggcaagggagaccacaggaaaccacgcgagcagggaaagcaacccaga

SEQ ID NO: 141651 - RNA, 74 nt, Homo sapiens
aagggcccccccgacaaccccgcacgcaagcggaaaccagcgaaaccaggcccaaaagaccaccagggagaccc

SEQ ID NO: 141652 - RNA, 76 nt, Homo sapiens
cacgcaggcgcacgaggagcgacccaagaacaaaaaccagaaggcaccgacaggaaaggaaaaggagaaccaggca

SEQ ID NO: 141653 - RNA, 73 nt, Homo sapiens
caccggaagcgggaaaggccccaggcccaccaggggcacgagccagccgaagggccggccccccaccacggcc

SEQ ID NO: 141654 - RNA, 74 nt, Homo sapiens
agaccagacaaccagcgaggagagaaaccacagagacccaagagaagaggagaggggcaacggacacaggagac

SEQ ID NO: 141655 - RNA, 80 nt, Homo sapiens
ggaggccggaagcgaccgaaacaccaaacacgcgaggagagaccacgcaaaaagacaaccagcaagaaagcggggggccc

SEQ ID NO: 141656 - RNA, 55 nt, Homo sapiens
acaccgcagcaacaggcgacagcaaaaagccaaagaaacgccaaccgcccaaaaa

SEQ ID NO: 141657 - RNA, 74 nt, Homo sapiens
cgcccgccacccgcgcgccgccgccgaggagaaaggacagcccaggccaagacagcagccacgaggaaaaagaa

SEQ ID NO: 141658 - RNA, 74 nt, Homo sapiens
aggggcaaggggaaaagacagcagcaagcacaccacaccgcaccaagaaagagcaagaaggagaagaagaaagc

SEQ ID NO: 141659 - RNA, 80 nt, Homo sapiens
cgagcacacccagaagacgaccaacgcagcaggaacacgcaagggccccgccggacagagagcgggacgcggcagcaggc

SEQ ID NO: 141660 - RNA, 52 nt, Homo sapiens
cgcaaagcggaggaggggccgacgcaaggcagcaaccaccggagggcgcaga

SEQ ID NO: 141661 - RNA, 61 nt, Homo sapiens
gaaggaccaagaaccagaaaccagagacacacagaccacagacagcccgaggaacagaggg

SEQ ID NO: 141662 - RNA, 58 nt, Homo sapiens
aagaagagaaagggaacagaaaaagaggagccgcccagcaaaacccaacgggaacccg

SEQ ID NO: 141663 - RNA, 74 nt, Homo sapiens
accgaaagaagcggaaagcagaagcgcgcagcaacggcggaagcaaggaagaaagaagcaccacagagagacag

SEQ ID NO: 141664 - RNA, 58 nt, Homo sapiens
accaccagaggcaagacagccggcagagacagggcccccgcacccgggcgaggcacgg

SEQ ID NO: 141665 - RNA, 69 nt, Homo sapiens
cagagacggacagcgaaggcagagagcaggagagcgcaaccaacccacgaccgcaacgcaagcagaaag

SEQ ID NO: 141666 - RNA, 77 nt, Homo sapiens
gagacagacccggacgagagaggaggagaagcggacccaaacggcagaagacagaaaaggggcacggcggagccccg

SEQ ID NO: 141667 - RNA, 80 nt, Homo sapiens
gggcagccgaggccgggaaccagcgaggacccgggcccaaagccgaaggcaagggaaggaagaccgaaaacagcaccaga

SEQ ID NO: 141668 - RNA, 58 nt, Homo sapiens
agacccgggcccggaccacagaagcagcgaaggggcacaaggaccagcgccgaggagc

SEQ ID NO: 141669 - RNA, 89 nt, Homo sapiens
accaccagggcggagcgacagcagggggagaccaagggccggaaccggccgaccgcgccgagccagccgcgaggcacccacgcgagcac

SEQ ID NO: 141670 - RNA, 84 nt, Homo sapiens
cagcccggccgccggcccccaacagcgccgggaacccacccaccacccagggcacaacaccacagccggaccgcacccgcaccg

SEQ ID NO: 141671 - RNA, 64 nt, Homo sapiens
ccgcgcgccggcgcgcgggcgggccccagacaagggaggcgaggacggacaaaaggaaacggac

SEQ ID NO: 141672 - RNA, 77 nt, Homo sapiens
ggaacaccacaccacgggcccacaggagcaaaacacccagcaaaaccggcggacaagaacacgggccccgagaaacg

SEQ ID NO: 141673 - RNA, 79 nt, Homo sapiens
aacaggacggaagccccaacagaaggcccccccgcgccgcgcggccccggagccgacgcagacccccagcccgggcccc

SEQ ID NO: 141674 - RNA, 77 nt, Homo sapiens
gagacaccaaaagagaggaagccggaaaggacccccaagcggagacaagaagagaccaggcaagaggaaaacacggg

SEQ ID NO: 141675 - RNA, 82 nt, Homo sapiens
caaaaacgggaaagccggcaagagggagaaggacaccaggcagaggcaagcccagcgacaccaagagcaccacagaaaaccc

SEQ ID NO: 141676 - RNA, 84 nt, Homo sapiens
acaagaccgggaaggggaacggggccccaggaccccacaacaccagaacaaaaggcaggagaccaagacacaccaccccagggg

SEQ ID NO: 141677 - RNA, 76 nt, Homo sapiens
cagcagccagcagccacaaagggaccccgggagggcccagcaaccggccagcgaaccggagacaaacaggcagggc

SEQ ID NO: 141678 - RNA, 52 nt, Homo sapiens
aaaccaacgcaaaaacgaccccgcagggacagcggggaaagaacagggggga

SEQ ID NO: 141679 - RNA, 60 nt, Homo sapiens
gaagacgcacgggccaggaccaagacggacacagacggaagggagggccacccacggcag

SEQ ID NO: 141680 - RNA, 83 nt, Homo sapiens
ggccaccacagaaacaaaagcaacaaagaggccccacagcggaccgaccaccccaacgggaacggggagaaggagacgaccag

SEQ ID NO: 141681 - RNA, 63 nt, Homo sapiens
ggggcagggcggcagagggggcagcggcaagcaggggagccagccacacagagacagaccacc

SEQ ID NO: 141682 - RNA, 54 nt, Homo sapiens
cagacgcagggcgcccccggcgggagcagcggaagacaccaaggccagggaggg

SEQ ID NO: 141683 - RNA, 75 nt, Homo sapiens
cccaccaggcccgaggagcgacgagaaccccggaaaaggagacagaagcgcaagaacccgacaagaaggaacaag

SEQ ID NO: 141684 - RNA, 89 nt, Homo sapiens
aggaagccagcagccaagccggggcagcagcccaccccaaagcaggcagggaacccaggaagagcccaggcccgagcggcggaagccag

SEQ ID NO: 141685 - RNA, 85 nt, Homo sapiens
aggccaagacgacaccaaacagacgagaagaggacagacggaggagaaggaggaagaacaacacagggagacgccgccgaagcca

SEQ ID NO: 141686 - RNA, 83 nt, Homo sapiens
ggccgggcggccccggggcgccagagcagcaggacagaagcgaaggggacagggggagaaccgccagggaaacccgggggaca

SEQ ID NO: 141687 - RNA, 81 nt, Homo sapiens
cgcggagcaaaaaaagagcccgcaagaagaacagagacagcagccaaacccccaggcccggaggcggagccgcacgagccc

SEQ ID NO: 141688 - RNA, 83 nt, Homo sapiens
ggagaaaagccaagaggaccaggagcagaagaggaagaggcaaggcagcaccccgacgacaagacaccccgagacaagacagc

SEQ ID NO: 141689 - RNA, 57 nt, Homo sapiens
acacgcaacagcaagcacagcagaagaacccccagggcccagagagaaacaggcagg

SEQ ID NO: 141690 - RNA, 79 nt, Homo sapiens
aaccagacgaaaacaaaggaaagagacaaacacgcggacagaggccaaggggaccagcggggacaaggggacggcgaag

SEQ ID NO: 141691 - RNA, 70 nt, Homo sapiens
cgccacacacaagcaggcagccagcccagaacagagaacagaacagccagcaaagacaagagcagaccag

SEQ ID NO: 141692 - RNA, 66 nt, Homo sapiens
agccgccccaaaacggcaccccggagaaagacccagaccagaaaaagagcagcccagcgggggcag

SEQ ID NO: 141693 - RNA, 59 nt, Homo sapiens
gacgagcacaccaggagagagcggccaagagaagcagggcggaggccggcgaagggagc

SEQ ID NO: 141694 - RNA, 71 nt, Homo sapiens
agccaaaggaaaagcaccaagggcaccaaacacccagaacaacaaagaggaggaggaggaggaggcccggc

SEQ ID NO: 141695 - RNA, 85 nt, Homo sapiens
cgagcacccaacagaagagcgggcgccgaaaagagccgcaaacacaccaaccgcaaacaagacacccaccagaaaaacgcgaacc

SEQ ID NO: 141696 - RNA, 56 nt, Homo sapiens
gcggcgccgccaacgcgcccccgaggcgacgcgcgcggggccggcgcggccggccg

SEQ ID NO: 141697 - RNA, 55 nt, Homo sapiens
gagcgggagagggccagcccggacgaggggcaggaccggggacacacgacgcggg

SEQ ID NO: 141698 - RNA, 83 nt, Homo sapiens
gcgcccccgagccgccgccgcgccggagccccacagccgccgccagcgcgcacgcaaggaggcggcggaacgcccagccgaca

SEQ ID NO: 141699 - RNA, 80 nt, Homo sapiens
gcccgccgggcacacaagaaggcaccccaaagacaacaggcccccccgccccccgcggagccccgcccagcaccaccccg

SEQ ID NO: 141700 - RNA, 69 nt, Homo sapiens
aagggccagagcagggagacaaaagagaaagcaggccacgaaaacacaaggggcgagcaagagccggaa

SEQ ID NO: 141701 - RNA, 88 nt, Homo sapiens
cgccaggcagagaggaccagaaggagccaggggccccggaagagaggcccccaggaccaggacgcaggagcagacccacagaagacag

SEQ ID NO: 141702 - RNA, 72 nt, Homo sapiens
ccaccggcggcccgcaagaagaccgagaaggcacaaggcacaaagcaggaggcaggaggccaggaagaggcc

SEQ ID NO: 141703 - RNA, 75 nt, Homo sapiens
acacccgacaaaggacgcggcgaggaagagggcagacgcccacgcaaagggagggacagagaacaggcaaagagc

SEQ ID NO: 141704 - RNA, 84 nt, Homo sapiens
gaagacgggggagaagaaacgggccgcgggccgggccggaaaggaagggccaggacaccaggccggcgcggacggaagcacagg

SEQ ID NO: 141705 - RNA, 75 nt, Homo sapiens
ccggaagcgcccgaggcccgggcccgcgggggcaaccgggcgcagacgagggaggcaggcaggggagagcgggag

SEQ ID NO: 141706 - RNA, 74 nt, Homo sapiens
ccagagggacagccaacggagcgaagcagagccaggcagagacccagagaacccaaacaagaccaaaaccacga

SEQ ID NO: 141707 - RNA, 78 nt, Homo sapiens
cagacaccgggccggacaggaaccgggccgccggaccgagccacagcggccacggaggacgaaggagacgcaggaggg

SEQ ID NO: 141708 - RNA, 61 nt, Homo sapiens
gccggacccacggcgcggagcgcaccaccagggaagggaaacgcaccgaagccaggccaag

SEQ ID NO: 141709 - RNA, 77 nt, Homo sapiens
gacgccccaggggaaaacccccgggaccagcaggaggaaagaaaggagcagcagccgcaaaacccagagagagcaag

SEQ ID NO: 141710 - RNA, 66 nt, Homo sapiens
acagaagcgggacaccgggaaaagaaggacaccacccaaggcaacaagaaaagaagcaacaacgcg

SEQ ID NO: 141711 - RNA, 85 nt, Homo sapiens
acggagcacgagaaaacggcggggacgcggcagagcgcaagccgacacgaggcgggccacagccacgagcagagagagcgacgcc

SEQ ID NO: 141712 - RNA, 86 nt, Homo sapiens
gggaacacggacagaagcaggcggacagcagcaagacagggagcagccaagcggcgcagccaggcaccgagaacaccgaggagaac

SEQ ID NO: 141713 - RNA, 52 nt, Homo sapiens
cagacgcagggcgcccccgaaaagggcccaagaagagcgcagcgggggcacg

SEQ ID NO: 141714 - RNA, 51 nt, Homo sapiens
gcccgagagcgggaacagaggacgccagcccggcagaaggcagaagcacgg

SEQ ID NO: 141715 - RNA, 83 nt, Homo sapiens
caaggacaccgcgcaaggccggcagaagaacccggccggaaacggaggggacggccaagacgcccccccgcccccacccaggc

SEQ ID NO: 141716 - RNA, 73 nt, Homo sapiens
gaagacgaccgcccggcccaaagacaccacaaccacgcgccaggaaaggaggaagagaagccgacaaagacga

SEQ ID NO: 141717 - RNA, 89 nt, Homo sapiens
gggccggccccagagcccaccgggaggagaaggaggaggaacgaagcccaccagaggcgaggggaggaggaagcgagcgaaaagaggcg

SEQ ID NO: 141718 - RNA, 79 nt, Homo sapiens
ggaaaaagaagggagcggccgaaggagccaccaggccgggaagcccacgggaagcagccaggacggcaaagaggaagag

SEQ ID NO: 141719 - RNA, 80 nt, Homo sapiens
gcacggagcagcaaacgcagagacaaaagaaacgggccccgacgaacccacaccaaacacaggacgggacacacagacga

SEQ ID NO: 141720 - RNA, 71 nt, Homo sapiens
ggagccacaaggacgggaagcaccaaagcgcgccaagaaggcgcggccagcgaagaagacgcagccagacc

SEQ ID NO: 141721 - RNA, 69 nt, Homo sapiens
cagaaccaccgaaagaaccagaagggggccagaaacagcaggcaggcagaggacgagaagaacaaaaaa

SEQ ID NO: 141722 - RNA, 118 nt, Homo sapiens
gcaaggcaagaccgaacagaaggaacgacgcggaccagaagccagagcgaggacgccggcaggcaaggaaccggagcaaacgacccgaccagcgcgcggcggccccggggagagcagc
